United States Patent Application Publication US 2025/0311734 A1 - sequence listing, part 14

SEQ ID NO: 60803 - protein, 380 aa, Unidentified
VRSKKLWIVASTALLISVAFSSSIASAAEEAKEKYLIGFNEQEAVSEFVEQVEANDEVAILSEEEEVEIELLHEFETIPVLSVELSPEDVDALELDPAISYIEEDAEVTTMAQSVPWGISRVQAPAAHNRGLTGSGVKVAVLDTGISTHPDLNIRGGASFVPGEPSTQDGNGHGTHVAGTIAALNNSIGVLGVAPSAELYAVKVLGASGSGSVSSIAQGLEWAGNNGMHVANLSLGSPSPSATLEQAVNSATSRGVLVVAASGNSGAGSISYPARYANAMAVGATDQNNNRASFSQYGAGLDIVAPGVNVQSTYPGSTYASLNGTSMATPHVAGAAALVKQKNPSWSNVQIRNHLKNTATSLGSTNLYGSGLVNAERATR

SEQ ID NO: 60804 - protein, 380 aa, Unidentified
VRSKKLWIVASTALLISVAFSSSIASAAEEAKEKYLIGFNEQEAVSEFVEQVEANDEVAILSEEEEVEIELLHEFETIPVLSVELSPEDVDALELDPAISYIEEDAEVTTMAQSVPWGISRVQAPAAHNRGLTGSGVKVAVLDTGISTHPDLNIRGGASFVPGEPSTQDGNGHGTHVAGTIAALNNSIGVLGVAPSAELYAVKVLGASGSGSVSSIAQGLEWAGNNGMHVANLSLGSPSPSATLEQAVNSATSRGVLVVAASGNSGAGSISYPARYANAMAVGATDQNNNRASFSQYGAGLDIVAPGVNVQSTYPGSTYASLNGTSMATPHVAGAAALVKQKNPSWSNVQIRNHLKNTATSLGSTNLYGSGLVNAPAATR

SEQ ID NO: 60805 - protein, 380 aa, Unidentified
VRSKKLWIVASTALLISVAFSSSIASAAEEAKEKYLIGFNEQEAVSEFVEQVEANDEVAILSEEEEVEIELLHEFETIPVLSVELSPEDVDALELDPAISYIEEDAEVTTMAQSVPWGISRVQAPAAHNRGLTGSGVKVAVLDTGISTHPDLNIRGGASFVPGEPSTQDGNGHGTHVAGTIAALNNSIGVLGVAPSAELYAVKVLGASGSGSVSSIAQGLEWAGNNGMHVANLSLGSPSPSATLEQAVNSATSRGVLVVAASGNSGAGSISYPARYANAMAVGATDQNNNRASFSQYGEGLDIVAPGVNVQSTYPGSTYASLNGTSMATPHVAGAAALVKQKNPSWSNVQIRNHLKNTATSLGSTNLYGSGLVNAEAATR

SEQ ID NO: 60806 - protein, 380 aa, Unidentified
VRSKKLWIVASTALLISVAFSSSIASAAEEAKEKYLIGFNEQEAVSEFVEQVEANDEVAILSEEEEVEIELLHEFETIPVLSVELSPEDVDALELDPAISYIEEDAEVTTMAQSVPWGISRVQAPAAHNRGLTGSGVKVAVLDTGISTHPDLNIRGGASFVPGEPSTQDGNGHGTHVAGTIAALNNSIGVLGVAPSAELYAVKVLGASGSGSVSSIAQGLEWAGNNGMHVANLSLGSPSPSATLEQAVNSATSRGVLVVAASGNSGAGSISYPARYANAMAVGATDQNNNRASFSQYGAGLDIVAPGVNVQSTYPGSTYASLNGTSMATPHVAGAAALVKQKNPSWSNVQIRNHLKNIATSLGSTNLYGSGLVNAEAATR

SEQ ID NO: 60807 - protein, 380 aa, Unidentified
VRSKKLWIVASTALLISVAFSSSIASAAEEAKEKYLIGFNEQEAVSEFVEQVEANDEVAILSEEEEVEIELLHEFETIPVLSVELSPEDVDALELDPAISYIEEDAEVTTMAQSVPWGISRVQAPAAHNRGLTGSGVKVAVLDTGISTHPDLIIRGGASFVPGEPSTQDGNGHGTHVAGTIAALNNSIGVLGVAPSAELYAVKVLGASGSGSVSSIAQGLEWAGNNGMHVANLSLGSPSPSATLEQAVNSATSRGVLVVAASGNSGAGSISYPARYANAMAVGATDQNNNRASFSQYGAGLDIVAPGVNVQSTYPGSTYASLNGTSMATPHVAGAAALVKQKNPSWSNVQIRNHLKNTATSLGSTNLYGSGLVNAEAATR

SEQ ID NO: 60808 - protein, 380 aa, Unidentified
VRSKKLWIVASTALLISVAFSSSIASAAEEAKEKYLIGFNEQEAVSEFVEQVEANDEVAILSEEEEVEIELLHEFETIPVLSVELSPEDVDALELDPAISYIEEDAEVTTMAQSVPWGISRVQAPAAHNRGLTGSGVKVAVLDTGISTHPDLNIRGGASFVPGEPSTQDGNGHGTHVAGTIAALNNSIGVLGVAPSAELYAVKVLGASGSGSVSSIAQGLEWAGNNGMHVANLSLGSPSPSATLEQAVNSATSRGVLVVAASGNSGAGSISYPARYANAMAVGATDQNNNRASFSQYGAGLDIVAPGVNVQSTYPGSTYASLNGTSMATPHVAGAAALVKQKNPSWSNVQIRNHLKNTATSLRSTNLYGSGLVNAEAATR

SEQ ID NO: 60809 - protein, 380 aa, Unidentified
VRSKKLWIVASTALLISVAFSSSIASAAEEAKEKYLIGFNEQEAVSEFVEQVEANDEVAILSEEEEVEIELLHEFETIPVLSVELSPEDVDALELDPAISYIEEDAEVTTMAQSVPWGISRVQAPAAHNRGLTGHGVKVAVLDTGISTHPDLNIRGGASFVPGEPSTQDGNGHGTHVAGTIAALNNSIGVLGVAPSAELYAVKVLGASGSGSVSSIAQGLEWAGNNGMHVANLSLGSPSPSATLEQAVNSATSRGVLVVAASGNSGAGSISYPARYANAMAVGATDQNNNRASFSQYGAGLDIVAPGVNVQSTYPGSTYASLNGTSMATPHVAGAAALVKQKNPSWSNVQIRNHLKNTATSLGSTNLYGSGLVNAEAATR

SEQ ID NO: 60810 - protein, 380 aa, Unidentified
VRSKKLWIVASTALLISVAFSSSIASAAEEAKEKYLIGFNEQEAVSEFVEQVEANDEVAILSEEEEVEIELLHEFETIPVLSVELSPEDVDALELDPAISYIEEDAEVTTMASSVPWGISRVQAPAAHNRGLTGSGVKVAVLDTGISTHPDLNIRGGASFVPGEPSTQDGNGHGTHVAGTIAALNNSIGVLGVAPSAELYAVKVLGASGSGSVSSIAQGLEWAGNNGMHVANLSLGSPSPSATLEQAVNSATSRGVLVVAASGNSGAGSISYPARYANAMAVGATDQNNNRASFSQYGAGLDIVAPGVNVQSTYPGSTYASLNGTSMATPHVAGAAALVKQKNPSWSNVQIRNHLKNTATSLGSTNLYGSGLVNAEAATR

SEQ ID NO: 60811 - protein, 380 aa, Unidentified
VRSKKLWIVASTALLISVAFSSSIASAAEEAKEKYLIGFNEQEAVSEFVEQVEANDEVAILSEEEEVEIELLHEFETIPVLSVELSPEDVDALELDPAISYIEEDAEVTTMAQSVPWGISRVQAPAAHNRGLTGSGVKVAVLDTGISTHPDLNIRGGASFVPGEPSRQDGNGHGTHVAGTIAALNNSIGVLGVAPSAELYAVKVLGASGSGSVSSIAQGLEWAGNNGMHVANLSLGSPSPSATLEQAVNSATSRGVLVVAASGNSGAGSISYPARYANAMAVGATDQNNNRASFSQYGAGLDIVAPGVNVQSTYPGSTYASLNGTSMATPHVAGAAALVKQKNPSWSNVQIRNHLKNTATSLGSTNLYGSGLVNAEAATR

SEQ ID NO: 60812 - protein, 380 aa, Unidentified
VRSKKLWIVASTALLISVAFSSSIASAAEEAKEKYLIGFNEQEAVSEFVEQVEANDEVAILSEEEEVEIELLHEFETIPVLSVELSPEDVDALELDPAISYIEEDAEVTTMAQSVPWGISRVQAPAAHNRGLTGSGVFVAVLDTGISTHPDLNIRGGASFVPGEPSTQDGNGHGTHVAGTIAALNNSIGVLGVAPSAELYAVKVLGASGSGSVSSIAQGLEWAGNNGMHVANLSLGSPSPSATLEQAVNSATSRGVLVVAASGNSGAGSISYPARYANAMAVGATDQNNNRASFSQYGAGLDIVAPGVNVQSTYPGSTYASLNGTSMATPHVAGAAALVKQKNPSWSNVQIRNHLKNTATSLGSTNLYGSGLVNAEAATR

SEQ ID NO: 60813 - protein, 380 aa, Unidentified
VRSKKLWIVASTALLISVAFSSSIASAAEEAKEKYLIGFNEQEAVSEFVEQVEANDEVAILSEEEEVEIELLHEFETIPVLSVELSPEDVDALELDPAISYIEEDAEVTTMAQSVPWGISRVQAPAAHNRGLTGSGVKVAVLDTGISTHPDLNIRGGASFVPGEPSTQDGNGHGTHVAGTIAALNNSIGVLGVAPSAELYAVKVLGASGSGSVSSIAQGLEWAGNNGMHVANLSLGSPSPSATLEQAVNSATSRGVLVVAASGNSGAGSISYPARYANAMAVGATDQNNNRASFSQYGAGLDIVAPGVNVQSTYPGSTYASLNGTSMATPHVAGAAALVKQKNPSWSNVQIRNHLKHTATSLGSTNLYGSGLVNAEAATR

SEQ ID NO: 60814 - protein, 380 aa, Unidentified
VRSKKLWIVASTALLISVAFSSSIASAAEEAKEKYLIGFNEQEAVSEFVEQVEANDEVAILSEEEEVEIELLHEFETIPVLSVELSPEDVDALELDPAISYIEEDAEVTTMAQSVPWGISRVQAPAAHNRGLTGSGVKVAVLDTGISTHPDLNIRGGASFVPGEPSTQDGNGHGTHVAGTIAALNNSIGVLGVAPSAELYAVKVLGASGSGSVSSIAQGLEWAGNNGMHVANLSLGSPSPSATLEQAVNSATSRGVLVVAASGNSGAGSISYPARYANAMAVGATDQNNNRASFSQYGAGLDIVAPGVNVQSTYPGSTYASLNGTSMATPHVAGAAALVKQKNNSWSNVQIRNHLKNTATSLGSTNLYGSGLVNAEAATR

SEQ ID NO: 60815 - protein, 380 aa, Unidentified
VRSKKLWIVASTALLISVAFSSSIASAAEEAKEKYLIGFNEQEAVSEFVEQVEANDEVAILSEEEEVEIELLHEFETIPVLSVELSPEDVDALELDPAISYIEEDAEVTTMAQSVPWGISRVQAPAAHNRGLLGSGVKVAVLDTGISTHPDLNIRGGASFVPGEPSTQDGNGHGTHVAGTIAALNNSIGVLGVAPSAELYAVKVLGASGSGSVSSIAQGLEWAGNNGMHVANLSLGSPSPSATLEQAVNSATSRGVLVVAASGNSGAGSISYPARYANAMAVGATDQNNNRASFSQYGAGLDIVAPGVNVQSTYPGSTYASLNGTSMATPHVAGAAALVKQKNPSWSNVQIRNHLKNTATSLGSTNLYGSGLVNAEAATR

SEQ ID NO: 60816 - protein, 380 aa, Unidentified
VRSKKLWIVASTALLISVAFSSSIASAAEEAKEKYLIGFNEQEAVSEFVEQVEANDEVAILSEEEEVEIELLHEFETIPVLSVELSPEDVDALELDPAISYIEEDAEVTTMAQSVPWGISRVQAPAAHNRGLTGSGVKVAVLDTGISTHPDLNIRGGASFVPGEPSTQDGNGHGTHVAGTIAAENNSIGVLGVAPSAELYAVKVLGASGSGSVSSIAQGLEWAGNNGMHVANLSLGSPSPSATLEQAVNSATSRGVLVVAASGNSGAGSISYPARYANAMAVGATDQNNNRASFSQYGAGLDIVAPGVNVQSTYPGSTYASLNGTSMATPHVAGAAALVKQKNPSWSNVQIRNHLKNTATSLGSTNLYGSGLVNAEAATR

SEQ ID NO: 60817 - protein, 380 aa, Unidentified
VRSKKLWIVASTALLISVAFSSSIASAAEEAKEKYLIGFNEQEAVSEFVEQVEANDEVAILSEEEEVEIELLHEFETIPVLSVELSPEDVDALELDPAISYIEEDAEVTTMAQSVPWGISRVQAPAAHNRGLTGSGVKVAVLDTGISTHPDLNIRGGASFVPGEPSTQDGNGHGTHVAGTIAALNNSIGVLGVAPSAELYAVKVLGASGSGSVSSIAQGLEWAGNNGMHVANLSLGSPSPSATLEQAVNSATSRGVLVVAASGNSGAGSISYPARYANAMAVGATDQNNNRASFSQYGAGLDIVAPGVNVQSTYPGSTYASLNGTSMATPHVAGAAALVKQKNPSWSNVQIRNHLKNTATSLGSTNLYGSGLVNATAATR

SEQ ID NO: 60818 - protein, 380 aa, Unidentified
VRSKKLWIVASTALLISVAFSSSIASAAEEAKEKYLIGFNEQEAVSEFVEQVEANDEVAILSEEEEVEIELLHEFETIPVLSVELSPEDVDALELDPAISYIEEDAEVTTMAQSVPWGISRVQAPAAHNRGLTGSGVKVAVLDTGISTHPDLNIRGGASFVPGEPSTQDGNGHGTHVAGTIAALNNSIGVLGVAPSAELYAVKVLGASGSGSVSSIAQGLEWAGNNGMHVANLSLGSPSPSATLEQAVNSATSRGVLVVAASGNSGAGSISYPARYANAMAVGATDQNNNRASFSQYGAGLDFVAPGVNVQSTYPGSTYASLNGTSMATPHVAGAAALVKQKNPSWSNVQIRNHLKNTATSLGSTNLYGSGLVNAEAATR

SEQ ID NO: 60819 - protein, 380 aa, Unidentified
VRSKKLWIVASTALLISVAFSSSIASAAEEAKEKYLIGFNEQEAVSEFVEQVEANDEVAILSEEEEVEIELLHEFETIPVLSVELSPEDVDALELDPAISYIEEDAEVTTMAQSVPWGISRVQAPAAHNRGLTGSGVKVAVLDTGISTHPDLNIRGGASFVPGEPSTQDGNGHGTHVAGTIAALNNSIGVLGVAPSAELYAVKVLGASGSGSDSSIAQGLEWAGNNGMHVANLSLGSPSPSATLEQAVNSATSRGVLVVAASGNSGAGSISYPARYANAMAVGATDQNNNRASFSQYGAGLDIVAPGVNVQSTYPGSTYASLNGTSMATPHVAGAAALVKQKNPSWSNVQIRNHLKNTATSLGSTNLYGSGLVNAEAATR

SEQ ID NO: 60820 - protein, 380 aa, Unidentified
VRSKKLWIVASTALLISVAFSSSIASAAEEAKEKYLIGFNEQEAVSEFVEQVEANDEVAILSEEEEVEIELLHEFETIPVLSVELSPEDVDALELDPAISYIEEDAEVTTMAQSVPWGISRVQAPAAHNRGLTGSGVKVAVLDTGISTHPDLNIRGGASFVPGEPSTQDGNGHGTHVAGTIAALNNSIGVLGVAPSAELYAVKVLGASGSGSVSSIAQGLEWAGNFGMHVANLSLGSPSPSATLEQAVNSATSRGVLVVAASGNSGAGSISYPARYANAMAVGATDQNNNRASFSQYGAGLDIVAPGVNVQSTYPGSTYASLNGTSMATPHVAGAAALVKQKNPSWSNVQIRNHLKNTATSLGSTNLYGSGLVNAEAATR

SEQ ID NO: 60821 - protein, 380 aa, Unidentified
VRSKKLWIVASTALLISVAFSSSIASAAEEAKEKYLIGFNEQEAVSEFVEQVEANDEVAILSEEEEVEIELLHEFETIPVLSVELSPEDVDALELDPAISYIEEDAEVTTMAQSVPWGISRVQAPAAHNRGLTGSGVKVAVLDTGISTHPDLNIRGGASFVPGEPSTQDGNGHGTHVAGTIAALNNSIGVLGVAPSAELYAVKVLGASGSGSVSSIAQGLEWAGNNGMHVANLSLGSPSPSATLEQAVNSATSRGVLVVAASGNSGAGSISYPARYANAMAVGATDQDNNRASFSQYGAGLDIVAPGVNVQSTYPGSTYASLNGTSMATPHVAGAAALVKQKNPSWSNVQIRNHLKNTATSLGSTNLYGSGLVNAEAATR

SEQ ID NO: 60822 - protein, 380 aa, Unidentified
VRSKKLWIVASTALLISVAFSSSIASAAEEAKEKYLIGFNEQEAVSEFVEQVEANDEVAILSEEEEVEIELLHEFETIPVLSVELSPEDVDALELDPAISYIEEDAEVTTMAQSVPWGISRVQAPAAHNRGLTGSGVKVAVLDTGISTHPDLNIRGGASFVPGEPSTQDGNGHGTHVAGTIAALNNSIGVLGVAPSAELYAVKVLGASGSGSVSSIAQGLEWAGKNGMHVANLSLGSPSPSATLEQAVNSATSRGVLVVAASGNSGAGSISYPARYANAMAVGATDQNNNRASFSQYGAGLDIVAPGVNVQSTYPGSTYASLNGTSMATPHVAGAAALVKQKNPSWSNVQIRNHLKNTATSLGSTNLYGSGLVNAEAATR

SEQ ID NO: 60823 - protein, 380 aa, Unidentified
VRSKKLWIVASTALLISVAFSSSIASAAEEAKEKYLIGFNEQEAVSEFVEQVEANDEVAILSEEEEVEIELLHEFETIPVLSVELSPEDVDALELDPAISYIEEDAEVTTMAQSVPWGISRVQAPAAHNRGLTGSGVKVAVLDTGISTHPDLNIRGGASFVPGEPSTQDGNGHGTHVAGTIAALNNSIGVLGVAPSAELYAVKVLGASGSGSVSSIAQGLEWAGNNGMHVANLSLGMPSPSATLEQAVNSATSRGVLVVAASGNSGAGSISYPARYANAMAVGATDQNNNRASFSQYGAGLDIVAPGVNVQSTYPGSTYASLNGTSMATPHVAGAAALVKQKNPSWSNVQIRNHLKNTATSLGSTNLYGSGLVNAEAATR

SEQ ID NO: 60824 - protein, 380 aa, Unidentified
VRSKKLWIVASTALLISVAFSSSIASAAEEAKEKYLIGFNEQEAVSEFVEQVEANDEVAILSEEEEVEIELLHEFETIPVLSVELSPEDVDALELDPAISYIEEDAEVTTMAQSVPWGISSVQAPAAHNRGLTGSGVKVAVLDTGISTHPDLNIRGGASFVPGEPSTQDGNGHGTHVAGTIAALNNSIGVLGVAPSAELYAVKVLGASGSGSVSSIAQGLEWAGNNGMHVANLSLGSPSPSATLEQAVNSATSRGVLVVAASGNSGAGSISYPARYANAMAVGATDQNNNRASFSQYGAGLDIVAPGVNVQSTYPGSTYASLNGTSMATPHVAGAAALVKQKNPSWSNVQIRNHLKNTATSLGSTNLYGSGLVNAEAATR

SEQ ID NO: 60825 - protein, 380 aa, Unidentified
VRSKKLWIVASTALLISVAFSSSIASAAEEAKEKYLIGFNEQEAVSEFVEQVEANDEVAILSEEEEVEIELLHEFETIPVLSVELSPEDVDALELDPAISYIEEDAEVTTMAQSVPWGISRVQAPAAHNRGLTGSGVKVAVLDTGISTHPDLNIRGGASFVPGEPSTQDGNGHGTHVWGTIAALNNSIGVLGVAPSAELYAVKVLGASGSGSVSSIAQGLEWAGNNGMHVANLSLGSPSPSATLEQAVNSATSRGVLVVAASGNSGAGSISYPARYANAMAVGATDQNNNRASFSQYGAGLDIVAPGVNVQSTYPGSTYASLNGTSMATPHVAGAAALVKQKNPSWSNVQIRNHLKNTATSLGSTNLYGSGLVNAEAATR

SEQ ID NO: 60826 - protein, 380 aa, Unidentified
VRSKKLWIVASTALLISVAFSSSIASAAEEAKEKYLIGFNEQEAVSEFVEQVEANDEVAILSEEEEVEIELLHEFETIPVLSVELSPEDVDALELDPAISYIEEDAEVTTMAQSVPWGISRVQAPAAHNRGLTGSGVKVAVLDTGISTHPDLNIRGGASFVPGEPSTQDGNGHGTHVAGTIAALNNSIGVLGVAPSAELYAVKVLGASGSGSVSSIAQGLEWAGNNGMHVANLSLGSPSPSATLEQAVNSATSRGVLVVAASGNSGAGSISYPARYANAMAVGATDQNNNRASFSQYGAGLDIVAPGVNVQSTYPGSTYASLNGTSMATPHVAGAAALVKQKNPSWSNVQIRNHLKNTATSLGSTNLYGSGMVNAEAATR

SEQ ID NO: 60827 - protein, 380 aa, Unidentified
VRSKKLWIVASTALLISVAFSSSIASAAEEAKEKYLIGFNEQEAVSEFVEQVEANDEVAILSEEEEVEIELLHEFETIPVLSVELSPEDVDALELDPAISYIEEDAEVTTMAQSVPWGISRVQAPAAHNRGLTGSGVKVAVLDTGISTHPDLNIRGGASFVPGEPSTQDGNGHGTHVAGTIAALNNSIGVLGVAPSAELYAVKVLGASGSGSVSSIAQGLEWAGNNGMHVANLSLGSPSPSATLEQAVNSATSRGVLVVAASGNSGAGSISYPARYANAMAVGATDQNNNRASFSQYGAGLDIVAPGVNVQSTYPGSTYASLNGTSMATPHVAGAAALVKQKNPSWSNVQIRNHIKNTATSLGSTNLYGSGLVNAEAATR

SEQ ID NO: 60828 - protein, 380 aa, Unidentified
VRSKKLWIVASTALLISVAFSSSIASAAEEAKEKYLIGFNEQEAVSEFVEQVEANDEVAILSEEEEVEIELLHEFETIPVLSVELSPEDVDALELDPAISYIEEDAEVTTMAQSVPWGISRVQAPAAHNRGLTGSGVKVAVLDTGISTHPDLNIRGGASFVPGEPSTQDGNGHGTHVAGTIAALNNSIGVLGVAPSAELYAVKVLGASGSGSVSSIAQGLEWAGNNGMHVANLSLGSPSPSATLEQAVNSATSRGVLVVAASGNSGAGSISYPARYANAMAVGATDQNNNRASFSQYGAGLDIVAPGENVQSTYPGSTYASLNGTSMATPHVAGAAALVKQKNPSWSNVQIRNHLKNTATSLGSTNLYGSGLVNAEAATR

SEQ ID NO: 60829 - protein, 380 aa, Unidentified
VRSKKLWIVASTALLISVAFSSSIASAAEEAKEKYLIGFNEQEAVSEFVEQVEANDEVAILSEEEEVEIELLHEFETIPVLSVELSPEDVDALELDPAISYIEEDAEVTTMAQSVPWGISRVQAPAAHNRGLTGSGVKVAVLDTGISTHPDLNIRGGASFVPGEPSTQDGNGHGTHVAGTIAALNNSQGVLGVAPSAELYAVKVLGASGSGSVSSIAQGLEWAGNNGMHVANLSLGSPSPSATLEQAVNSATSRGVLVVAASGNSGAGSISYPARYANAMAVGATDQNNNRASFSQYGAGLDIVAPGVNVQSTYPGSTYASLNGTSMATPHVAGAAALVKQKNPSWSNVQIRNHLKNTATSLGSTNLYGSGLVNAEAATR

SEQ ID NO: 60830 - protein, 380 aa, Unidentified
VRSKKLWIVASTALLISVAFSSSIASAAEEAKEKYLIGFNEQEAVSEFVEQVEANDEVAILSEEEEVEIELLHEFETIPVLSVELSPEDVDALELDPAISYIEEDAEVTTMAQSVPWGISRVQAPAAHRRGLTGSGVKVAVLDTGISTHPDLNIRGGASFVPGEPSTQDGNGHGTHVAGTIAALNNSIGVLGVAPSAELYAVKVLGASGSGSVSSIAQGLEWAGNNGMHVANLSLGSPSPSATLEQAVNSATSRGVLVVAASGNSGAGSISYPARYANAMAVGATDQNNNRASFSQYGAGLDIVAPGVNVQSTYPGSTYASLNGTSMATPHVAGAAALVKQKNPSWSNVQIRNHLKNTATSLGSTNLYGSGLVNAEAATR

SEQ ID NO: 60831 - protein, 380 aa, Unidentified
VRSKKLWIVASTALLISVAFSSSIASAAEEAKEKYLIGFNEQEAVSEFVEQVEANDEVAILSEEEEVEIELLHEFETIPVLSVELSPEDVDALELDPAISYIEEDAEVTTMAQSVPWGISRVQAPAAHKRGLTGSGVKVAVLDTGISTHPDLNIRGGASFVPGEPSTQDGNGHGTHVAGTIAALNNSIGVLGVAPSAELYAVKVLGASGSGSVSSIAQGLEWAGNNGMHVANLSLGSPSPSATLEQAVNSATSRGVLVVAASGNSGAGSISYPARYANAMAVGATDQNNNRASFSQYGAGLDIVAPGVNVQSTYPGSTYASLNGTSMATPHVAGAAALVKQKNPSWSNVQIRNHLKNTATSLGSTNLYGSGLVNAEAATR

SEQ ID NO: 60832 - protein, 380 aa, Unidentified
VRSKKLWIVASTALLISVAFSSSIASAAEEAKEKYLIGFNEQEAVSEFVEQVEANDEVAILSEEEEVEIELLHEFETIPVLSVELSPEDVDALELDPAISYIEEDAEVTTMAQSVPWGISRVQAPAAHNRGLTGSGVKVAVLDTGISTHPDLNIRGGASFVPGEPSTQDGNGHGTHVAGTIAALNNSIGVLGVAPSAELYAVKVLGASGSGSVSSIAQGLEWAGNNGMHVANLSLGFPSPSATLEQAVNSATSRGVLVVAASGNSGAGSISYPARYANAMAVGATDQNNNRASFSQYGAGLDIVAPGVNVQSTYPGSTYASLNGTSMATPHVAGAAALVKQKNPSWSNVQIRNHLKNTATSLGSTNLYGSGLVNAEAATR

SEQ ID NO: 60833 - protein, 380 aa, Unidentified
VRSKKLWIVASTALLISVAFSSSIASAAEEAKEKYLIGFNEQEAVSEFVEQVEANDEVAILSEEEEVEIELLHEFETIPVLSVELSPEDVDALELDPAISYIEEDAEVTTMAQSVPWGISRVQAPAAHNRGLTGSGVKVAVLDTGISTHPDLNIRGGASFVPGEPSTQDGNGHGTHVAGTIAALNNSIGVLGVAPSAELYAVKVLGASGPGSVSSIAQGLEWAGNNGMHVANLSLGSPSPSATLEQAVNSATSRGVLVVAASGNSGAGSISYPARYANAMAVGATDQNNNRASFSQYGAGLDIVAPGVNVQSTYPGSTYASLNGTSMATPHVAGAAALVKQKNPSWSNVQIRNHLKNTATSLGSTNLYGSGLVNAEAATR

SEQ ID NO: 60834 - protein, 380 aa, Unidentified
VRSKKLWIVASTALLISVAFSSSIASAAEEAKEKYLIGFNEQEAVSEFVEQVEANDEVAILSEEEEVEIELLHEFETIPVLSVELSPEDVDALELDPAISYIEEDAEVTTMAQSVPWGISRVQAPAAHNRGLTGSGVKVAVLDTGISTHPDLNIRGGASFVPGEPSTQDGNGHGTHVAGTIAALNNSIGVLGVAPSAELYAVKVLGASGSGSVSSIAQGLEWARNNGMHVANLSLGSPSPSATLEQAVNSATSRGVLVVAASGNSGAGSISYPARYANAMAVGATDQNNNRASFSQYGAGLDIVAPGVNVQSTYPGSTYASLNGTSMATPHVAGAAALVKQKNPSWSNVQIRNHLKNTATSLGSTNLYGSGLVNAEAATR

SEQ ID NO: 60835 - protein, 380 aa, Unidentified
VRSKKLWIVASTALLISVAFSSSIASAAEEAKEKYLIGFNEQEAVSEFVEQVEANDEVAILSEEEEVEIELLHEFETIPVLSVELSPEDVDALELDPAISYIEEDAEVTTMAQSVPWGISRVQAPAAHNRGLTGSGVKVAVLDTGISTHPDLNIRGGASFVPGEPSTQDGNGHGTHVAGTIAALNNSIGVLGVAPSAELYAVKVLGASGSGSVSSIAQGLEWAGNNGMHVANLSLGSPSPSATLEQAVNSATSRGVLVVAASGNSGAGSISYPARYANAMAVGATDQNNNRASFSQYGAGLDIVAPGVNVQSTTPGSTYASLNGTSMATPHVAGAAALVKQKNPSWSNVQIRNHLKNTATSLGSTNLYGSGLVNAEAATR

SEQ ID NO: 60836 - protein, 380 aa, Unidentified
VRSKKLWIVASTALLISVAFSSSIASAAEEAKEKYLIGFNEQEAVSEFVEQVEANDEVAILSEEEEVEIELLHEFETIPVLSVELSPEDVDALELDPAISYIEEDAEVTTMAQSVPWGISRVQAPAAHNRGLTGSGVKVAVLDTGISTHPDLNIRGGASFVPGEPSTQDGNGHGTHVAGTIAALNNSIGVLGVAPSAWLYAVKVLGASGSGSVSSIAQGLEWAGNNGMHVANLSLGSPSPSATLEQAVNSATSRGVLVVAASGNSGAGSISYPARYANAMAVGATDQNNNRASFSQYGAGLDIVAPGVNVQSTYPGSTYASLNGTSMATPHVAGAAALVKQKNPSWSNVQIRNHLKNTATSLGSTNLYGSGLVNAEAATR

SEQ ID NO: 60837 - protein, 380 aa, Unidentified
VRSKKLWIVASTALLISVAFSSSIASAAEEAKEKYLIGFNEQEAVSEFVEQVEANDEVAILSEEEEVEIELLHEFETIPVLSVELSPEDVDALELDPAISYIEEDAEVTTMAQSVPWGISRVQAPAAHNRGLTGSGVKVAELDTGISTHPDLNIRGGASFVPGEPSTQDGNGHGTHVAGTIAALNNSIGVLGVAPSAELYAVKVLGASGSGSVSSIAQGLEWAGNNGMHVANLSLGSPSPSATLEQAVNSATSRGVLVVAASGNSGAGSISYPARYANAMAVGATDQNNNRASFSQYGAGLDIVAPGVNVQSTYPGSTYASLNGTSMATPHVAGAAALVKQKNPSWSNVQIRNHLKNTATSLGSTNLYGSGLVNAEAATR

SEQ ID NO: 60838 - protein, 380 aa, Unidentified
VRSKKLWIVASTALLISVAFSSSIASAAEEAKEKYLIGFNEQEAVSEFVEQVEANDEVAILSEEEEVEIELLHEFETIPVLSVELSPEDVDALELDPAISYIEEDAEVTTMAQSVPWGISRVQAPAAHNRGLTGSGVKVAVLDTGISTHPDLNIRGGASFVPGEPSTQDGNGHGTHVAGTIAALNNSIGVLGVAPSAELYAVKVLGASGSGSVSSIAQGLEWAGNNGMHVANLSLGSPSPSATLEQAVNSATSRGVLVVAASGNSGAGSISYPARYANAMAVGATDQNNNRASFSQYGAGLDIVAPGVNVQSTYPGFTYASLNGTSMATPHVAGAAALVKQKNPSWSNVQIRNHLKNTATSLGSTNLYGSGLVNAEAATR

SEQ ID NO: 60839 - protein, 380 aa, Unidentified
VRSKKLWIVASTALLISVAFSSSIASAAEEAKEKYLIGFNEQEAVSEFVEQVEANDEVAILSEEEEVEIELLHEFETIPVLSVELSPEDVDALELDPAISYIEEDAEVTTMAQSVPWGISRVQAPAAHNRGLTGSGVKVAVFDTGISTHPDLNIRGGASFVPGEPSTQDGNGHGTHVAGTIAALNNSIGVLGVAPSAELYAVKVLGASGSGSVSSIAQGLEWAGNNGMHVANLSLGSPSPSATLEQAVNSATSRGVLVVAASGNSGAGSISYPARYANAMAVGATDQNNNRASFSQYGAGLDIVAPGVNVQSTYPGSTYASLNGTSMATPHVAGAAALVKQKNPSWSNVQIRNHLKNTATSLGSTNLYGSGLVNAEAATR

SEQ ID NO: 60840 - protein, 380 aa, Unidentified
VRSKKLWIVASTALLISVAFSSSIASAAEEAKEKYLIGFNEQEAVSEFVEQVEANDEVAILSEEEEVEIELLHEFETIPVLSVELSPEDVDALELDPAISYIEEDAEVTTMAQSVPWGISRVQAPAAHNRGLTGSGVKVAVLDTGISTHPDLNIRGGASFVPGEPSTQDGNGHGTHVAGTIAALNNSIGVLGVAPSAELYAVKVLGASGSGSVSSIAQGLEWAGNNGMHVANLSLGSPSPSATLEQAVNSATSRGVLVVAASGNSGAGSISYPARYANAMAVGATDQNNNRASFSQYGAGLDIVAPGVNVQSTYPGSTYASLNGTSMATPHVAGAAALVKQKNPSWSNVQIRNHLKNTCTSLGSTNLYGSGLVNAEAATR

SEQ ID NO: 60841 - protein, 380 aa, Unidentified
VRSKKLWIVASTALLISVAFSSSIASAAEEAKEKYLIGFNEQEAVSEFVEQVEANDEVAILSEEEEVEIELLHEFETIPVLSVELSPEDVDALELDPAISYIEEDAEVTTMAQSVPWGISRVQAPAAHNRGLTGSGVKVAVLDTGISTHPDLNIRGGASFVPGEPSTQDGNGHGTHVAGTIAALNNSIGVLGVAPSAELYAVKVLGASGSGSVSSIAQGLEWAGNNGMHVANLSLGLPSPSATLEQAVNSATSRGVLVVAASGNSGAGSISYPARYANAMAVGATDQNNNRASFSQYGAGLDIVAPGVNVQSTYPGSTYASLNGTSMATPHVAGAAALVKQKNPSWSNVQIRNHLKNTATSLGSTNLYGSGLVNAEAATR

SEQ ID NO: 60842 - protein, 380 aa, Unidentified
VRSKKLWIVASTALLISVAFSSSIASAAEEAKEKYLIGFNEQEAVSEFVEQVEANDEVAILSEEEEVEIELLHEFETIPVLSVELSPEDVDALELDPAISYIEEDAEVTTMAQSVPWGISRVQAPAAHNRGLTGSGVKVAVLDTGISTHPDLNIRGGASFVPGEPSTQDGNGHGTHVAGTIAALNNSIGVLGVAPSAELYAVKVLGASGTGSVSSIAQGLEWAGNNGMHVANLSLGSPSPSATLEQAVNSATSRGVLVVAASGNSGAGSISYPARYANAMAVGATDQNNNRASFSQYGAGLDIVAPGVNVQSTYPGSTYASLNGTSMATPHVAGAAALVKQKNPSWSNVQIRNHLKNTATSLGSTNLYGSGLVNAEAATR

SEQ ID NO: 60843 - protein, 380 aa, Unidentified
VRSKKLWIVASTALLISVAFSSSIASAAEEAKEKYLIGFNEQEAVSEFVEQVEANDEVAILSEEEEVEIELLHEFETIPVLSVELSPEDVDALELDPAISYIEEDAEVTTMAQSVPWGISRVQAPAAHNRGLTGSGVKVAVLDTGISTHPDLNIRGGASFVPGEPSTQDGNGHGTHVNGTIAALNNSIGVLGVAPSAELYAVKVLGASGSGSVSSIAQGLEWAGNNGMHVANLSLGSPSPSATLEQAVNSATSRGVLVVAASGNSGAGSISYPARYANAMAVGATDQNNNRASFSQYGAGLDIVAPGVNVQSTYPGSTYASLNGTSMATPHVAGAAALVKQKNPSWSNVQIRNHLKNTATSLGSTNLYGSGLVNAEAATR

SEQ ID NO: 60844 - protein, 380 aa, Unidentified
VRSKKLWIVASTALLISVAFSSSIASAAEEAKEKYLIGFNEQEAVSEFVEQVEANDEVAILSEEEEVEIELLHEFETIPVLSVELSPEDVDALELDPAISYIEEDAEVTTMAQSVPWGISRVQAPAAHNRGLTGSGVKVAVLDTGISTHPDLNIRGGASFVPGEPSTQDGNGHGTHVTGTIAALNNSIGVLGVAPSAELYAVKVLGASGSGSVSSIAQGLEWAGNNGMHVANLSLGSPSPSATLEQAVNSATSRGVLVVAASGNSGAGSISYPARYANAMAVGATDQNNNRASFSQYGAGLDIVAPGVNVQSTYPGSTYASLNGTSMATPHVAGAAALVKQKNPSWSNVQIRNHLKNTATSLGSTNLYGSGLVNAEAATR

SEQ ID NO: 60845 - protein, 380 aa, Unidentified
VRSKKLWIVASTALLISVAFSSSIASAAEEAKEKYLIGFNEQEAVSEFVEQVEANDEVAILSEEEEVEIELLHEFETIPVLSVELSPEDVDALELDPAISYIEEDAEVTTMAQSVPWGISRVQAPAAHNRGLTGSGVKVAVLDTGISTHPDLNIRGGASFVPGEPSTQDGNGHGTHVAGTIAALNNSIGVLGVAPSAELYAVKVLGASGSGSVSSIAQGLEWAGNNGMHVANLSLGSPSPSATLEQAVNSATSRGVLVVAASGNSGAGSISYPARYANAMAVGATDRNNNRASFSQYGAGLDIVAPGVNVQSTYPGSTYASLNGTSMATPHVAGAAALVKQKNPSWSNVQIRNHLKNTATSLGSTNLYGSGLVNAEAATR

SEQ ID NO: 60846 - protein, 380 aa, Unidentified
VRSKKLWIVASTALLISVAFSSSIASAAEEAKEKYLIGFNEQEAVSEFVEQVEANDEVAILSEEEEVEIELLHEFETIPVLSVELSPEDVDALELDPAISYIEEDAEVTTMAQSVPWGISRVQAPAAHNRGLTGSGVKVAVLDTGISTHPDLNIRGGASFVPGEPSTQDGNGHGTHVAGTIAALNNSIGVLGVAPSAELYAVKVLGASGSGSVSSIAQGLEWAGNNGMHVANLSLGSPSPSATLEQAVNSATSRGVLVVAASGNSGAGSISWPARYANAMAVGATDQNNNRASFSQYGAGLDIVAPGVNVQSTYPGSTYASLNGTSMATPHVAGAAALVKQKNPSWSNVQIRNHLKNTATSLGSTNLYGSGLVNAEAATR

SEQ ID NO: 60847 - protein, 380 aa, Unidentified
VRSKKLWIVASTALLISVAFSSSIASAAEEAKEKYLIGFNEQEAVSEFVEQVEANDEVAILSEEEEVEIELLHEFETIPVLSVELSPEDVDALELDPAISYIEEDAEVTTMAQSVPWGISRVQAPAAHNRGLTGSGVKVAVLDTGISTHPDLNIRGGASFVPGEPSTQDGNGHGTHVAGTIAALNNSIGVLGVAPSAELYAVKVLGASGSGSVSSIAQGLEWAGNNGMHVANLSLGSPSPSATLEQAVNSATSRGVLVVAASGNSGAGSISYPARYANAMAVGATDQNNNRASFSQYGAGLDIVAPGVNVQSTYPGSTYASLNGTSMATPHVAGAIALVKQKNPSWSNVQIRNHLKNTATSLGSTNLYGSGLVNAEAATR

SEQ ID NO: 60848 - protein, 380 aa, Unidentified
VRSKKLWIVASTALLISVAFSSSIASAAEEAKEKYLIGFNEQEAVSEFVEQVEANDEVAILSEEEEVEIELLHEFETIPVLSVELSPEDVDALELDPAISYIEEDAEVTTMAQSVPWGISRVQAPAAHNRGLTGSGVKVAVLDTGISTHPDLNIRGGASFVPGEPSTQDGNGHGTHVAGTIAALNNSIGVLGVAPSAELYAVKVLGASGSGSVESIAQGLEWAGNNGMHVANLSLGSPSPSATLEQAVNSATSRGVLVVAASGNSGAGSISYPARYANAMAVGATDQNNNRASFSQYGAGLDIVAPGVNVQSTYPGSTYASLNGTSMATPHVAGAAALVKQKNPSWSNVQIRNHLKNTATSLGSTNLYGSGLVNAEAATR

SEQ ID NO: 60849 - protein, 380 aa, Unidentified
VRSKKLWIVASTALLISVAFSSSIASAAEEAKEKYLIGFNEQEAVSEFVEQVEANDEVAILSEEEEVEIELLHEFETIPVLSVELSPEDVDALELDPAISYIEEDAEVTTMAQRVPWGISRVQAPAAHNRGLTGSGVKVAVLDTGISTHPDLNIRGGASFVPGEPSTQDGNGHGTHVAGTIAALNNSIGVLGVAPSAELYAVKVLGASGSGSVSSIAQGLEWAGNNGMHVANLSLGSPSPSATLEQAVNSATSRGVLVVAASGNSGAGSISYPARYANAMAVGATDQNNNRASFSQYGAGLDIVAPGVNVQSTYPGSTYASLNGTSMATPHVAGAAALVKQKNPSWSNVQIRNHLKNTATSLGSTNLYGSGLVNAEAATR

SEQ ID NO: 60850 - protein, 380 aa, Unidentified
VRSKKLWIVASTALLISVAFSSSIASAAEEAKEKYLIGFNEQEAVSEFVEQVEANDEVAILSEEEEVEIELLHEFETIPVLSVELSPEDVDALELDPAISYIEEDAEVTTMAQSVPWGISRVQAPAAHNRGLTGSGVKVAVLDTGISTHPDINIRGGASFVPGEPSTQDGNGHGTHVAGTIAALNNSIGVLGVAPSAELYAVKVLGASGSGSVSSIAQGLEWAGNNGMHVANLSLGSPSPSATLEQAVNSATSRGVLVVAASGNSGAGSISYPARYANAMAVGATDQNNNRASFSQYGAGLDIVAPGVNVQSTYPGSTYASLNGTSMATPHVAGAAALVKQKNPSWSNVQIRNHLKNTATSLGSTNLYGSGLVNAEAATR

SEQ ID NO: 60851 - protein, 380 aa, Unidentified
VRSKKLWIVASTALLISVAFSSSIASAAEEAKEKYLIGFNEQEAVSEFVEQVEANDEVAILSEEEEVEIELLHEFETIPVLSVELSPEDVDALELDPAISYIEEDAEVTTMAQSVPWGISRVQAPAAHNRGLTGSGVKVAVLDTGISTHPDLNIRGGASFVFGEPSTQDGNGHGTHVAGTIAALNNSIGVLGVAPSAELYAVKVLGASGSGSVSSIAQGLEWAGNNGMHVANLSLGSPSPSATLEQAVNSATSRGVLVVAASGNSGAGSISYPARYANAMAVGATDQNNNRASFSQYGAGLDIVAPGVNVQSTYPGSTYASLNGTSMATPHVAGAAALVKQKNPSWSNVQIRNHLKNTATSLGSTNLYGSGLVNAEAATR

SEQ ID NO: 60852 - protein, 380 aa, Unidentified
VRSKKLWIVASTALLISVAFSSSIASAAEEAKEKYLIGFNEQEAVSEFVEQVEANDEVAILSEEEEVEIELLHEFETIPVLSVELSPEDVDALELDPAISYIEEDAEVTTMAQSVPWGIARVQAPAAHNRGLTGSGVKVAVLDTGISTHPDLNIRGGASFVPGEPSTQDGNGHGTHVAGTIAALNNSIGVLGVAPSAELYAVKVLGASGSGSVSSIAQGLEWAGNNGMHVANLSLGSPSPSATLEQAVNSATSRGVLVVAASGNSGAGSISYPARYANAMAVGATDQNNNRASFSQYGAGLDIVAPGVNVQSTYPGSTYASLNGTSMATPHVAGAAALVKQKNPSWSNVQIRNHLKNTATSLGSTNLYGSGLVNAEAATR

SEQ ID NO: 60853 - protein, 380 aa, Unidentified
VRSKKLWIVASTALLISVAFSSSIASAAEEAKEKYLIGFNEQEAVSEFVEQVEANDEVAILSEEEEVEIELLHEFETIPVLSVELSPEDVDALELDPAISYIEEDAEVTTMAWSVPWGISRVQAPAAHNRGLTGSGVKVAVLDTGISTHPDLNIRGGASFVPGEPSTQDGNGHGTHVAGTIAALNNSIGVLGVAPSAELYAVKVLGASGSGSVSSIAQGLEWAGNNGMHVANLSLGSPSPSATLEQAVNSATSRGVLVVAASGNSGAGSISYPARYANAMAVGATDQNNNRASFSQYGAGLDIVAPGVNVQSTYPGSTYASLNGTSMATPHVAGAAALVKQKNPSWSNVQIRNHLKNTATSLGSTNLYGSGLVNAEAATR

SEQ ID NO: 60854 - protein, 380 aa, Unidentified
VRSKKLWIVASTALLISVAFSSSIASAAEEAKEKYLIGFNEQEAVSEFVEQVEANDEVAILSEEEEVEIELLHEFETIPVLSVELSPEDVDALELDPAISYIEEDAEVTTMAQSVPWGISRVQAPAAHNRKLTGSGVKVAVLDTGISTHPDLNIRGGASFVPGEPSTQDGNGHGTHVAGTIAALNNSIGVLGVAPSAELYAVKVLGASGSGSVSSIAQGLEWAGNNGMHVANLSLGSPSPSATLEQAVNSATSRGVLVVAASGNSGAGSISYPARYANAMAVGATDQNNNRASFSQYGAGLDIVAPGVNVQSTYPGSTYASLNGTSMATPHVAGAAALVKQKNPSWSNVQIRNHLKNTATSLGSTNLYGSGLVNAEAATR

SEQ ID NO: 60855 - protein, 380 aa, Unidentified
VRSKKLWIVASTALLISVAFSSSIASAAEEAKEKYLIGFNEQEAVSEFVEQVEANDEVAILSEEEEVEIELLHEFETIPVLSVELSPEDVDALELDPAISYIEEDAEVTTMAQSVPWGISRVQAPAAHNRGLTGSGVKVAVLDTGISTHPDLNIRGGASFVPGEPSTQDGNGHGTHVAGTIAARNNSIGVLGVAPSAELYAVKVLGASGSGSVSSIAQGLEWAGNNGMHVANLSLGSPSPSATLEQAVNSATSRGVLVVAASGNSGAGSISYPARYANAMAVGATDQNNNRASFSQYGAGLDIVAPGVNVQSTYPGSTYASLNGTSMATPHVAGAAALVKQKNPSWSNVQIRNHLKNTATSLGSTNLYGSGLVNAEAATR

SEQ ID NO: 60856 - protein, 380 aa, Unidentified
VRSKKLWIVASTALLISVAFSSSIASAAEEAKEKYLIGFNEQEAVSEFVEQVEANDEVAILSEEEEVEIELLHEFETIPVLSVELSPEDVDALELDPAISYIEEDAEVTTMAQSVPWGISRVQAPAAHNRGLTGSGVKVAVLDTGISTHPDLNIRGGASFVPGEPSTQDGNGHGTHVAGTIAALNNSIGVLGVAPSAILYAVKVLGASGSGSVSSIAQGLEWAGNNGMHVANLSLGSPSPSATLEQAVNSATSRGVLVVAASGNSGAGSISYPARYANAMAVGATDQNNNRASFSQYGAGLDIVAPGVNVQSTYPGSTYASLNGTSMATPHVAGAAALVKQKNPSWSNVQIRNHLKNTATSLGSTNLYGSGLVNAEAATR

SEQ ID NO: 60857 - protein, 380 aa, Unidentified
VRSKKLWIVASTALLISVAFSSSIASAAEEAKEKYLIGFNEQEAVSEFVEQVEANDEVAILSEEEEVEIELLHEFETIPVLSVELSPEDVDALELDPAISYIEEDAEVTTMAQSVPWGISRVQAPAAHNRGLTGSGVKVAVLDTGISTHPDLNIRGGASFVPGEPSTQDGNGHGTHVAGTIAALNNSIGVLGVAPSAELYAVKVLGASGSGSVSSIAQGLEWAGNNGMHFANLSLGSPSPSATLEQAVNSATSRGVLVVAASGNSGAGSISYPARYANAMAVGATDQNNNRASFSQYGAGLDIVAPGVNVQSTYPGSTYASLNGTSMATPHVAGAAALVKQKNPSWSNVQIRNHLKNTATSLGSTNLYGSGLVNAEAATR

SEQ ID NO: 60858 - protein, 380 aa, Unidentified
VRSKKLWIVASTALLISVAFSSSIASAAEEAKEKYLIGFNEQEAVSEFVEQVEANDEVAILSEEEEVEIELLHEFETIPVLSVELSPEDVDALELDPAISYIEEDAEVTTMAQSVPWGISRVQAPAAHNRGLTGSGVKVAVLDTGISTHPDLNIRGGASFVPGEPSTQDGNGHGTHVAGTIAALNNSIGVLGVAPSAELYAVKVLGASGSGSVSSIAQGLEWAGNNGMHVANLSLGSPSPSATLEQAVNSATSRGVLVVAASGNSGAGSISYPARYANAMAVGATDQNNNRASFSQYGAGLDIVAPGVNVQSTYPGSTYFSLNGTSMATPHVAGAAALVKQKNPSWSNVQIRNHLKNTATSLGSTNLYGSGLVNAEAATR

SEQ ID NO: 60859 - protein, 380 aa, Unidentified
VRSKKLWIVASTALLISVAFSSSIASAAEEAKEKYLIGFNEQEAVSEFVEQVEANDEVAILSEEEEVEIELLHEFETIPVLSVELSPEDVDALELDPAISYIEEDAEVTTMAQSVPWGISRVQAPAAHNRGLTGSGVKVAVLDTGISTHRDLNIRGGASFVPGEPSTQDGNGHGTHVAGTIAALNNSIGVLGVAPSAELYAVKVLGASGSGSVSSIAQGLEWAGNNGMHVANLSLGSPSPSATLEQAVNSATSRGVLVVAASGNSGAGSISYPARYANAMAVGATDQNNNRASFSQYGAGLDIVAPGVNVQSTYPGSTYASLNGTSMATPHVAGAAALVKQKNPSWSNVQIRNHLKNTATSLGSTNLYGSGLVNAEAATR

SEQ ID NO: 60860 - protein, 380 aa, Unidentified
VRSKKLWIVASTALLISVAFSSSIASAAEEAKEKYLIGFNEQEAVSEFVEQVEANDEVAILSEEEEVEIELLHEFETIPVLSVELSPEDVDALELDPAISYIEEDAEVTTMAQSVPWGISRVQAPAAHNRGLTGFGVKVAVLDTGISTHPDLNIRGGASFVPGEPSTQDGNGHGTHVAGTIAALNNSIGVLGVAPSAELYAVKVLGASGSGSVSSIAQGLEWAGNNGMHVANLSLGSPSPSATLEQAVNSATSRGVLVVAASGNSGAGSISYPARYANAMAVGATDQNNNRASFSQYGAGLDIVAPGVNVQSTYPGSTYASLNGTSMATPHVAGAAALVKQKNPSWSNVQIRNHLKNTATSLGSTNLYGSGLVNAEAATR

SEQ ID NO: 60861 - protein, 380 aa, Unidentified
VRSKKLWIVASTALLISVAFSSSIASAAEEAKEKYLIGFNEQEAVSEFVEQVEANDEVAILSEEEEVEIELLHEFETIPVLSVELSPEDVDALELDPAISYIEEDAEVTTMAQSVPWGISRVQAPAAHNRGLTGSGVKVAVLDTGISTHPDLNIRGGASFVPGEPSTQDGNGHGTHVAGTIAALNNSIGVLGVAPSAELYAVKVLGASGSGSVSSIAQGLEWAGNNGMHVANLSLGSPSPSATLEQAVNSATSRGVLVVAASGNSGAGSISYPARYANAMAVGATDQNNNRASFSQYGAGLDIVAPGVNVQSTYPGSTYASLNGTSMATPHVAGAAALVKQKNPSWSNVQIRNHLKNTATSLGSTNLYGSGLVNCEAATR

SEQ ID NO: 60862 - protein, 380 aa, Unidentified
VRSKKLWIVASTALLISVAFSSSIASAAEEAKEKYLIGFNEQEAVSEFVEQVEANDEVAILSEEEEVEIELLHEFETIPVLSVELSPEDVDALELDPAISYIEEDAEVTTMAQSVPWGISRVQAPAAHNRGLTGSGVKVAVLDTGISTHPDLNIRGGASFVPGEPSTQDGNGHGTHVAGTIAALNNSIGVLGVAPSAELYAVKVLGASGSASVSSIAQGLEWAGNNGMHVANLSLGSPSPSATLEQAVNSATSRGVLVVAASGNSGAGSISYPARYANAMAVGATDQNNNRASFSQYGAGLDIVAPGVNVQSTYPGSTYASLNGTSMATPHVAGAAALVKQKNPSWSNVQIRNHLKNTATSLGSTNLYGSGLVNAEAATR

SEQ ID NO: 60863 - protein, 380 aa, Unidentified
VRSKKLWIVASTALLISVAFSSSIASAAEEAKEKYLIGFNEQEAVSEFVEQVEANDEVAILSEEEEVEIELLHEFETIPVLSVELSPEDVDALELDPAISYIEEDAEVTTMAQSVPWGISRVQAPAAHNRGLTGSGVKVAVLDTGISTHPDLNIRGGASFVPGEPSTQDGNGHGTHVAGTIAALNNSIGVLGVAPSAELYAVKVLGASGSGSVSSIAQGLEWAGNNGMAVANLSLGSPSPSATLEQAVNSATSRGVLVVAASGNSGAGSISYPARYANAMAVGATDQNNNRASFSQYGAGLDIVAPGVNVQSTYPGSTYASLNGTSMATPHVAGAAALVKQKNPSWSNVQIRNHLKNTATSLGSTNLYGSGLVNAEAATR

SEQ ID NO: 60864 - protein, 380 aa, Unidentified
VRSKKLWIVASTALLISVAFSSSIASAAEEAKEKYLIGFNEQEAVSEFVEQVEANDEVAILSEEEEVEIELLHEFETIPVLSVELSPEDVDALELDPAISYIEEDAEVTTMAQSVPWGISRVQAPAAHNRGLTGSGVKVAVLDTGISTHPDLNIRGGASFVPGEPSTQDGNGHGTHVAGTIAALNNSIGVFGVAPSAELYAVKVLGASGSGSVSSIAQGLEWAGNNGMHVANLSLGSPSPSATLEQAVNSATSRGVLVVAASGNSGAGSISYPARYANAMAVGATDQNNNRASFSQYGAGLDIVAPGVNVQSTYPGSTYASLNGTSMATPHVAGAAALVKQKNPSWSNVQIRNHLKNTATSLGSTNLYGSGLVNAEAATR

SEQ ID NO: 60865 - protein, 380 aa, Unidentified
VRSKKLWIVASTALLISVAFSSSIASAAEEAKEKYLIGFNEQEAVSEFVEQVEANDEVAILSEEEEVEIELLHEFETIPVLSVELSPEDVDALELDPAISYIEEDAEVTTMAQSVPWGISRVQAPAAHNRGLTGSGVKVAVLDTGISTHPDLNIRGGASFVPGEPSTQDGNGHGTHVAGTIAALNNSIGVLGVAPSAELYAVKVLGASGSGSVSSIAQGLEWAGNNGMHVANLSLGSPSPSATLEQAVNSATSRGVLVVAASGNSGAGSISYPARYANAMAVGATDQNNNRASFSQYGAGLDIVAPGCNVQSTYPGSTYASLNGTSMATPHVAGAAALVKQKNPSWSNVQIRNHLKNTATSLGSTNLYGSGLVNAEAATR

SEQ ID NO: 60866 - protein, 380 aa, Unidentified
VRSKKLWIVASTALLISVAFSSSIASAAEEAKEKYLIGFNEQEAVSEFVEQVEANDEVAILSEEEEVEIELLHEFETIPVLSVELSPEDVDALELDPAISYIEEDAEVTTMAASVPWGISRVQAPAAHNRGLTGSGVKVAVLDTGISTHPDLNIRGGASFVPGEPSTQDGNGHGTHVAGTIAALNNSIGVLGVAPSAELYAVKVLGASGSGSVSSIAQGLEWAGNNGMHVANLSLGSPSPSATLEQAVNSATSRGVLVVAASGNSGAGSISYPARYANAMAVGATDQNNNRASFSQYGAGLDIVAPGVNVQSTYPGSTYASLNGTSMATPHVAGAAALVKQKNPSWSNVQIRNHLKNTATSLGSTNLYGSGLVNAEAATR

SEQ ID NO: 60867 - protein, 380 aa, Unidentified
VRSKKLWIVASTALLISVAFSSSIASAAEEAKEKYLIGFNEQEAVSEFVEQVEANDEVAILSEEEEVEIELLHEFETIPVLSVELSPEDVDALELDPAISYIEEDAEVTTMAQSVPWGISRVQAPAAHNRGLTGSGVKVAVLDTGISTHPDLNIRGGASFVPGEPSTQDGNGHGTHVAGTIAALNNSIGVLGVAPSAELYAVKVLGASGSGSVSSIAQGLEWAGNNGMHVANLSLGSPSPSATLEQAVNSATSRGVLVVAASGNSGAGSISYPARYANAMAVGATDQNNNRASFSQYGAGLDIVAPGVNVQSTYPGSTYASLNGTSMATPHVAGAAALVKQKNPSWSFVQIRNHLKNTATSLGSTNLYGSGLVNAEAATR

SEQ ID NO: 60868 - protein, 380 aa, Unidentified
VRSKKLWIVASTALLISVAFSSSIASAAEEAKEKYLIGFNEQEAVSEFVEQVEANDEVAILSEEEEVEIELLHEFETIPVLSVELSPEDVDALELDPAISYIEEDAEVTTMAQSVPWGISRVQAPAAHNRGLTGSGVKVAVLDTGISTHPDLNIRGGASFVPGEPSTQDGNGHGTHAAGTIAALNNSIGVLGVAPSAELYAVKVLGASGSGSVSSIAQGLEWAGNNGMHVANLSLGSPSPSATLEQAVNSATSRGVLVVAASGNSGAGSISYPARYANAMAVGATDQNNNRASFSQYGAGLDIVAPGVNVQSTYPGSTYASLNGTSMATPHVAGAAALVKQKNPSWSNVQIRNHLKNTATSLGSTNLYGSGLVNAEAATR

SEQ ID NO: 60869 - protein, 380 aa, Unidentified
VRSKKLWIVASTALLISVAFSSSIASAAEEAKEKYLIGFNEQEAVSEFVEQVEANDEVAILSEEEEVEIELLHEFETIPVLSVELSPEDVDALELDPAISYIEEDAEVTTMAQSVPWGISRVQAPAAHNRGLTGSGVKVAVLDTGISTHPDLNIRGGASFVPGEPSTQDGNGHGTHVAGTIAALNNSIGVLGVAPSAELYAVKVLGASGSGSVSSIAQGLEWAGNNGMHVANLSLGSPSPSATLEQAVNSATSRGVLVVAASGNSGAGSISYPARYANAMAVGATDQNNNRASFSQYGAGLDIVAPGVNVQSTYPGSTYASLNGTSMATPHVAGAAALVKQKNPSWSNRQIRNHLKNTATSLGSTNLYGSGLVNAEAATR

SEQ ID NO: 60870 - protein, 380 aa, Unidentified
VRSKKLWIVASTALLISVAFSSSIASAAEEAKEKYLIGFNEQEAVSEFVEQVEANDEVAILSEEEEVEIELLHEFETIPVLSVELSPEDVDALELDPAISYIEEDAEVTTMAQSVPWGISRVQAPAAHNRGLTGSGVKVAVLDTGISTHPDLNIRGGASFVPGEPSTQDGNGHGTHVAGTIAALNNSIGVLGVAPSAELYAVKVLGASGSGDVSSIAQGLEWAGNNGMHVANLSLGSPSPSATLEQAVNSATSRGVLVVAASGNSGAGSISYPARYANAMAVGATDQNNNRASFSQYGAGLDIVAPGVNVQSTYPGSTYASLNGTSMATPHVAGAAALVKQKNPSWSNVQIRNHLKNTATSLGSTNLYGSGLVNAEAATR

SEQ ID NO: 60871 - protein, 380 aa, Unidentified
VRSKKLWIVASTALLISVAFSSSIASAAEEAKEKYLIGFNEQEAVSEFVEQVEANDEVAILSEEEEVEIELLHEFETIPVLSVELSPEDVDALELDPAISYIEEDAEVTTMAQSVPWGISRVQAPAAHNRGLTGSGVKVAVLDTGISTHPDLNIRGGASFVPGEPSTQDGNGHGTHVAGTIAALNNSIGVVGVAPSAELYAVKVLGASGSGSVSSIAQGLEWAGNNGMHVANLSLGSPSPSATLEQAVNSATSRGVLVVAASGNSGAGSISYPARYANAMAVGATDQNNNRASFSQYGAGLDIVAPGVNVQSTYPGSTYASLNGTSMATPHVAGAAALVKQKNPSWSNVQIRNHLKNTATSLGSTNLYGSGLVNAEAATR

SEQ ID NO: 60872 - protein, 380 aa, Unidentified
VRSKKLWIVASTALLISVAFSSSIASAAEEAKEKYLIGFNEQEAVSEFVEQVEANDEVAILSEEEEVEIELLHEFETIPVLSVELSPEDVDALELDPAISYIEEDAEVTTMAQSVPWGISRVQAPAAHNRGLTGSGVRVAVLDTGISTHPDLNIRGGASFVPGEPSTQDGNGHGTHVAGTIAALNNSIGVLGVAPSAELYAVKVLGASGSGSVSSIAQGLEWAGNNGMHVANLSLGSPSPSATLEQAVNSATSRGVLVVAASGNSGAGSISYPARYANAMAVGATDQNNNRASFSQYGAGLDIVAPGVNVQSTYPGSTYASLNGTSMATPHVAGAAALVKQKNPSWSNVQIRNHLKNTATSLGSTNLYGSGLVNAEAATR

SEQ ID NO: 60873 - protein, 380 aa, Unidentified
VRSKKLWIVASTALLISVAFSSSIASAAEEAKEKYLIGFNEQEAVSEFVEQVEANDEVAILSEEEEVEIELLHEFETIPVLSVELSPEDVDALELDPAISYIEEDAEVTTMAQSVPWGISRVQAPAAHNRGLTGSGVKVAVLDTGISTHPDLNIRGGASFVPGEPSTQDGNGHGTHVAGTIAALNNSIGVLGVAPSAELYAVKVLGASGSGSVSSIAQGLEWAGNNGMHVANLSLGSPSPSATLEQAVNSATSRGVLVVAASGNSGAGSISYPARYANAMAVGATDQNNNRASFSQYGAGLDIVAPGVNVQSTYPRSTYASLNGTSMATPHVAGAAALVKQKNPSWSNVQIRNHLKNTATSLGSTNLYGSGLVNAEAATR

SEQ ID NO: 60874 - protein, 380 aa, Unidentified
VRSKKLWIVASTALLISVAFSSSIASAAEEAKEKYLIGFNEQEAVSEFVEQVEANDEVAILSEEEEVEIELLHEFETIPVLSVELSPEDVDALELDPAISYIEEDAEVTTMAQSVPWGISRVQAPAAHNRGLTGSGVKVAVLDTGISTHPDLNIRGGASFVPGEPSTQDGNGHGTHVAGTIAALNNSIGVLGVAPSAELYAVNVLGASGSGSVSSIAQGLEWAGNNGMHVANLSLGSPSPSATLEQAVNSATSRGVLVVAASGNSGAGSISYPARYANAMAVGATDQNNNRASFSQYGAGLDIVAPGVNVQSTYPGSTYASLNGTSMATPHVAGAAALVKQKNPSWSNVQIRNHLKNTATSLGSTNLYGSGLVNAEAATR

SEQ ID NO: 60875 - protein, 380 aa, Unidentified
VRSKKLWIVASTALLISVAFSSSIASAAEEAKEKYLIGFNEQEAVSEFVEQVEANDEVAILSEEEEVEIELLHEFETIPVLSVELSPEDVDALELDPAISYIEEDAEVTTMAQSVPWGISRVQAPAAHNRGLYGSGVKVAVLDTGISTHPDLNIRGGASFVPGEPSTQDGNGHGTHVAGTIAALNNSIGVLGVAPSAELYAVKVLGASGSGSVSSIAQGLEWAGNNGMHVANLSLGSPSPSATLEQAVNSATSRGVLVVAASGNSGAGSISYPARYANAMAVGATDQNNNRASFSQYGAGLDIVAPGVNVQSTYPGSTYASLNGTSMATPHVAGAAALVKQKNPSWSNVQIRNHLKNTATSLGSTNLYGSGLVNAEAATR

SEQ ID NO: 60876 - protein, 380 aa, Unidentified
VRSKKLWIVASTALLISVAFSSSIASAAEEAKEKYLIGFNEQEAVSEFVEQVEANDEVAILSEEEEVEIELLHEFETIPVLSVELSPEDVDALELDPAISYIEEDAEVTTMAQSVPWGISRVQAPAAHNRGLTGSGVKVAVLDTGISTHPDLAIRGGASFVPGEPSTQDGNGHGTHVAGTIAALNNSIGVLGVAPSAELYAVKVLGASGSGSVSSIAQGLEWAGNNGMHVANLSLGSPSPSATLEQAVNSATSRGVLVVAASGNSGAGSISYPARYANAMAVGATDQNNNRASFSQYGAGLDIVAPGVNVQSTYPGSTYASLNGTSMATPHVAGAAALVKQKNPSWSNVQIRNHLKNTATSLGSTNLYGSGLVNAEAATR

SEQ ID NO: 60877 - protein, 380 aa, Unidentified
VRSKKLWIVASTALLISVAFSSSIASAAEEAKEKYLIGFNEQEAVSEFVEQVEANDEVAILSEEEEVEIELLHEFETIPVLSVELSPEDVDALELDPAISYIEEDAEVTTMAQSVPWGISRVQAPAAHNRGLTASGVKVAVLDTGISTHPDLNIRGGASFVPGEPSTQDGNGHGTHVAGTIAALNNSIGVLGVAPSAELYAVKVLGASGSGSVSSIAQGLEWAGNNGMHVANLSLGSPSPSATLEQAVNSATSRGVLVVAASGNSGAGSISYPARYANAMAVGATDQNNNRASFSQYGAGLDIVAPGVNVQSTYPGSTYASLNGTSMATPHVAGAAALVKQKNPSWSNVQIRNHLKNTATSLGSTNLYGSGLVNAEAATR

SEQ ID NO: 60878 - protein, 380 aa, Unidentified
VRSKKLWIVASTALLISVAFSSSIASAAEEAKEKYLIGFNEQEAVSEFVEQVEANDEVAILSEEEEVEIELLHEFETIPVLSVELSPEDVDALELDPAISYIEEDAEVTTMAQSVPWGISRVQAPAAHNRGLTGSGVKVAVLDTGISTHPDLNIRGGASFVPGEPSTQDGNGHGTHVAGTIAALNNSIGVRGVAPSAELYAVKVLGASGSGSVSSIAQGLEWAGNNGMHVANLSLGSPSPSATLEQAVNSATSRGVLVVAASGNSGAGSISYPARYANAMAVGATDQNNNRASFSQYGAGLDIVAPGVNVQSTYPGSTYASLNGTSMATPHVAGAAALVKQKNPSWSNVQIRNHLKNTATSLGSTNLYGSGLVNAEAATR

SEQ ID NO: 60879 - protein, 380 aa, Unidentified
VRSKKLWIVASTALLISVAFSSSIASAAEEAKEKYLIGFNEQEAVSEFVEQVEANDEVAILSEEEEVEIELLHEFETIPVLSVELSPEDVDALELDPAISYIEEDAEVTTMAQSVPWGISRVQAPAAHNRGLTGSGVKVAVLDTGISTHPDLNIRGGASFVPGEPSTQDGNGHGTHVAGTIAALNNSIGVLGVAPSAELYAVKVLGASGSGSVSSIAQGLEWAGNNGMHVANSSLGSPSPSATLEQAVNSATSRGVLVVAASGNSGAGSISYPARYANAMAVGATDQNNNRASFSQYGAGLDIVAPGVNVQSTYPGSTYASLNGTSMATPHVAGAAALVKQKNPSWSNVQIRNHLKNTATSLGSTNLYGSGLVNAEAATR

SEQ ID NO: 60880 - protein, 380 aa, Unidentified
VRSKKLWIVASTALLISVAFSSSIASAAEEAKEKYLIGFNEQEAVSEFVEQVEANDEVAILSEEEEVEIELLHEFETIPVLSVELSPEDVDALELDPAISYIEEDAEVTTMAQSVPWGISRVQAPAAHNRGLTGSGVKVAVLDTGISTHPDLNIRGGASFVPGEPSTQDGNGHGTHVAGTIAALNNSIGVLGVAPSAELYAVKVLGASGSGSVSSIAQGLEWAGNNGMHVANLSLGSPSPSATLEQAVNSATSRGVLVVAASGNSGAGSISYPARYANAMAVGATDQNNNKASFSQYGAGLDIVAPGVNVQSTYPGSTYASLNGTSMATPHVAGAAALVKQKNPSWSNVQIRNHLKNTATSLGSTNLYGSGLVNAEAATR

SEQ ID NO: 60881 - protein, 380 aa, Unidentified
VRSKKLWIVASTALLISVAFSSSIASAAEEAKEKYLIGFNEQEAVSEFVEQVEANDEVAILSEEEEVEIELLHEFETIPVLSVELSPEDVDALELDPAISYIEEDAEVTTMAQSVPWGISRVQAPAAHNRGLTGSGVKVAVLDTGISTHPDLNIRGGASFVPGEPSTQDGNGHGTHVAGTIAALNNSIGVLGVAPSAELYAVKVLGASGSGSVSSIAQGLEWAGNNGMHVANLSLGSPSPSATLEQAVNSATSRGVLVVAASGNSGAGSISYPARYANAMAVGATDQNNNRASFSQYGAGLDIVAPGVNVQSTYPGSTYASLNGTSMATPHVAGAAALVKQKNPSWSNVQIRNHLKNTATSLGSTNLYGSGLVNAEAAGR

SEQ ID NO: 60882 - protein, 380 aa, Unidentified
VRSKKLWIVASTALLISVAFSSSIASAAEEAKEKYLIGFNEQEAVSEFVEQVEANDEVAILSEEEEVEIELLHEFETIPVLSVELSPEDVDALELDPAISYIEEDAEVTTMAQSVPWGISRVQAPAAHNRGLTGSGVKVAVLDTGISTHPDLNIRGGASFVPGEPSTQDGNGHGTHVAGTCAALNNSIGVLGVAPSAELYAVKVLGASGSGSVSSIAQGLEWAGNNGMHVANLSLGSPSPSATLEQAVNSATSRGVLVVAASGNSGAGSISYPARYANAMAVGATDQNNNRASFSQYGAGLDIVAPGVNVQSTYPGSTYASLNGTSMATPHVAGAAALVKQKNPSWSNVQIRNHLKNTATSLGSTNLYGSGLVNAEAATR

SEQ ID NO: 60883 - protein, 380 aa, Unidentified
VRSKKLWIVASTALLISVAFSSSIASAAEEAKEKYLIGFNEQEAVSEFVEQVEANDEVAILSEEEEVEIELLHEFETIPVLSVELSPEDVDALELDPAISYIEEDAEVTTMAQSVPWGISRVQAPAAHNRGLTGSGVKVAVLDTGISTHPDLNIRGGASFVPGEPSTQDGNGHGTHVAGTIAALNNSIGVLGVAPSAELYAVKVLGASGSGSVSSIAQGLEWAGNNGMHVANLSLGSPSPSATLEQAVNSATSRGVLVVAASGNSGAGSISYPARYANAMAVGATDQNNNRASFSQYGAGLDIVAPGVNVQSTYPGSTYASENGTSMATPHVAGAAALVKQKNPSWSNVQIRNHLKNTATSLGSTNLYGSGLVNAEAATR

SEQ ID NO: 60884 - protein, 380 aa, Unidentified
VRSKKLWIVASTALLISVAFSSSIASAAEEAKEKYLIGFNEQEAVSEFVEQVEANDEVAILSEEEEVEIELLHEFETIPVLSVELSPEDVDALELDPAISYIEEDAEVTTMAQSVPWGISRVQAPAAHNRGLTGSGVKVAVLDTGISTHPDLNIRGGASFVPGEPSTQDGNGHGTHVAGTIAALNNSIGVLGVAPSAELYAVKVLGASGSGSVSSIAQGLEWAGNNGMHVANLSLGNPSPSATLEQAVNSATSRGVLVVAASGNSGAGSISYPARYANAMAVGATDQNNNRASFSQYGAGLDIVAPGVNVQSTYPGSTYASLNGTSMATPHVAGAAALVKQKNPSWSNVQIRNHLKNTATSLGSTNLYGSGLVNAEAATR

SEQ ID NO: 60885 - protein, 380 aa, Unidentified
VRSKKLWIVASTALLISVAFSSSIASAAEEAKEKYLIGFNEQEAVSEFVEQVEANDEVAILSEEEEVEIELLHEFETIPVLSVELSPEDVDALELDPAISYIEEDAEVTTMAQSVPWGISRVQAPAAHNRGLTGSGVKVAVLDTGISTHPDLNIRGGASFVPGEPSTQDGNGHGTHVAGTIAALNNSIGVLGVAPSAELYAVKVLGASGSGSVSSIAQGLEWAGNNGMHVANLSLGSPSPSATLEQAVNSATSRGVLVVAASGNSGAGSISYPARYANAMAVGATDQNNNRASFSQYGAGLDIVAPGVNVQSTYPGSTYASLNGTSMATPHVAGAAALVKQKNPSWSNVQIRNHLKNTATSLGSTNLYGSGVVNAEAATR

SEQ ID NO: 60886 - protein, 380 aa, Unidentified
VRSKKLWIVASTALLISVAFSSSIASAAEEAKEKYLIGFNEQEAVSEFVEQVEANDEVAILSEEEEVEIELLHEFETIPVLSVELSPEDVDALELDPAISYIEEDAEVTTMAQSVPWGISRVQAPAAHNRGLTGSGVKVAVLDTGISTHPDLNIRGGASFVPGEPSTQDGNGHGTHVAGTIAALNNSIGVLGVAPSAELYAVKVLGASGSGSVSSIAQGLEWAGNNGMHVANLSLGSPSPSATLEQAVNSATSRGVLVVAASGNSGAGSISYPARYANAMAVGATDQNNNRASFSQYGAGLDIVAPGVNVQSTLPGSTYASLNGTSMATPHVAGAAALVKQKNPSWSNVQIRNHLKNTATSLGSTNLYGSGLVNAEAATR

SEQ ID NO: 60887 - protein, 380 aa, Unidentified
VRSKKLWIVASTALLISVAFSSSIASAAEEAKEKYLIGFNEQEAVSEFVEQVEANDEVAILSEEEEVEIELLHEFETIPVLSVELSPEDVDALELDPAISYIEEDAEVTTMAQSVPWGISRVQAPAAHNRGLTGSGVKVAVLDTGISTHPDLNIRGGASFVPGEPSTQDGNGHGTHVAGTIAALNNSIGVLGVAPSAELYAVKVLGASGSGSVSSIAQGLEWAGNNGMHVANLSLGSPSPSATLEQAVNSATSRGVLVVAASGNSGAGSISYPARYANAMAVGATDQNNNRASFSQYGAGLDIVAPGVNVQSTYPGSTYASLNGTSMATPHVAGAAACVKQKNPSWSNVQIRNHLKNTATSLGSTNLYGSGLVNAEAATR

SEQ ID NO: 60888 - protein, 380 aa, Unidentified
VRSKKLWIVASTALLISVAFSSSIASAAEEAKEKYLIGFNEQEAVSEFVEQVEANDEVAILSEEEEVEIELLHEFETIPVLSVELSPEDVDALELDPAISYIEEDAEVTTMAQSVPWGISRVQAPAAHNRGLTGSGVKVAVLDTGISTHPDLNIRGGASFVPGEPSTQDGNGHGTHVAGTIAALNNSIGVLGVAPSAELYAVKVLGASGSGSVSSIAQGLEWAGNNGMHVANLSLGSPSPSATLEQAVNSATSRGVLVVAASGNSGAGSISYPARYANAMAVGATDQNNNRASFSQYGAGLDIVAPGVNVQSTYPGSTYASLNGTSMATPHVAGAAALVKQKNPSWSNVQIRNHLKNTATSLGSTNLYGSGLVNAEAFTR

SEQ ID NO: 60889 - protein, 380 aa, Unidentified
VRSKKLWIVASTALLISVAFSSSIASAAEEAKEKYLIGFNEQEAVSEFVEQVEANDEVAILSEEEEVEIELLHEFETIPVLSVELSPEDVDALELDPAISYIEEDAEVTTMAQSVPWGISRVQAPAAHNRGLTGSGVKVAVLDTGISTHPDLNIRGGASFVPGEPSTQDGNGHGTHVAGTIAALNNSIGVLGVAPSAELYAVKVLGASGSGSVSSIAQGLEWAGNNGMHVANLSLGSPSPSATLEQAVNSATSRGVLVVAASGNSGAGSISYPARYANAMAVGATDQNNNRASFSQYGAGLDIVAPGVNVQSTYPGSTYASLNGTSMATPHVAGAAALVKQKNPSWSNVQIRNHLKITATSLGSTNLYGSGLVNAEAATR

SEQ ID NO: 60890 - protein, 380 aa, Unidentified
VRSKKLWIVASTALLISVAFSSSIASAAEEAKEKYLIGFNEQEAVSEFVEQVEANDEVAILSEEEEVEIELLHEFETIPVLSVELSPEDVDALELDPAISYIEEDAEVTTMAQSVPWGISRVQAPAAHNRGLTGSGVKVAVLDTGISTHPDLNIRGGASFVPGEPSTQDGNMHGTHVAGTIAALNNSIGVLGVAPSAELYAVKVLGASGSGSVSSIAQGLEWAGNNGMHVANLSLGSPSPSATLEQAVNSATSRGVLVVAASGNSGAGSISYPARYANAMAVGATDQNNNRASFSQYGAGLDIVAPGVNVQSTYPGSTYASLNGTSMATPHVAGAAALVKQKNPSWSNVQIRNHLKNTATSLGSTNLYGSGLVNAEAATR

SEQ ID NO: 60891 - protein, 380 aa, Unidentified
VRSKKLWIVASTALLISVAFSSSIASAAEEAKEKYLIGFNEQEAVSEFVEQVEANDEVAILSEEEEVEIELLHEFETIPVLSVELSPEDVDALELDPAISYIEEDAEVTTMAQSRPWGISRVQAPAAHNRGLTGSGVKVAVLDTGISTHPDLNIRGGASFVPGEPSTQDGNGHGTHVAGTIAALNNSIGVLGVAPSAELYAVKVLGASGSGSVSSIAQGLEWAGNNGMHVANLSLGSPSPSATLEQAVNSATSRGVLVVAASGNSGAGSISYPARYANAMAVGATDQNNNRASFSQYGAGLDIVAPGVNVQSTYPGSTYASLNGTSMATPHVAGAAALVKQKNPSWSNVQIRNHLKNTATSLGSTNLYGSGLVNAEAATR

SEQ ID NO: 60892 - protein, 380 aa, Unidentified
VRSKKLWIVASTALLISVAFSSSIASAAEEAKEKYLIGFNEQEAVSEFVEQVEANDEVAILSEEEEVEIELLHEFETIPVLSVELSPEDVDALELDPAISYIEEDAEVTTMAQSVPWGISRVQAPAAHNRGLTGSGVKVAVLDTGISTHPDLNIRGGASFVPGEPSTQDGNGTGTHVAGTIAALNNSIGVLGVAPSAELYAVKVLGASGSGSVSSIAQGLEWAGNNGMHVANLSLGSPSPSATLEQAVNSATSRGVLVVAASGNSGAGSISYPARYANAMAVGATDQNNNRASFSQYGAGLDIVAPGVNVQSTYPGSTYASLNGTSMATPHVAGAAALVKQKNPSWSNVQIRNHLKNTATSLGSTNLYGSGLVNAEAATR

SEQ ID NO: 60893 - protein, 380 aa, Unidentified
VRSKKLWIVASTALLISVAFSSSIASAAEEAKEKYLIGFNEQEAVSEFVEQVEANDEVAILSEEEEVEIELLHEFETIPVLSVELSPEDVDALELDPAISYIEEDAEVTTMAQSVPWGISRVQAPAAHNRGLTGSGVKVAVLDTGISTHPDLNIRGGASFVPGEPSTQDGNGHGTHVAGTIAALNNSIGVLGVAPSAELYAVKVLGASGSGSVSSIAQGLEWAGNNGMHVANLSLGSPSPSATLEQAVNSATSRGVLVVAASGNSGAGSISYPARYANAMAVGATDQNNNRASFSQYGAGLDIVAPGVNVQSTEPGSTYASLNGTSMATPHVAGAAALVKQKNPSWSNVQIRNHLKNTATSLGSTNLYGSGLVNAEAATR

SEQ ID NO: 60894 - protein, 380 aa, Unidentified
VRSKKLWIVASTALLISVAFSSSIASAAEEAKEKYLIGFNEQEAVSEFVEQVEANDEVAILSEEEEVEIELLHEFETIPVLSVELSPEDVDALELDPAISYIEEDAEVTTMAQSVPWGISRVQAPAAHNRGLTGSGVKVAVLDTGISTHPDLSIRGGASFVPGEPSTQDGNGHGTHVAGTIAALNNSIGVLGVAPSAELYAVKVLGASGSGSVSSIAQGLEWAGNNGMHVANLSLGSPSPSATLEQAVNSATSRGVLVVAASGNSGAGSISYPARYANAMAVGATDQNNNRASFSQYGAGLDIVAPGVNVQSTYPGSTYASLNGTSMATPHVAGAAALVKQKNPSWSNVQIRNHLKNTATSLGSTNLYGSGLVNAEAATR

SEQ ID NO: 60895 - protein, 380 aa, Unidentified
VRSKKLWIVASTALLISVAFSSSIASAAEEAKEKYLIGFNEQEAVSEFVEQVEANDEVAILSEEEEVEIELLHEFETIPVLSVELSPEDVDALELDPAISYIEEDAEVTTMAQSVPWGISRVQAPAAHNRGLTGSGVKVAVLDTGISTHPDLNIRGGASFVPGEPSTQDGNGHGTHVAGTIAALNNSIGVLGVAPSAELYAVKVLGASGSGSVSSIIQGLEWAGNNGMHVANLSLGSPSPSATLEQAVNSATSRGVLVVAASGNSGAGSISYPARYANAMAVGATDQNNNRASFSQYGAGLDIVAPGVNVQSTYPGSTYASLNGTSMATPHVAGAAALVKQKNPSWSNVQIRNHLKNTATSLGSTNLYGSGLVNAEAATR

SEQ ID NO: 60896 - protein, 380 aa, Unidentified
VRSKKLWIVASTALLISVAFSSSIASAAEEAKEKYLIGFNEQEAVSEFVEQVEANDEVAILSEEEEVEIELLHEFETIPVLSVELSPEDVDALELDPAISYIEEDAEVTTMAQSVPWGISRVQAPAAHNRGLTGSGVKVAVLDTGISTHPDLNIRGGASFVPGEPSTQDGNGHGTHVAGTIAALNNSIGVLGVAPSAELYAVKVLGASQSGSVSSIAQGLEWAGNNGMHVANLSLGSPSPSATLEQAVNSATSRGVLVVAASGNSGAGSISYPARYANAMAVGATDQNNNRASFSQYGAGLDIVAPGVNVQSTYPGSTYASLNGTSMATPHVAGAAALVKQKNPSWSNVQIRNHLKNTATSLGSTNLYGSGLVNAEAATR

SEQ ID NO: 60897 - protein, 380 aa, Unidentified
VRSKKLWIVASTALLISVAFSSSIASAAEEAKEKYLIGFNEQEAVSEFVEQVEANDEVAILSEEEEVEIELLHEFETIPVLSVELSPEDVDALELDPAISYIEEDAEVTTMAQSVPWGISRVQAPAAHNRGLTGSGVKVAVLDTGISTHPDLNIRGGASFVPGEPSTQDGNGHGTHVAGTIAALNNSIGVLGVAPSAELYAVKVLGASGSGSVSSIAQGLEWAGNNGMHVANLSLGSPSPSATLEQAVNSATSRGVLVVAASGNSGAGSISYPARYANAMAVGATDQNNNRASFSQYGAGLDIVAPGVNVQSTYPGSTYESLNGTSMATPHVAGAAALVKQKNPSWSNVQIRNHLKNTATSLGSTNLYGSGLVNAEAATR

SEQ ID NO: 60898 - protein, 380 aa, Unidentified
VRSKKLWIVASTALLISVAFSSSIASAAEEAKEKYLIGFNEQEAVSEFVEQVEANDEVAILSEEEEVEIELLHEFETIPVLSVELSPEDVDALELDPAISYIEEDAEVTTMAQSVPWGISRVQAPAAHNRGLTGSGVKVAVLDTGISTHPDLNIRGGASFVPGEPSTQDGNGHGTHVAGTIAALNNSIGVLGVAPSAELYAVKVLGASGSGSVSSIAQGLEWAGNNGMHVANLSLGSPSPSATLEQAVNSATSRGVLVVAASGNSGAGSISYPARYANAMAVGATDQNNNRASFSQYGAGLDIVAPGVNVQSTYPGSTYASLNGTSMATPHVAGAAALVKQKNPSWSNVQIRNTLKNTATSLGSTNLYGSGLVNAEAATR

SEQ ID NO: 60899 - protein, 380 aa, Unidentified
VRSKKLWIVASTALLISVAFSSSIASAAEEAKEKYLIGFNEQEAVSEFVEQVEANDEVAILSEEEEVEIELLHEFETIPVLSVELSPEDVDALELDPAISYIEEDAEVTTMAQSVPWGISRVQAPAAHNRGLTGSGVKVAVLDTGISTHPDLNIRGGASFVPGEPSTQDGNGHGTHVAGTIAALNNSIGVLGVAPSAELYAVKVLGASGSGSVSSIAQGLEWAGNNGMHVANLSLGSPSPSATLEQAVNSATSRGVLVVAASGNSGAGSISYPARYANAMAVGATDQNNNRASFSQYGAGLDIVAPGVNVQSTYPGSTYASLNGTSMATPHVAGAAALVKQKNPSWSNVQIRNHLKNTATSLGSTNLYGSGLVNAAAATR

SEQ ID NO: 60900 - protein, 380 aa, Unidentified
VRSKKLWIVASTALLISVAFSSSIASAAEEAKEKYLIGFNEQEAVSEFVEQVEANDEVAILSEEEEVEIELLHEFETIPVLSVELSPEDVDALELDPAISYIEEDAEVTTMAQSVPWGISRVQAPAAHNRGLTGSGVKVAVLDTGISTHPDLNIRGGASFVPGEPSTQAGNGHGTHVAGTIAALNNSIGVLGVAPSAELYAVKVLGASGSGSVSSIAQGLEWAGNNGMHVANLSLGSPSPSATLEQAVNSATSRGVLVVAASGNSGAGSISYPARYANAMAVGATDQNNNRASFSQYGAGLDIVAPGVNVQSTYPGSTYASLNGTSMATPHVAGAAALVKQKNPSWSNVQIRNHLKNTATSLGSTNLYGSGLVNAEAATR

SEQ ID NO: 60901 - protein, 380 aa, Unidentified
VRSKKLWIVASTALLISVAFSSSIASAAEEAKEKYLIGFNEQEAVSEFVEQVEANDEVAILSEEEEVEIELLHEFETIPVLSVELSPEDVDALELDPAISYIEEDAEVTTMAQSVPWGISRVQAPAAHNRGLTGSGVKVAVLDTGISTHPDLNIRGGASFVPGEPSTQDGNGHGTHVAGTIAALNNSIGVLGVAPSAELYAVKVLGASGSGSVSSIAQGLEWAGNNGMHVANLSLGSPSPSATLEQAVNSATSRGVLVVAASGNSGAGSISYPARYANAMAVGATDQNNNRASFSQYGAGLDIVAPGVNVQSSYPGSTYASLNGTSMATPHVAGAAALVKQKNPSWSNVQIRNHLKNTATSLGSTNLYGSGLVNAEAATR

SEQ ID NO: 60902 - protein, 380 aa, Unidentified
VRSKKLWIVASTALLISVAFSSSIASAAEEAKEKYLIGFNEQEAVSEFVEQVEANDEVAILSEEEEVEIELLHEFETIPVLSVELSPEDVDALELDPAISYIEEDAEVTTMAQSCPWGISRVQAPAAHNRGLTGSGVKVAVLDTGISTHPDLNIRGGASFVPGEPSTQDGNGHGTHVAGTIAALNNSIGVLGVAPSAELYAVKVLGASGSGSVSSIAQGLEWAGNNGMHVANLSLGSPSPSATLEQAVNSATSRGVLVVAASGNSGAGSISYPARYANAMAVGATDQNNNRASFSQYGAGLDIVAPGVNVQSTYPGSTYASLNGTSMATPHVAGAAALVKQKNPSWSNVQIRNHLKNTATSLGSTNLYGSGLVNAEAATR

SEQ ID NO: 60903 - protein, 380 aa, Unidentified
VRSKKLWIVASTALLISVAFSSSIASAAEEAKEKYLIGFNEQEAVSEFVEQVEANDEVAILSEEEEVEIELLHEFETIPVLSVELSPEDVDALELDPAISYIEEDAEVTTMAQSVPWGISRVQAPAAHNRGLTGSGVKVAVLDTGISTHPDLNIRGGASFVPGEPSTQDGNGHGTHVAGTIAALNNSIGVLGVAPSAELYAVKVLGASGSGSVSSIAQGLEWAGNNGMHVANLSLGSPSPSATLEQAVNSATSRGVLVVAASGNSGAGSISYPARYANAMAVGATDQNNNRASFSQYGAGLDIVAPGVNVQSTYPGSTYASLNGTSMATPHIAGAAALVKQKNPSWSNVQIRNHLKNTATSLGSTNLYGSGLVNAEAATR

SEQ ID NO: 60904 - protein, 380 aa, Unidentified
VRSKKLWIVASTALLISVAFSSSIASAAEEAKEKYLIGFNEQEAVSEFVEQVEANDEVAILSEEEEVEIELLHEFETIPVLSVELSPEDVDALELDPAISYIEEDAEVTTMAQSVPWGISRVQAPAAHNRGLTGSGVKVAVLDTGISTHPDLNIRGGASFVPGEPSTQDGNGHGTHVAGTIAALNNSIGVLGVAPSAELYAVKVLGASGSGSVSSIAQGLEWAGANGMHVANLSLGSPSPSATLEQAVNSATSRGVLVVAASGNSGAGSISYPARYANAMAVGATDQNNNRASFSQYGAGLDIVAPGVNVQSTYPGSTYASLNGTSMATPHVAGAAALVKQKNPSWSNVQIRNHLKNTATSLGSTNLYGSGLVNAEAATR

SEQ ID NO: 60905 - protein, 380 aa, Unidentified
VRSKKLWIVASTALLISVAFSSSIASAAEEAKEKYLIGFNEQEAVSEFVEQVEANDEVAILSEEEEVEIELLHEFETIPVLSVELSPEDVDALELDPAISYIEEDAEVTTMAQSVPWGISRVQAPAAHNRGLTGSGVKVAVLDTGISTHPDLNIRGGASFVPGEPSTQDGNQHGTHVAGTIAALNNSIGVLGVAPSAELYAVKVLGASGSGSVSSIAQGLEWAGNNGMHVANLSLGSPSPSATLEQAVNSATSRGVLVVAASGNSGAGSISYPARYANAMAVGATDQNNNRASFSQYGAGLDIVAPGVNVQSTYPGSTYASLNGTSMATPHVAGAAALVKQKNPSWSNVQIRNHLKNTATSLGSTNLYGSGLVNAEAATR

SEQ ID NO: 60906 - protein, 380 aa, Unidentified
VRSKKLWIVASTALLISVAFSSSIASAAEEAKEKYLIGFNEQEAVSEFVEQVEANDEVAILSEEEEVEIELLHEFETIPVLSVELSPEDVDALELDPAISYIEEDAEVTTMAQSVPWGISRVQAPAAHNRGLTGSGVKVAVLDTGISTHPDLNIRGGASFVPGEPSTQDGNGHGTHVAGTIAALNNSIGVLGVAPSAELYAVKVLGASGSGSVSSIAQGLEWAGNNGMHVANLSLGSPSPSATLEQAVNSATSRGVLVVAASGNSGAGSISYPARYANAMAVGATDQNNNRASFSQYGAGLDIVAPGVNVQSTYPGSTYASLNGTSMATPHVAGAAALVKQKNPSWRNVQIRNHLKNTATSLGSTNLYGSGLVNAEAATR

SEQ ID NO: 60907 - protein, 380 aa, Unidentified
VRSKKLWIVASTALLISVAFSSSIASAAEEAKEKYLIGFNEQEAVSEFVEQVEANDEVAILSEEEEVEIELLHEFETIPVLSVELSPEDVDALELDPAISYIEEDAEVTTMAQSVPWGISRVQAPAAHNRGLTGSGVKVAVLDTGISTHPDLNIRGGASFVPGEPSTQDGNGHGTHVAGTIAALNNSIGVLGVAPSAELYAVKVLGASGSGSVSSIAQGLEWAGNNGMHVANLSLGSPSPSATLEQAVNSATSRGVLVVAASGNSGAGSISYPARYANAMAVGATDQNNNRASFSQHGAGLDIVAPGVNVQSTYPGSTYASLNGTSMATPHVAGAAALVKQKNPSWSNVQIRNHLKNTATSLGSTNLYGSGLVNAEAATR

SEQ ID NO: 60908 - protein, 380 aa, Unidentified
VRSKKLWIVASTALLISVAFSSSIASAAEEAKEKYLIGFNEQEAVSEFVEQVEANDEVAILSEEEEVEIELLHEFETIPVLSVELSPEDVDALELDPAISYIEEDAEVTTMAQSVPWGISRVQAPAAHNRGLTGSGVKVAVLDTGISTHPDLNIRGGASFVPGEPSTQDGNGHGTHVAGTIAALNNIIGVLGVAPSAELYAVKVLGASGSGSVSSIAQGLEWAGNNGMHVANLSLGSPSPSATLEQAVNSATSRGVLVVAASGNSGAGSISYPARYANAMAVGATDQNNNRASFSQYGAGLDIVAPGVNVQSTYPGSTYASLNGTSMATPHVAGAAALVKQKNPSWSNVQIRNHLKNTATSLGSTNLYGSGLVNAEAATR

SEQ ID NO: 60909 - protein, 380 aa, Unidentified
VRSKKLWIVASTALLISVAFSSSIASAAEEAKEKYLIGFNEQEAVSEFVEQVEANDEVAILSEEEEVEIELLHEFETIPVLSVELSPEDVDALELDPAISYIEEDAEVTTMAQSVPWGISRVQAQAAHNRGLTGSGVKVAVLDTGISTHPDLNIRGGASFVPGEPSTQDGNGHGTHVAGTIAALNNSIGVLGVAPSAELYAVKVLGASGSGSVSSIAQGLEWAGNNGMHVANLSLGSPSPSATLEQAVNSATSRGVLVVAASGNSGAGSISYPARYANAMAVGATDQNNNRASFSQYGAGLDIVAPGVNVQSTYPGSTYASLNGTSMATPHVAGAAALVKQKNPSWSNVQIRNHLKNTATSLGSTNLYGSGLVNAEAATR

SEQ ID NO: 60910 - protein, 380 aa, Unidentified
VRSKKLWIVASTALLISVAFSSSIASAAEEAKEKYLIGFNEQEAVSEFVEQVEANDEVAILSEEEEVEIELLHEFETIPVLSVELSPEDVDALELDPAISYIEEDAEVTTMAQSVPWGISRVQAPAAHNRGLTGSGVKVAVLDTGISTHWDLNIRGGASFVPGEPSTQDGNGHGTHVAGTIAALNNSIGVLGVAPSAELYAVKVLGASGSGSVSSIAQGLEWAGNNGMHVANLSLGSPSPSATLEQAVNSATSRGVLVVAASGNSGAGSISYPARYANAMAVGATDQNNNRASFSQYGAGLDIVAPGVNVQSTYPGSTYASLNGTSMATPHVAGAAALVKQKNPSWSNVQIRNHLKNTATSLGSTNLYGSGLVNAEAATR

SEQ ID NO: 60911 - protein, 380 aa, Unidentified
VRSKKLWIVASTALLISVAFSSSIASAAEEAKEKYLIGFNEQEAVSEFVEQVEANDEVAILSEEEEVEIELLHEFETIPVLSVELSPEDVDALELDPAISYIEEDAEVTTMAQSVPWGISRVQAPAAHNRGLTGSGVKVAVLDTGISTHPDLNIRGGASFVPGEPSTQDGNGHGTHVAGTIAALNNSIGVLGVAPSAELYAVKVLGASGSGSVSSIAQGLEWAGNNGMHVANLSLGSPSPSATLEQAVNSATSRGVLVVAASGNSGAGSISYPARYANAMAVGATDQNNNRASFSQYGAGLDIVAPGVNVQSTYPGSTYASLNGTSMATPHVAGAAALVKQKNPSWLNVQIRNHLKNTATSLGSTNLYGSGLVNAEAATR

SEQ ID NO: 60912 - protein, 380 aa, Unidentified
VRSKKLWIVASTALLISVAFSSSIASAAEEAKEKYLIGFNEQEAVSEFVEQVEANDEVAILSEEEEVEIELLHEFETIPVLSVELSPEDVDALELDPAISYIEEDAEVTTMAQSVPWGISRVQAPAAHNRGLTGSGVKVAVLDTGISTHPDLNIRGGASFVPGEPSTQDGNGHGTHVAGTIAALNNSIGVLGVAPSAELYAVKVLGASGSGSVSSIAQGLEWAGNNGMHVANLSLGSPSPSATLEQAVNSATSRGVLVVAASGNSGAGSISYPARYANAMAVGATDQNNIRASFSQYGAGLDIVAPGVNVQSTYPGSTYASLNGTSMATPHVAGAAALVKQKNPSWSNVQIRNHLKNTATSLGSTNLYGSGLVNAEAATR

SEQ ID NO: 60913 - protein, 380 aa, Unidentified
VRSKKLWIVASTALLISVAFSSSIASAAEEAKEKYLIGFNEQEAVSEFVEQVEANDEVAILSEEEEVEIELLHEFETIPVLSVELSPEDVDALELDPAISYIEEDAEVTTMAQSVPWGISRVQAPAAHNRGLTGSGVKVAVLDTGISTHPDLWIRGGASFVPGEPSTQDGNGHGTHVAGTIAALNNSIGVLGVAPSAELYAVKVLGASGSGSVSSIAQGLEWAGNNGMHVANLSLGSPSPSATLEQAVNSATSRGVLVVAASGNSGAGSISYPARYANAMAVGATDQNNNRASFSQYGAGLDIVAPGVNVQSTYPGSTYASLNGTSMATPHVAGAAALVKQKNPSWSNVQIRNHLKNTATSLGSTNLYGSGLVNAEAATR

SEQ ID NO: 60914 - protein, 380 aa, Unidentified
VRSKKLWIVASTALLISVAFSSSIASAAEEAKEKYLIGFNEQEAVSEFVEQVEANDEVAILSEEEEVEIELLHEFETIPVLSVELSPEDVDALELDPAISYIEEDAEVTTMAQSVPWGASRVQAPAAHNRGLTGSGVKVAVLDTGISTHPDLNIRGGASFVPGEPSTQDGNGHGTHVAGTIAALNNSIGVLGVAPSAELYAVKVLGASGSGSVSSIAQGLEWAGNNGMHVANLSLGSPSPSATLEQAVNSATSRGVLVVAASGNSGAGSISYPARYANAMAVGATDQNNNRASFSQYGAGLDIVAPGVNVQSTYPGSTYASLNGTSMATPHVAGAAALVKQKNPSWSNVQIRNHLKNTATSLGSTNLYGSGLVNAEAATR

SEQ ID NO: 60915 - protein, 380 aa, Unidentified
VRSKKLWIVASTALLISVAFSSSIASAAEEAKEKYLIGFNEQEAVSEFVEQVEANDEVAILSEEEEVEIELLHEFETIPVLSVELSPEDVDALELDPAISYIEEDAEVTTMAQSVPWGISRVQAPAAHNRGLTGSGVKVAVLDTGISTHPDLNIRGGASFVPGEPSTQDGNGHGTHVAGTIAAANNSIGVLGVAPSAELYAVKVLGASGSGSVSSIAQGLEWAGNNGMHVANLSLGSPSPSATLEQAVNSATSRGVLVVAASGNSGAGSISYPARYANAMAVGATDQNNNRASFSQYGAGLDIVAPGVNVQSTYPGSTYASLNGTSMATPHVAGAAALVKQKNPSWSNVQIRNHLKNTATSLGSTNLYGSGLVNAEAATR

SEQ ID NO: 60916 - protein, 380 aa, Unidentified
VRSKKLWIVASTALLISVAFSSSIASAAEEAKEKYLIGFNEQEAVSEFVEQVEANDEVAILSEEEEVEIELLHEFETIPVLSVELSPEDVDALELDPAISYIEEDAEVTTMAQSVPWGISRVQAPAAHNRGLTGSGVKVAVLDTGISTHPDLNIRGGASFVPGEPSTQDGNGHGTHVAGTIAALNNSIGVLGVAPSAELYAVKVLGASGSGSVSSIAQGLEWAGNNGMHVANLSLGSPSPSATLEQAVNSATSRGVIVVAASGNSGAGSISYPARYANAMAVGATDQNNNRASFSQYGAGLDIVAPGVNVQSTYPGSTYASLNGTSMATPHVAGAAALVKQKNPSWSNVQIRNHLKNTATSLGSTNLYGSGLVNAEAATR

SEQ ID NO: 60917 - protein, 380 aa, Unidentified
VRSKKLWIVASTALLISVAFSSSIASAAEEAKEKYLIGFNEQEAVSEFVEQVEANDEVAILSEEEEVEIELLHEFETIPVLSVELSPEDVDALELDPAISYIEEDAEVTTMAQSVPWGISRVQAPAAHNRGLTGSGVKVAVLDTGISTHPDLNIRGGASFVPGEPSTQDGNGHGTHVAGTIAALNNSIGVLGVAPSAELYAVKVLGASGSGSVSSFAQGLEWAGNNGMHVANLSLGSPSPSATLEQAVNSATSRGVLVVAASGNSGAGSISYPARYANAMAVGATDQNNNRASFSQYGAGLDIVAPGVNVQSTYPGSTYASLNGTSMATPHVAGAAALVKQKNPSWSNVQIRNHLKNTATSLGSTNLYGSGLVNAEAATR

SEQ ID NO: 60918 - protein, 380 aa, Unidentified
VRSKKLWIVASTALLISVAFSSSIASAAEEAKEKYLIGFNEQEAVSEFVEQVEANDEVAILSEEEEVEIELLHEFETIPVLSVELSPEDVDALELDPAISYIEEDAEVTTMAQSVPWGISRVQAPAAHNRGLTGSGVKVAVLDTGISTHPDLNIRGGASFVPGEPSTQDGNGHGTHVAGTIAALNNSIGVLGVAPSAELYAVKVLGASGSGSVSSIAQGLEWAGNNGMHVANLSLGSPSPSATLEQAVNSATSRGVLVVAASGNSGAGSISYPARYANAMAVGATDQNNNRASFSQYGAGLDIVAPGVNVQSTFPGSTYASLNGTSMATPHVAGAAALVKQKNPSWSNVQIRNHLKNTATSLGSTNLYGSGLVNAEAATR

SEQ ID NO: 60919 - protein, 380 aa, Unidentified
VRSKKLWIVASTALLISVAFSSSIASAAEEAKEKYLIGFNEQEAVSEFVEQVEANDEVAILSEEEEVEIELLHEFETIPVLSVELSPEDVDALELDPAISYIEEDAEVTTMAQSVPWGISRVQAPAAHNRGLTGSGVKVAVLDTGISTHPDLNIRGGASFVPGEPSTQDGNIHGTHVAGTIAALNNSIGVLGVAPSAELYAVKVLGASGSGSVSSIAQGLEWAGNNGMHVANLSLGSPSPSATLEQAVNSATSRGVLVVAASGNSGAGSISYPARYANAMAVGATDQNNNRASFSQYGAGLDIVAPGVNVQSTYPGSTYASLNGTSMATPHVAGAAALVKQKNPSWSNVQIRNHLKNTATSLGSTNLYGSGLVNAEAATR

SEQ ID NO: 60920 - protein, 380 aa, Unidentified
VRSKKLWIVASTALLISVAFSSSIASAAEEAKEKYLIGFNEQEAVSEFVEQVEANDEVAILSEEEEVEIELLHEFETIPVLSVELSPEDVDALELDPAISYIEEDAEVTTMAQSVPWGISRVQAPAAHNRGLTGSGVKVAVLDTGISTHTDLNIRGGASFVPGEPSTQDGNGHGTHVAGTIAALNNSIGVLGVAPSAELYAVKVLGASGSGSVSSIAQGLEWAGNNGMHVANLSLGSPSPSATLEQAVNSATSRGVLVVAASGNSGAGSISYPARYANAMAVGATDQNNNRASFSQYGAGLDIVAPGVNVQSTYPGSTYASLNGTSMATPHVAGAAALVKQKNPSWSNVQIRNHLKNTATSLGSTNLYGSGLVNAEAATR

SEQ ID NO: 60921 - protein, 380 aa, Unidentified
VRSKKLWIVASTALLISVAFSSSIASAAEEAKEKYLIGFNEQEAVSEFVEQVEANDEVAILSEEEEVEIELLHEFETIPVLSVELSPEDVDALELDPAISYIEEDAEVTTMAQSVPWGISRVQAPAAHNRGLTGSGVKVAVLDTGISTHPDLNIRGGASFVPGEPSTQDGNVHGTHVAGTIAALNNSIGVLGVAPSAELYAVKVLGASGSGSVSSIAQGLEWAGNNGMHVANLSLGSPSPSATLEQAVNSATSRGVLVVAASGNSGAGSISYPARYANAMAVGATDQNNNRASFSQYGAGLDIVAPGVNVQSTYPGSTYASLNGTSMATPHVAGAAALVKQKNPSWSNVQIRNHLKNTATSLGSTNLYGSGLVNAEAATR

SEQ ID NO: 60922 - protein, 380 aa, Unidentified
VRSKKLWIVASTALLISVAFSSSIASAAEEAKEKYLIGFNEQEAVSEFVEQVEANDEVAILSEEEEVEIELLHEFETIPVLSVELSPEDVDALELDPAISYIEEDAEVTTMAQSVPWGISRVQAPAAHNRGLTGSGFKVAVLDTGISTHPDLNIRGGASFVPGEPSTQDGNGHGTHVAGTIAALNNSIGVLGVAPSAELYAVKVLGASGSGSVSSIAQGLEWAGNNGMHVANLSLGSPSPSATLEQAVNSATSRGVLVVAASGNSGAGSISYPARYANAMAVGATDQNNNRASFSQYGAGLDIVAPGVNVQSTYPGSTYASLNGTSMATPHVAGAAALVKQKNPSWSNVQIRNHLKNTATSLGSTNLYGSGLVNAEAATR

SEQ ID NO: 60923 - protein, 380 aa, Unidentified
VRSKKLWIVASTALLISVAFSSSIASAAEEAKEKYLIGFNEQEAVSEFVEQVEANDEVAILSEEEEVEIELLHEFETIPVLSVELSPEDVDALELDPAISYIEEDAEVTTMAQSVPWGISRVQAPAAHNRGLTGSGVKVAVLDTGISTHPDLNIRGGASFVPGEPSTQDGNGHGTHVAGTIAALNNSIGVLGVAPSAELYAVKVLGASGSGSVSFIAQGLEWAGNNGMHVANLSLGSPSPSATLEQAVNSATSRGVLVVAASGNSGAGSISYPARYANAMAVGATDQNNNRASFSQYGAGLDIVAPGVNVQSTYPGSTYASLNGTSMATPHVAGAAALVKQKNPSWSNVQIRNHLKNTATSLGSTNLYGSGLVNAEAATR

SEQ ID NO: 60924 - protein, 380 aa, Unidentified
VRSKKLWIVASTALLISVAFSSSIASAAEEAKEKYLIGFNEQEAVSEFVEQVEANDEVAILSEEEEVEIELLHEFETIPVLSVELSPEDVDALELDPAISYIEEDAEVTTMAQSVPWGISRVQAPAAHNRGLTGSGVKVAVLDTGISTHPDLNIRGGASFVPGEPSTQDGNGHGTHVAGTIAALNNSIGVLGVAPSAELYAVKVLGASGSNSVSSIAQGLEWAGNNGMHVANLSLGSPSPSATLEQAVNSATSRGVLVVAASGNSGAGSISYPARYANAMAVGATDQNNNRASFSQYGAGLDIVAPGVNVQSTYPGSTYASLNGTSMATPHVAGAAALVKQKNPSWSNVQIRNHLKNTATSLGSTNLYGSGLVNAEAATR

SEQ ID NO: 60925 - protein, 380 aa, Unidentified
VRSKKLWIVASTALLISVAFSSSIASAAEEAKEKYLIGFNEQEAVSEFVEQVEANDEVAILSEEEEVEIELLHEFETIPVLSVELSPEDVDALELDPAISYIEEDAEVTTMAQSVPWGISRVQAPAAHNRGLTGSGVKVAVLDTGISRHPDLNIRGGASFVPGEPSTQDGNGHGTHVAGTIAALNNSIGVLGVAPSAELYAVKVLGASGSGSVSSIAQGLEWAGNNGMHVANLSLGSPSPSATLEQAVNSATSRGVLVVAASGNSGAGSISYPARYANAMAVGATDQNNNRASFSQYGAGLDIVAPGVNVQSTYPGSTYASLNGTSMATPHVAGAAALVKQKNPSWSNVQIRNHLKNTATSLGSTNLYGSGLVNAEAATR

SEQ ID NO: 60926 - protein, 380 aa, Unidentified
VRSKKLWIVASTALLISVAFSSSIASAAEEAKEKYLIGFNEQEAVSEFVEQVEANDEVAILSEEEEVEIELLHEFETIPVLSVELSPEDVDALELDPAISYIEEDAEVTTMAQSVPWGISRVQAPAAHNRGLTGWGVKVAVLDTGISTHPDLNIRGGASFVPGEPSTQDGNGHGTHVAGTIAALNNSIGVLGVAPSAELYAVKVLGASGSGSVSSIAQGLEWAGNNGMHVANLSLGSPSPSATLEQAVNSATSRGVLVVAASGNSGAGSISYPARYANAMAVGATDQNNNRASFSQYGAGLDIVAPGVNVQSTYPGSTYASLNGTSMATPHVAGAAALVKQKNPSWSNVQIRNHLKNTATSLGSTNLYGSGLVNAEAATR

SEQ ID NO: 60927 - protein, 380 aa, Unidentified
VRSKKLWIVASTALLISVAFSSSIASAAEEAKEKYLIGFNEQEAVSEFVEQVEANDEVAILSEEEEVEIELLHEFETIPVLSVELSPEDVDALELDPAISYIEEDAEVTTMAQSVPWGISRVQAPAAHNRGLTGSGVKVAVLDTGISTHPDLNIRGGASFVPGEPSTQDGNGHGTHVAGTIAALNNSIGVLGVAPSAELYAVKVLGASGSGSVSSIAQGLEWAGNNGMHVANLSLGSPSPSATLEQAVNSATSRGVLVVAASGNSGAGSISYPARYANAMAVGATDQNNNRASFSQYGAGLDIVAPGVNVQSTYPGSAYASLNGTSMATPHVAGAAALVKQKNPSWSNVQIRNHLKNTATSLGSTNLYGSGLVNAEAATR

SEQ ID NO: 60928 - protein, 380 aa, Unidentified
VRSKKLWIVASTALLISVAFSSSIASAAEEAKEKYLIGFNEQEAVSEFVEQVEANDEVAILSEEEEVEIELLHEFETIPVLSVELSPEDVDALELDPAISYIEEDAEVTTMAQSVPWGISRVQAPAAHNRGLTGSGVKVAVLDTGISTHPDLNIRGGASFVPGEPSTQDGNGHGTHVAGTIAALNNSIGVLGVAPSAELYAVKVLGASGSGSVSSIAQGLEWAGNNGMHVANLSLGSPSPSATLEQAVNSATSRGVLVVAASGNSGAGSISYPARYANAMAVGATDQNNNRASFSQYGAGLDIVAPGVNVQSTYPGSTYASLPGTSMATPHVAGAAALVKQKNPSWSNVQIRNHLKNTATSLGSTNLYGSGLVNAEAATR

SEQ ID NO: 60929 - protein, 380 aa, Unidentified
VRSKKLWIVASTALLISVAFSSSIASAAEEAKEKYLIGFNEQEAVSEFVEQVEANDEVAILSEEEEVEIELLHEFETIPVLSVELSPEDVDALELDPAISYIEEDAEVTTMAQSVPWGISRVQAPAAHNRGLTGSGVKVAVLDTGISTHPDLNIRGGASFVNGEPSTQDGNGHGTHVAGTIAALNNSIGVLGVAPSAELYAVKVLGASGSGSVSSIAQGLEWAGNNGMHVANLSLGSPSPSATLEQAVNSATSRGVLVVAASGNSGAGSISYPARYANAMAVGATDQNNNRASFSQYGAGLDIVAPGVNVQSTYPGSTYASLNGTSMATPHVAGAAALVKQKNPSWSNVQIRNHLKNTATSLGSTNLYGSGLVNAEAATR

SEQ ID NO: 60930 - protein, 380 aa, Unidentified
VRSKKLWIVASTALLISVAFSSSIASAAEEAKEKYLIGFNEQEAVSEFVEQVEANDEVAILSEEEEVEIELLHEFETIPVLSVELSPEDVDALELDPAISYIEEDAEVTTMAQSVPWGISRVQAPAAHNRGLTGSGVKVAVLDTGISTHPDLNIRGGASFVPGEPSTQDGNGHGTHVAGTIAALNNSIGVLGVAPSAELYAVKVLGASGSGSVSSIAQGLEWAGNNGMHVANLSLGQPSPSATLEQAVNSATSRGVLVVAASGNSGAGSISYPARYANAMAVGATDQNNNRASFSQYGAGLDIVAPGVNVQSTYPGSTYASLNGTSMATPHVAGAAALVKQKNPSWSNVQIRNHLKNTATSLGSTNLYGSGLVNAEAATR

SEQ ID NO: 60931 - protein, 380 aa, Unidentified
VRSKKLWIVASTALLISVAFSSSIASAAEEAKEKYLIGFNEQEAVSEFVEQVEANDEVAILSEEEEVEIELLHEFETIPVLSVELSPEDVDALELDPAISYIEEDAEVTTMAQSVPWGISRVQAPAAHNRGLTGSGVKVAVLDTGISTHPDLNIRGGASFVPGEPSTQDGNGHGTHVAGTIAALNNSIGVLGVAPSAELYAVKVLGASGSGSVSSIAQGLEWGGNNGMHVANLSLGSPSPSATLEQAVNSATSRGVLVVAASGNSGAGSISYPARYANAMAVGATDQNNNRASFSQYGAGLDIVAPGVNVQSTYPGSTYASLNGTSMATPHVAGAAALVKQKNPSWSNVQIRNHLKNTATSLGSTNLYGSGLVNAEAATR

SEQ ID NO: 60932 - protein, 380 aa, Unidentified
VRSKKLWIVASTALLISVAFSSSIASAAEEAKEKYLIGFNEQEAVSEFVEQVEANDEVAILSEEEEVEIELLHEFETIPVLSVELSPEDVDALELDPAISYIEEDAEVTTMAQSVPWGISRVQAPAAHNRGLTGSGVKVAVLDTGISTHPDLNIRGGASCVPGEPSTQDGNGHGTHVAGTIAALNNSIGVLGVAPSAELYAVKVLGASGSGSVSSIAQGLEWAGNNGMHVANLSLGSPSPSATLEQAVNSATSRGVLVVAASGNSGAGSISYPARYANAMAVGATDQNNNRASFSQYGAGLDIVAPGVNVQSTYPGSTYASLNGTSMATPHVAGAAALVKQKNPSWSNVQIRNHLKNTATSLGSTNLYGSGLVNAEAATR

SEQ ID NO: 60933 - protein, 380 aa, Unidentified
VRSKKLWIVASTALLISVAFSSSIASAAEEAKEKYLIGFNEQEAVSEFVEQVEANDEVAILSEEEEVEIELLHEFETIPVLSVELSPEDVDALELDPAISYIEEDAEVTTMAQSVPWGISRVQAPAAHNRGLTGSGVKVAVLDTGISTHPDLNIRGGASFVPGEPSTQDGNGHGTHVAGTIAALNNSIGVLGVAPSAELYAVKVLGASGSGSVSSIAQGLEWAGNNGMHVANLSLGSPSPSATLEQAVNSATSRGVLVVAASGNSGAGSISYPARYANAMAVGATDQNNNRASFSQYGAGLDIVAPGVNVQSTYPGSTYASLNGTSMATPHVAGEAALVKQKNPSWSNVQIRNHLKNTATSLGSTNLYGSGLVNAEAATR

SEQ ID NO: 60934 - protein, 380 aa, Unidentified
VRSKKLWIVASTALLISVAFSSSIASAAEEAKEKYLIGFNEQEAVSEFVEQVEANDEVAILSEEEEVEIELLHEFETIPVLSVELSPEDVDALELDPAISYIEEDAEVTTMAQSVPWGISRVQAPAAHNRGLTGSGVKVAVLDTGISTHPDLNIRGGASFVPGEPSTQDGNGHGTHVAGTIAALNNSIGVLGVAPSAELYAVKVLGASGSGSLSSIAQGLEWAGNNGMHVANLSLGSPSPSATLEQAVNSATSRGVLVVAASGNSGAGSISYPARYANAMAVGATDQNNNRASFSQYGAGLDIVAPGVNVQSTYPGSTYASLNGTSMATPHVAGAAALVKQKNPSWSNVQIRNHLKNTATSLGSTNLYGSGLVNAEAATR

SEQ ID NO: 60935 - protein, 380 aa, Unidentified
VRSKKLWIVASTALLISVAFSSSIASAAEEAKEKYLIGFNEQEAVSEFVEQVEANDEVAILSEEEEVEIELLHEFETIPVLSVELSPEDVDALELDPAISYIEEDAEVTTMAQSVPWGISMVQAPAAHNRGLTGSGVKVAVLDTGISTHPDLNIRGGASFVPGEPSTQDGNGHGTHVAGTIAALNNSIGVLGVAPSAELYAVKVLGASGSGSVSSIAQGLEWAGNNGMHVANLSLGSPSPSATLEQAVNSATSRGVLVVAASGNSGAGSISYPARYANAMAVGATDQNNNRASFSQYGAGLDIVAPGVNVQSTYPGSTYASLNGTSMATPHVAGAAALVKQKNPSWSNVQIRNHLKNTATSLGSTNLYGSGLVNAEAATR

SEQ ID NO: 60936 - protein, 380 aa, Unidentified
VRSKKLWIVASTALLISVAFSSSIASAAEEAKEKYLIGFNEQEAVSEFVEQVEANDEVAILSEEEEVEIELLHEFETIPVLSVELSPEDVDALELDPAISYIEEDAEVTTMAQSVPWGISRVQAPAAHNRGLTGSGVKVAVLDTGISTHPDLNIRGGASFVPGEPSTQDGNGHGTHVAGTIAALNNSIGVLGVAPSAELYAVKVLGASGSGSVSSIAQGLEWAGNNGMHVANLSLGSPSPSATLEQAVNSATSRGVLVVAASGNSGAGSISYPARYANAMAVGATDQNNNRASFSQWGAGLDIVAPGVNVQSTYPGSTYASLNGTSMATPHVAGAAALVKQKNPSWSNVQIRNHLKNTATSLGSTNLYGSGLVNAEAATR

SEQ ID NO: 60937 - protein, 380 aa, Unidentified
VRSKKLWIVASTALLISVAFSSSIASAAEEAKEKYLIGFNEQEAVSEFVEQVEANDEVAILSEEEEVEIELLHEFETIPVLSVELSPEDVDALELDPAISYIEEDAEVTTMAQSVPWGISRVFAPAAHNRGLTGSGVKVAVLDTGISTHPDLNIRGGASFVPGEPSTQDGNGHGTHVAGTIAALNNSIGVLGVAPSAELYAVKVLGASGSGSVSSIAQGLEWAGNNGMHVANLSLGSPSPSATLEQAVNSATSRGVLVVAASGNSGAGSISYPARYANAMAVGATDQNNNRASFSQYGAGLDIVAPGVNVQSTYPGSTYASLNGTSMATPHVAGAAALVKQKNPSWSNVQIRNHLKNTATSLGSTNLYGSGLVNAEAATR

SEQ ID NO: 60938 - protein, 380 aa, Unidentified
VRSKKLWIVASTALLISVAFSSSIASAAEEAKEKYLIGFNEQEAVSEFVEQVEANDEVAILSEEEEVEIELLHEFETIPVLSVELSPEDVDALELDPAISYIEEDAEVTTMAQSVPWGISRVQAPAAHNRGLTGSGVKVAVLDTGISTHPDLNIRGGASFVPGEPSTQDGNGHGTHVAGTIAALNNSIGVLGVAPSAELYAVKVLGASGSGSVSSIAQGLEWAGNNGMHVANLSLGSPSPSATLEQAVNSATSRGVLVVAASGNSGAGSISYPARYANAMAVGATDQNNNRASFSQYGAGLDIVAPGVNVQSTYPGSTYASLNGTSMATPHVAGAAALVKNKNPSWSNVQIRNHLKNTATSLGSTNLYGSGLVNAEAATR

SEQ ID NO: 60939 - protein, 380 aa, Unidentified
VRSKKLWIVASTALLISVAFSSSIASAAEEAKEKYLIGFNEQEAVSEFVEQVEANDEVAILSEEEEVEIELLHEFETIPVLSVELSPEDVDALELDPAISYIEEDAEVTTMAQSVPWGISRVQAPAAHNRGLTGSGVKVAVLDTGISTHPDLNIRGGASFVPGEPSTQDGNGHGTHVAGTIAALNNSIGVLGVAPSAELYAVKVLGASGSGSVSSIAQGLEWAGNNGMHVANLSLGSPSPSATLEQAVNSATSRGVLVVAASGNSGAGSISYPARYANAMAVGATDQNNNRASFSQYGAGLDIVAPGVNVQSTYPGSTYASLNGTSMATPHVAGAAALVKQKNKSWSNVQIRNHLKNTATSLGSTNLYGSGLVNAEAATR

SEQ ID NO: 60940 - protein, 380 aa, Unidentified
VRSKKLWIVASTALLISVAFSSSIASAAEEAKEKYLIGFNEQEAVSEFVEQVEANDEVAILSEEEEVEIELLHEFETIPVLSVELSPEDVDALELDPAISYIEEDAEVTTMAQSVPWGISRVQAPAAHNRGLTGSGVKVAVLDTGISTHPDLNIRGGASFVPGEPSTQDGNGHGTHVAGTIAALNNSIGRLGVAPSAELYAVKVLGASGSGSVSSIAQGLEWAGNNGMHVANLSLGSPSPSATLEQAVNSATSRGVLVVAASGNSGAGSISYPARYANAMAVGATDQNNNRASFSQYGAGLDIVAPGVNVQSTYPGSTYASLNGTSMATPHVAGAAALVKQKNPSWSNVQIRNHLKNTATSLGSTNLYGSGLVNAEAATR

SEQ ID NO: 60941 - protein, 380 aa, Unidentified
VRSKKLWIVASTALLISVAFSSSIASAAEEAKEKYLIGFNEQEAVSEFVEQVEANDEVAILSEEEEVEIELLHEFETIPVLSVELSPEDVDALELDPAISYIEEDAEVTTMAQSVPWGISRVQAPAAHNRGLTGSGVKVAVLDTGISTHPDLNIRGGASFVPGEPSTQDGNGHGTHVAGTIAALNNSIGVLGVAPSAELYAVKVLGASGSGSVSSIAQGLEWAGNNGMHVANLSLGSPSPSATLEQAVNSATSRGVLVVAASGNSGAGSISYPARYANAMAVGATDQNNNRASFSQYGAGLDIVAPGVNVQSTYPGSTYASLNGTSMATPHVAGAAALVKQKNHSWSNVQIRNHLKNTATSLGSTNLYGSGLVNAEAATR

SEQ ID NO: 60942 - protein, 380 aa, Unidentified
VRSKKLWIVASTALLISVAFSSSIASAAEEAKEKYLIGFNEQEAVSEFVEQVEANDEVAILSEEEEVEIELLHEFETIPVLSVELSPEDVDALELDPAISYIEEDAEVTTMAQSVPWGISRVQAPAAHNRGLTSSGVKVAVLDTGISTHPDLNIRGGASFVPGEPSTQDGNGHGTHVAGTIAALNNSIGVLGVAPSAELYAVKVLGASGSGSVSSIAQGLEWAGNNGMHVANLSLGSPSPSATLEQAVNSATSRGVLVVAASGNSGAGSISYPARYANAMAVGATDQNNNRASFSQYGAGLDIVAPGVNVQSTYPGSTYASLNGTSMATPHVAGAAALVKQKNPSWSNVQIRNHLKNTATSLGSTNLYGSGLVNAEAATR

SEQ ID NO: 60943 - protein, 380 aa, Unidentified
VRSKKLWIVASTALLISVAFSSSIASAAEEAKEKYLIGFNEQEAVSEFVEQVEANDEVAILSEEEEVEIELLHEFETIPVLSVELSPEDVDALELDPAISYIEEDAEVTTMAQSVPWGISRVQAPFAHNRGLTGSGVKVAVLDTGISTHPDLNIRGGASFVPGEPSTQDGNGHGTHVAGTIAALNNSIGVLGVAPSAELYAVKVLGASGSGSVSSIAQGLEWAGNNGMHVANLSLGSPSPSATLEQAVNSATSRGVLVVAASGNSGAGSISYPARYANAMAVGATDQNNNRASFSQYGAGLDIVAPGVNVQSTYPGSTYASLNGTSMATPHVAGAAALVKQKNPSWSNVQIRNHLKNTATSLGSTNLYGSGLVNAEAATR

SEQ ID NO: 60944 - protein, 380 aa, Unidentified
VRSKKLWIVASTALLISVAFSSSIASAAEEAKEKYLIGFNEQEAVSEFVEQVEANDEVAILSEEEEVEIELLHEFETIPVLSVELSPEDVDALELDPAISYIEEDAEVTTMAQSVPWGISRVQAPAAHNRGLTGSGVKVAVLDTGISTHPDLNIRGGASFVPGEPSTQDGNGHGTHVAGTIAALNNSIGVLGVAPSAELYAVKVLGASGSGSVSSIAQGLEWAGNNGMHVANLSLGSPSPSATLEQAVNSATSRGVLVVAASGNSGAGSISYPARYANAVAVGATDQNNNRASFSQYGAGLDIVAPGVNVQSTYPGSTYASLNGTSMATPHVAGAAALVKQKNPSWSNVQIRNHLKNTATSLGSTNLYGSGLVNAEAATR

SEQ ID NO: 60945 - protein, 380 aa, Unidentified
VRSKKLWIVASTALLISVAFSSSIASAAEEAKEKYLIGFNEQEAVSEFVEQVEANDEVAILSEEEEVEIELLHEFETIPVLSVELSPEDVDALELDPAISYIEEDAEVTTMAQSVPWGISRVQAPAAHNRGLTGSGVKVAVLDTGISTHPDLNIRGGASFVPGEPSTQDGNSHGTHVAGTIAALNNSIGVLGVAPSAELYAVKVLGASGSGSVSSIAQGLEWAGNNGMHVANLSLGSPSPSATLEQAVNSATSRGVLVVAASGNSGAGSISYPARYANAMAVGATDQNNNRASFSQYGAGLDIVAPGVNVQSTYPGSTYASLNGTSMATPHVAGAAALVKQKNPSWSNVQIRNHLKNTATSLGSTNLYGSGLVNAEAATR

SEQ ID NO: 60946 - protein, 380 aa, Unidentified
VRSKKLWIVASTALLISVAFSSSIASAAEEAKEKYLIGFNEQEAVSEFVEQVEANDEVAILSEEEEVEIELLHEFETIPVLSVELSPEDVDALELDPAISYIEEDAEVTTMAQSVPWGISRVQAPAAHNRGLTGSGVKVAVLDTGISTHPDLNIRGGASFVPGEPSTQDGNGHGTHVAGTIAALNNSIGVLGVAPSAELYAVKVLGASGSGSVSSIAQGLEWAGNNGMHVANLSLGSPSPSATLEQAVNSATSRGVLVVAASGNSGAGSISYPARYANAMAVGATDQNNNRASFSQYGAGLDIVAPGVNVQSTYPGSTYASLNGTSMATPHVAGAAALVKQKNGSWSNVQIRNHLKNTATSLGSTNLYGSGLVNAEAATR

SEQ ID NO: 60947 - protein, 380 aa, Unidentified
VRSKKLWIVASTALLISVAFSSSIASAAEEAKEKYLIGFNEQEAVSEFVEQVEANDEVAILSEEEEVEIELLHEFETIPVLSVELSPEDVDALELDPAISYIEEDAEVTTMAQSVPWGISRVQAPAAHNRGLTGSGVKVAVLDTGISTHPDLNIRGGASFVPGEPSTQDGNGHGTHVAGTIAALNNSIGVLGVAPSAELYAVKVLGASGSGSVSSIAQGLEWAGNNGMHVANLSLGSPSPSATLEQAVNSATSRGVLVVAASGNSGAGSISYPARYANAMAVGATDQNNNRASFSQYGAGLDIVAPGVNVQSTYPGSTYASLNGTSMATPHVAGAAALVKQKNFSWSNVQIRNHLKNTATSLGSTNLYGSGLVNAEAATR

SEQ ID NO: 60948 - protein, 380 aa, Unidentified
VRSKKLWIVASTALLISVAFSSSIASAAEEAKEKYLIGFNEQEAVSEFVEQVEANDEVAILSEEEEVEIELLHEFETIPVLSVELSPEDVDALELDPAISYIEEDAEVTTMAQSVPWGISRVQAPAAHNRGLTGSGVKVAVLDTGISTHPDLNIRGGASFVPGEPSTQDGNGHGTHVAGTIAALNNSIGVLGVAPSAELYAVKVLGASGSGSVSSIAQGLEWAGNNGMHVANLSLGSPSPSATLEQAVNSATSRGVLVVAASGNSGAGSISYPARYANAMAVGATDQNNNRASFSQYGAGLDIVAPGVNVQSTYPGSTYASLNGTSMATPHVAGAAALVKQKRPSWSNVQIRNHLKNTATSLGSTNLYGSGLVNAEAATR

SEQ ID NO: 60949 - protein, 380 aa, Unidentified
VRSKKLWIVASTALLISVAFSSSIASAAEEAKEKYLIGFNEQEAVSEFVEQVEANDEVAILSEEEEVEIELLHEFETIPVLSVELSPEDVDALELDPAISYIEEDAEVTTMAQSVPWGISRVQAPAAHNRGLTGSGVKVAVLDTGISTHPDLNIRGGASFVPGEPSTQDGNGHGTHVAGTIAALNNSIGVLGVAPSAELYAVKVLGASGDGSVSSIAQGLEWAGNNGMHVANLSLGSPSPSATLEQAVNSATSRGVLVVAASGNSGAGSISYPARYANAMAVGATDQNNNRASFSQYGAGLDIVAPGVNVQSTYPGSTYASLNGTSMATPHVAGAAALVKQKNPSWSNVQIRNHLKNTATSLGSTNLYGSGLVNAEAATR

SEQ ID NO: 60950 - protein, 380 aa, Unidentified
VRSKKLWIVASTALLISVAFSSSIASAAEEAKEKYLIGFNEQEAVSEFVEQVEANDEVAILSEEEEVEIELLHEFETIPVLSVELSPEDVDALELDPAISYIEEDAEVTTMAQSVPWGISRVQAPAAFNRGLTGSGVKVAVLDTGISTHPDLNIRGGASFVPGEPSTQDGNGHGTHVAGTIAALNNSIGVLGVAPSAELYAVKVLGASGSGSVSSIAQGLEWAGNNGMHVANLSLGSPSPSATLEQAVNSATSRGVLVVAASGNSGAGSISYPARYANAMAVGATDQNNNRASFSQYGAGLDIVAPGVNVQSTYPGSTYASLNGTSMATPHVAGAAALVKQKNPSWSNVQIRNHLKNTATSLGSTNLYGSGLVNAEAATR

SEQ ID NO: 60951 - protein, 380 aa, Unidentified
VRSKKLWIVASTALLISVAFSSSIASAAEEAKEKYLIGFNEQEAVSEFVEQVEANDEVAILSEEEEVEIELLHEFETIPVLSVELSPEDVDALELDPAISYIEEDAEVTTMAQSVPWGISRVQAPAAHNRGLTGSGVKVAVLDTGISTHPDLNIRGGASFVPGEPSTQDGNGHGTHVAGTIAALNNSIGVLGVAPSAELYAVKVLGASGSGSVSSIAQGLEWAGNNGMHVANLSLGSPSPSATLEQAVNSATSRGVLVVAASGNSGAGSISYPARYANAMAVGATDQNNNRASFSQYGAGLDIVAPGVNVQSTYPGSTYASLNGTSMATPHVAGAAALVKQKNPSWSNVQIRNHLKNTATSLGSTNLYGSGLVNAMAATR

SEQ ID NO: 60952 - protein, 380 aa, Unidentified
VRSKKLWIVASTALLISVAFSSSIASAAEEAKEKYLIGFNEQEAVSEFVEQVEANDEVAILSEEEEVEIELLHEFETIPVLSVELSPEDVDALELDPAISYIEEDAEVTTMAQSVPWGISRVQAPAAHNRGLTGSGVKVAVLDTGISTHPDLNIRGGASFVPGEPSTQPGNGHGTHVAGTIAALNNSIGVLGVAPSAELYAVKVLGASGSGSVSSIAQGLEWAGNNGMHVANLSLGSPSPSATLEQAVNSATSRGVLVVAASGNSGAGSISYPARYANAMAVGATDQNNNRASFSQYGAGLDIVAPGVNVQSTYPGSTYASLNGTSMATPHVAGAAALVKQKNPSWSNVQIRNHLKNTATSLGSTNLYGSGLVNAEAATR

SEQ ID NO: 60953 - protein, 380 aa, Unidentified
VRSKKLWIVASTALLISVAFSSSIASAAEEAKEKYLIGFNEQEAVSEFVEQVEANDEVAILSEEEEVEIELLHEFETIPVLSVELSPEDVDALELDPAISYIEEDAEVTTMAQSVPWGISRVQAPAAHNRGLTGSGVKVAVLDTGISLHPDLNIRGGASFVPGEPSTQDGNGHGTHVAGTIAALNNSIGVLGVAPSAELYAVKVLGASGSGSVSSIAQGLEWAGNNGMHVANLSLGSPSPSATLEQAVNSATSRGVLVVAASGNSGAGSISYPARYANAMAVGATDQNNNRASFSQYGAGLDIVAPGVNVQSTYPGSTYASLNGTSMATPHVAGAAALVKQKNPSWSNVQIRNHLKNTATSLGSTNLYGSGLVNAEAATR

SEQ ID NO: 60954 - protein, 380 aa, Unidentified
VRSKKLWIVASTALLISVAFSSSIASAAEEAKEKYLIGFNEQEAVSEFVEQVEANDEVAILSEEEEVEIELLHEFETIPVLSVELSPEDVDALELDPAISYIEEDAEVTTMAQSVPWGISRVQAPAARNRGLTGSGVKVAVLDTGISTHPDLNIRGGASFVPGEPSTQDGNGHGTHVAGTIAALNNSIGVLGVAPSAELYAVKVLGASGSGSVSSIAQGLEWAGNNGMHVANLSLGSPSPSATLEQAVNSATSRGVLVVAASGNSGAGSISYPARYANAMAVGATDQNNNRASFSQYGAGLDIVAPGVNVQSTYPGSTYASLNGTSMATPHVAGAAALVKQKNPSWSNVQIRNHLKNTATSLGSTNLYGSGLVNAEAATR

SEQ ID NO: 60955 - protein, 380 aa, Unidentified
VRSKKLWIVASTALLISVAFSSSIASAAEEAKEKYLIGFNEQEAVSEFVEQVEANDEVAILSEEEEVEIELLHEFETIPVLSVELSPEDVDALELDPAISYIEEDAEVTTMAQSVPWGISRVQAPAAHNRGLTGSGVKVAVLDTGISTHPDLNIRGGASFVPGEPSTQDGNGHGTHVAGTIAALNNSIGVLGVAPSAELYAVKVLGASGSGSVSSIAQGLEWAGNNGMHVANLSLGSPSPSATLEQAVNSATSRGVLVVAASGNSGAGSISYPARYANAMAVGATDQNNNRASFSQYGAGLDIVAPGVNVQSTYPGSTYASLNGTSMATPHVAGAAALVKQKNPSWSNVQIRNHLSNTATSLGSTNLYGSGLVNAEAATR

SEQ ID NO: 60956 - protein, 380 aa, Unidentified
VRSKKLWIVASTALLISVAFSSSIASAAEEAKEKYLIGFNEQEAVSEFVEQVEANDEVAILSEEEEVEIELLHEFETIPVLSVELSPEDVDALELDPAISYIEEDAEVTTMAQSVPWGISRVQAPAAHNRGLTGSGVKVAVLDTPISTHPDLNIRGGASFVPGEPSTQDGNGHGTHVAGTIAALNNSIGVLGVAPSAELYAVKVLGASGSGSVSSIAQGLEWAGNNGMHVANLSLGSPSPSATLEQAVNSATSRGVLVVAASGNSGAGSISYPARYANAMAVGATDQNNNRASFSQYGAGLDIVAPGVNVQSTYPGSTYASLNGTSMATPHVAGAAALVKQKNPSWSNVQIRNHLKNTATSLGSTNLYGSGLVNAEAATR

SEQ ID NO: 60957 - protein, 380 aa, Unidentified
VRSKKLWIVASTALLISVAFSSSIASAAEEAKEKYLIGFNEQEAVSEFVEQVEANDEVAILSEEEEVEIELLHEFETIPVLSVELSPEDVDALELDPAISYIEEDAEVTTMAQSVPWGISRVQAPAAHNRGLTGSGVKVAVLDTGISTHPDLNIRGGASFVPGEPSTQDGNGHGTHVAGTIAALNNSIGVLGVAPSAELNAVKVLGASGSGSVSSIAQGLEWAGNNGMHVANLSLGSPSPSATLEQAVNSATSRGVLVVAASGNSGAGSISYPARYANAMAVGATDQNNNRASFSQYGAGLDIVAPGVNVQSTYPGSTYASLNGTSMATPHVAGAAALVKQKNPSWSNVQIRNHLKNTATSLGSTNLYGSGLVNAEAATR

SEQ ID NO: 60958 - protein, 380 aa, Unidentified
VRSKKLWIVASTALLISVAFSSSIASAAEEAKEKYLIGFNEQEAVSEFVEQVEANDEVAILSEEEEVEIELLHEFETIPVLSVELSPEDVDALELDPAISYIEEDAEVTTMAQSVPWGISRVQAPAAHNRGLTGSGVKVAVLDTGISTHPDLNIRGGASFVPGEPSTQDGNGHGTHVAGTIAALNNSIGVLGVAPSAELYAVKVLGASGSGSVSSIAQGLEWAGNNGMHVANLSLGSPSPSATLEQAVNSATSRGVLVVAASGNSGAGSISYPARYANAMAVGATDQNNNRASFSQYGAGLDIVAPGVNVQSTYPGSTYASLNGTSMATPHVAGAAALVKQKNPSWSNVQIRVHLKNTATSLGSTNLYGSGLVNAEAATR

SEQ ID NO: 60959 - protein, 380 aa, Unidentified
VRSKKLWIVASTALLISVAFSSSIASAAEEAKEKYLIGFNEQEAVSEFVEQVEANDEVAILSEEEEVEIELLHEFETIPVLSVELSPEDVDALELDPAISYIEEDAEVTTMAQSVPWGISRVQAPAAHNRGLTGSGVKVAVLDTGISTHPDLNIRGGASFVPGEPSTQDGNGHGTHVAGTIAALNNSIGVLGVAPSAELYAVKVLGASGSGSVSSIAQGLEWAGNNGMHVANLSLGSPSPSATLEQAVNSATSRGVLVVAASGNSGAGSISYPARYANAMAVGATDQMNNRASFSQYGAGLDIVAPGVNVQSTYPGSTYASLNGTSMATPHVAGAAALVKQKNPSWSNVQIRNHLKNTATSLGSTNLYGSGLVNAEAATR

SEQ ID NO: 60960 - protein, 380 aa, Unidentified
VRSKKLWIVASTALLISVAFSSSIASAAEEAKEKYLIGFNEQEAVSEFVEQVEANDEVAILSEEEEVEIELLHEFETIPVLSVELSPEDVDALELDPAISYIEEDAEVTTMAQSVPWGISRVQAPAAHNRGLTGSGVKVAVLDTGISTHPDLNIRGGASFVPGEPSTQDGNGHGTHVAGTIAALNNSIGVLGVAPSAELYAVKVLGASGSGSVSSIAQGLEWAGNNGMHVANLSLGSPSPSATLEQAVNSATSRGVLVVAASGNSGAGSISYPARYANAMAVGATDQNNNRASFSQYGAGLDIVAPGVNVQSTYPGSTYASLNGTSMATPHVAGAAALVKQKNRSWSNVQIRNHLKNTATSLGSTNLYGSGLVNAEAATR

SEQ ID NO: 60961 - protein, 380 aa, Unidentified
VRSKKLWIVASTALLISVAFSSSIASAAEEAKEKYLIGFNEQEAVSEFVEQVEANDEVAILSEEEEVEIELLHEFETIPVLSVELSPEDVDALELDPAISYIEEDAEVTTMAQSVPWGISRVQAPAAHNRGLTGSGVKVAVLDTGITTHPDLNIRGGASFVPGEPSTQDGNGHGTHVAGTIAALNNSIGVLGVAPSAELYAVKVLGASGSGSVSSIAQGLEWAGNNGMHVANLSLGSPSPSATLEQAVNSATSRGVLVVAASGNSGAGSISYPARYANAMAVGATDQNNNRASFSQYGAGLDIVAPGVNVQSTYPGSTYASLNGTSMATPHVAGAAALVKQKNPSWSNVQIRNHLKNTATSLGSTNLYGSGLVNAEAATR

SEQ ID NO: 60962 - protein, 380 aa, Unidentified
VRSKKLWIVASTALLISVAFSSSIASAAEEAKEKYLIGFNEQEAVSEFVEQVEANDEVAILSEEEEVEIELLHEFETIPVLSVELSPEDVDALELDPAISYIEEDAEVTTMAQSVPWGISRVQAPAAHNRGLTGSGVKVAVLDTGISTHPDLNIRGGASFVPGEPSTQDGNGHGTHVAGTIAALNNSIGVLGVAPSAELYAVKVLGASGSGSVSSIAQGLEWAGNNGMHVANLSLGSPSPSATLEQAVNSATSRGVLVVAASGNSGAGSISYPARYANAMAVGATDQNNVRASFSQYGAGLDIVAPGVNVQSTYPGSTYASLNGTSMATPHVAGAAALVKQKNPSWSNVQIRNHLKNTATSLGSTNLYGSGLVNAEAATR

SEQ ID NO: 60963 - protein, 380 aa, Unidentified
VRSKKLWIVASTALLISVAFSSSIASAAEEAKEKYLIGFNEQEAVSEFVEQVEANDEVAILSEEEEVEIELLHEFETIPVLSVELSPEDVDALELDPAISYIEEDAEVTTMAQSVPWGISRVQAPAAHNRGLTGSGVKVAVLDTGISTHPDLNITGGASFVPGEPSTQDGNGHGTHVAGTIAALNNSIGVLGVAPSAELYAVKVLGASGSGSVSSIAQGLEWAGNNGMHVANLSLGSPSPSATLEQAVNSATSRGVLVVAASGNSGAGSISYPARYANAMAVGATDQNNNRASFSQYGAGLDIVAPGVNVQSTYPGSTYASLNGTSMATPHVAGAAALVKQKNPSWSNVQIRNHLKNTATSLGSTNLYGSGLVNAEAATR

SEQ ID NO: 60964 - protein, 380 aa, Unidentified
VRSKKLWIVASTALLISVAFSSSIASAAEEAKEKYLIGFNEQEAVSEFVEQVEANDEVAILSEEEEVEIELLHEFETIPVLSVELSPEDVDALELDPAISYIEEDAEVTTMARSVPWGISRVQAPAAHNRGLTGSGVKVAVLDTGISTHPDLNIRGGASFVPGEPSTQDGNGHGTHVAGTIAALNNSIGVLGVAPSAELYAVKVLGASGSGSVSSIAQGLEWAGNNGMHVANLSLGSPSPSATLEQAVNSATSRGVLVVAASGNSGAGSISYPARYANAMAVGATDQNNNRASFSQYGAGLDIVAPGVNVQSTYPGSTYASLNGTSMATPHVAGAAALVKQKNPSWSNVQIRNHLKNTATSLGSTNLYGSGLVNAEAATR

SEQ ID NO: 60965 - protein, 380 aa, Unidentified
VRSKKLWIVASTALLISVAFSSSIASAAEEAKEKYLIGFNEQEAVSEFVEQVEANDEVAILSEEEEVEIELLHEFETIPVLSVELSPEDVDALELDPAISYIEEDAEVTTMAQSVPWGISRVQAPAAHNRGLTGSGVKVAVLDTGISTHPDLNIRGGASFVPGEPSTQDGNGHGTHVAGTIAALNNSIGVLGVAPSAELFAVKVLGASGSGSVSSIAQGLEWAGNNGMHVANLSLGSPSPSATLEQAVNSATSRGVLVVAASGNSGAGSISYPARYANAMAVGATDQNNNRASFSQYGAGLDIVAPGVNVQSTYPGSTYASLNGTSMATPHVAGAAALVKQKNPSWSNVQIRNHLKNTATSLGSTNLYGSGLVNAEAATR

SEQ ID NO: 60966 - protein, 380 aa, Unidentified
VRSKKLWIVASTALLISVAFSSSIASAAEEAKEKYLIGFNEQEAVSEFVEQVEANDEVAILSEEEEVEIELLHEFETIPVLSVELSPEDVDALELDPAISYIEEDAEVTTMAQSVPWGISRVQAPAAHNRGLTGSGVKVAVLDTGISTHPDLNIRGGASFVPGEPSTQQGNGHGTHVAGTIAALNNSIGVLGVAPSAELYAVKVLGASGSGSVSSIAQGLEWAGNNGMHVANLSLGSPSPSATLEQAVNSATSRGVLVVAASGNSGAGSISYPARYANAMAVGATDQNNNRASFSQYGAGLDIVAPGVNVQSTYPGSTYASLNGTSMATPHVAGAAALVKQKNPSWSNVQIRNHLKNTATSLGSTNLYGSGLVNAEAATR

SEQ ID NO: 60967 - protein, 380 aa, Unidentified
VRSKKLWIVASTALLISVAFSSSIASAAEEAKEKYLIGFNEQEAVSEFVEQVEANDEVAILSEEEEVEIELLHEFETIPVLSVELSPEDVDALELDPAISYIEEDAEVTTMAQSVPWGISRVQAPAAHNRGLTGSGVKVAVLDTGISTHPDLNIRGGASFVPGEPSTQDGNGHGTHVAGTIAALNNSIGVLGVAPSAELYAVKVLGASGSESVSSIAQGLEWAGNNGMHVANLSLGSPSPSATLEQAVNSATSRGVLVVAASGNSGAGSISYPARYANAMAVGATDQNNNRASFSQYGAGLDIVAPGVNVQSTYPGSTYASLNGTSMATPHVAGAAALVKQKNPSWSNVQIRNHLKNTATSLGSTNLYGSGLVNAEAATR

SEQ ID NO: 60968 - protein, 380 aa, Unidentified
VRSKKLWIVASTALLISVAFSSSIASAAEEAKEKYLIGFNEQEAVSEFVEQVEANDEVAILSEEEEVEIELLHEFETIPVLSVELSPEDVDALELDPAISYIEEDAEVTTMAQSVPWGISRVQAPAAHNRGLTGSGVKVAVLDTGISTHPDLNIRGGASFVPGEPSTQDGNGHGTHVAGTIAALNNSIGVLGVAPSAELYAVKVLGASGSGSVSSIAQGLEWAGNNGMHVANLSLGSPSPSATLEQAVNSATSRGVLVVAASGNSGAGSISYPARYANAMAVGATDQNNNRASFSQYGAGLDIVAPGVNVQSTYPGMTYASLNGTSMATPHVAGAAALVKQKNPSWSNVQIRNHLKNTATSLGSTNLYGSGLVNAEAATR

SEQ ID NO: 60969 - protein, 380 aa, Unidentified
VRSKKLWIVASTALLISVAFSSSIASAAEEAKEKYLIGFNEQEAVSEFVEQVEANDEVAILSEEEEVEIELLHEFETIPVLSVELSPEDVDALELDPAISYIEEDAEVTTMAQSVPWGISRVQAPAAHNRGLTGSGVKVAVLDTGISTHPDLNIRGGASFVPGEPSTQDGNGHGTHVAGTIAALNNSIGVLGVAPSAELYAVKVLGASGSGSVSSIAQGLEWAGNNGMHVANLSLGSPSPSATLEQAVNSATSRGVLVVAASGNSGAGSISYPARYANAMAVGATDQNNNRASFSQYGAGLDIVAPGVNVQSTYPGSTYASLNGTSMATPHVAGAAALVKQKKPSWSNVQIRNHLKNTATSLGSTNLYGSGLVNAEAATR

SEQ ID NO: 60970 - protein, 380 aa, Unidentified
VRSKKLWIVASTALLISVAFSSSIASAAEEAKEKYLIGFNEQEAVSEFVEQVEANDEVAILSEEEEVEIELLHEFETIPVLSVELSPEDVDALELDPAISYIEEDAEVTTMAQSVPWGISRVQAPAAHNRGLTGSGVKVAVLDTGISTHPDLNIRGGASFVPGEPSTQDGNGHGTHVAGTIAALNNSIGVLGVAPSAPLYAVKVLGASGSGSVSSIAQGLEWAGNNGMHVANLSLGSPSPSATLEQAVNSATSRGVLVVAASGNSGAGSISYPARYANAMAVGATDQNNNRASFSQYGAGLDIVAPGVNVQSTYPGSTYASLNGTSMATPHVAGAAALVKQKNPSWSNVQIRNHLKNTATSLGSTNLYGSGLVNAEAATR

SEQ ID NO: 60971 - protein, 380 aa, Unidentified
VRSKKLWIVASTALLISVAFSSSIASAAEEAKEKYLIGFNEQEAVSEFVEQVEANDEVAILSEEEEVEIELLHEFETIPVLSVELSPEDVDALELDPAISYIEEDAEVTTMAQSVPWGISRVQAPAAHNRGLTGSGVKVAVLDTGISTHPDLNIRGGASFVPGEPSTQDGNGHGTHVAGTIAALNNSIGVLGVAPSAELYFVKVLGASGSGSVSSIAQGLEWAGNNGMHVANLSLGSPSPSATLEQAVNSATSRGVLVVAASGNSGAGSISYPARYANAMAVGATDQNNNRASFSQYGAGLDIVAPGVNVQSTYPGSTYASLNGTSMATPHVAGAAALVKQKNPSWSNVQIRNHLKNTATSLGSTNLYGSGLVNAEAATR

SEQ ID NO: 60972 - protein, 380 aa, Unidentified
VRSKKLWIVASTALLISVAFSSSIASAAEEAKEKYLIGFNEQEAVSEFVEQVEANDEVAILSEEEEVEIELLHEFETIPVLSVELSPEDVDALELDPAISYIEEDAEVTTMAQSVPWGISRVQAPAAHNRGLTGSGVKVAVLDTGISTHPDLNIRGGASFFPGEPSTQDGNGHGTHVAGTIAALNNSIGVLGVAPSAELYAVKVLGASGSGSVSSIAQGLEWAGNNGMHVANLSLGSPSPSATLEQAVNSATSRGVLVVAASGNSGAGSISYPARYANAMAVGATDQNNNRASFSQYGAGLDIVAPGVNVQSTYPGSTYASLNGTSMATPHVAGAAALVKQKNPSWSNVQIRNHLKNTATSLGSTNLYGSGLVNAEAATR

SEQ ID NO: 60973 - protein, 380 aa, Unidentified
VRSKKLWIVASTALLISVAFSSSIASAAEEAKEKYLIGFNEQEAVSEFVEQVEANDEVAILSEEEEVEIELLHEFETIPVLSVELSPEDVDALELDPAISYIEEDAEVTTMAQSVPWGISRVQAPAAHNRGLTGSGVKVTVLDTGISTHPDLNIRGGASFVPGEPSTQDGNGHGTHVAGTIAALNNSIGVLGVAPSAELYAVKVLGASGSGSVSSIAQGLEWAGNNGMHVANLSLGSPSPSATLEQAVNSATSRGVLVVAASGNSGAGSISYPARYANAMAVGATDQNNNRASFSQYGAGLDIVAPGVNVQSTYPGSTYASLNGTSMATPHVAGAAALVKQKNPSWSNVQIRNHLKNTATSLGSTNLYGSGLVNAEAATR

SEQ ID NO: 60974 - protein, 380 aa, Unidentified
VRSKKLWIVASTALLISVAFSSSIASAAEEAKEKYLIGFNEQEAVSEFVEQVEANDEVAILSEEEEVEIELLHEFETIPVLSVELSPEDVDALELDPAISYIEEDAEVTTMAQSVPWGISRVQAKAAHNRGLTGSGVKVAVLDTGISTHPDLNIRGGASFVPGEPSTQDGNGHGTHVAGTIAALNNSIGVLGVAPSAELYAVKVLGASGSGSVSSIAQGLEWAGNNGMHVANLSLGSPSPSATLEQAVNSATSRGVLVVAASGNSGAGSISYPARYANAMAVGATDQNNNRASFSQYGAGLDIVAPGVNVQSTYPGSTYASLNGTSMATPHVAGAAALVKQKNPSWSNVQIRNHLKNTATSLGSTNLYGSGLVNAEAATR

SEQ ID NO: 60975 - protein, 380 aa, Unidentified
VRSKKLWIVASTALLISVAFSSSIASAAEEAKEKYLIGFNEQEAVSEFVEQVEANDEVAILSEEEEVEIELLHEFETIPVLSVELSPEDVDALELDPAISYIEEDAEVTTMAQSVPWGISRVQAPAAHNRGLTGSGVKVAVLDTGISTHPDLNIRGGASFVPGEPSTQDGNGHGTHVAGTIAALNNSIGVLGVAPSAELYAVKVLGASGSGSVSSIAQGLEWAGNNGMHVANLSLGSPSPSATLEQAVNSATSRGVLVVAASGNSGAGSISYPARYANAMAVGATDQNNNRASFSQYGAGLFIVAPGVNVQSTYPGSTYASLNGTSMATPHVAGAAALVKQKNPSWSNVQIRNHLKNTATSLGSTNLYGSGLVNAEAATR

SEQ ID NO: 60976 - protein, 380 aa, Unidentified
VRSKKLWIVASTALLISVAFSSSIASAAEEAKEKYLIGFNEQEAVSEFVEQVEANDEVAILSEEEEVEIELLHEFETIPVLSVELSPEDVDALELDPAISYIEEDAEVTTMAQSVPWGISRVQAPAAHNRGLQGSGVKVAVLDTGISTHPDLNIRGGASFVPGEPSTQDGNGHGTHVAGTIAALNNSIGVLGVAPSAELYAVKVLGASGSGSVSSIAQGLEWAGNNGMHVANLSLGSPSPSATLEQAVNSATSRGVLVVAASGNSGAGSISYPARYANAMAVGATDQNNNRASFSQYGAGLDIVAPGVNVQSTYPGSTYASLNGTSMATPHVAGAAALVKQKNPSWSNVQIRNHLKNTATSLGSTNLYGSGLVNAEAATR

SEQ ID NO: 60977 - protein, 380 aa, Unidentified
VRSKKLWIVASTALLISVAFSSSIASAAEEAKEKYLIGFNEQEAVSEFVEQVEANDEVAILSEEEEVEIELLHEFETIPVLSVELSPEDVDALELDPAISYIEEDAEVTTMAQSVPWGISRVQAPAAHNRGLTGSGVKVAVLDTGISTHPDLNIRGGASFVPGEPSTQDGNGHGTHVAGTIAALNNSIGVLGVAPSAELYAVKVLGASGSGSVSSIAQGLLWAGNNGMHVANLSLGSPSPSATLEQAVNSATSRGVLVVAASGNSGAGSISYPARYANAMAVGATDQNNNRASFSQYGAGLDIVAPGVNVQSTYPGSTYASLNGTSMATPHVAGAAALVKQKNPSWSNVQIRNHLKNTATSLGSTNLYGSGLVNAEAATR

SEQ ID NO: 60978 - protein, 380 aa, Unidentified
VRSKKLWIVASTALLISVAFSSSIASAAEEAKEKYLIGFNEQEAVSEFVEQVEANDEVAILSEEEEVEIELLHEFETIPVLSVELSPEDVDALELDPAISYIEEDAEVTTMAQSVPWGISRVQAPAAHNRGLTGSGVKVAVLDTGISTHPDLNIRGGASFVPGEPSTQDGNGHGTHVAGTIAALNNSIGVLGVAPSAELYAVKVLGASGSGSVSSIAQGLEWAGNNGMHVANLSLGSPSPSATLEQAVNSATSRGVLVVAASGNSGAGSISYPARYANAMAVGATDQNNNRASFSQYGAGLDIVAPGVNVQSTYPGSTYNSLNGTSMATPHVAGAAALVKQKNPSWSNVQIRNHLKNTATSLGSTNLYGSGLVNAEAATR

SEQ ID NO: 60979 - protein, 380 aa, Unidentified
VRSKKLWIVASTALLISVAFSSSIASAAEEAKEKYLIGFNEQEAVSEFVEQVEANDEVAILSEEEEVEIELLHEFETIPVLSVELSPEDVDALELDPAISYIEEDAEVTTMAQSVPWGISRVQAPAAHNRGLTGSGVKVAVLDTGISTHPDLNIRGGASFVPGEPSTQDGNGHGTHVAGTIAALNNSIGVLGVAPSAELYAVKVLGASGSGSVSSIAQGLEWAGNNGMHVANLSLGSPSPSATLEQAVNSATSRGVLVVAASGNSGAGSISYPARYANAMAVGATDQNNNRASFSQYGAGLDIVAPGVNVQSTYPGSTYAFLNGTSMATPHVAGAAALVKQKNPSWSNVQIRNHLKNTATSLGSTNLYGSGLVNAEAATR

SEQ ID NO: 60980 - protein, 380 aa, Unidentified
VRSKKLWIVASTALLISVAFSSSIASAAEEAKEKYLIGFNEQEAVSEFVEQVEANDEVAILSEEEEVEIELLHEFETIPVLSVELSPEDVDALELDPAISYIEEDAEVTTMAQSVPWGISRVQAPAAHNRGLTGSGVKVAVLDTGISTHPDLNIRGGASFVPGEPSTQDGNGHGTHCAGTIAALNNSIGVLGVAPSAELYAVKVLGASGSGSVSSIAQGLEWAGNNGMHVANLSLGSPSPSATLEQAVNSATSRGVLVVAASGNSGAGSISYPARYANAMAVGATDQNNNRASFSQYGAGLDIVAPGVNVQSTYPGSTYASLNGTSMATPHVAGAAALVKQKNPSWSNVQIRNHLKNTATSLGSTNLYGSGLVNAEAATR

SEQ ID NO: 60981 - protein, 380 aa, Unidentified
VRSKKLWIVASTALLISVAFSSSIASAAEEAKEKYLIGFNEQEAVSEFVEQVEANDEVAILSEEEEVEIELLHEFETIPVLSVELSPEDVDALELDPAISYIEEDAEVTTMAQSVPWGISRVQAPAAHNRGLTGSGVKVAVLDTGISTHPDLNIRGGASFVPGEPSTQDGNGHGTHVAGTIAALNNSIGVLGVAPSAELYAVKVLGAFGSGSVSSIAQGLEWAGNNGMHVANLSLGSPSPSATLEQAVNSATSRGVLVVAASGNSGAGSISYPARYANAMAVGATDQNNNRASFSQYGAGLDIVAPGVNVQSTYPGSTYASLNGTSMATPHVAGAAALVKQKNPSWSNVQIRNHLKNTATSLGSTNLYGSGLVNAEAATR

SEQ ID NO: 60982 - protein, 380 aa, Unidentified
VRSKKLWIVASTALLISVAFSSSIASAAEEAKEKYLIGFNEQEAVSEFVEQVEANDEVAILSEEEEVEIELLHEFETIPVLSVELSPEDVDALELDPAISYIEEDAEVTTMAQSVPWGISRVQAPAAHNRGLTGSGVKVAVLDTGISTHPDLNIRGGASFVPGEPSTQDGNGHGTHVAGTIAALNNSIGVLGVAPSAGLYAVKVLGASGSGSVSSIAQGLEWAGNNGMHVANLSLGSPSPSATLEQAVNSATSRGVLVVAASGNSGAGSISYPARYANAMAVGATDQNNNRASFSQYGAGLDIVAPGVNVQSTYPGSTYASLNGTSMATPHVAGAAALVKQKNPSWSNVQIRNHLKNTATSLGSTNLYGSGLVNAEAATR

SEQ ID NO: 60983 - protein, 380 aa, Unidentified
VRSKKLWIVASTALLISVAFSSSIASAAEEAKEKYLIGFNEQEAVSEFVEQVEANDEVAILSEEEEVEIELLHEFETIPVLSVELSPEDVDALELDPAISYIEEDAEVTTMAQSVPWGISRVQAPAAHNRGLTGSGVKVAVLDTGISTHPDLNIRGGASFVPGEPSTQDGNGHGTHVAGTIAALNNSIGVLGVAPSAELYAVKVLGASGSGSVSSIAQGLEWAGNNGMHVANLSLGSPSPSATLEQAVNSATSRGVLVVAASGNSGAGSISYPARYANAMAVGATDQNNNRASFSQYGAGLDIVAPGVNVQSTYPGSTYASLNGTSMATPHVAGAAALVKQKNPSWSNVQIRNHLKRTATSLGSTNLYGSGLVNAEAATR

SEQ ID NO: 60984 - protein, 380 aa, Unidentified
VRSKKLWIVASTALLISVAFSSSIASAAEEAKEKYLIGFNEQEAVSEFVEQVEANDEVAILSEEEEVEIELLHEFETIPVLSVELSPEDVDALELDPAISYIEEDAEVTTMAQSVPWGISRVQAPAAHNRGLTGSGVLVAVLDTGISTHPDLNIRGGASFVPGEPSTQDGNGHGTHVAGTIAALNNSIGVLGVAPSAELYAVKVLGASGSGSVSSIAQGLEWAGNNGMHVANLSLGSPSPSATLEQAVNSATSRGVLVVAASGNSGAGSISYPARYANAMAVGATDQNNNRASFSQYGAGLDIVAPGVNVQSTYPGSTYASLNGTSMATPHVAGAAALVKQKNPSWSNVQIRNHLKNTATSLGSTNLYGSGLVNAEAATR

SEQ ID NO: 60985 - protein, 380 aa, Unidentified
VRSKKLWIVASTALLISVAFSSSIASAAEEAKEKYLIGFNEQEAVSEFVEQVEANDEVAILSEEEEVEIELLHEFETIPVLSVELSPEDVDALELDPAISYIEEDAEVTTMAQSVPWGISRVQAPAAHNRGLTGSGVKVAVLDTGISTHPDLNIRGGASFVPGEPSTQDGNGHGTHVAGTIAALNNSIGVLGVAPSAELYAVKVLGASGSGSVSSIAQGLEWAGNNGMHVANLSLGSPSPSATLEQAVNSATSRGVLVVAASGNSGAGSISYPARYANAMAVGATDQNNNRASFSQYGAGLDIVAPGVNVQSTYPGSTYASLNGTSMATPHVAGAAALVKQKNPSWSNVQIRNHLRNTATSLGSTNLYGSGLVNAEAATR

SEQ ID NO: 60986 - protein, 380 aa, Unidentified
VRSKKLWIVASTALLISVAFSSSIASAAEEAKEKYLIGFNEQEAVSEFVEQVEANDEVAILSEEEEVEIELLHEFETIPVLSVELSPEDVDALELDPAISYIEEDAEVTTMAQSVPWGISRVQAPAAHNRGLTGSGVKVAVLDTGISTHPDLNIRGGASFVPGEPSTQDGNGHGTHVAGTIAALNNSIGVLGVAPSAELYAVKVLGASGSGSVSSIAQGLEWAGNNGMHVANLSLGSPSPSATLEQAVNSATSRGVLVVAASGNSGAGSISYPARYANAMAVGATDQNNNRASFSQYGAGLDIVAPGVNVQSTYPGSTYASLNGTSMATPHVAGAAALVKQKNPSWSNVQIRNHLKNTATSLGSTNLYGFGLVNAEAATR

SEQ ID NO: 60987 - protein, 380 aa, Unidentified
VRSKKLWIVASTALLISVAFSSSIASAAEEAKEKYLIGFNEQEAVSEFVEQVEANDEVAILSEEEEVEIELLHEFETIPVLSVELSPEDVDALELDPAISYIEEDAEVTTMAQSVPWGISRVQAPAAHNRGLWGSGVKVAVLDTGISTHPDLNIRGGASFVPGEPSTQDGNGHGTHVAGTIAALNNSIGVLGVAPSAELYAVKVLGASGSGSVSSIAQGLEWAGNNGMHVANLSLGSPSPSATLEQAVNSATSRGVLVVAASGNSGAGSISYPARYANAMAVGATDQNNNRASFSQYGAGLDIVAPGVNVQSTYPGSTYASLNGTSMATPHVAGAAALVKQKNPSWSNVQIRNHLKNTATSLGSTNLYGSGLVNAEAATR

SEQ ID NO: 60988 - protein, 380 aa, Unidentified
VRSKKLWIVASTALLISVAFSSSIASAAEEAKEKYLIGFNEQEAVSEFVEQVEANDEVAILSEEEEVEIELLHEFETIPVLSVELSPEDVDALELDPAISYIEEDAEVTTMAQSVPWGISRVQAPAAHNRGLTGSGVKVAVLDTGISTHPDLNIRGGASFVPGEPSTQDGNGHGTHVAGTIAALNNSIGVLGVAPSAELYAVKVLGASGSGSVSSIAQGLEWAGNNGMHVANLSLGDPSPSATLEQAVNSATSRGVLVVAASGNSGAGSISYPARYANAMAVGATDQNNNRASFSQYGAGLDIVAPGVNVQSTYPGSTYASLNGTSMATPHVAGAAALVKQKNPSWSNVQIRNHLKNTATSLGSTNLYGSGLVNAEAATR

SEQ ID NO: 60989 - protein, 380 aa, Unidentified
VRSKKLWIVASTALLISVAFSSSIASAAEEAKEKYLIGFNEQEAVSEFVEQVEANDEVAILSEEEEVEIELLHEFETIPVLSVELSPEDVDALELDPAISYIEEDAEVTTMAQSVPWGISRVQAPAAHNRGLTGSGVKVAVLDTGISTHPDLNIRGGASFVPGEPSTQDGNGHGTHVAGTIAALNNSIGVLGVAPSAELYAVKVLGASGSGSVSSIAQGLEWAGNNGMHVANLSLGSPSPEATLEQAVNSATSRGVLVVAASGNSGAGSISYPARYANAMAVGATDQNNNRASFSQYGAGLDIVAPGVNVQSTYPGSTYASLNGTSMATPHVAGAAALVKQKNPSWSNVQIRNHLKNTATSLGSTNLYGSGLVNAEAATR

SEQ ID NO: 60990 - protein, 380 aa, Unidentified
VRSKKLWIVASTALLISVAFSSSIASAAEEAKEKYLIGFNEQEAVSEFVEQVEANDEVAILSEEEEVEIELLHEFETIPVLSVELSPEDVDALELDPAISYIEEDAEVTTMAQSVPWGISRVQAPAAHNRGLTGSGVKVAVLDTGISTHPDLNIRGGASFVPGEPSTQDGNGHGTHVAGTIAALNNSIGVLGVAPSAELYAVKVLGASGSGSVSSIAQGLEWAGNNGMHVANLSLGSPSPAATLEQAVNSATSRGVLVVAASGNSGAGSISYPARYANAMAVGATDQNNNRASFSQYGAGLDIVAPGVNVQSTYPGSTYASLNGTSMATPHVAGAAALVKQKNPSWSNVQIRNHLKNTATSLGSTNLYGSGLVNAEAATR

SEQ ID NO: 60991 - protein, 380 aa, Unidentified
VRSKKLWIVASTALLISVAFSSSIASAAEEAKEKYLIGFNEQEAVSEFVEQVEANDEVAILSEEEEVEIELLHEFETIPVLSVELSPEDVDALELDPAISYIEEDAEVTTMAQSVPWGISRVQAPAAHNRGLTGSGVKVAVLDTGISTHPDLNIRGGASFVPGEPSTQDGNGHGTHVAGTIAALNNSIGVLGVAPSAELYAVKVLGASGSGSVSSIAQGLEWAGNNGMHVANLSLGSPSPSATLEQAVNSATSRGVLVVAASGNSGAGSISYPARYANAMAVGATDQNNNRASFSQYGAGLDIVAPGVNVQSTYPGSTYASDNGTSMATPHVAGAAALVKQKNPSWSNVQIRNHLKNTATSLGSTNLYGSGLVNAEAATR

SEQ ID NO: 60992 - protein, 380 aa, Unidentified
VRSKKLWIVASTALLISVAFSSSIASAAEEAKEKYLIGFNEQEAVSEFVEQVEANDEVAILSEEEEVEIELLHEFETIPVLSVELSPEDVDALELDPAISYIEEDAEVTTMAQSVPWGISRVQAPAAHNRGLTGSGVKVAVLDTGISTHPDLNIRGGASFVPGEPSTQDGNGHGTHVAGTIAALNNSIGVLGVAPSAELYAVKVLGASGSGSVSGIAQGLEWAGNNGMHVANLSLGSPSPSATLEQAVNSATSRGVLVVAASGNSGAGSISYPARYANAMAVGATDQNNNRASFSQYGAGLDIVAPGVNVQSTYPGSTYASLNGTSMATPHVAGAAALVKQKNPSWSNVQIRNHLKNTATSLGSTNLYGSGLVNAEAATR

SEQ ID NO: 60993 - protein, 380 aa, Unidentified
VRSKKLWIVASTALLISVAFSSSIASAAEEAKEKYLIGFNEQEAVSEFVEQVEANDEVAILSEEEEVEIELLHEFETIPVLSVELSPEDVDALELDPAISYIEEDAEVTTMAQSVPWGISRVQAPAAHNRGLTGSGVKVAVLDTGISTHPDLNIRGGASFVPGEPSTQDGNGHGTHVAGTIAALNNSIGVLGVAPSAELYAVKVLGASGSGSVSSIAQGLEWAGNNGCHVANLSLGSPSPSATLEQAVNSATSRGVLVVAASGNSGAGSISYPARYANAMAVGATDQNNNRASFSQYGAGLDIVAPGVNVQSTYPGSTYASLNGTSMATPHVAGAAALVKQKNPSWSNVQIRNHLKNTATSLGSTNLYGSGLVNAEAATR

SEQ ID NO: 60994 - protein, 380 aa, Unidentified
VRSKKLWIVASTALLISVAFSSSIASAAEEAKEKYLIGFNEQEAVSEFVEQVEANDEVAILSEEEEVEIELLHEFETIPVLSVELSPEDVDALELDPAISYIEEDAEVTTMAQSVPWGISRVQAPAAHNRGLTGSGVKVAVLDTGISTHPDLNIRGGASFVPGEPSTQDGNGHGTHVAGTIAALNNSIGVLGVAPSAELYAVKVLGASGSGSVSSIAQGLEWAGNNGMHVANLSLGSPSPSATLEQAVNSATRRGVLVVAASGNSGAGSISYPARYANAMAVGATDQNNNRASFSQYGAGLDIVAPGVNVQSTYPGSTYASLNGTSMATPHVAGAAALVKQKNPSWSNVQIRNHLKNTATSLGSTNLYGSGLVNAEAATR

SEQ ID NO: 60995 - protein, 380 aa, Unidentified
VRSKKLWIVASTALLISVAFSSSIASAAEEAKEKYLIGFNEQEAVSEFVEQVEANDEVAILSEEEEVEIELLHEFETIPVLSVELSPEDVDALELDPAISYIEEDAEVTTMAQSVPWGISRVQAPAAHNRGLTGSGVKVAVLDTGISTHPDLNIRGGASFVPGEPSTQDGNGHGTHVAGTIAALNNSIGVLGVAPSAELYAVKVLGASGSGSVSSIAQGLEWAGNNGMHVANLSLGSPSPSATLEQAVNSATSRGVLVVAASGNSGAGSISYPARYANAMAVGATDQNNNRASFSQYGAGLDIVAPGVNVQSTYPGSTYASLNGTSMATPHVAGAAALVKQKNPSWSNVQIRNHLKNTATSLGSTNLYGSGLVNAFAATR

SEQ ID NO: 60996 - protein, 376 aa, Unidentified
LGKIVASTALLISVAFSSSIASAAEEAKEKYLIGFNEQEAVSEFVEQVEANDEVAILSEEEEVEIELLHEFETIPVLSVELSPEDVDALELDPAISYIEEDAEVTTMAQSVPWGISRVQAPAAHNRGLTGSGVKVAVLDTGISTHPDLNIRGGASFVPGEPSTQDGNGHGTHVAGTIAALNNSIGVLGVAPSAELYAVKVLGASGSGSVSSIAQGLEWAGNNGMHVANLSLGSPSPSATLEQAVNSATSRGVLVVAASGNSGAGSISYPARYANAMAVGALTKTNNRASFSQYGAGLDIVAPGVNVQSTYPGSTYASLNGTSMATPHVAGAAALVKQKNPSWSNVQIRNHLKNTATSLGSTNLYGSGLVNAEAATR

SEQ ID NO: 60997 - protein, 274 aa, Bacillus licheniformis
AQVVPYGIPLIKADKVQAQGFKGANVKVAVLDTGIQASHPDLNVVGGASFVAGEAYNTDGNGHGTHVSGTVAALDNETGVLGVAPSVSLYAVKVLNSSGSGSYSGIVSGIEWATTNGMDVINISLGTPSGSTAMKQAVDNAYARGVVVVAAAGNSGSSGNTNTIQYPAKYDSVIAVGAVDSNSQRASFSSVGAELEVMAPGVGVYSTYPTNTYATLSGTSMASPHVAGAAALILSKHPNLSASQVRNRLSSTATYLGPSFYYGKGLINVEAAAQ

SEQ ID NO: 60998 - protein, 274 aa, Bacillus licheniformis
AQTVPYGIPLIKADKVQAQGFKGANVKVAVLDTGIQASHPDLNVVGGASFVAGEAYNTDGNGHGTHVSGTVAALDNNIGVLGVAPDVSLYAVKVLNSSGSGSYSGIVSGIEWATTNGMDVINMSLGSPSGSTAMKQAVDNAYARGVVVVAAAGNSGSSGNTNTIQYPAKYDSVIAVGAVDSNSQRASFSSVGAELEVMAPGVGVYSTYPTNTYATLSGTSMASPHVAGAAALILSKHPNLSASQVRNRLSSTATYLGPSFYYGKGLINVEAAAQ

SEQ ID NO: 60999 - protein, 274 aa, Bacillus licheniformis
AQVVPYGIPLIKADKVQAQGFKGANVKVAVLDTGIQASHPDLNVVGGASFVAGEAYNTDGNGHGTHVSGTVAALDNNTGVLGVAPSVSLYAVKVLNSSGSGSYSGIVSGIEWATTNGMDVINISLGGRSGSTAMKQAVDNAYARGVVVVAAAGNSGSSGNTNTIQYPAKYDSVIAVGAVDSNSQRASFSSVGAELEVMAPGVGVYSTYPTNTYATLSGTSMASPHVAGAAALILSKHPNLSASQVRNRLSSTATYLGDSFYYGHGLINVEAAAQ

SEQ ID NO: 61000 - protein, 274 aa, Bacillus licheniformis
AQVVPYGIPLIKADKVQAQGFKGANVKVAVLDTGIQASHPDLNVVGGASFVAGEAYNTDGNGHGTHVSGTVAALDNNTGVLGVAPSVSLYAVKVLNSSGSGSYSGIVSGIEWATTNGMDVINMSLGSPSGSTAMKQAVDNAYARGVVVVAAAGNSGSSGNTNTIQYPAKYDSVIAVGAVDSNSQRASFSSVGAELEVMAPGVGVYSTYPPNTYATLSGTSMASPHVAGAAALILSKHPNLSASQVRNRLSSTATYLGPSFYYGKGLINVEAAAQ

SEQ ID NO: 61001 - protein, 274 aa, Bacillus licheniformis
AQTVPYGIPLIKADKVQAQGFKGANVKVAVLDTGIQASHPDLNVVGGASFVAGEAYNTDGNGHGTHVSGTVAALDNNIGVLGVAPSVSLYAVKVLNSSGSGSYSGIVSGIEWATTNGMDVINISLGSPSGSTAMKQAVDNAYARGVVVVAAAGNSGSSGNTNTIQYPAKYDSVIAVGAVDSNSQRASFSSVGAELEVMAPGVGVYSTYPTNTYATLSGTSMASPHVAGAAALILSKHPNLSASQVRNRLSSTATYLGDSFYYGKGLINVEAAAQ

SEQ ID NO: 61002 - protein, 274 aa, Bacillus licheniformis
AQVVPYGIPLIKADKVQAQGFKGANVKVAVLDTGIQASHPDLNVVGGASFVAGEAYNTDGNGHGTHVSGTVAALDNNIGVLGVAPSVSLYAVKVLNSSGSGSYSGIVSGIEWATTNGMDVINMSLGSPSGSTAMKQAVDNAYARGVVVVAAAGNSGSSGNTNTIQYPAKYDSVIAVGAVDSNSQRASFSSVGAELEVMAPGVGVYSTYPTNTYATLSGTSMASPHVAGAAALILSKHPNLSASQVRNRLSSTATYLGPSFYYGKGLINVEAAAQ

SEQ ID NO: 61003 - protein, 274 aa, Bacillus licheniformis
AQVVPYGIPLIKADKVQAQGFKGANVKVAVLDTGIQASHPDLNVVGGASFVAGEAYNTDGNGHGTHVAGTVAALDNNTGVLGVAPSVSLYAVKVLNSSGNGSYSNIVSGIEWATTNGMDVINMSLGGPSGSTAMKQAVDNAYARGVVVVAAAGNSGSDGNQNTIAYPAKYDSVIAVGAVDSNSQRASFSSVGAELEVMAPGAGVYSTYPTNTYATLSGTSMASPHVAGAAALILSKHPNLSASQVRNRLSSTATYLGPSFYYGKGLINVEAAAQ

SEQ ID NO: 61004 - protein, 274 aa, Bacillus licheniformis
AQVVPYGIPLIKADKVQAQGFKGANVKVAVLDTGIQASHPDLNVRGGASFVAGEAYNTDGNGHGTHVSGTVAALDNNTGVLGVAPSVSLYAVKVLNSSGSGDYSGIVSGIEWATTNGMDVINMSLGGPSGSTAMKQAVDNAYARGVVVVAAAGNSGSSGNDNTIQYPAKYDSVIAVGAVDSNSQRASFSSVGAELEVMAPGVGVYSTYPTNTYATLSGTSMASPHVAGAAALILSKHPNLSASQVRNRLSSTATYLGSSFYYGKGLINVEAAAQ

SEQ ID NO: 61005 - protein, 274 aa, Bacillus licheniformis
AQVVPYGIPLIKADKVQAQGFKGANVKVAVLDTGIQASHPDLNVVGGASFVAGEAYNTDGNGHGTHVSGTVAALDNNTGVLGVAPSVSLYAVKVLNSSQSGSYSGIVSGIEWATTNGMDVINMSLGGPSGSTAMKQAVDNAYARGVVVVAAAGNSGSSGNTNTIQYPAKYDSVIAVGAVDSNSQRASFSSVGAELEVMAPGVGVYSTYPPNTYATLSGTSMASPHVAGAAALILSKHPNLSASQVRNRLSSTATYLGPSFYYGKGLINVEAAAQ

SEQ ID NO: 61006 - protein, 274 aa, Bacillus licheniformis
AQVVPYGIPLIKADKVQAQGFKGANVKVAVLDTGIQASHPDLNVVGGASFVRGEAYNTDGNGHGTHVSGTVAALDNNTGVLGVAPSVSLYAVKVLNSSGSGSYSGIVSGIEWATTNGMDVINISLGGRSGSTAMKQAVDNAYARGVVVVAAAGNSGSSGNTNTIQYPAKYDSVIAVGAVDSNSERASFSSVGAELEVMAPGVGVYSTYPTNTYATLSGTSMASPHVAGAAALILSKHPNLSASQVRNRLSSTATYLGDSFYYGKGLINVEAAAQ

SEQ ID NO: 61007 - protein, 274 aa, Bacillus licheniformis
AQVVPYGIPLIKADKVQAQGFKGANVKVAVLDTGIQASHPDLNVVGGASFVAGEAYNTDGNGHGTHVSGTVAALDNNTGVLGVAPSVSLYAVKVLNSSGSGSYSGIVSGIEWATTNGMDVINISLGSPSGSTAMKQAVDNAYARGVVVVAAAGNSGSSGNTNTIEYPAKYDSVIAVGAVDSNSQRASFSSVGAELEVMAPGVGVYSTYPTNTYATLSGTSMASPHVAGAAALILSKHPNLSASQVRNRLSSTATYLGPSFYYGKGLINVEAAAQ

SEQ ID NO: 61008 - protein, 274 aa, Bacillus licheniformis
AQTVPYGIELIKADKVQAQGFKGANVKVAVLDTGIQASHPDLNVVGGASFVAGEAYNTDGNGHGTHVSGTVAALDNNIGVLGVAPSVSLYAVKVLNSSGSGSYSGIVSGIEWATTNGMDVINMSLGSPSGSTAMKQAVDNAYARGVVVVAAAGNSGSSGNTNTIQYPAKYDSVIAVGAVDSNSQRASFSSVGAELEVMAPGVGVYSTYPTNTYATLSGTSMASPHVAGAAALILSKHPNLSASQVRNRLSSTATYLGPSFYYGKGLINVEAAAQ

SEQ ID NO: 61009 - protein, 274 aa, Bacillus licheniformis
AQVVPYGIPLIKADKVQAQGFKGANVKVAVLDTGIQASHPDLNVVGGASFVAGEAYNTDGNGHGTHVSGTVAALDNNTGVLGVAPSVSLYAVKVLNSSGSGSYSGIVSGIEWATTNGMDVINISLGSPSGSTAMKQAVDNAYARGVVVVAAAGNSGSSGNTNTIQYPAKYDSVIAVGAVDSNSQRASFSSVGAELEVMAPGVGVYSTYPTNTYATLSGTSMASPHVAGAAALILSKHPNLSASQVRNRLSSTATYLGPSFYYGKGLINVEAAAQ

SEQ ID NO: 61010 - protein, 274 aa, Bacillus licheniformis
AQVVPYGIPLIKADKVQAQGFKGANVKVAVLDTGIQASHPDLNVVGGASFVAGEAYNTDGNGHGTHVSGTVAALDNNTGVLGVAPSVSLYAVKVLNSSGSGSYSGIVSGIEWATTNGMDVINISLGVPSGSTAMKQAVDNAYARGVVVVAAAGNSGSSGNTNTIQYPAKYDSVIAVGAVDSNSQRASFSSVGAELEVMAPGVGVYSTYPTNTYATLSGTSMASPHVAGAAALILSKHPNLSASQVRNRLSSTATYLGPSFYYGKGLINVEAAAQ

SEQ ID NO: 61011 - protein, 274 aa, Bacillus licheniformis
AQVVPYGIPLIKADKVQAQGFKGANVKVAVLDTGIQASHPDLNVVGGASFVAGEAYNTDGNGHGTHVSGTVAALDNNTGVLGVAPSVSLYAVKVLNSSGSGSYSGIVSGIEWATTNGMDVINISLGGPSGSTAMKNAVDNAYARGVVVVAAAGNNGSSGNTNTIQYPAKYDSVIAVGAVDSNSQRASFSSVGAELEVMAPGAGVYSTYPTNTYATLSGTSMASPHVAGAAALILSKHPNLSNSQVRNRLSSTATYLGSSFYYGKGLINVEAAAQ

SEQ ID NO: 61012 - protein, 274 aa, Bacillus licheniformis
AQTVPYGIPLIKADKVQAQGFKGQNVKVAVLDTGIQASHPDLNVVGGASFVAGEAYNTDGNGHGTHVSGTVAALDNNIGVLGVAPSVSLYAVKVLNSSGSGSYSGIVSGIEWATTNGMDVINMSLGSPSGSTAMKQAVDNAYARGVVVVAAAGNSGSSGNTNTIQYPAKYDSVIAVGAVDSNSQRASFSSVGAELEVMAPGVGVYSTYPTNTYATLSGTSMASPHVAGAAALILSKHPNLSASQVRNRLSSTATYLGPSFYYGKGLINVEAAAQ

SEQ ID NO: 61013 - protein, 274 aa, Bacillus licheniformis
AQVVPYGIPLIKADKVQAQGFKGANVKVAVLDTGIQASHPDLNVVGGASFVAGEAYNTDGNGHGTHVSGTVAALDNNTGVLGVAPSVSLYAVKVLNSSQSGSYSGIVSGIEWATTNGMDVINMSLGSPSGSTAMKQAVDNAYARGVVVVAAAGNSGSSGNTNTIQYPAKYDSVIAVGAVDSNSQRASFSSVGAELEVMAPGVGVYSTYPTNTYATLSGTSMASPHVAGAAALILSKHPNLSASQVRNRLSSTATYLGPSFYYGKGLINVEAAAQ

SEQ ID NO: 61014 - protein, 274 aa, Bacillus licheniformis
AQTVPYGIPLIKADKVQAQGFKGANVKVAVLDTGIQASHPDLNVVGGASFVAGEAYNTDGNGHGTHVSGTVAALDNNIGVLGVAPSVSLYAVKVLNSSGSGSYSGIVSGIEWATTNGMDVINMSLGSPSGSTAMKQAVDNAYARGVVVVAAAGNSGSSGNTNTIQYPAKYDSVIAVGAVDSNSQRASFSSVGAELEVMAPGVGVYSTYPPNTYATLSGTSMASPHVAGAAALILSKHPNLSASQVRNRLSSTATYLGPSFYYGKGLINVEAAAQ

SEQ ID NO: 61015 - protein, 274 aa, Bacillus licheniformis
AQTVPYGIPLIKADKVQAQGFKGANVKVAVLDTGIQASHPDLAVRGGASFVAGEAYNTDGNGHGTHVAGTVAALDNHTGVLGVAPSTSLYAVKVLNSSGSGSYSGIVSGIEWATTNGMDVINISLGGASGSTAMKRAVDNAYARGVVVVAAAGNSGSSGNTNTIAYPAKYDSVIAVGAVDSNSQRAPFSSVGAELEVMAPGAGVYSTYPTNTYATLNGTSMASPHVAGAAALILSKHPSLSASQVRNRLSSTATYLGPSFYYGKGLINVEAAAQ

SEQ ID NO: 61016 - protein, 274 aa, Bacillus licheniformis
AQVVPYGIPLIKADKVQAQGFKGANVKVAVLDTGIQASHPDLNVVGGASFVAGEAYNTDGNGHGTHVSGTVAALDNNTGVLGVAPSVSLYAVKVLNSSGSGSYSGIVSGIEWATTNGMDVINISLGTPSGSTAMKQAVDNAYARGVVVVAAAGNSGSSGNTNTIQYPAKYDSVIAVGAVDSNSQRASFSSVGAELEVMAPGVGVYSTYPPNTYATLSGTSMASPHVAGAAALILSKHPNLSASQVRNRLSSTATYLGSSFYYGKGLINVEAAAQ

SEQ ID NO: 61017 - protein, 274 aa, Bacillus licheniformis
AQVVPYGIPLIKADKVQAQGFKGANVKVAVLDTGIQASHPDLNVVGGASFVAGEAYNTDGNGHGTHVSGTVAALDNETGVLGVAPSVSLYAVKVLNSSGSGSYSGIVSGIEWATTNGMDVINISLGSPSGSTAMKQAVDNAYARGVVVVAAAGNSGSSGNTNTIQYPAKYDSVIAVGAVDSNSQRASFSSVGAELEVMAPGVGVYSTYPTNTYATLSGTSMASPHVAGAAALILSKHPNLSASQVRNRLSSTATYLGPSFYYGKGLINVEAAAQ

SEQ ID NO: 61018 - protein, 274 aa, Bacillus licheniformis
AQVVPYGIPLIKADKVQAQGFKGANVKVAVLDTGIQASHPDLNVVGGASFVAGEAYNTDGNGHGTHVSGTVAALDNNTGVLGVAPSVSLYAVKVLNSSGSGSYSGIVSGIEWATTNGMDVINISLGTPSGSTAMKQAVDNAYARGVVVVAAAGNSGSSGNTNTIQYPAKYDSVIAVGAVDSNSQRASFSSVGAELEVMAPGVGVYSTYPTNTYATLSGTSMASPHVAGAAALILSKHPNLSASQVRNRLSSTATYLGDSFYYGKGLINVEAAAQ

SEQ ID NO: 61019 - protein, 274 aa, Bacillus licheniformis
AQVVPYGIPLIKADKVQAQGFKGANVKVAVLDTGIQASHPDLNVVGGASFVAGEAYNTDGNGHGTHVSGTVAALDNNIGVLGVAPSVSLYAVKVLNSSSSGSYSGIVSGIEWATTNGMDVINMSLGSPSGSTAMKQAVDNAYARGVVVVAAAGNSGSSGNTNTIQYPAKYDSVIAVGAVDSNSNRASFSSVGAELEVMAPGAGVYSTYPPNTYATLNGTSMASPHVAGAAALILSKHPNLSGSQVRNRLSSTATYLGPSFYYGKGLINVEAAAQ

SEQ ID NO: 61020 - protein, 274 aa, Bacillus licheniformis
AQVVPYGIPLIKADKVQAQGFKGANVKVAVLDTGIQASHPDLNVVGGASFVAGEAYNTDGNGHGTHVSGTVAALDNNTGVLGVAPSVSLYAVKVLNSSGSGSYSGIVSGIEWATTNGMDVINISLGSPSGSTAMKQAVDNAYARGVVVVAAAGNSGSSGNTNTIQYPAKYDSVIAVGAVDSNSQRASFSSVGAELEVMAPGVGVYSTYPTNTYATLSGTSMASPHVAGAAALILSKHPNLSASQVRNRLSSTATYLGDSFYYGKGLINVEAAAQ

SEQ ID NO: 61021 - protein, 274 aa, Bacillus licheniformis
AQVVPYGIPLIKADKVQAQGFKGANVKVAVLDTGIQASHPDLNVVGGASFVAGEAYNTDGNGHGTHVSGTVAALDNNTGVLGVAPSVSLYAVKVLNSSGSGSYSGIVHGIEWATTNGMDVINMSLGSPSGSTAMKQAVDNAYARGVVVVAAAGNSGSSGNTNTIQYPAKYDSVIAVGAVDSNSQRASFSSVGAELEVMAPGVGVYSTYPTNTYATLSGTSMASPHVAGAAALILSKHPNLSASQVRNRLSSTATYLGPSFYYGKGLINVEAAAQ

SEQ ID NO: 61022 - protein, 274 aa, Bacillus licheniformis
AQVVPYGIPLIKADKVQAQGFKGANVKVAVLDTGIQASHPDLNVVGGASFVAGEAYNTDGNGHGTHVSGTVAALDNNTGVLGVAPSVSLYAVKVLNSSGSGSYSGIVSGIEWATTNGMDVINISLGGPSGSTAMKQAVDNAYARGVVVVAAAGNSGSSGNTNTIQYPAKYDSVIAVGAVDSNSQRASFSSVGAELEVMAPGVGVYSTYPPNTYATLSGTSMASPHVAGAAALILSKHPNLSASQVRNRLSSTATYLGPSFYYGKGLINVEAAAQ

SEQ ID NO: 61023 - protein, 274 aa, Bacillus licheniformis
AQTVPYGIELIKADKVQAQGFKGANVKVAVLDTGIQASHPDLAVRGGASFVAGEAYNTDGNGHGTHVAGTVAALDNSTGVLGVAPSSSLYAVKVLNSSGSGSYSGIVSGIEWATTNGMDVINISLGGASGSTAMKRAVDNAYARGVVVVAAAGNSGSSGNTNTIQYPAKYDSVIAVGAVDSNSNRAPFSSVGAELEVMAPGAGVYSTYPTNTYATLSGTSMASPHVAGAAALILSKHPNLSASQVRNRLSSTATYLGPSFYYGKGLINVEAAAQ

SEQ ID NO: 61024 - protein, 274 aa, Bacillus licheniformis
AQVVPYGIPLIKADKVQAQGFKGANVKVAVLDTGIQASHPDLNVVGGASFVAGEAYNTDGNGHGTHVSGTVAALDNNTGVLGVAPSVSLYAVKVLNSSGSGSYSGIVSGIEWATTNGMDVINISLGTASGSTAMKQAVDNAYARGVVVVAAAGNSGSSGNTNTIEYPAKYDSVIAVGAVDSNSQRASFSSVGAELEVMAPGVGVYSTYPTNTYATLSGTSMASPHVAGAAALILSKHQNLSASQVRNRLSSTATYLGPSFYYGKGLINVEAAAQ

SEQ ID NO: 61025 - protein, 274 aa, Bacillus licheniformis
AQTVPYGIPLIKADKVQAQGFKGANVKVAVLDTGIQASHPDLNVVGGASFVAGEAYNTDGNGHGTHVSGTVAALDNNIGVLGVAPSVSLYAVKVLNSSGSGSYSGIVSGIEWATTNGMDVINMSLGSPSGSTAMKQAVDNAYARGVVVVAAAGNSGSSGNTNTIQYPAKYDSVIAVGAVDSNSQRASFSSVGAELEVMAPGVGVYSTYPTNTYATQSGTSMASPHVAGAAALILSKHPNLSASQVRNRLSSTATYLGPSFYYGKGLINVEAAAQ

SEQ ID NO: 61026 - protein, 274 aa, Bacillus licheniformis
AQVVPYGIPLIKADKVQAQGFKGANVKVAVLDTGAQASHPDLNVVGGASFVAGEAYNTDGNGHGTHVAGTVAALDNNTGVLGVAPSSSLYAVKVLNSSGSGSYSGIVSGIEWATTNGMDVINISLGGPSGSTAMKQAVDNAYARGVVVVAAAGNSGSSGNTNTIQYPAKYDSVIAVGAVDSNSQRASFSSVGAELEVMAPGVGVYSTYPTNTYATLSGTSMASPHVAGAAALILSKHPNLSGSQVRNRLSSTATYLGSSFYYGKGLINVEAAAQ

SEQ ID NO: 61027 - protein, 274 aa, Bacillus licheniformis
AQVVPYGIPLIKADKVQAQGFKGANVKVAVLDTGAQASHPDLNVVGGASFVAGEAYNTDGNGHGTHVSGTVAALDNNTGVLGVAPSSSLYAVKVLNSSGSGSYSGIVSGIEWATTNGMDVINISLGGPSGSTAMKQAVDNAYARGVLVVAAAGNSGSSGNTNTIQYPAKYDSVIAVGAVDSNSNRASFSSVGAELEVMAPGVGVYSTYPTNTYATLSGTSMASPHVAGAAALILSKHPNLSASQVRNRLSSTATYLGSSFYYGKGLINVEAAAQ

SEQ ID NO: 61028 - protein, 274 aa, Bacillus licheniformis
AQVVPYGIPLIKADKVQAQGFKGANVKVAVLDTGIQASHPDLNVVGGASFVAGEAYNTDGNGHGTHVSGTVAALDNNTGVLGVAPSVSLYAVKVLNSSGSGSYSGIVSGIEWATTNGMDVINISLGTPSGSTAMKQAVDNAYARGVVVVAAAGNSGSSGNTNTIQYPAKYDSVIAVGAVDSNSQRASFSSVGAELEVMAPGVGVYSTYPTNTYATLSGTSMASPHVAGAAALILSKHPNLSASQVRNRLSSTATYLGPSFYYGKGLINVEAAAQ

SEQ ID NO: 61029 - protein, 274 aa, Bacillus licheniformis
AQVVPYGIPLIKADKVQAQGFKGANVKVAVLDTGIQASHPDLNVVGGASFVAGEAYNTDGNGHGTHVSGTVAALDNNIGVLGVAPSVSLYAVKVLNSSGSGSYSGIVSGIEWATTNGMDVINMSLGSPSGSTAMKQAVDNAYARGVVVVAAAGNSGSSGNTNTIQYPAKYDSVIAVGAVDSNSQRASFSSVGAELEVMAPGVGVYSTYPTNTYATLSGTSMASPHVAGAAALILSKHPNLSASQVRNRLSSTATYLGDSFYYGKGLINVEAAAQ

SEQ ID NO: 61030 - protein, 273 aa, Bacillus licheniformis
QVVPYGIPLIKADKVQAQGFKGANVKVAVLDTGAQASHPDLNVVGGASFVAGEAYNTDGNGHGTHVAGTVAALDNNIGVLGVAPHVSLYAVKVLNSSGSGSYSGIVSGIEWATFNGMDVINMSLGGASGSTAMKQAVDNAYARGVVVVAAAGNSGSSGNTNTIQYPAKYDSVIAVGAVDSNSQRASFSSVGAELEVMAPGAGVYSTYPTNTYATLSGTSMASPHVAGAAALIWSKHPNLSASQVRNRLSSTATYLGPSFYYGKGLINVEAAAQ

SEQ ID NO: 61031 - protein, 273 aa, Bacillus licheniformis
QTVPYGIPLIKADKVQAQGFKGANVKVAVLDTGIQASHPDLNVVGGASFVAGEAYNTDGNGHGTHVAGTVAALDNTTGVLGVAPSVSLYAVKVLNSSGSGSYSAIVSGIEWATTTGMDVINMSLGGASVSTAMKQAVDHAYARGAVVVSSAGNSGSSGNTNTIGYPAKYDSVIAVGAVDSNSNRASFSSVGAELEVMAPGAGVYSTYPTNTYATLNGTSMASPHVAGAAALILSKHPNLSASQVRTRLSRTATYLGSSFSYGRGLINVEAAAQ

SEQ ID NO: 61032 - protein, 272 aa, Bacillus licheniformis
AQTVPYGIPLIKADKVQAQGAKGANVKVAVLDTGIQASHPNLNVVGGASAVAGQAYNTDGNGHGTHVAGTVAALNNTTGVLGVAPSVSLYAVKVLNSSGSGSYSGIVSGIQWATTNGMDVINMSLGGASGSTAMKQAVDNAYARGVVVVAAAGNSGNSGSTNTIGYPAKYDSVIAVGAVDSNSNRASASSVGAELEVMAPGAGVYSTYPTNTYATLNGTSMASPHVAGAALILSKHPNLSASQVRNRLSTATYLGSSAYYGKGLINVQAAAQ

SEQ ID NO: 61033 - protein, 272 aa, Bacillus licheniformis
QVVPYGIPLIKADKVQAQGFKGANVKAAVLDTGAQASHPDLNVVGGASFVAGEAYNTDGNGHGTHVSGTVAALDNNTGVLGVAPHVSLYAVKVLNSSGSGSYSGIVSGIEWATFNGMDVINMSLGGASGSTAMKQAVDNAYARGVVVVAAAGNSGSSGNTNTIGYPAKYDSVIAVGAVDSNSNRASFSSVGAELEVMAPGAGVYSTYPTNTYATLSGTSMASPHVAGAAALILSKHPSLSASQVRNRLGSTATYLGPSFYYGKGLINVEAAA

SEQ ID NO: 61034 - protein, 272 aa, Bacillus licheniformis
QTVPYGIPLIKADKVQAQGFKGANVKVAVLDTGIQTSHPDLNVVGGASFVAGEAYNTDGNGHGTHVAGTVAALDNNIGVLGVAPHVSLYAVKVLNSSGSGSYSGIVSGIEWATTNGMDVINISLGGASGSTAMKQAVDNAYARGVVVVAAAGNSGSSGNTNTIQYPAKYDSVIAVGAVDSNSQRASFSSVGAELEVMAPGVGVYSTYPTNTYATLNGTSMASPHVAGAAALILSKHPSLSASQVRNRLGSTATYLGPSFYYGKGLINVEAAA

SEQ ID NO: 61035 - protein, 222 aa, Unidentified
AQSVPWGISRVQAPAAHNRGLTGSGVKVAVLDTGISTHPDLNIRGGASFVPGEPSTQDGNGHGTHVAGTIAALNNSIGVLGVAPSAELYAVKVLGASGSGSVSSIAQGLEWAGNNGMHVANLSLGSPSPSATLEQAVNSATSRGVLVVAASGNSGAGSISYPARYANAMAVGATDQNNNRASFSQYGAGLDIVAPGVNVQSTYPGCFVAGTMILTVAGLVAI

SEQ ID NO: 61036 - protein, 269 aa, Unidentified
AQSVPWGISRVQAPAAHNRGLAGSGVKVAVLDTGISTHPDLNIRGGASFVPGEPSTQDGNGHGTHVAGTIAALNNSIGVLGVAPSAELYAVKVLGASGGGAISSIAQGLEWAGNNGMHVANLSLGSPSPSATLEQAVNSATSRGVLVVAASGNSGEESISYPARYANAMAVGATDQNNNRASFSQYGAGLDIVAPGVNVQSTYPGSTYASLNGTSMATPHVAGAAVLVKQKNPSWSNVRIRDRLKNTATSLGSTNLYGSGLVNAEAATR

SEQ ID NO: 61037 - protein, 269 aa, Unidentified
AQSVPWGISRVQAPAAHNRGLAGSGVKVAVLDTGISTHPDLNIRGGASFVPGEPSTQDGNGHGTHVAGTIAALNNSIGVLGVAPSAELYAVKVLGASGGGAISSIAQGLEWAGNNGMHVANLSLGSPSPSATLEQAVNSATSRGVLVVAASGNSGADSISYPARYANAMAVGATDQNNNRADFSQYGAGLDIVAPGVNVQSTYPGSTYASLNGTSMATPHVAGAATLVKQKNPSWSNVVIRDHLKNTATSLGSTNLYGSGLVNAHAATR

SEQ ID NO: 61038 - protein, 269 aa, Unidentified
AQSVPWGISRVQAPAAHNRRLTGSGVKVAVLDTGISTHPDLNIRGGASFVPGEPSTQDGNGHGTHVAGTIAALNNSIGVLGVAPSAELYAVKVLGASGAGAISSIAQGLEWAGANGMHVANLSLGSPSPSATLEQAVNSATSRGVLVVAASGNSGAGSISYPARYANAMAVGATDQDNNRASFSQYGAGLDIVAPGVNVQSTYPGSAYFSLNGTSMATPHVAGAAVLVKQKNPSWSNVRIRNHLKNTATSLGSTNLYGSGLVNAEAATR

SEQ ID NO: 61039 - protein, 269 aa, Unidentified
AQSVPWGISRVQAPAAHNRGLAGSGVKVAVLDTGISTHPDLNIRGGASFVPGEPSTQDGNGHGTHVAGTIAALDNSIGVLGVAPSAELYAVKVLGASGGGAISSIAQGLEWAGNNGMHVANLSLGSPSPSATLEQAVNSATSRGVLVVAASGNSGADSISYPARYANAMAVGATDQNNNRASFSQYGAGLDIVAPGVNVQSTYPGSTYASLNGTSMATPHVAGAAVLVKQKNPSWSNVRIRDHLKNTATSLGSTNLYGSGLVNAFAATR

SEQ ID NO: 61040 - protein, 269 aa, Unidentified
AQSVPWGISRVQAPAAHNRGLAGSGVKVAVLDTGISTHPDLNIRGGASFVPGEPSTQDGNGHGTHVAGTIAALNNSIGVLGVAPSAELYAVKVLGASGGGAISSIAQGLEWAGNNGMHVANLSLGSPSPSATLEQAVNSATSRGVLVVAASGNSGADSISYPARYANAMAVGATDQNNNRAEFSQYGAGLDIVAPGVNVQSTYPGSTYASLNGTSMATPHVAGAALLVKQKNPSWSNVRIRHHLKNTATSLGSTNLYGSGLVNALAATR

SEQ ID NO: 61041 - protein, 269 aa, Unidentified
AQSVPWGISRVQAPAAHNRGLTGSGVKVAVLDTGISTHPDLNIRGGASFVPGEPSTQDGNGHGTHAAGTIAALDNSIGVLGVAPSAELYAVKVLGASGSGAISSIAQGLEWAGNNGMHVANLSLGSPSPSATLEQAVNSATSRGVLVVAASGNSGADSISYPARYANAMAVGATDQNNNRASFSQYGAGLDIVAPGVNVQSTYPGSRYASLNGTSMATPHVAGAAVLVKHKNPSWSNVRIRNHLKNTATSLGSANLYGSGLVNAEAATR

SEQ ID NO: 61042 - protein, 269 aa, Unidentified
AQSVPWGISRVQAPAAHNRGLTGSGVKVAVLDTGISTHPDLNIRGGASFVPGEPSTQDGNGHGTHAAGTIAALNNSIGVLGVAPSAELYAVKVLGASGSGAISSIAQGLEWAGNNGMHVANLSLGSPSPSATLEQAVNSATSRGVLVVAASGNSGADSISYPARYANAMAVGATDQNNNRASFSQYGAGLDIVAPGVNVQSTYPGSTYRSLNGTSMATPHVAGAAVLVKHKNPSWSNVRIRDHLKKTATSLGSTNLYGSGLVNAEAATR

SEQ ID NO: 61043 - protein, 269 aa, Unidentified
AQSVPWGISRVQAPAAHNRGSAGGGVKVAVLDTGISTHPDLNIRGGASFVPGEPSTQDGNGHGTHVAGTIAALDNNIGVLGVAPSAELYAVKVLGASGGGAISSIAQGLEWAGNNGMHVANLSLGAPSPSATLEQAVNSATSRGVLVVAASGNSGAGSISYPARYANAMAVGATDQNNNRASFSQYGAGLDIVAPGVNVQSTYPGSTYASLNGTSMATPHVAGAAVLVKQKNPSWSNVQIRNHLKNTATSLGSTNLYGSGLVNAEAATR

SEQ ID NO: 61044 - protein, 269 aa, Unidentified
AQSVPWGISRVQAPAAHNRGLAGRGVKVAVLDTGISTHPDLNIRGGASFVPGEPSTQDGNGHGTHVAGTIAALNNSIGVLGVAPSAELYAVKVLGASGGGAISSIAQGLEWAGNNGMHVANLSLGSPSPSATLEQAVNSATSRGVLVVAASGNSGAGSISYPARYANAMAVGATDQNNNRADFSQYGAGLDIVAPGVNVQSTYPGSTYASLNGTSMATPHVAGAAVLVKQKNPSWSNVRIRDRLKNTATSLGSTNLYGSGLVNAEAATR

SEQ ID NO: 61045 - protein, 269 aa, Unidentified
AQSVPWGISRVQAPAAHNRGLQGSGVKVAVLDTGISTHPDLNIRGGASFVPGEPSTQDGNGHGTHVAGTIAALNNSIGVLGVAPSAELYAVKVLGASGGGAISSIAQGLEWAGNNGMHVANLSLGSPSPSATLEQAVNSATSRGVLVVAASGNSGADSISYPARYANAMAVGATDQNNNRADFSQYGAGLDIVAPGVNVQSTYPGSTYASLNGTSMATPHVAGAATLVKQKNPSWSNVTIRDHLKNTATSLGSTNLYGSGLVNALAATR

SEQ ID NO: 61046 - protein, 269 aa, Unidentified
AQSVPWGISRVQAPAAHNRRLWGSGVKVAVLDTGISTHPDLNIRGGASFVPGEPSTQDGNGHGTHVAGTIAALNNSIGVLGVAPSAELYAVKVLGASGGGAISSIAQGLEWAGANGMHVANLSLGSPSPSATLEQAVNSATSRGVLVVAASGNSGAGSISYPARYANAMAVGATDQDNNRASFSQYGAGLDIVAPGVNVQSTYPGSAYASLNGTSMATPHVAGAAVLVKQKNPSWSNVRIRNHLKNTATSLGSTNLYGSGLVNAEAATR

SEQ ID NO: 61047 - protein, 269 aa, Unidentified
AQSVPWGISRVQAPAAHNRGLAGSGVKVAVLDTGISTHPDLNIRGGASFVPGEPSTQDGNGHGTHVAGTIAALNNSIGVLGVAPSAELYAVKVLGASGGGAISSIAQGLEWAGNNGMHVANLSLGSPSPSATLEQAVNSATSRGVLVVAASGNSGADSISYPARYANAMAVGATDQNNNRADFSQYGAGLDIVAPGVNVQSTYPGSTYASLNGTSMATPHVAGAASLVKQKNPSWSNVTIRDHLKNTATSLGSTNLYGSGLVNATAATR

SEQ ID NO: 61048 - protein, 269 aa, Unidentified
AQSVPWGISRVQAPAAHNRGLAGSGVKVAVLDTGISTHPDLNIRGGASFVPGEPSTQDGNGHGTHVAGTIAALNNSIGVLGVAPSAELYAVKVLGASGGGAISSIAQGLEWAGLNVMHVANLSLGSPSPSATLEQAVNSATSRGVLVVAASGNSGAGSISYPARYANAMAVGATDQNNNRASFSQYGAGLDIVAPGVNVQSTVPQSAYASLNGTSMATPHVAGAAVLVKQKNPSWSNVQIRNHLKNTATSLGSTNLYGSGLVNAEAATR

SEQ ID NO: 61049 - protein, 269 aa, Unidentified
AQSVPWGISRVQAPAAHNRGLWGSGVKVAVLDTGISTHPDLNIRGGASFVPGEPSTQDGNGHGTHVAGTIAALDNNIGVLGVAPRAELYAVKVLGASGSGSVSSIAQGLEWAGNNRMHVANLSLGRQAPSATLEQAVNSATSRGVLVVAASGNSGAGSISYPARYANAMAVGATDQNNNRASFSQYGPGLDIVAPGVNVQSTYPGSTYASLNGTSMATPHVAGAAALVKQKNPSWSNVQIRNHLKNTATSLGSTNLYGSGLVNADAATR

SEQ ID NO: 61050 - protein, 269 aa, Unidentified
AQSVPWGISRVQAPAAHNRRLWGSGVKVAVLDTGISTHPDLNIRGGASFVPGEPSTQDGNGHGTHVAGTIAALNNSIGVLGVAPSAELYAVKVLGASGAGAISSIAQGLEWAGNNGMHVANLSLGSPSPSATLEQAVNSATSRGVLVVAASGNSGAGSISYPARYANAMAVGATDQDNNRASFSQYGAGLDIVAPGVNVQSTYPGSAYFSLNGTSMATPHVAGAAVLVKQKNPSWSNVRIRNHLKNTATSLGSTNLYGSGLVNAEAATR

SEQ ID NO: 61051 - protein, 269 aa, Unidentified
AQSVPWGISRVQAPAAHNRGLTGSGVKVAVLDTGISTHPDLNIRGGASFVPGEPSTQDGNGHGTHVAGTIAALNNSIGVLGVAPSAELYAVKVLGASGSGAISSIAQGLEWAGNNGMHVANLSLGSPSPSATLEQAVNSATSRGVLVVAASGNSGADSISYPARYANAMAVGATDQNNNRASFSQYGAGLDIVAPGVNVRSTYPGSTYASENGTSMATPHVAGAAVLVKHKNPSWSNVRIRDHLKKTATSLGSTNLYGSGLVNAEAATR

SEQ ID NO: 61052 - protein, 269 aa, Unidentified
AQSVPWGISRVQAPAAHNRGLAGSGVKVAVLDTGISTHPDLNIRGGASFVPGEPSTQDGNGHGTHVAGTIAALDNNIGVLGVAPSAELYAVKVLAASGGGAISSIAQGLEWAGNNGMHVANLSLGAPSPSATLEQAVNSATSRGVLVVAASGNSGAGSISYPARYANAMAVGATDQNNNRASFSQYGAGLDIVAPGVNVQSTYPGSTYASLNGTSMATPHVAGAAVLVKQKNPSWSNVRIRNHLKNTATSLGSTNLYGSGLVNAEAATR

SEQ ID NO: 61053 - protein, 269 aa, Unidentified
AQSVPWGISRVQAPAAHNRGLAGRGVKVAVLDTGISTHPDLNIRGGASFVPGEPSTQDGNGHGTHVAGTIAALNNSIGVLGVAPSAELYAVKVLGASGDGAISSIAQGLEWAGNNGMHVANLSLGSPSPSATLEQAVNSATSRGVLVVAASGNSGADSISYPARYANAMAVGATDQNNNRADFSQYGAGLDIVAPGVNVQSTYPGSTYASLNGTSMATPHVAGAAVLVKQKNPSWSNVRIRDHLKNTATSLGSTNLYGSGLVNAEAATR

SEQ ID NO: 61054 - protein, 269 aa, Unidentified
AQSVPWGISRVQAPAAHNRGLTGSGVKVAVLDTGISTHPDLNIRGGASFVPGEPSTQDGNGHGTHAAGTIAALNNSIGVLGVAPSAELYAVKVLGASGSGAISSIAQGLEWAGNNGMHVANLSLGSPSPSATLEQAVNSATSRGVLVVAASGNSGADSISYPARYANAMAVGATDQNNNRASFSQYGAGLDIVAPGVNVQSTYPGSTYASLNGTSMATPHVAGAAVLVKHKNPSWSNVRIRDHLKKTAVSLGSTNLYGSGLVNAEAATR

SEQ ID NO: 61055 - protein, 269 aa, Unidentified
AQSVPWGISRVQAPAAHNRGLAGVGVKVAVLDTGISTHPDLNIRGGASFVPGEPSTQDGNGHGTHVAGTIAALNNSIGVLGVAPSAELYAVKVLSASGNGAISSIAQGLEWAGNNGMNVANLSLGAPSPSATLEQAVNSATSRGVLVVAASGNSGAGSISYPARYANAMAVGATDQNNNRASFSQYGAGLDIVAPGVNVQSTYPGSTYASLNGTSMATPHVAGAAVLVKQKNPSWSNVRIRNHLKNTATSLGSTNLYGSGLVNAEAATR

SEQ ID NO: 61056 - protein, 269 aa, Unidentified
AQSVPWGISRVQAPAAHRRGLTGSGVKVAVLDTGISTHPDLDITGGASFVPGEPSTQDGNGHGTHVAGTIAALNNRIGVLGVAPSAELYAVKVLGASGGGAISSIAQGLEWAGNNGMHVANLSLGSPSPSATLEQAVNSATSRGVLVVAASGNSGAGSISYPARYANAMAVGATDQNNNRASFSQYGAGLDIVAPGVNVQSTYPGSTYASLNGTSMATPHVAGAAVLVKQKNPSWSNVRIRNHLKNTATSLGSTNLYGSGLVNAEDATR

SEQ ID NO: 61057 - protein, 269 aa, Unidentified
AQSVPWGISRVQAPASHNRGLTGFGVKVAVLDSGISTHPDLNIRGGASFVPGEPSTQDGNGHGTHVAGTIAALNNSIGVLGVAPSAELYAVKVLGASGGGAISSIAQGLEWAGLNGMHVANLSLGSPSPSATLEQAVNSATSRGVLVVAASGNSGAGSISYPARYANAMAVGATDQNNNRASFSQYGAGLDIVAPGVNVQSTVPQSTYASLNGTSMATPHVAGAAVLVKQKNPSWSNVQIRNHLKNTATSLGSTNLYGSGLVNAEAATR

SEQ ID NO: 61058 - protein, 269 aa, Unidentified
AQSVPWGISRVQAPAAHNRRLWGSGVKVAVLDTGISTHPDLNIRGGASFVPGEPSTQDGNGHGTHVAGTIAALNNSIGVLGVAPSAELYAVKVLGASGAGAISSIAQGLEWAGANGMHVANLSLGSPSPSATLEQAVNSATSRGVLVVAASGNSGAGSISYPARYANAMAVGATDQDNNRASFSQYGAGLDIVAPGVNVQSTYPGSAYASLNGTSMATPHVAGAAVLVKQKNPSWSNVRIRNHLKNTATSLGSTNLYGSGLVNAEAATR

SEQ ID NO: 61059 - protein, 269 aa, Unidentified
AQSVPWGISRVQAPAAHNRGLQGSGVKVAVLDTGISTHPDLNIRGGASFVPGEPSTQDGNGHGTHVAGTIAALNNSIGVLGVAPSAELYAVKVLGASGGGAISSIAQGLEWAGNNGMHVANLSLGSPSPSATLEQAVNSATSRGVLVVAASGNSGADSISYPARYANAMAVGATDQNNNRADFSQYGAGLDIVAPGVNVQSTYPGSTYASLNGTSMATPHVAGAATLVKQKNPSWSNVVIREHLKNTATSLGSTNLYGSGLVNALAATR

SEQ ID NO: 61060 - protein, 269 aa, Unidentified
AQSVPWGISRVQAPAAHNRGLTGSGVKVAVLDTGISTHPDLNIRGGASFVPGEPSTQDGNGHGTHAAGTIAALNNSIGVLGVAPSAELYAVKVLGASGSGAISSIAQGLEWAGNNGMHVANLSLGSPSPSATLEQAVNSATSRGVLVVAASGNSGADSISYPARYANAMAVGATDQNNNRASFSQYGAGLDIVAPGVNVQSTYPGSTYASLNGTSMATPHVAGAAVLVKHKNPSWSNVRIRDHLVKTATSLGSTNLYGSGLVNAEAATR

SEQ ID NO: 61061 - protein, 269 aa, Unidentified
AQSVPWGISRVQAPAAHNRGLQGSGVKVAVLDTGISTHPDLNIRGGASFVPGEPSTQDGNGHGTHVAGTIAALNNSIGVLGVAPSAELYAVKVLGASGGGAISSIAQGLEWAGNNGMHVANLSLGSPSPSATLEQAVNSATSRGVLVVAASGNSGADSISYPARYANAMAVGATDQNNNRADFSQYGAGLDIVAPGVNVQSTYPGSTYASLNGTSMATPHVAGAALLVKQKNPSWSNVVIREHLKNTATSLGSTNLYGSGLVNALAATR

SEQ ID NO: 61062 - protein, 269 aa, Unidentified
AQSVPWGISRVQAPAAHNRGLQGSGVKVAVLDTGISTHPDLNIRGGASFVPGEPSTQDGNGHGTHVAGTIAALNNSIGVLGVAPSAELYAVKVLGASGGGAISSIAQGLEWAGNNGMHVANLSLGSPSPSATLEQAVNSATSRGVLVVAASGNSGADSISYPARYANAMAVGATDQNNNRADFSQYGAGLDIVAPGVNVQSTYPGSTYASLNGTSMATPHVAGAATLVKQKNPSWSNVRIRDHLKNTATSLGSTNLYGSGLVNAHAATR

SEQ ID NO: 61063 - protein, 269 aa, Unidentified
AQSVPWGISRVQAPAAHNRGLTGSGVKVAVLDTGISTHPDLNIRGGASFVPGEPSTQDGNGHGTHAAGTIAALNNSIGVLGVAPSAELYAVKVLGASGSGAISSIAQGLEWAGNNGMHVANLSLGSPSPSATLEQAVNSATSRGVLVVAASGNSGADSISYPARYANAMAVGATDQNNNRASFSQYGAGLDIVAPGVNVQSTYPGSRYASLNGTSMATPHVAGAAVLVKHKNPSWSNVRIRDHLKKTATSLGSTNLYGSGLVNAEAATR

SEQ ID NO: 61064 - protein, 269 aa, Unidentified
AQSVPWGISRVQAPAAHNRGLTGSGVKVAVLDTGISTHPDLFIRGGASFVPGEPSTQDGNGHGTHVAGTIAALNNSIGVLGVAPSAELYAVKVLGASGGGAISSIAQGLEWAGNNGMHVANLSLGSPSPSATLEQAVNSATSRGVLVVAASGNSGADSISYPARYANAMAVGATDQNNNRADFSQYGAGLDIVAPGVNVQSTYPGSTYASLNGTSMATPHVAGAAVLVKQKNPSWSNVRIRDHLKNTATSLGSTNLYGSGLVNAFAATR

SEQ ID NO: 61065 - protein, 269 aa, Unidentified
AQSVPWGISRVQAPAAHNRGLAGSGVKVAVLDTGISTHPDLNIRGGASFVPGEPSTQDGNGHGTHVAGTIAALNNSIGVLGVAPSAELYAVKVLGASGGGAISSIAQGLEWAGNNGMHVANLSLGSPSPSATLEQAVNSATSRGVLVVAASGNSGADSISYPARYANAMAVGATDQNNNRAEFSQYGAGLDIVAPGVNVQSTYPGSTYASLNGTSMATPHVAGAATLVKQKNPSWSNVTIRHHLKNTATSLGSTNLYGSGLVNATAATR

SEQ ID NO: 61066 - protein, 269 aa, Unidentified
AQTIPWGISRVQAPAAHNRGWTGSGVKVAVLDTGISTHPDLNIRGGASFVPGEPSTQDGNGHGTHVAGTIAALNNSIGVLGVAPSAELYAVKVLGADGEGAISSIAQGLEWAANNGMHVANLSLGSPSPSATLEQAVNSATSRGVLVVAASGNSGASSISYPARYANAMAVGATDQNNNRASFSQYGAGLDIVAPGVNIQSTYPGSTYASLNGTSMATPHVAGAAALVKQKNPSWSNVQIRNHLKNTATSLGSTNLYGSGLVNAEAATR

SEQ ID NO: 61067 - protein, 269 aa, Unidentified
AQSVPWGISRVQAPAAHRRGLTGRGVKVAVLDTGISTHPDLNIRGGASFVPGEPSTQDGNGHGTHVAGTIAALDNSIGVLGVAPSAELYAVKVLGASGSGSVSSIAQGLEWAGANGMHVANLSLGSPSPSATLEQAVNSATSRGVLVVAASGNSGAGSISYPARYANAMAVGATDQDNNRASFSQYGAGLDLVAPGVNVQSTYPQSAYFSLNGTSMATPHVAGAAALVKQKNPSWSNVQIRNRLKNTATSLGSTNLYGSGLVNAEAATR

SEQ ID NO: 61068 - protein, 269 aa, Unidentified
AQSVPWGISRVQAPAAHNRGLAGSGVKVAVLDTGISTHPDLNIRGGASFVPGEPSTQDGNGHGTHVAGTIAALNNSIGVLGVAPSAELYAVKVLGASGGGAISSIAQGLEWAGNNGMHVANLSLGSPSPSATLEQAVNSATSRGVLVVAASGNSGADSISYPARYANAMAVGATDQNNNRASFSQYGAGLDIVAPGVNVQSTYPGSTYASENGTSMATPHVAGAAVLVKQKNPSWSNVRIRDHLKNTATSLGSTNLYGSGLVNAFAATR

SEQ ID NO: 61069 - protein, 269 aa, Unidentified
AQSVPWGISRVQAPAAHNRGLTGSGVKVAVLDTGISTHPDLNIRGGASFVPGEPSTQDGNGHGTHVAGTIAALNNSIGVLGVAPSAELYAVKVLGASGGGAISSIAQGLEWAGNNGMHVANLSLGSPSPSATLEQAVNSATSRGVLVVAASGNSGADSISYPARYANAMAVGATDQNNDRASFSQYGAGLDIVAPGVNVQSTYPGSTYASLNGTSMATPHVAGAAVLVKHKNPSWSNVRIRDHLKKTATSLGSTNLYGSGLVNAEAATR

SEQ ID NO: 61070 - protein, 269 aa, Unidentified
AQSVPWGISRVQAPAAHNRGLTGRGVKVAVLDTGISTHPDLNIRGGASFVPGEPSTQDGNGHGTHVAGTIAALDNNIGVLGVAPRAELYAVKVLGASGSGSVSSIAQGLEWAGNNRMHVANLSLGLQAPSATLEQAVNSATSRGVLVVAASGNSGAGSISYPARYANAMAVGATDQNNNRASFSQYGAGLDIVAPGVNVLSTYPGSTYASLNGTSMATPHVAGAAALVKQKNPSWSNVQIRNRLKNTATSLGSTNLYGSGLVNAEAATR

SEQ ID NO: 61071 - protein, 269 aa, Unidentified
AQSVPWGISRVQAPAAHRRRLTGSGVKVAVLDTGISTHPDLNITGGASFVPGEPSTQDGNGHGTHVAGTIAALDNSIGVLGVAPSAELYAVKVLGASGGGAISSIAQGLEWAGNNGMHVANLSLGSPSPSATLEQAVNSATSRGVLVVAASGNSGAGSISYPARYANAMAVGATDQNNNRASFSQYGAGLDIVAPGVNVQSTYPGSTYASLNGTSMATPHVAGAAVLVKQKNPSWSNVRIRNRLKNTATSLGSTNLYGSGLVNAEAATR

SEQ ID NO: 61072 - protein, 269 aa, Unidentified
AQSVPWGISRVQAPAAHNRGLRGSGVKVAVLDTGISTHPDLNIRGGASFVPGEPSTQDGNGHGTHVAGTIAALNNNIGVLGVAPSAELYAVKVLAASGQGAISSIAQGLEWAGLNGMHVANLSLGAPSPSATLEQAVNSATSRGVLVVAASGNSGAGSISYPARYANAMAVGATDQNNNRASFSQYGAGLDIVAPGVNVQSTYPGSTYASLNGTSMATPHVAGAAVLVKQKNPSWSNVRIRNHLKNTATSLGSTNLYGSGLVNAEAATR

SEQ ID NO: 61073 - protein, 269 aa, Unidentified
AQSVPWGISRVQAPASHNRGLAGSGVKVAVLDTGISTHPDLNIRGGASFVPGEPSTQDGNGHGTHVAGTIAALNNSIGVLGVAPSAELYAVKVLGASGGGAISSIAQGLEWAGANVMHVANLSLGSPSPSATLEQAVNSATSRGVLVVAASGNSGAGSISYPARYANAMAVGATDQNNNRASFSQYGAGLDIVAPGVNVQSTAPGSAYASLNGTSMATPHVAGAAVLVKQKNPSWSNVQIRNHLKNTATSLGSTNLYGSGLVNAEAATR

SEQ ID NO: 61074 - protein, 269 aa, Unidentified
AQSVPWGISRVQAPAAHNRGLAGSGVKVAVLDTGISTHPDLNIRGGASFVPGEPSTQDGNGHGTHVAGTIAALNNSIGVLGVAPSAELYAVKVLGASGGGAISSIAQGLEWAGNNGMHVANLSLGSESPSATLEQAVNSATSRGVLVVAASGNSGAGSISYPARYANAMAVGATDQNNNRADFSQYGAGLDIVAPGVNVQSTYPGSTYASLNGTSMATPHVAGAAVLVKQKRPSWSNVRIRDHLKNTATSLGSTNLYGSGLVNAEAATR

SEQ ID NO: 61075 - protein, 269 aa, Unidentified
AQSVPWGISRVQAPAAHNRGLTGSGVKVAVLDTGISTHPDLNIRGGASFVPGEPSTQDGNGHGTHVAGTIAALNNSIGVLGVAPSAELYAVKVLGVSGGGAISSIAQGLEWAGNNGMHVANLSLGSPSPSATLEQAVNSATSRGVLVVAASGNSGADSISYPARYANAMAVGATDQNNNRASFSQYGAGLDIVAPGVNVQSTYPGSTYASLNGTSMATPHVAGAAVLVKHKNPSWSNVRIRDHLKKTATSLGSTNLYGSGLVNAEAATR

SEQ ID NO: 61076 - protein, 269 aa, Unidentified
AQSVPWGISRVQAPAAHNRGLAGSGVKVAVLDTGISTHPDLNIRGGASFVPGEPSTQDGNGHGTHVAGTIAALNNSIGVLGVAPSAELYAVKVLGASGGGAISSIAQGLEWAGNNGMHVANLSLGSPSPSATLEQAVNSATSRGVLVVAASGNSGADSISYPARYANAMAVGATDQNNNRAEFSQYGAGLDIVAPGVNVQSTYPGSTYASLNGTSMATPHVAGAATLVKQKNPSWSNVTIRHHLKNTATSLGSTNLYGSGLVNAFAATR

SEQ ID NO: 61077 - protein, 269 aa, Unidentified
AQSVPWGISRVQAPAAHNRGLQGSGVKVAVLDTGISTHPDLNIRGGASFVPGEPSTQDGNGHGTHVAGTIAALNNSIGVLGVAPSAELYAVKVLGASGGGAISSIAQGLEWAGNNGMHVANLSLGSPSPSATLEQAVNSATSRGVLVVAASGNSGADSISYPARYANAMAVGATDQNNNRAEFSQYGAGLDIVAPGVNVQSTYPGSTYASLNGTSMATPHVAGAATLVKQKNPSWSNVRIRHHLKNTATSLGSTNLYGSGLVNATAATR

SEQ ID NO: 61078 - protein, 269 aa, Unidentified
AQSVPWGISRVQAPAAHNRGLTGSGVKVAVLDTGISTHPDLNIRGGASFVPGEPSTQDGNGHGTHAAGTIAALNNSIGVLGVAPSAELYAVKVLGASGSGAISSIAQGLEWAGNNGMHVANLSLGSPSPSATLEQAVNSATSRGVLVVAASGNSGADSISYPARYANAMAVGATDQNNNRASFSQYGAGLDIVAPGVNVQSTYPGSTYASLNGTSMATPHVAGAAVLVKHKNPSWSNVRIRDHLKKTATSLGSRNLYGSGLVNAEAATR

SEQ ID NO: 61079 - protein, 269 aa, Unidentified
AQSVPWGISRVQAPAAHNRGLQGSGVKVAVLDTGISTHPDLNIRGGASFVPGEPSTQDGNGHGTHVAGTIAALNNSIGVLGVAPSAELYAVKVLGASGGGAISSIAQGLEWAGNNGMHVANLSLGSPSPSATLEQAVNSATSRGVLVVAASGNSGADSISYPARYANAMAVGATDQNNNRAEFSQYGAGLDIVAPGVNVQSTYPGSTYASLNGTSMATPHVAGAASLVKQKNPSWSNVTIREHLKNTATSLGSTNLYGSGLVNATAATR

SEQ ID NO: 61080 - protein, 269 aa, Unidentified
AQSVPWGISRVQAPAAHNRGLAGGGVKVAVLDTGISTHPDLNIRGGASFVPGEPSTQDGNGHGTHVAGTIAALNNSIGVLGVAPSAELYAVKVLAASGQGAISSIAGGLEWAGNNGMHVANLSLGAPSPSATLEQAVNSATSRGVLVVAASGNSGAGSISYPARYANAMAVGATDQNNNRASFSQYGAGLDIVAPGVNVQSTYPGSTYASLNGTSMATPHVAGAAVLVKQKNPSWSNVRIRNHLKNTATSLGSTNLYGSGLVNAEAATR

SEQ ID NO: 61081 - protein, 269 aa, Unidentified
AQSVPWGISRVQAPAAHNRGLAGSGVKVAVLDTGISTHPDLNIRGGASFVPGEPSTQDGNGHGTHVAGTIAALNNSIGVLGVAPSAELYAVKVLGASGGGAISSIAQGLEWAGNNGMHVANLSLGSPSPSATLEQAVNSATSRGVLVVAASGNSGADSISYPARYANAMAVGATDQNNNRADFSQYGAGLDIVAPGVNVQSTYPGSTYASLNGTSMATPHVAGAASLVKQKNPSWSNVRIREHLKNTATSLGSTNLYGSGLVNALAATR

SEQ ID NO: 61082 - protein, 269 aa, Unidentified
AQSVPWGISRVQAPAAHNRGLAGSGVKVAVLDTGISTHPDLNIRGGASFVPGEPSTQDGNGHGTHVAGTIAALNNSIGVLGVAPSAELYAVKVLGASGGGAISSIAQGLEWAGNNGMHVANLSLGSPSPSATLEQAVNSATSRGVLVVAASGNSGAESISYPARYANAMAVGATDQNNNRADFSQYGAGLDIVAPGVNVQSTYPGSTYASLNGTSMATPHVAGAAVLVKQKNPSWSNVRIRDRLKNTATSLGSTNLYGSGLVNAEAATR

SEQ ID NO: 61083 - protein, 269 aa, Unidentified
AQSVPWGISRVQAPAAHNRGLQGSGVKVAVLDTGISTHPDLNIRGGASFVPGEPSTQDGNGHGTHVAGTIAALNNSIGVLGVAPSAELYAVKVLGASGGGAISSIAQGLEWAGNNGMHVANLSLGSPSPSATLEQAVNSATSRGVLVVAASGNSGADSISYPARYANAMAVGATDQNNNRADFSQYGAGLDIVAPGVNVQSTYPGSTYASLNGTSMATPHVAGAAVLVKQKNPSWSNVRIRDHLKNTATSLGSTNLYGSGLVNALAATR

SEQ ID NO: 61084 - protein, 269 aa, Unidentified
AQSVPWGISRVQAPAAHNRGLQGSGVKVAVLDTGISTHPDLNIRGGASFVPGEPSTQDGNGHGTHVAGTIAALNNSIGVLGVAPSAELYAVKVLGASGGGAISSIAQGLEWAGNNGMHVANLSLGSPSPSATLEQAVNSATSRGVLVVAASGNSGADSISYPARYANAMAVGATDQNNNRADFSQYGAGLDIVAPGVNVQSTYPGSTYASLNGTSMATPHVAGAASLVKQKNPSWSNVTIREHLKNTATSLGSTNLYGSGLVNALAATR

SEQ ID NO: 61085 - protein, 269 aa, Unidentified
AQSVPWGISRVQAPAAHNRGLTGSGVKVAVLDTGISTHPDLNIRGGASFVPGEPSTQDGNGHGTHAAGTIAALNNSIGVLGVAPSAELYAVKVLGASGSGAISSIAQGLEWAGNNGMHVANLSLGSPSPSATLEQAVNSATSRGVLVVAASGNSGADSISYPARYANAMAVGATDQNNNRASFSQYGAGLDIVAPGVNVQSTYPGSTYASLSGTSMATPHVAGAAVLVKHKNPSWSNVRIRDHLKKTATSLGSTNLYGSGLVNAEAATR

SEQ ID NO: 61086 - protein, 269 aa, Unidentified
AQSVPWGISRVQAPAAHNRGLTGRGVKVAVLDTGISTHPDLRIRGGASFVPGEPSTQDGNGHGTHVAGTIAALDNRIGVLGVAPSAELYAVKVLGASGGGAISSIAQGLEWAGNNGMHVANLSLGSPSPSATLEQAVNSATSRGVLVVAASGNSGAGSISYPARYANAMAVGATDQNNNRASFSQYGAGLDIVAPGVNVQSTYPGSTYASENGTSMATPHVAGAAVLVKQKNPSWSNVRIRNHLKNTATSLGSTNLYGSGLVNAEAATR

SEQ ID NO: 61087 - protein, 269 aa, Unidentified
AQSVPWGISRVQAPAAHRRRLTGRGVKVAVLDTGISTHPDLNIRGGASFVPGEPSTQDGNGHGTHVAGTIAALDNSIGVLGVAPSAELYAVKVLGASGAGSVSSIAQGLEWAGNNGMHVANLSLGSPSPSATLEQAVNSATSRGVLVVAASGNSGAGSISYPARYANAMAVGATDQDNNRASFSQYGAGLDLVAPGVNVQSTYPQSTYFSLNGTSMATPHVAGAAALVKQKNPSWSNVQIRNRLKNTATSLGSTNLYGSGLVNAEAATR

SEQ ID NO: 61088 - protein, 269 aa, Unidentified
AQSVPWGISRVQAPAAHKRGLTGSGVKVAVLDTGISTHPDLNIRGGASFVPGEPSTQDGNGHGTHVAGTIAALDNRIGVLGVAPSAELYAVKVLGASGGGAISSIAQGLEWAGNNGMHVANLSLGSPSPSATLEQAVNSATSRGVLVVAASGNSGAGSISYPARYANAMAVGATDQNNNRASFSQYGAGLDIVAPGVNVQSTYPGSTYASENGTSMATPHVAGAAVLVKQKNPSWSNVRIRNHLKNTATSLGSTNLYGSGLVRAEAATR

SEQ ID NO: 61089 - protein, 269 aa, Unidentified
AQSVPWGISRVQAPAAHRRRLWGRGVKVAVLDTGISTHPDLNIRGGASFVPGEPSTQDGNGHGTHVAGTIAALDNSIGVLGVAPSAELYAVKVLGASGAGSVSSIAQGLEWAGNNGMHVANLSLGSPSPSATLEQAVNSATSRGVLVVAASGNSGAGSISYPARYANAMAVGATDQNNNRASFSQYGAGLDLVAPGVNVQSTYPQSAYASLNGTSMATPHVAGAAALVKQKNPSWSNVQIRNRLKNTATSLGSTNLYGSGLVNAEAATR

SEQ ID NO: 61090 - protein, 269 aa, Unidentified
AQSVPWGISRVQAPAAHNRGLQGSGVKVAVLDTGISTHPDLNIRGGASFVPGEPSTQDGNGHGTHVAGTIAALNNSIGVLGVAPSAELYAVKVLGASGGGAISSIAQGLEWAGNNGMHVANLSLGSPSPSATLEQAVNSATSRGVLVVAASGNSGADSISYPARYANAMAVGATDQNNNRAEFSQYGAGLDIVAPGVNVQSTYPGSTYASLNGTSMATPHVAGAALLVKQKNPSWSNVTIRDHLKNTATSLGSTNLYGSGLVNAHAATR

SEQ ID NO: 61091 - protein, 269 aa, Unidentified
AQSVPWGISRVQAPAAHNRGLAGSGVKVAVLDTGISTHPDLNIRGGASFVPGEPSTQDGNGHGTHVAGTIAALNNSIGVLGVAPSAELYAVKVLGASGGGAISSIAQGLEWAGNNGMHVANLSLGSPSPSATLEQAVNSATSRGVLVVAASGNSGADSISYPARYANAMAVGATDQNNNRAEFSQYGAGLDIVAPGVNVQSTYPGSTYASLNGTSMATPHVAGAAVLVKQKNPSWSNVTIRHHLKNTATSLGSTNLYGSGLVNAHAATR

SEQ ID NO: 61092 - protein, 269 aa, Unidentified
AQSVPWGISRVQAPAAHNRGLQGSGVKVAVLDTGISTHPDLNIRGGASFVPGEPSTQDGNGHGTHVAGTIAALNNSIGVLGVAPSAELYAVKVLGASGGGAISSIAQGLEWAGNNGMHVANLSLGSPSPSATLEQAVNSATSRGVLVVAASGNSGADSISYPARYANAMAVGATDQNNNRADFSQYGAGLDIVAPGVNVQSTYPGSTYASLNGTSMATPHVAGAASLVKQKNPSWSNVTIRDHLKNTATSLGSTNLYGSGLVNAHAATR

SEQ ID NO: 61093 - protein, 269 aa, Unidentified
AQSVPWGISRVQAPAAHNRGLTGSGVKVAVLDTGISTHPDLNIRGGASFVPGEPSTQDGNGHGTHVAGTIAALNNSIGVLGVAPSAELYAVKVLGASGSGAISSIAQGLEWAGNNGMHVANLSLGSPSPSATLEQAVNSATSRGVLVVAASGNSGADSISYPARYANAMAVGATDQNNNRASFSQYGAGLDIVAPGVNIQSTWIGSTYASLNGTSMATPHVAGAAVLVKHKNPSWSNVRIRNHLKNTATSVGSTNLYGSGLVNAEAATR

SEQ ID NO: 61094 - protein, 269 aa, Unidentified
AQSVPWGISRVQAPAAHNRGLTGSGVKVAVLDTGISTHPDLNIRGGASFVPGEPSTQDGNGHGTHAAGTIAALNNSIGVLGVAPSAELYAVKVLGASGSGAISSIAQGLEWAGNNGMHVANLSLGSPSPSATLEQAVNSATSRGVLVVAASGNSGADSISYPARYANAMAVGATDQNNNRASFSQYGAGLDIVAPGVNVQSTYRGSTYASLNGTSMATPHVAGAAVLVKHKNPSWSNVRIRDHLKKTATSLGSTNLYGSGLVNAEAATR

SEQ ID NO: 61095 - protein, 269 aa, Bacillus lentus
AQSVPWGISRVQAPAAHNRGLTGSGVKVAVLDTGISTHEDLNVRGGVSFVPGETSYQDGNGHGTHVAGTIAALNNSIGVVGVAPSADLYAVKVLGASGEGSVSSIAQGLEWAGQNGMHVANLSLGSPSPSATLEQAVNSATSRGVLVVAASGNSGAGSISYPARYANAMAVGATDQNNNRASFSQYGAGLDIVAPGVNVQSTYPGSTYASLNGTSMATPHVAGAAALVKQKNPSWSNVQIRDHLKNTATSLGSTNLYGSGLVNAEAATR

SEQ ID NO: 61096 - protein, 269 aa, Unidentified
AQSVPWGISRVQAPAAHNRGLAGSGVKVAVLDTGISTHPDLNIRGGASFVPGEPSTQDGNGHGTHVAGTIAALNNSIGVLGVAPSAELYAVKVLGASGGGAISSIAQGLEWAGNNGMHVANLSLGNESPSATLEQAVNSATSRGVLVVAASGNSGAGSISYPARYANAMAVGATDQNNNRASFSQYGAGLDIVAPGVNVQSTYPGSTYASLNGTSMATPHVAGAAVLVKQKRPSWSNVRIRDHLKNTATSLGSTNLYGSGLVNAEAATR

SEQ ID NO: 61097 - protein, 269 aa, Unidentified
AQSVPWGISRVQAPAAHNRGLQGSGVKVAVLDTGISTHPDLNIRGGASFVPGEPSTQDGNGHGTHVAGTIAALNNSIGVLGVAPSAELYAVKVLGASGGGAISSIAQGLEWAGNNGMHVANLSLGSPSPSATLEQAVNSATSRGVLVVAASGNSGADSISYPARYANAMAVGATDQNNNRADFSQYGAGLDIVAPGVNVQSTYPGSTYASLNGTSMATPHVAGAAVLVKQKNPSWSNVTIRDHLKNTATSLGSTNLYGSGLVNATAATR

SEQ ID NO: 61098 - protein, 269 aa, Unidentified
AQSVPWGISRVQAPAAHNRGLTGSGVKVAVLDTGISTHPDLNIRGGASFVPGEPSTQDGNGHGTHAAGTIAALNNSIGVLGVAPSAELYAVKVLGASGSGAISSIAQGLEWAGNNGMHVANLSLGSPSPSATLEQAVNSATSRGVLVVAASGNSGADSISYPARYANAMAVGATDQNNNRASFSQYGAGLDIVAPGVNVQSTYPGSTYASLNGTSMATPHVAGAAVLVKHKNPSWSNVRIRDHLKKTATSLGSENLYGSGLVNAEAATR

SEQ ID NO: 61099 - protein, 269 aa, Unidentified
AQSVPWGISRVQAPAAHNRGLQGSGVKVAVLDTGISTHPDLNIRGGASFVPGEPSTQDGNGHGTHVAGTIAALNNSIGVLGVAPSAELYAVKVLGASGGGAISSIAQGLEWAGNNGMHVANLSLGSPSPSATLEQAVNSATSRGVLVVAASGNSGADSISYPARYANAMAVGATDQNNNRAEFSQYGAGLDIVAPGVNVQSTYPGSTYASLNGTSMATPHVAGAAVLVKQKNPSWSNVRIREHLKNTATSLGSTNLYGSGLVNATAATR

SEQ ID NO: 61100 - protein, 269 aa, Unidentified
AQSVPWGISRVQAPAAHNRGLAGRGVKVAVLDTGISTHPDLNIRGGASFVPGEPSTQDGNGHGTHVAGTIAALNNSIGVLGVAPSAELYAVKVLGASGGGAISSIAQGLEWAGNNGMHVANLSLGNPSPSATLEQAVNSATSRGVLVVAASGNSGAGSISYPARYANAMAVGATDQNNNRADFSQYGAGLDIVAPGVNVQSTYPGSTYASLNGTSMATPHVAGAAVLVKQKNPSWSNVRIRDHLKNTATSLGSTNLYGSGLVNAEAATR

SEQ ID NO: 61101 - protein, 269 aa, Unidentified
AQSVPWGISRVQAPAAHNRRLTGGGVKVAVLDTGISTHPDLRIRGGASFVPGEPSTQDGNGHGTHVAGTIAALNNNIGVLGVAPSAELYAVKVLGASGQGSVSSIAGGLEWAGLNGMHVANLSLGAPSPSATLEQAVNSATSRGVLVVAASGNSGAGSISYPARYANAMAVGATDQNNNRASFSQYGAGLDIVAPGVNVRSTYPGSTYASQNGTSMATPHVAGAAALVKQKNPSWSNVQIRNHLKNTATSLGSTNLYGSGLVNAEAATR

SEQ ID NO: 61102 - protein, 269 aa, Unidentified
AQSVPWGISRVQAPAAHNRGLQGSGVKVAVLDTGISTHPDLNIRGGASFVPGEPSTQDGNGHGTHVAGTIAALNNSIGVLGVAPSAELYAVKVLGASGGGAISSIAQGLEWAGNNGMHVANLSLGSPSPSATLEQAVNSATSRGVLVVAASGNSGADSISYPARYANAMAVGATDQNNNRADFSQYGAGLDIVAPGVNVQSTYPGSTYASLNGTSMATPHVAGAAVLVKQKNPSWSNVTIRHHLKNTATSLGSTNLYGSGLVNALAATR

SEQ ID NO: 61103 - protein, 269 aa, Unidentified
AQSVPWGISRVQAPAAHNRGLRGGGVKVAVLDTGISTHPDLNIRGGASFVPGEPSTQDGNGHGTHVAGTIAALNNNIGVLGVAPSAELYAVKVLGASGQGAISSIAQGLEWAGLNGMHVANLSLGAPSPSATLEQAVNSATSRGVLVVAASGNSGAGSISYPARYANAMAVGATDQNNNRASFSQYGAGLDIVAPGVNVQSTYPGSTYASLNGTSMATPHVAGAAVLVKQKNPSWSNVRIRNHLKNTATSLGSTNLYGSGLVNAEAATR

SEQ ID NO: 61104 - protein, 269 aa, Unidentified
AQSVPWGISRVQAPAAHRRGLWGRGVKVAVLDTGISTHPDLNIRGGASFVPGEPSTQDGNGHGTHVAGTIAALDNSIGVLGVAPSAELYAVKVLGASGAGSVSSIAQGLEWAGANGMHVANLSLGSPSPSATLEQAVNSATSRGVLVVAASGNSGAGSISYPARYANAMAVGATDQDNNRASFSQYGAGLDIVAPGVNVQSTYPGSAYFSLNGTSMATPHVAGAAALVKQKNPSWSNVQIRNRLKNTATSLGSTNLYGSGLVNAEAATR

SEQ ID NO: 61105 - protein, 269 aa, Unidentified
AQSVPWGISRVQAPAAHNRGLTGSGVKVAVLDTGISTHPDLNIRGGASFVPGEPSTQDGNGHGTHAAGTIAALNNSIGVLGVAPSAELYAVKVLGASGSGAISSIAQGLEWAGNNGMHVANLSLGSPSPSATLEQAVNSATSRGVLVVAASGNSGADSISYPARYANAMAVGATDQNNNRASFSQYGAGLDIVAPGVNVQSTFPGSTYASLNGTSMATPHVAGAAVLVKHKNPSWSNVRIRDHLKKTATSLGSTNLYGSGLVNAEAATR

SEQ ID NO: 61106 - protein, 269 aa, Unidentified
AQSVPWGISRVQAPAAHNRGLTGSGVKVAVLDTGISTHPDLNIRGGASFVPGEPSTQDGNGHGTHVAGTIAALNNSIGVLGVAPSAELYAVKVLGASGGGAISSIAQGLEWAGNNGMHVANLSLGSPSPSATLEQAVNSATSRGVLVVAASGNSGEGSISYPARYANAMAVGATDQDNNRADFSQYGAGLDIVAPGVNVQSTYPGSTYASLNGTSMATPHVAGAAVLVKQKNPSWSNVRIRDRLKNTATSLGSTNLYGSGLVNAEAATR

SEQ ID NO: 61107 - protein, 269 aa, Unidentified
AQSVPWGISRVQAPAAHNRGLAGSGVKVAVLDSGISTHPDLNIRGGASFVPGEPSTQDGNGHGTHVAGTIAALNNSIGVLGVAPSAELYAVKVLGASGGGAISSIAQGLEWAGLNGMHVANLSLGSPSPSATLEQAVNSATSRGVLVVAASGNSGAGSISYPARYANAMAVGATDQNNNRASFSQYGAGLDIVAPGVNVQSTVPQSAYASLNGTSMATPHVAGAAVLVKQKNPSWSNVQIRNHLKNTATSLGSTNLYGSGLVNAEAATR

SEQ ID NO: 61108 - protein, 269 aa, Unidentified
AQSVPWGISRVQAPAAHNRGLAGSGVKVAVLDTGISTHPDLNIRGGASFVPGEPSTQDGNGHGTHVAGTIAALNNSIGVLGVAPSAELYAVKVLGASGGGAISSIAQGLEWAGNNGMHVANLSLGSPSPSATLEQAVNSATSRGVLVVAASGNSGADSISYPARYANAMAVGATDQNNNRADFSQYGAGLDIVAPGVNVQSTYPGSTYASLNGTSMATPHVAGAATLVKQKNPSWSNVRIRDHLKNTATSLGSTNLYGSGLVNAFAATR

SEQ ID NO: 61109 - protein, 269 aa, Unidentified
AQSVPWGISRVQAPAAHNRKLTGSGVKVAVLDTGISTHPDLNIRGGASFVPGEPSTQDGEGHGTHVAGTIAALNNNIGVLGVAPSAELYAVKVLAASGGGSVSSIAGGLEWAGLNGMHVANLSLGAPSPSATLEQAVNSATSRGVLVVAASGNSGAGSISYPARYANAMAVGATDQNNNRADFSQYGAGLDIVAPGVNVQSTYPGSTYASQNGTSMATPHVAGAAALVKQKNPSWSNVQIRNHLKNTATSLGSTNLYGSGLVNAEAATR

SEQ ID NO: 61110 - protein, 269 aa, Unidentified
AQSVPWGISRVQAPAAHNRGLAGGGVKVAVLDTGISTHPDLNIRGGASFVPGEPSTQDGNGHGTHVAGTIAALNNNIGVLGVAPSAELYAVKVLAASGNGAISSIANGLEWAGNNGMHVANLSLGSPSPSATLEQAVNSATSRGVLVVAASGNSGAGSISYPARYANAMAVGATDQNNNRASFSQYGAGLDIVAPGVNVQSTYPGSTYASLNGTSMATPHVAGAAVLVKQKNPSWSNVRIRNHLKNTATSLGSTNLYGSGLVNAEAATR

SEQ ID NO: 61111 - protein, 269 aa, Unidentified
AQSVPWGISRVQAPAAHRRRLTGRGVKVAVLDTGISTHPDLNIRGGASFVPGEPSTQDGNGHGTHVAGTIAALDNSIGVLGVAPSAELYAVKVLGASGAGSVSSIAQGLEWAGANGMHVANLSLGSPSPSATLEQAVNSATSRGVLVVAASGNSGAGSISYPARYANAMAVGATDQNNNRASFSQYGAGLDIVAPGVNVQSTYPQSAYFSLNGTSMATPHVAGAAALVKQKNPSWSNVQIRNRLKNTATSLGSTNLYGSGLVNAEAATR

SEQ ID NO: 61112 - protein, 269 aa, Unidentified
AQSVPWGISRVQAPAAHNRGLAGSGVKVAVLDTGISTHPDLNIRGGASFVPGEPSTQDGNGHGTHVAGTIAALNNSIGVLGVAPSAELYAVKVLGASGGGAISSIAQGLEWAGNNGMHVANLSLGSPSPSATLEQAVNSATSRGVLVVAASGNSGAGSISYPARYANAMAVGATDQNNNRADFSQYGAGLDIVAPGVNVQSTYPGSTYASLNGTSMATPHVAGAAVLVKQKNPSWSNVRIRDHLKNTATSLGSTNLYGSGLVNAFVATR

SEQ ID NO: 61113 - protein, 269 aa, Unidentified
AQSVPWGISRVQAPAAHNRGLQGSGVKVAVLDTGISTHPDLNIRGGASFVPGEPSTQDGNGHGTHVAGTIAALNNSIGVLGVAPSAELYAVKVLGASGGGAISSIAQGLEWAGNNGMHVANLSLGSPSPSATLEQAVNSATSRGVLVVAASGNSGADSISYPARYANAMAVGATDQNNNRADFSQYGAGLDIVAPGVNVQSTYPGSTYASLNGTSMATPHVAGAASLVKQKNPSWSNVVIRHHLKNTATSLGSTNLYGSGLVNALAATR

SEQ ID NO: 61114 - protein, 269 aa, Unidentified
AQSVPWGISRVQAPAAHNRKLTGGGVKVAVLDTGISTHPDLNIRGGASFVPGEPSTQDGEGHGTHVAGTIAALNNSIGVLGVAPSAELYAVKVLSASGNGSVSSIANGLEWAGLNGMHVANLSLGAPSPSATLEQAVNSATSRGVLVVAASGNSGAGSISYPARYANAMAVGATDQNNNRADFSQYGAGLDIVAPGVNVQSTYPGSTYASQNGTSMATPHVAGAAALVKQKNPSWSNVQIRNHLKNTATSLGSTNLYGSGLVNAEAATR

SEQ ID NO: 61115 - protein, 269 aa, Unidentified
AQSVPWGISRVQAPAAHNRGLAGSGVKVAVLDTGISTHPDLNIRGGASFVPGEPSTQDGNGHGTHVAGTIAALDNNIGVLGVAPSAELYAVKVLSASGGGAISSIAQGLEWAGNNGMHVANLSLGSPSPSATLEQAVNSATSRGVLVVAASGNSGAGSISYPARYANAMAVGATDQNNNRASFSQYGAGLDIVAPGVNVQSTYPGSTYASQNGTSMATPHVAGAAVLVKQKNPSWSNVRIRNHLKNTATSLGSTNLYGSGLVNAEAATR

SEQ ID NO: 61116 - protein, 269 aa, Unidentified
AQSVPWGISRVQAPAAHNRGLAGSGVKVAVLDTGISTHPDLNIRGGASFVPGEPSTQDGNGHGTHVAGTIAALNNSIGVLGVAPSAELYAVKVLGASGGGAISSIAQGLEWAGNNGMHVANLSLGSPSPSATLEQAVNSATSRGVLVVAASGNSGADSISYPARYANAMAVGATDQNNNRAEFSQYGAGLDIVAPGVNVQSTYPGSTYASLNGTSMATPHVAGAATLVKQKNPSWSNVVIRDHLKNTATSLGSTNLYGSGLVNATAATR

SEQ ID NO: 61117 - protein, 269 aa, Unidentified
AQSVPWGISRVQAPAAHNRGLQGSGVKVAVLDTGISTHPDLNIRGGASFVPGEPSTQDGNGHGTHVAGTIAALNNSIGVLGVAPSAELYAVKVLGASGGGAISSIAQGLEWAGNNGMHVANLSLGSPSPSATLEQAVNSATSRGVLVVAASGNSGADSISYPARYANAMAVGATDQNNNRAEFSQYGAGLDIVAPGVNVQSTYPGSTYASLNGTSMATPHVAGAATLVKQKNPSWSNVVIREHLKNTATSLGSTNLYGSGLVNALAATR

SEQ ID NO: 61118 - protein, 269 aa, Unidentified
AQSVPWGISRVQAPAAHNRGLAGSGVKVAVLDTGISTHPDLNIRGGASFVPGEPSTQDGNGHGTHVAGTIAALNNSIGVLGVAPSAELYAVKVLGASGGGAISSIAQGLEWAGNNGMHVANLSLGSESPSATLEQAVNSATSRGVLVVAASGNSGEGSISYPARYANAMAVGATDQNNNRASFSQYGAGLDIVAPGVNVQSTYPGSTYASLNGTSMATPHVAGAAVLVKQKNPSWSNVRIRDRLKNTATSLGSTNLYGSGLVNAEAATR

SEQ ID NO: 61119 - protein, 269 aa, Unidentified
AQSVPWGISRVQAPAAHRRGLTGSGVKVAVLDTGISTHPDLNIRGGASFVPGEPSTQDGNGHGTHVAGTIAALDNNIGVLGVAPRAELYAVKVLGASGSGSVSSIAQGLEWAGNNRMHVANLSLGLQAPSATLEQAVNSATSRGVLVVAASGNSGAGSISYPARYANAMAVGATDQNNNRASFSQYGAGLDIVAPGVNVLSTYPGSTYASLNGTSMATPHVAGAAALVKQKNPSWSNVQIRNRLKNTATSLGSTNLYGSGLVNAEAATR

SEQ ID NO: 61120 - protein, 269 aa, Unidentified
AQSVPWGISRVQAPAAHRRRLTGRGVKVAVLDTGISTHPDLNIRGGASFVPGEPSTQDGNGHGTHVAGTIAALDNSIGVLGVAPSAELYAVKVLGASGSGSVSSIAQGLEWAGANGMHVANLSLGSPSPSATLEQAVNSATSRGVLVVAASGNSGAGSISYPARYANAMAVGATDQDNNRASFSQYGAGLDLVAPGVNVQSTYPQSTYFSLNGTSMATPHVAGAAALVKQKNPSWSNVQIRNRLKNTATSLGSTNLYGSGLVNAEAATR

SEQ ID NO: 61121 - protein, 269 aa, Unidentified
AQSVPWGISRVQAPAAHNRKLTGGGVKVAVLDTGISTHPDLNIRGGASFVPGEPSTQDGEGHGTHVAGTIAALNNSIGVLGVAPSAELYAVKVLSASGGGSVSSIAGGLEWAGLNGMHVANLSLGAPSPSATLEQAVNSATSRGVLVVAASGNSGAGSISYPARYANAMAVGATDQNNNRADFSQYGAGLDIVAPGVNVQSTYPGSTYASQNGTSMATPHVAGAAALVKQKNPSWSNVQIRNHLKNTATSLGSTNLYGSGLVNAEAATR

SEQ ID NO: 61122 - protein, 269 aa, Unidentified
AQSVPWGISRVQAPAAHNRGLAGSGVKVAVLDTGISTHPDLNIRGGASFVPGEPSTQDGNGHGTHVAGTIAALNNSIGVLGVAPSAELYAVKVLGASGGGAISSIAQGLEWAGNNGMHVANLSLGSESPSATLEQAVNSATSRGVLVVAASGNSGAGSISYPARYANAMAVGATDQNNNRADFSQYGAGLDIVAPGVNVQSTYPGSTYASLNGTSMATPHVAGAAVLVKQKNPSWSNVRIRDHLKNTATSLGSTNLYGSGLVNAFAATR

SEQ ID NO: 61123 - protein, 269 aa, Unidentified
AQSVPWGISRVQAPAAHNRGLAGFGVKVAVLDSGISTHPDLNIRGGASFVPGEPSTQDGNGHGTHVAGTIAALNNSIGVLGVAPSAELYAVKVLGASGGGAISSIAQGLEWAGLNGMHVANLSLGSPSPSATLEQAVNSATSRGVLVVAASGNSGAGSISYPARYANAMAVGATDQNNNRASFSQYGAGLDIVAPGVNVQSTAPQSTYASLNGTSMATPHVAGAAVLVKQKNPSWSNVQIRNHLKNTATSLGSTNLYGSGLVNAEAATR

SEQ ID NO: 61124 - protein, 269 aa, Unidentified
AQSVPWGISRVQAPAAHNRGLQGSGVKVAVLDTGISTHPDLNIRGGASFVPGEPSTQDGNGHGTHVAGTIAALNNSIGVLGVAPSAELYAVKVLGASGGGAISSIAQGLEWAGNNGMHVANLSLGSPSPSATLEQAVNSATSRGVLVVAASGNSGADSISYPARYANAMAVGATDQNNNRADFSQYGAGLDIVAPGVNVQSTYPGSTYASLNGTSMATPHVAGAAVLVKQKNPSWSNVRIRHHLKNTATSLGSTNLYGSGLVNALAATR

SEQ ID NO: 61125 - protein, 269 aa, Unidentified
AQSVPWGISRVQAPAAHNRGLAGSGVKVAVLDTGISTHPDLNIRGGASFVPGEPSTQDGNGHGTHVAGTIAALNNSIGVLGVAPSAELYAVKVLGASGGGAISSIAQGLEWAGNNGMHVANLSLGSPSPSATLEQAVNSATSRGVLVVAASGNSGADSISYPARYANAMAVGATDQNNNRADFSQYGAGLDIVAPGVNVQSTYPGSTYASLNGTSMATPHVAGAAVLVKQKNPSWSNVRIREHLKNTATSLGSTNLYGSGLVNATAATR

SEQ ID NO: 61126 - protein, 269 aa, Unidentified
AQSVPWGISRVQAPAAHNRGLTGSGVKVAVLDTGISTHPDLNIRGGASFVPGEPSTQDGNGHGTHAAGTIAALNNSIGVLGVAPSAELYAVKVLGASGSGAISSIAQGLEWAGNNGMHVANLSLGSPSPSATLEQAVNSATSRGVLVVAASGNSGADSISYPARYANAMAVGATDQNNNRASFSQYGAGLDIVAPGVNVQSTYPGSTYASLNGTSMATPHVAGAAVLVKHKNPSWSNVRIRDHLKKTATSLGSTDLYGSGLVNAEAATR

SEQ ID NO: 61127 - protein, 269 aa, Unidentified
AQSVPWGISRVQAPAAHNRGLAGSGVKVAVLDTGISTHPDLNIRGGASFVPGEPSTQDGNGHGTHVAGTIAALNNSIGVLGVAPSAELYAVKVLGASGGGAISSIAQGLEWAGLNGMHVANLSLGSPSPSATLEQAVNSATSRGVLVVAASGNSGADSISYPARYANAMAVGATDQNNNRADFSQYGAGLDIVAPGVNVQSTYPGSTYASLNGTSMATPHVAGAAVLVKQKNPSWSNVRIRNHLKNTATSLGSTNLYGSGLVNAFAATR

SEQ ID NO: 61128 - protein, 269 aa, Unidentified
AQSVPWGISRVQAPAAHNRGLQGSGVKVAVLDTGISTHPDLNIRGGASFVPGEPSTQDGNGHGTHVAGTIAALNNSIGVLGVAPSAELYAVKVLGASGGGAISSIAQGLEWAGNNGMHVANLSLGSPSPSATLEQAVNSATSRGVLVVAASGNSGADSISYPARYANAMAVGATDQNNNRADFSQYGAGLDIVAPGVNVQSTYPGSTYASLNGTSMATPHVAGAAVLVKQKNPSWSNVVIREHLKNTATSLGSTNLYGSGLVNATAATR

SEQ ID NO: 61129 - protein, 269 aa, Unidentified
AQTIPWGISRVQAPAAHNRGLTGSGVKVAVLDTGISTHPDLNISGGASFVPGEPSTQDGNGHGTHVAGTIAALNNSIGVLGVAPSAELYAVKVLGADGEGAISSIAQGLEWAGNNGMHVANLSLGSPSPSATLEQAVNSATSRGVLVVAASGNSGASSISYPARYANAMAVGATDQNNNRASFSQYGAGLDIVAPGVNIQSTYPGSTYASLNGTSMATPHVAGAAALVKQKNPAWSNVQIRNHLKNTATSLGSTNLYGSGLVNAEAATR

SEQ ID NO: 61130 - protein, 269 aa, Unidentified
AQSVPWGISRVQAPAAHNRGLAGSGVKVAVLDTGISTHPDLNIRGGASFVPGEPSTQDGNGHGTHVAGTIAALNNSIGVLGVAPSAELYAVKVLGASGGGAISSIAQGLEWAGNNGMHVANLSLGSPSPSATLEQAVNSATSRGVLVVAASGNSGADSISYPARYANAMAVGATDQNNNRADFSQYGAGLDIVAPGVNVQSTYPGSTYASLNGTSMATPHVAGAAVLVKQKNPSWSNVRIRDHLKNTATSLGSTNLYGSGLVNAFAATR

SEQ ID NO: 61131 - protein, 269 aa, Unidentified
AQSVPWGISRVQAPAAHNRKLTGGGVKVAVLDTGISTHPDLNIRGGASFVPGEPSTQDGEGHGTHVAGTIAALNNSIGVLGVAPSAELYAVKVLSASGNGSVSSIAGGLEWAGLNGMHVANLSLGAPSPSATLEQAVNSATSRGVLVVAASGNSGAGSISYPARYANAMAVGATDQNNNRADFSQYGAGLDIVAPGVNVQSTYPGSTYASQNGTSMATPHVAGAAALVKQKNPSWSNVQIRNHLKNTATSLGSTNLYGSGLVNAEAATR

SEQ ID NO: 61132 - protein, 269 aa, Unidentified
AQSVPWGISRVQAPAAHRRGLWGRGVKVAVLDTGISTHPDLNIRGGASFVPGEPSTQDGNGHGTHVAGTIAALDNSIGVLGVAPSAELYAVKVLGASGSGSVSSIAQGLEWAGANGMHVANLSLGSPSPSATLEQAVNSATSRGVLVVAASGNSGAGSISYPARYANAMAVGATDQDNNRASFSQYGAGLDLVAPGVNVQSTYPGSAYFSLNGTSMATPHVAGAAALVKQKNPSWSNVQIRNRLKNTATSLGSTNLYGSGLVNAEAATR

SEQ ID NO: 61133 - protein, 269 aa, Unidentified
AQSVPWGISRVQAPAAHNRGLAGRGVKVAVLDTGISTHPDLNIRGGASFVPGEPSTQDGNGHGTHVAGTIAALNNSIGVLGVAPSAELYAVKVLGASGGGAISSIAQGLEWAGNNGMHVANLSLGSPSPSATLEQAVNSATSRGVLVVAASGNSGEGSISYPARYANAMAVGATDQNNNRASFSQYGAGLDIVAPGVNVQSTYPGSTYASLNGTSMATPHVAGAAVLVKQKNPSWSNVRIRDRLKNTATSLGSTNLYGSGLVNAEAATR

SEQ ID NO: 61134 - protein, 269 aa, Unidentified
AQSVPWGISRVQAPAAHNRGLRGGGVKVAVLDTGISTHPDLNIRGGASFVPGEPSTQDGNGHGTHVAGTIAALNNNIGVLGVAPSAELYAVKVLGASGNGAISSIAQGLEWAGLNGMHVANLSLGAPSPSATLEQAVNSATSRGVLVVAASGNSGAGSISYPARYANAMAVGATDQNNNRASFSQYGAGLDIVAPGVNVQSTYPGSTYASLNGTSMATPHVAGAAVLVKQKNPSWSNVRIRNHLKNTATSLGSTNLYGSGLVNAEAATR

SEQ ID NO: 61135 - protein, 269 aa, Unidentified
AQSVPWGISRVQAPAAHRRGLWGRGVKVAVLDTGISTHPDLNIRGGASFVPGEPSTQDGNGHGTHVAGTIAALDNSIGVLGVAPSAELYAVKVLGASGSGSVSSIAQGLEWAGANGMHVANLSLGSPSPSATLEQAVNSATSRGVLVVAASGNSGAGSISYPARYANAMAVGATDQDNNRASFSQYGAGLDLVAPGVNVQSTYPQSTYFSLNGTSMATPHVAGAAALVKQKNPSWSNVQIRNRLKNTATSLGSTNLYGSGLVNAEAATR

SEQ ID NO: 61136 - protein, 269 aa, Unidentified
AQSVPWGISRVQAPAAHRRGLWGRGVKVAVLDTGISTHPDLNIRGGASFVPGEPSTQDGNGHGTHVAGTIAALDNSIGVLGVAPSAELYAVKVLGASGAGSVSSIAQGLEWAGANGMHVANLSLGSPSPSATLEQAVNSATSRGVLVVAASGNSGAGSISYPARYANAMAVGATDQNNNRASFSQYGAGLDLVAPGVNVQSTYPGSAYFSLNGTSMATPHVAGAAALVKQKNPSWSNVQIRNRLKNTATSLGSTNLYGSGLVNAEAATR

SEQ ID NO: 61137 - protein, 269 aa, Unidentified
AQSVPWGISRVQAPAAHNRGLAGSGVKVAVLDTGISTHPDLNIRGGASFVPGEPSTQDGNGHGTHVAGTIAALNNSIGVLGVAPSAELYAVKVLGASGGGAISSIAQGLEWAGNNGMHVANLSLGSPSPSATLEQAVNSATSRGVLVVAASGNSGADSISYPARYANAMAVGATDQNNNRAEFSQYGAGLDIVAPGVNVQSTYPGSTYASLNGTSMATPHVAGAAVLVKQKNPSWSNVTIRDHLKNTATSLGSTNLYGSGLVNAHAATR

SEQ ID NO: 61138 - protein, 269 aa, Unidentified
AQSVPWGISRVQAPAAHNRGLTGSGVKVAVLDTGISTHPDLNIRGGASFVPGEPSTQDGNGHGTHAAGTIAALNNSIGVLGVAPSAELYAVKVLGASGSGAISSIAQGLEWAGNNGMHVANLSLGSPSPSATLEQAVNSATSRGVLVVAASGNSGADSISYPARYANAMAVGATDQNNNRASFSQYGAGLDIVAPGVNVQSTYPGSTYACLNGTSMATPHVAGAAVLVKHKNPSWSNVRIRDHLKKTATSLGSTNLYGSGLVNAEAATR

SEQ ID NO: 61139 - protein, 269 aa, Unidentified
AQSVPWGISRVQAPAAHNRGLQGSGVKVAVLDTGISTHPDLNIRGGASFVPGEPSTQDGNGHGTHVAGTIAALNNSIGVLGVAPSAELYAVKVLGASGGGAISSIAQGLEWAGNNGMHVANLSLGSPSPSATLEQAVNSATSRGVLVVAASGNSGADSISYPARYANAMAVGATDQNNNRADFSQYGAGLDIVAPGVNVQSTYPGSTYASLNGTSMATPHVAGAATLVKQKNPSWSNVVIRDHLKNTATSLGSTNLYGSGLVNALAATR

SEQ ID NO: 61140 - protein, 269 aa, Unidentified
AQSVPWGISRVQAPAAHNRGLQGSGVKVAVLDTGISTHPDLNIRGGASFVPGEPSTQDGNGHGTHVAGTIAALNNSIGVLGVAPSAELYAVKVLGASGGGAISSIAQGLEWAGNNGMHVANLSLGSPSPSATLEQAVNSATSRGVLVVAASGNSGADSISYPARYANAMAVGATDQNNNRADFSQYGAGLDIVAPGVNVQSTYPGSTYASLNGTSMATPHVAGAATLVKQKNPSWSNVTIREHLKNTATSLGSTNLYGSGLVNAFAATR

SEQ ID NO: 61141 - protein, 269 aa, Unidentified
AQSVPWGISRVQAPAAHNRRLTGRGVKVAVLDTGISTHPDLNIRGGASFVPGEPSTQDGNGHGTHVAGTIAALNNGIGVLGVAPSAELYAVKVLGASGSGSVSSIAQGLEWAGNNSMHVANLSLGSESPSATLEQAVNSATSRGVLVVAASGNSGADSISYPARYANAMAVGATDQNNNRADFSQYGAGLDIVAPGVNVQSTYPGSTYASLNGTSMATPHVAGAAALVKQKNPSWSNVRIRDRLKNTATSLGSTNLYGSGLVNAEAATR

SEQ ID NO: 61142 - protein, 269 aa, Unidentified
AQSVPWGISRVQAPAAHNRRLTGSGVKVAVLDTGISTHPDLNIRGGASFVPGEPSTQDGNGHGTHVAGTIAALNNRIGVLGVAPSAELYAVKVLGASGAGAISSIAQGLEWAGANGMHVANLSLGSPSPSATLEQAVNSATSRGVLVVAASGNSGAGSISYPARYANAMAVGATDQDNNRASFSQYGAGLDIVAPGVNVQSTYPGSAYASLNGTSMATPHVAGAAVLVKQKNPSWSNVRIRNHLKNTATSLGSTNLYGSGLVNAEAATR

SEQ ID NO: 61143 - protein, 269 aa, Unidentified
AQSVPWGISRVQAPAAHNRGLAGSGVKVAVLDTGISTHPDLNIRGGASFVPGEPSTQDGNGHGTHVAGTIAALNNSIGVLGVAPSAELYAVKVLGASGGGAISSIAQGLEWAGNNGMHVANLSLGSPSPSATLEQAVNSATSRGVLVVAASGNSGADSISYPARYANAMAVGATDQNNNRAEFSQYGAGLDIVAPGVNVQSTYPGSTYASLNGTSMATPHVAGAATLVKQKNPSWSNVRIRHHLKNTATSLGSTNLYGSGLVNAFAATR

SEQ ID NO: 61144 - protein, 269 aa, Unidentified
AQSVPWGISRVQAPAAHNRGLAGSGVKVAVLDTGISTHPDLNIRGGASFVPGEPSTQDGEGHGTHVAGTIAALNNSIGVLGVAPSAELYAVKVLGASGGGAISSIAQGLEWAGNNGMHVANLSLGSPSPSATLEQAVNSATSRGVLVVAASGNSGAGSISYPARYANAMAVGATDQNNNRADFSQYGAGLDIVAPGVNVQSTYPGSTYASLNGTSMATPHVAGAAVLVKQKNPSWSNVRIRDHLKNTATSLGSTNLYGSGLVNAFAATR

SEQ ID NO: 61145 - protein, 269 aa, Unidentified
AQSVPWGISRVQAPAAHNRGLTGRGVKVAVLDTGISTHPDLNIRGGASFVPGEPSTQDGNGHGTHVAGTIAALNNSIGVLGVAPSAELYAVKVLGASGGGAISSIAQGLEWAGNNGMHVANLSLGSESPSATLEQAVNSATSRGVLVVAASGNSGEGSISYPARYANAMAVGATDQNNNRASFSQYGAGLDIVAPGVNVQSTYPGSTYASLNGTSMATPHVAGAAVLVKQKNPSWSNVRIRDRLKNTATSLGSTNLYGSGLVNAEAATR

SEQ ID NO: 61146 - protein, 269 aa, Unidentified
AQSVPWGISRVQAPAAHNRGLAGSGVKVAVLDTGISTHPDLNIRGGASFVPGEPSTQDGNGHGTHVAGTIAALNNNIGVLGVAPSAELYAVKVLSASGQGAISSIANGLEWAGNNGMHVANLSLGSPSPSATLEQAVNSATSRGVLVVAASGNSGAGSISYPARYANAMAVGATDQNNNRASFSQYGAGLDIVAPGVNVQSTYPGSTYASQNGTSMATPHVAGAAVLVKQKNPSWSNVRIRNHLKNTATSLGSTNLYGSGLVNAEAATR

SEQ ID NO: 61147 - protein, 269 aa, Unidentified
AQSVPWGISRVQAPAAHNRGLAGGGVKVAVLDTGISTHPDLNIRGGASFVPGEPSTQDGNGHGTHVAGTIAALDNNIGVLGVAPSAELYAVKVLSASGQGAISSIAQGLEWAGNNGMHVANLSLGSPSPSATLEQAVNSATSRGVLVVAASGNSGAGSISYPARYANAMAVGATDQNNNRASFSQYGAGLDIVAPGVNVQSTYPGSTYASLNGTSMATPHVAGAAVLVKQKNPSWSNVRIRNHLKNTATSLGSTNLYGSGLVNAEAATR

SEQ ID NO: 61148 - protein, 269 aa, Unidentified
AQSVPWGISRVQAPAAHNRGLQGSGVKVAVLDTGISTHPDLNIRGGASFVPGEPSTQDGNGHGTHVAGTIAALNNSIGVLGVAPSAELYAVKVLGASGGGAISSIAQGLEWAGNNGMHVANLSLGSPSPSATLEQAVNSATSRGVLVVAASGNSGADSISYPARYANAMAVGATDQNNNRAEFSQYGAGLDIVAPGVNVQSTYPGSTYASLNGTSMATPHVAGAALLVKQKNPSWSNVVIRDHLKNTATSLGSTNLYGSGLVNALAATR

SEQ ID NO: 61149 - protein, 269 aa, Unidentified
AQSVPWGISRVQAPASHNRGLAGSGVKVAVLDTGISTHPDLNIRGGASFVPGEPSTQDGNGHGTHVAGTIAALNNSIGVLGVAPSAELYAVKVLGASGGGAISSIAQGLEWAGANGMHVANLSLGNPSPSATLEQAVNSATSRGVLVVAASGNSGAGSISYPARYANAMAVGATDQNNNRASFSQYGAGLDIVAPGVNVQSTVPQSTYASLNGTSMATPHVAGAAVLVKQKNPSWSNVQIRNHLKNTATSLGSTNLYGSGLVNAEAATR

SEQ ID NO: 61150 - protein, 269 aa, Unidentified
AQSVPWGISRVQAPAAHNRGLAGSGVKVAVLDTGISTHPDLNIRGGASFVPGEPSTQDGNGHGTHVAGTIAALNNSIGVLGVAPSAELYAVKVLGASGGGAISSIAQGLEWAGNNGMHVANLSLGSPSPSATLEQAVNSATSRGVLVVAASGNSGADSISYPARYANAMAVGATDQNNNRADFSQYGAGLDIVAPGVNVQSTYPGSTYASLNGTSMATPHVAGAASLVKQKNPSWSNVVIRDHLKNTATSLGSTNLYGSGLVNAFAATR

SEQ ID NO: 61151 - protein, 269 aa, Unidentified
AQSVPWGISRVQAPAAHNRGLAGSGVKVAVLDTGISTHPDLNIRGGASFVPGEPSTQDGNGHGTHVAGTIAALNNSIGVLGVAPSAELYAVKVLGASGGGAISSIAQGLEWAGNNGMHVANLSLGSPSPSATLEQAVNSATSRGVLVVAASGNSGADSISYPARYANAMAVGATDQNNNRADFSQYGAGLDIVAPGVNVQSTYPGSTYASLNGTSMATPHVAGAAVLVKQKNPSWSNVRIRHHLKNTATSLGSTNLYGSGLVNAHAATR

SEQ ID NO: 61152 - protein, 269 aa, Unidentified
AQSVPWGISRVQAPAAHNRKLTGSGVKVAVLDTGISTHPDLNIRGGASFVPGEPSTQDGEGHGTHVAGTIAALNNNIGVLGVAPSAELYAVKVLSASGNGSVSSIANGLEWAGLNGMHVANLSLGAPSPSATLEQAVNSATSRGVLVVAASGNSGAGSISYPARYANAMAVGATDQNNNRADFSQYGAGLDIVAPGVNVQSTYPGSTYASQNGTSMATPHVAGAAALVKQKNPSWSNVQIRNHLKNTATSLGSTNLYGSGLVNAEAATR

SEQ ID NO: 61153 - protein, 269 aa, Unidentified
AQSVPWGISRVQAPAAHNRGLTGSGVKVAVLDTGISTHPDLNIRGGASFVPGEPSTQDGNGHGTHAAGTIAALNNSIGVLGVAPSAELYAVKVLGASGSGAISSIAQGLEWAGNNGMHVANLSLGSPSPSATLEQAVNSATSRGVLVVAASGNSGADSISYPARYANAMAVGATDQNNDRASFSQYGAGLDIVAPGVNVQSTYPGSTYASLNGTSMATPHVAGAAVLVKHKNPSWSNVRIRDHLKKTATSLGSTNLYGSGLVNAEAATR

SEQ ID NO: 61154 - protein, 269 aa, Unidentified
AQSVPWGISRVQAPAAHRRGLWGRGVKVAVLDTGISTHPDLNIRGGASFVPGEPSTQDGNGHGTHVAGTIAALDNSIGVLGVAPSAELYAVKVLGASGSGSVSSIAQGLEWAGANGMHVANLSLGSPSPSATLEQAVNSATSRGVLVVAASGNSGAGSISYPARYANAMAVGATDQDNNRASFSQYGAGLDLVAPGVNVQSTYPQSAYASLNGTSMATPHVAGAAALVKQKNPSWSNVQIRNRLKNTATSLGSTNLYGSGLVNAEAATR

SEQ ID NO: 61155 - protein, 269 aa, Unidentified
AQSVPWGISRVQAPAAHNRGLQGSGVKVAVLDTGISTHPDLNIRGGASFVPGEPSTQDGNGHGTHVAGTIAALNNSIGVLGVAPSAELYAVKVLGASGGGAISSIAQGLEWAGNNGMHVANLSLGSPSPSATLEQAVNSATSRGVLVVAASGNSGADSISYPARYANAMAVGATDQNNNRADFSQYGAGLDIVAPGVNVQSTYPGSTYASLNGTSMATPHVAGAAVLVKQKNPSWSNVTIRDHLKNTATSLGSTNLYGSGLVNALAATR

SEQ ID NO: 61156 - protein, 269 aa, Unidentified
AQSVPWGISRVQAPAAHNRGLAGSGVKVAVLDTGISTHPDLNIRGGASFVPGEPSTQDGNGHGTHVAGTIAALNNSIGVLGVAPSAELYAVKVLGASGGGAISSIAQGLEWAGNNGMHVANLSLGSPSPSATLEQAVNSATSRGVLVVAASGNSGADSISYPARYANAMAVGATDQNNNRADFSQYGAGLDIVAPGVNVQSTYPGSTYASLNGTSMATPHVAGAAVLVKQKNPSWSNVRIREHLKNTATSLGSTNLYGSGLVNAFAATR

SEQ ID NO: 61157 - protein, 269 aa, Unidentified
AQSVPWGISRVQAPAAHNRGLTGSGVKVAVLDTGISTHPDLNIRGGASFVPGEPSTQDGNGHGTHAAGTIAALNNSIGVLGVAPSAELYAVKVLGASGSGAISSIARGLEWAGNNGMHVANLSLGSPSPSATLEQAVNSATSRGVLVVAASGNSGADSISYPARYANAMAVGATDQNNNRASFSQYGAGLDIVAPGVNVQSTYPGSTYASLNGTSMATPHVAGAAVLVKHKNPSWSNVRIRDHLKKTATSLGSTNLYGSGLVNAEAATR

SEQ ID NO: 61158 - protein, 269 aa, Unidentified
AQSVPWGISRVQAPAAHNRGLAGFGVKVAVLDTGISTHPDLNIRGGASFVPGEPSTQDGNGHGTHVAGTIAALNNSIGVLGVAPSAELYAVKVLGASGGGAISSIAQGLEWAGLNGMHVANLSLGSPSPSATLEQAVNSATSRGVLVVAASGNSGAGSISYPARYANAMAVGATDQNNNRASFSQYGAGLDIVAPGVNVQSTVPQSAYASLNGTSMATPHVAGAAVLVKQKNPSWSNVQIRNHLKNTATSLGSTNLYGSGLVNAEAATR

SEQ ID NO: 61159 - protein, 269 aa, Unidentified
AQSVPWGISRVQAPAAHNRGLTGSGVKVAVLDTGISTHEDLNVRGGVSFVPGEPSYQDGNGHGTHVAGTIAALNNSIGVVGVAPSADLYAVKVLGASGRGSVSSIAQGLEWAGQNGMHVANLSLGDPSPSATLEQAVNSATSRGVLVVAASGNSGAGSISYPARYANAMAVGATDQNNNRASFSQYGAGLDIVAPGVNVQSTYPGSTYASLNGTSMATPHVAGAAALVKQKNPSWSNVQIRDHLKNTATSLGSTNLYGSGLVNAEAATR

SEQ ID NO: 61160 - protein, 269 aa, Unidentified
AQSVPWGISRVQAPAAHNRGLTGSGVKVAVLDTGISTHPDLNIRGGASFVPGEPSTQDENGHGTHVAGTIAALNNSIGVLGVAPSAELYAVKVLGASGSGAISSIAQGLEWAGNNGMHVANLSLGSPSPSVTLEQAVNSATSRGVLVVAASGNSGADSISYPARYANAMAVGATDQNNNRASFSQYGAGLDIVAPGVNVQSTYPGSTYASLNGTSMATPHVAGAAVLVKHKNPSWSNVRIRDHLKKTATSLGSTNLYGSGLVNAEAATR

SEQ ID NO: 61161 - protein, 269 aa, Unidentified
AQSVPWGISRVQAPASHNRGLTGSGVKVAVLDTGISTHPDLNIRGGASFVPGEPSTQDGNGHGTHVAGTIAALNNSIGVLGVAPSAELYAVKVLGASGGGAISSIAQGLEWAGLNGMHVANLSLGNPSPSATLEQAVNSATSRGVLVVAASGNSGAGSISYPARYANAMAVGATDQNNNRASFSQYGAGLDIVAPGVNVQSTVPQSAYASLNGTSMATPHVAGAAVLVKQKNPSWSNVQIRNHLKNTATSLGSTNLYGSGLVNAEAATR

SEQ ID NO: 61162 - protein, 269 aa, Unidentified
AQSVPWGISRVQAPAAHNRGLQGSGVKVAVLDTGISTHPDLNIRGGASFVPGEPSTQDGNGHGTHVAGTIAALNNSIGVLGVAPSAELYAVKVLGASGGGAISSIAQGLEWAGNNGMHVANLSLGSPSPSATLEQAVNSATSRGVLVVAASGNSGADSISYPARYANAMAVGATDQNNNRAEFSQYGAGLDIVAPGVNVQSTYPGSTYASLNGTSMATPHVAGAAVLVKQKNPSWSNVRIRHHLKNTATSLGSTNLYGSGLVNATAATR

SEQ ID NO: 61163 - protein, 269 aa, Unidentified
AQSVPWGISRVQAPAAHNRGLQGSGVKVAVLDTGISTHPDLNIRGGASFVPGEPSTQDGNGHGTHVAGTIAALNNSIGVLGVAPSAELYAVKVLGASGGGAISSIAQGLEWAGNNGMHVANLSLGSPSPSATLEQAVNSATSRGVLVVAASGNSGADSISYPARYANAMAVGATDQNNNRADFSQYGAGLDIVAPGVNVQSTYPGSTYASLNGTSMATPHVAGAASLVKQKNPSWSNVTIRDHLKNTATSLGSTNLYGSGLVNATAATR

SEQ ID NO: 61164 - protein, 269 aa, Unidentified
AQSVPWGISRVQAPAAHNRGLQGSGVKVAVLDTGISTHPDLNIRGGASFVPGEPSTQDGNGHGTHVAGTIAALNNSIGVLGVAPSAELYAVKVLGASGGGAISSIAQGLEWAGNNGMHVANLSLGSPSPSATLEQAVNSATSRGVLVVAASGNSGADSISYPARYANAMAVGATDQNNNRAEFSQYGAGLDIVAPGVNVQSTYPGSTYASLNGTSMATPHVAGVAVLVKQKNPSWSNVRIRHHLKNTATSLGSTNLYGSGLVNAEAATR

SEQ ID NO: 61165 - protein, 269 aa, Unidentified
AQSVPWGISRVQAPAAHNRGLTGSGVKVAVLDTGISTHPDLNIRGGASFVPGEPSTQDGNGHGTHVAGTIAALNNSIGVLGVAPSAELYAVKVLGASGGGAISSIAQGLEWAGNNGMHVANLSLGSQSPSATLEQAVNSATSRGVLVVAASGNSGEGSISYPARYANAMAVGATDQNNNRADFSQYGAGLDIVAPGVNVQSTYPGSTYASLNGTSMATPHVAGAAVLVKQKNPSWSNVRIRDRLKNTATSLGSTNLYGSGLVNAEAATR

SEQ ID NO: 61166 - protein, 269 aa, Unidentified
AQSVPWGISRVQAPAAHRRGLWGRGVKVAVLDTGISTHPDLNIRGGASFVPGEPSTQDGNGHGTHVAGTIAALDNSIGVLGVAPSAELYAVKVLGASGAGSVSSIAQGLEWAGANGMHVANLSLGSPSPSATLEQAVNSATSRGVLVVAASGNSGAGSISYPARYANAMAVGATDQNNNRASFSQYGAGLDIVAPGVNVQSTYPQSAYFSLNGTSMATPHVAGAAALVKQKNPSWSNVQIRNRLKNTATSLGSTNLYGSGLVNAEAATR

SEQ ID NO: 61167 - protein, 269 aa, Unidentified
AQSVPWGISRVQAPAAHNRGLTGSGVKVAVLDTGISTHPDLNIRGGASFVPGEPSTQDGNGHGTHAAGTIAALDNSIGVLGVAPSAELYAVKVLGASGSGAISSIAQGLEWAGNNGMHVANLSLGSPSPSATLEQAVNSATSRGVLVVAASGNSGADSISYPARYANAMAVGATDQNNNRASFSQYGAGLDIVAPGVNVQSTYPGSTYASLNGTSMATPHVAGAAVLVKHKNPSWSNVRIRDHLKKTATSLGSTNLYGSGLVNAEAATR

SEQ ID NO: 61168 - protein, 269 aa, Unidentified
AQSVPWGISRVQAPAAHNRRLTGSGVKVAVLDTGISTHPDLNITGGASFVPGEPSTQDGNGHGTHVAGTIAALDNRIGVLGVAPSAELYAVKVLGASGGGAISSIAQGLEWAGNNGMHVANLSLGSPSPSATLEQAVNSATSRGVLVVAASGNSGAGSISYPARYANAMAVGATDQNNNRASFSQYGAGLDIVAPGVNVQSTYPGSTYASLNGTSMATPHVAGAAVLVKQKNPSWSNVRIRNHLKNTATSLGSTNLYGSGLVRAEAATR

SEQ ID NO: 61169 - protein, 269 aa, Unidentified
AQSVPWGISRVQAPAAHNRGLQGSGVKVAVLDTGISTHPDLNIRGGASFVPGEPSTQDGNGHGTHVAGTIAALNNSIGVLGVAPSAELYAVKVLGASGGGAISSIAQGLEWAGNNGMHVANLSLGSPSPSATLEQAVNSATSRGVLVVAASGNSGADSISYPARYANAMAVGATDQNNNRADFSQYGAGLDIVAPGVNVQSTYPGSTYASLNGTSMATPHVAGAALLVKQKNPSWSNVRIREHLKNTATSLGSTNLYGSGLVNAHAATR

SEQ ID NO: 61170 - protein, 269 aa, Unidentified
AQSVPWGISRVQAPAAHNRGLAGGGVKVAVLDTGISTHPDLNIRGGASFVPGEPSTQDGNGHGTHVAGTIAALNNNIGVLGVAPSAELYAVKVLGASGQGAISSIANGLEWAGNNGMHVANLSLGAPSPSATLEQAVNSATSRGVLVVAASGNSGAGSISYPARYANAMAVGATDQNNNRASFSQYGAGLDIVAPGVNVQSTYPGSTYASLNGTSMATPHVAGAAVLVKQKNPSWSNVRIRNHLKNTATSLGSTNLYGSGLVNAEAATR

SEQ ID NO: 61171 - protein, 269 aa, Unidentified
AQSVPWGISRVQAPAAHNRGLAGSGVKVAVLDTGISTHPDLNIRGGASFVPGEPSTQDGNGHGTHVAGTIAALNNSIGVLGVAPSAELYAVKVLGASGSGAISSIAQGLEWAGLNGMHVANLSLGSPSPSATLEQAVNSATSRGVLVVAASGNSGADSISYPARYANAMAVGATDQNNNRADFSQYGAGLDIVAPGVNVQSTYPGSTYASLNGTSMATPHVAGAAVLVKQKNPSWSNVRIRDHLKNTATSLGSTNLYGSGLVNAFAATR

SEQ ID NO: 61172 - protein, 269 aa, Unidentified
AQSVPWGISRVQAPAAHRRGLTGSGVKVAVLDTGISTHPDLDIRGGASFVPGEPSTQDGNGHGTHVAGTIAALDNRIGVLGVAPSAELYAVKVLGASGGGAISSIAQGLEWAGNNGMHVANLSLGSPSPSATLEQAVNSATSRGVLVVAASGNSGAGSISYPARYANAMAVGATDQNNNRASFSQYGAGLDIVAPGVNVQSTYPGSTYASLNGTSMATPHVAGAAVLVKQKNPSWSNVRIRNRLKNTATSLGSTNLYGSGLVNAEAATR

SEQ ID NO: 61173 - protein, 269 aa, Unidentified
AQSVPWGISRVQAPASHNRGLTGFGVKVAVLDSGISTHPDLNIRGGASFVPGEPSTQDGNGHGTHVAGTIAALNNSIGVLGVAPSAELYAVKVLGASGGGAISSIAQGLEWAGLNGMHVANLSLGSPSPSATLEQAVNSATSRGVLVVAASGNSGAGSISYPARYANAMAVGATDQNNNRASFSQYGAGLDIVAPGVNVQSTAPGSAYASLNGTSMATPHVAGAAVLVKQKNPSWSNVQIRNHLKNTATSLGSTNLYGSGLVNAEAATR

SEQ ID NO: 61174 - protein, 269 aa, Unidentified
AQSVPWGISRVQAPAAHNRGLAGSGVKVAVLDTGISTHPDLNIRGGASFVPGEPSTQDGNGHGTHVAGTIAALNNSIGVLGVAPSAELYAVKVLGASGGGAISSIAQGLEWAGNNGMHVANLSLGSPSPSATLEQAVNSATSRGVLVVAASGNSGADSISYPARYANAMAVGATDQNNNRAEFSQYGAGLDIVAPGVNVQSTYPGSTYASLNGTSMATPHVAGAAVLVKQKNPSWSNVTIREHLKNTATSLGSTNLYGSGLVNAFAATR

SEQ ID NO: 61175 - protein, 269 aa, Unidentified
AQSVPWGISRVQAPAAHRRGLWGRGVKVAVLDTGISTHPDLNIRGGASFVPGEPSTQDGNGHGTHVAGTIAALDNSIGVLGVAPSAELYAVKVLGASGAGSVSSIAQGLEWAGNNGMHVANLSLGSPSPSATLEQAVNSATSRGVLVVAASGNSGAGSISYPARYANAMAVGATDQNNNRASFSQYGAGLDLVAPGVNVQSTYPQSAYFSLNGTSMATPHVAGAAALVKQKNPSWSNVQIRNRLKNTATSLGSTNLYGSGLVNAEAATR

SEQ ID NO: 61176 - protein, 269 aa, Unidentified
AQSVPWGISRVQAPAAHNRGLAGSGVKVAVLDTGISTHPDLNIRGGASFVPGEPSTQDGNGHGTHVAGTIAALNNSIGVLGVAPSAELYAVKVLGASGGGAISSIAQGLEWAGLNGMHVANLSLGSPSPSATLEQAVNSATSRGVLVVAASGNSGADSISYPARYANAMAVGATDQNNNRADFSQYGAGLDIVAPGVNVQSTYPGSTYASLNGTSMATPHVAGAAVLVKQKNPSWSNVQIRDHLKNTATSLGSTNLYGSGLVNAFAATR

SEQ ID NO: 61177 - protein, 269 aa, Unidentified
AQSVPWGISRVQAPAAHNRGLQGSGVKVAVLDTGISTHPDLNIRGGASFVPGEPSTQDGNGHGTHVAGTIAALNNSIGVLGVAPSAELYAVKVLGASGGGAISSIAQGLEWAGNNGMHVANLSLGSPSPSATLEQAVNSATSRGVLVVAASGNSGADSISYPARYANAMAVGATDQNNNRAEFSQYGAGLDIVAPGVNVQSTYPGSTYASLNGTSMATPHVAGAATLVKQKNPSWSNVRIREHLKNTATSLGSTNLYGSGLVNATAATR

SEQ ID NO: 61178 - protein, 269 aa, Unidentified
AQSVPWGISRVQAPAAHNRGLTGSGVKVAVLDTGISTHPDLNIRGGASFVPGEPSTQDGNGHGTHVAGTIAALNNSIGVLGVAPSAELYAVKVLGASGGGAISSIAQGLEWAGNNGMHVANLSLGGPSPSATLEQAVNSATSRGVLVVAASGNSGADSISYPARYANAMAVGATDQNNNRASFSQYGAGLDIVAPGVNVQSTYPGSTYASLNGTSMATPHVAGAAVLVKHKNPSWSNVRIRDHLKKTATSLGSTNLYGSGLVNAEAATR

SEQ ID NO: 61179 - protein, 269 aa, Unidentified
AQSVPWGISRVQAPAAHRRRLTGRGVKVAVLDTGISTHPDLNIRGGASFVPGEPSTQDGNGHGTHVAGTIAALDNSIGVLGVAPSAELYAVKVLGASGAGSVSSIAQGLEWTGNNGMHVANLSLGSPSPSATLEQAVNSATSRGVLVVAASGNSGAGSISYPARYANAMAVGATDQNNNRASFSQYGAGLDLVAPGVNVQSTYPQSTYFSLNGTSMATPHVAGAAALVKQKNPSWSNVQIRNRLKNTATSLGSTNLYGSGLVNAEAATR

SEQ ID NO: 61180 - protein, 269 aa, Unidentified
AQSVPWGISRVQAPAAHNRGLTGSGVKVAVLDTGISTHPDLNIRGGASFVPGEPSTQDGNGHGTHAAGTIAALNNSIGVLGVAPSAELYAVKVLGASGSGAISSIAQGLEWAGNNGMHVANLSLGSPSPSATLEQAVNSATSRGVLVVAASGNSGADSISYPARYANAMAVGATDQNNNRASFSQYGAGLDIVAPGVNVQSTYPGGTYASLNGTSMATPHVAGAAVLVKHKNPSWSNVRIRDHLKKTATSLGSTNLYGSGLVNAEAATR

SEQ ID NO: 61181 - protein, 269 aa, Unidentified
AQSVPWGISRVQAPAAHNRGLQGSGVKVAVLDTGISTHPDLNIRGGASFVPGEPSTQDGNGHGTHVAGTIAALNNSIGVLGVAPSAELYAVKVLGASGGGAISSIAQGLEWAGNNGMHVANLSLGSPSPSATLEQAVNSATSRGVLVVAASGNSGADSISYPARYANAMAVGATDQNNNRADFSQYGAGLDIVAPGVNVQSTYPGSTYASLNGTSMATPHVAGAALLVKQKNPSWSNVTIREHLKNTATSLGSTNLYGSGLVNALAATR

SEQ ID NO: 61182 - protein, 269 aa, Unidentified
AQTIPWGISRVQAPAAHNRGLTGSGVKVAVLDTGISTHPDLNIRGGASFVPGEPSTQDGNGHGTHVAGTIAALDNSIGVLGVAPSAELYAVKVLGADGEGAISSIAQGLEWAGNNGMHVANLSLGSPSPSATLEQAVNSATSRGVLVVAASGNSGASSISYPARYANAMAVGATDQNNNRASFSQYGAGLDIVAPGVNILSTYPGSTYASLNGTSMATPHVAGAAALVKQKNPSWSNVQIRNHLKNTATSLGSTNLYGSGLVNAEAATR

SEQ ID NO: 61183 - protein, 269 aa, Unidentified
AQSVPWGISRVQAPAAHNRGLTGSGVKVAVLDTGISTHPDLNIRGGASFVPGEPSTQDGNGHGTHVAGTIAALDNNIGVLGVAPRAELYAVKVLGASGSGSVSSIAQGLEWAGNNRMHVANLSLGRQAPSATLEQAVNSATSRGILVVAASGNSGAGSISYPARYANAMAVGATDQNNNRASFSQYGPGLDIVAPGVNVQSTYPGSTYASLNGTSMATPHVAGAAALVKQKNPSWSNVQIRNHLKNTATSLGSTNLYGSGLVNADAATR

SEQ ID NO: 61184 - protein, 269 aa, Unidentified
AQSVPWGISRVQAPAAHNRGLAGSGVKVAVLDTGISTHPDLNIRGGASFVPGEPSTQDGNGHGTHVAGTIAALDNNIGVLGVAPSAELYAVKVLSASGGGAISSIAQGLEWAGNNGMHVANLSLGAPSPSATLEQAVNSATSRGVLVVAASGNSGAGSISYPARYANAMAVGATDQNNNRASFSQYGAGLDIVAPGVNVQSTYPGSTYASLNGTSMATPHVAGAAVLVKQKNPSWSNVRIRNHLKNTATSLGSTNLYGSGLVNAEAATR

SEQ ID NO: 61185 - protein, 269 aa, Unidentified
AQSVPWGISRVQAPAAHNRGLAGSGVKVAVLDTGISTHPDLNIRGGASFVPGEPSTQDGNGHGTHVAGTIAALDNSIGVLGVAPSAELYAVKVLGASGGGAISSIAQGLEWAGNNGMHVANLSLGSPSPSATLEQAVNSATSRGVLVVAASGNSGAGSISYPARYANAMAVGATDQNNNRASFSQYGAGLDIVAPGVNVQSTYPGSTYASLNGTSMATPHVAGAAVLVKQKYPSWSNVRIRNHLKNTATSLGSTNLYGSGLVNVEVATR

SEQ ID NO: 61186 - protein, 269 aa, Unidentified
AQSVPWGISRVQAPAAHNRGLAGSGVKVAVLDTGISTHPDLNIRGGASFVPGEPSTQDGNGHGTHVAGTIAALNNSIGVLGVAPSAELYAVKVLGASGGGAISSIAQGLEWAGNNGMHVANLSLGSPSPSATLEQAVNSATSRGVLVVAASGNSGAESISYPARYANAMAVGATDQNNNRADFSQYGAGLDIVAPGVNVQSTYPGSTYASLNGTSMATPHVAGAAVLVKQKRPSWSNVRIRDHLKNTATSLGSTNLYGSGLVNAEAATR

SEQ ID NO: 61187 - protein, 269 aa, Unidentified
AQSVPWGISRVQAPAAHRRGLWGRGVKVAVLDTGISTHPDLNIRGGASFVPGEPSTQDGNGHGTHVAGTIAALDNSIGVLGVAPSAELYAVKVLGASGAGSVSSIAQGLEWAGNNGMHVANLSLGSPSPSATLEQAVNSATSRGVLVVAASGNSGAGSISYPARYANAMAVGATDQDNNRASFSQYGAGLDIVAPGVNVQSTYPQSAYFSLNGTSMATPHVAGAAALVKQKNPSWSNVQIRNRLKNTATSLGSTNLYGSGLVNAEAATR

SEQ ID NO: 61188 - protein, 269 aa, Unidentified
AQSVPWGISRVQAPAAHNRGLAGSGVKVAVLDTGISTHPDLNIRGGASFVPGEPSTQDGNGHGTHVAGTIAALDNSIGVLGVAPSAELYAVKVLSASGNGAISSIAGGLEWAGNNGMHVANLSLGAPSPSATLEQAVNSATSRGVLVVAASGNSGAGSISYPARYANAMAVGATDQNNNRASFSQYGAGLDIVAPGVNVQSTYPGSTYASLNGTSMATPHVAGAAVLVKQKNPSWSNVRIRNHLKNTATSLGSTNLYGSGLVNAEAATR

SEQ ID NO: 61189 - protein, 269 aa, Unidentified
AQSVPWGISRVQAPAAHNRGLAGSGVKVAVLDTGISTHPDLNIRGGASFVPGEPSTQDGNGHGTHVAGTIAALNNSIGVLGVAPSAELYAVKVLGASGGGAISSIAQGLEWAGNNGMHVANLSLGSPSPSATLEQAVNSATSRGVLVVAASGNSGADSISYPARYANAMAVGATDQNNNRAEFSQYGAGLDIVAPGVNVQSTYPGSTYASLNGTSMATPHVAGAASLVKQKNPSWSNVRIRHHLKNTATSLGSTNLYGSGLVNALAATR

SEQ ID NO: 61190 - protein, 269 aa, Unidentified
AQSVPWGISRVQAPAAHNRGLQGSGVKVAVLDTGISTHPDLNIRGGASFVPGEPSTQDGNGHGTHVAGTIAALNNSIGVLGVAPSAELYAVKVLGASGGGAISSIAQGLEWAGNNGMHVANLSLGSPSPSATLEQAVNSATSRGVLVVAASGNSGADSISYPARYANAMAVGATDQNNNRAEFSQYGAGLDIVAPGVNVQSTYPGSTYASLNGTSMATPHVAGAASLVKQKNPSWSNVTIREHLKNTATSLGSTNLYGSGLVNALAATR

SEQ ID NO: 61191 - protein, 269 aa, Unidentified
AQSVPWGISRVQAPAAHNRRLWGSGVKVAVLDTGISTHPDLNIRGGASFVPGEPSTQDGNGHGTHVAGTIAALNNSIGVLGVAPSAELYAVKVLGASGAGAISSIAQGLEWAGANGMHVANLSLGSPSPSATLEQAVNSATSRGVLVVAASGNSGAGSISYPARYANAMAVGATDQDNNRASFSQYGAGLDIVAPGVNVQSTYPGSTYASLNGTSMATPHVAGAAVLVKQKNPSWSNVRIRNHLKNTATSLGSTNLYGSGLVNAEAAIR

SEQ ID NO: 61192 - protein, 269 aa, Unidentified
AQSVPWGISRVQAPAAHNRRLTGRGVKVAVLDTGISTHPDLNIRGGASFVPGEPSTQDGEGHGTHVAGTIAALNNDIGVLGVAPSAELYAVKVLGASGSGSVSSIAQGLEWAGNNDMHVANLSLGSPSPSATLEQAVNSATSRGVLVVAASGNSGADSISYPARYANAMAVGATDQNNNRADFSQYGAGLDIVAPGVNVQSTYPGSTYASLNGTSMATPHVAGAAALVKQKNPSWSNVRIRDRLKNTATSLGSTNLYGSGLVNAEAATR

SEQ ID NO: 61193 - protein, 269 aa, Unidentified
AQSVPWGISRVQAPAAHNRGLAGSGVKVAVLDTGISTHPDLNIRGGASFVPGEPSTQDGNGHGTHVAGTIAALNNSIGVLGVAPSAELYAVKVLGASGNGAISSIAQGLEWAGNNGMHVANLSLGSPSPSATLEQAVNSATSRGVLVVAASGNSGADSISYPARYANAMAVGATDQNNNRADFSQYGAGLDIVAPGVNVQSTYPGSTYASLNGTSMATPHVAGAAVLVKQKNPSWSNVRIRDHLKNTATSLGSTNLYGSGLVNAFAATR

SEQ ID NO: 61194 - protein, 269 aa, Unidentified
AQSVPWGISRVQAPAAHNRGLAGGGVKVAVLDTGISTHPDLNIRGGASFVPGEPSTQDGNGHGTHVAGTVAALNNSIGVLGVAPSAELYAVKVLSASGQGAISSIAQGLEWAGNNGMHVANLSLGAPSPSATLEQAVNSATSRGVLVVAASGNSGAGSISYPARYANAMAVGATDQNNNRASFSQYGAGLDIVAPGVNVQSTYPGSTYASQNGTSMATPHVAGAAVLVKQKNPSWSNVQIRNHLKNTATSLGSTNLYGSGLVNAEAATR

SEQ ID NO: 61195 - protein, 269 aa, Unidentified
AQSVPWGISRVQAPAAHNRGLTGSGVKVAVLDTGISTHPDLNIRGGASFVPGEPSTQDGNGHGTHVAGTIAALNNSIGVLGVAPSAELYAVKVLGASGGGAISSIAQGLEWAGNNGMHVANLSLGSPSPSATLEQAVNSATSRGVLVVAASGNSGADSISYPARYANAMAVGATDQNNNRASFSQYGAGLDIVAPGVNVQSTYPGSQYASLNGTSMATPHVAGAAVLVKHKNPSWSNVRIRDHLKKTATSLGSTNLYGSGLVNAEAATR

SEQ ID NO: 61196 - protein, 269 aa, Unidentified
AQSVPWGISRVQAPAAHNRGLAGGGVKVAVLDTGISTHPDLNIRGGASFVPGEPSTQDGNGHGTHVAGTIAALDNSIGVLGVAPSAELYAVKVLSASGNGAISSIANGLEWAGNNGMHVANLSLGSPSPSATLEQAVNSATSRGVLVVAASGNSGAGSISYPARYANAMAVGATDQNNNRASFSQYGAGLDIVAPGVNVQSTYPGSTYASLNGTSMATPHVAGAAVLVKQKNPSWSNVRIRNHLKNTATSLGSTNLYGSGLVNAEAATR

SEQ ID NO: 61197 - protein, 269 aa, Unidentified
AQSVPWGISRVQAPAAHNRGLAGSGVKVAVLDTGISTHPDLNIRGGASFVPGEPSTQDGNGHGTHVAGTIAALNNSIGVLGVAPSAELYAVKVLGASGGGAISSIAQGLEWAGNNGMHVANLSLGSPSPSATLEQAVNSATSRGVLVVAASGNSGADSISYPARYANAMAVGATDQNNNRADFSQYGAGLDIVAPGVNVQSTYPGSTYASLNGTSMATPHVAGAASLVKQKNPSWSNVRIRHHLKNTATSLGSTNLYGSGLVNAFAATR

SEQ ID NO: 61198 - protein, 269 aa, Unidentified
AQSVPWGISRVQAPAAHNRRLTGRGVKVAVLDTGISTHPDLNIRGGASFVPGEPSTQDGNGHGTHVAGTIAALNNDIGVLGVAPSAELYAVKVLGASGSGSVSSIAQGLEWAGNNSMHVANLSLGSESPSATLEQAVNSATSRGVLVVAASGNSGADSISYPARYANAMAVGATDQNNNRADFSQYGAGLDIVAPGVNVQSTYPGSTYASLNGTSMATPHVAGAAALVKQKNPSWSNVRIRDRLKNTATSLGSTNLYGSGLVNAEAATR

SEQ ID NO: 61199 - protein, 269 aa, Unidentified
AQSVPWGISRVQAPAAHNRGLTGSGVKVAVLDTGISTHPDLNIRGGASFVPGEPSTQDGNGHGTHAAGTIAALNNSIGVLGVAPSAELYAVKVLGASGSGAISSIAQGLEWAGNNGMHVANLSLGSPSPSATLEQAVNSATSRGVLVVAASGNSGADSISYPARYANAMAVGATDQNNNRASFSQYGAGLDIVAPGVNVQSTYLGSTYASLNGTSMATPHVAGAAVLVKHKNPSWSNVRIRDHLKKTATSLGSTNLYGSGLVNAEAATR

SEQ ID NO: 61200 - protein, 269 aa, Unidentified
AQSVPWGISRVQAPAAHNRGLTGSGVKVAVLDTGISTHPDLNIRGGASFVPGEPSTQDGNGHGTHVAGTIAALNNSIGVLGVAPSAELYAVKVLGASGGGSIASIAQGLEWAGNNGMHVANLSLGNESPSATLEQAVNSATSRGVLVVAASGNSGEGSISYPARYANAMAVGATDQNNNRASFSQYGAGLDIVAPGVNVQSTYPGSTYASLNGTSMATPHVAGAAVLVKQKRPSWSNVRIRDHLKNTATSLGSTNLYGSGLVNAEAATR

SEQ ID NO: 61201 - protein, 269 aa, Unidentified
AQSVPWGISRVQAPAAHNRGLAGGGVKVAVLDTGISTHPDLNIRGGASFVPGEPSTQDGNGHGTHVAGTIAALNNNIGVLGVAPSAELYAVKVLAASGNGAISSIAQGLEWAGNNGMHVANLSLGSPSPSATLEQAVNSATSRGVLVVAASGNSGAGSISYPARYANAMAVGATDQNNNRASFSQYGAGLDIVAPGVNVQSTYPGSTYASQNGTSMATPHVAGAAVLVKQKNPSWSNVRIRNHLKNTATSLGSTNLYGSGLVNAEAATR

SEQ ID NO: 61202 - protein, 269 aa, Unidentified
AQSVPWGISRVQAPAAHNRGLAGGGVKVAVLDTGISTHPDLNIRGGASFVPGEPSTQDGNGHGTHVAGTIAALDNNIGVLGVAPSAELYAVKVLSASGNGAISSIAQGLEWAGNNGMHVANLSLGSPSPSATLEQAVNSATSRGVLVVAASGNSGAGSISYPARYANAMAVGATDQNNNRASFSQYGAGLDIVAPGVNVQSTYPGSTYASQNGTSMATPHVAGAAVLVKQKNPSWSNVQIRNHLKNTATSLGSTNLYGSGLVNAEAATR

SEQ ID NO: 61203 - protein, 269 aa, Unidentified
AQSVPWGISRVQAPAAHNRGLTGRGVKVAVLDTGISTHPDLNIRGGASFVPGEPSTQDGNGHGTHVAGTIAALNNSIGVLGVAPSAELYAVKVLGASGGGAISSIAQGLEWAGNNGMHVANLSLGSESPSATLEQAVNSATSRGVLVVAASGNSGAGSISYPARYANAMAVGATDQNNNRADFSQYGAGLDIVAPGVNVQSTYPGSTYASLNGTSMATPHVAGAAVLVKQKNPSWSNVRIRDRLKNTATSLGSTNLYGSGLVNAEAATR

SEQ ID NO: 61204 - protein, 269 aa, Unidentified
AQSVPWGISRVQAPAAHNRGLRGSGVKVAVLDTGISTHPDLNIRGGASFVPGEPSTQDGNGHGTHVAGTIAALNNSIGVLGVAPSAELYAVKVLSASGNGAISSIAQGLEWAGLNGMHVANLSLGAPSPSATLEQAVNSATSRGVLVVAASGNSGAGSISYPARYANAMAVGATDQNNNRASFSQYGAGLDIVAPGVNVQSTYPGSTYASQNGTSMATPHVAGAAVLVKQKNPSWSNVRIRNHLKNTATSLGSTNLYGSGLVNAEAATR

SEQ ID NO: 61205 - protein, 269 aa, Unidentified
AQSVPWGISRVQAPAAHNRGLTGRGVKVAVLDTGISTHPDLNIRGGASFVPGEPSTQDGNGHGTHVAGTIAALNNSIGVLGVAPSAELYAVKVLGASGGGAISSIAQGLEWAGNNGMHVANLSLGSPSPSATLEQAVNSATSRGVLVVAASGNSGAESISYPARYANAMAVGATDQNNNRADFSQYGAGLDIVAPGVNVQSTYPGSTYASLNGTSMATPHVAGAAVLVKQKRPSWSNVRIRDHLKNTATSLGSTNLYGSGLVNAEAATR

SEQ ID NO: 61206 - protein, 269 aa, Unidentified
AQSVPWGISRVQAPAAHNRGLQGSGVKVAVLDTGISTHPDLNIRGGASFVPGEPSTQDGNGHGTHVAGTIAALNNSIGVLGVAPSAELYAVKVLGASGGGAISSIAQGLEWAGNNGMHVANLSLGSPSPSATLEQAVNSATSRGVLVVAASGNSGADSISYPARYANAMAVGATDQNNNRADFSQYGAGLDIVAPGVNVQSTYPGSTYASLNGTSMATPHVAGAATLVKQKNPSWSNVRIRDHLKNTATSLGSTNLYGSGLVNALAATR

SEQ ID NO: 61207 - protein, 269 aa, Unidentified
AQSVPWGISRVQAPAAHNRRLWGSGVKVAVLDTGISTHPDLNIRGGASFVPGEPSTQDGNGHGTHVAGTIAALNNSIGVLGVAPSAELYAVKVLGASGGGAISSIAQGLEWAGNNGMHVANLSLGSPSPSATLEQAVNSATSRGVLVVAASGNSGAGSISYPARYANAMAVGATDQNNNRASFSQYGAGLDLVAPGVNVQSTYPQSAYASLNGTSMATPHVAGAAVLVKQKNPSWSNVRIRNHLKNTATSLGSTNLYGSGLVNAEAATR

SEQ ID NO: 61208 - protein, 269 aa, Unidentified
AQSVPWGISRVQAPAAHNRGLTGSGVKVAVLDTGISTHPDLNIRGGASFVPGEPSTQDGNGHGTHAAGTIAALNNSIGVLGVAPSAELYAVKVLGASGSGAISSIAQGLEWAGNNGMHVANLSLGSPSPSATLEQAVNSATSRGVLVVAASGNSGADSISYPARYANAMAVGATDQNNNRASFSQYGAGLDIVAPGVNVQSTYPGSTYASLNGTSMATPHVAGAAVLVKHKNPSWSNVRIRDHLKKTATSLGSTRLYGSGLVNAEAATR

SEQ ID NO: 61209 - protein, 269 aa, Unidentified
AQSVPWGISAVQAPAAHNRGLRGFGVKVAVLDTGISTHPDLNIRGGASFVPGEPSTQDGNGHGTHVAGTIAALNNSIGVLGVAPSAELYAVKVLGASGGGAISSIAQGLEWAGNNGMHVANLSLGSPSPSATLEQAVNSATSRGVLVVAASGNSGAGSISYPARYANAMAVGATDQNNNRASFSQYGAGLDIVAPGVNVQSTYPGSTYASLNGTSMATPHVAGAAVLVKQKNPSWSNVRIRNHLKNTATSLGSTNLYGSGNVNAHAATR

SEQ ID NO: 61210 - protein, 269 aa, Unidentified
AQSVPWGISRVQAPAAHNRGLTGRGVKVAVLDTGISTHPDLNIRGGASFVPGEPSTQDGNGHGTHVAGTIAALNNSIGVLGVAPSAELYAVKVLGASGGGAISSIAQGLEWAGNNGMHVANLSLGSPSPSATLEQAVNSATSRGVLVVAASGNSGEGSISYPARYANAMAVGATDQNNNRADFSQYGAGLDIVAPGVNVQSTYPGSTYASLNGTSMATPHVAGAAVLVKQKNPSWSNVRIRDRLKNTATSLGSTNLYGSGLVNAEAATR

SEQ ID NO: 61211 - protein, 269 aa, Unidentified
AQSVPWGISRVQAPAAHNRRLTGRGVKVAVLDTGISTHPDLDIRGGASFVPGEPSTQDGNGHGTHVAGTIAALDNRIGVLGVAPSAELYAVKVLGASGGGAISSIAQGLEWAGNNGMHVANLSLGSPSPSATLEQAVNSATSRGVLVVAASGNSGAGSISYPARYANAMAVGATDQNNNRASFSQYGAGLDIVAPGVNVQSTYPGSTYASLNGTSMATPHVAGAAVLVKQKNPSWSNVRIRNHLKNTATSLGSTNLYGSGLVNAEAATR

SEQ ID NO: 61212 - protein, 269 aa, Unidentified
AQSVPWGISRVQAPAAHNRGLAGSGVKVAVLDTGISTHPDLNIRGGASFVPGEPSTQDGNGHGTHVAGTIAALNNSIGVLGVAPSAELYAVKVLAASGQGAISSIAQGLEWAGNNGMHVANLSLGASSPSATLEQAVNSATSRGVLVVAASGNSGAGSISYPARYANAMAVGATDQNNNRASFSQYGAGLDIVAPGVNVQSTYPGSTYASQNGTSMATPHVAGAAVLVKQKNPSWSNVRIRNHLKNTATSLGSTNLYGSGLVNAEAATR

SEQ ID NO: 61213 - protein, 269 aa, Unidentified
AQSVPWGISRVQAPAAHNRGLTGSGVKVAVLDTGISTHPDLNIRGGVSFVPGEPSTQDGNGHGTHAAGTIAALNNSIGVLGVAPSAELYAVKVLGASGSGAISSIAQGLEWAGNNGMHVANLSLGSPSPSATLEQAVNSATSRGVLVVAASGNSGADSISYPARYANAMAVGATDQNNNRASFSQYGAGLDIVAPGVNVQSTYPGSTYASLNGTSMATPHVAGAAVLVKHKNPSWSNVRIRDHLKKTATSLGSTNLYGSGLVNAEAATR

SEQ ID NO: 61214 - protein, 269 aa, Unidentified
AQSVPWGISRVQAPAAHNRGLQGSGVKVAVLDTGISTHPDLNIRGGASFVPGEPSTQDGNGHGTHVAGTIAALNNSIGVLGVAPSAELYAVKVLGASGGGAISSIAQGLEWAGNNGMHVANLSLGSPSPSATLEQAVNSATSRGVLVVAASGNSGADSISYPARYANAMAVGATDQNNNRADFSQYGAGLDIVAPGVNVQSTYPGSTYASLNGTSMATPHVAGAATLVKQKNPSWSNVVIRHHLKNTATSLGSTNLYGSGLVNALAATR

SEQ ID NO: 61215 - protein, 269 aa, Unidentified
AQSVPWGISRVQAPAAHNRGLTGSGVKVAVLDTGISTHPDLNIRGGASFVPGEPSTQDGNGHGTHVAGTIAALNNSIGVLGVAPSAELYAVKVLGASGGGAISSIAQGLEWAGLNGMHVANLSLGSPSPSATLEQAVNSATSRGVLVVAASGNSGADSISYPARYANAMAVGATDQNNNRADFSQYGAGLDIVAPGVNVQSTYPGSTYASLNGTSMATPHVAGAAVLVKQKNPSWSNVRIRDHLKNTATSLGSTNLYGSGLVNAFAATR

SEQ ID NO: 61216 - protein, 269 aa, Unidentified
AQSVPWGISRVQAPAAHRRGLTGRGVKVAVFDTGISTHPDLNIRGGASFVPGEPSTQDGNGHGTHVAGTIAALDNSIGVLGVAPSAELYAVKVLGASGSGSVSSIAQGLEWAGANGMHVANLSLGSPSPSATLEQAVNSATSRGVLVVAASGNSGAGSISYPARYANAMAVGATDQDNNRASFSQYGAGLDIVAPGVNVQSTYPQSAYFSLNGTSMATPHVAGAAALVKQKNPSWSNVQIRNRLKNTATSLGSTNLYGSGLVNAEAATR

SEQ ID NO: 61217 - protein, 269 aa, Unidentified
AQSVPWGISRVQAPAAHRRRLWGRGVKVAVLDTGISTHPDLNIRGGASFVPGEPSTQDGNGHGTHVAGTIAALDNSIGVLGVAPSAELYAVKVLGASGSGSVSSIAQGLEWAGANGMHVANLSLGSPSPSATLEQAVNSATSRGVLVVAASGNSGAGSISYPARYANAMAVGATDQDNNRASFSQYGAGLDLVAPGVNVQSTYPGSAYASLNGTSMATPHVAGAAALVKQKNPSWSNVQIRNRLKNTATSLGSTNLYGSGLVNAEAATR

SEQ ID NO: 61218 - protein, 269 aa, Unidentified
AQSVPWGISRVQAPAAHNRGLAGSGVKVAVLDTGISTHPDLNIRGGASFVPGEPSTQDGNGHGTHVAGTIAALNNSIGVLGVAPSAELYAVKVLGASGGGAISSIAQGLEWAGLNGMHVANLSLGNPSPSATLEQAVNSATSRGVLVVAASGNSGAGSISYPARYANAMAVGATDQNNNRASFSQYGAGLDIVAPGVNVQSTVPQSAYASLNGTSMATPHVAGAAVLVKQKNPSWSNVQIRNHLKNTATSLGSTNLYGSGLVNAEAATR

SEQ ID NO: 61219 - protein, 269 aa, Unidentified
AQSVPWGISRVQAPAAHNRGLTGSGVKVAVLDTGISTHPDLNIRGGASFVPGEPSTQDGNGHGTHAAGTIAALNNSIGVLGVAPSAELYAVKVLGASGSGAISSIAQGLEWAGNNGMHVANLSLGSPSPSATLEQAVNSATSRGVLVVAASGNSGADSISYPARYANAMAVGATDQNNNRASFSQYGAGLDIVAPGVNVQSTYPGSTYASLNGTSMATPHVAGAAVLVKHKNPSWSNVRIRDHLKKTATNLGSTNLYGSGLVNAEAATR

SEQ ID NO: 61220 - protein, 269 aa, Unidentified
AQSVPWGISRVQAPAAHNRGLQGSGVKVAVLDTGISTHPDLNIRGGASFVPGEPSTQDGNGHGTHVAGTIAALNNSIGVLGVAPSAELYAVKVLGASGGGAISSIAQGLEWAGNNGMHVANLSLGSPSPSATLEQAVNSATSRGVLVVAASGNSGADSISYPARYANAMAVGATDQNNNRADFSQYGAGLDIVAPGVNVQSTYPGSTYASLNGTSMATPHVAGAASLVKQKNPSWSNVVIREHLKNTATSLGSTNLYGSGLVNALAATR

SEQ ID NO: 61221 - protein, 269 aa, Unidentified
AQSVPWGISRVQAPAAHNRGLAGSGVKVAVLDTGISTHPDLNIRGGASFVPGEPSTQDGNGHGTHVAGTIAALNNSIGVLGVAPSAELYAVKVLGASGGGAISSIAQGLEWAGNNGMHVANLSLGSPSPSATLEQAVNSATSRGVLVVAASGNSGADSISYPARYANAMAVGATDQNNNRADFSQYGAGLDIVAPGVNVQSTYPGSTYASLNGTSMATPHVAGAAVLVKQKNPSWSNVVIREHLKNTATSLGSTNLYGSGLVNALAATR

SEQ ID NO: 61222 - protein, 269 aa, Unidentified
AQSVPWGISRVQAPAAHNRRLTGSGVKVAVLDTGISTHPDLNIRGGASFVPGEPSTQDGNGHGTHVAGTIAALNNSIGVLGVAPSAELYAVKVLGASGAGAISSIAQGLEWAGANGMHVANLSLGSPSPSATLEQAVNSATSRGVLVVAASGNSGAGSISYPARYANAMAVGATDQDNNRASFSQYGAGLDIVAPGVNVQSTYPQSAYASLNGTSMATPHVAGAAVLVKQKNPSWSNVRIRNHLKNTATSLGSTNLYGSGLVNAEAATR

SEQ ID NO: 61223 - protein, 269 aa, Unidentified
AQSVPWGISRVQAPAAHRRGLWGRGVKVAVLDTGISTHPDLNIRGGASFVPGEPSTQDGNGHGTHVAGTIAALDNSIGVLGVAPSAELYAVKVLGASGAGSVSSIAQGLEWAGANGMHVANLSLGSPSPSATLEQAVNSATSRGVLVVAASGNSGAGSISYPARYANAMAVGATDQDNNRASFSQYGAGLDLVAPGVNVQSTYPGSAYASLNGTSMATPHVAGAAALVKQKNPSWSNVQIRNRLKNTATSLGSTNLYGSGLVNAEAATR

SEQ ID NO: 61224 - protein, 269 aa, Unidentified
AQSVPWGIERVQAPAAHNRGLTGSGVKVAVLDTGISTHPDLRIRGGASFVPGEPSTQDGNGHGTHVAGTIAALDNSIGVLGVAPSAELYAVKVLGASGSGSVSSIAQGLEWAGNNGMHVANLSLGSPSPSATLEQAVNSATSRGVLVVAASGNSGAGSISYPARYANAMAVGATDQNNNRASFSQYGPGLDIVAPGVNILSTWPGSTYASLNGTSMATPHVAGAAALVKQKNPSWSNVQIRNHLKNTATSLGDTWEYGSGLVNAEAATR

SEQ ID NO: 61225 - protein, 269 aa, Unidentified
AQSVPWGISRVQAPAAHNRGLTGSGVKVAVLDTGISTHPDLNIRGGASFVPGEPSTQDGNGHGTHAAGTIAALNNSIGVLGVAPSAELYAVKVLGASGSGAISSIAQGLEWAGNNGMHVANLSLGSPSPSATLEQAVNSATSRGVLVVAASGNSGADSISYPARYANAMAVGATDQNNNRASFSQYGAGLDIVAPGVNVQSTWPGSTYASLNGTSMATPHVAGAAVLVKHKNPSWSNVRIRDHLKKTATSLGSTNLYGSGLVNAEAATR

SEQ ID NO: 61226 - protein, 269 aa, Unidentified
AQSVPWGISRVQAPAAHNRGLTGRGVKVAVLDTGISTHPDLNIRGGASFVPGEPSTQDGNGHGTHVAGTIAALNNSIGVLGVAPSAELYAVKVLGASGGGAISSIAQGLEWAGNNGMHVANLSLGSPSPSATLEQAVNSATSRGVLVVAASGNSGAESISYPARYANAMAVGATDQNNNRADFSQYGAGLDIVAPGVNVQSTYPGSTYASLNGTSMATPHVAGAAVLVKQKNPSWSNVRIRDRLKNTATSLGSTNLYGSGLVNAEAATR

SEQ ID NO: 61227 - protein, 269 aa, Unidentified
AQSVPWGISRVQAPAAHRRGLWGRGVKVAVLDTGISTHPDLNIRGGASFVPGEPSTQDGNGHGTHVAGTIAALDNSIGVLGVAPSAELYAVKVLGASGAGSVSSIAQGLEWAGANGMHVANLSLGSPSPSATLEQAVNSATSRGVLVVAASGNSGAGSISYPARYANAMAVGATDQDNNRASFSQYGAGLDIVAPGVNVQSTYPQSAYASLNGTSMATPHVAGAAALVKQKNPSWSNVQIRNRLKNTATSLGSTNLYGSGLVNAEAATR

SEQ ID NO: 61228 - protein, 269 aa, Unidentified
AQSVPWGISRVQAPAAHNRGLAGSGVKVAVLDTGISTHPDLRIRGGASFVPGEPSTQDGNGHGTHVAGTIAALNNSIGVLGVAPSAELYAVKVLGASGGGAISSIAQGLEWAGNNGMHVANLSLGSPSPSATLEQAVNSATSRGVLVVAASGNSGADSISYPARYANAMAVGATDQNNNRASFSQYGAGLDIVAPGVNVQSTYPGSTYASLNGTSMATPHVAGAAVLVKQKNPSWSNVRIRDHLKNTATSLGSTNLYGSGLVNAFAATR

SEQ ID NO: 61229 - protein, 269 aa, Unidentified
AQSVPWGISRVQAPAAHNRGLAGSGVKVAVLDTGISTHPDLRIRGGASFVPGEPSTQDGNGHGTHVAGTIAALNNSIGVLGVAPSAELYAVKVLGASGSGAISSIAQGLEWAGNNGMHVANLSLGSESPSATLEQAVNSATSRGVLVVAASGNSGADSISYPARYANAMAVGATDQNNNRADFSQYGAGLDIVAPGVNVQSTYPGSTYASLNGTSMATPHVAGAAVLVKQKNPSWSNVRIRDHLKNTATSLGSTNLYGSGLVNAEAATR

SEQ ID NO: 61230 - protein, 269 aa, Unidentified
AQSVPWGISRVQAPAAHNRGLQGSGVKVAVLDTGISTHPDLNIRGGASFVPGEPSTQDGNGHGTHVAGTIAALNNSIGVLGVAPSAELYAVKVLGASGGGAISSIAQGLEWAGNNGMHVANLSLGSPSPSATLEQAVNSATSRGVLVVAASGNSGADSISYPARYANAMAVGATDQNNNRADFSQYGAGLDIVAPGVNVQSTYPGSTYASLNGTSMATPHVAGAASLVKQKNPSWSNVRIREHLKNTATSLGSTNLYGSGLVNALAATR

SEQ ID NO: 61231 - protein, 269 aa, Unidentified
AQTIPWGISRVQAPAAHNRGLTGSGVKVAVLDTGISTHPDLNIRGGASFVPGEPSTQDGNGHGTHVAGTIAALNNSIGVLGVAPSAELYAVKVLGADGEGAISSIAQGLEWAGNNGMHVANLSLGSPSPSATLEQAVNSASSRGVLVVAASGNSGASSISYPARYANAMAVGATDQNNNRASFSQYGAGLDIVAPGVNIQSTYPGSTYACLNGTSMATPHVAGAAALVKQKNPSWSNVQIRNHLKNTATSLGSTNLYGSGLVNAEAATR

SEQ ID NO: 61232 - protein, 269 aa, Unidentified
AQTIPWGISRVQAPAAHNRGLTGSGVKVAVLDTGISTHPDLNIRGGASFVPGEPSTQDGNGHGTHVAGTIAALDNSIGVLGVAPSAELYAVKVLGADGEGAISSIAQGLEWAGNNGMHVANLSLGSPSPSATLEQAVNSATSRGVLVVAASGNSGASSISYPARYANAMAVGATDQNNNRASFSQYGAGLDIVAPGVNIQSTYPGSTYASLSGTSMATPHVAGAAALVKQKNPSWSNVQIRNHLKNTATSLGSTNLYGSGLVNAEAATR

SEQ ID NO: 61233 - protein, 269 aa, Unidentified
AQSVPWGISRVQAPAAHNRGLQGSGVKVAVLDTGISTHPDLNIRGGASFVPGEPSTQDGNGHGTHVAGTIAALNNSIGVLGVAPSAELYAVKVLGASGGGAISSIAQGLEWAGNNGMHVANLSLGSPSPSATLEQAVNSATSRGVLVVAASGNSGADSISYPARYANAMAVGATDQNNNRADFSQYGAGLDIVAPGVNVQSTYPGSTYASLNGTSMATPHVAGAALLVKQKNPSWSNVTIRDHLKNTATSLGSTNLYGSGLVNAHAATR

SEQ ID NO: 61234 - protein, 269 aa, Unidentified
AQSVPWGISRVQAPAAHNRRLTGSGVKVAVLDTGISTHPDLNIRGGASFVPGEPSTQDGNGHGTHVAGTIAALNNRIGVLGVAPSAELYAVKVLGASGGGAISSIAQGLEWAGNNGMHVANLSLGSPSPSATLEQAVNSATSRGVLVVAASGNSGAGSISYPARYANAMAVGATDQNNNRASFSQYGAGLDIVAPGVNVQSTYPQSAYFSLNGTSMATPHVAGAAVLVKQKNPSWSNVRIRNHLKNTATSLGSTNLYGSGLVNAEAATR

SEQ ID NO: 61235 - protein, 269 aa, Unidentified
AQSVPWGISRVQAPAAHNRGLTGSGVKVAVLDTGISTHPDLNIRGGASFVPGEPSTQDGNGHGTHAAGTIAALNNSIGVLGVAPSAELYAVKVLGASGSGVISSIAQGLEWAGNNGMHVANLSLGSPSPSATLEQAVNSATSRGVLVVAASGNSGADSISYPARYANAMAVGATDQNNNRASFSQYGAGLDIVAPGVNVQSTYPGSEYASLNGTSMATPHVAGAAVLVKHKNPSWSNVRIRDHLKKTATSLGSTNLYGSGLVNAEAATR

SEQ ID NO: 61236 - protein, 269 aa, Unidentified
AQSVPWGISRVQAPAAHNRGLQGSGVKVAVLDTGISTHPDLNIRGGASFVPGEPSTQDGNGHGTHVAGTIAALNNSIGVLGVAPSAELYAVKVLGASGGGAISSIAQGLEWAGNNGMHVANLSLGSPSPSATLEQAVNSATSRGVLVVAASGNSGADSISYPARYANAMAVGATDQNNNRAEFSQYGAGLDIVAPGVNVQSTYPGSTYASLNGTSMATPHVAGAAVLVKQKNPSWSNVTIRHHLKNTATSLGSTNLYGSGLVNAFAATR

SEQ ID NO: 61237 - protein, 269 aa, Unidentified
AQSVPWGISRVQAPAAHNRGLAGSGVKVAVLDTGISTHPDLNIRGGASFVPGEPSTQDGNGHGTHVAGTIAALDNSIGVLGVAPSAELYAVKVLSASGQGAISSIANGLEWAGNNGMHVANLSLGAPSPSATLEQAVNSATSRGVLVVAASGNSGAGSISYPARYANAMAVGATDQNNNRASFSQYGAGLDIVAPGVNVQSTYPGSTYASLNGTSMATPHVAGAAVLVKQKNPSWSNVRIRNHLKNTATSLGSTNLYGSGLVNAEAATR

SEQ ID NO: 61238 - protein, 269 aa, Unidentified
AQSVPWGISRVQAPAAHNRGLRGGGVKVAVLDTGISTHPDLNIRGGASFVPGEPSTQDGNGHGTHVAGTIAALNNSIGVLGVAPSAELYAVKVLAASGQGAISSIAQGLEWAGNNGMHVANLSLGAPSPSATLEQAVNSATSRGVLVVAASGNSGAGSISYPARYANAMAVGATDQNNNRASFSQYGAGLDIVAPGVNVQSTYPGSTYASQNGTSMATPHVAGAAVLVKQKNPSWSNVRIRNHLKNTATSLGSTNLYGSGLVNAEAATR

SEQ ID NO: 61239 - protein, 269 aa, Unidentified
AQSVPWGISRVQAPAAHNRGLRGGGVKVAVLDTGISTHPDLNIRGGASFVPGEPSTQDGNGHGTHVAGTIAALNNSIGVLGVAPSAELYAVKVLSASGGGAISSIAQGLEWAGNNGMHVANLSLGAPSPSATLEQAVNSATSRGVLVVAASGNSGAGSISYPARYANAMAVGATDQNNNRASFSQYGAGLDIVAPGVNVQSTYPGSTYASQNGTSMATPHVAGAAVLVKQKNPSWSNVRIRNHLKNTATSLGSTNLYGSGLVNAEAATR

SEQ ID NO: 61240 - protein, 269 aa, Unidentified
AQSVPWGISRVQAPASHNRGLAGSGVKVAVLDSGISTHPDLNIRGGASFVPGEPSTQDGNGHGTHVAGTIAALNNSIGVLGVAPSAELYAVKVLGASGGGAISSIAQGLEWAGLNGMHVANLSLGSPSPSATLEQAVNSATSRGVLVVAASGNSGAGSISYPARYANAMAVGATDQNNNRASFSQYGAGLDIVAPGVNVQSTVPGSAYASLNGTSMATPHVAGAAVLVKQKNPSWSNVQIRNHLKNTATSLGSTNLYGSGLVNAEAATR

SEQ ID NO: 61241 - protein, 269 aa, Unidentified
AQSVPWGISRVQAPAAHNRGLAGSGVKVAVLDTGISTHPDLNIRGGASFVPGEPSTQDGNGHGTHVAGTIAALNNSIGVLGVAPSAELYAVKVLGASGGGAISSIAQGLEWAGNNGMHVANLSLGSPSPSATLEQAVNSATSRGVLVVAASGNSGADSISYPARYANAMAVGATDQNNNRADFSQYGAGLDIVAPGVNVQSTYPGSTYASLNGTSMATPHVAGAALLVKQKNPSWSNVTIREHLKNTATSLGSTNLYGSGLVNAHAATR

SEQ ID NO: 61242 - protein, 269 aa, Unidentified
AQSVPWGISRVQAPAAHNRGLTGSGVKVAVLDTGISTHPDLNIRGGASFVPGEPSTQDGNGHGTHVAGTIAALNNSIGVLGVAPSAELYAVKVLGASGGGAISSIAQGLEWAGNNGMHVANLSLGSPSPSATLEQAVNSATSRGVLVVAASGNSGEESISYPARYANAMAVGATDQNNNRADFSQYGAGLDIVAPGVNVQSTYPGSTYASLNGTSMATPHVAGAAVLVKQKRPSWSNVRIRDHLKNTATSLGSTNLYGSGLVNAEAATR

SEQ ID NO: 61243 - protein, 269 aa, Unidentified
AQSVPWGISRVQAPAAHRRRLWGRGVKVAVLDTGISTHPDLNIRGGASFVPGEPSTQDGNGHGTHVAGTIAALDNSIGVLGVAPSAELYAVKVLGASGAGSVSSIAQGLEWAGNNGMHVANLSLGSPSPSATLEQAVNSATSRGVLVVAASGNSGAGSISYPARYANAMAVGATDQNNNRASFSQYGAGLDIVAPGVNVQSTYPQSAYFSLNGTSMATPHVAGAAALVKQKNPSWSNVQIRNRLKNTATSLGSTNLYGSGLVNAEAATR

SEQ ID NO: 61244 - protein, 269 aa, Unidentified
AQSVPWGISRVQAPAAHNRGLAGSGVKVAVLDTGISTHPDLNIRGGASFVPGEPSTQDGNGHGTHVAGTIAALNNSIGVLGVAPSAELYAVKVLGASGGGAISSIAQGLEWAGNNGMHVANLSLGSPSPSATLEQAVNSATSRGVLVVAASGNSGADSISYPARYANAMAVGATDQNNNRADFSQYGAGLDIVAPGVNVQSTYPGSTYASLNGTSMATPHVAGAALLVKQKNPSWSNVTIRHHLKNTATSLGSTNLYGSGLVNAHAATR

SEQ ID NO: 61245 - protein, 269 aa, Unidentified
AQSVPWGISRVQAPAAHNRGLAGSGVKVAVLDTGISTHPDLNIRGGASFVPGEPSTQDGNGHGTHVAGTIAALNNSIGVLGVAPSAELYAVKVLGASGGGAISSIAQGLEWAGNNGMHVANLSLGSESPSATLEQAVNSATSRGVLVVAASGNSGAESISYPARYANAMAVGATDQNNNRASFSQYGAGLDIVAPGVNVQSTYPGSTYASLNGTSMATPHVAGAAVLVKQKRPSWSNVRIRDHLKNTATSLGSTNLYGSGLVNAEAATR

SEQ ID NO: 61246 - protein, 269 aa, Unidentified
AQSVPWGISRVQAPAAHNRGLQGSGVKVAVLDTGISTHPDLNIRGGASFVPGEPSTQDGNGHGTHVAGTIAALNNSIGVLGVAPSAELYAVKVLGASGGGAISSIAQGLEWAGNNGMHVANLSLGSPSPSATLEQAVNSATSRGVLVVAASGNSGADSISYPARYANAMAVGATDQNNNRAEFSQYGAGLDIVAPGVNVQSTYPGSTYASLNGTSMATPHVAGAATLVKQKNPSWSNVVIRHHLKNTATSLGSTNLYGSGLVNAHAATR

SEQ ID NO: 61247 - protein, 275 aa, Unidentified
AQTIPWGISRVQAPAAHNRGLTGSGVKVAVLDTGIXSTHPDLNIRGGASFVPGEPXSTQDGNGHGTHVAGTIAALNNSIGVLGVAPSAELYAVKVLGADGEGAISSIAQGLEWAGNNGMHVANLSLGSPSPSATLEQAVNSATSRGVLVVAASGNSGAXSSISXXXYPARYANAMAVGATDQNNNRASFSQYGAGLDIVAPGVNILSTWPGSTYASLNGTSMATPHVAGAAALVKQKNPSWSNVQIRNHLKNTATSLGSTNLYGSGLVNAEAATR

SEQ ID NO: 61248 - protein, 269 aa, Unidentified
AQSVPWGISRVQAPAAHRRRLTGRGVKVAVLDTGISTHPDLNITGGASFVPGEPSTQDGNGHGTHVAGTIAALDNSIGVLGVAPSAELYAVKVLGASGGGAISSIAQGLEWAGNNGMHVANLSLGSPSPSATLEQAVNSATSRGVLVVAASGNSGAGSISYPARYANAMAVGATDQNNNRASFSQYGAGLDIVAPGVNVQSTYPGSTYASLNGTSMATPHVAGAAVLVKQKNPSWSNVRIRNHLKNTATSLGSTNLYGSGLVNAEAATR

SEQ ID NO: 61249 - protein, 269 aa, Unidentified
AQSVPWGISRVQAPAAHNRGLQGSGVKVAVLDTGISTHPDLNIRGGASFVPGEPSTQDGNGHGTHVAGTIAALNNSIGVLGVAPSAELYAVKVLGASGGGAISSIAQGLEWAGNNGMHVANLSLGSPSPSATLEQAVNSATSRGVLVVAASGNSGADSISYPARYANAMAVGATDQNNNRAEFSQYGAGLDIVAPGVNVQSTYPGSTYASLNGTSMATPHVAGAATLVKQKNPSWSNVTIREHLKNTATSLGSTNLYGSGLVNATAATR

SEQ ID NO: 61250 - protein, 269 aa, Unidentified
AQSVPWGISRVQAPAAHNRGLTGRGVKVAVLDTGISTHPDLNIRGGASFVPGEPSTQDGNGHGTHVAGTIAALDNNIGVLGVAPDAELYAVKVLGASGGGAISSIAQGLEWAGNNRMHVANLSLGSPSPSATLEQAVNSATSRGVLVVAASGNSGAGSISYPARYANAMAVGATDQNNNRASFSQYGAGLDIVAPGVNVQSTWPGSTYASLNGTSQATPHVAGAAALVKQKNPSWSNVQIRNRLKNTATSLGSTNLYGSGLVNAEAATR

SEQ ID NO: 61251 - protein, 269 aa, Unidentified
AQSVPWGISRVQAPAAHNRGLAGSGVKVAVLDTGISTHPDLNIRGGASFVPGEPSTQDGNGHGTHVAGTIAALNNSIGVLGVAPSAELYAVKVLGASGGGAISSIAQGLEWAGNNGMHVANLSLGSPSPSATLEQAVNSATSRGVLVVAASGNSGADSISYPARYANAMAVGATDQNNNRADFSQYGAGLDIVAPGVNVQSTYPGSTYASLNGTSMATPHVAGAASLVKQKNPSWSNVVIRDHLKNTATSLGSTNLYGSGLVNATAATR

SEQ ID NO: 61252 - protein, 269 aa, Unidentified
AQSVPWGISRVQAPAAHNRGLAGGGVKVAVLDTGISTHPDLNIRGGASFVPGEPSTQDGNGHGTHVAGTIAALDNSIGVLGVAPSAELYAVKVLSASGNGAISSIAQGLEWAGNNGMHVANLSLGAPSPSATLEQAVNSATSRGVLVVAASGNSGAGSISYPARYANAMAVGATDQNNNRASFSQYGAGLDIVAPGVNVQSTYPGSTYASLNGTSMATPHVAGAAVLVKQKNPSWSNVRIRNHLKNTATSLGSTNLYGSGLVNAEAATR

SEQ ID NO: 61253 - protein, 269 aa, Unidentified
AQSVPWGISRVQAPAAHNRGLQGSGVKVAVLDTGISTHPDLNIRGGASFVPGEPSTQDGNGHGTHVAGTIAALNNSIGVLGVAPSAELYAVKVLGASGGGAISSIAQGLEWAGNNGMHVANLSLGSPSPSATLEQAVNSATSRGVLVVAASGNSGADSISYPARYANAMAVGATDQNNNRAEFSQYGAGLDIVAPGVNVQSTYPGSTYASLNGTSMATPHVAGAATLVKQKNPSWSNVTIRHHLKNTATSLGSTNLYGSGLVNAHAATR

SEQ ID NO: 61254 - protein, 269 aa, Unidentified
AQSVPWGISRVQAPASHNRGLTGRGVKVAVLDTGISTHPDLNIRGGASFVPGEPSTQDGNGHGTHVAGTIAALNNSIGVLGVAPSAELYAVKVLGASGGGAISSIAQGLEWAGANGMHVANLSLGNPSPSATLEQAVNSATSRGVLVVAASGNSGAGSISYPARYANAMAVGATDQNNNRASFSQYGAGLDIVAPGVNVQSTVPGSAYASLNGTSMATPHVAGAAVLVKQKNPSWSNVQIRNHLKNTATSLGSTNLYGSGLVNAEAATR

SEQ ID NO: 61255 - protein, 269 aa, Unidentified
AQSVPWGISRVQAPAAHNRGLAGSGVKVAVLDTGISTHPDLNIRGGASFVPGEPSTQDGNGHGTHVAGTIAALNNSIGVLGVAPSAELYAVKVLGASGGGAISSIAQGLEWAGLNGMHVANLSLGSPSPSATLEQAVNSATSRGVLVVAASGNSGADSISYPARYANAMAVGATDQNNNRASFSQYGAGLDIVAPGVNVQSTYPGSTYASLNGTSMATPHVAGAAVLVKQKNPSWSNVRIRDHLKNTATSLGSTNLYGSGLVNAFAATR

SEQ ID NO: 61256 - protein, 269 aa, Unidentified
AQSVPWGISRVQAPAAHNRKLTGGGVKVAVLDTGISTHPDLNIRGGASFVPGEPSTQDGEGHGTHVAGTIAALNNNIGVLGVAPSAELYAVKVLSASGNGSVSSIAGGLEWAGLNGMHVANLSLGAPSPSATLEQAVNSATSRGVLVVAASGNSGAGSISYPARYANAMAVGATDQNNNRADFSQYGAGLDIVAPGVNVQSTYPGSTYASLNGTSMATPHVAGAAALVKQKNPSWSNVQIRNHLKNTATSLGSTNLYGSGLVNAEAATR

SEQ ID NO: 61257 - protein, 269 aa, Unidentified
AQSVPWGISRVQAPAAHNRGLAGGGVKVAVLDTGISTHPDLNIRGGASFVPGEPSTQDGNGHGTHVAGTIAALNNNIGVLGVAPSAELYAVKVLSASGQGAISSIAQGLEWAGNNGMHVANLSLGSPSPSATLEQAVNSATSRGVLVVAASGNSGAGSISYPARYANAMAVGATDQNNNRASFSQYGAGLDIVAPGVNVQSTYPGSTYASQNGTSMATPHVAGAAVLVKQKNPSWSNVRIRNHLKNTATSLGSTNLYGSGLVNAEAATR

SEQ ID NO: 61258 - protein, 269 aa, Unidentified
AQSVPWGISRVQAPAAHNRGLTGSGVKVAVLDTGISTHPDLNIRGGASFVPGEPSTQDGNGHGTHVAGTIAALNNSIGVLGVAPSAELYAVKVLGASGGGAISSIAQGLEWAGNNGMHVANLSLGSESPSATLEQAVNSATSRGVLVVAASGNSGEGSISYPARYANAMAVGATDQNNNRADFSQYGAGLDIVAPGVNVQSTYPGSTYASLNGTSMATPHVAGAAVLVKQKRPSWSNVRIRDHLKNTATSLGSTNLYGSGLVNAEAATR

SEQ ID NO: 61259 - protein, 269 aa, Unidentified
AQSVPWGISRVQAPAAHNRRLWGSGVKVAVLDTGISTHPDLNIRGGASFVPGEPSTQDGNGHGTHVAGTIAALNNSIGVLGVAPSAELYAVKVLGASGAGAISSIAQGLEWAGNNGMHVANLSLGSPSPSATLEQAVNSATSRGVLVVAASGNSGAGSISYPARYANAMAVGATDQNNNRASFSQYGAGLDLVAPGVNVQSTYPQSTYFSLNGTSMATPHVAGAAVLVKQKNPSWSNVRIRNHLKNTATSLGSTNLYGSGLVNAEAATR

SEQ ID NO: 61260 - protein, 269 aa, Unidentified
AQSVPWGISRVQAPAAHNRGLAGSGVKVAVLDTGISTHPDLNIRGGASFVPGEPSTQDGNGHGTHVAGTIAALNNSIGVLGVAPSAELYAVKVLGASGGGAISSIAQGLEWAGNNGMHVANLSLGSPSPSATLEQAVNSATSRGVLVVAASGNSGADSISYPARYANAMAVGATDQNNNRAEFSQYGAGLDIVAPGVNVQSTYPGSTYASLNGTSMATPHVAGAALLVKQKNPSWSNVTIRDHLKNTATSLGSTNLYGSGLVNAHAATR

SEQ ID NO: 61261 - protein, 269 aa, Unidentified
AQSVPWGISRVQAPAAHNRGLAGSGVKVAVLDTGISTHPDLNIRGGASFVPGEPSTQDGNGHGTHVAGTIAALNNSIGVLGVAPSAELYAVKVLGASGGGAISSIAQGLEWAGNNGMHVANLSLGSPSPSATLEQAVNSATSRGVLVVAASGNSGADSISYPARYANAMAVGATDQNNNRADFSQYGAGLDIVAPGVNVQSTYPGSTYASLNGTSMATPHVAGAASLVKQKNPSWSNVVIRHHLKNTATSLGSTNLYGSGLVNATAATR

SEQ ID NO: 61262 - protein, 269 aa, Unidentified
AQSVPWGISRVQAPASHNRGLAGSGVKVAVLDTGISTHPDLNIRGGASFVPGEPSTQDGNGHGTHVAGTIAALNNSIGVLGVAPSAELYAVKVLGASGGGAISSIAQGLEWAGANGMHVANLSLGSPSPSATLEQAVNSATSRGVLVVAASGNSGAGSISYPARYANAMAVGATDQNNNRASFSQYGAGLDIVAPGVNVQSTVPQSAYASLNGTSMATPHVAGAAVLVKQKNPSWSNVQIRNHLKNTATSLGSTNLYGSGLVNAEAATR

SEQ ID NO: 61263 - protein, 269 aa, Unidentified
AQSVPWGISRVQAPAAHNRGLQGSGVKVAVLDTGISTHPDLNIRGGASFVPGEPSTQDGNGHGTHVAGTIAALNNSIGVLGVAPSAELYAVKVLGASGGGAISSIAQGLEWAGNNGMHVANLSLGSPSPSATLEQAVNSATSRGVLVVAASGNSGADSISYPARYANAMAVGATDQNNNRAEFSQYGAGLDIVAPGVNVQSTYPGSTYASLNGTSMATPHVAGAATLVKQKNPSWSNVRIRDHLKNTATSLGSTNLYGSGLVNALAATR

SEQ ID NO: 61264 - protein, 269 aa, Unidentified
AQSVPWGISRVQAPASHNRGLTGSGVKVAVLDTGISTHPDLNIRGGASFVPGEPSTQDGNGHGTHVAGTIAALNNSIGVLGVAPSAELYAVKVLGASGGGAISSIAQGLEWAGANGMHVANLSLGNPSPSATLEQAVNSATSRGVLVVAASGNSGAGSISYPARYANAMAVGATDQNNNRASFSQYGAGLDIVAPGVNVQSTVPQSAYASLNGTSMATPHVAGAAVLVKQKNPSWSNVQIRNHLKNTATSLGSTNLYGSGLVNAEAATR

SEQ ID NO: 61265 - protein, 269 aa, Unidentified
AQSVPWGISRVQAPAAHRRGLWGRGVKVAVLDTGISTHPDLNIRGGASFVPGEPSTQDGNGHGTHVAGTIAALDNSIGVLGVAPSAELYAVKVLGASGAGSVSSIAQGLEWAGANGMHVANLSLGSPSPSATLEQAVNSATSRGVLVVAASGNSGAGSISYPARYANAMAVGATDQDNNRASFSQYGAGLDIVAPGVNVQSTYPQSTYFSLNGTSMATPHVAGAAALVKQKNPSWSNVQIRNRLKNTATSLGSTNLYGSGLVNAEAATR

SEQ ID NO: 61266 - protein, 269 aa, Unidentified
AQSVPWGISRVQAPAAHNRGLAGSGVKVAVLDTGISTHPDLNIRGGASFVPGEPSTQDGNGHGTHVAGTIAALNNSIGVLGVAPSAELYAVKVLAASGNGAISSIAQGLEWAGNNGMHVANLSLGASSPSATLEQAVNSATSRGVLVVAASGNSGAGSISYPARYANAMAVGATDQNNNRASFSQYGAGLDIVAPGVNVQSTYPGSTYASQNGTSMATPHVAGAAVLVKQKNPSWSNVRIRNHLKNTATSLGSTNLYGSGLVNAEAATR

SEQ ID NO: 61267 - protein, 269 aa, Unidentified
AQSVPWGISRVQAPAAHNRGLAGRGVKVAVLDTGISTHPDLNIRGGASFVPGEPSTQDGNGHGTHVAGTIAALNNSIGVLGVAPSAELYAVKVLGASGGGAISSIAQGLEWAGNNGMHVANLSLGSESPSATLEQAVNSATSRGVLVVAASGNSGAGSISYPARYANAMAVGATDQNNNRASFSQYGAGLDIVAPGVNVQSTYPGSTYASLNGTSMATPHVAGAAVLVKQKNPSWSNVRIRNHLKNTATSLGSTNLYGSGLVNWEVATR

SEQ ID NO: 61268 - protein, 269 aa, Unidentified
AQSVPWGISRVQAPAAHNRGLAGSGVKVAVLDTGISTHPDLNIRGGASFVPGEPSTQDGNGHGTHVAGTIAALNNSIGVLGVAPSAELYAVKVLGASGGGAISSIAQGLEWAGNNGMHVANLSLGSPSPSATLEQAVNSATSRGVLVVAASGNSGADSISYPARYANAMAVGATDQNNNRAEFSQYGAGLDIVAPGVNVQSTYPGSTYASLNGTSMATPHVAGAAVLVKQKNPSWSNVVIREHLKNTATSLGSTNLYGSGLVNAHAATR

SEQ ID NO: 61269 - protein, 269 aa, Unidentified
AQSVPWGISRVRAPAAHNRGLTGSGVKVAVLDTGISTHPDLNIRGGVSFVPGEPSTQDGNGHGTHAAGTIAALDNSIGVLGVAPSAELYAVKVLGASGSGAISSIAQGLEWAGNNGMHVANLSLGSPSPSATLEQAVNSATSRGVLVVAASGNSGADSISYPARYANAMAVGATDQNNNRASFSQYGAGLDIVAPGVNVQSTYPGSTYASLNGTSMATPHVAGAAVLVKHKNPSWSNVRIRNHLKNTATSLGSTNLYGSGLVNAEAATR

SEQ ID NO: 61270 - protein, 269 aa, Unidentified
AQSVPWGISRVQAPAAHNRGLQGSGVKVAVLDTGISTHPDLNIRGGASFVPGEPSTQDGNGHGTHVAGTIAALNNSIGVLGVAPSAELYAVKVLGASGGGAISSIAQGLEWAGNNGMHVANLSLGSPSPSATLEQAVNSATSRGVLVVAASGNSGADSISYPARYANAMAVGATDQNNNRADFSQYGAGLDIVAPGVNVQSTYPGSTYASLNGTSMATPHVAGAASLVKQKNPSWSNVRIRHHLKNTATSLGSTNLYGSGLVNATAATR

SEQ ID NO: 61271 - protein, 269 aa, Unidentified
AQSVPWGISRVQAPAAHNRGLAGRGVKVAVLDTGISTHPDLNIRGGASFVPGEPSTQDGNGHGTHVAGTIAALNNSIGVLGVAPSAELYAVKVLGASGGGAISSIAQGLEWAGNNGMHVANLSLGSPSPSATLEQAVNSATSRGVLVVAASGNSGEGSISYPARYANAMAVGATDQNNNRASFSQYGAGLDIVAPGVNVQSTYPGSTYASLNGTSMATPHVAGAAVLVKQKRPSWSNVRIRDHLKNTATSLGSTNLYGSGLVNAEAATR

SEQ ID NO: 61272 - protein, 269 aa, Unidentified
AQSVPWGISRVQAPAAHRRGLWGRGVKVAVLDTGISTHPDLNIRGGASFVPGEPSTQDGNGHGTHVAGTIAALDNSIGVLGVAPSAELYAVKVLGASGAGSVSSIAQGLEWAGANGMHVANLSLGSPSPSATLEQAVNSATSRGVLVVAASGNSGAGSISYPARYANAMAVGATDQNNNRASFSQYGAGLDLVAPGVNVQSTYPQSAYASLNGTSMATPHVAGAAALVKQKNPSWSNVQIRNRLKNTATSLGSTNLYGSGLVNAEAATR

SEQ ID NO: 61273 - protein, 269 aa, Unidentified
AQSVPWGISRVQAPAAHNRGLAGSGVKVAVLDTGISTHPDLNIRGGASFVPGEPSTQDGNGHGTHVAGTIAALNNSIGVLGVAPSAELYAVKVLGASGSGAISSIAQGLEWAGNNGMHVANLSLGIESPSATLEQAVNSATSRGVLVVAASGNSGADSISYPARYANAMAVGATDQNNNRADFSQYGAGLDIVAPGVNVQSTYPGSTYASLNGTSMATPHVAGAAVLVKQKNPSWSNVQIRDHLKNTATSLGSTNLYGSGLVNAFAATR

SEQ ID NO: 61274 - protein, 269 aa, Unidentified
AQSVPWGISRVQAPAAHNRGLQGSGVKVAVLDTGISTHPDLNIRGGASFVPGEPSTQDGNGHGTHVAGTIAALNNSIGVLGVAPSAELYAVKVLGASGGGAISSIAQGLEWAGNNGMHVANLSLGSPSPSATLEQAVNSATSRGVLVVAASGNSGADSISYPARYANAMAVGATDQNNNRADFSQYGAGLDIVAPGVNVQSTYPGSTYASLNGTSMATPHVAGAASLVKQKNPSWSNVVIREHLKNTATSLGSTNLYGSGLVNATAATR

SEQ ID NO: 61275 - protein, 269 aa, Unidentified
AQSVPWGISRVQAPAAHRRGLWGRGVKVAVLDTGISTHPDLNIRGGASFVPGEPSTQDGNGHGTHVAGTIAALDNSIGVLGVAPSAELYAVKVLGASGSGSVSSIAQGLEWAGANGMHVANLSLGSPSPSATLEQAVNSATSRGVLVVAASGNSGAGSISYPARYANAMAVGATDQDNNRASFSQYGAGLDLVAPGVNVQSTHPQSTYASLNGTSMATPHVAGAAALVKQKNPSWSNVQIRNRLKNTATSLGSTNLYGSGLVNAEAATR

SEQ ID NO: 61276 - protein, 269 aa, Unidentified
AQSVPWGISRVQAPAAHNRRLWGSGVKVAVLDTGISTHPDLNIRGGASFVPGEPSTQDGNGHGTHVAGTIAALNNSIGVLGVAPSAELYAVKVLGASGAGAISSIAQGLEWAGNNGMHVANLSLGSPSPSATLEQAVNSATSRGVLVVAASGNSGAGSISYPARYANAMAVGATDQDNNRASFSQYGAGLDLVAPGVNVQSTYPGSTYFSLNGTSMATPHVAGAAVLVKQKNPSWSNVRIRNHLKNTATSLGSTNLYGSGLVNAEAATR

SEQ ID NO: 61277 - protein, 269 aa, Unidentified
AQSVPWGISRVQAPAAHNRGLQGSGVKVAVLDTGISTHPDLNIRGGASFVPGEPSTQDGNGHGTHVAGTIAALNNSIGVLGVAPSAELYAVKVLGASGGGAISSIAQGLEWAGNNGMHVANLSLGSPSPSATLEQAVNSATSRGVLVVAASGNSGADSISYPARYANAMAVGATDQNNNRAEFSQYGAGLDIVAPGVNVQSTYPGSTYASLNGTSMATPHVAGAATLVKQKNPSWSNVVIRHHLKNTATSLGSTNLYGSGLVNAFAATR

SEQ ID NO: 61278 - protein, 269 aa, Unidentified
AQSVPWGISRVQAPAAHNRRLTGSGVKVAVLDTGISTHPDLNIRGGASFVPGEPSTQDGNGHGTHVAGTIAALNNRIGVLGVAPSAELYAVKVLGASGAGAISSIAQGLEWAGANGMHVANLSLGSPSPSATLEQAVNSATSRGVLVVAASGNSGAGSISYPARYANAMAVGATDQDNNRASFSQYGAGLDIVAPGVNVQSTYPQSTYASLNGTSMATPHVAGAAVLVKQKNPSWSNVRIRNHLKNTATSLGSTNLYGSGLVNAEAATR

SEQ ID NO: 61279 - protein, 269 aa, Unidentified
AQSVPWGISRVQAPAAHNRGLAGSGVKVAVLDTGISTHPDLNIRGGASFVPGEPSTQDGNGHGTHVAGTIAALNNSIGVLGVAPSAELYAVKVLGASGGGAISSIAQGLEWAGNNGMHVANLSLGSPSPSATLEQAVNSATSRGVLVVAASGNSGADSISYPARYANAMAVGATDQNNNRAEFSQYGAGLDIVAPGVNVQSTYPGSTYASLNGTSMATPHVAGAATLVKQKNPSWSNVTIREHLKNTATSLGSTNLYGSGLVNALAATR

SEQ ID NO: 61280 - protein, 269 aa, Unidentified
AQSVPWGISRVQAPAAHNRGLQGSGVKVAVLDTGISTHPDLNIRGGASFVPGEPSTQDGNGHGTHVAGTIAALNNSIGVLGVAPSAELYAVKVLGASGGGAISSIAQGLEWAGNNGMHVANLSLGSPSPSATLEQAVNSATSRGVLVVAASGNSGADSISYPARYANAMAVGATDQNNNRADFSQYGAGLDIVAPGVNVQSTYPGSTYASLNGTSMATPHVAGAALLVKQKNPSWSNVTIRHHLKNTATSLGSTNLYGSGLVNAHAATR

SEQ ID NO: 61281 - protein, 269 aa, Unidentified
AQSVPWGISRVQAPAAHNRGLAGSGVKVAVLDTGISTHPDLNIRGGASFVPGEPSTQDGNGHGTHVAGTIAALNNSIGVLGVAPSAELYAVKVLGASGGGAISSIAQGLEWAGNNGMHVANLSLGSPSPSATLEQAVNSATSRGVLVVAASGNSGADSISYPARYANAMAVGATDQNNNRAEFSQYGAGLDIVAPGVNVQSTYPGSTYASLNGTSMATPHVAGAASLVKQKNPSWSNVVIREHLKNTATSLGSTNLYGSGLVNAHAATR

SEQ ID NO: 61282 - protein, 269 aa, Unidentified
AQSVPWGISRVQAPAAHNRGLAGSGVKVAVLDTGISTHPDLNIRGGASFVPGEPSTQDGNGHGTHVAGTIAALNNSIGVLGVAPSAELYAVKVLGASGGGAISSIAQGLEWAGNNGMHVANLSLGSPSPSATLEQAVNSATSRGVLVVAASGNSGADSISYPARYANAMAVGATDQNNNRAEFSQYGAGLDIVAPGVNVQSTYPGSTYASLNGTSMATPHVAGAALLVKQKNPSWSNVVIREHLKNTATSLGSTNLYGSGLVNAHAATR

SEQ ID NO: 61283 - protein, 269 aa, Unidentified
AQSVPWGISRVQAPAAHNRGLQGSGVKVAVLDTGISTHPDLNIRGGASFVPGEPSTQDGNGHGTHVAGTIAALNNSIGVLGVAPSAELYAVKVLGASGGGAISSIAQGLEWAGNNGMHVANLSLGSPSPSATLEQAVNSATSRGVLVVAASGNSGADSISYPARYANAMAVGATDQNNNRAEFSQYGAGLDIVAPGVNVQSTYPGSTYASLNGTSMATPHVAGAASLVKQKNPSWSNVVIRDHLKNTATSLGSTNLYGSGLVNAFAATR

SEQ ID NO: 61284 - protein, 269 aa, Unidentified
AQSVPWGISRVQAPAAHRRRLWGRGVKVAVLDTGISTHPDLNIRGGASFVPGEPSTQDGNGHGTHVAGTIAALDNSIGVLGVAPSAELYAVKVLGASGSGSVSSIAQGLEWAGANGMHVANLSLGSPSPSATLEQAVNSATSRGVLVVAASGNSGAGSISYPARYANAMAVGATDQNNNRASFSQYGAGLDLVAPGVNVQSTYPGSAYFSLNGTSMATPHVAGAAALVKQKNPSWSNVQIRNRLKNTATSLGSTNLYGSGLVNAEAATR

SEQ ID NO: 61285 - protein, 269 aa, Unidentified
AQSVPWGISRVQAPAAHNRGLAGSGVKVAVLDTGISTHPDLNIRGGASFVPGEPSTQDGNGHGTHVAGTIAALNNSIGVLGVAPSAELYAVKVLGASGGGAISSIAQGLEWAGNNGMHVANLSLGSPSPSATLEQAVNSATSRGVLVVAASGNSGADSISYPARYANAMAVGATDQNNNRAEFSQYGAGLDIVAPGVNVQSTYPGSTYASLNGTSMATPHVAGAATLVKQKNPSWSNVTIRHHLKNTATSLGSTNLYGSGLVNAHAATR

SEQ ID NO: 61286 - protein, 269 aa, Unidentified
AQSVPWGISRVQAPAAHNRGLAGSGVKVAVLDTGISTHPDLNIRGGASFVPGEPSTQDGNGHGTHVAGTIAALDNNIGVLGVAPSAELYAVKVLAASGQGAISSIAQGLEWAGNNGMHVANLSLGSPSPSATLEQAVNSATSRGVLVVAASGNSGAGSISYPARYANAMAVGATDQNNNRASFSQYGAGLDIVAPGVNVQSTYPGSTYASQNGTSMATPHVAGAAVLVKQKNPSWSNVRIRNHLKNTATSLGSTNLYGSGLVNAEAATR

SEQ ID NO: 61287 - protein, 269 aa, Unidentified
AQSVPWGISRVQAPAAHNRGLTGRGVKVAVLDTGISTHPDLNIRGGASFVPGEPSTQDGNGHGTHVAGTIAALNNSIGVLGVAPSAELYAVKVLGASGGGAISSIAQGLEWAGNNGMHVANLSLGSPSPSATLEQAVNSATSRGVLVVAASGNSGEGSISYPARYANAMAVGATDQNNNRADFSQYGAGLDIVAPGVNVQSTYPGSTYASLNGTSMATPHVAGAAVLVKQKRPSWSNVRIRDHLKNTATSLGSTNLYGSGLVNAEAATR

SEQ ID NO: 61288 - protein, 269 aa, Unidentified
AQSVPWGISRVQAPAAHNRGLAGSGVKVAVLDTGISTHPDLNIRGGASFVPGEPSTQDGNGHGTHVAGTIAALNNSIGVLGVAPSAELYAVKVLGASGGGAISSIAQGLEWAGNNGMHVANLSLGSPSPSATLEQAVNSATSRGVLVVAASGNSGADSISYPARYANAMAVGATDQNNNRADFSQYGAGLDIVAPGVNVQSTYPGSTYASLNGTSMATPHVAGAAVLVKQKNPSWSNVVIRDHLKNTATSLGSTNLYGSGLVNAHAATR

SEQ ID NO: 61289 - protein, 269 aa, Unidentified
AQSVPWGISRVQAPAAHRRGLTGRGVKVAVLDTGISTHPDLNIRGGASFVPGEPSTQDGNGHGTHVAGTIAALDNSIGVLGVAPSAELYAVKVLGASGAGSVSSIAQGLEWAGANGMHVANLSLGSPSPSATLEQAVNSATSRGVLVVAASGNSGAGSISYPARYANAMAVGATDQDNNRASFSQYGAGLDIVAPGVNVQSTYPQSAYFSLNGTSMATPHVAGAAALVKQKNPSWSNVQIRNRLKNTATSLGSTNLYGSGLVNAEAATR

SEQ ID NO: 61290 - protein, 269 aa, Unidentified
AQSVPWGISRVQAPAAHNRGLAGSGVKVAVLDTGISTHPDLNIRGGASFVPGEPSTQDGNGHGTHVAGTIAALNNSIGVLGVAPSAELYAVKVLGASGGGAISSIAQGLEWAGNNGMHVANLSLGSPSPSATLEQAVNSATSRGVLVVAASGNSGADSISYPARYANAMAVGATDQNNNRADFSQYGAGLDIVAPGVNVQSTYPGSTYASLNGTSMATPHVAGAALLVKQKNPSWSNVRIREHLKNTATSLGSTNLYGSGLVNALAATR

SEQ ID NO: 61291 - protein, 269 aa, Unidentified
AQSVPWGISRVQAPAAHNRGLTGFGVKVAVLDSGISTHPDLNIRGGASFVPGEPSTQDGNGHGTHVAGTIAALNNSIGVLGVAPSAELYAVKVLGASGGGAISSIAQGLEWAGANGMHVANLSLGNPSPSATLEQAVNSATSRGVLVVAASGNSGAGSISYPARYANAMAVGATDQNNNRASFSQYGAGLDIVAPGVNVQSTAPGSAYASLNGTSMATPHVAGAAVLVKQKNPSWSNVQIRNHLKNTATSLGSTNLYGSGLVNAEAATR

SEQ ID NO: 61292 - protein, 269 aa, Unidentified
AQSVPWGISRVQAPAAHNRRLTGSGVKVAVLDTGISTHPDLNIRGGASFVPGEPSTQDGNGHGTHAAGTIAALNNSIGVLGVAPSAELYAVKVLGASGSGAISSIAQGLEWAGNNGMHVANLSLGSPSPSATLEQAVNSATSRGVLVVAASGNSGADSISYPARYANAMAVGATDQNNNRASFSQYGAGLDIVAPGVNVQSTYPGSTYASLNGTSMATPHVAGAAVLVKHKNPSWSNVRIRDHLKKTATSLGSTNLYGSGLVNAEAATR

SEQ ID NO: 61293 - protein, 269 aa, Unidentified
AQSVPWGISRVRAPAAHNRGLTGSGVKVAVLDTGISTHPDLNIRGGASFVPGEPSTQDGNGHGTHAAGTIAALDNSIGVLGVAPSAELYAVKVLGASGSGAISSIAQGLEWAGNNGMHVANLSLGSPSPSATLEQAVNSATSRGVLVVAASGNSGADSISYPARYANAMAVGATDQNNNRASFSQYGAGLDIVAPGVNVQSTYPGSTLASLNGTSMATPHVAGAAVLVKHKNPSWSNVRIRNHLKNTATSLGSTNLYGSGLVNAEAATR

SEQ ID NO: 61294 - protein, 269 aa, Unidentified
AQSVPWGISRVQAPAAHNRGLQGSGVKVAVLDTGISTHPDLNIRGGASFVPGEPSTQDGNGHGTHVAGTIAALNNSIGVLGVAPSAELYAVKVLGASGGGAISSIAQGLEWAGNNGMHVANLSLGSPSPSATLEQAVNSATSRGVLVVAASGNSGADSISYPARYANAMAVGATDQNNNRAEFSQYGAGLDIVAPGVNVQSTYPGSTYASLNGTSMATPHVAGAALLVKQKNPSWSNVRIRDHLKNTATSLGSTNLYGSGLVNATAATR

SEQ ID NO: 61295 - protein, 269 aa, Unidentified
AQSVPWGISRVQAPAAHNHRLWGSGVKVAVLDTGISTHPDLNIRGGASFVPGEPSTQDGNGHGTHVAGTIAALNNRIGVLGVAPSAELYAVKVLGASGGGAISSIAQGLEWAGNNGMHVANLSLGSPSPSATLEQAVNSATSRGVLVVAASGNSGAGSISYPARYANAMAVGATDQNNNRASFSQYGAGLDIVAPGVNVQSTYPQSTYASLNGTSMATPHVAGAAVLVKQKNPSWSNVRIRNHLKNTATSLGSTNLYGSGLVNAEAATR

SEQ ID NO: 61296 - protein, 269 aa, Unidentified
AQSVPWGISRVQAPAAHNRGLQGSGVKVAVLDTGISTHPDLNIRGGASFVPGEPSTQDGNGHGTHVAGTIAALNNSIGVLGVAPSAELYAVKVLGASGGGAISSIAQGLEWAGNNGMHVANLSLGSPSPSATLEQAVNSATSRGVLVVAASGNSGADSISYPARYANAMAVGATDQNNNRADFSQYGAGLDIVAPGVNVQSTYPGSTYASLNGTSMATPHVAGAASLVKQKNPSWSNVVIRHHLKNTATSLGSTNLYGSGLVNAHAATR

SEQ ID NO: 61297 - protein, 269 aa, Unidentified
AQSVPWGISRVQAPASHNRGLTGSGVKVAVLDSGISTHPDLNIRGGASFVPGEPSTQDGNGHGTHVAGTIAALNNSIGVLGVAPSAELYAVKVLGASGGGAISSIAQGLEWAGLNGMHVANLSLGNPSPSATLEQAVNSATSRGVLVVAASGNSGAGSISYPARYANAMAVGATDQNNNRASFSQYGAGLDIVAPGVNVQSTAPQSTYASLNGTSMATPHVAGAAVLVKQKNPSWSNVQIRNHLKNTATSLGSTNLYGSGLVNAEAATR

SEQ ID NO: 61298 - protein, 269 aa, Unidentified
AQSVPWGISRVQAPAAHNRGLTGSGVKVAVLDTGISTHPDLNIRGGASFVPGEPSTQDGNGHGTHVAGTIAALNNSIGVLGVAPSAELYAVKVLGASGGGAISSIAQGLEWAGNNGMHVANLSLGSPAPSATLEQAVNSATSRGVLVVAASGNSGEGSISYPARYANAMAVGATDQNNNRADFSQYGAGLDIVAPGVNVQSTYPGSTYASLNGTSMATPHVAGAAVLVKQKNPSWSNVRIRDRLKNTATSLGSTNLYGSGLVNAEAATR

SEQ ID NO: 61299 - protein, 269 aa, Unidentified
AQSVPWGISRVQAPAAHNRGLQGSGVKVAVLDTGISTHPDLNIRGGASFVPGEPSTQDGNGHGTHVAGTIAALNNSIGVLGVAPSAELYAVKVLGASGGGAISSIAQGLEWAGNNGMHVANLSLGSPSPSATLEQAVNSATSRGVLVVAASGNSGADSISYPARYANAMAVGATDQNNNRADFSQYGAGLDIVAPGVNVQSTYPGSTYASLNGTSMATPHVAGAALLVKQKNPSWSNVTIRDHLKNTATSLGSTNLYGSGLVNATAATR

SEQ ID NO: 61300 - protein, 269 aa, Unidentified
AQSVPWGISRVQAPAAHNRGLQGSGVKVAVLDTGISTHPDLNIRGGASFVPGEPSTQDGNGHGTHVAGTIAALNNSIGVLGVAPSAELYAVKVLGASGGGAISSIAQGLEWAGNNGMHVANLSLGSPSPSATLEQAVNSATSRGVLVVAASGNSGADSISYPARYANAMAVGATDQNNNRADFSQYGAGLDIVAPGVNVQSTYPGSTYASLNGTSMATPHVAGAATLVKQKNPSWSNVVIRDHLKNTATSLGSTNLYGSGLVNAFAATR

SEQ ID NO: 61301 - protein, 269 aa, Unidentified
AQSVPWGISRVQAPAAHRRGLTGRGVKVAVLDTGISTHPDLNITGGASFVPGEPSTQDGNGHGTHVAGTIAALDNSIGVLGVAPSAELYAVKVLGASGGGAISSIAQGLEWAGNNGMHVANLSLGSPSPSATLEQAVNSATSRGVLVVAASGNSGAGSISYPARYANAMAVGATDQNNNRASFSQYGAGLDIVAPGVNVQSTYPGSTYASLNGTSMATPHVAGAAVLVKQKNPSWSNVRIRNHLKNTATSLGSTNLYGSGLVRAEAATR

SEQ ID NO: 61302 - protein, 269 aa, Unidentified
AQSVPWGISRVQAPAAHNRKLTGGGVKVAVLDTGISTHPDLNIRGGASFVPGEPSTQDGEGHGTHVAGTIAALNNNIGVLGVAPSAELYAVKVLSASGNGSVSSIAGGLEWAGLNGMHVANLSLGSPSPSATLEQAVNSATSRGVLVVAASGNSGAGSISYPARYANAMAVGATDQNNNRADFSQYGAGLDIVAPGVNVQSTYPGSTYASQNGTSMATPHVAGAAALVKQKNPSWSNVQIRNHLKNTATSLGSTNLYGSGLVNAEAATR

SEQ ID NO: 61303 - protein, 269 aa, Unidentified
AQSVPWGISRVQAPAAHNRGLTGSGVKVAVLDTGISTHPDLNIRGGASFVPGEPSTQDGNGHGTHAAGTIAALDNSIGVLGVAPSAELYAVKVLGASGSGAISSIAQGLEWAGNNGMHVANLSLGSPSPSATLEQAVNSATSRGVLVVAASGNSGADSISYPARYANAMAVGATDQKNNRASFSQYGAGLDIVAPGVNVLSTYPGSTYASLNGTSMATPHVAGAAVLVKHKNPSWSNVRIRNHLKNTATSLGSTNLYGSGLVNAEAATR

SEQ ID NO: 61304 - protein, 269 aa, Unidentified
AQSVPWGISRVQAPAAHNRGLAGRGVKVAVLDTGISTHPDLNIRGGASFVPGEPSTQDGNGHGTHVAGTIAALNNSIGVLGVAPSAELYAVKVLGASGGGAISSIAQGLEWAGNNGMHVANLSLGSPSPSATLEQAVNSATSRGVIVVAASGNSGEGSISYPARYANAMAVGATDQNNNRASFSQYGAGLDIVAPGVNVQSTYPGSTYASLNGTSMATPHVAGAAVLVKQKNPSWSNVRIRDHLKNTATSLGSTNLYGSGLVNAEAATR

SEQ ID NO: 61305 - protein, 269 aa, Unidentified
AQSVPWGISRVQAPAAHNRGLAGSGVKVAVLDTGISTHPDLRIRGGASFVPGEPSTQDGNGHGTHVAGTIAALNNSIGVLGVAPSAELYAVKVLGASGSGAISSIAQGLEWAGNNRMHVANLSLGSPSPSATLEQAVNSATSRGVLVVAASGNSGADSISYPARYANAMAVGATDQNNNRADFSQYGAGLDIVAPGVNVQSTYPGSTYASLNGTSMATPHVAGAAVLVKQKNPSWSNVQIRDHLKNTATSLGSTNLYGSGLVNAFAATR

SEQ ID NO: 61306 - protein, 269 aa, Unidentified
AQSVPWGISRVQAPAAHNRGLQGSGVKVAVLDTGISTHPDLNIRGGASFVPGEPSTQDGNGHGTHVAGTIAALNNSIGVLGVAPSAELYAVKVLGASGGGAISSIAQGLEWAGNNGMHVANLSLGSPSPSATLEQAVNSATSRGVLVVAASGNSGADSISYPARYANAMAVGATDQNNNRADFSQYGAGLDIVAPGVNVQSTYPGSTYASLNGTSMATPHVAGAALLVKQKNPSWSNVVIRDHLKNTATSLGSTNLYGSGLVNALAATR

SEQ ID NO: 61307 - protein, 269 aa, Unidentified
AQSVPWGISRVQAPAAHNRGLAGSGVKVAVLDTGISTHPDLNIRGGASFVPGEPSTQDGNGHGTHVAGTIAALNNSIGVLGVAPSAELYAVKVLGASGGGSISSIAQGLEWAGLNGMHVANLSLGSPSPSATLEQAVNSATSRGVLVVAASGNSGADSISYPARYANAMAVGATDQNNNRADFSQYGAGLDIVAPGVNVQSTYPGSTYASLNGTSMATPHVAGAAVLVKQKNPSWSNVRIRDHLKNTATSLGSTNLYGSGLVNAFAATR

SEQ ID NO: 61308 - protein, 269 aa, Unidentified
AQSVPWGISRVQAPAAHNRGLAGRGVKVAVLDTGISTHPDLNIRGGASFVPGEPSTQDGNGHGTHVAGTIAALNNSIGVLGVAPSAELYAVKVLGASGGGAISSIAQGLEWAGNNGMHVANLSLGSPSPSATLEQAVNSATSRGVLVVAASGNSGAGSISYPARYANAMAVGATDQNNNRADFSQYGAGLDIVAPGVNVQSTYPGSTYASLNGTSMATPHVAGAAVLVKQKNPSWSNVRIRDHLKNTATSLGSTNLYGSGLVNAFAATR

SEQ ID NO: 61309 - protein, 269 aa, Unidentified
AQSVPWGISRVQAPAAHRRGLTGSGVKVAVLDTGISTHPDLDIRGGASFVPGEPSTQDGNGHGTHVAGTIAALDNRIGVLGVAPSAELYAVKVLGASGGGAISSIAQGLEWAGNNGMHVANLSLGSPSPSATLEQAVNSATSRGVLVVAASGNSGAGSISYPARYANAMAVGATDQNNNRASFSQYGAGLDIVAPGVNVQSTYPGSTYASLNGTSMATPHVAGAAVLVKQKNPSWSNVRIRNHLKNTATSLGSTNLYGSGLVRAEAATR

SEQ ID NO: 61310 - protein, 269 aa, Unidentified
AQSVPWGISRVQAPAAHNRGLQGSGVKVAVLDTGISTHPDLNIRGGASFVPGEPSTQDGNGHGTHVAGTIAALNNSIGVLGVAPSAELYAVKVLGASGGGAISSIAQGLEWAGNNGMHVANLSLGSPSPSATLEQAVNSATSRGVLVVAASGNSGADSISYPARYANAMAVGATDQNNNRADFSQYGAGLDIVAPGVNVQSTYPGSTYASLNGTSMATPHVAGAAVLVKQKNPSWSNVVIRHHLKNTATSLGSTNLYGSGLVNATAATR

SEQ ID NO: 61311 - protein, 269 aa, Unidentified
AQSVPWGISRVQAPAAHNRGLQGSGVKVAVLDTGISTHPDLNIRGGASFVPGEPSTQDGNGHGTHVAGTIAALNNSIGVLGVAPSAELYAVKVLGASGGGAISSIAQGLEWAGNNGMHVANLSLGSPSPSATLEQAVNSATSRGVLVVAASGNSGADSISYPARYANAMAVGATDQNNNRAEFSQYGAGLDIVAPGVNVQSTYPGSTYASLNGTSMATPHVAGAAVLVKQKNPSWSNVTIRDHLKNTATSLGSTNLYGSGLVNALAATR

SEQ ID NO: 61312 - protein, 269 aa, Unidentified
AQSVPWGISRVQAPAAHNRGLAGSGVKVAVLDTGISTHPDLNIRGGASFVPGEPSTQDGNGHGTHVAGTIAALNNSIGVLGVAPSAELYAVKVLGASGGGAISSIAQGLEWAGNNGMHVANLSLGSPSPSATLEQAVNSATSRGVLVVAASGNSGEESISYPARYANAMAVGATDQNNNRASFSQYGAGLDIVAPGVNVQSTYPGSTYASLNGTSMATPHVAGAAVLVKQKRPSWSNVRIRDHLKNTATSLGSTNLYGSGLVNAEAATR

SEQ ID NO: 61313 - protein, 269 aa, Unidentified
AQTIPWGISRVQAPAAHNRGLTGSGVKVAVLDTGISTHPDLNIRGGASFVPGEPSTQDGNGHGTHVAGTIAALNNSIGVLGVAPSAELYAVKVLGADGEGAISSIAQGLEWAGNNGMHVANLSLGSPSPSATLEQAVNSATSRGVLVVAASGNDGASSISYPARYANAMAVGATDQNNNRASFSQYGAGLDIVAPGVNIQSTYPGSTYASLNGTSMATPHVAGAAALVKQKNPSWSNVQIRNHLKNTATSLGSTNEYGSGLVNAEAATR

SEQ ID NO: 61314 - protein, 269 aa, Unidentified
AQSVPWGISRVQAPAAHNRRLWGSGVKVAVLDTGISTHPDLNIRGGASFVPGEPSTQDGNGHGTHVAGTIAALNNRIGVLGVAPSAELYAVKVLGASGGGAISSIAQGLEWAGANGMHVANLSLGSPSPSATLEQAVNSATSRGVLVVAASGNSGAGSISYPARYANAMAVGATDQDNNRASFSQYGAGLDIVAPGVNVQSTYPGSTYASLNGTSMATPHVAGAAVLVKQKNPSWSNVRIRNHLKNTATSLGSTNLYGSGLVNAEAATR

SEQ ID NO: 61315 - protein, 269 aa, Unidentified
AQSVPWGISRVQAPAAHNRGLAGGGVKVAVLDTGISTHPDLNIRGGASFVPGEPSTQDGNGHGTHVAGTIAALNNSIGVLGVAPSAELYAVKVLSASGNGAISSIAGGLEWAGNNGMHVANLSLGAPSPSATLEQAVNSATSRGVLVVAASGNSGAGSISYPARYANAMAVGATDQNNNRASFSQYGAGLDIVAPGVNVQSTYPGSTYASLNGTSMATPHVAGAAVLVKQKNPSWSNVRIRNHLKNTATSLGSTNLYGSGLVNAEAATR

SEQ ID NO: 61316 - protein, 269 aa, Bacillus lentus
AQSVPWGISRVQAPAAHNRGLTGSGVKVAVLDTGISTHEDLNVRGGVSFVPGETSYQDGNGHGTHVAGTIAALNNSIGVVGVAPSADLYAVKVLGASGRGSVSSIAQGLEWAGQNGMHVANLSLGSPSPSATLEQAVNSATSRGVLVVAASGNSGAGSISYPARYANAMAVGATDQNNNRASFSQYGAGLDIVAPGVNVQSTYPGSTYASLNGTSMATPHVAGAAALVKQKNPSWSNVQIRDHLKNTATSLGSTNLYGSGLVNAEAATR

SEQ ID NO: 61317 - protein, 269 aa, Unidentified
AQSVPWGISRVQAPAAHNRGLTGSGVKVAVLDTGISTHPDLNIRGGASFVPGEPSTQDGNGHGTHVAGTIAALNNSIGVLGVAPSAELYAVKVLGASGGGAISSIAQGLEWAGNNGMHVANLSLGLPSPSATLEQAVNSATSRGVLVVAASGNSGADSISYPARYANAMAVGATDQNNNRASFSQYGAGLDIVAPGVNVQSTYPGSTYASLNGTSMATPHVAGAAVLVKHKNPSWSNVRIRDHLKKTATSLGSTNLYGSGLVNAEAATR

SEQ ID NO: 61318 - protein, 269 aa, Unidentified
AQSVPWGISRVQAPAAHNRGLQGSGVKVAVLDTGISTHPDLNIRGGASFVPGEPSTQDGNGHGTHVAGTIAALNNSIGVLGVAPSAELYAVKVLGASGGGAISSIAQGLEWAGNNGMHVANLSLGSPSPSATLEQAVNSATSRGVLVVAASGNSGADSISYPARYANAMAVGATDQNNNRADFSQYGAGLDIVAPGVNVQSTYPGSTYASLNGTSMATPHVAGAASLVKQKNPSWSNVRIREHLKNTATSLGSTNLYGSGLVNAFAATR

SEQ ID NO: 61319 - protein, 269 aa, Unidentified
AQSVPWGISRVQAPAAHNRGLAGSGVKVAVLDSGISTHPDLNIRGGASFVPGEPSTQDGNGHGTHVAGTIAALNNSIGVLGVAPSAELYAVKVLGASGGGAISSIAQGLEWAGLNGMHVANLSLGSPSPSATLEQAVNSATSRGVLVVAASGNSGAGSISYPARYANAMAVGATDQNNNRASFSQYGAGLDIVAPGVNVQSTAPQSAYASLNGTSMATPHVAGAAVLVKQKNPSWSNVQIRNHLKNTATSLGSTNLYGSGLVNAEAATR

SEQ ID NO: 61320 - protein, 269 aa, Unidentified
AQSVPWGISRVQAPAAHRRRLWGRGVKVAVLDTGISTHPDLNIRGGASFVPGEPSTQDGNGHGTHVAGTIAALDNSIGVLGVAPSAELYAVKVLGASGAGSVSSIAQGLEWAGANGMHVANLSLGSPSPSATLEQAVNSATSRGVLVVAASGNSGAGSISYPARYANAMAVGATDQDNNRASFSQYGAGLDIVAPGVNVQSTYPGSAYASLNGTSMATPHVAGAAALVKQKNPSWSNVQIRNRLKNTATSLGSTNLYGSGLVNAEAATR

SEQ ID NO: 61321 - protein, 269 aa, Unidentified
AQSVPWGISRVQAPAAHNRRLWGSGVKVAVLDTGISTHPDLNIRGGASFVPGEPSTQDGNGHGTHVAGTIAALNNRIGVLGVAPSAELYAVKVLGASGAGAISSIAQGLEWAGANGMHVANLSLGSPSPSATLEQAVNSATSRGVLVVAASGNSGAGSISYPARYANAMAVGATDQDNNRASFSQYGAGLDIVAPGVNVQSTYPGSTYASLNGTSMATPHVAGAAVLVKQKNPSWSNVRIRNHLKNTATSLGSTNLYGSGLVNAEAATR

SEQ ID NO: 61322 - protein, 269 aa, Unidentified
AQSVPWGISRVQAPAAHNRGLAGRGVKVAVLDTGISTHPDLNIRGGASFVPGEPSTQDGNGHGTHVAGTIAALNNSIGVLGVAPSAELYAVKVLGASGGGAISSIAQGLEWAGNNGMHVANLSLGSESPSATLEQAVNSATSRGVLVVAASGNSGAGSISYPARYANAMAVGATDQNNNRADFSQYGAGLDIVAPGVNVQSTYPGSTYASLNGTSMATPHVAGAAVLVKQKNPSWSNVRIRDHLKNTATSLGSTNLYGSGLVNAEAATR

SEQ ID NO: 61323 - protein, 269 aa, Unidentified
AQSVPWGISRVQAPAAHNRGLTGRGVKVAVLDTGISTHPDLNIRGGASFVPGEPSTQDGNGHGTHVAGTIAALNNSIGVLGVAPSAELYAVKVLGASGGGAISSIAQGLEWAGNNGMHVANLSLGSESPSATLEQAVNSATSRGVIVVAASGNSGEGSISYPARYANAMAVGATDQNNNRASFSQYGAGLDIVAPGVNVQSTYPGSTYASLNGTSMATPHVAGAAVLVKQKNPSWSNVRIRDHLKNTATSLGSTNLYGSGLVNAEAATR

SEQ ID NO: 61324 - protein, 269 aa, Unidentified
AQSVPWGISRVQAPAAHNRGLRGGGVKVAVLDTGISTHPDLNIRGGASFVPGEPSTQDGNGHGTHVAGTIAALNNSIGVLGVAPSAELYAVKVLAASGQGAISSIAQGLEWAGLNGMHVANLSLGSPSPSATLEQAVNSATSRGVLVVAASGNSGAGSISYPARYANAMAVGATDQNNNRASFSQYGAGLDIVAPGVNVQSTYPGSTYASQNGTSMATPHVAGAAVLVKQKNPSWSNVRIRNHLKNTATSLGSTNLYGSGLVNAEAATR

SEQ ID NO: 61325 - protein, 269 aa, Unidentified
AQSVPWGISRVQAPAAHNRGLAGFGVKVAVLDTGISTHPDLNIRGGASFVPGEPSTQDGNGHGTHVAGTIAALNNSIGVLGVAPSAELYAVKVLGASGGGAISSIAQGLEWAGANGMHVANLSLGNPSPSATLEQAVNSATSRGVLVVAASGNSGAGSISYPARYANAMAVGATDQNNNRASFSQYGAGLDIVAPGVNVQSTAPQSTYASLNGTSMATPHVAGAAVLVKQKNPSWSNVQIRNHLKNTATSLGSTNLYGSGLVNAEAATR

SEQ ID NO: 61326 - protein, 269 aa, Unidentified
AQSVPWGISRVQAPAAHNRGLQGSGVKVAVLDTGISTHPDLNIRGGASFVPGEPSTQDGNGHGTHVAGTIAALNNSIGVLGVAPSAELYAVKVLGASGGGAISSIAQGLEWAGNNGMHVANLSLGSPSPSATLEQAVNSATSRGVLVVAASGNSGADSISYPARYANAMAVGATDQNNNRAEFSQYGAGLDIVAPGVNVQSTYPGSTYASLNGTSMATPHVAGAALLVKQKNPSWSNVTIRHHLKNTATSLGSTNLYGSGLVNATAATR

SEQ ID NO: 61327 - protein, 269 aa, Unidentified
AQSVPWGISRVQAPAAHNRGLAGSGVKVAVLDTGISTHPDLNIRGGASFVPGEPSTQDGNGHGTHVAGTIAALNNSIGVLGVAPSAELYAVKVLGASGGGAISSIAQGLEWAGNNGMHVANLSLGSPSPSATLEQAVNSATSRGVLVVAASGNSGADSISYPARYANAMAVGATDQNNNRAEFSQYGAGLDIVAPGVNVQSTYPGSTYASLNGTSMATPHVAGAASLVKQKNPSWSNVVIREHLKNTATSLGSTNLYGSGLVNAFAATR

SEQ ID NO: 61328 - protein, 269 aa, Unidentified
AQSVPWGISRVQAPAAHNRGLAGSGVKVAVLDTGISTHPDLNIRGGASFVPGEPSTQDGNGHGTHVAGTIAALNNSIGVLGVAPSAELYAVKVLGASGGGAISSIAQGLEWAGNNGMHVANLSLGSPSPSATLEQAVNSATSRGVLVVAASGNSGADSISYPARYANAMAVGATDQNNNRADFSQYGAGLDIVAPGVNVQSTYPGSTYASLNGTSMATPHVAGAASLVKQKNPSWSNVRIRHHLKNTATSLGSTNLYGSGLVNAHAATR

SEQ ID NO: 61329 - protein, 269 aa, Unidentified
AQSVPWGISRVQAPAAHNRKLTGGGVKVAVLDTGISTHPDLNIRGGVSFVPGEPSTQDGEGHGTHVAGTIAALNNNIGVLGVAPSAELYAVKVLAASGNGSVSSIAQGLEWAGLNGMHVANLSLGAPSPSATLEQAVNSATSRGVLVVAASGNSGAGSISYPARYANAMAVGATDQNNNRASFSQYGAGLDIVAPGVNVQSTYPGSTYASQNGTSMATPHVAGAAALVKQKNPSWSNVQIRNHLKNTATSLGSTNLYGSGLVNAEAATR

SEQ ID NO: 61330 - protein, 269 aa, Unidentified
AQSVPWGISRVQAPASHNRGLAGSGVKVAVLDTGISTHPDLNIRGGASFVPGEPSTQDGNGHGTHVAGTIAALNNSIGVLGVAPSAELYAVKVLGASGGGAISSIAQGLEWAGLNGMHVANLSLGSPSPSATLEQAVNSATSRGVLVVAASGNSGAGSISYPARYANAMAVGATDQNNNRASFSQYGAGLDIVAPGVNVQSTVPQSAYASLNGTSMATPHVAGAAVLVKQKNPSWSNVQIRNHLKNTATSLGSTNLYGSGLVNAEAATR

SEQ ID NO: 61331 - protein, 269 aa, Unidentified
AQSVPWGISRVQAPAAHNRGLTGSGVKVAVLDTGISTHPDLNIRGGASFVPGEPSTQDGNGHGTHVAGTIAALNNSIGVLGVAPSAELYAVKVLGLSGSAAISSIAQGLEWAGNNGMHVANLSLGSPSPSATLEQAVNSATSRGVLVVAASGNSGADSISYPARYANAMAVGATDQNNNRASFSQYGAGLDIVAPGVNVQSTYPGSTYASLNGTSMATPHVAGAAVLVKHKNPSWSNVRIRDHLKKTATSLGSTNLYGSGLVNAEAATR

SEQ ID NO: 61332 - protein, 269 aa, Unidentified
AQSVPWGISRVQAPAAHNRGLAGRGVKVAVLDTGISTHPDLNIRGGASFVPGEPSTQDGNGHGTHVAGTIAALNNSIGVLGVAPSAELYAVKVLGASGGGAISSIAQGLEWAGNNGMHVANLSLGSESPSATLEQAVNSATSRGVLVVAASGNSGAGSISYPARYANAMAVGATDQNNNRASFSQYGAGLDIVAPGVNVQSTYPGSTYASLNGTSMATPHVAGAAVLVKQKNPSWSNVRIRDRLKNTATSLGSTNLYGSGLVNAEAATR

SEQ ID NO: 61333 - protein, 269 aa, Unidentified
AQSVPWGISRVQAPAAHNRGLTGSGVKVAVLDTGISTHPDLNIRGGASFVPGEPSTQDGNGHGTHVAGTIAALDNSIGVLGVAPSAELYAVKVLGASGAGAISSIAQGLEWAGNNGMHVANLSLGSPSPSATLEQAVNSATSRGVLVVAASGNSGEGSISYPARYANAMAVGATDQNNNRADFSQYGAGLDIVAPGVNVQSTYPGSTYASLNGTSMATPHVAGAAVLVKQKNPSWSNVRIRDRLKNTATSLGSTNLYGSGLVNAEAATR

SEQ ID NO: 61334 - protein, 269 aa, Unidentified
AQSVPWGISRVQAPDSHNRGLTGSGVKVAVLDTGISTHPDLNIRGGASFVPGEPSTQDGNGHGTHVAGTIAALNNSIGVLGVAPSAELYAVKVLGASGGGAISSIAQGLEWAGLNGMHVANLSLGNPSPSATLEQAVNSATSRGVLVVAASGNSGAGSISYPARYANAMAVGATDQNNNRASFSQYGAGLDIVAPGVNVQSTVPGSAYASLNGTSMATPHVAGAAVLVKQKNPSWSNVQIRNHLKNTATSLGSTNLYGSGLVNAEAATR

SEQ ID NO: 61335 - protein, 269 aa, Unidentified
AQSVPWGISRVQAPAAHNRGLRGGGVKVAVLDTGISTHPDLNIRGGASFVPGEPSTQDGNGHGTHVAGTIAALNNNIGVLGVAPSAELYAVKVLSASGQGAISSIAQGLEWAGNNGMHVANLSLGAPSPSATLEQAVNSATSRGVLVVAASGNSGAGSISYPARYANAMAVGATDQNNNRASFSQYGAGLDIVAPGVNVQSTYPGSTYASLNGTSMATPHVAGAAVLVKQKNPSWSNVRIRNHLKNTATSLGSTNLYGSGLVNAEAATR

SEQ ID NO: 61336 - protein, 269 aa, Unidentified
AQSVPWGISRVQAPAAHNRGLAGGGVKVAVLDTGISTHPDLNIRGGASFVPGEPSTQDGNGHGTHVAGTIAALNNNIGVLGVAPSAELYAVKVLSASGQGAISSIAQGLEWAGNNGMHVANLSLGAPSPSATLEQAVNSATSRGVLVVAASGNSGAGSISYPARYANAMAVGATDQNNNRASFSQYGAGLDIVAPGVNVQSTYPGSTYASLNGTSMATPHVAGAAVLVKQKNPSWSNVRIRNHLKNTATSLGSTNLYGSGLVNAEAATR

SEQ ID NO: 61337 - protein, 269 aa, Unidentified
AQSVPWGISRVQAPAAHRRGLWGRGVKVAVLDTGISTHPDLNIRGGASFVPGEPSTQDGNGHGTHVAGTIAALDNSIGVLGVAPSAELYAVKVLGASGSGSVSSIAQGLEWAGANGMHVANLSLGSPSPSATLEQAVNSATSRGVLVVAASGNSGAGSISYPARYANAMAVGATDQNNNRASFSQYGAGLDLVAPGVNVQSTYPQSAYFSLNGTSMATPHVAGAAALVKQKNPSWSNVQIRNRLKNTATSLGSTNLYGSGLVNAEAATR

SEQ ID NO: 61338 - protein, 269 aa, Unidentified
AQSVPWGISRVQAPASHNRGLTGFGVKVAVLDTGISTHPDLNIRGGASFVPGEPSTQDGNGHGTHVAGTIAALNNSIGVLGVAPSAELYAVKVLGASGGGAISSIAQGLEWAGLNGMHVANLSLGNPSPSATLEQAVNSATSRGVLVVAASGNSGAGSISYPARYANAMAVGATDQNNNRASFSQYGAGLDIVAPGVNVQSTVPQSTYASLNGTSMATPHVAGAAVLVKQKNPSWSNVQIRNHLKNTATSLGSTNLYGSGLVNAEAATR

SEQ ID NO: 61339 - protein, 269 aa, Unidentified
AQSVPWGISRVQAPAAHNRGLQGSGVKVAVLDTGISTHPDLNIRGGASFVPGEPSTQDGNGHGTHVAGTIAALNNSIGVLGVAPSAELYAVKVLGASGGGAISSIAQGLEWAGNNGMHVANLSLGSPSPSATLEQAVNSATSRGVLVVAASGNSGADSISYPARYANAMAVGATDQNNNRAEFSQYGAGLDIVAPGVNVQSTYPGSTYASLNGTSMATPHVAGAALLVKQKNPSWSNVTIRDHLKNTATSLGSTNLYGSGLVNAFAATR

SEQ ID NO: 61340 - protein, 269 aa, Unidentified
AQSVPWGISRVQAPAAHNRGLAGSGVKVAVLDTGISTHPDLNIRGGASFVPGEPSTQDGNGHGTHVAGTIAALNNSIGVLGVAPSAELYAVKVLGASGGGAISSIAQGLEWAGNNGMHVANLSLGSPSPSATLEQAVNSATSRGVLVVAASGNSGAESISYPARYANAMAVGATDQNNNRADFSQYGAGLDIVAPGVNVQSTYPGSTYASLNGTSMATPHVAGAAVLVKQKNPSWSNVRIRDHLKNTATSLGSTNLYGSGLVNAFAATR

SEQ ID NO: 61341 - protein, 269 aa, Unidentified
AQSVPWGISRVQAPAAHNRGLTGRGVKVAVLDTGISTHPDLNIRGGASFVPGEPSTQDGNGHGTHVAGTIAALNNSIGVLGVAPSAELYAVKVLGASGGGAISSIAQGLEWAGNNGMHVANLSLGSPSPSATLEQAVNSATSRGVLVVAASGNSGEESISYPARYANAMAVGATDQNNNRASFSQYGAGLDIVAPGVNVQSTYPGSTYASLNGTSMATPHVAGAAVLVKQKRPSWSNVRIRDHLKNTATSLGSTNLYGSGLVNAEAATR

SEQ ID NO: 61342 - protein, 269 aa, Unidentified
AQSVPWGISRVQAPAAHNRALTGSGVKVAVLDTGISTHPDLNIRGGASFVPGEPSTQDGNGHGTHAAGTIAALNNSIGVLGVAPSAELYAVKVLGASGSGAISSIAQGLEWAGNNGMHVANLSLGSPSPSATLEQAVNSATSRGVLVVAASGNSGADSISYPARYANAMAVGATDQNNNRASFSQYGAGLDIVAPGVNVQSTYPGSTYASLNGTSMATPHVAGAAVLVKHKNPSWSNVRIRDHLKKTATSLGSTNLYGSGLVNAEAATR

SEQ ID NO: 61343 - protein, 269 aa, Lederbergia lentus
AQTIPWGISRVQAPAAHNRGLTGSGVKVAVLDTGISTHPDLNIRGGASFVPGEPSTQDGNGHGTHVAGTIAALNNSIGVLGVAPSAELYAVKVLGADGEGAISSIAQGLEWAGNNGMHVANLSLGSPSPSATLEQAVNSATSRGVLVVAASGNSGASSISYPARYANAMAVGATDQNNNRASFSQYGAGLDIVAPGVNILSTWPGSTYASLNGTSMATPHVAGAAALVKQKNPSWSNVQIRNHLKNTATSLGSTNLYGSGLVNAEAATR

SEQ ID NO: 61344 - protein, 269 aa, Unidentified
AQSVPWGISRVQAPAAHNRGLTGRGVKVAVLDTGISTHPDLNIRGGASFVPGEPSTQDGNGHGTHVAGTIAALNNSIGVLGVAPSAELYAVKVLGASGGGAISSIAQGLEWAGNNGMHVANLSLGSPSPSATLEQAVNSATSRGVIVVAASGNSGEGSISYPARYANAMAVGATDQNNNRADFSQYGAGLDIVAPGVNVQSTYPGSTYASLNGTSMATPHVAGAAVLVKQKNPSWSNVRIRDHLKNTATSLGSTNLYGSGLVNAEAATR

SEQ ID NO: 61345 - protein, 269 aa, Unidentified
AQSVPWGISRVQAPAAHNRGLAGSGVKVAVLDTGISTHPDLNIRGGASFVPGEPSTQDGNGHGTHVAGTIAALNNSIGVLGVAPSAELYAVKVLGASGGGAISSIAQGLEWAGLNGMHVANLSLGSPSPSATLEQAVNSATSRGVLVVAASGNSGADSISYPARYANAMAVGATDQNNNRADFSQYGAGLDIVAPGVNVQSTYPGSTYASLNGTSMATPHVAGAAVLVKQKNPSWSNVRIRDHLKNTATSLGSTNLYGSGLVNAEAATR

SEQ ID NO: 61346 - protein, 269 aa, Unidentified
AQSVPWGISRVQAPAAHNRRLWGSGVKVAVLDTGISTHPDLNIRGGASFVPGEPSTQDGNGHGTHVAGTIAALNNSIGVLGVAPSAELYAVKVLGASGGGAISSIAQGLEWAGANGMHVANLSLGSPSPSATLEQAVNSATSRGVLVVAASGNSGAGSISYPARYANAMAVGATDQDNNRASFSQYGAGLDIVAPGVNVQSTYPGSTYFSLNGTSMATPHVAGAAVLVKQKNPSWSNVRIRNHLKNTATSLGSTNLYGSGLVNAEAATR

SEQ ID NO: 61347 - protein, 269 aa, Unidentified
AQSVPWGISRVQAPAAHRRRLWGRGVKVAVLDTGISTHPDLNIRGGASFVPGEPSTQDGNGHGTHVAGTIAALDNSIGVLGVAPSAELYAVKVLGASGSGSVSSIAQGLEWAGANGMHVANLSLGSPSPSATLEQAVNSATSRGVLVVAASGNSGAGSISYPARYANAMAVGATDQDNNRASFSQYGAGLDLVAPGVNVQSTYPQSTYASLNGTSMATPHVAGAAALVKQKNPSWSNVQIRNRLKNTATSLGSTNLYGSGLVNAEAATR

SEQ ID NO: 61348 - protein, 269 aa, Unidentified
AQSVPWGISRVQAPAAHNRGLAGGGVKVAVLDTGISTHPDLNIRGGASFVPGEPSTQDGNGHGTHVAGTIAALDNNIGVLGVAPSAELYAVKVLSASGQGAISSIANGLEWAGNNGMHVANLSLGSPSPSATLEQAVNSATSRGVLVVAASGNSGAGSISYPARYANAMAVGATDQNNNRASFSQYGAGLDIVAPGVNVQSTYPGSTYASLNGTSMATPHVAGAAVLVKQKNPSWSNVQIRNHLKNTATSLGSTNLYGSGLVNAEAATR

SEQ ID NO: 61349 - protein, 269 aa, Unidentified
AQSVPWGISRVQAPAAHNRGLTGSGVKVAVLDTGISTHPDLNIRGGASFVPGEPSTQDGNGHGTHVAGTIAALNNSIGVLGVAPSAELYAVKVLGASGGGAISSIAQGLEWAGNNGMHVANLSLGSPSPSATLEQAVNSATSRGVLVVAASGNSGADSISYPARYANAMAVGATDQNNNRASFSQYGAGLDIVAPGVNVQSTYPGGTYASLNGTSMATPHVAGAAVLVKHKNPSWSNVRIRDHLKKTATSLGSTNLYGSGLVNAEAATR

SEQ ID NO: 61350 - protein, 269 aa, Unidentified
AQSVPWGISRVQAPAAHNRGLTGSGVKVAVLDTGISTHPDLNIRGGASFVPGEPSTQDGNGHGTHAAGTIAALNNSIGVLGVAPSAELYAVKVLGASGSGAISSIAQGLEWAGNNGMHVANLSLGSPSPSATLEQAVNSATSRGVLVVAASGNSGADSISYPARYANAMAVGATDQNNNRASFSQYGAGLDIVAPGVNVQSTYPGSTYASLNGTSMATPHVAGAAVLVKHKNPSWSNVRIRDHLKKTATELGSTNLYGSGLVNAEAATR

SEQ ID NO: 61351 - protein, 269 aa, Unidentified
AQSVPWGISRVQAPAAHNRGLAGSGVKVAVLDTGISTHPDLNIRGGASFVPGEPSTQDGNGHGTHVAGTIAALNNSIGVLGVAPSAELYAVKVLGASGGGAISSIAQGLEWAGNNGMHVANLSLGSPSPSATLEQAVNSATSRGVLVVAASGNSGADSISYPARYANAMAVGATDQNNNRAEFSQYGAGLDIVAPGVNVQSTYPGSTYASLNGTSMATPHVAGAATLVKQKNPSWSNVVIRDHLKNTATSLGSTNLYGSGLVNAHAATR

SEQ ID NO: 61352 - protein, 269 aa, Unidentified
AQSVPWGISRVQAPAAHNRGLTGSGVKVAVLDTGISTHPDLNIRGGASFVPGEPSTQDGNGHGTHVAGTIAALNNSIGVLGVAPSAELYAVKVLGAGGGGAISSIAQGLEWAGNNGMHVANLSLGSPSPSATLEQAVNSATSRGVLVVAASGNSGADSISYPARYANAMAVGATDQNNNRASFSQYGAGLDIVAPGVNVQSTYPGSTYASLNGTSMATPHVAGAAVLVKHKNPSWSNVRIRDHLKKTATSLGSTNLYGSGLVNAEAATR

SEQ ID NO: 61353 - protein, 269 aa, Unidentified
AQSVPWGISRVQAPASHNRGLAGFGVKVAVLDTGISTHPDLNIRGGASFVPGEPSTQDGNGHGTHVAGTIAALNNSIGVLGVAPSAELYAVKVLGASGGGAISSIAQGLEWAGANGMHVANLSLGSPSPSATLEQAVNSATSRGVLVVAASGNSGAGSISYPARYANAMAVGATDQNNNRASFSQYGAGLDIVAPGVNVQSTVPQSTYASLNGTSMATPHVAGAAVLVKQKNPSWSNVQIRNHLKNTATSLGSTNLYGSGLVNAEAATR

SEQ ID NO: 61354 - protein, 269 aa, Unidentified
AQSVPWGISRVQAPAAHNRRLWGSGVKVAVLDTGISTHPDLNIRGGASFVPGEPSTQDGNGHGTHVAGTIAALNNRIGVLGVAPSAELYAVKVLGASGGGAISSIAQGLEWAGNNGMHVANLSLGSPSPSATLEQAVNSATSRGVLVVAASGNSGAGSISYPARYANAMAVGATDQNNNRASFSQYGAGLDIVAPGVNVQSTYPQSAYASLNGTSMATPHVAGAAVLVKQKNPSWSNVRIRNHLKNTATSLGSTNLYGSGLVNAEAATR

SEQ ID NO: 61355 - protein, 269 aa, Unidentified
AQSVPWGISRVQAPAAHNRGLQGSGVKVAVLDTGISTHPDLNIRGGASFVPGEPSTQDGNGHGTHVAGTIAALNNSIGVLGVAPSAELYAVKVLGASGGGAISSIAQGLEWAGNNGMHVANLSLGSPSPSATLEQAVNSATSRGVLVVAASGNSGADSISYPARYANAMAVGATDQNNNRAEFSQYGAGLDIVAPGVNVQSTYPGSTYASLNGTSMATPHVAGAASLVKQKNPSWSNVTIRDHLKNTATSLGSTNLYGSGLVNAHAATR

SEQ ID NO: 61356 - protein, 269 aa, Unidentified
AQSVPWGISRVQAPAAHNRGLAGSGVKVAVLDTGISTHPDLNIRGGASFVPGEPSTQDGNGHGTHVAGTIAALNNSIGVLGVAPSAELYAVKVLGASGGGAISSIAQGLEWAGNNGMHVANLSLGSESPSATLEQAVNSATSRGVLVVAASGNSGEGSISYPARYANAMAVGATDQNNNRASFSQYGAGLDIVAPGVNVQSTYPGSTYASLNGTSMATPHVAGAAVLVKQKRPSWSNVRIRDHLKNTATSLGSTNLYGSGLVNAEAATR

SEQ ID NO: 61357 - protein, 269 aa, Unidentified
AQSVPWGISRVQAPAAHNRGLTGSGVKVAVLDTGISTHPDLNIRGGASFVPGEPSTQDGNGHGTHAAGTIAALNNSIGVLGVAPSAELYAVKVLGASGSGAISSIAQGLEWAGNNGMHVANLSLGSPSPSATLEQAVNSATSRGVLVVAASGNSGADSISYPARYANAMAVGATDQNNNRASFSQYGAGLDIVAPGVNVQSTYPGSEYASLNGTSMATPHVAGAAVLVKHKNPSWSNVRIRDHLKKTATSLGSTNLYGSGLVNAEAATR

SEQ ID NO: 61358 - protein, 269 aa, Unidentified
AQSVPWGISRVQAPAAHNRGLQGSGVKVAVLDTGISTHPDLNIRGGASFVPGEPSTQDGNGHGTHVAGTIAALNNSIGVLGVAPSAELYAVKVLGASGGGAISSIAQGLEWAGNNGMHVANLSLGSPSPSATLEQAVNSATSRGVLVVAASGNSGADSISYPARYANAMAVGATDQNNNRAEFSQYGAGLDIVAPGVNVQSTYPGSTYASLNGTSMATPHVAGAAVLVKQKNPSWSNVVIRHHLKNTATSLGSTNLYGSGLVNALAATR

SEQ ID NO: 61359 - protein, 269 aa, Unidentified
AQSVPWGISRVQAPAAHNRGLAGSGVKVAVLDTGISTHPDLNIRGGASFVPGEPSTQDGNGHGTHVAGTIAALNNSIGVLGVAPSAELYAVKVLGASGGGAISSIAQGLEWAGNNGMHVANLSLGSPSPSATLEQAVNSATSRGVLVVAASGNSGADSISYPARYANAMAVGATDQNNNRAEFSQYGAGLDIVAPGVNVQSTYPGSTYASLNGTSMATPHVAGAASLVKQKNPSWSNVTIRHHLKNTATSLGSTNLYGSGLVNATAATR

SEQ ID NO: 61360 - protein, 269 aa, Unidentified
AQSVPWGISRVQAPAAHNRGLAGSGVKVAVLDTGISTHPDLNIRGGASFVPGEPSTQDGNGHGTHVAGTIAALDNSIGVLGVAPSAELYAVKVLGASGGGAISSIAQGLEWAGNNGMHVANLSLGSPSPSATLEQAVNSATSRGVLVVAASGNSGAGSISYPARYANAMAVGATDQNNNRADFSQYGAGLDIVAPGVNVQSTYPGSTYASLNGTSMATPHVAGAAVLVKQKNPSWSNVRIRDHLKNTATSLGSTNLYGSGLVNAFAATR

SEQ ID NO: 61361 - protein, 269 aa, Unidentified
AQSVPWGISRVQAPAAHNRGLAGSGVKVAVLDTGISTHPDLNIRGGASFVPGEPSTQDGNGHGTHVAGTIAALNNSIGVLGVAPSAELYAVKVLGASGGGAISSIAQGLEWAGNNGMHVANLSLGSPSPSATLEQAVNSATSRGVLVVAASGNSGEGSISYPARYANAMAVGATDQNNNRADFSQYGAGLDIVAPGVNVQSTYPGSTYASLNGTSMATPHVAGAAVLVKQKNPSWSNVRIRDHLKNTATSLGSTNLYGSGLVNAFAATR

SEQ ID NO: 61362 - protein, 269 aa, Unidentified
AQSVPWGISRVQAPAAHNRGLQGSGVKVAVLDTGISTHPDLNIRGGASFVPGEPSTQDGNGHGTHVAGTIAALNNSIGVLGVAPSAELYAVKVLGASGGGAISSIAQGLEWAGNNGMHVANLSLGSPSPSATLEQAVNSATSRGVLVVAASGNSGADSISYPARYANAMAVGATDQNNNRADFSQYGAGLDIVAPGVNVQSTYPGSTYASLNGTSMATPHVAGAASLVKQKNPSWSNVTIREHLKNTATSLGSTNLYGSGLVNATAATR

SEQ ID NO: 61363 - protein, 269 aa, Unidentified
AQSVPWGISRVQAPAAHNRGLAGSGVKVAVLDTGISTHPDLNIRGGASFVPGEPSTQDGNGHGTHVAGTIAALNNSIGVLGVAPSAELYAVKVLGASGGGAISSIAQGLEWAGNNGMHVANLSLGSPSPSATLEQAVNSATSRGVLVVAASGNSGADSISYPARYANAMAVGATDQNNNRAEFSQYGAGLDIVAPGVNVQSTYPGSTYASLNGTSMATPHVAGAALLVKQKNPSWSNVTIRDHLKNTATSLGSTNLYGSGLVNATAATR

SEQ ID NO: 61364 - protein, 269 aa, Unidentified
AQSVPWGISRVQAPAAHRRRLTGRGVKVAVLDTGISTHPDLNIRGGASFVPGEPSTQDGNGHGTHVAGTIAALDNSIGVLGVAPSAELYAVKVLGASGAGSVSSIAQGLEWAGANGMHVANLSLGSPSPSATLEQAVNSATSRGVLVVAASGNSGAGSISYPARYANAMAVGATDQDNNRASFSQYGAGLDLVAPGVNVQSTYPGSAYASLNGTSMATPHVAGAAALVKQKNPSWSNVQIRNRLKNTATSLGSTNLYGSGLVNAEAATR

SEQ ID NO: 61365 - protein, 269 aa, Unidentified
AQSVPWGISRVQAPAAHNRGLAGSGVKVAVLDTGISTHPDLNIRGGASFVPGEPSTQDGNGHGTHVAGTIAALNNSIGVLGVAPSAELYAVKVLGASGGGAISSIAQGLEWAGNNGMHVANLSLGSPSPSATLEQAVNSATSRGVLVVAASGNSGADSISYPARYANAMAVGATDQNNNRADFSQYGAGLDIVAPGVNVQSTYPGSTYASLNGTSMATPHVAGAALLVKQKNPSWSNVTIREHLKNTATSLGSTNLYGSGLVNATAATR

SEQ ID NO: 61366 - protein, 269 aa, Unidentified
AQSVPWGISRVQAPAAHNRGLAGGGVKVAVLDTGISTHPDLNIRGGASFVPGEPSTQDGNGHGTHVAGTIAALDNNIGVLGVAPSAELYAVKVLAASGGGAISSIAQGLEWAGNNGMHVANLSLGSPSPSATLEQAVNSATSRGVLVVAASGNSGAGSISYPARYANAMAVGATDQNNNRASFSQYGAGLDIVAPGVNVQSTYPGSTYASLNGTSMATPHVAGAAVLVKQKNPSWSNVRIRNHLKNTATSLGSTNLYGSGLVNAEAATR

SEQ ID NO: 61367 - protein, 269 aa, Unidentified
AQSVPWGISRVQAPAAHNRGLAGGGVKVAVLDTGISTHPDLNIRGGASFVPGEPSTQDGNGHGTHVAGTIAALDNSIGVLGVAPSAELYAVKVLAASGNGAISSIAQGLEWAGNNGMHVANLSLGAPSPSATLEQAVNSATSRGVLVVAASGNSGAGSISYPARYANAMAVGATDQNNNRASFSQYGAGLDIVAPGVNVQSTYPGSTYASLNGTSMATPHVAGAAVLVKQKNPSWSNVRIRNHLKNTATSLGSTNLYGSGLVNAEAATR

SEQ ID NO: 61368 - protein, 269 aa, Unidentified
AQSVPWGISRVQAPAAHNRGLAGSGVKVAVLDTGISTHPDLNIRGGASFVPGEPSTQDGNGHGTHVAGTIAALNNSIGVLGVAPSAELYAVKVLGASGGGAISSIAQGLEWAGNNGMHVANLSLGSPSPSATLEQAVNSATSRGVLVVAASGNSGADSISYPARYANAMAVGATDQNNNRADFSQYGAGLDIVAPGVNVQSTYPGSTYASLNGTSMATPHVAGAATLVKQKNPSWSNVRIRDHLKNTATSLGSTNLYGSGLVNALAATR

SEQ ID NO: 61369 - protein, 269 aa, Unidentified
AQSVPWGISRVQAPAAHRRGLWGRGVKVAVLDTGISTHPDLNIRGGASFVPGEPSTQDGNGHGTHVAGTIAALDNSIGVLGVAPSAELYAVKVLGASGAGSVSSIAQGLEWAGANGMHVANLSLGSPSPSATLEQAVNSATSRGVLVVAASGNSGAGSISYPARYANAMAVGATDQDNNRASFSQYGAGLDLVAPGVNVQSTYPQSTYASLNGTSMATPHVAGAAALVKQKNPSWSNVQIRNRLKNTATSLGSTNLYGSGLVNAEAATR

SEQ ID NO: 61370 - protein, 269 aa, Unidentified
AQSVPWGISRVQAPAAHNRGLRGSGVKVAVLDTGISTHPDLNIRGGASFVPGEPSTQDGNGHGTHVAGTIAALNNNIGVLGVAPSAELYAVKVLAASGQGAISSIAQGLEWAGNNGMHVANLSLGAPSPSATLEQAVNSATSRGVLVVAASGNSGAGSISYPARYANAMAVGATDQNNNRASFSQYGAGLDIVAPGVNVQSTYPGSTYASQNGTSMATPHVAGAAVLVKQKNPSWSNVRIRNHLKNTATSLGSTNLYGSGLVNAEAATR

SEQ ID NO: 61371 - protein, 269 aa, Unidentified
AQSVPWGISRVQAPAAHNRGLQGSGVKVAVLDTGISTHPDLNIRGGASFVPGEPSTQDGNGHGTHVAGTIAALNNSIGVLGVAPSAELYAVKVLGASGGGAISSIAQGLEWAGNNGMHVANLSLGSPSPSATLEQAVNSATSRGVLVVAASGNSGADSISYPARYANAMAVGATDQNNNRADFSQYGAGLDIVAPGVNVQSTYPGSTYASLNGTSMATPHVAGAALLVKQKNPSWSNVRIREHLKNTATSLGSTNLYGSGLVNAFAATR

SEQ ID NO: 61372 - protein, 269 aa, Unidentified
AQSVPWGISRVQAPAAHNRGLQGSGVKVAVLDTGISTHPDLNIRGGASFVPGEPSTQDGNGHGTHVAGTIAALNNSIGVLGVAPSAELYAVKVLGASGGGAISSIAQGLEWAGNNGMHVANLSLGSPSPSATLEQAVNSATSRGVLVVAASGNSGADSISYPARYANAMAVGATDQNNNRADFSQYGAGLDIVAPGVNVQSTYPGSTYASLNGTSMATPHVAGAALLVKQKNPSWSNVTIRHHLKNTATSLGSTNLYGSGLVNALAATR

SEQ ID NO: 61373 - protein, 269 aa, Unidentified
AQSVPWGISRVQAPAAHNRGLAGSGVKVAVLDTGISTHPDLNIRGGASFVPGEPSTQDGNGHGTHVAGTIAALNNSIGVLGVAPSAELYAVKVLGASGGGAISSIAQGLEWAGNNGMHVANLSLGSESPSATLEQAVNSATSRGVLVVAASGNSGAESISYPARYANAMAVGATDQNNNRASFSQYGAGLDIVAPGVNVQSTYPGSTYASLNGTSMATPHVAGAAVLVKQKNPSWSNVRIRDRLKNTATSLGSTNLYGSGLVNAEAATR

SEQ ID NO: 61374 - protein, 269 aa, Unidentified
AQSVPWGISRVQAPAAHNRGLTGSGVKVAVLDTGISTHPDLNIRGGASFVPGEPSTQDGNGHGTHVAGTIAALNNSIGVLGVAPSAELYAVKVLGASGGGAISSIAQGLEWAGNNGMHVANLSLGNESPSATLEQAVNSATSRGVLVVAASGNSGEGSISYPARYANAMAVGATDQNNNRASFSQYGAGLDIVAPGVNVQSTYPGSTYASLNGTSMATPHVAGAAVLVKQKRPSWSNVRIRDHLKNTATSLGSTNLYGSGLVNAEAATR

SEQ ID NO: 61375 - protein, 269 aa, Unidentified
AQSVPWGISRVQAPAAHNRGLAGSGVKVAVLDTGISTHPDLNIRGGASFVPGEPSTQDGNGHGTHVAGTIAALNNSIGVLGVAPSAELYAVKVLGASGGGAISSIAQGLEWAGNNGMHVANLSLGSPSPSATLEQAVNSATSRGVLVVAASGNSGADSISYPARYANAMAVGATDQNNNRADFSQYGAGLDIVAPGVNVQSTYPGSTYASLNGTSMATPHVAGAASLVKQKNPSWSNVTIREHLKNTATSLGSTNLYGSGLVNAHAATR

SEQ ID NO: 61376 - protein, 269 aa, Unidentified
AQSVPWGISRVQAPAAHNRRLTGSGVKVAVLDTGISTHPDLNIRGGASFVPGEPSTQDGNGHGTHAAGTIAALDNSIGVLGVAPSAELYAVKVLGASGSGAISSIAQGLEWAGNNGMHVANLSLGSPSPSATLEQAVNSATSRGVLVVAASGNSGADSISYPARYANAMAVGATDQNNNRASFSQYGAGLDIVAPGVNVQSTYPGSTYASLNGTSMATPHVAGAAVLVKHKNPSWSNVRIRNHLKNTATSLGGTNLYGSGLVNAEAATR

SEQ ID NO: 61377 - protein, 269 aa, Unidentified
AQSVPWGISRVQAPAAHNRGLTGSGVKVAVLDTGISTHPDLNIRGGASFVPGEPSTQDGNGHGTHVAGTIAALNNSIGVLGVAPSAELYAVKVLGASGGGAISSIAQGLEWAGNNGMHVANLSLGSPSPSATLEQAVNSATSRGVLVVAASGNSGEGSISYPARYANAMAVGATDQNNNRADFSQYGAGLDIVAPGVNVQSTYPGSTYASENGTSMATPHVAGAAVLVKQKNPSWSNVRIRDRLKNTATSLGSTNLYGSGLVNAEAATR

SEQ ID NO: 61378 - protein, 269 aa, Unidentified
AQSVPWGISRVQAPAAHNRGLTGRGVKVAVLDTGISTHPDLNIRGGASFVPGEPSTQDGNGHGTHVAGTIAALDNNIGVLGVAPDAELYAVKVLGASGGGAISSIAQGLEWAGNNRMHVANLSLGSPSPSATLEQAVNSATSRGVLVVAASGNSGAGSISYPARYANAMAVGATDQNNNRASFSQYGAGLDIVAPGVNVQSTWPGSTYASLNGTSMATPHVAGAAALVKQKNPSWSNVQIRNRLKNTATSLGSTNLYGSGLVNAEAATR

SEQ ID NO: 61379 - protein, 269 aa, Unidentified
AQSVPWGISRVQAPAAHNRGLAGSGVKVAVLDTGISTHPDLNIRGGASFVPGEPSTQDGNGHGTHVAGTIAALNNSIGVLGVAPSAELYAVKVLGASGGGAISSIAQGLEWAGNNGMHVANLSLGSPSPSATLEQAVNSATSRGVLVVAASGNSGADSISYPARYANAMAVGATDQNNNRAEFSQYGAGLDIVAPGVNVQSTYPGSTYASLNGTSMATPHVAGAALLVKQKNPSWSNVTIREHLKNTATSLGSTNLYGSGLVNATAATR

SEQ ID NO: 61380 - protein, 269 aa, Unidentified
AQSVPWGISRVQAPAAHNRGLTGSGVKVAVLDTGISTHPDLNIRGGASFVPGEPSTQDENGHGTHAAGTIAALNNSIGVLGVAPSAELYAVKVLGASGSGAISSIAQGLEWAGNNGMHVANLSLGSPSPSATLEQAVNSATSRGVLVVAASGNSGADSISYPARYANAMAVGATDQNNNRASFSQYGAGLDIVAPGVNVQSTYPGSTYASLNGTSMATPHVAGAAVLVKHKNPSWSNVRIRDHLKKTATSLGSTNLYGSGLVNAEAATR

SEQ ID NO: 61381 - protein, 269 aa, Unidentified
AQSVPWGISRVQAPAAHNRRLTGRGVKVAVLDTGISTHPDLNIRGGASFVPGEPSTQDGEGHGTHVAGTIAALNNGIGVLGVAPSAELYAVKVLGASGSGSVSSIAQGLEWAGNNSMHVANLSLGSESPSATLEQAVNSATSRGVLVVAASGNSGADSISYPARYANAMAVGATDQNNNRADFSQYGAGLDIVAPGVNVQSTYPGSTYASLNGTSMATPHVAGAAALVKQKNPSWSNVRIRDHLKNTATSLGSTNLYGSGLVNAEAATR

SEQ ID NO: 61382 - protein, 269 aa, Unidentified
AQSVPWGISRVQAPAAHNRGLQGSGVKVAVLDTGISTHPDLNIRGGASFVPGEPSTQDGNGHGTHVAGTIAALNNSIGVLGVAPSAELYAVKVLGASGGGAISSIAQGLEWAGNNGMHVANLSLGSPSPSATLEQAVNSATSRGVLVVAASGNSGADSISYPARYANAMAVGATDQNNNRADFSQYGAGLDIVAPGVNVQSTYPGSTYASLNGTSMATPHVAGAATLVKQKNPSWSNVTIRDHLKNTATSLGSTNLYGSGLVNAFAATR

SEQ ID NO: 61383 - protein, 269 aa, Unidentified
AQSVPWGISRVQAPASHNRGLTGFGVKVAVLDTGISTHPDLNIRGGASFVPGEPSTQDGNGHGTHVAGTIAALNNSIGVLGVAPSAELYAVKVLGASGDGAISSIAQGLEWAGANGMHVANLSLGNPSPSATLEQAVNSATSRGVLVVAASGNSGAGSISYPARYANAMAVGATDQNNNRASFSQYGAGLDIVAPGVNVQSTVPGSAYASLNGTSMATPHVAGAAVLVKQKNPSWSNVQIRNHLKNTATSLGSTNLYGSGLVNAEAATR

SEQ ID NO: 61384 - protein, 269 aa, Unidentified
AQSVPWGISRVQAPAAHNRGLAGFGVKVAVLDTGISTHPDLNIRGGASFVPGEPSTQDGNGHGTHVAGTIAALNNSIGVLGVAPSAELYAVKVLGASGGGAISSIAQGLEWAGLNVMHVANLSLGSPSPSATLEQAVNSATSRGVLVVAASGNSGAGSISYPARYANAMAVGATDQNNNRASFSQYGAGLDIVAPGVNVQSTAPGSAYASLNGTSMATPHVAGAAVLVKQKNPSWSNVQIRNHLKNTATSLGSTNLYGSGLVNAEAATR

SEQ ID NO: 61385 - protein, 269 aa, Unidentified
AQSVPWGISRVQAPAAHNRGLTGRGVKVAVLDTGISTHPDLRITGGASFVPGEPSTQDGNGHGTHVAGTIAALDNRIGVLGVAPSAELYAVKVLGASGGGAISSIAQGLEWAGNNGMHVANLSLGSPSPSATLEQAVNSATSRGVLVVAASGNSGAGSISYPARYANAMAVGATDQNNNRASFSQYGAGLDIVAPGVNVQSTYPGSTYASLNGTSMATPHVAGAAVLVKQKNPSWSNVRIRNHLKNTATSLGSTNLYGSGLVNAEAATR

SEQ ID NO: 61386 - protein, 269 aa, Unidentified
AQSVPWGISRVQAPAAHRRRLTGRGVKVAVLDTGISTHPDLNIRGGASFVPGEPSTQDGNGHGTHVAGTIAALDNSIGVLGVAPSAELYAVKVLGASGSGSVSSIAQGLEWAGANGMHVANLSLGSPSPSATLEQAVNSATSRGVLVVAASGNSGAGSISYPARYANAMAVGATDQDNNRASFSQYGAGLDLVAPGVNVQSTYPQSAYASLNGTSMATPHVAGAAALVKQKNPSWSNVQIRNRLKNTATSLGSTNLYGSGLVNAEAATR

SEQ ID NO: 61387 - protein, 269 aa, Unidentified
AQSVPWGISRVQAPASHNRGLTGFGVKVAVLDSGISTHPDLNIRGGASFVPGEPSTQDGNGHGTHVAGTIAALNNSIGVLGVAPSAELYAVKVLGASGGGAISSIAQGLEWAGLNGMHVANLSLGSPSPSATLEQAVNSATSRGVLVVAASGNSGAGSISYPARYANAMAVGATDQNNNRASFSQYGAGLDIVAPGVNVQSTVPGSAYASLNGTSMATPHVAGAAVLVKQKNPSWSNVQIRNHLKNTATSLGSTNLYGSGLVNAEAATR

SEQ ID NO: 61388 - protein, 269 aa, Unidentified
AQSVPWGISRVQAPAAHNRGLAGSGVKVAVLDTGISTHPDLNIRGGASFVPGEPSTQDGNGHGTHVAGTIAALNNSIGVLGVAPSAELYAVKVLGASGGGAISSIAQGLEWAGNNGMHVANLSLGSPSPSATLEQAVNSATSRGVLVVAASGNSGADSISYPARYANAMAVGATDQNNNRAEFSQYGAGLDIVAPGVNVQSTYPGSTYASLNGTSMATPHVAGAATLVKQKNPSWSNVRIREHLKNTATSLGSTNLYGSGLVNALAATR

SEQ ID NO: 61389 - protein, 269 aa, Unidentified
AQSVPWGISRVQAPAAHNRGLQGSGVKVAVLDTGISTHPDLNIRGGASFVPGEPSTQDGNGHGTHVAGTIAALNNSIGVLGVAPSAELYAVKVLGASGGGAISSIAQGLEWAGNNGMHVANLSLGSPSPSATLEQAVNSATSRGVLVVAASGNSGADSISYPARYANAMAVGATDQNNNRAEFSQYGAGLDIVAPGVNVQSTYPGSTYASLNGTSMATPHVAGAATLVKQKNPSWSNVVIRDHLKNTATSLGSTNLYGSGLVNATAATR

SEQ ID NO: 61390 - protein, 269 aa, Unidentified
AQSVPWGISRVQAPAAHNRGLAGSGVKVAVLDTGISTHPDLNIRGGASFVPGEPSTQDGNGHGTHVAGTIAALNNSIGVLGVAPSAELYAVKVLGASGGGAISSIAQGLEWAGNNGMHVANLSLGSPSPSATLEQAVNSATSRGVLVVAASGNSGADSISYPARYANAMAVGATDQNNNRAEFSQYGAGLDIVAPGVNVQSTYPGSTYASLNGTSMATPHVAGAASLVKQKNPSWSNVRIRDHLKNTATSLGSTNLYGSGLVNATAATR

SEQ ID NO: 61391 - protein, 269 aa, Unidentified
AQSVPWGISRVQAPAAHNRGLQGSGVKVAVLDTGISTHPDLNIRGGASFVPGEPSTQDGNGHGTHVAGTIAALNNSIGVLGVAPSAELYAVKVLGASGGGAISSIAQGLEWAGNNGMHVANLSLGSPSPSATLEQAVNSATSRGVLVVAASGNSGADSISYPARYANAMAVGATDQNNNRADFSQYGAGLDIVAPGVNVQSTYPGSTYASLNGTSMATPHVAGAAVLVKQKNPSWSNVRIREHLKNTATSLGSTNLYGSGLVNAHAATR

SEQ ID NO: 61392 - protein, 269 aa, Unidentified
AQSVPWGISRVQAPAAHNRGLAGRGVKVAVLDTGISTHPDLNIRGGASFVPGEPSTQDGNGHGTHVAGTIAALNNSIGVLGVAPSAELYAVKVLGASGGGAISSIAQGLEWAGNNGMHVANLSLGSESPSATLEQAVNSATSRGVLVVAASGNSGEGSISYPARYANAMAVGATDQNNNRASFSQYGAGLDIVAPGVNVQSTYPGSTYASLNGTSMATPHVAGAAVLVKQKNPSWSNVRIRDHLKNTATSLGSTNLYGSGLVNAEAATR

SEQ ID NO: 61393 - protein, 269 aa, Unidentified
AQSVPWGISRVRAPAAHNRGLTGSGVKVAVLDTGISTHPDLNIRGGASFVPGEPSTQDGNGHGTHVAGTIAALNNSIGVLGVAPSAELYAVKVLGASGSGAISSIAQGLEWAGNNGMHVANLSLGSPSPSATLEQAVNSATSRGVLVVAASGNSGADSISYPARYANAMAVGATDQNNNRASFSQYGAGLDIVAPGVNVQSTWPGSRYASLNGTSMATPHVAGAAVLVKHKNPSWSNVRIRNHLKNTATSLGSANLYGSGLVNAEAATR

SEQ ID NO: 61394 - protein, 269 aa, Unidentified
AQSVPWGISRVQAPAAHNRGLQGSGVKVAVLDTGISTHPDLNIRGGASFVPGEPSTQDGNGHGTHVAGTIAALNNSIGVLGVAPSAELYAVKVLGASGGGAISSIAQGLEWAGNNGMHVANLSLGSPSPSATLEQAVNSATSRGVLVVAASGNSGADSISYPARYANAMAVGATDQNNNRADFSQYGAGLDIVAPGVNVQSTYPGSTYASLNGTSMATPHVAGAASLVKQKNPSWSNVTIREHLKNTATSLGSTNLYGSGLVNAHAATR

SEQ ID NO: 61395 - protein, 269 aa, Unidentified
AQSVPWGISRVQAPASHNRGLAGFGVKVAVLDTGISTHPDLNIRGGASFVPGEPSTQDGNGHGTHVAGTIAALNNSIGVLGVAPSAELYAVKVLGASGGGAISSIAQGLEWAGLNGMHVANLSLGSPSPSATLEQAVNSATSRGVLVVAASGNSGAGSISYPARYANAMAVGATDQNNNRASFSQYGAGLDIVAPGVNVQSTAPQSTYASLNGTSMATPHVAGAAVLVKQKNPSWSNVQIRNHLKNTATSLGSTNLYGSGLVNAEAATR

SEQ ID NO: 61396 - protein, 269 aa, Unidentified
AQSVPWGISRVQAPAAHNRGLQGSGVKVAVLDTGISTHPDLNIRGGASFVPGEPSTQDGNGHGTHVAGTIAALNNSIGVLGVAPSAELYAVKVLGASGGGAISSIAQGLEWAGNNGMHVANLSLGSPSPSATLEQAVNSATSRGVLVVAASGNSGADSISYPARYANAMAVGATDQNNNRAEFSQYGAGLDIVAPGVNVQSTYPGSTYASLNGTSMATPHVAGAALLVKQKNPSWSNVTIREHLKNTATSLGSTNLYGSGLVNALAATR

SEQ ID NO: 61397 - protein, 269 aa, Unidentified
AQSVPWGISRVQAPAAHNRGLAGSGVKVAVLDTGISTHPDLNIRGGASFVPGEPSTQDGNGHGTHVAGTIAALNNSIGVLGVAPSAELYAVKVLGASGGGAISSIAQGLEWAGNNGMHVANLSLGSPSPSATLEQAVNSATSRGVLVVAASGNSGADSISYPARYANAMAVGATDQNNNRADFSQYGAGLDIVAPGVNVQSTYPGSTYASLNGTSMATPHVAGAALLVKQKNPSWSNVRIRHHLKNTATSLGSTNLYGSGLVNAFAATR

SEQ ID NO: 61398 - protein, 269 aa, Unidentified
AQSVPWGISRVQAPAAHNRGLQGSGVKVAVLDTGISTHPDLNIRGGASFVPGEPSTQDGNGHGTHVAGTIAALNNSIGVLGVAPSAELYAVKVLGASGGGAISSIAQGLEWAGNNGMHVANLSLGSPSPSATLEQAVNSATSRGVLVVAASGNSGADSISYPARYANAMAVGATDQNNNRADFSQYGAGLDIVAPGVNVQSTYPGSTYASLNGTSMATPHVAGAALLVKQKNPSWSNVTIRHHLKNTATSLGSTNLYGSGLVNATAATR

SEQ ID NO: 61399 - protein, 269 aa, Unidentified
AQSVPWGISRVQAPAAHNRGLAGGGVKVAVLDTGISTHPDLNIRGGASFVPGEPSTQDGNGHGTHVAGTIAALNNSIGVLGVAPSAELYAVKVLAASGNGAISSIAQGLEWAGNNGMHVANLSLGSPSPSATLEQAVNSATSRGVLVVAASGNSGAGSISYPARYANAMAVGATDQNNNRASFSQYGAGLDIVAPGVNVQSTYPGSTYASQNGTSMSTPHVAGAAVLVKQKNPSWSNVRIRNHLKNTATSLGSTNLYGSGLVNAEAATR

SEQ ID NO: 61400 - protein, 269 aa, Unidentified
AQSVPWGISRVQAPAAHNRGLTGSGVKVAVLDTGISTHPDLNIRGGASFVPGEPSTQDGNGHGTHAAGTIAALNNSIGVLGVAPSAELYAVKVLGASGSGAISSIAQGLEWAGNNGMHVANLSLGSPSPSATLEQAVNSATSRGVLVVAASGNSGADSISYPARYANAMAVGATDQNNNRASFSQYGAGLDIVAPGVNIQSTWIGSTYASLNGTSMATPHVAGAAVLVKHKNPSWSNVRIRNHLKNTATSLGSTNLYGSGLVNAEAATR

SEQ ID NO: 61401 - protein, 269 aa, Unidentified
AQSVPWGISRVQAPAAHNRGLAGSGVKVAVLDTGISTHPDLNIRGGASFVPGEPSTQDGNGHGTHVAGTIAALNNSIGVLGVAPSAELYAVKVLGASGGGAISSIAQGLEWAGNNGMHVANLSLGSPSPSATLEQAVNSATSRGVLVVAASGNSGADSISYPARYANAMAVGATDQNNNRADFSQYGAGLDIVAPGVNVQSTYPGSTYASLNGTSMATPHVAGAASLVKQKNPSWSNVTIREHLKNTATSLGSTNLYGSGLVNATAATR

SEQ ID NO: 61402 - protein, 269 aa, Unidentified
AQSVPWGISRVQAPAAHNRGLAGSGVKVAVLDTGISTHPDLNIRGGASFVPGEPSTQDGNGHGTHVAGTIAALNNSIGVLGVAPSAELYAVKVLGASGGGAISSIAQGLEWAGNNGMHVANLSLGSPSPSATLEQAVNSATSRGVLVVAASGNSGADSISYPARYANAMAVGATDQNNNRADFSQYGAGLDIVAPGVNVQSTYPGSTYASLNGTSMATPHVAGAALLVKQKNPSWSNVTIRHHLKNTATSLGSTNLYGSGLVNATAATR

SEQ ID NO: 61403 - protein, 269 aa, Unidentified
AQSVPWGISRVQAPAAHNRGLAGSGVKVAVLDTGISTHPDLNIRGGASFVPGEPSTQDGNGHGTHVAGTIAALNNSIGVLGVAPSAELYAVKVLGASGGGAISSIAQGLEWAGNNGMHVANLSLGSPSPSATLEQAVNSATSRGVLVVAASGNSGADSISYPARYANAMAVGATDQNNNRAEFSQYGAGLDIVAPGVNVQSTYPGSTYASLNGTSMATPHVAGAAVLVKQKNPSWSNVVIRDHLKNTATSLGSTNLYGSGLVNAFAATR

SEQ ID NO: 61404 - protein, 269 aa, Unidentified
AQSVPWGISRVQAPAAHNRGLAGSGVKVAVLDTGISTHPDLNIRGGASFVPGEPSTQDGNGHGTHVAGTIAALNNSIGVLGVAPSAELYAVKVLGASGSGAISSIAQGLEWAGNNRMHVANLSLGSPSPSATLEQAVNSATSRGVLVVAASGNSGADSISYPARYANAMAVGATDQNNNRADFSQYGAGLDIVAPGVNVQSTYPGSTYASDNGTSMATPHVAGAAVLVKQKNPSWSNVRIRDHLKNTATSLGSTNLYGSGLVNAEAATR

SEQ ID NO: 61405 - protein, 269 aa, Unidentified
AQSVPWGISRVQAPAAHNRRLWGSGVKVAVLDTGISTHPDLNIRGGASFVPGEPSTQDGNGHGTHVAGTIAALNNSIGVLGVAPSAELYAVKVLGASGAGAISSIAQGLEWAGANGMHVANLSLGSPSPSATLEQAVNSATSRGVLVVAASGNSGAGSISYPARYANAMAVGATDQDNNRASFSQYGAGLDIVAPGVNVQSTYPGSTYFSLNGTSMATPHVAGAAVLVKQKNPSWSNVRIRNHLKNTATSLGSTNLYGSGLVNAEAATR

SEQ ID NO: 61406 - protein, 269 aa, Unidentified
AQSVPWGISRVQAPASHNRGLTGSGVKVAVLDSGISTHPDLNIRGGASFVPGEPSTQDGNGHGTHVAGTIAALNNSIGVLGVAPSAELYAVKVLGASGGGAISSIAQGLEWAGANGMHVANLSLGSPSPSATLEQAVNSATSRGVLVVAASGNSGAGSISYPARYANAMAVGATDQNNNRASFSQYGAGLDIVAPGVNVQSTVPQSAYASLNGTSMATPHVAGAAVLVKQKNPSWSNVQIRNHLKNTATSLGSTNLYGSGLVNAEAATR

SEQ ID NO: 61407 - protein, 269 aa, Unidentified
AQSVPWGISRVQAPAAHNRGLTGSGVKVAVLDTGISAHPDLNIRGGASFVPGEPSTQDGNGHGTHVAGTIAALDNSIGVLGVAPSAELYAVKVLGASGSGAISSIAQGLEWAGNNGMHVANLSLGSPSPSATLEQAVNSATSRGVLVVAASGNSGADSISYPARYANAMAVGATDQNNNRASFSQYGAGLDIVAPGVNVQSTYPGSRYASLNGTSMATPHVAGAAVLVKHKNPSWSNVRIRNHLKNTATSLGSANLYGSGLVNAEAATR

SEQ ID NO: 61408 - protein, 269 aa, Unidentified
AQSVPWGISRVQAPASHNRGLAGFGVKVAVLDTGISTHPDLNIRGGASFVPGEPSTQDGNGHGTHVAGTIAALNNSIGVLGVAPSAELYAVKVLGASGGGAISSIAQGLEWAGANGMHVANLSLGNPSPSATLEQAVNSATSRGVLVVAASGNSGAGSISYPARYANAMAVGATDQNNNRASFSQYGAGLDIVAPGVNVQSTAPGSTYASLNGTSMATPHVAGAAVLVKQKNPSWSNVQIRNHLKNTATSLGSTNLYGSGLVNAEAATR

SEQ ID NO: 61409 - protein, 269 aa, Unidentified
AQSVPWGISRVQAPAAHNRGLTGSGVKVAVLDTGISTHPDLNIRGGASFVPGEPSTQDGNGHGTHVAGTIAALDNSIGVLGVAPSAELYAVKVLGADGRGAISSIAQGLEWAGNNGMHVANLSLGSPSPSATLEQAVNSATSRGVLVVAASGNDGASSISYPARYANAMAVGATDQNNNRASFSQYGAGLDIVAPGVNVLSTWPGSTYASLNGTSMATPHVAGAAALVKQKNPSWSNVQIRNHLKNTATSLGSTNEYGSGLVNAEAATR

SEQ ID NO: 61410 - protein, 269 aa, Unidentified
AQSVPWGISRVQAPAAHNRGLAGGGVKVAVLDTGISTHPDLNIRGGASFVPGEPSTQDGNGHGTHVAGTIAALNNNIGVLGVAPSAELYAVKVLSASGGGAISSIAQGLEWAGNNGMHVANLSLGSPSPSATLEQAVNSATSRGVLVVAASGNSGAGSISYPARYANAMAVGATDQNNNRASFSQYGAGLDIVAPGVNVQSTYPGSTYASQNGTSMATPHVAGAAVLVKQKNPSWSNVRIRNHLKNTATSLGSTNLYGSGLVNAEAATR

SEQ ID NO: 61411 - protein, 269 aa, Unidentified
AQVVPWGISRVQAPAAHNRGLTGRGVKVAVLDTGISTHPDLNIRGGASFVPGEPSTQDGNGHGTHVAGTIAALDNNIGVLGVAPRAELYAVKVLGASSVGSVSSIAQGLEWAGNNRMHVANLSLGSPSPSATLEQAVNSATSRGVLVVAASGNSGAGSISYPARYANAMAVGATDQNNNRASFSQYGAGLDIVAPGVNVLSTYPGSTYASKNGTSMATPHVAGAAALVKQKNPSWSNVQIRNHLKNTATSLGSTNLYGSGLVNAEAATR

SEQ ID NO: 61412 - protein, 269 aa, Unidentified
AQSVPWGISRVQAPAAHNRGLAGSGVKVAVLDTGISTHPDLNIRGGASFVPGEPSTQDGNGHGTHVAGTIAALNNSIGVLGVAPSAELYAVKVLGASGGGAISSIAQGLEWAGNNGMHVANLSLGSPSPSATLEQAVNSATSRGVLVVAASGNSGADSISYPARYANAMAVGATDQNNNRADFSQYGAGLDIVAPGVNVQSTYPGSTYASLNGTSMATPHVAGAALLVKQKNPSWSNVRIRDHLKNTATSLGSTNLYGSGLVNATAATR

SEQ ID NO: 61413 - protein, 269 aa, Unidentified
AQSVPWGISRVQAPAAHRRGLTGRGVKVAVLDTGISTHPDLNIRGGASFVPGEPSTQDGNGHGTHVAGTIAALDNSIGVLGVAPSAELYAVKVLGASGAGSVSSIAQGLEWAGANGMHVANLSLGSPSPSATLEQAVNSATSRGVLVVAASGNSGAGSISYPARYANAMAVGATDQDNNRASFSQYGAGLDLVAPGVNVQSTYPGSAYASLNGTSMATPHVAGAAALVKQKNPSWSNVQIRNRLKNTATSLGSTNLYGSGLVSAEAATR

SEQ ID NO: 61414 - protein, 269 aa, Unidentified
AQSVPWGISRVQAPAAHNRGLAGSGVKVAVLDTGISTHPDLNIRGGASFVPGEPSTQDGNGHGTHVAGTIAALNNSIGVLGVAPSAELYAVKVLGASGGGAISSIAQGLEWAGNNGMHVANLSLGSPSPSATLEQAVNSATSRGVLVVAASGNSGADSISYPARYANAMAVGATDQNNNRADFSQYGAGLDIVAPGVNVQSTYPGSTYASLNGTSMATPHVAGAASLVKQKNPSWSNVTIRHHLKNTATSLGSTNLYGSGLVNAFAATR

SEQ ID NO: 61415 - protein, 269 aa, Unidentified
AQSVPWGISRVQAPAAHNRGLQGSGVKVAVLDTGISTHPDLNIRGGASFVPGEPSTQDGNGHGTHVAGTIAALNNSIGVLGVAPSAELYAVKVLGASGGGAISSIAQGLEWAGNNGMHVANLSLGSPSPSATLEQAVNSATSRGVLVVAASGNSGADSISYPARYANAMAVGATDQNNNRADFSQYGAGLDIVAPGVNVQSTYPGSTYASLNGTSMATPHVAGAALLVKQKNPSWSNVTIRDHLKNTATSLGSTNLYGSGLVNALAATR

SEQ ID NO: 61416 - protein, 269 aa, Unidentified
AQSVPWGISRVQAPAAHNRGLAGGGVKVAVLDTGISTHPDLNIRGGASFVPGEPSTQDGNGHGTHVAGTIAALNNSIGVLGVAPSAELYAVKVLSASGQGAISSIAGGLEWAGNNGMHVANLSLGAPSPSATLEQAVNSATSRGVLVVAASGNSGAGSISYPARYANAMAVGATDQNNNRASFSQYGAGLDIVAPGVNVQSTYPGSTYASQNGTSMATPHVAGAAVLVKQKNPSWSNVQIRNHLKNTATSLGSTNLYGSGLVNAEAATR

SEQ ID NO: 61417 - protein, 269 aa, Unidentified
AQSVPWGISRVQAPAAHNRGLTGSGVKVAVLDTGISTHPDLNIRGGASFVPGEPSTQDGNGHGTHVAGTIAALNNSIGVLGVAPSAELYAVKVLGASGGGSIASIAQGLEWAGNNGMHVANLSLGSESPSATLEQAVNSATSRGVLVVAASGNSGEGSISYPARYANAMAVGATDQNNNRADFSQYGAGLDIVAPGVNVQSTYPGSTYASLNGTSMATPHVAGAAVLVKQKNPSWSNVRIRDRLKNTATSLGSTNLYGSGLVNAEAATR

SEQ ID NO: 61418 - protein, 269 aa, Unidentified
AQSVPWGISRVQAPAAHNRGLAGSGVKVAVLDTGISTHPDLNIRGGASFVPGEPSTQDGNGHGTHVAGTIAALNNSIGVLGVAPSAELYAVKVLGASGGGAISSIAQGLEWAGNNGMHVANLSLGSPSPSATLEQAVNSATSRGVLVVAASGNSGADSISYPARYANAMAVGATDQNNNRAEFSQYGAGLDIVAPGVNVQSTYPGSTYASLNGTSMATPHVAGAATLVKQKNPSWSNVVIREHLKNTATSLGSTNLYGSGLVNAFAATR

SEQ ID NO: 61419 - protein, 269 aa, Unidentified
AQSVPWGISRVQAPAAHNRGLTGSGVKVAVLDTGISTHPDLNIRGGASFVPGEPSTQDGNGHGTHVAGTIAALNNSIGVLGVAPSAELYAVKVLGASGGGAISSIAQGLEWAGNNGMHVANLSLGSPGPSATLEQAVNSATSRGVLVVAASGNSGADSISYPARYANAMAVGATDQNNNRASFSQYGAGLDIVAPGVNVQSTYPGSTYASLNGTSMATPHVAGAAVLVKHKNPSWSNVRIRDHLKKTATSLGSTNLYGSGLVNAEAATR

SEQ ID NO: 61420 - protein, 269 aa, Unidentified
AQSVPWGISRVQAPAAHNRGLAGSGVKVAVLDTGISTHPDLNIRGGASFVPGEPSTQDGNGHGTHVAGTIAALNNSIGVLGVAPSAELYAVKVLGASGGGAISSIAQGLEWAGNNGMHVANLSLGSPSPSATLEQAVNSATSRGVLVVAASGNSGADSISYPARYANAMAVGATDQNNNRAEFSQYGAGLDIVAPGVNVQSTYPGSTYASLNGTSMATPHVAGAATLVKQKNPSWSNVRIRHHLKNTATSLGSTNLYGSGLVNATAATR

SEQ ID NO: 61421 - protein, 269 aa, Unidentified
AQSVPWGISRVQAPAAHNRGLRGSGVKVAVLDTGISTHPDLNIRGGASFVPGEPSTQDGNGHGTHVAGTIAALNNSIGVLGVAPSAELYAVKVLAASGGGAISSIAGGLEWAGLNGMHVANLSLGSPSPSATLEQAVNSATSRGVLVVAASGNSGAGSISYPARYANAMAVGATDQNNNRASFSQYGAGLDIVAPGVNVQSTYPGSTYASQNGTSMATPHVAGAAVLVKQKNPSWSNVRIRNHLKNTATSLGSTNLYGSGLVNAEAATR

SEQ ID NO: 61422 - protein, 269 aa, Unidentified
AQSVPWGISRVQAPAAHNRGLTGSGVKVAVLDTGISTHPDLNIRGGASFVPGEPSTQDGNGHGTHVAGTIAALDNSIGVLGVAPSAELYAVKVLGADGRGAISSIAQGLEWAGNNGMHVANLSLGSPSPSATLEQAVNSATSYGVLVVAASGNSGASSISYPARYANAMAVGATDQNNNRASFSQYGAGLDIVAPGVNVQSTWPGSTYASLSGTSMATPHVAGAAALVKQKNPSWSNVQIRNHLKNTATSLGSTNEYGSGLVNAEAATR

SEQ ID NO: 61423 - protein, 269 aa, Unidentified
AQSVPWGISRVQAPAAHNRGLTGSGVKVAVLDTGISTHPDLNIRGGASFVPGEPSTQDGNGHGTHVAGTIAALNNSIGVLGVAPSAELYAVKVLGASGGGAISSIAQGLEWAGNNGMHVANLSLGSPSPSATLEQAVNSATSRGVLVVAASGNSGEGSISYPARYANAMAVGATDQNNNRADFSQYGAGLDIVAPGVNVQSTYPGSTYASLNGTSMATPHVAGAAVLVKQKNPSWSNVRIRDRLKNTATSLGSTNLYGSGLVNAFAATR

SEQ ID NO: 61424 - protein, 269 aa, Unidentified
AQSVPWGISRVQAPAAHNRRLTGRGVKVAVLDTGISTHPDLDITGGASFVPGEPSTQDGNGHGTHVAGTIAALDNSIGVLGVAPSAELYAVKVLGASGGGAISSIAQGLEWAGNNGMHVANLSLGSPSPSATLEQAVNSATSRGVLVVAASGNSGAGSISYPARYANAMAVGATDQNNNRASFSQYGAGLDIVAPGVNVQSTYPGSTYASLNGTSMATPHVAGAAVLVKQKNPSWSNVRIRNHLKNTATSLGSTNLYGSGLVNAEAATR

SEQ ID NO: 61425 - protein, 269 aa, Unidentified
AQSVPWGISRVQAPAAHNRGLTGSGVKVAVLDTGISTHPDLNIRGGASFVPGEPSTQDGNGHGTHVAGTIAALNNSIGVLGVAPSAELYAVKVLGASGGGAISSIAQGLEWAGNNGMHVANLSLGSPSPSATLEQAVNSATSRGVLVVAASGNSGADSISYPARYANAMAVGATDQNNNRASFSQYGAGLDIVAPGVNVQSTYPGSTYASLNGTSMATPHVAGVAVLVKHKNPSWSNVRIRDHLKKTATSLGSTNLYGSGLVNAEAATR

SEQ ID NO: 61426 - protein, 269 aa, Unidentified
AQSVPWGISRVQAPAAHNRGLTGSGVKVAVLDTGISTHPDLNIRGGASFVPGEPSTQDGNGHGTHVAGTIAALNNSIGVLGVAPSAELYAVKVLGASGGGSIASIAQGLEWAGNNGMHVANLSLGSESPSATLEQAVNSATSRGVLVVAASGNSGEESISYPARYANAMAVGATDQNNNRASFSQYGAGLDIVAPGVNVQSTYPGSTYASLNGTSMATPHVAGAAVLVKQKRPSWSNVRIRDHLKNTATSLGSTNLYGSGLVNAEAATR

SEQ ID NO: 61427 - protein, 269 aa, Unidentified
AQSVPWGISRVQAPAAHNRGLAGSGVKVAVLDTGISTHPDLNIRGGASFVPGEPSTQDGNGHGTHVAGTIAALNNSIGVLGVAPSAELYAVKVLGASGGGAISSIAQGLEWAGNNGMHVANLSLGSPSPSATLEQAVNSATSRGVLVVAASGNSGADSISYPARYANAMAVGATDQNNNRAEFSQYGAGLDIVAPGVNVQSTYPGSTYASLNGTSMATPHVAGAATLVKQKNPSWSNVRIRDHLKNTATSLGSTNLYGSGLVNALAATR

SEQ ID NO: 61428 - protein, 269 aa, Unidentified
AQSVPWGISRVQAPAAHNRGLAGSGVKVAVLDTGISTHPDLNIRGGASFVPGEPSTQDGNGHGTHVAGTIAALNNSIGVLGVAPSAELYAVKVLGASGGGAISSIAQGLEWAGNNGMHVANLSLGSPSPSATLEQAVNSATSRGVLVVAASGNSGADSISYPARYANAMAVGATDQNNNRADFSQYGAGLDIVAPGVNVQSTYPGSTYASLNGTSMATPHVAGAATLVKQKNPSWSNVVIRHHLKNTATSLGSTNLYGSGLVNATAATR

SEQ ID NO: 61429 - protein, 269 aa, Unidentified
AQSVPWGISRVQAPAAHRRRLTGRGVKVAVLDTGISTHPDLNIRGGASFVPGEPSTQDGNGHGTHVAGTIAALDNSIGVLGVAPSAELYAVKVLGASGAGSVSSIAQGLEWAGANGMHVANLSLGSPSPSATLEQAVNSATSRGVLVVAASGNSGAGSISYPARYANAMAVGATDQINNRASFSQYGAGLDIVAPGVNVQSTYPQSAYASLNGTSMATPHVAGAAALVKQKNPSWSNVQIRNRLKNTATSLGSTNLYGSGLVNAEAATR

SEQ ID NO: 61430 - protein, 269 aa, Unidentified
AQSVPWGISRVQAPAAHNRRLTGRGVKVAVLDTGISTHPDLDIRGGASFVPGEPSTQDGNGHGTHVAGTIAALDNSIGVLGVAPSAELYAVKVLGASGGGAISSIAQGLEWAGNNGMHVANLSLGSPSPSATLEQAVNSATSRGVLVVAASGNSGAGSISYPARYANAMAVGATDQNNNRASFSQYGAGLDIVAPGVNVQSTYPGSTYASLNGTSMATPHVAGAAVLVKQKNPSWSNVRIRNHLKNTATSLGSTNLYGSGLVRAEAATR

SEQ ID NO: 61431 - protein, 269 aa, Unidentified
AQSVPWGISRVQAPAAHNRGLAGGGVKVAVLDTGISTHPDLNIRGGASFVPGEPSTQDGNGHGTHVAGTIAALDNNIGVLGVAPSAELYAVKVLSASGNGAISSIAQGLEWAGNNGMHVANLSLGSPSPSATLEQAVNSATSRGVLVVAASGNSGAGSISYPARYANAMAVGATDQNNNRASFSQYGAGLDIVAPGVNVQSTYPGSTYASLNGTSMATPHVAGAAVLVKQKNPSWSNVRIRNHLKNTATSLGSTNLYGSGLVNAEAATR

SEQ ID NO: 61432 - protein, 269 aa, Unidentified
AQSVPWGISRVQAPAAHNRGLQGSGVKVAVLDTGISTHPDLNIRGGASFVPGEPSTQDGNGHGTHVAGTIAALNNSIGVLGVAPSAELYAVKVLGASGGGAISSIAQGLEWAGNNGMHVANLSLGSPSPSATLEQAVNSATSRGVLVVAASGNSGADSISYPARYANAMAVGATDQNNNRAEFSQYGAGLDIVAPGVNVQSTYPGSTYASLNGTSMATPHVAGAAVLVKQKNPSWSNVVIRDHLKNTATSLGSTNLYGSGLVNAFAATR

SEQ ID NO: 61433 - protein, 269 aa, Unidentified
AQSVPWGISRVQAPAAHNRRLTGSGVKVAVLDTGISTHPDLNIRGGASFVPGEPSTQDGNGHGTHVAGTIAALNNSIGVLGVAPSAELYAVKVLGASGGGAISSIAQGLEWAGANGMHVANLSLGNPSPSATLEQAVNSATSRGVLVVAASGNSGAGSISYPARYANAMAVGATDQNNNRASFSQYGAGLDIVAPGVNVQSTVPQSAYASLNGTSMATPHVAGAAVLVKQKNPSWSNVQIRNHLKNTATSLGSTNLYGSGLVNAEAATR

SEQ ID NO: 61434 - protein, 269 aa, Unidentified
AQSVPWGISRVQAPAAHNRGLAGSGVKVAVLDTGISTHPDLNIRGGASFVPGEPSTQDGNGHGTHVAGTIAALNNSIGVLGVAPSAELYAVKVLGASGGGAISSIAQGLEWAGNNGMHVANLSLGSPSPSATLEQAVNSATSRGVLVVAASGNSGADSISYPARYANAMAVGATDQNNNRAEFSQYGAGLDIVAPGVNVQSTYPGSTYASLNGTSMATPHVAGAAVLVKQKNPSWSNVVIRDHLKNTATSLGSTNLYGSGLVNATAATR

SEQ ID NO: 61435 - protein, 269 aa, Unidentified
AQSVPWGISRVQAPAAHRRGLTGSGVKVAVLDTGISTHPDLDITGGASFVPGEPSTQDGNGHGTHVAGTIAALDNSIGVLGVAPSAELYAVKVLGASGGGAISSIAQGLEWAGNNGMHVANLSLGSPSPSATLEQAVNSATSRGVLVVAASGNSGAGSISYPARYANAMAVGATDQNNNRASFSQYGAGLDIVAPGVNVQSTYPGSTYASLNGTSMATPHVAGAAVLVKQKNPSWSNVRIRNHLKNTATSLGSTNLYGSGLVRAEAATR

SEQ ID NO: 61436 - protein, 269 aa, Unidentified
AQSVPWGISRVQAPAAHNRGLRGSGVKVAVLDTGISTHPDLNIRGGASFVPGEPSTQDGNGHGTHVAGTIAALNNSIGVLGVAPSAELYAVKVLGASGQGAISSIAGGLEWAGLNGMHVANLSLGAPSPSATLEQAVNSATSRGVLVVAASGNSGAGSISYPARYANAMAVGATDQNNNRASFSQYGAGLDIVAPGVNVQSTYPGSTYASQNGTSMATPHVAGAAVLVKQKNPSWSNVRIRNHLKNTATSLGSTNLYGSGLVNAEAATR

SEQ ID NO: 61437 - protein, 269 aa, Unidentified
AQSVPWGISRVQAPAAHNRGLQGSGVKVAVLDTGISTHPDLNIRGGASFVPGEPSTQDGNGHGTHVAGTIAALNNSIGVLGVAPSAELYAVKVLGASGGGAISSIAQGLEWAGNNGMHVANLSLGSPSPSATLEQAVNSATSRGVLVVAASGNSGADSISYPARYANAMAVGATDQNNNRADFSQYGAGLDIVAPGVNVQSTYPGSTYASLNGTSMATPHVAGAATLVKQKNPSWSNVRIRHHLKNTATSLGSTNLYGSGLVNAHAATR

SEQ ID NO: 61438 - protein, 269 aa, Unidentified
AQSVPWGISRVQAPAAHNRGLAGRGVKVAVLDTGISTHPDLNIRGGASFVPGEPSTQDGNGHGTHVAGTIAALNNSIGVLGVAPSAELYAVKVLGASGGGAISSIAQGLEWAGNNGMHVANLSLGSPSPSATLEQAVNSATSRGVLVVAASGNSGEGSISYPARYANAMAVGATDQNNNRADFSQYGAGLDIVAPGVNVQSTYPGSTYASLNGTSMATPHVAGAAVLVKQKNPSWSNVRIRDHLKNTATSLGSTNLYGSGLVNAEAATR

SEQ ID NO: 61439 - protein, 269 aa, Unidentified
AQSVPWGISRVQAPAAHRRRLTGRGVKVAVLDTGISTHPDLNIRGGASFVPGEPSTQDGNGHGTHVAGTIAALDNSIGVLGVAPSAELYAVKVLGASGAGSVSSIAQGLEWAGANGMHVANLSLGSPSPSATLEQAVNSATSRGVLVVAASGNSGAGSISYPARYANAMAVGATDQDNNRASFSQYGAGLDIVAPGVNVQSTYPQSTYFSLNGTSMATPHVAGAAALVKQKNPSWSNVQIRNRLKNTATSLGSTNLYGSGLVNAEAATR

SEQ ID NO: 61440 - protein, 269 aa, Unidentified
AQSVPWGISRVQAPAAHNRGLQGSGVKVAVLDTGISTHPDLNIRGGASFVPGEPSTQDGNGHGTHVAGTIAALNNSIGVLGVAPSAELYAVKVLGASGGGAISSIAQGLEWAGNNGMHVANLSLGSPSPSATLEQAVNSATSRGVLVVAASGNSGADSISYPARYANAMAVGATDQNNNRADFSQYGAGLDIVAPGVNVQSTYPGSTYASLNGTSMATPHVAGAAVLVKQKNPSWSNVRIREHLKNTATSLGSTNLYGSGLVNAFAATR

SEQ ID NO: 61441 - protein, 269 aa, Unidentified
AQSVPWGISRVQAPAAHNRGLTGSGVKVAVLDTGISTHPDLNIRGGASFVPGEPSTQDGNGHGTHAAGTIAALNNSIGVLGVAPSAELYAVKVLGASGSGAISSIAQGLEWAGNNGMHVANLSLGSPSVSATLEQAVNSATSRGVLVVAASGNSGADSISYPARYANAMAVGATDQNNNRASFSQYGAGLDIVAPGVNVQSTYPGSTYASLNGTSMATPHVAGAAVLVKHKNPSWSNVRIRDHLKKTATSLGSTNLYGSGLVNAEAATR

SEQ ID NO: 61442 - protein, 269 aa, Unidentified
AQSVPWGISRVQAPAAHNRGLTGSGVKVAVLDTGISTHPDLNIRGGASFVPGEPSTQDGNGHGTHVAGTIAALDNNIGVLGVAPRAELYAVKVLGASGSGSVSSIAQGLEWAGNNRMHVANLSLGLQAPSATLEQAVNSATSRGVLVVAASGNSGAGSISYPARYANAMAVGATDQNNNRASFSQYGAGLDIVAPGVNVLSTYPGSTYASLNGTSMATPHVAGAAVLVKQKNPSWSNVRIRNHLKNTATSLGSTNLYGSGLVNAEAATR

SEQ ID NO: 61443 - protein, 269 aa, Unidentified
AQSVPWGISRVQAPAAHNRGLTGSGVKVAVLDTGISTHPDLNIRGGASFVPGEPSTQDGNGHGTHAAGTIAALNNSIGVLGVAPSAELYAVKVLGASGSGAISSIAQGLEWAGNNGMHVANLSLGSPSPSATLEQAVNSATSRGVLVVAASGNSGADSISYPARYANAMAVGATDQNNNRASFSQYGAGLDIVAPGVNVQSTYPGSTYASLNGTSMATPHVAGAAVLVKHKNPSWSNVRIRDHLKKTATSRGSTNLYGSGLVNAEAATR

SEQ ID NO: 61444 - protein, 269 aa, Unidentified
AQSVPWGISRVQAPAAHNRGLAGSGVKVAVLDTGISTHPDLNIRGGASFVPGEPSTQDGNGHGTHVAGTIAALNNSIGVLGVAPSAELYAVKVLGASGGGAISSIAQGLEWAGNNGMHVANLSLGSPSPSATLEQAVNSATSRGVLVVAASGNSGADSISYPARYANAMAVGATDQNNNRADFSQYGAGLDIVAPGVNVQSTYPGSTYASLNGTSMATPHVAGAALLVKQKNPSWSNVTIREHLKNTATSLGSTNLYGSGLVNALAATR

SEQ ID NO: 61445 - protein, 269 aa, Unidentified
AQSVPWGISRVQAPAAHNRGLQGSGVKVAVLDTGISTHPDLNIRGGASFVPGEPSTQDGNGHGTHVAGTIAALNNSIGVLGVAPSAELYAVKVLGASGGGAISSIAQGLEWAGNNGMHVANLSLGSPSPSATLEQAVNSATSRGVLVVAASGNSGADSISYPARYANAMAVGATDQNNNRADFSQYGAGLDIVAPGVNVQSTYPGSTYASLNGTSMATPHVAGAASLVKQKNPSWSNVVIREHLKNTATSLGSTNLYGSGLVNAHAATR

SEQ ID NO: 61446 - protein, 269 aa, Unidentified
AQTIPWGISRVQAPAAHNRGLTGSGVKVAVLDTGISTHPDLNIRGGASFVPGEPSTQDGNGHGTHVAGTIAALNNSIGVLGVAPSAELYAVKVLGADGEGAISSIAQGLEWAGNNGMHVANLSLGSPSPSATLEQAVNSATSRGVLVVAASGNSGASSISYPARYANAMAVGATDQNNNRASFSQYGAGLDIVAPGVNIQSTYPGSTYASLNGTSMATPHVAGAAALVKQKNPSWSNVQIRNHLKNTATSLGSTYLYGSGLVNAEASTR

SEQ ID NO: 61447 - protein, 269 aa, Unidentified
AQSVPWGISRVQAPAAHNRGLTGSGVKVAVLDTGISTHPDLNIRGGASFVPGEPSTQDGNGHGTHVAGTIAALNNSIGVLGVAPSAELYAVKVLGASGGGSIASIAQGLEWAGNNGMHVANLSLGSESPSATLEQAVNSATSRGVLVVAASGNSGEESISYPARYANAMAVGATDQNNNRASFSQYGAGLDIVAPGVNVQSTYPGSTYASLNGTSMATPHVAGAAVLVKQKNPSWSNVRIRDRLKNTATSLGSTNLYGSGLVNAEAATR

SEQ ID NO: 61448 - protein, 269 aa, Unidentified
AQSVPWGISRVQAPAAHNRGLAGFGVKVAVLDSGISTHPDLNIRGGASFVPGEPSTQDGNGHGTHVAGTIAALNNSIGVLGVAPSAELYAVKVLGASGGGAISSIAQGLEWAGLNGMHVANLSLGSPSPSATLEQAVNSATSRGVLVVAASGNSGAGSISYPARYANAMAVGATDQNNNRASFSQYGAGLDIVAPGVNVQSTVPQSTYASLNGTSMATPHVAGAAVLVKQKNPSWSNVQIRNHLKNTATSLGSTNLYGSGLVNAEAATR

SEQ ID NO: 61449 - protein, 269 aa, Unidentified
AQSVPWGISRVQAPAAHNRGLQGSGVKVAVLDTGISTHPDLNIRGGASFVPGEPSTQDGNGHGTHVAGTIAALNNSIGVLGVAPSAELYAVKVLGASGGGAISSIAQGLEWAGNNGMHVANLSLGSPSPSATLEQAVNSATSRGVLVVAASGNSGADSISYPARYANAMAVGATDQNNNRADFSQYGAGLDIVAPGVNVQSTYPGSTYASLNGTSMATPHVAGAALLVKQKNPSWSNVVIREHLKNTATSLGSTNLYGSGLVNAFAATR

SEQ ID NO: 61450 - protein, 269 aa, Unidentified
AQSVPWGISRVQAPAAHNRGLAGRGVKVAVLDTGISTHPDLNIRGGASFVPGEPSTQDGNGHGTHVAGTIAALNNSIGVLGVAPSAELYAVKVLGASGDGSISSIAQGLEWAGNNRMHVANLSLGSPSPSATLEQAVNSATSRGVLVVAASGNSGADSISYPARYANAMAVGATDQNNNRADFSQYGAGLDIVAPGVNVQSTYPGSTYASLNGTSMATPHVAGAAVLVKQKNPSWSNVQIRDHLKNTATSLGSTNLYGSGLVNAFAATR

SEQ ID NO: 61451 - protein, 269 aa, Unidentified
AQSVPWGISRVQAPAAHNRGLWGSGVKVAVLDTGISTHPDLNIRGGASFVPGEPSTQDGNGHGTHVAGTIAALDNNIGVLGVAPRAELYAVKVLGASGSGSVSSIAQGLEWAGNNRMHVANLSLGRQAPSATLEQAVNSATSRGVLVVAASGNSGAGSISYPARYANAMAVGATDQNNNRASFSQYGAGLDIVAPGVNVQSTYPGSTYVSLNGTSMATPHVAGAAALVKQKNPSWSNVQIRNHLKNTATSLGSTNLYGSGLVNADAATR

SEQ ID NO: 61452 - protein, 269 aa, Unidentified
AQSVPWGISRVQAPAAHNRGLAGSGVKVAVLDTGISTHPDLNIRGGASFVPGEPSTQDGNGHGTHVAGTIAALNNSIGVLGVAPSAELYAVKVLGASGGGAISSIAQGLEWAGNNGMHVANLSLGSPSPSATLEQAVNSATSRGVLVVAASGNSGADSISYPARYANAMAVGATDQNNNRADFSQYGAGLDIVAPGVNVQSTYPGSTYASLNGTSMATPHVAGAATLVKKKNPSWSNVTIREHLKNTATSLGSTNLYGSGLVNAEAATR

SEQ ID NO: 61453 - protein, 269 aa, Unidentified
AQSVPWGISRVQAPAAHNRGLAGSGVKVAVLDTGISTHPDLNIRGGASFVPGEPSTQDGNGHGTHVAGTIAALNNSIGVLGVAPSAGLYAVKVLAASGQGAISSIAQGLEWAGNNGMHVANLSLGSSSPSATLEQAVNSATSRGVLVVAASGNSGAGSISYPARYANAMAVGATDQNNNRASFSQYGAGLDIVAPGVNVQSTYPGSTYASQNGTSMATPHVAGAAVLVKQKNPSWSNVRIRNHLKNTATSLGSTNLYGSGLVNAEAATR

SEQ ID NO: 61454 - protein, 269 aa, Unidentified
AQSVPWGISRVQAPAAHRRGLTGRGVKVAVLDTGISTHPDLNIRGGASFVPGEPSTQDGNGHGTHVAGTIAALDNSIGVLGVAPSIELYAVKVLGASGAGSVSSIAQGLEWAGANGMHVANLSLGSPSPSATLEQAVNSATSRGVLVVAASGNSGAGSISYPARYANAMAVGATDQNNNRASFSQYGAGLDLVAPGVNVQSTYPQSTYFSLNGTSMATPHVAGAAALVKQKNPSWSNVQIRNRLKNTATSLGSTNLYGSGLVNAEAATR

SEQ ID NO: 61455 - protein, 269 aa, Unidentified
AQSVPWGISRVQAPAAHNRGLAGSGVKVAVLDTGISTHPDLNIRGGASFVPGEPSTQDGNGHGTHVAGTIAALNNSIGVLGVAPSAELYAVKVLGASGGGAISSIAQGLEWAGNNGMHVANLSLGSPSPSATLEQAVNSATSRGVLVVAASGNSGADSISYPARYANAMAVGATDQNNNRADFSQYGAGLDIVAPGVNVQSTYPGSTYASLNGTSMATPHVAGAAVLVKQKNPSWSNVVIRHHLKNTATSLGSTNLYGSGLVNALAATR

SEQ ID NO: 61456 - protein, 269 aa, Unidentified
AQSVPWGISRVQAPAAHNRGLAGSGVKVAVLDTGISTHPDLNIRGGASFVPGEPSTQDGNGHGTHVAGTIAALDNNIGVLGVAPSAELYAVKVLAASGNGAISSIAQGLEWAGNNGMHVANLSLGSPSPSATLEQAVNSATSRGVLVVAASGNSGAGSISYPARYANAMAVGATDQNNNRASFSQYGAGLDIVAPGVNVQSTYPGSTYASQNGTSMATPHVAGAAVLVKQKNPSWSNVRIRNHLKNTATSLGSTNLYGSGLVNAEAATR

SEQ ID NO: 61457 - protein, 269 aa, Unidentified
AQSVPWGISRVQAPAAHNRGLQGSGVKVAVLDTGISTHPDLNIRGGASFVPGEPSTQDGNGHGTHVAGTIAALNNSIGVLGVAPSAELYAVKVLGASGGGAISSIAQGLEWAGNNGMHVANLSLGSPSPSATLEQAVNSATSRGVLVVAASGNSGADSISYPARYANAMAVGATDQNNNRAEFSQYGAGLDIVAPGVNVQSTYPGSTYASLNGTSMATPHVAGAAVLVKQKNPSWSNVRIRHHLKNTATSLGSTNLYGSGLVNAFAATR

SEQ ID NO: 61458 - protein, 269 aa, Unidentified
AQSVPWGISRVQAPAAHNRGLQGSGVKVAVLDTGISTHPDLNIRGGASFVPGEPSTQDGNGHGTHVAGTIAALNNSIGVLGVAPSAELYAVKVLGASGGGAISSIAQGLEWAGNNGMHVANLSLGSPSPSATLEQAVNSATSRGVLVVAASGNSGADSISYPARYANAMAVGATDQNNNRADFSQYGAGLDIVAPGVNVQSTYPGSTYASLNGTSMATPHVAGAALLVKQKNPSWSNVTIREHLKNTATSLGSTNLYGSGLVNATAATR

SEQ ID NO: 61459 - protein, 269 aa, Unidentified
AQSVPWGISRVQAPAAHNRGLQGSGVKVAVLDTGISTHPDLNIRGGASFVPGEPSTQDGNGHGTHVAGTIAALNNSIGVLGVAPSAELYAVKVLGASGGGAISSIAQGLEWAGNNGMHVANLSLGSPSPSATLEQAVNSATSRGVLVVAASGNSGADSISYPARYANAMAVGATDQNNNRADFSQYGAGLDIVAPGVNVQSTYPGSTYASLNGTSMATPHVAGAATLVKQKNPSWSNVRIRDHLKNTATSLGSTNLYGSGLVNAFAATR

SEQ ID NO: 61460 - protein, 269 aa, Unidentified
AQSVPWGISRVQAPAAHNRGLAGGGVKVAVLDTGISTHPDLNIRGGASFVPGEPSTQDGNGHGTHVAGTIAALNNNIGVLGVAPSAELYAVKVLAASGGGAISSIAQGLEWAGNNGMHVANLSLGSPSPSATLEQAVNSATSRGVLVVAASGNSGAGSISYPARYANAMAVGATDQNNNRASFSQYGAGLDIVAPGVNVQSTYPGSTYASQNGTSMATPHVAGAAVLVKQKNPSWSNVRIRNHLKNTATSLGSTNLYGSGLVNAEAATR

SEQ ID NO: 61461 - protein, 269 aa, Unidentified
AQSVPWGISRVQAPAAHNRGLQGSGVKVAVLDTGISTHPDLNIRGGASFVPGEPSTQDGNGHGTHVAGTIAALNNSIGVLGVAPSSELYAVKVLGASGGGAISSIAQGLEWAGNNGMHVANLSLGSPSPSATLEQAVNSATSRGVLVVAASGNSGADSISYPARYANAMAVGATDQNNNRADFSQYGAGLDIVAPGVNVQSTYPGSTYASLNGTSMATPHVAGAATLVKQKNPSWSNVVIREHLKNTATSLGSTNLYGSGLVNAEAATR

SEQ ID NO: 61462 - protein, 269 aa, Unidentified
AQSVPWGISRVQAPASHNRGLAGFGVKVAVLDTGISTHPDLNIRGGASFVPGEPSTQDGNGHGTHVAGTIAALNNSIGVLGVAPSAELYAVKVLGASGGGAISSIAQGLEWAGLNGMHVANLSLGSPSPSATLEQAVNSATSRGVLVVAASGNSGAGSISYPARYANAMAVGATDQNNNRASFSQYGAGLDIVAPGVNVQSTVPGSAYASLNGTSMATPHVAGAAVLVKQKNPSWSNVQIRNHLKNTATSLGSTNLYGSGLVNAEAATR

SEQ ID NO: 61463 - protein, 269 aa, Unidentified
AQSVPWGISRVQAPAAHNRGLAGGGVKVAVLDTGISTHPDLNIRGGASFVPGEPSTQDGNGHGTHVAGTIAALNNSIGVLGVAPSAELYAVKVLSASGQGAISSIAQGLEWAGNNGMHVANLSLGAPSPSATLEQAVNSATSRGVLVVAASGNSGAGSISYPARYANAMAVGATDQNNNRASFSQYGAGLDIVAPGVNVQSTYPGSTYASQNGTSMATPHVAGAAVLVKQKNPSWSNVRIRNHLKNTATSLGSTNLYGSGLVNAEAATR

SEQ ID NO: 61464 - protein, 269 aa, Unidentified
AQSVPWGISRVQAPAAHNRGLAGSGVKVAVLDTGISTHPDLNIRGGASFVPGEPSTQDGNGHGTHVAGTIAALNNSIGVLGVAPSAELYAVKVLGASGGGAISSIAQGLEWAGNNGMHVANLSLGSPSPSATLEQAVNSATSRGVLVVAASGNSGADSISYPARYANAMAVGATDQNNNRADFSQYGAGLDIVAPGVNVQSTYPGSTYASLNGTSMATPHVAGAALLVKQKNPSWSNVVIREHLKNTATSLGSTNLYGSGLVNAHAATR

SEQ ID NO: 61465 - protein, 269 aa, Unidentified
AQSVPWGISRVQAPAAHNRGLAGSGVKVAVLDTGISTHPDLNIRGGASFVPGEPSTQDGNGHGTHVAGTIAALNNSIGVLGVAPSAELYAVKVLGASGGGAISSIAQGLEWAGNNGMHVANLSLGSPSPSATLEQAVNSATSRGVLVVAASGNSGADSISYPARYANAMAVGATDQNNNRAEFSQYGAGLDIVAPGVNVQSTYPGSTYASLNGTSMATPHVAGAAVLVKQKNPSWSNVRIRHHLKNTATSLGSTNLYGSGLVNAFAATR

SEQ ID NO: 61466 - protein, 269 aa, Unidentified
AQSVPWGISRVQAPAAHNRRLWGSGVKVAVLDTGISTHPDLNIRGGASFVPGEPSTQDGNGHGTHVAGTIAALNNSIGVLGVAPSAELYAVKVLGASGGGAISSIAQGLEWTGNNGMHVANLSLGSPSPSATLEQAVNSATSRGVLVVAASGNSGAGSISYPARYANAMAVGATDQNNNRASFSQYGAGLDIVAPGVNVQSTYPGSAYFSLNGTSMATPHVAGAAVLVKQKNPSWSNVRIRNHLKNTATSLGSTNLYGSGLVNAEAATR

SEQ ID NO: 61467 - protein, 269 aa, Unidentified
AQSVPWGISRVQAPAAHNRGLQGSGVKVAVLDTGISTHPDLNIRGGASFVPGEPSTQDGNGHGTHVAGTIAALNNSIGVLGVAPSAELYAVKVLGASGGGAISSIAQGLEWAGNNGMHVANLSLGSPSPSATLEQAVNSATSRGVLVVAASGNSGADSISYPARYANAMAVGATDQNNNRAEFSQYGAGLDIVAPGVNVQSTYPGSTYASLNGTSMATPHVAGAASLVKQKNPSWSNVRIREHLKNTATSLGSTNLYGSGLVNAFAATR

SEQ ID NO: 61468 - protein, 269 aa, Synthetic construct
AQSVPWGISRVQAPAAHNRGLTGSGVKVAVLDTGISTHPDLNIRGGASFVPGEPSTQDGNGHGTHVAGTIAALNNSIGVLGVAPSAELYAVKVLGASGSGSVSSIAQGLEWAGNNGMHVANLSLGSPSPSATLEQAVNSATSRGVLVVAASGNSGAGSISYPARYANAMAVGATDQNNNRASFSQYGAGLDIVAPNVNASSQHNPSTYASLQEESMATPHVAGAAALVKQKNPSWSNVQIRNHLKNTATSLGSTNLYGSGLVNAEAATR

SEQ ID NO: 61469 - protein, 269 aa, Unidentified
AQSVPWGISRVQAPAAHNRRLTGRGVKVAVLDTGISTHPDLNIRGGASFVPGEPSTQDGEGHGTHVAGTIAALNNGIGVLGVAPSAELYAVKVLGASGSGSVSSIAQGLEWAGNNDMHVANLSLGSPSPSATLEQAVNSATSRGVLVVAASGNSGADSISYPARYANAMAVGATDQNNNRADFSQYGAGLDIVAPGVNVQSTYPGSTYASLNGTSMATPHVAGAAALVKQKNPSWSNVRIRDRLKNTATSLGSTNLYGSGLVNAEAATR

SEQ ID NO: 61470 - protein, 269 aa, Unidentified
AQSVPWGISRVQAPAAHRRGLTGRGVKVAVLDTGISTHPDLNIRGGASFVPGEPSTQDGNGHGTHVAGTIAALDNSIGVLGVAPSAELYAVKVLGASGAGSVSSIAQGLEWAGNNGMHVANLSLGSPSPSATLEQAVNSATSRGVLVVAASGNSGAGSISYPARYANAMAVGATDQDNNRASFSQYGAGLDLVAPGVNVQSTYPQSAYFSLNGTSMATPHVAGAAALVKQKNPSWSNVQIRNRLKNTATSLGSTNLYGSGLVNAEAATR

SEQ ID NO: 61471 - protein, 269 aa, Unidentified
AQTIPWGISRVQAPAAHNRGLTGSGVKVAVLDTGISTHPDLNIRGGASFVPGEPSTQDGNGHGTHVAGTIAALDNSIGVLGVAPSAELYAVKVLGADGEGAISSIAQGLEWAGNNGMHVANLSLGSPSPSATLEQAVNSATSRGVLVVAASGNSGASSISYPARYANAMAVGATDQNNNRASFSQYGAGLDIVAPGVNIQSTWPGSTYASLNGTSMATPHVAGAAALVKQKNPSWSNVQIRNHLKNTATSLGSTNLYGSGLVNAEAATR

SEQ ID NO: 61472 - protein, 269 aa, Unidentified
AQSVPWGISRVQAPAAHNRGLAGGGVKVAVLDTGISTHPDLNIRGGASFVPGEPSTQDGNGHGTHVAGTIAALDNNIGVLGVAPSAELYAVKVLGASGGGAISSIAQGLEWAGNNGMHVANLSLGAPSPSATLEQAVNSATSRGVLVVAASGNSGAGSISYPARYANAMAVGATDQNNNRASFSQYGAGLDIVAPGVNVQSTYPGSTYASLNGTSMATPHVAGAAVLVKQKNPSWSNVRIRNHLKNTATSLGSTNLYGSGLVNAEAATR

SEQ ID NO: 61473 - protein, 269 aa, Unidentified
AQSVPWGISRVQAPAAHNRGLQGSGVKVAVLDTGISTHPDLNIRGGASFVPGEPSTQDGNGHGTHVAGTIAALNNSIGVLGVAPSAELYAVKVLGASGGGAISSIAQGLEWAGNNGMHVANLSLGSPSPSATLEQAVNSATSRGVLVVAASGNSGADSISYPARYANAMAVGATDQNNNRADFSQYGAGLDIVAPGVNVQSTYPGSTYASLNGTSMATPHVAGAASLVKQKNPSWSNVVIRDHLKNTATSLGSTNLYGSGLVNALAATR

SEQ ID NO: 61474 - protein, 269 aa, Unidentified
AQSVPWGISRVQAPAAHNRGLAGFGVKVAVLDSGISTHPDLNIRGGASFVPGEPSTQDGNGHGTHVAGTIAALNNSIGVLGVAPSAELYAVKVLGASGGGAISSIAQGLEWAGLNGMHVANLSLGSPSPSATLEQAVNSATSRGVLVVAASGNSGAGSISYPARYANAMAVGATDQNNNRASFSQYGAGLDIVAPGVNVQSTVPGSAYASLNGTSMATPHVAGAAVLVKQKNPSWSNVQIRNHLKNTATSLGSTNLYGSGLVNAEAATR

SEQ ID NO: 61475 - protein, 269 aa, Unidentified
AQSVPWGISRVQAPAAHRRGLTGSGVKVAVLDTGISTHPDLRITGGASFVPGEPSTQDGNGHGTHVAGTIAALDNSIGVLGVAPSAELYAVKVLGASGGGAISSIAQGLEWAGNNGMHVANLSLGSPSPSATLEQAVNSATSRGVLVVAASGNSGAGSISYPARYANAMAVGATDQNNNRASFSQYGAGLDIVAPGVNVQSTYPGSTYASLNGTSMATPHVAGAAVLVKQKNPSWSNVRIRNHLKNTATSLGSTNLYGSGLVRAEAATR

SEQ ID NO: 61476 - protein, 269 aa, Unidentified
AQSVPWGISRVQAPAAHNRGLTGSGVKVAVLDTGISTHPDLNIRGGASFVPGEPSTQDGNGHGTHAAGTIAALNNSIGVLGVAPSAELYAVKVLGASGSGAISSIAQGLEWAGNNGMHVANLSLGSPSPSATLEQAVNSATSRGVLVVAASGNSGADSISYPARYADAMAVGATDQNNNRASFSQYGAGLDIVAPGVNVQSTYPGSTYASLNGTSMATPHVAGAAVLVKHKNPSWSNVRIRDHLKKTATSLGSTNLYGSGLVNAEAATR

SEQ ID NO: 61477 - protein, 269 aa, Unidentified
AQSVPWGISRVQAPAAHNRGLTGSGVKVAVLDTGISTHPDLNIRGGASFVPGEPSTQDGNGHGTHVAGTIAALNNSIGVLGVAPSAELYAVKVLGASGGGAISSIAQGLEWAGNNGMHVANLSLGSPSVSATLEQAVNSATSRGVLVVAASGNSGADSISYPARYANAMAVGATDQNNNRASFSQYGAGLDIVAPGVNVQSTYPGSTYASLNGTSMATPHVAGAAVLVKHKNPSWSNVRIRDHLKKTATSLGSTNLYGSGLVNAEAATR

SEQ ID NO: 61478 - protein, 269 aa, Unidentified
AQSVPWGISRVQAPAAHNRGLAGGGVKVAVLDTGISTHPDLNIRGGASFVPGEPSTQDGNGHGTHVAGTIAALNNNIGVLGVAPSAELYAVKVLGASGNGAISSIAGGLEWAGNNGMHVANLSLGSPSPSATLEQAVNSATSRGVLVVAASGNSGAGSISYPARYANAMAVGATDQNNNRASFSQYGAGLDIVAPGVNVQSTYPGSTYASQNGTSMATPHVAGAAVLVKQKNPSWSNVRIRNHLKNTATSLGSTNLYGSGLVNAEAATR

SEQ ID NO: 61479 - protein, 269 aa, Unidentified
AQSVPWGISRVQAPAAHNRGLTGSGVKVAVLDTGISTHPDLRITGGASFVPGEPSTQDGNGHGTHVAGTIAALDNRIGVLGVAPSAELYAVKVLGASGGGAISSIAQGLEWAGNNGMHVANLSLGSPSPSATLEQAVNSATSRGVLVVAASGNSGAGSISYPARYANAMAVGATDQNNNRASFSQYGAGLDIVAPGVNVQSTYPGSTYASLNGTSMATPHVAGAAVLIKQKNPSWSNVRIRNHLKNTATSLGSTNLYGSGLVNAEAATR

SEQ ID NO: 61480 - protein, 269 aa, Unidentified
AQSVPWGISRVQAPAAHNRGLTGRGVKVAVLDTGISTHPDLNIRGGASFVPGEPSTQDGNGHGTHVAGTIAALNNSIGVLGVAPSAELYAVKVLGASGGGAISSIAQGLEWAGNNGMHVANLSLGSESPSATLEQAVNSATSRGVLVVAASGNSGEGSISYPARYANAMAVGATDQNNNRADFSQYGAGLDIVAPGVNVQSTYPGSTYASLNGTSMATPHVAGAAVLVKQKNPSWSNVRIRDHLKNTATSLGSTNLYGSGLVNAEAATR

SEQ ID NO: 61481 - protein, 269 aa, Unidentified
AQSVPWGISRVQAPAAHNRRLTGSGVKVAVLDTGISTHPDLNIRGGASFVPGEPSTQDGNGHGTHVAGTIAALNNSIGVLGVAPSAELYAVKVLGASGGGAISSIAQGLEWAGANGMHVANLSLGSPSPSATLEQAVNSATSRGVLVVAASGNSGAGSISYPARYANAMAVGATDQDNNRASFSQYGAGLDIVAPGVNVQSTYPQSAYASLNGTSMATPHVAGAAVLVKQKNPSWSNVRIRNHLKNTATSLGSTNLYGSGLVNAEAATR

SEQ ID NO: 61482 - protein, 269 aa, Unidentified
AQSVPWGISRVQAPAAHNRGLTGSGVKVAVLDTGISTHPDLNIRGGASFVPGEPSTQDGNGHGTHVAGTIAALNNSIGVLGVAPSAELYAVKVLGASGAGAISSIAQGLEWAGNNGMHVANLSLGSPSPSATLEQAVNSATSRGVLVVAASGNSGEGSISYPARYANAMAVGATDQNNNRADFSQYGAGLDIVAPGVNVQSTYPGSTYASENGTSMATPHVAGAAVLVKQKNPSWSNVRIRDRLKNTATSLGSTNLYGSGLVNAEAATR

SEQ ID NO: 61483 - protein, 269 aa, Unidentified
AQSVPWGISRVQAPAAHNRGLTGSGVKVAVLDTGISTHPDLNIRGGASFVPGEPSTQDGNGHGTHVAGTIAALNNSIGVLGVAPSAELYAVKVLGADGRGAISSIAQGLEWAGNNGMHVANLSLGSPSPTATLEQAVNYATSRGVLVVAASGNSGASSISYPARYANAMAVGATDQNNNRASFSQYGPGLDIMAPGVNIQSTYPGSTYASLNGTSMATPHVAGAAALVKQKNPSWSNVQIRNHLKNTATSLGSTNLYGSGLVNAEAATR

SEQ ID NO: 61484 - protein, 269 aa, Unidentified
AQSVPWGISRVQAPAAHNRGLQGSGVKVAVLDTGISTHPDLNIRGGASFVPGEPSTQDGNGHGTHVAGTIAALNNSIGVLGVAPSAELYAVKVLGASGGGAISSIAQGLEWAGNNGMHVANLSLGSPSPSATLEQAVNSATSRGVLVVAASGNSGADSISYPARYANAMAVGATDQNNNRADFSQYGAGLDIVAPGVNVQSTYPGSTYASLNGTSMATPHVAGAATLVKQKNPSWSNVTIRHHLKNTATSLGSTNLYGSGLVNALAATR

SEQ ID NO: 61485 - protein, 269 aa, Unidentified
AQSVPWGISRVQAPAAHNRGLQGSGVKVAVLDTGISTHPDLNIRGGASFVPGEPSTQDGNGHGTHVAGTIAALNNSIGVLGVAPSAELYAVKVLGASGGGAISSIAQGLEWAGNNGMHVANLSLGSPSPSATLEQAVNSATSRGVLVVAASGNSGADSISYPARYANAMAVGATDQNNNRADFSQYGAGLDIVAPGVNVQSTYPGSTYASLNGTSMATPHVAGAAVLVKQKNPSWSNVTIRHHLKNTATSLGSTNLYGSGLVNAFAATR

SEQ ID NO: 61486 - protein, 269 aa, Unidentified
AQSVPWGISRTQAPAAHNRRLWGSGVKVAVLDTGISTHPDLNIRGGASFVPGEPSTQDGNGHGTHVAGTIAALNNSIGVLGVAPSAELYAVKVLGASGGGAISSIAQGLEWAGNNGMHVANLSLGSPSPSATLEQAVNSATSRGVLVVAASGNSGAGSISYPARYANAMAVGATDQNNNRASFSQYGAGLDIVAPGVNVQSTYPGSAYFSLNGTSMATPHVAGAAVLVKQKNPSWSNVRIRNHLKNTATSLGSTNLYGSGLVNAEAATR

SEQ ID NO: 61487 - protein, 269 aa, Unidentified
AQSVPWGISRVQAPAAHNRGLAGSGVKVAVLDTGISTHPDLNIRGGASFVPGEPSTQDGNGHGTHVAGTIAALNNSIGVLGVAPSAELYAVKVLGASGGGAISSIAQGLEWAGNNGMHVANLSLGSPSPSATLEQAVNSATSRGVLVVAASGNSGADSISYPARYANAMAVGATDQNNNRADFSQYGAGLDIVAPGVNVQSTYPGSTYASLNGTSMATPHVAGAASLVKQKNPSWSNVVIREHLKNTATSLGSTNLYGSGLVNATAATR

SEQ ID NO: 61488 - protein, 269 aa, Unidentified
AQSVPWGISRVQAPAAHNRGLQGSGVKVAVLDTGISTHPDLNIRGGASFVPGEPSTQDGNGHGTHVAGTIAALNNSIGVLGVAPSAELYAVKVLGASGGGAISSIAQGLEWAGNNGMHVANLSLGSPSPSATLEQAVNSATSRGVLVVAASGNSGADSISYPARYANAMAVGATDQNNNRADFSQYGAGLDIVAPGVNVQSTYPGSTYASLNGTSMATPHVAGAASLVKQKNPSWSNVTIREHLKNTATSLGSTNLYGSGLVNAFAATR

SEQ ID NO: 61489 - protein, 269 aa, Unidentified
AQSVPWGISRVQAPAAHRRRLWGRGVKVAVLDTGISTHPDLNIRGGASFVPGEPSTQDGNGHGTHVAGTIAALDNSIGVLGVAPSAELYAVKVLGASGAGSVSSIAQGLEWAGNNGMHVANLSLGSPSPSATLEQAVNSATSRGVLVVAASGNSGAGSISYPARYANAMAVGATDQDNNRASFSQYGAGLDIVAPGVNVQSTYPQSTYFSLNGTSMATPHVAGAAALVKQKNPSWSNVQIRNRLKNTATSLGSTNLYGSGLVNAEAATR

SEQ ID NO: 61490 - protein, 269 aa, Unidentified
AQSVPWGISRVQAPAAHNRGLQGSGVKVAVLDTGISTHPDLNIRGGASFVPGEPSTQDGNGHGTHVAGTIAALNNSIGVLGVAPSAELYAVKVLGASGGGAISSIAQGLEWAGNNGMHVANLSLGSPSPSATLEQAVNSATSRGVLVVAASGNSGADSISYPARYANAMAVGATDQNNNRADFSQYGAGLDIVAPGVNVQSTYPGSTYASLNGTSMATPHVAGAALLVKQKNPSWSNVTIREHLKNTATSLGSTNLYGSGLVNAFAATR

SEQ ID NO: 61491 - protein, 269 aa, Unidentified
AQSVPWGISRVQAPAAHNRGLAGSGVKVAVLDTGISTHPDLNIRGGASFVPGEPSTQDGNGHGTHVAGTIAALNNSIGVLGVAPSAELYAVKVLGASGGGAISSIAQGLEWAGNNGMHVANLSLGSPSPSATLEQAVNSATSRGVLVVAASGNSGADSISYPARYANAMAVGATDQNNNRAEFSQYGAGLDIVAPGVNVQSTYPGSTYASLNGTSMATPHVAGAALLVKQKNPSWSNVTIREHLKNTATSLGSTNLYGSGLVNALAATR

SEQ ID NO: 61492 - protein, 269 aa, Unidentified
AQSVPWGISRVQAPAAHNRGLQGSGVKVAVLDTGISTHPDLNIRGGASFVPGEPSTQDGNGHGTHVAGTIAALNNSIGVLGVAPSAELYAVKVLGASGGGAISSIAQGLEWAGNNGMHVANLSLGSPSPSATLEQAVNSATSRGVLVVAASGNSGADSISYPARYANAMAVGATDQNNNRAEFSQYGAGLDIVAPGVNVQSTYPGSTYASLNGTSMATPHVAGAAVLVKQKNPSWSNVVIRDHLKNTATSLGSTNLYGSGLVNALAATR

SEQ ID NO: 61493 - protein, 269 aa, Unidentified
AQSVPWGISRVQAPAAHNRGLTGSGVKVAVLDTGISTHPDLNIRGGASFVPGEPSTQDGNGHGTHVAGTIAALNNSIGVLGVAPSAELYAVKVLGASGGGAISSIAQGLEWAGNNGMHVANLSLGSESPSATLEQAVNSATSRGVLVVAASGNSGEESISYPARYANAMAVGATDQNNNRASFSQYGAGLDIVAPGVNVQSTYPGSTYASLNGTSMATPHVAGAAVLVKQKRPSWSNVRIRDHLKNTATSLGSTNLYGSGLVNAEAATR

SEQ ID NO: 61494 - protein, 269 aa, Unidentified
AQSVPWGISRVQAPAAHNRGLAGGGVKVAVLDTGISTHPDLNIRGGASFVPGEPSTQDGNGHGTHVAGTIAALDNNIGVLGVAPSAELYAVKVLSASGNGAISSIAQGLEWAGNNGMHVANLSLGAPSPSATLEQAVNSATSRGVLVVAASGNSGAGSISYPARYANAMAVGATDQNNNRASFSQYGAGLDIVAPGVNVQSTYPGSTYASLNGTSMATPHVAGAAVLVKQKNPSWSNVQIRNHLKNTATSLGSTNLYGSGLVNAEAATR

SEQ ID NO: 61495 - protein, 269 aa, Unidentified
AQSVPWGISRVQAPAAHNRGLQGSGVKVAVLDTGISTHPDLNIRGGASFVPGEPSTQDGNGHGTHVAGTIAALNNSIGVLGVAPSAELYAVKVLGASGGGAISSIAQGLEWAGNNGMHVANLSLGSPSPSATLEQAVNSATSRGVLVVAASGNSGADSISYPARYANAMAVGATDQNNNRAEFSQYGAGLDIVAPGVNVQSTYPGSTYASLNGTSMATPHVAGAATLVKQKNPSWSNVRIREHLKNTATSLGSTNLYGSGLVNALAATR

SEQ ID NO: 61496 - protein, 269 aa, Unidentified
AQSVPWGISRVQAPAAHNRGLQGSGVKVAVLDTGISTHPDLNIRGGASFVPGEPSTQDGNGHGTHVAGTIAALNNSIGVLGVAPSAELYAVKVLGASGGGAISSIAQGLEWAGNNGMHVANLSLGSPSPSATLEQAVNSATSRGVLVVAASGNSGADSISYPARYANAMAVGATDQNNNRADFSQYGAGLDIVAPGVNVQSTYPGSTYASLNGTSMATPHVAGAATLVKQKNPSWSNVRIRDHLKNTATSLGSTNLYGSGLVNATAATR

SEQ ID NO: 61497 - protein, 269 aa, Lederbergia lenta
AQTIPWGISRVQAPAAHNRGLTGSGVKVAVLDTGISTHPDLNIRGGASFVPGEPSTQDGNGHGTHVAGTIAALNNSIGVLGVAPSAELYAVKVLGADGRGAISSIAQGLEWAGNNGMHVANLSLGSPSPSATLEQAVNSATSRGVLVVAASGNSGASSISYPARYANAMAVGATDQNNNRASFSQYGAGLDIMAPGVNIQSTYPGSTYASDNGTSMATPHVAGAAALVKQKNPSWSNVQIRNHLKNTATSLGSTNLYGSGLVNAEAATR

SEQ ID NO: 61498 - protein, 269 aa, Unidentified
AQSVPWGISRVQAPAAHNRGLQGSGVKVAVLDTGISTHPDLNIRGGASFVPGEPSTQDGNGHGTHVAGTIAALNNSIGVLGVAPSAELYAVKVLGASGGGAISSIAQGLEWAGNNGMHVANLSLGSPSPSATLEQAVNSATSRGVLVVAASGNSGADSISYPARYANAMAVGATDQNNNRADFSQYGAGLDIVAPGVNVQSTYPGSTYASLNGTSMATPHVAGAASLVKQKNPSWSNVVIRDHLKNTATSLGSTNLYGSGLVNAHAATR

SEQ ID NO: 61499 - protein, 269 aa, Unidentified
AQSVPWGISRVQAPAAHNRGLTGRGVKVAVLDTGISTHPDLNIRGGASFVPGEPSTQDGNGHGTHVAGTIAALNNSIGVLGVAPSAELYAVKVLGASGGGAISSIAQGLEWAGNNGMHVANLSLGSESPSATLEQAVNSATSRGVIVVAASGNSGAGSISYPARYANAMAVGATDQNNNRADFSQYGAGLDIVAPGVNVQSTYPGSTYASLNGTSMATPHVAGAAVLVKQKNPSWSNVRIRDHLKNTATSLGSTNLYGSGLVNAEAATR

SEQ ID NO: 61500 - protein, 269 aa, Unidentified
AQSVPWGISRVQAPAAHNRGLAGGGVKVAVLDTGISTHPDLNIRGGASFVPGEPSTQDGNGHGTHVAGTVAALNNNIGVLGVAPSAELYAVKVLSASGNGAISSIAQGLEWAGNNGMHVANLSLGAPSPSATLEQAVNSATSRGVLVVAASGNSGAGSISYPARYANAMAVGATDQNNNRASFSQYGAGLDIVAPGVNVQSTYPGSTYASLNGTSMATPHVAGAAVLVKQKNPSWSNVQIRNHLKNTATSLGSTNLYGSGLVNAEAATR

SEQ ID NO: 61501 - protein, 269 aa, Unidentified
AQSVPWGISRVQAPAAHNRGLTGSGVKVAVLDTGISTHPDLNIRGGASFVPGEPSTQDGNGHGTHVAGTIAALNNSIGVLGVAPSAELYAVKVLGASGGGAISSIAQGLEWAGNNGMHVANLSLGNESPSATLEQAVNSATSRGVLVVAASGNSGAGSISYPARYANAMAVGATDQNNNRADFSQYGAGLDIVAPGVNVQSTYPGSTYASLNGTSMATPHVAGAAVLVKQKNPSWSNVRIRDRLKNTATSLGSTNLYGSGLVNAEAATR

SEQ ID NO: 61502 - protein, 269 aa, Unidentified
AQSVPWGISRVQAPAAHNRGLTGSGVKVAVLDTGISTHEDLNIRGGASFVPGEPSTQDGNGHGTHVAGTIAALDNSIGVLGVAPSAELYAVKVLGADGEGAISSIAQGLEWAGNNGMHVANLSLGSPSPSATLEQAVNSATSRGVLVVAASGNSGASSIGYPARYANAMAVGATDQNNNRASFSRYGAGLDIVAPGVNVQSTYPGSTYASLNGTSMATPHVAGAAALVKQKNPSWSNVQIRNHLKNTATSLGDTNLYGSGLVNAEAATR

SEQ ID NO: 61503 - protein, 269 aa, Unidentified
AQSVPWGISRVQAPAAHNRGLQGSGVKVAVLDTGISTHPDLNIRGGASFVPGEPSTQDGNGHGTHVAGTIAALNNSIGVLGVAPSAELYAVKVLGASGGGAISSIAQGLEWAGNNGMHVANLSLGSPSPSATLEQAVNSATSRGVLVVAASGNSGADSISYPARYANAMAVGATDQNNNRADFSQYGAGLDIVAPGVNVQSTYPGSTYASLNGTSMATPHVAGAAVLVKQKNPSWSNVRIRDHLKNTATSLGSTNLYGSGLVNAHAATR

SEQ ID NO: 61504 - protein, 269 aa, Unidentified
AQSVPWGISRVQAPAAHNRRLTGRGVKVAVLDTGISTHPDLNIRGGASFVPGEPSTQDGNGHGTHVAGTIAALDNRIGVLGVAPSAELYAVKVLGASGGGAISSIAQGLEWAGNNGMHVANLSLGSPSPSATLEQAVNSATSRGVLVVAASGNSGAGSISYPARYANAMAVGATDQNNNRASFSQYGAGLDIVAPGVNVQSTYPGSTYASLNGTSMATPHVAGAAVLVKQKNPSWSNVRIRNRLKNTATSLGSTNLYGSGLVNAEAATR

SEQ ID NO: 61505 - protein, 269 aa, Unidentified
AQTIPWGISRVQAPAAHNRGLTGSGVKVAVLDTGISTHPDLNIRGGASFVPGEPSTQDGNGHGTHVAGTIAALNNSIGVLGVAPSAELYAVKVLGADGAGAISSIAQGLEWAGNNGMHVANLSLGSPSPSATLEQAVNSATSRGVLVVAASGNSGASSISYPARYANAMAVGATDQNNNRASFSQYGPGLDIMAPGVNIQSTYPGSTYASLNGTSMATPHVAGAAALVKQKNPSWSNVQIRNHLKNTATSLGSTNLYGSGLVNAEAATR

SEQ ID NO: 61506 - protein, 269 aa, Unidentified
AQSVPWGISRVQAPAAHRRRLWGRGVKVAVLDTGISTHPDLNIRGGASFVPGEPSTQDGNGHGTHVAGTIAALDNSIGVLGVAPSAELYAVKVLGASGAGSVSSIAQGLEWAGANGMHVANLSLGSPSPSATLEQAVNSATSRGVLVVAASGNSGAGSISYPARYANAMAVGATDQNNNRASFSQYGAGLDLVAPGVNVQSTYPGSAYASLNGTSMATPHVAGAAALVKQKNPSWSNVQIRNRLKNTATSLGSTNLYGSGLVNAEAATR

SEQ ID NO: 61507 - protein, 269 aa, Unidentified
AQSVPWGISRVQAPATHRRGLTGRGVKVAVLDTGISTHPDLNIRGGASFVPGEPSTQDGNGHGTHVAGTIAALDNNIGVLGVAPSAELYAVKVLGASGSGSVSSIAQGLEWAGNNRMHVANLSLGLQAPSATLEQAVNSATSRGVLVVAASGNSGAGSISYPARYANAMAVGATDQNNNRASFSQYGAGLDIVAPGVNVLSTYPGSTYASLNGTSMATPHVAGAAALVKQKNPSWSNVQIRNHLKNTATSLGSTNLYGSGLVNAEAATR

SEQ ID NO: 61508 - protein, 269 aa, Unidentified
AQSVPWGISRVQAPAAHNRGLTGSGVKVAVLDTGISTHPDLNIRGGASFVPGEPSTQDGNGHGTHAAGTIAALNNSIGVLGVAPSAELYAVKVLGASGSGAISSIAQGLEWAGNNGMHVANLSLGSPSPSATLEQAVNSATSRGVLVVAASGNSGADSISYPARYANAMAVGATDQNNNRASFSQYGAGLDIVAPGVNVRSTYPGSTYASLNGTSMATPHVAGAAVLVKHKNPSWSNVRIRDHLKKTATSLGSTNLYGSGLVNAEAATR

SEQ ID NO: 61509 - protein, 269 aa, Unidentified
AQSVPWGISRVQAPAAHNRGLTGSGVKVAVLDSGISTHPDLNIRGGASFVPGEPSTQDGNGHGTHVAGTIAALNNSIGVLGVAPSAELYAVKVLGASGGGAISSIAQGLEWAGLNGMHVANLSLGNPSPSATLEQAVNSATSRGVLVVAASGNSGAGSISYPARYANAMAVGATDQNNNRASFSQYGAGLDIVAPGVNVQSTAPQSAYASLNGTSMATPHVAGAAVLVKQKNPSWSNVQIRNHLKNTATSLGSTNLYGSGLVNAEAATR

SEQ ID NO: 61510 - protein, 269 aa, Unidentified
AQSVPWGISRVQAPAAHNRRLTGRGVKVAVLDTGISTHPDLDIRGGASFVPGEPSTQDGNGHGTHVAGTIAALNNRIGVLGVAPSAELYAVKVLGASGGGAISSIAQGLEWAGNNGMHVANLSLGSPSPSATLEQAVNSATSRGVLVVAASGNSGAGSISYPARYANAMAVGATDQNNNRASFSQYGAGLDIVAPGVNVQSTYPGSTYASLNGTSMATPHVAGAAVLVKQKNPSWSNVRIRNRLKNTATSLGSTNLYGSGLVNAEAATR

SEQ ID NO: 61511 - protein, 269 aa, Unidentified
AQSVPWGISRVQAPAAHNRGLTGSGVKVAVLDTGISTHPDLNIRGGASFVPGEPSTQDGNGHGTHVAGTIAALNNSIGVLGVAPSAELYAVKVLGASGGGAISSIAQGLEWAGNNGMHVANLSLGSESPSATLEQAVNSATSRGVLVVAASGNSGEESISYPARYANAMAVGATDQNNNRASFSQYGAGLDIVAPGVNVQSTYPGSTYASLNGTSMATPHVAGAAVLVKQKNPSWSNVRIRDRLKNTATSLGSTNLYGSGLVNAEAATR

SEQ ID NO: 61512 - protein, 269 aa, Unidentified
AQSVPWGISRVQAPAAHNRRLTGSGVKVAVLDTGISTHPDLNIRGGASFVPGEPSTQDGNGHGTHVAGTIAALNNSIGVLGVAPSAELYAVKVLGASGGGAISSIAQGLEWAGANGMHVANLSLGSPSPSATLEQAVNSATSRGVLVVAASGNSGAGSISYPARYANAMAVGATDQDNNRASFSQYGAGLDIVAPGVNVQSTYPQSTYFSLNGTSMATPHVAGAAVLVKQKNPSWSNVRIRNHLKNTATSLGSTNLYGSGLVNAEAATR

SEQ ID NO: 61513 - protein, 269 aa, Unidentified
AQSVPWGISRVQAPAAHNRGLAGSGVKVAVLDTGISTHPDLNIRGGASFVPGEPSTQDGNGHGTHVAGTIAALNNSIGVLGVAPSAELYAVKVLGASGQGAISSIAQGLEWAGNNGMHVANLSLGSPSPSATLEQAVNSATSRGVLVVAASGNSGADSISYPARYANAMAVGATDQNNNRADFSQYGAGLDIVAPGVNVQSTYPGSTYASLNGTSMATPHVAGAAVLVKQKNPSWSNVRIRDHLKNTATSLGSTNLYGSGLVNAFAATR

SEQ ID NO: 61514 - protein, 269 aa, Unidentified
AQSVPWGISRVQAPAAHRRRLTGSGVKVAVLDTGISTHPDLNITGGASFVPGEPSTQDGNGHGTHVAGTIAALDNRIGVLGVAPSAELYAVKVLGASGGGAISSIAQGLEWAGNNGMHVANLSLGSPSPSATLEQAVNSATSRGVLVVAASGNSGAGSISYPARYANAMAVGATDQNNNRASFSQYGAGLDIVAPGVNVQSTYPGSTYASLNGTSMATPHVAGAAVLVKQKNPSWSNVRIRNHLKNTATSLGSTNLYGSGLVNAEAATR

SEQ ID NO: 61515 - protein, 269 aa, Unidentified
AQSVPWGISRVQAPAAHNRGLAGGGVKVAVLDTGISTHPDLNIRGGASFVPGEPSTQDGNGHGTHVAGTIAALNNNIGVLGVAPSAELYAVKVLSASGNGAISSIAQGLEWAGNNGMHVANLSLGAPSPSATLEQAVNSATSRGVLVVAASGNSGAGSISYPARYANAMAVGATDQNNNRASFSQYGAGLDIVAPGVNVQSTYPGSTYASLNGTSMATPHVAGAAVLVKQKNPSWSNVRIRNHLKNTATSLGSTNLYGSGLVNAEAATR

SEQ ID NO: 61516 - protein, 269 aa, Unidentified
AQSVPWGISRVQAPAAHNRGLAGSGVKVAVLDTGISTHPDLNIRGGASFVPGEPSTQDGNGHGTHVAGTIAALDNNIGVLGVAPSAELYAVKVLAASGNGAISSIAQGLEWAGNNGMHVANLSLGAPSPSATLEQAVNSATSRGVLVVAASGNSGAGSISYPARYANAMAVGATDQNNNRASFSQYGAGLDIVAPGVNVQSTYPGSTYASLNGTSMATPHVAGAAVLVKQKNPSWSNVRIRNHLKNTATSLGSTNLYGSGLVNAEAATR

SEQ ID NO: 61517 - protein, 269 aa, Unidentified
AQSVPWGISRVQAPAAHRRRLTGRGVKVAVLDTGISTHPDLNIRGGASFVPGEPSTQDGNGHGTHVAGTIAALDNSIGVLGVAPSAELYAVKVLGASGAGSVSSIAQGLEWAGANGMHVANLSLGSPSPSATLEQAVNSATSRGVLVVAASGNSGAGSISYPARYANAMAVGATDQNNNDASFSQYGAGLDLVAPGVNVQSTYPGSAYASLNGTSMATPHVAGAAALVKQKNPSWSNVQIRNRLKNTATSLGSTNLYGSGLVNAEAATR

SEQ ID NO: 61518 - protein, 269 aa, Unidentified
AQSVPWGISRVQAPAAHNRGLAGSGVKVAVLDTGISTHPDLNIRGGASFVPGEPSTQDGNGHGTHVAGTIAALDNNIGVLGVAPSAELYAVKVLGASGGGAISSIAQGLEWAGNNGMHVANLSLGAPSPSATLEQAVNSATSRGVLVVAASGNSGAGSISYPARYANAMAVGATDQNNNRASFSQYGAGLDIVAPGVNVQSTYPGSTYASQNGTSMATPHVAGAAVLVKQKNPSWSNVRIRNHLKNTATSLGSTNLYGSGLVNAEAATR

SEQ ID NO: 61519 - protein, 269 aa, Unidentified
AQSVPWGISRVQAPAAHNRGLAGSGVKVAVLDTGISTHPDLNIRGGASFVPGEPSTQDGNGHGTHVAGTIAALNNSIGVLGVAPSAELYAVKVLGASGGGAISSIAQGLEWAGNNGMHVANLSLGSPSPSATLEQAVNSATSRGVLVVAASGNSGADSISYPARYANAMAVGATDQNNNRADFSQYGAGLDIVAPGVNVQSTYPGSTYASLNGTSMATPHVAGAASLVKQKNPSWSNVRIREHLKNTATSLGSTNLYGSGLVNAHAATR

SEQ ID NO: 61520 - protein, 269 aa, Unidentified
AQSVPWGISRVQAPAAHNRGLTGSGVKVAVLDTGISTHPDLNIRGGASFVPGEPSTQDGNGHGTHVAGTIAALNNSIGVLGVAPSAELYAVKVLGASGGGSIASIAQGLEWAGNNGMHVANLSLGSESPSATLEQAVNSATSRGVLVVAASGNSGEGSISYPARYANAMAVGATDQNNNRADFSQYGAGLDIVAPGVNVQSTYPGSTYASLNGTSMATPHVAGAAVLVKQKRPSWSNVRIRDHLKNTATSLGSTNLYGSGLVNAEAATR

SEQ ID NO: 61521 - protein, 269 aa, Unidentified
AQSVPWGISRVQAPAAHNRGLAGRGVKVAVLDTGISTHPDLNIRGGASFVPGEPSTQDGNGHGTHVAGTIAALNNSIGVLGVAPSAELYAVKVLGASGSGAISSIAQGLEWAGNNGMHVANLSLGSESPSATLEQAVNSATSRGVLVVAASGNSGADSISYPARYANAMAVGATDQNNNRADFSQYGAGLDIVAPGVNVQSTYPGSTYASLNGTSMATPHVAGAAVLVKQKNPSWSNVQIRDHLKNTATSLGSTNLYGSGLVNAFAATR

SEQ ID NO: 61522 - protein, 269 aa, Unidentified
AQSVPWGISRVQAPAAHNRGLAGSGVKVAVLDTGISTHPDLNIRGGASFVPGEPSTQDGNGHGTHVAGTIAALNNSIGVLGVAPSAELYAVKVLGASGGGAISSIAQGLEWAGNNGMHVANLSLGSPSPSATLEQAVNSATSRGVLVVAASGNSGADSISYPARYANAMAVGATDQNNNRAEFSQYGAGLDIVAPGVNVQSTYPGSTYASLNGTSMATPHVAGAALLVKQKNPSWSNVTIREHLKNTATSLGSTNLYGSGLVNAHAATR

SEQ ID NO: 61523 - protein, 269 aa, Unidentified
AQSVPWGISRVQAPAAHNRGLTGSGVKVAVLDTGISTHPDLNIRGGASFVPGEPSTQDGNGHGTHAAGTIAALNNSIGVLGVAPSAELYAVKVLGASGSGAISSIAQGLEWAGNNGMHVANLSLGSPSPSATLEQAVNSATSRGVLVVAASGNSGADSISYPARYANAMAVGATDQNNNRASFSQYGAGLDIVAPGVNVQSTYPGSTYASLNGTSMATPHVVGAAVLVKHKNPSWSNVRIRDHLKKTATSLGSTNLYGSGLVNAEAATR

SEQ ID NO: 61524 - protein, 269 aa, Unidentified
AQSVPWGISRVQAPAAHNRGLQGSGVKVAVLDTGISTHPDLNIRGGASFVPGEPSTQDGNGHGTHVAGTIAALNNSIGVLGVAPSAELYAVKVLGASGGGAISSIAQGLEWAGNNGMHVANLSLGSPSPSATLEQAVNSATSRGVLVVAASGNSGADSISYPARYANAMAVGATDQNNNRADFSQYGAGLDIVAPGVNVQSTYPGSTYASLNGTSMATPHVAGAATLVKQKNPSWSNVRIRHHLKNTATSLGSTNLYGSGLVNATAATR

SEQ ID NO: 61525 - protein, 269 aa, Unidentified
AQSVPWGISRVQAPAAHRRGLTGSGVKVAVLDTGISTHPDLRITGGASFVPGEPSTQDGNGHGTHVAGTIAALTNSIGVLGVAPSAELYAVKVLGASGGGAISSIAQGLEWAGNNGMHVANLSLGSPSPSATLEQAVNSATSRGVLVVAASGNSGAGSISYPARYANAMAVGATDQNNNRASFSQYGAGLDIVAPGVNVQSTYPGSTYASLNGTSMATPHVAGAAVLVKQKNPSWSNVRIRNHLKNTATSLGSTNLYGSGLVNAEATTR

SEQ ID NO: 61526 - protein, 269 aa, Unidentified
AQSVPWGISRVQAPAAHNRGLRGSGVKVAVLDTGISTHPDLNIRGGASFVPGEPSTQDGNGHGTHVAGTIAALNNNIGVLGVAPSAELYAVKVLSASGGGAISSIAGGLEWAGNNGMHVANLSLGAPSPSATLEQAVNSATSRGVLVVAASGNSGAGSISYPARYANAMAVGATDQNNNRASFSQYGAGLDIVAPGVNVQSTYPGSTYASLNGTSMATPHVAGAAVLVKQKNPSWSNVRIRNHLKNTATSLGSTNLYGSGLVNAEAATR

SEQ ID NO: 61527 - protein, 269 aa, Unidentified
AQSVPWGISRVQAPAAHNRRLTGRGVKVAVLDTGISTHPDLNIRGGASFVPGEPSTQDGEGHGTHVAGTIAALNNGIGVLGVAPSAELYAVKVLGASGSGSVSSIAQGLEWAGNNSMHVANLSLGSESPSATLEQAVNSATSRGVLVVAASGNSGTDSISYPARYANAMAVGATDQNNNRASFSQYGAGLDIVAPGVNVQSTYPGSTYASLNGTSMATPHVAGAAALVKQKNPSWSNVRIRDHLKNTATSLGSTNLYGSGLVNAEAATR

SEQ ID NO: 61528 - protein, 269 aa, Unidentified
AQSVPWGISRVQAPAAHNRGLAGFGVKVAVLDTGISTHPDLNIRGGASFVPGEPSTQDGNGHGTHVAGTIAALNNSIGVLGVAPSAELYAVKVLGASGGGAISSIAQGLEWAGLNGMHVANLSLGSPSPSATLEQAVNSATSRGVLVVAASGNSGAGSISYPARYANAMAVGATDQNNNRASFSQYGAGLDIVAPGVNVQSTAPQSAYASLNGTSMATPHVAGAAVLVKQKNPSWSNVQIRNHLKNTATSLGSTNLYGSGLVNAEAATR

SEQ ID NO: 61529 - protein, 269 aa, Unidentified
AQSVPWGISRVQAPAAHNRGLAGSGVKVAVLDTGISTHPDLNIRGGASFVPGEPSTQDGNGHGTHVAGTIAALNNSIGVLGVAPSAELYAVKVLGASGGGAISSIAQGLEWAGNNGMHVANLSLGSESPSATLEQAVNSATSRGVLVVAASGNSGAGSISYPARYANAMAVGATDQNNNRASFSQYGAGLDIVAPGVNVQSTYPGSTYASLNGTSMATPHVAGAAVLVKQKYPSWSNIRIRNHLKNTATSLGSTNLYGSGLVNVEAATR

SEQ ID NO: 61530 - protein, 269 aa, Unidentified
AQSVPWGISRVQAPAAHNRGLQGSGVKVAVLDTGISTHPDLNIRGGASFVPGEPSTQDGNGHGTHVAGTIAALNNSIGVLGVAPSAELYAVKVLGASGGGAISSIAQGLEWAGNNGMHVANLSLGSPSPSATLEQAVNSATSRGVLVVAASGNSGADSISYPARYANAMAVGATDQNNNRADFSQYGAGLDIVAPGVNVQSTYPGSTYASLNGTSMATPHVAGAALLVKQKNPSWSNVVIRDHLKNTATSLGSTNLYGSGLVNATAATR

SEQ ID NO: 61531 - protein, 269 aa, Unidentified
AQSVPWGIERVQAPAAHNRGLTGSGVKVAVLDTGISTHPDLNIRGGASFVPGEPSTQDENGHGTHVAGTIAALDNSIGVLGVAPSAELYAVKVLGASGSGSVSSIAQGLEWAGNNGMHVANLSLGSPSPSATLEHAVNHATSHGVLVVAASGNSGAGSISYPARYANAMAVGATDQNNNRASFSQYGAGLDIVAPGVDVLSTWPGSTYASLNGTSMATPHVAGAAALVKQKNPSWSNVQIRNHLKNTATSLGSTNEYGSGLVNAEAATR

SEQ ID NO: 61532 - protein, 269 aa, Unidentified
AQSVPWGISRVQAPAAHNRGLAGRGVKVAVLDTGISTHPDLNIRGGASFVPGEPSTQDGNGHGTHVAGTIAALDNSIGVLGVAPSAELYAVKVLGASGGGAISSVAQGLEWAGNNGMHVANLSLGSESPSATLEQAVNSATSRGVLVVAASGNSGAGSISYPARYANAMAVGATDQNNNRASFSQYGAGLDIVAPGVNVQSTYPGSTYASLNGTSMATPHVAGAAVLVKQKNPSWSNVRIRNHLKNTATSLGSTNLYGSGLVNAEAATR

SEQ ID NO: 61533 - protein, 269 aa, Unidentified
AQSVPWGISRVQAPAAHNRGLAGSGVKVAVLDTGISTHPDLNIRGGASFVPGEPSTQDGNGHGTHVAGTIAALNNSIGVLGVAPSAELYAVKVLGASGGGAISSIAQGLEWAGLNGMHVANLSLGSPSPSATLEQAVNSATSRGVLVVAASGNSGAGSISYPARYANAMAVGATDQNNNRADFSQYGAGLDIVAPGVNVQSTYPGSTYASLNGTSMATPHVAGAAVLVKQKNPSWSNVRIRDHLKNTATSLGSTNLYGSGLVNAFAATR

SEQ ID NO: 61534 - protein, 269 aa, Unidentified
AQSVPWGISRVQAPAAHNRGLTGFGVKVAVLDTGISTHPDLNIRGGASFVPGEPSTQDGNGHGTHVAGTIAALNNSIGVLGVAPSAELYAVKVLGASGGGAISSIAQGLEWAGLNGMHVANLSLGNPSPSATLEQAVNSATSRGVLVVAASGNSGAGSISYPARYANAMAVGATDQNNNRASFSQYGAGLDIVAPGVNVQSTVPQSAYASLNGTSMATPHVAGAAVLVKQKNPSWSNVQIRNHLKNTATSLGSTNLYGSGLVNAEAATR

SEQ ID NO: 61535 - protein, 269 aa, Unidentified
AQSVPWGISRVQAPAAHNRGLTGSGVKVAVLDTGISTHPDLNIRGGASFVPGEPSTQDGNGHGTHAAGTIAALNNSIGVLGVAPSAELYAVKVLGASGSGAISSIAQGLEWAGNNGMHVANLSLGSPSPSATLEQAVNSATSRGVLVVAASGNSGADSISYPARYANAMAVGATDQNNNRASFSQYGAGLDIVAPGVNVQSTYPGSTYAVLNGTSMATPHVAGAAVLVKHKNPSWSNVRIRDHLKKTATSLGSTNLYGSGLVNAEAATR

SEQ ID NO: 61536 - protein, 269 aa, Unidentified
AQSVPWGISRVQAPAAHNRRLTGRGVKVAVLDTGISTHPDLNIRGGASFVPGEPSTQDGEGHGTHVAGTIAALNNGIGVLGVAPSAELYAVKVLGASGSGSVSSIAQGLEWAGNNSMHVANLSLGSESPSATLEQAVNSATSRGVLVVAASGNSGADSISYPARYANAMAVGATDQNNNRASFSQYGAGLDIVAPGVNVQSTYPGSTYASLNGTSMATPHVAGAAALVKQKNPSWSNVRIRDRLKNTATSLGSTNLYGSGLVNAEAATR

SEQ ID NO: 61537 - protein, 269 aa, Unidentified
AQSVPWGISRVQAPAAHNRGLAGSGVKVAVLDTGISTHPDLNIRGGASFVPGEPSTQDGNGHGTHVAGTIAALNNSIGVLGVAPSAELYAVKVLGASGGGAISSIAQGLEWAGNNGMHVANLSLGSPSPSATLEQAVNSATSRGVLVVAASGNSGADSISYPARYANAMAVGATDQNNNRADFSQYGAGLDIVAPGVNVQSTYPGSTYASLNGTSMATPHVAGAALLVKQKNPSWSNVVIREHLKNTATSLGSTNLYGSGLVNAFAATR

SEQ ID NO: 61538 - protein, 269 aa, Unidentified
AQSVPWGISRVQAPAAHNRRLWGSGVKVAVLDTGISTHPDLNIRGGASFVPGEPSTQDGNGHGTHVAGTIAALNNSIGVLGVAPSAELYAVKVLGASGGGAISSIAQGLEWAGNNGMHVANLSLGSPSPSATLEQAVNSATSRGVLVVAASGNSGAGSISYPARYANAMAVGATDQNNNRASFSQYGAGLDIVAPGVNVQSTYPQSAYFSLNGTSMATPHVAGAAVLVKQKNPSWSNVRIRNHLKNTATSLGSTNLYGSGLVNAEAATR

SEQ ID NO: 61539 - protein, 269 aa, Unidentified
AQSVPWGISRVQAPAAHNRRLTGSGVKVAVLDTGISTHPDLNIRGGASFVPGEPSTQDGNGHGTHVAGTIAALNNRIGVLGVAPSAELYAVKVLGASGGGAISSIAQGLEWAGANGMHVANLSLGSPSPSATLEQAVNSATSRGVLVVAASGNSGAGSISYPARYANAMAVGATDQDNNRASFSQYGAGLDIVAPGVNVQSTYPGSAYASLNGTSMATPHVAGAAVLVKQKNPSWSNVRIRNHLKNTATSLGSTNLYGSGLVNAEAATR

SEQ ID NO: 61540 - protein, 269 aa, Unidentified
AQSVPWGISRVQAPAAHNRGLQGSGVKVAVLDTGISTHPDLNIRGGASFVPGEPSTQDGNGHGTHVAGTIAALNNSIGVLGVAPSAELYAVKVLGASGGGAISSIAQGLEWAGNNGMHVANLSLGSPSPSATLEQAVNSATSRGVLVVAASGNSGADSISYPARYANAMAVGATDQNNNRAEFSQYGAGLDIVAPGVNVQSTYPGSTYASLNGTSMATPHVAGAATLVKQKNPSWSNVTIRHHLKNTATSLGSTNLYGSGLVNATAATR

SEQ ID NO: 61541 - protein, 269 aa, Unidentified
AQSVPWGISRVQAPAAHNRGLAGSGVKVAVLDTGISTHPDLNIRGGASFVPGEPSTQDGNGHGTHVAGTIAALNNSIGVLGVAPSAELYAVKVLGASGGGAVSSIAQGLEWAGLNGMHVANLSLGSPSPSATLEQAVNSATSRGVLVVAASGNSGADSISYPARYANAMAVGATDQNNNRADFSQYGAGLDIVAPGVNVQSTYPGSTYASLNGTSMATPHVAGAAVLVKQKNPSWSNVRIRDHLKNTATSLGSTNLYGSGLVNAFAATR

SEQ ID NO: 61542 - protein, 269 aa, Unidentified
AQSVPWGISRVQAPAAHNRGLQGSGVKVAVLDTGISTHPDLNIRGGASFVPGEPSTQDGNGHGTHVAGTIAALNNSIGVLGVAPSAELYAVKVLGASGGGAISSIAQGLEWAGNNGMHVANLSLGSPSPSATLEQAVNSATSRGVLVVAASGNSGADSISYPARYANAMAVGATDQNNNRAEFSQYGAGLDIVAPGVNVQSTYPGSTYASLNGTSMATPHVAGAATLVKQKNPSWSNVTIREHLKNTATSLGSTNLYGSGLVNAFAATR

SEQ ID NO: 61543 - protein, 269 aa, Unidentified
AQSVPWGISRVQAPAAHNRGLQGSGVKVAVLDTGISTHPDLNIRGGASFVPGEPSTQDGNGHGTHVAGTIAALNNSIGVLGVAPSAELYAVKVLGASGGGAISSIAQGLEWAGNNGMHVANLSLGSPSPSATLEQAVNSATSRGVLVVAASGNSGADSISYPARYANAMAVGATDQNNNRAEFSQYGAGLDIVAPGVNVQSTYPGSTYASLNGTSMATPHVAGAASLVKQKNPSWSNVTIRDHLKNTATSLGSTNLYGSGLVNALAATR

SEQ ID NO: 61544 - protein, 269 aa, Unidentified
AQSVPWGISRVQAPAAHNRGLTGSGVKVAVLDTGISTHPDLNIRGGASFVPGEPSTQDGNGHGTHVAGTIAALNNSIGVLGVAPSAELYAVKVLGASGGGAISSIAQGLEWAGNNGMHVANLSLGSPSPSATLEQAVNSATSRGVLVVAASGNSGADSISYPARYANAMAVGATDQNNNRASFSQYGAGLDIVAPGVNVESTYPGSTYASLNGTSMATPHVAGAAVLVKHKNPSWSNVRIRDHLKKTATSLGSTNLYGSGLVNAEAATR

SEQ ID NO: 61545 - protein, 269 aa, Unidentified
AQSVPWGISRVQAPAAHNRGLAGSGVKVAVLDTGISTHPDLNIRGGASFVPGEPSTQDGNGHGTHVAGTIAALNNSIGVLGVAPSAELYAVKVLGASGGGAISSIAQGLEWAGNNGMHVANLSLGSPSPSATLEQAVNSATSRGVLVVAASGNSGADSISYPARYANAMAVGATDQNNNRAEFSQYGAGLDIVAPGVNVQSTYPGSTYASLNGTSMATPHVAGAATLVKQKNPSWSNVRIREHLKNTATSLGSTNLYGSGLVNAFAATR

SEQ ID NO: 61546 - protein, 269 aa, Unidentified
AQSVPWGISRVQAPAAHNRGLAGSGVKVAVLDTGISTHPDLNIRGGASFVPGEPSTQDGNGHGTHVAGTIAALNNSIGVLGVAPSAELYAVKVLGASGGGAISSIAQGLEWAGNNGMHVANLSLGSPSPSATLEQAVNSATSRGVLVVAASGNSGADSISYPARYANAMAVGATDQNNNRAEFSQYGAGLDIVAPGVNVQSTYPGSTYASLNGTSMATPHVAGAATLVKQKNPSWSNVTIRDHLKNTATSLGSTNLYGSGLVNALAATR

SEQ ID NO: 61547 - protein, 269 aa, Unidentified
AQSVPWGISRVQAPAAHNRGLAGSGVKVAVLDTGISTHPDLNIRGGASFVPGEPSTQDGNGHGTHVAGTIAALNNSIGVLGVAPSAELYAVKVLGASGGGAISSIAQGLEWAGNNGMHVANLSLGSPSPSATLEQAVNSATSRGVLVVAASGNSGADSISYPARYANAMAVGATDQNNNRAEFSQYGAGLDIVAPGVNVQSTYPGSTYASLNGTSMATPHVAGAASLVKQKNPSWSNVRIREHLKNTATSLGSTNLYGSGLVNATAATR

SEQ ID NO: 61548 - protein, 269 aa, Unidentified
AQSVPWGISRVQAPAAHRRRLTGRGVKVAVLDTGISTHPDLNIRGGASFVPGEPSTQDGNGHGTHVAGTIAALDNSIGVLGVAPSAELYAVKVLGASGAGSVSSIAQGLEWAGANGMHVANLSLGSPSPSATLEQAVNSATSRGVLVVAASGNSGAGSISYPARYANAMAVGATDQDNNRASFSQYGAGLDIVAPGVNVQSTYPQSAYASLNGTSMATPHVAGAAALVKQKNPSWSNVQIRNRLKNTATSLGSTNLYGSGLVNAEAATR

SEQ ID NO: 61549 - protein, 269 aa, Unidentified
AQSVPWGISRVQAPASHNRGLTGFGVKVAVLDSGISTHPDLNIRGGASFVPGEPSTQDGNGHGTHVAGTIAALNNSIGVLGVAPSAELYAVKVLGASGGGAISSIAQGLEWAGLNGMHVANLSLGNPSPSATLEQAVNSATSRGVLVVAASGNSGAGSISYPARYANAMAVGATDQNNNRASFSQYGAGLDIVAPGVNVQSTVPGSTYASLNGTSMATPHVAGAAVLVKQKNPSWSNVQIRNHLKNTATSLGSTNLYGSGLVNAEAATR

SEQ ID NO: 61550 - protein, 269 aa, Unidentified
AQSVPWGISRVQAPAAHRRRLWGRGVKVAVLDTGISTHPDLNIRGGASFVPGEPSTQDGNGHGTHVAGTIAALDNSIGVLGVAPSAELYAVKVLGASGAGSVSSIAQGLEWAGANGMHVANLSLGSPSPSATLEQAVNSATSRGVLVVAASGNSGAGSISYPARYANAMAVGATDQDNNRASFSQYGAGLDIVAPGVNVQSTYPQSTYASLNGTSMATPHVAGAAALVKQKNPSWSNVQIRNRLKNTATSLGSTNLYGSGLVNAEAATR

SEQ ID NO: 61551 - protein, 269 aa, Unidentified
AQSVPWGISRVQAPAAHNRGLAGGGVKVAVLDTGISTHPDLNIRGGASFVPGEPSTQDGNGHGTHVAGTIAALNNNIGVLGVAPSAELYAVKVLGASGGGAISSIAQGLEWAGNNGMHVANLSLGAPSPSATLEQAVNSATSRGVLVVAASGNSGAGSISYPARYANAMAVGATDQNNNRASFSQYGAGLDIVAPGVNVQSTYPGSTYASQNGTSMATPHVAGAAVLVKQKNPSWSNVRIRNHLKNTATSLGSTNLYGSGLVNAEAATR

SEQ ID NO: 61552 - protein, 269 aa, Unidentified
AQSVPWGISRVQAPAAHNRGLAGSGVKVAVLDTGISTHPDLNIRGGASFVPGEPSTQDGNGHGTHVAGTIAALNNSIGVLGVAPSAELYAVKVLGASGGGAISSIAQGLEWAGNNGMHVANLSLGSPSPSATLEQAVNSATSRGVLVVAASGNSGADSISYPARYANAMAVGATDQNNNRAEFSQYGAGLDIVAPGVNVQSTYPGSTYASLNGTSMATPHVAGAATLVKQKNPSWSNVVIRDHLKNTATSLGSTNLYGSGLVNALAATR

SEQ ID NO: 61553 - protein, 269 aa, Unidentified
AQSVPWGISRVQAPASHNRGLTGFGVKVAVLDTGISTHPDLNIRGGASFVPGEPSTQDGNGHGTHVAGTIAALNNSIGVLGVAPSAELYAVKVLGASGGGAISSIAQGLEWAGANGMHVANLSLGNPSPSATLEQAVNSATSRGVLVVAASGNSGAGSISYPARYANAMAVGATDQNNNRASFSQYGAGLDIVAPGVNVQSTVPGSAYASLNGTSMATPHVAGAAVLVKQKNPSWSNVQIRNHLKNTATSLGSTNLYGSGLVNAEAATR

SEQ ID NO: 61554 - protein, 269 aa, Synthetic construct
AQTIPWGISRVQAPAAHNRGLTGSGVKVAVLDTGISTHPDLNIRGGASFVPGEPSTQDGNGHGTHVAGTIAALNNSIGVLGVAPSAELYAVKVLGADGRGAISSIAQGLEWAGNNGMHVANLSLGSPSPSATLEQAVNSATSRGVLVVAASGNSGASSISYPARYANAMAVGATDQNNNRASFSQYGPGLDIVAPGVNIQSTYPGSTYASDNGTSMATPHVAGAAALVKQKNPSWSNVQIRNHLKNTATSLGSTNLYGSGLVNAEAATR

SEQ ID NO: 61555 - protein, 269 aa, Unidentified
AQSVPWGISRVQAPAAHNRRLWGSGVKVAVLDTGISTHPDLNIRGGASFVPGEPSTQDGNGHGTHVAGTIAALNNSIGVLGVAPSAELYAVKVLGASGAGAISSIAQGLEWAGANGMHVANLSLGSPSPSATLEQAVNSATSRGVLVVAASGNSGAGSISYPARYANAMAVGATDQDNNRASFSQYGAGLDIVAPGVNVQSTYPGSTYASLNGTSMATPHVAGAAVLVKQKNPSWSNVRIRNHLKNTATSLGSTNLYGSGLVSAEAATR

SEQ ID NO: 61556 - protein, 269 aa, Unidentified
AQSVPWGISRVQAPAAHNRGLAGSGVKVAVLDTGISTHPDLNIRGGASFVPGEPSTQDGNGHGTHVAGTIAALNNSIGVLGVAPSAELYAVKVLGASGGGAISSIAQGLEWAGNNGMHVANLSLGSPSPSATLEQAVNSATSRGVLVVAASGNSGADSISYPARYANAMAVGATDQNNNRADFSQYGAGLDIVAPGVNVQSTYPGSTYASLNGTSMATPHVAGAATLVKQKNPSWSNVTIREHLKNTATSLGSTNLYGSGLVNALAATR

SEQ ID NO: 61557 - protein, 269 aa, Unidentified
AQSVPWGISRVQAPAAHNRGLQGSGVKVAVLDTGISTHPDLNIRGGASFVPGEPSTQDGNGHGTHVAGTIAALNNSIGVLGVAPSAELYAVKVLGASGGGAISSIAQGLEWAGNNGMHVANLSLGSPSPSATLEQAVNSATSRGVLVVAASGNSGADSISYPARYANAMAVGATDQNNNRAEFSQYGAGLDIVAPGVNVQSTYPGSTYASLNGTSMATPHVAGAATLVKQKNPSWSNVTIRHHLKNTATSLGSTNLYGSGLVNAFAATR

SEQ ID NO: 61558 - protein, 269 aa, Bacillus licheniformis
AQTIPWGISRVQAPAAHNRGLTGSGVKVAVLDTGISTHPDLNIRGGASFVPGEPSTQDGNGHGTHVAGTIAALNNSIGVLGVAPSAELYAVKVLGADGRGAISSIAQGLEWAGNNGMHVANLSLGSPSPSATLEQAVNSATSRGVLVVAASGNSGASSISYPARYANAMAVGATDQNNNRASFSQYGPGLDIMAPGVNIQSTYPGSTYASLNGTSMATPHVAGAAALVKQKNPSWSNVQIRNHLKNTATSLGSTNLYGSGLVNAEAATR

SEQ ID NO: 61559 - protein, 269 aa, Unidentified
AQSVPWGISRVQAPAAHNRGLTGSGVKVAVLDTGISTHPDLNIRGGASFVPGEPSTQDGNGHGTHVAGTIAALNNSIGVLGVAPSAELYAVKVLGASGGGAISSIAQGLEWAGNNGMHVANLSLGSPSPSATLEQAVNSATSRGVLVVAASGNSGADSISYPARYANAMAVGATDQNNNRASFSQYGPGLDIVAPGVNVQSTYPGSTYASLNGTSMATPHVAGAAVLVKHKNPSWSNVRIRDHLKKTATSLGSTNLYGSGLVNAEAATR

SEQ ID NO: 61560 - protein, 269 aa, Unidentified
AQSVPWGISRVQAPAAHRRGLTGSGVKVAVLDTGISTHPDLRIRGGASFVPGEPSTQDGNGHGTHVAGTIAALDNRIGVLGVAPSAELYAVKVLGASGGGAISSIAQGLEWAGNNGMHVANLSLGSPSPSATLEQAVNSATSRGVLVVAASGNSGAGSISYPARYANAMAVGATDQNNNRASFSQYGAGLDIVAPGVNVQSTYPGSTYASLNGTSMATPHVAGAAVLVKQKNPSWSNVRIRNHLKNTATSLGSTNLYGSGLVRAEAATR

SEQ ID NO: 61561 - protein, 269 aa, Unidentified
AQSVPWGISRVQAPAAHNRGLTGRGVKVAVLDTGISTHPDLRIRGGASFVPGEPSTQDGNGHGTHVAGTIAALDNRIGVLGVAPSAELYAVKVLGASGGGAISSIAQGLEWAGNNGMHVANLSLGSPSPSATLEQAVNSATSRGVLVVAASGNSGAGSISYPARYANAMAVGATDQNNNRASFSQYGAGLDIVAPGVNVQSTYPGSTYASLNGTSMATPHVAGAAVLVKQKNPSWSNVRIRNHLKNTATSLGSTNLYGSGLVRAEAATR

SEQ ID NO: 61562 - protein, 269 aa, Bacillus lentus
AQTIPWGISRVQAPAAHNRGLTGSGVKVAVLDTGISTHPDLNIRGGASFVPGEPSTQDGNGHGTHVAGTIAALNNSIGVLGVAPSAELYAVKVLGADGGGAISSIAQGLEWAGNNGMHVANLSLGSPSPSATLEQAVNSATSRGVLVVAASGNSGASSISYPARYANAMAVGATDQNNNRASFSQYGPGLDIMAPGVNIQSTYPGSTYASLNGTSMATPHVAGAAALVKQKNPSWSNVQIRNHLKNTATSLGSTNLYGSGLVNAEAATR

SEQ ID NO: 61563 - protein, 269 aa, Unidentified
AQSVPWGISRVQAPAAHNRGLTGSGVKVAVLDTGISTHPDLNIRGGASFVPGEPSTQDGNGHGTHVAGTIAALDNNIGVLGVAPRAELYAVKVLGASGSGSVSSIAQGLEWAGNNRMHVANLSLGRQAPSATLEQAVNSATSRGILVVAASGNSGAGSISYPARYANAMAVGATDQNNNRASFSQYGPGLDIVAPGVNVQSTYPGSTYVSLNGTSMATPHVAGAAALVKQKNPSWSNVQIRNHLKNTATSLGSTNLYGSGLVNAEAATR

SEQ ID NO: 61564 - protein, 269 aa, Unidentified
AQSVPWGISRVQAPAAHNRGLTGSGVKVAVLDTGISTHPDLNIRGGASFVPGEPSTQDGNGHGTHVAGTIAALNNSIGVLGVAPSAELYAVKVLGASGSGAISSIAQGLEWAGNNGMHVANLSLGSPSPSATLEQAVNSATSRGVLVVAASGNSGADSISYPARYANAMAVGATDQNNNRASFSQYGAGLDIVAPGVNIQSTYIGSRYASLNGTSMATPHVAGAAVLVKHKNPSWSNVRIRNHLKNTATSLGSANLYGSGLVNAEAATR

SEQ ID NO: 61565 - protein, 269 aa, Unidentified
AQSVPWGISRVQAPAAHNRGLAGGGVKVAVLDTGISTHPDLNIRGGASFVPGEPSTQDGNGHGTHVAGTIAALNNSIGVLGVAPSAELYAVKVLAASGNGAISSIAQGLEWAGNNGMHVANLSLGAPSPSATLEQAVNSATSRGVLVVAASGNSGAGSISYPARYANAMAVGATDQNNNRASFSQYGAGLDIVAPGVNVQSTYPGSTYASQNGTSMATPHVAGAAVLVKQKNPSWSNVRIRNHLKNTATSLGSTNLYGSGLVNAEAATR

SEQ ID NO: 61566 - protein, 269 aa, Unidentified
AQSVPWGISRVQAPAAHRRGLTGRGVKVAVLDTGISTHPDLNIRGGASFVPGEPSTQDGNGHGTHVAGTIAALDNSIGVLGVAISAELYAVKVLGASGAGSVSSIAQGLEWAGANGMHVANLSLGSPSPSATLEQAVNSATSRGVLVVAASGNSGAGSISYPARYANAMAVGATDQNNNRASFSQYGAGLDLVAPGVNVQSTYPQSTYFSLNGTSMATPHVAGAAALVKQKNPSWSNVQIRNRLKNTATSLGSTNLYGSGLVNAEAATR

SEQ ID NO: 61567 - protein, 269 aa, Unidentified
AQSVPWGISRVQAPAAHNRGLAGSGVKVAVLDTGISTHPDLNIRGGASFVPGEPSTQDGNGHGTHVAGTIAALNNSIGVLGVAPSAELYAVKVLGASGGGAISSIAQGLEWAGNNGMHVANLSLGSPSPSATLEQAVNSATSRGVLVVAASGNSGADSISYPARYANAMAVGATDQNNNRADFSQYGAGLDIVAPGVNVQSTYPGSTYASLNGTSMATPHVAGAASLVKQKNPSWSNVRIREHLKNTATSLGSTNLYGSGLVNAFAATR

SEQ ID NO: 61568 - protein, 269 aa, Unidentified
AQSVPWGISRVQAPAAHNRGLQGSGVKVAVLDTGISTHPDLNIRGGASFVPGEPSTQDGNGHGTHVAGTIAALNNSIGVLGVAPSAELYAVKVLGASGGGAISSIAQGLEWAGNNGMHVANLSLGSPSPSATLEQAVNSATSRGVLVVAASGNSGADSISYPARYANAMAVGATDQNNNRADFSQYGAGLDIVAPGVNVQSTYPGSTYASLNGTSMATPHVAGAAVLVKQKNPSWSNVVIRHHLKNTATSLGSTNLYGSGLVNALAATR

SEQ ID NO: 61569 - protein, 269 aa, Unidentified
AQSVPWGISRVQAPAAHNRGLQGSGVKVAVLDTGISTHPDLNIRGGASFVPGEPSTQDGNGHGTHVAGTIAALNNSIGVLGVAPSAELYAVKVLGASGGGAISSIAQGLEWAGNNGMHVANLSLGSPSPSATLEQAVNSATSRGVLVVAASGNSGADSISYPARYANAMAVGATDQNNNRAEFSQYGAGLDIVAPGVNVQSTYPGSTYASLNGTSMATPHVAGAAVLVKQKNPSWSNVTIRDHLKNTATSLGSTNLYGSGLVNAHAATR

SEQ ID NO: 61570 - protein, 269 aa, Unidentified
AQSVPWGISRVQAPAAHNRGLAGSGVKVAVLDTGISTHPDLNIRGGASFVPGEPSTQDGNGHGTHVAGTIAALNNSIGVLGVAPSAELYAVKVLGASGGGAISSIAQGLEWAGNNGMHVANLSLGSPSPSATLEQAVNSATSRGVLVVAASGNSGADSISYPARYANAMAVGATDQNNNRAEFSQYGAGLDIVAPGVNVQSTYPGSTYASLNGTSMATPHVAGAAVLVKQKNPSWSNVRIRHHLKNTATSLGSTNLYGSGLVNAHAATR

SEQ ID NO: 61571 - protein, 269 aa, Unidentified
AQSVPWGISRVQAPAAHNRGLAGRGVKVAVLDTGISTHPDLNIRGGASFVPGEPSTQDGNGHGTHVAGTIAALNNSIGVLGVAPSAELYAVKVLGASGSGAISSIAQGLEWAGNNGMHVANLSLGSPSPSATLEQAVNSATSRGVLVVAASGNSGADSISYPARYANAMAVGATDQNNNRADFSQYGAGLDIVAPGVNVQSTYPGSTYASDNGTSMATPHVAGAAVLVKQKNPSWSNVQIRDHLKNTATSLGSTNLYGSGLVNAFAATR

SEQ ID NO: 61572 - protein, 269 aa, Unidentified
AQSVPWGISRVQAPAAHNRRLWGSGVKVAVLDTGISTHPDLNIRGGASFVPGEPSTQDGNGHGTHVAGTIAALNNSIGVLGVAPSAELYAVKVLGASGAGAISSIAQGLEWAGANGMHVANLSLGSPSPSATLEQAVNSATSRGVLVVAASGNSGAGSISYPARYANAMAVGATDQDNNRASFSQYGAGLDIVAPGVNVQSTYPQSTYASLNGTSMATPHVAGAAVLVKQKNPSWSNVRIRNHLKNTATSLGSTNLYGSGLVNAEAATR

SEQ ID NO: 61573 - protein, 269 aa, Unidentified
AQSVPWGISRVQAPAAHNRGLAGSGVKVAVLDTGISTHPDLNIRGGASFVPGEPSTQDGNGHGTHVAGTIAALNNSIGVLGVAPSAELYAVKVLGASGGGAISSIAQGLEWAGNNGMHVANLSLGSPSPSATLEQAVNSATSRGVLVVAASGNSGADSISYPARYANAMAVGATDQNNNRADFSQYGAGLDIVAPGVNVQSTYPGSTYASLNGTSMATPHVAGAAVLVKQKNPSWSNVRIRDHLKNTATSLGSTNLYGSGLVNALAATR

SEQ ID NO: 61574 - protein, 269 aa, Unidentified
AQSVPWGISRVQAPAAHNRGLQGSGVKVAVLDTGISTHPDLNIRGGASFVPGEPSTQDGNGHGTHVAGTIAALNNSIGVLGVAPSAELYAVKVLGASGGGAISSIAQGLEWAGNNGMHVANLSLGSPSPSATLEQAVNSATSRGVLVVAASGNSGADSISYPARYANAMAVGATDQNNNRADFSQYGAGLDIVAPGVNVQSTYPGSTYASLNGTSMATPHVAGAATLVKQKNPSWSNVRIREHLKNTATSLGSTNLYGSGLVNAFAATR

SEQ ID NO: 61575 - protein, 269 aa, Unidentified
AQSVPWGISRVQAPAAHNRGLTGSGVRVAVLDTGISTHPDLNITGGASFVPGEPSTQDGNGHGTHVAGTIAALDNRIGVLGVAPSAELYAVKVLGASGGGAISSIAQGLEWAGNNGMHVANLSLGSPSPSATLEQAVNSATSRGVLVVAASGNSGAGSISYPARYANAMAVGATDQNNNRASFSQYGAGLDIVAPGVNVQSTYPGSTYASLNGTSMATPHVAGAAVLVKQKNPSWSNVRIRNHLKNTATSLGSTNLYGSGLVRAEAATR

SEQ ID NO: 61576 - protein, 269 aa, Unidentified
AQSVPWGISRVQAPAAHNRGLTGSGVKVAVLDTGISTHPDLNIRGGASFVPGEPSTQDGNGHGTHVAGTIAALNNSIGVLGVAPSAELYAVKVLGASGGGAISSIAQGLEWAGNNGMHVANLSLGSPSPSATLEQAVNSATSRGVLVVAASGNSGADSISYPARYANAMAVGATDQNNNRASFSQYGAGLDIVAPGVNVQSTYIGSTYASLNGTSMATPHVAGAAVLVKHKNPSWSNVRIRDHLKKTATSLGSTNLYGSGLVNAEAATR

SEQ ID NO: 61577 - protein, 269 aa, Unidentified
AQSVPWGISRVQAPAAHNRRLWGSGVKVAVLDTGISTHPDLNIRGGASFVPGEPSTQDGNGHGTHVAGTIAALNNSIGVLGVAPSAELYAVKVLGASGAGAISSIAQGLEWAGANGMHVANLSLGSPSPSATLEQAVNSATSRGVLVVAASGNSGAGSISYPARYANAMAVGATDQNNNRASFSQYGAGLDIVAPGVNVQSTYPQSTYFSLNGTSMATPHVAGAAVLVKQKNPSWSNVRIRNHLKNTATSLGSTNLYGSGLVNAEAATR

SEQ ID NO: 61578 - protein, 269 aa, Unidentified
AQSVPWGISRVQAPAAHNRGLTGRGVKVAVLDTGISTHPDLNIRGGASFVPGEPSTQDGNGHGTHVAGTIAALNNSIGVLGVAPSAELYAVKVLGASGGGAISSIAQGLEWAGNNGMHVANLSLGSESPSATLEQAVNSATSRGVLVVAASGNSGAGSISYPARYANAMAVGATDQNNNRADFSQYGAGLDIVAPGVNVQSTYPGSTYASLNGTSMATPHVAGAAVLVKQKRPSWSNVRIRDHLKNTATSLGSTNLYGSGLVNAEAATR

SEQ ID NO: 61579 - protein, 269 aa, Unidentified
AQSVPWGISRVQAPAAHNRGLQGSGVKVAVLDTGISTHPDLNIRGGASFVPGEPSTQDGNGHGTHVAGTIAALNNSIGVLGVAPSAELYAVKVLGASGGGAISSIAQGLEWAGNNGMHVANLSLGSPSPSATLEQAVNSATSRGVLVVAASGNSGADSISYPARYANAMAVGATDQNNNRADFSQYGAGLDIVAPGVNVQSTYPGSTYASLNGTSMATPHVAGAALLVKQKNPSWSNVRIREHLKNTATSLGSTNLYGSGLVNALAATR

SEQ ID NO: 61580 - protein, 269 aa, Unidentified
AQSVPWGISRVQAPAAHNRGLAGGGVKVAVLDTGISTHPDLNIRGGASFVPGEPSTQDGNGHGTHVAGTIAALDNSIGVLGVAPSAELYAVKVLAASGGGAISSIAQGLEWAGNNGMHVANLSLGAPSPSATLEQAVNSATSRGVLVVAASGNSGAGSISYPARYANAMAVGATDQNNNRASFSQYGAGLDIVAPGVNVQSTYPGSTYASLNGTSMATPHVAGAAVLVKQKNPSWSNVRIRNHLKNTATSLGSTNLYGSGLVNAEAATR

SEQ ID NO: 61581 - protein, 269 aa, Unidentified
AQSVPWGISRVQAPASHNRGLTGFGVKVAVLDTGISTHPDLNIRGGASFVPGEPSTQDGNGHGTHVAGTIAALNNSIGVLGVAPSAELYAVKVLGASGGGAISSIAQGLEWAGLNGMHVANLSLGSPSPSATLEQAVNSATSRGVLVVAASGNSGAGSISYPARYANAMAVGATDQNNNRASFSQYGAGLDIVAPGVNVQSTVPQSAYASLNGTSMATPHVAGAAVLVKQKNPSWSNVQIRNHLKNTATSLGSTNLYGSGLVNAEAATR

SEQ ID NO: 61582 - protein, 269 aa, Unidentified
AQSVPWGISRVQAPAAHNRGLAGSGVKVAVLDTGISTHPDLNIRGGASFVPGEPSTQDGNGHGTHVAGTIAALNNSIGVLGVAPSAELYAVKVLGASGGGAISSIAQGLEWAGNNGMHVANLSLGSPSPSATLEQAVNSATSRGVLVVAASGNSGADSISYPARYANAMAVGATDQNNNRADFSQYGAGLDIVAPGVNVQSTYPGSTYASLNGTSMATPHVAGAALLVKQKNPSWSNVVIREHLKNTATSLGSTNLYGSGLVNALAATR

SEQ ID NO: 61583 - protein, 269 aa, Unidentified
AQSVPWGISRVQAPAAHNRGLAGRGVKVAVLDTGISTHPDLNIRGGASFVPGEPSTQDGNGHGTHVAGTIAALNNSIGVLGVAPSAELYAVKVLGASGGGAISSIAQGLEWAGNNGMHVANLSLGSESPSATLEQAVNSATSRGVLVVAASGNSGAGSISYPARYANAMAVGATDQNNNRASFSQYGAGLDIVAPGVNVQSTYPGSTYASLNGTSMATPHVAGAAVLVKQKYPSWSNVRIRNHLKNTATSLGSTNLYGSGLVNAEVATR

SEQ ID NO: 61584 - protein, 269 aa, Unidentified
AQSVPWGISRVQAPASHNRGLTGFGVKVAVLDSGISTHPDLNIRGGASFVPGEPSTQDGNGHGTHVAGTIAALNNSIGVLGVAPSAELYAVKVLGASGGGAISSIAQGLEWAGANGMHVANLSLGSPSPSATLEQAVNSATSRGVLVVAASGNSGAGSISYPARYANAMAVGATDQNNNRASFSQYGAGLDIVAPGVNVQSTVPGSAYASLNGTSMATPHVAGAAVLVKQKNPSWSNVQIRNHLKNTATSLGSTNLYGSGLVNAEAATR

SEQ ID NO: 61585 - protein, 269 aa, Unidentified
AQSVPWGISRVQAPAAHNRGLTGSGVKVAVLDTGISTHPDLNIRGGASFVPGEPSTQDGNGHGTHVAGTIAALNNSIGVLGVAPSAELYAVKVLGASGGGAISSIAQGLEWAGNNGMHVANLSLGNESPSATLEQAVNSATSRGVLVVAASGNSGEGSISYPARYANAMAVGATDQNNNRASFSQYGAGLDIVAPGVNVQSTYPGSTYASLNGTSMATPHVAGAAVLVKQKNPSWSNVRIRDRLKNTATSLGSTNLYGSGLVNAEAATR

SEQ ID NO: 61586 - protein, 269 aa, Unidentified
AQSVPWGISRVQAPAAHNRGLTGSGVKVAVLDTGISTHPDLNIRGGASFVPGEPSTQDGNGHGTHVAGTIAALNNSIGVLGVAPSAELYAVKVLGASGSAAISSIAQGLEWAGNNGMHVANLSLGSPSPSATLEQAVNSATSRGVLVVAASGNSGADSISYPARYANAMAVGATDQNNNRASFSQYGAGLDIVAPGVNVQSTYPGGTYASLNGTSMATPHVAGAAVLVKHKNPSWSNVRIRDHLKKTATSLGSTNLYGSGLVNAEAATR

SEQ ID NO: 61587 - protein, 269 aa, Unidentified
AQSVPWGISRVQAPAAHNRGLTGSGVKVAVLDTGISTHPDLNIRGGASFVPGEPSTQDGNGHGTHAAGTIAALNNSIGVLGVAPSAELYAVKVLGASGSGAISSIAQGLEWAGNNGMHVANLSLGSPSPSATLEQAVNSATSRGVLVVAASGNSGADSISYPARYANAMAVGATDQNNNRASFSQYGAGLDIVAPGVNVQSTYPGSTYATLNGTSMATPHVAGAAVLVKHKNPSWSNVRIRDHLKKTATSLGSTNLYGSGLVNAEAATR

SEQ ID NO: 61588 - protein, 269 aa, Unidentified
AQSVPWGISRVQAPAAHNRGLTGSGVKVAVLDTGISTHPDLNIRGGASFVPGEPSTQDGDGHGTHVAGTIAALNNSIGVLGVAPSAELYAVKVLGASGSGAISSIAQGLEWAGNNGMHVANLSLGSPSPSATLEQAVNSATSRGVLVVAASGNSGADSISYPARYANAMAVGATDQNNNRASFSQYGAGLDIVAPGVNVRSTYPGSTYASLNGTSMATPHVAGAAVLVKHKNPSWSNVRIRDHLKKTATSLGSTNLYGSGLVNAEAATR

SEQ ID NO: 61589 - protein, 269 aa, Unidentified
AQSVPWGISRVQAPAAHNRGLAGSGVKVAVLDTGISTHPDLNIRGGASFVPGEPSTQDGNGHGTHVAGTIAALNNSIGVLGVAPSAELYAVKVLGASGGGAISSIAQGLEWAGNNGMHVANLSLGSPSPSATLEQAVNSATSRGVLVVAASGNSGADSISYPARYANAMAVGATDQNNNRADFSQYGAGLDIVAPGVNVQSTYPGSTYASLNGTSMATPHVAGAALLVKQKNPSWSNVVIRHHLKNTATSLGSTNLYGSGLVNATAATR

SEQ ID NO: 61590 - protein, 269 aa, Unidentified
AQSVPWGISRVQAPAAHNRGLAGSGVKVAVLDTGISTHPDLNIRGGASFVPGEPSTQDGNGHGTHVAGTIAALNNSIGVLGVAPSAELYAVKVLGASGGGAISSIAQGLEWAGLNGMHVANLSLGSPSPSATLEQAVNSATSRGVLVVAASGNSGADSISYPARYANAMAVGATDQNNNRADFSQYGAGLDIVAPGVNVQSTYPGSTYASLNGTSMATPHVAGAAALVKQKNPSWSNVRIRDHLKNTATSLGSTNLYGSGLVNAFAATR

SEQ ID NO: 61591 - protein, 269 aa, Unidentified
AQSVPWGISRVQAPAAHNRGLQGSGVKVAVLDTGISTHPDLNIRGGASFVPGEPSTQDGNGHGTHVAGTIAALNNSIGVLGVAPSAELYAVKVLGASGGGAISSIAQGLEWAGNNGMHVANLSLGSPSPSATLEQAVNSATSRGVLVVAASGNSGADSISYPARYANAMAVGATDQNNNRADFSQYGAGLDIVAPGVNVQSTYPGSTYASLNGTSMATPHVAGAALLVKQKNPSWSNVTIRHHLKNTATSLGSTNLYGSGLVNAFAATR

SEQ ID NO: 61592 - protein, 269 aa, Unidentified
AQSVPWGISRVQAPAAHNRGLAGSGVKVAVLDTGISTHPDLNIRGGASFVPGEPSTQDGNGHGTHVAGTIAALNNSIGVLGVAPSAELYAVKVLGASGGGAISSIAQGLEWAGNNGMHVANLSLGSPSPSATLEQAVNSATSRGVLVVAASGNSGADSISYPARYANAMAVGATDQNNNRAEFSQYGAGLDIVAPGVNVQSTYPGSTYASLNGTSMATPHVAGAAVLVKQKNPSWSNVRIREHLKNTATSLGSTNLYGSGLVNAFAATR

SEQ ID NO: 61593 - protein, 269 aa, Unidentified
AQSVPWGISRVQAPAAHNRGLTGFGVKVAVLDSGISTHPDLNIRGGASFVPGEPSTQDGNGHGTHVAGTIAALNNSIGVLGVAPSAELYAVKVLGASGGGAISSIAQGLEWAGLNGMHVANLSLGNPSPSATLEQAVNSATSRGVLVVAASGNSGAGSISYPARYANAMAVGATDQNNNRASFSQYGAGLDIVAPGVNVQSTVPGSAYASLNGTSMATPHVAGAAVLVKQKNPSWSNVQIRNHLKNTATSLGSTNLYGSGLVNAEAATR

SEQ ID NO: 61594 - protein, 269 aa, Unidentified
AQSVPWGISRVQAPAAHNRGLAGSGVKVAVLDTGISTHPDLNIRGGASFVPGEPSTQDGNGHGTHVAGTIAALNNSIGVLGVAPSAELYAVKVLGASGGGAISSIAQGLEWAGNNGMHVANLSLGSPSPSATLEQAVNSATSRGVLVVAASGNSGADSISYPARYANAMAVGATDQNNNRAEFSQYGAGLDIVAPGVNVQSTYPGSTYASLNGTSMATPHVAGAAVLVKQKNPSWSNVVIRHHLKNTATSLGSTNLYGSGLVNATAATR

SEQ ID NO: 61595 - protein, 269 aa, Unidentified
AQSVPWGISRVQAPAAHRRGLTGRGVKVAVLDTGISTHPDLNIRGGASFVPGEPSTQDGNGHGTHVAGTIAALDNNIGVLGVAPRAELYAVKVLGASGSGSVSSIAQGLEWAGNNRMHVANLSLGLQAPSATLEQAVNSATSRGVLVVAASGNSGAGSISYPARYANAMAVGATDQNNNRASFSQYGAGLDIVAPGVNVLSTYPGSTYASLNGTSMATPHVAGAAALVKQKNPSWSNVQIRNHLKNTATSLGSTNLYGSGLVNAEAATR

SEQ ID NO: 61596 - protein, 269 aa, Unidentified
AQSVPWGISRVQAPAAHNRGLAGSGVKVAVLDTGISTHPDLNIRGGASFVPGEPSTQDGNGHGTHVAGTIAALNNSIGVLGVAPSAELYAVKVLGASGGGAISSIAQGLEWAGNNGMHVANLSLGSPSPSATLEQAVNSATSRGVLVVAASGNSGADSISYPARYANAMAVGATDQNNNRADFSQYGAGLDIVAPGVNVQSTYPGSTYASLNGTSMATPHVAGAAVLVKQKNPSWSNVTIRHHLKNTATSLGSTNLYGSGLVNAHAATR

SEQ ID NO: 61597 - protein, 269 aa, Unidentified
AQSVPWGISRVQAPAAHNRGLQGSGVKVAVLDTGISTHPDLNIRGGASFVPGEPSTQDGNGHGTHVAGTIAALNNSIGVLGVAPSAELYAVKVLGASGGGAISSIAQGLEWAGNNGMHVANLSLGSPSPSATLEQAVNSATSRGVLVVAASGNSGADSISYPARYANAMAVGATDQNNNRADFSQYGAGLDIVAPGVNVQSTYPGSTYASLNGTSMATPHVAGAASLVKQKNPSWSNVTIRHHLKNTATSLGSTNLYGSGLVNAHAATR

SEQ ID NO: 61598 - protein, 269 aa, Unidentified
AQSVPWGISRVQAPAAHNRGLAGSGVKVAVLDTGISTHPDLNIRGGASFVPGEPSTQDGNGHGTHVAGTIAALNNSIGVLGVAPSAELYAVKVLGASGGGAISSIAQGLEWAGNNGMHVANLSLGSPSPSATLEQAVNSATSRGVLVVAASGNSGADSISYPARYANAMAVGATDQNNNRAEFSQYGAGLDIVAPGVNVQSTYPGSTYASLNGTSMATPHVAGAAVLVKQKNPSWSNVVIRHHLKNTATSLGSTNLYGSGLVNAHAATR

SEQ ID NO: 61599 - protein, 269 aa, Unidentified
AQSVPWGISRVQAPAAHNRGLTGRGVKVAVLDTGISTHPDLNITGGASFVPGEPSTQDGNGHGTHVAGTIAALDNRIGVLGVAPSAELYAVKVLGASGGGAISSIAQGLEWAGNNGMHVANLSLGSPSPSATLEQAVNSATSRGVLVVAASGNSGAGSISYPARYANAMAVGATDQNNNRASFSQYGAGLDIVAPGVNVQSTYPGSTYASLNGTSMATPHVAGAAVLVKQKNPSWSNVRIRNHLKNTATSLGSTNLYGSGLVRAEAATR

SEQ ID NO: 61600 - protein, 269 aa, Bacillus lentus
AQSVPWGISRVQAPAAHNRGLTGSGVKVAVLDTGISTHEDLNVRGGVSFVPGEPSYQDGNGHGTHVAGTIAALNNSIGVVGVAPSADLYAVKVLGASGEGSVSSIAQGLEWAGQNGMHVANLSLGSESPSATLEQAVNSATSRGVLVVAASGNSGAGSISYPARYANAMAVGATDQNNNRASFSQYGAGLDIVAPGVNVQSTYPGSTYASLNGTSMATPHVAGAAALVKQKNPSWSNVQIRDHLKNTATSLGSTNLYGSGLVNAEAATR

SEQ ID NO: 61601 - protein, 269 aa, Unidentified
AQSVPWGISRVQAPAAHNRGLQGSGVKVAVLDTGISTHPDLNIRGGASFVPGEPSTQDGNGHGTHVAGTIAALNNSIGVLGVAPSAELYAVKVLGASGGGAISSIAQGLEWAGNNGMHVANLSLGSPSPSATLEQAVNSATSRGVLVVAASGNSGADSISYPARYANAMAVGATDQNNNRAEFSQYGAGLDIVAPGVNVQSTYPGSTYASLNGTSMATPHVAGAALLVKQKNPSWSNVVIREHLKNTATSLGSTNLYGSGLVNALAATR

SEQ ID NO: 61602 - protein, 269 aa, Unidentified
AQSVPWGISRVQAPAAHNRGLAGSGVKVAVLDTGISTHPDLNIRGGASFVPGEPSTQDGNGHGTHVAGTIAALNNSIGVLGVAPSAELYAVKVLGASGGGAISSIAQGLEWAGNNGMHVANLSLGSPSPSATLEQAVNSATSRGVLVVAASGNSGADSISYPARYANAMAVGATDQNNNRAEFSQYGAGLDIVAPGVNVQSTYPGSTYASLNGTSMATPHVAGAAVLVKQKNPSWSNVTIRDHLKNTATSLGSTNLYGSGLVNATAATR

SEQ ID NO: 61603 - protein, 269 aa, Unidentified
AQSVPWGISRVQAPAAHNRGLTGRGVKVAVLDTGISTHPDLNIRGGASFVPGEPSTQDGNGHGTHVAGTIAALDNNIGVLGVAPDAELYAVKVLGASGSGSVSSIAQGLEWAGNNRMHVANLSLGLQAPSATLEQAVNSATSRGVLVVAASGNSGAGSISYPARYANAMAVGATDQNNNRASFSQYGAGLDIVAPGVNVLSTYPGSAYASLNGTSMATPHVAGAAALVKQKNPSWSNVQIRNHLKNTATSLGSTNLYGSGLVNAEAATR

SEQ ID NO: 61604 - protein, 269 aa, Unidentified
AQSVPWGISRVQAPAAHNRGLTGSGVKVAVLDTGISTHPDLNIRGGASFVPGEPSTQDGNGHGTHAAGTIAALNNSIGVLGVAPSAELYAVKVLGASGSGAISSIAQGLEWAGNNGMHVANLSLGSPSPSATLEQAVNSATSRGVLVVAASGNSGADSISYPARYANAMAVGATDQNNNRASFSQYGAGLDIVAPGVNVQSTYPGATYASLNGTSMATPHVAGAAVLVKHKNPSWSNVRIRDHLKKTATSLGSTNLYGSGLVNAEAATR

SEQ ID NO: 61605 - protein, 269 aa, Unidentified
AQSVPWGISRVQAPAAHNRGLQGSGVKVAVLDTGISTHPDLNIRGGASFVPGEPSTQDGNGHGTHVAGTIAALNNSIGVLGVAPSAELYAVKVLGASGGGAISSIAQGLEWAGNNGMHVANLSLGSPSPSATLEQAVNSATSRGVLVVAASGNSGADSISYPARYANAMAVGATDQNNNRADFSQYGAGLDIVAPGVNVQSTYPGSTYASLNGTSMATPHVAGAATLVKQKNPSWSNVTIREHLKNTATSLGSTNLYGSGLVNALAATR

SEQ ID NO: 61606 - protein, 269 aa, Unidentified
AQSVPWGISRVQAPASHNRGLTGSGVKVAVLDTGISTHPDLNIRGGASFVPGEPSTQDGNGHGTHVAGTIAALNNSIGVLGVAPSAELYAVKVLGASGGGAISSIAQGLEWAGANGMHVANLSLGNPSPSATLEQAVNSATSRGVLVVAASGNSGAGSISYPARYANAMAVGATDQNNNRASFSQYGAGLDIVAPGVNVQSTAPQSAYASLNGTSMATPHVAGAAVLVKQKNPSWSNVQIRNHLKNTATSLGSTNLYGSGLVNAEAATR

SEQ ID NO: 61607 - protein, 269 aa, Unidentified
AQSVPWGISRVQAPATHNRGLTGSGVKVAVLDTGISTHPDLRITGGASFVPGEPSTQDGNGHGTHVAGTIAALDNSIGVLGVAPSAELYAVKVLGASGGGAISSIAQGLEWAGNNGMHVANLSLGSPSPSATLEQAVNSATSRGVLVVAASGNSGAGSISYPARYANAMAVGATDQNNNRASFSQYGAGLDIVAPGVNVQSTYPGSTYASLNGTSMATPHVAGAAVLVKQKNPSWSNVRIRNHLKNTATSLGSTNLYGSGLVRAEAATR

SEQ ID NO: 61608 - protein, 269 aa, Unidentified
AQSVPWGISRVQAPAAHNRGLQGSGVKVAVLDTGISTHPDLNIRGGASFVPGEPSTQDGNGHGTHVAGTIAALNNSIGVLGVAPSAELYAVKVLGASGGGAISSIAQGLEWAGNNGMHVANLSLGSPSPSATLEQAVNSATSRGVLVVAASGNSGADSISYPARYANAMAVGATDQNNNRAEFSQYGAGLDIVAPGVNVQSTYPGSTYASLNGTSMATPHVAGAAVLVKQKNPSWSNVTIRDHLKNTATSLGSTNLYGSGLVNAFAATR

SEQ ID NO: 61609 - protein, 269 aa, Unidentified
AQSVPWGISRVQAPAAHNRGLAGFGVKVAVLDSGISTHPDLNIRGGASFVPGEPSTQDGNGHGTHVAGTIAALNNSIGVLGVAPSAELYAVKVLGASGGGAISSIAQGLEWAGANGMHVANLSLGSPSPSATLEQAVNSATSRGVLVVAASGNSGAGSISYPARYANAMAVGATDQNNNRASFSQYGAGLDIVAPGVNVQSTVPGSAYASLNGTSMATPHVAGAAVLVKQKNPSWSNVQIRNHLKNTATSLGSTNLYGSGLVNAEAATR

SEQ ID NO: 61610 - protein, 269 aa, Unidentified
AQSVPWGISRVQAPAAHNRGLTGSGVKVAVLDTGISTHPDLNIRGGASFVPGEPSTQDGDGHGTHVAGTIAALNNSIGVLGVAPSAELYAVKVLGASGSGAISSIAQGLEWAGNNGMHVANLSLGSPSPSATLEQAVNSATSRGVLVVAASGNSGADSISYPARYANAMAVGATDQNNNRASFSQYGAGLDIVAPGVNVQSTYPGSRYASLNGTSMATPHVAGAAVLVKHKNPSWSNVRIRDHLKKTATSLGSTNLYGSGLVNAEAATR

SEQ ID NO: 61611 - protein, 269 aa, Unidentified
AQSVPWGISRVQAPAAHNRGLQGSGVKVAVLDTGISTHPDLNIRGGASFVPGEPSTQDGNGHGTHVAGTIAALNNSIGVLGVAPSAELYAVKVLGASGGGAISSIAQGLEWAGNNGMHVANLSLGSPSPSATLEQAVNSATSRGVLVVAASGNSGADSISYPARYANAMAVGATDQNNNRAEFSQYGAGLDIVAPGVNVQSTYPGSTYASLNGTSMATPHVAGAAVLVKQKNPSWSNVRIRDHLKNTATSLGSTNLYGSGLVNALAATR

SEQ ID NO: 61612 - protein, 269 aa, Bacillus lentus
AQTIPWGISRVQAPAAHNRGLTGSGVKVAVLDTGISTHPDLNIRGGASFVPGEPSTQDGNGHGTHVAGTIAALNNSIGVLGVAPSAELYAVKVLGADGRGAISSIAQGLEWAGNNGMHVANLSLGSPSPSATLEQAVNSATSRGVLVVAASGNSGASSISYPARYANAMAVGATDQNNNRASFSQYGAGLDIVAPGVNVQSTYPGSTYASLNGTSMATPHVAGVAALVKQKNPSWSNVQIRNHLKNTATGLGNTNLYGSGLVNAEAATR

SEQ ID NO: 61613 - protein, 269 aa, Unidentified
AQSVPWGISRVQAPAAHNRGLTGRGVKVAVLDTGISTHPDLNIRGGASFVPGEPSTQDGNGHGTHVAGTIAALNNSIGVLGVAPSAELYAVKVLGASGGGAISSIAQGLEWAGNNGMHVANLSLGNESPSATLEQAVNSATSRGVLVVAASGNSGAGSISYPARYANAMAVGATDQNNNRADFSQYGAGLDIVAPGVNVQSTYPGSTYASLNGTSMATPHVAGAAVLVKQKNPSWSNVRIRDHLKNTATSLGSTNLYGSGLVNAEAATR

SEQ ID NO: 61614 - protein, 269 aa, Unidentified
AQSVPWGISRVQAPAAHNRGLQGSGVKVAVLDTGISTHPDLNIRGGASFVPGEPSTQDGNGHGTHVAGTIAALNNSIGVLGVAPSAELYAVKVLGASGGGAISSIAQGLEWAGNNGMHVANLSLGSPSPSATLEQAVNSATSRGVLVVAASGNSGADSISYPARYANAMAVGATDQNNNRADFSQYGAGLDIVAPGVNVQSTYPGSTYASLNGTSMATPHVAGAAVLVKQKNPSWSNVRIRHHLKNTATSLGSTNLYGSGLVNAHAATR

SEQ ID NO: 61615 - protein, 269 aa, Unidentified
AQSVPWGISRVQAPAAHNRGLAGSGVKVAVLDTGISTHPDLNIRGGASFVPGEPSTQDGNGHGTHVAGTIAALNNSIGVLGVAPSAELYAVKVLGASGGGAISSIAQGLEWAGNNGMHVANLSLGSPSPSATLEQAVNSATSRGVLVVAASGNSGADSISYPARYANAMAVGATDQNNNRAEFSQYGAGLDIVAPGVNVQSTYPGSTYASLNGTSMATPHVAGAASLVKQKNPSWSNVVIREHLKNTATSLGSTNLYGSGLVNALAATR

SEQ ID NO: 61616 - protein, 269 aa, Unidentified
AQSVPWGISRVQAPAAHNRGLTGSGVKVAVLDTGISTHPDLNIRGGASFVPGEPSTQDGNGHGTHVAGTIAALNNSIGVLGVAPSAELYAVKVLGASGAGAISSIAQGLEWAGNNGMHVANLSLGSPSPSATLEQAVNSATSRGVLVVAASGNSGEGSISYPARYANAMAVGATDQNNNRADFSQYGAGLDIVAPGVNVQSTYPGSTYASLNGTSMATPHVAGAAVLVKQKNPSWSNVRIRDRLKNTATSLGSTNLYGSGLVNAFAATR

SEQ ID NO: 61617 - protein, 269 aa, Unidentified
AQSVPWGISRVQAPAAHNRGLQGSGVKVAVLDTGISTHPDLNIRGGASFVPGEPSTQDGNGHGTHVAGTIAALNNSIGVLGVAPSAELYAVKVLGASGGGAISSIAQGLEWAGNNGMHVANLSLGSPSPSATLEQAVNSATSRGVLVVAASGNSGADSISYPARYANAMAVGATDQNNNRAEFSQYGAGLDIVAPGVNVQSTYPGSTYASLNGTSMATPHVAGAATLVKQKNPSWSNVRIRDHLKNTATSLGSTNLYGSGLVNATAATR

SEQ ID NO: 61618 - protein, 269 aa, Unidentified
AQSVPWGISRVQAPAAHNRGLAGGGVKVAVLDTGISTHPDLNIRGGASFVPGEPSTQDGNGHGTHVAGTIAALDNNIGVLGVAPSAELYAVKVLAASGNGAISSIAQGLEWAGNNGMHVANLSLGSPSPSATLEQAVNSATSRGVLVVAASGNSGAGSISYPARYANAMAVGATDQNNNRASFSQYGAGLDIVAPGVNVQSTYPGSTYASLNGTSMATPHVAGAAVLVKQKNPSWSNVRIRNHLKNTATSLGSTNLYGSGLVNAEAATR

SEQ ID NO: 61619 - protein, 269 aa, Unidentified
AQSVPWGISRVQAPAAHNRGLAGGGVKVAVLDTGISTHPDLNIRGGASFVPGEPSTQDGNGHGTHVAGTIAALDNNIGVLGVAPSAELYAVKVLGASGGGAISSIAQGLEWAGNNGMHVANLSLGSPSPSATLEQAVNSATSRGVLVVAASGNSGAGSISYPARYANAMAVGATDQNNNRASFSQYGAGLDIVAPGVNVQSTYPGSTYASQNGTSMATPHVAGAAVLVKQKNPSWSNVRIRNHLKNTATSLGSTNLYGSGLVNAEAATR

SEQ ID NO: 61620 - protein, 269 aa, Unidentified
AQSVPWGISRVQAPAAHNRGLTGSGVKVAVLDTGISTHPDLNIRGGASFVPGEPSTQDGNGHGTHVAGTIAALDNSIGVLGVAPSAELYAVKVLGADGRGAISSIAQGLEWAGNNGMHVANLSLGSPSPSATLEQAVNSATSYGVLVVAASGNSGASSISYPARYANAMAVGATDQNNNRASFSQYGAGLDIVAPGVNVQSTYPGSTYWSLSGTSMATPHVAGAAALVKQKNPSWSNVQIRNHLKNTATSLGSTNEYGSGLVNAEAATR

SEQ ID NO: 61621 - protein, 269 aa, Unidentified
AQSVPWGISRVQAPAAHNRGLTGRGVKVAVLDTGISTHPDLNIRGGASFVPGEPSTQDGEGHGTHVAGTIAALNNDIGVLGVAPSAELYAVKVLGASGSGSVSSIAQGLEWAGNNSMHVANLSLGSESPSATLEQAVNSATSRGVLVVAASGNSGADSISYPARYANAMAVGATDQNNNRADFSQYGAGLDIVAPGVNVQSTYPGSTYASLNGTSMATPHVAGAAALVKQKNPSWSNVRIRDRLKNTATSLGSTNLYGSGLVNAEAATR

SEQ ID NO: 61622 - protein, 269 aa, Unidentified
AQSVPWGISRVQAPAAHNRGLAGSGVKVAVLDTGISTHPDLNIRGGASFVPGEPSTQDGNGHGTHVAGTIAALNNSIGVLGVAPSAELYAVKVLGASGGGAISSIAQGLEWAGNNGMHVANLSLGSPSPSATLEQAVNSATSRGVLVVAASGNSGADSISYPARYANAMAVGATDQNNNRADFSQYGAGLDIVAPGVNVQSTYPGSTYASLNGTSMATPHVAGAASLVKQKNPSWSNVRIRDHLKNTATSLGSTNLYGSGLVNATAATR

SEQ ID NO: 61623 - protein, 269 aa, Unidentified
AQSVPWGISRVQAPAAHNRGLTGSGVKVAVLDTGISTHPDLNIRGGASFVPGEPSTQDGNGHGTHAAGTIAALNNSIGVLGVAPSAELYAVKVLGASGSGAISSIAQGLEWAGNNGMHVANLSLGSPSPSATLEQAVNSATSRGVLVVAASGNSGADSISYPARYANAMAVGATDQNNNRASFSQYGAGLDIVAPGVNVQSTYPGETYASLNGTSMATPHVAGAAVLVKHKNPSWSNVRIRDHLKKTATSLGSTNLYGSGLVNAEAATR

SEQ ID NO: 61624 - protein, 269 aa, Unidentified
AQSVPWGISRVQAPAAHNRGLAGRGVKVAVLDTGISTHPDLNIRGGASFVPGEPSTQDGNGHGTHVAGTIAALNNSIGVLGVAPSAELYAVKVLGASGGGAISSIAQGLEWAGNNGMHVANLSLGSESPSATLEQAVNSATSRGVIVVAASGNSGAGSISYPARYANAMAVGATDQNNNRASFSQYGAGLDIVAPGVNVQSTYPGSTYASLNGTSMATPHVAGAAVLVKQKNPSWSNVRIRDHLKNTATSLGSTNLYGSGLVNAEAATR

SEQ ID NO: 61625 - protein, 269 aa, Unidentified
AQSVPWGISRVQAPAAHNRRLTGRGVKVAVLDTGISTHPDLNIRGGASFVPGEPSTQDGEGHGTHVAGTIAALNNGIGVLGVAPSAELYAVKVLGASGSGSVSSIAQGLEWAGNNSMHVANLSLGSESPSATLEQAVNSATSRGVLVVAASGNSGAGSISYPARYANAMAVGATDQNNNRADFSQYGAGLDIVAPGVNVQSTYPGSTYASLNGTSMATPHVAGAAALVKQKNPSWSNVRIRDRLKNTATSLGSTNLYGSGLVNAEAATR

SEQ ID NO: 61626 - protein, 269 aa, Unidentified
AQSVPWGISRVQAPAAHNRGLTGFGVKVAVLDSGISTHPDLNIRGGASFVPGEPSTQDGNGHGTHVAGTIAALNNSIGVLGVAPSAELYAVKVLGASGGGAISSIAQGLEWAGLNGMHVANLSLGSPSPSATLEQAVNSATSRGVLVVAASGNSGAGSISYPARYANAMAVGATDQNNNRASFSQYGAGLDIVAPGVNVQSTVPQSAYASLNGTSMATPHVAGAAVLVKQKNPSWSNVQIRNHLKNTATSLGSTNLYGSGLVNAEAATR

SEQ ID NO: 61627 - protein, 269 aa, Unidentified
AQSVPWGISRVQAPAAHNRRLTGSGVKVAVLDTGISTHPDLNIRGGASFVPGEPSTQDGNGHGTHVAGTIAALNNSIGVLGVAPSAELYAVKVLGASGAGAISSIAQGLEWAGANGMHVANLSLGSPSPSATLEQAVNSATSRGVLVVAASGNSGAGSISYPARYANAMAVGATDQDNNRASFSQYGAGLDIVAPGVNVQSTYPQSTYASLNGTSMATPHVAGAAVLVKQKNPSWSNVRIRNHLKNTATSLGSTNLYGSGLVNAEAAIR

SEQ ID NO: 61628 - protein, 269 aa, Unidentified
AQSVPWGISRVQAPAAHNRGLRGSGVKVAVLDTGISTHPDLNIRGGASFVPGEPSTQDGNGHGTHVAGTIAALNNNIGVLGVAPSAELYAVKVLSASGQGAISSIANGLEWAGLNGMHVANLSLGSPSPSATLEQAVNSATSRGVLVVAASGNSGAGSISYPARYANAMAVGATDQNNNRASFSQYGAGLDIVAPGVNVQSTYPGSTYASLNGTSMATPHVAGAAVLVKQKNPSWSNVRIRNHLKNTATSLGSTNLYGSGLVNAEAATR

SEQ ID NO: 61629 - protein, 269 aa, Unidentified
AQSVPWGISRVQAPAAHNRRLTGSGVKVAVLDTGISTHPDLNIRGGASFVPGEPSTQDGEGHGTHVAGTIAALNNGIGVLGVAPSAELYAVKVLGASGSGSVSSIAQGLEWAGNNDMHVANLSLGSESPSATLEQAVNSATSRGVLVVAASGNSGADSISYPARYANAMAVGATDQNNNRADFSQYGAGLDIVAPGVNVQSTYPGSTYASLNGTSMATPHVAGAAALVKQKNPSWSNVRIRDRLKNTATSLGSTNLYGSGLVNAEAATR

SEQ ID NO: 61630 - protein, 269 aa, Unidentified
AQSVPWGISRVQAPAAHNRGLRGGGVKVAVLDTGISTHPDLNIRGGASFVPGEPSTQDGNGHGTHVAGTIAALNNNIGVLGVAPSAELYAVKVLGASGGGAISSIAQGLEWAGLNGMHVANLSLGAPSPSATLEQAVNSATSRGVLVVAASGNSGAGSISYPARYANAMAVGATDQNNNRASFSQYGAGLDIVAPGVNVQSTYPGSTYASLNGTSMATPHVAGAAVLVKQKNPSWSNVRIRNHLKNTATSLGSTNLYGSGLVNAEAATR

SEQ ID NO: 61631 - protein, 269 aa, Unidentified
AQSVPWGISRVQAPAAHNRGLTGSGVKVAVLDTGISTHPDLNIRGGASFVPGEPSTQDGNGHGTHVAGTIAALNNSIGVLGVAPSAELYAVKVLGASGGGAISSIAQGLEWAGNNGMHVANLSLGSPSPSATLEQAVNSATSRGVLVVAASGNSGADSISYPARYANAMAVGATDQNNNRASFSQYGAGLDIVAPGVNIQSTYPGSTYASLNGTSMATPHVAGAAVLVKHKNPSWSNVRIRDHLKKTATSLGSTNLYGSGLVNAEAATR

SEQ ID NO: 61632 - protein, 269 aa, Unidentified
AQSVPWGISRVQAPAAHNRRLTGRGVKVAVLDTGISTHPDLNIRGGASFVPGEPSTQDGEGHGTHVAGTIAALNNDIGVLGVAPSAELYAVKVLGASGSGSVSSIAQGLEWAGNNDMHVANLSLGSESPSATLEQAVNSATSRGVLVVAASGNSGADSISYPARYANAMAVGATDQNNNRADFSQYGAGLDIVAPGVNVQSTYPGSTYASLNGTSMATPHVAGAAALVKQKNPSWSNVQIRDRLKNTATSLGSTNLYGSGLVNAEAATR

SEQ ID NO: 61633 - protein, 269 aa, Unidentified
AQSVPWGISRVQAPAAHNRGLAGSGVKVAVLDTGISTHPDLNIRGGASFVPGEPSTQDGNGHGTHVAGTIAALNNSIGVLGVAPSAELYAVKVLGASGGGAISSIAQGLEWAGNNGMHVANLSLGSPSPSATLEQAVNSATSRGVLVVAASGNSGADSISYPARYANAMAVGATDQNNNRAEFSQYGAGLDIVAPGVNVQSTYPGSTYASLNGTSMATPHVAGAAVLVKQKNPSWSNVVIREHLKNTATSLGSTNLYGSGLVNATAATR

SEQ ID NO: 61634 - protein, 269 aa, Unidentified
AQSVPWGISRVQAPAAHRRRLTGRGVKVAVLDTGISTHPDLNIRGGASFVPGEPSTQDGNGHGTHVAGTIAALDNSIGVLGVAPSAELYAVKVLGASGAGSVSSIAQGLEWAGNNGMHVANLSLGSPSPSATLEQAVNSATSRGVLVVAASGNSGAGSISYPARYANAMAVGATDQDNNRASFSQYGAGLDLVAPGVNVQSTYPQSAYASLNGTSMATPHVAGAAALVKQKNPSWSNVQIRNRLKNTATSLGSTNLYGSGLVNAEAATR

SEQ ID NO: 61635 - protein, 269 aa, Unidentified
AQSVPWGISRVQAPAAHRRRLTGSGVKVAVLDTGISTHPDLDITGGASFVPGEPSTQDGNGHGTHVAGTIAALDNSIGVLGVAPSAELYAVKVLGASGGGAISSIAQGLEWAGNNGMHVANLSLGSPSPSATLEQAVNSATSRGVLVVAASGNSGAGSISYPARYANAMAVGATDQNNNRASFSQYGAGLDIVAPGVNVQSTYPGSTYASLNGTSMATPHVAGAAVLVKQKNPSWSNVRIRNHLKNTATSLGSTNLYGSGLVNAEAATR

SEQ ID NO: 61636 - protein, 269 aa, Unidentified
AQSVPWGISRVQAPAAHNRGLAGSGVKVAVLDTGISTHPDLNIRGGASFVPGEPSTQDGNGHGTHVAGTIAALNNSIGVLGVAPSAELYAVKVLGASGGGAISSIAQGLEWAGNNGMHVANLSLGSPSPSATLEQAVNSATSRGVLVVAASGNSGADSISYPARYANAMAVGATDQNNNRAEFSQYGAGLDIVAPGVNVQSTYPGSTYASLNGTSMATPHVAGAATLVKQKNPSWSNVVIREHLKNTATSLGSTNLYGSGLVNATAATR

SEQ ID NO: 61637 - protein, 269 aa, Unidentified
AQSVPWGISRVQAPAAHNRRLTGRGVKVAVLDTGISTHPDLNIRGGASFVPGEPSTQDGEGHGTHVAGTIAALNNDIGVLGVAPSAELYAVKVLGASGSGSVSSIAQGLEWAGNNSMHVANLSLGSESPSATLEQAVNSATSRGVLVVAASGNSGADSISYPARYANAMAVGATDQNNNRADFSQYGAGLDIVAPGVNVQSTYPGSTYASLNGTSMATPHVAGAAALVKQKNPSWSNVQIRDRLKNTATSLGSTNLYGSGLVNAEAATR

SEQ ID NO: 61638 - protein, 269 aa, Unidentified
AQSVPWGISRVQAPAAHNRGLAGSGVKVAVLDTGISTHPDLNIRGGASFVPGEPSTQDGNGHGTHVAGTIAALNNSIGVLGVAPSAELYAVKVLGASGGGAISSIAQGLEWAGNNGMHVANLSLGSPSPSATLEQAVNSATSRGVLVVAASGNSGADSISYPARYANAMAVGATDQNNNRADFSQYGAGLDIVAPGVNVQSTYPGSTYASLNGTSMATPHVAGAALLVKQKNPSWSNVRIRHHLKNTATSLGSTNLYGSGLVNAHAATR

SEQ ID NO: 61639 - protein, 269 aa, Unidentified
AQSVPWGISRVQAPAAHNRGLTGSGVKVAVLDTGISTHPDLDIRGGASFVPGEPSTQDGNGHGTHAAGTIAALNNSIGVLGVAPSAELYAVKVLGASGSGAISSIAQGLEWAGNNGMHVANLSLGSPSPSATLEQAVNSATSRGVLVVAASGNSGADSISYPARYANAMAVGATDQNNNRASFSQYGAGLDIVAPGVNVQSTYPGSTYASLNGTSMATPHVAGAAVLVKHKNPSWSNVRIRDHLKKTATSLGSTNLYGSGLVNAEAATR

SEQ ID NO: 61640 - protein, 269 aa, Unidentified
AQSVPWGISRVQAPAAHNRGLTGSGVKVAVLDTGISTHPDLNIRGGASFVPGEPSTQDGNGHGTHAAGTIAALNNSIGVLGVAPSAELYAVKVLGASGSGAISSIAQGLEWAGNNGMHVANLSLGSPSPSATLEQAVNSATSRGVLVVAASGNSGADSISYPARYANAMAVGATDQNNNRASFSQYGAGLDIVAPGVNVQSTYPGPTYASLNGTSMATPHVAGAAVLVKHKNPSWSNVRIRDHLKKTATSLGSTNLYGSGLVNAEAATR

SEQ ID NO: 61641 - protein, 269 aa, Unidentified
AQSVPWGISRVQAPAAHNRGLTGSGVKVAVLDTGISTHPDLRITGGASFVPGEPSTQDGNGHGTHVAGTIAALDNRIGVLGVAPSAELYAVKVLGASGGGAISSIAQGLEWAGNNGMHVANLSLGSPSPSATLEQAVNSATSRGVLVVAASGNSGAGSISYPARYANAMAVGATDQNNNRASFSQYGAGLDIVAPGVNVQSTYPGSTYASLNGTSMATPHVAGAAVLVKQKNPSWSNVRIRNHLKNTATSLGSTNLYGSGLVRAEAATR

SEQ ID NO: 61642 - protein, 269 aa, Unidentified
AQSVPWGISRVQAPAAHNRGLAGSGVKVAVLDTGISTHPDLNIRGGASFVPGEPSTQDGNGHGTHVAGTIAALNNSIGVLGVAPSAELYAVKVLGASGGGAISSIAQGLEWAGNNGMHVANLSLGSPSPSATLEQAVNSATSRGVLVVAASGNSGADSISYPARYANAMAVGATDQNNNRAEFSQYGAGLDIVAPGVNVQSTYPGSTYASLNGTSMATPHVAGAASLVKQKNPSWSNVVIRDHLKNTATSLGSTNLYGSGLVNAHAATR

SEQ ID NO: 61643 - protein, 269 aa, Unidentified
AQSVPWGISRVQAPAAHNRRLWGSGVKVAVLDTGISTHPDLNIRGGASFVPGEPSTQDGNGHGTHVAGTIAALNNSIGVLGVAPSAELYAVKVLGASGGGAISSIAQGLEWAGANGMHVANLSLGSPSPSATLEQAVNSATSRGVLVVAASGNSGAGSISYPARYANAMAVGATDQDNNRASFSQYGAGLDLVAPGVNVQSTYPGSTYASLNGTSMATPHVAGAAVLVKQKNPSWSNVRIRNHLKNTATSLGSTNLYGSGLVNAEAATR

SEQ ID NO: 61644 - protein, 269 aa, Unidentified
AQSVPWGISRVQAPAAHNRGLQGSGVKVAVLDTGISTHPDLNIRGGASFVPGEPSTQDGNGHGTHVAGTIAALNNSIGVLGVAPSAELYAVKVLGASGGGAISSIAQGLEWAGNNGMHVANLSLGSPSPSATLEQAVNSATSRGVLVVAASGNSGADSISYPARYANAMAVGATDQNNNRAEFSQYGAGLDIVAPGVNVQSTYPGSTYASLNGTSMATPHVAGAATLVKQKNPSWSNVVIRDHLKNTATSLGSTNLYGSGLVNAFAATR

SEQ ID NO: 61645 - protein, 269 aa, Unidentified
AQSVPWGISRVQAPAAHNRGLAGSGVKVAVLDTGISTHPDLNIRGGASFVPGEPSTQDGNGHGTHVAGTIAALNNSIGVLGVAPSAELYAVKVLGASGSGAISSIAQGLEWAGNNGMHVANLSLGSPSPSATLEQAVNSATSRGVLVVAASGNSGADSISYPARYANAMAVGATDQNNNRADFSQYGAGLDIVAPGVNVQSTYPGSTYASDNGTSMATPHVAGAAVLVKQKNPSWSNVRIRDHLKNTATSLGSTNLYGSGLVNAFAATR

SEQ ID NO: 61646 - protein, 269 aa, Unidentified
AQSVPWGISRVQAPAAHNRGLAGGGVKVAVLDTGISTHPDLNIRGGASFVPGEPSTQDGNGHGTHVAGAIAALNNSIGVLGVAPSAELYAVKVLSASGQGAISSIAQGLEWAGNNGMHVANLSLGAPSPSATLEQAVNSATSRGVLVVAASGNSGAGSISYPARYANAMAVGATDQNNNRASFSQYGAGLDIVAPGVNVQSTYPGSTYASLNGTSMATPHVAGAAVLVKQKNPSWSNVRIRNHLKNTATSLGSTNLYGSGLVNAEAATR

SEQ ID NO: 61647 - protein, 269 aa, Unidentified
AQSVPWGISRVQAPAAHNRGLAGGGVKVAVLDTGISTHPDLNIRGGASFVPGEPSTQDGNGHGTHVAGTIAALNNNIGVLGVAPSAELYAVKVLGASGNGAISSIAQGLEWAGNNGMHVANLSLGAPSPSATLEQAVNSATSRGVLVVAASGNSGAGSISYPARYANAMAVGATDQNNNRASFSQYGAGLDIVAPGVNVQSTYPGSTYASQNGTSMATPHVAGAAVLVKQKNPSWSNVRIRNHLKNTATSLGSTNLYGSGLVNAEAATR

SEQ ID NO: 61648 - protein, 269 aa, Unidentified
AQSVPWGISRVQAPAAHNRGLAGSGVKVAVLDTGISTHPDLNIRGGASFVPGEPSTQDGNGHGTHVAGTIAALNNSIGVLGVAPSAELYAVKVLGASGGGAISSIAQGLEWAGNNGMHVANLSLGSPSPSATLEQAVNSATSRGVLVVAASGNSGADSISYPARYANAMAVGATDQNNNRADFSQYGAGLDIVAPGVNVQSTYPGSTYASLNGTSMATPHVAGAATLVKQKNPSWSNVVIREHLKNTATSLGSTNLYGSGLVNALAATR

SEQ ID NO: 61649 - protein, 269 aa, Unidentified
AQSVPWGISRVQAPASHNRGLTGFGVKVAVLDSGISTHPDLNIRGGASFVPGEPSTQDGNGHGTHVAGTIAALNNSIGVLGVAPSAELYAVKVLGASGGGAISSIAQGLEWAGLNGMHVANLSLGNPSPSATLEQAVNSATSRGVLVVAASGNSGAGSISYPARYANAMAVGATDQNNNRASFSQYGAGLDIVAPGVNVQSTAPGSTYASLNGTSMATPHVAGAAVLVKQKNPSWSNVQIRNHLKNTATSLGSTNLYGSGLVNAEAATR

SEQ ID NO: 61650 - protein, 269 aa, Unidentified
AQSVPWGISRVQAPAAHNRGLTGSGVKVAVLDTGISTHPDLNIRGGASFVPGEPSTQDGNGHGTHAAGTIAALNNSIGVLGVAPSAELYAVKVLGASGSGAISSIAQGLEWAGNNGMHVANLSLGSPSPSATLEQAVNSATSRGVLVVAASGNSGADSISYPARYANAMAVGATDQNNNRASFSQYGAGLDIVAPGVNVQSTYPGCTYASLNGTSMATPHVAGAAVLVKHKNPSWSNVRIRDHLKKTATSLGSTNLYGSGLVNAEAATR

SEQ ID NO: 61651 - protein, 269 aa, Unidentified
AQSVPWGISRVQAPAAHNRGLAGSGVKVAVLDTGISTHPDLNIRGGASFVPGEPSTQDGNGHGTHVAGTIAALNNSIGVLGVAPSAELYAVKVLGASGGGAISSIAQGLEWAGNNGMHVANLSLGSPSPSATLEQAVNSATSRGVLVVAASGNSGADSISYPARYANAMAVGATDQNNNRADFSQYGAGLDIVAPGVNVQSTYPGSTYASLNGTSMATPHVAGAALLVKQKNPSWSNVRIRDHLKNTATSLGSTNLYGSGLVNALAATR

SEQ ID NO: 61652 - protein, 269 aa, Unidentified
AQSVPWGISRVQAPAAHNRGLAGSGVKVAVLDTGISTHPDLNIRGGASFVPGEPSTQDGNGHGTHVAGTIAALNNSIGVLGVAPSAELYAVKVLGASGGGAISSIAQGLEWAGNNGMHVANLSLGSPSPSATLEQAVNSATSRGVLVVAASGNSGADSISYPARYANAMAVGATDQNNNRADFSQYGAGLDIVAPGVNVQSTYPGSTYASLNGTSMATPHVAGAAVLVKQKNPSWSNVTIREHLKNTATSLGSTNLYGSGLVNAHAATR

SEQ ID NO: 61653 - protein, 269 aa, Unidentified
AQSVPWGISRVQAPAAHNRGLTGSGVKVAVLDTGISTHPDLNIRGGASFVPGEPSTQDGNGHGTHVAGTIAALNNSIGVLGVAPSAELYAVKVLGASGGGSIASIAQGLEWAGNNGMHVANLSLGNESPSATLEQAVNSATSRGVLVVAASGNSGAGSISYPARYANAMAVGATDQNNNRADFSQYGAGLDIVAPGVNVQSTYPGSTYASLNGTSMATPHVAGAAVLVKQKNPSWSNVRIRDRLKNTATSLGSTNLYGSGLVNAEAATR

SEQ ID NO: 61654 - protein, 269 aa, Unidentified
AQSVPWGISRVQAPAAHRRRLTGRGVKVAVLDTGISTHPDLNIRGGASFVPGEPSTQDGNGHGTHAAGTIAALDNSIGVLGVAPSAELYAVKVLGASGAGSVSSIAQGLEWAGANGMHVANLSLGSPSPSATLEQAVNSATSRGVLVVAASGNSGAGSISYPARYANAMAVGATDQNNNRASFSQYGAGLDIVAPGVNVQSTYPGSAYFSLNGTSMATPHVAGAAALVKQKNPSWSNVQIRNRLKNTATSLGSTNLYGSGLVNAEAATR

SEQ ID NO: 61655 - protein, 269 aa, Unidentified
AQSVPWGISRVQAPAAHNRGLAGSGVKVAVLDTGISTHPDLNIRGGASFVPGEPSTQDGNGHGTHVAGTIAALNNSIGVLGVAPSAELYAVKVLGASGGGAISSIAQGLEWAGNNGMHVANLSLGSPSPSATLEQAVNSATSRGVLVVAASGNSGADSISYPARYANAMAVGATDQNNNRAEFSQYGAGLDIVAPGVNVQSTYPGSTYASLNGTSMATPHVAGAASLVKQKNPSWSNVTIREHLKNTATSLGSTNLYGSGLVNAHAATR

SEQ ID NO: 61656 - protein, 269 aa, Unidentified
AQSVPWGISRVQAPAAHNRGLTGFGVKVAVLDSGISTHPDLNIRGGASFVPGEPSTQDGNGHGTHVAGTIAALNNSIGVLGVAPSAELYAVKVLGASGGGAISSVAQGLEWAGANGMHVANLSLGSPSPSATLEQAVNSATSRGVLVVAASGNSGAGSISYPARYANAMAVGATDQNNNRASFSQYGAGLDIVAPGVNVQSTVPGSAYASLNGTSMATPHVAGAAVLVKQKNPSWSNVQIRNHLKNTATSLGSTNLYGSGLVNAEAATR

SEQ ID NO: 61657 - protein, 269 aa, Unidentified
AQSVPWGISRVQAPAAHNRGLTGSGVKVAVLDTGISTHPDLNIRGGASFVPGEPSTQDGNGHGTHVAGTIAALDNSIGVLGVAPSAELYAVKVLGASGSGAISSIAQGLEWAGNNGMHVANLSLGSPSPSATLEQAVNSATSRGILVVAASGNSGADSISYPARYANAMAVGATDQNNNRASFSQYGAGLDIVAPGVNVQSTYPGSTYASLNGTSMATPHVAGAAVLVKHKNPSWSNVRIRSHLRNTATSLGSTNLYGSGLVNAEAATR

SEQ ID NO: 61658 - protein, 269 aa, Unidentified
AQTIPWGISRVQAPAAHNRGLTGSGVKVAVLDTGISTHPDLNIRGGASFVPGEPSTQDGNGHGTHVAGTIAALNNSIGVLGVAPSAELYAVKVLGADGEGAISSIAQGLEWAGNNGMHVANLSLGSPSPSATLEQAVNSATSRGVLVVAASGNSGASSLSYPARYANAMAVGATDQNNNRASFSQYGAGLDIVAPGVNIQSTYPGSTYASLNGTSMATPHVAGAAALVKEKNPSWSNVQIRNHLKNTATSLGSTNLYGSGLVNAEAATR

SEQ ID NO: 61659 - protein, 269 aa, Unidentified
AQSVPWGISRVQAPAAHNRGLAGSGVKVAVLDTGISTHPDLNIRGGASFVPGEPSTQDGNGHGTHVAGTIAALNNSIGVLGVAPSAELYAVKVLGASGGGAISSIAQGLEWAGNNGMHVANLSLGSPSPSATLEQAVNSATSRGVLVVAASGNSGADSISYPARYANAMAVGATDQNNNRADFSQYGAGLDIVAPGVNVQSTYPGSTYASLNGTSMATPHVAGAATLVKQKNPSWSNVTIRDHLKNTATSLGSTNLYGSGLVNAHAATR

SEQ ID NO: 61660 - protein, 269 aa, Unidentified
AQSVPWGISRVQAPAAHRRGLWGRGVKVAVLDTGISTHPDLNIRGGASFVPGEPSTQDGNGHGTHVAGTIAALDNSIGVLGVAPSAELYAVKVLGASGAGSVSSIAQGLEWAGNNGMHVANLSLGSPSPSATLEQAVNSATSRGVLVVAASGNSGAGSISYPARYANAMAVGATDQDNNRASFSQYGAGLDLVAPGVNVQSTYPQSAYASLNGTSMATPHVAGAAALVKQKNPSWSNVQIRNRLKNTATSLGSTNLYGSGLVNAEAATR

SEQ ID NO: 61661 - protein, 269 aa, Unidentified
AQSVPWGISRVQAPAAHNRGLTGRGVKVAVLDTGISTHPDLNIRGGASFVPGEPSTQDGNGHGTHVAGTIAALDNNIGVLGVAPRAELYAVKVLGASGSGSVSSIAQGLEWAGNNRMHVANLSLGLQAPSATLEQAVNSATSRGVLVVAASGNSGAGSISYPARYANAMAVGATDQNNNRASFSQYGAGLDIVAPGVNVLSTYPGSAYASLNGTSMATPHVAGAAALVKQKNPSWSNVQIRNHLKNTATSLGSTNLYGSGLVNAEAATR

SEQ ID NO: 61662 - protein, 269 aa, Unidentified
AQSVPWGISRVQAPAAHNRGLAGGGVKVAVLDTGISTHPDLNIRGGASFVPGEPSTQDGNGHGTHVAGTIAALNNNIGVLGVAPSAELYAVKVLSASGNGAISSIAGGLEWAGNNGMHVANLSLGAPSPSATLEQAVNSATSRGVLVVAASGNSGAGSISYPARYANAMAVGATDQNNNRASFSQYGAGLDIVAPGVNVQSTYPGSTYASLNGTSMATPHVAGAAVLVKQKNPSWSNVQIRNHLKNTATSLGSTNLYGSGLVNAEAATR

SEQ ID NO: 61663 - protein, 269 aa, Unidentified
AQSVPWGISRVQAPAAHNRGLAGSGVKVAVLDTGISTHPDLNIRGGASFVPGEPSTQDGEGHGTHVAGTIAALNNSIGVLGVAPSAELYAVKVLGASGSGAISSIAQGLEWAGNNRMHVANLSLGSPSPSATLEQAVNSATSRGVLVVAASGNSGADSISYPARYANAMAVGATDQNNNRADFSQYGAGLDIVAPGVNVQSTYPGSTYASLNGTSMATPHVAGAAVLVKQKNPSWSNVRIRDHLKNTATSLGSTNLYGSGLVNAEAATR

SEQ ID NO: 61664 - protein, 269 aa, Unidentified
AQSVPWGISRVQAPAAHNRGLRGGGVKVAVLDTGISTHPDLNIRGGASFVPGEPSTQDGNGHGTHVAGTIAALNNSIGVLGVAPSAELYAVKVLAASGQGAISSIAQGLEWAGLNGMHVANLSLGAPSPSATLEQAVNSATSRGVLVVAASGNSGAGSISYPARYANAMAVGATDQNNNRASFSQYGAGLDIVAPGVNVQSTYPGSTYASLNGTSMATPHVAGAAVLVKQKNPSWSNVRIRNHLKNTATSLGSTNLYGSGLVNAEAATR

SEQ ID NO: 61665 - protein, 269 aa, Unidentified
AQSVPWGISRVQAPAAHRRGLTGRGVKVAVLDTGISTHPDLNIRGGASFVPGEPSTQDGNGHGTHVAGTIAALDNNIGVLGVAPRAELYAVKVLGASGSGSVSSIAQGLEWAGNNRMHVANLSLGLQAPSATLEQAVNSATSRGVLVVAASGNSGAGSISYPARYANAMAVGATDQNNNRASFSQYGAGLDIVAPGVNVQSTYPGSTYASLNGTSMATPHVAGAAALVKQKNPSWSNVQIRNRLKNTATSLGSTNLYGSGLVNAEAATR

SEQ ID NO: 61666 - protein, 269 aa, Unidentified
AQSVPWGISRVQAPAAHNRGLTGSGVKVAVLDTGISTHPDLNIRGGASFVPGESSTQDGNGHGTHNAGTIAALNNSIGVLGVAPSAELYAVKVLGASGSGAISSIAQGLEWAGNNGMHVANLSLGSPSPSATLEQAVNSATSRGVLVVAASGNSGADSISYPARYANAMAVGATDQNNNRASFSQYGAGLDIVAPGVNVQSTYPGSTYASLNGTSMATPHVAGAAVLVKHKNPSWSNVRIRDHLKLTATSLGSTNLYGSGLVNAEAATR

SEQ ID NO: 61667 - protein, 269 aa, Unidentified
AQSVPWGISRVQAPAAHNRGLAGSGVKVAVLDTGISTHPDLNIRGGASFVPGEPSTQDGNGHGTHVAGTIAALNNSIGVLGVAPSAELYAVKVLGASGGGAISSIAQGLEWAGNNGMHVANLSLGSPSPSATLEQAVNSATSRGVLVVAASGNSGADSISYPARYANAMAVGATDQNNNRAEFSQYGAGLDIVAPGVNVQSTYPGSTYASLNGTSMATPHVAGAALLVKQKNPSWSNVRIRDHLKNTATSLGSTNLYGSGLVNAHAATR

SEQ ID NO: 61668 - protein, 269 aa, Unidentified
AQSVPWGISRVQAPAAHNRGLQGSGVKVAVLDTGISTHPDLNIRGGASFVPGEPSTQDGNGHGTHVAGTIAALNNSIGVLGVAPSAELYAVKVLGASGGGAISSIAQGLEWAGNNGMHVANLSLGSPSPSATLEQAVNSATSRGVLVVAASGNSGADSISYPARYANAMAVGATDQNNNRAEFSQYGAGLDIVAPGVNVQSTYPGSTYASLNGTSMATPHVAGAALLVKQKNPSWSNVRIREHLKNTATSLGSTNLYGSGLVNAHAATR

SEQ ID NO: 61669 - protein, 269 aa, Unidentified
AQSVPWGISRVQAPAAHNRGLTGSGVKVAVLDTGISTHPDLNIRGGASFVPGEPSTQDGNGHGTHVAGTIAALNNSIGVLGVAPSAELYAVKVLGLSGSAAISSIAQGLEWAGNNGMHVANLSLGSPSPSATLEQAVNSATSRGVLVVAASGNSGADSISYPARYANAMAVGATDQNNNRASFSQYGAGLDIVAPGVNVQSTYPGGTYASLNGTSMATPHVAGAAVLVKHKNPSWSNVQIRDHLKKTATSLGSTNLYGSGLVNAEAATR

SEQ ID NO: 61670 - protein, 269 aa, Unidentified
AQSVPWGISRVQAPAAHNRGLAGSGVKVAVLDTGISTHPDLNIRGGASFVPGEPSTQDGNGHGTHVAGTIAALNNSIGVLGVAPSAELYAVKVLGASGGGAISSIAQGLEWAGNNGMHVANLSLGSPSPSATLEQAVNSATSRGVLVVAASGNSGADSISYPARYANAMAVGATDQNNNRADFSQYGAGLDIVAPGVNVQSTYPGSTYASLNGTSSATPHVAGAAVLVKQKNPSWSNVRIRDHLKNTATSLGSTNLYGSGLVNVFAATR

SEQ ID NO: 61671 - protein, 269 aa, Synthetic construct
AQSVPWGISRVQAPAAHNRGLTGSGVKVAVLDTGISTHPDLNIRGGEIFDGLEPSTQDGNGHGTHVAGTIAALNNSIGVLGVAPSAELYAVKVLGADGEGAISSIAQGLEWAGNNGMHVANLSLGSPSPSATLEQAVNSATSRGVLVVAASGNSGASSISYPARYANAMAVGATDQNNNRASFSQYGAGLDIVAPGVNVQSTYPGSTYASLNGTSMATPHVAGAAALVKQKNPSWSNVQIRNHLKNTATSLGSTNLYGSGLVNAEAATR

SEQ ID NO: 61672 - protein, 269 aa, Unidentified
AQSVPWGISRVQAPAAHNRGLTGSGVKVAVLDTGISTHEDLNVRGGVSFVPGETSYQDGNGHGTHVAGTIAALNNSIGVLGVAPSAELYAVKVLGASGRGSVSSIAQGLEWAGQNGMHVANLSLGSDEPSATLEQAVNSATSRGVLVVAASGNSGAGSISYPARYANAMAVGATDQNNNRASFSQYGAGLDIVAPGVNVQSTYPGSTYASLNGTSMATPHVAGAAALVKQKNPSWSNVQIRDHLKNTATSLGSTNLYGSGLVNAEAATR

SEQ ID NO: 61673 - protein, 269 aa, Unidentified
AQSVPWGISRVQAPAAHNRGLAGSGVKVAVLDTGISTHPDLNIRGGASFVPGEPSTQDGNGHGTHVAGTIAALDNNIGVLGVAPSAELYAVKVLSASGQGAISSIAGGLEWAGNNGMHVANLSLGSPSPSATLEQAVNSATSRGVLVVAASGNSGAGSISYPARYANAMAVGATDQNNNRASFSQYGAGLDIVAPGVNVQSTYPGSTYASLNGTSMATPHVAGAAVLVKQKNPSWSNVRIRNHLKNTATSLGSTNLYGSGLVNAEAATR

SEQ ID NO: 61674 - protein, 269 aa, Unidentified
AQSVPWGISRVQAPAAHNRGLAGGGVKVAVLDTGISTHPDLNIRGGASFVPGEPSTQDGNGHGTHVAGTIAALDNNIGVLGVAPSAELYAVKVLGASGQGAISSIAQGLEWAGNNGMHVANLSLGAPSPSATLEQAVNSATSRGVLVVAASGNSGAGSISYPARYANAMAVGATDQNNNRASFSQYGAGLDIVAPGVNVQSTYPGSTYASLNGTSMATPHVAGAAVLVKQKNPSWSNVRIRNHLKNTATSLGSTNLYGSGLVNAEAATR

SEQ ID NO: 61675 - protein, 269 aa, Unidentified
AQSVPWGISRVQAPAAHNRGLQGSGVKVAVLDTGISTHPDLNIRGGASFVPGEPSTQDGNGHGTHVAGTIAALNNSIGVLGVAPSAELYAVKVLGASGGGAISSIAQGLEWAGNNGMHVANLSLGSPSPSATLEQAVNSATSRGVLVVAASGNSGADSISYPARYANAMAVGATDQNNNRAEFSQYGAGLDIVAPGVNVQSTYPGSTYASLNGTSMATPHVAGAALLVKQKNPSWSNVTIRHHLKNTATSLGSTNLYGSGLVNAFAATR

SEQ ID NO: 61676 - protein, 269 aa, Unidentified
AQSVPWGISRVQAPAAHNRGLAGGGVKVAVLDTGISTHPDLNIRGGASFVPGEPSTQDGNGHGTHVAGTIAALDNSIGVLGVAPSAELYAVKVLAASGQGAISSIAQGLEWAGNNGMHVANLSLGAPSPSATLEQAVNSATSRGVLVVAASGNSGAGSISYPARYANAMAVGATDQNNNRASFSQYGAGLDIVAPGVNVQSTYPGSTYASLNGTSMATPHVAGAAVLVKQKNPSWSNVRIRNHLKNTATSLGSTNLYGSGLVNAEAATR

SEQ ID NO: 61677 - protein, 269 aa, Unidentified
AQSVPWGISRVQAPAAHNRGLAGSGVKVAVLDTGISTHPDLRIRGGASFVPGEPSTQDGNGHGTHVAGTIAALNNSIGVLGVAPSAELYAVKVLGASGSGAISSIAQGLEWAGNNGMHVANLSLGIPSPSATLEQAVNSATSRGVLVVAASGNSGADSISYPARYANAMAVGATDQNNNRADFSQYGAGLDIVAPGVNVQSTYPGSTYASLNGTSMATPHVAGAAVLVKQKNPSWSNVRIRDHLKNTATSLGSTNLYGSGLVNAEAATR

SEQ ID NO: 61678 - protein, 269 aa, Unidentified
AQSVPWGISRVQAPAAHNRGLTGSGVKVAVLDTGISTHPDLNIRGGASFVPGEPSTQDGNGHGTHAAGTIAALNNSIGVLGVAPSAELYAVKVLGASGSGAISSIAQGLEWAGNNGMHVANLSLGSPSPSATLEQAVNSATSRGVLVVAASGNSGADSISYPARYANAMAVGATDQNNNRASFSQYGAGLDIVAPGVNVQSTYPGSGYASLNGTSMATPHVAGAAVLVKHKNPSWSNVRIRDHLKKTATSLGSTNLYGSGLVNAEAATR

SEQ ID NO: 61679 - protein, 269 aa, Unidentified
AQSVPWGISRVQAPAAHRRGLTGSGVKVAVLDTGISTHPDLDITGGASFVPGEPSTQDGNGHGTHVAGTIAALDNRIGVLGVAPSAELYAVKVLGASGGGAISSIAQGLEWAGNNGMHVANLSLGSPSPSATLEQAVNSATSRGVLVVAASGNSGAGSISYPARYANAMAVGATDQNNNRASFSQYGAGLDIVAPGVNVQSTYPGSTYASLNGTSMATPHVAGAAVLVKQKNPSWSNVRIRNHLKNTATSLGSTNLYGSGLVNAEAATR

SEQ ID NO: 61680 - protein, 269 aa, Unidentified
AQSVPWGISRVQAPAAHNRRLTGRGVKVAVLDTGISTHPDLNIRGGASFVPGEPSTQDGEGHGTHVAGTIAALNNGIGVLGVAPSAELYAVKVLGASGSGSVSSIAQGLEWAGNNDMHVANLSLGSESPSATLEQAVNSATSRGVLVVAASGNSGAGSISYPARYANAMAVGATDQNNNRADFSQYGAGLDIVAPGVNVQSTYPGSTYASLNGTSMATPHVAGAAALVKQKNPSWSNVRIRDRLKNTATSLGSTNLYGSGLVNAEAATR

SEQ ID NO: 61681 - protein, 269 aa, Unidentified
AQSVPWGISRVQAPAAHNRGLQGSGVKVAVLDTGISTHPDLNIRGGASFVPGEPSTQDGNGHGTHVAGTIAALNNSIGVLGVAPSAELYAVKVLGASGGGAISSIAQGLEWAGNNGMHVANLSLGSPSPSATLEQAVNSATSRGVLVVAASGNSGADSISYPARYANAMAVGATDQNNNRAEFSQYGAGLDIVAPGVNVQSTYPGSTYASLNGTSMATPHVAGAASLVKQKNPSWSNVVIREHLKNTATSLGSTNLYGSGLVNAFAATR

SEQ ID NO: 61682 - protein, 269 aa, Unidentified
AQSVPWGISRVQAPAAHNRGLTGSGVKVAVLDTGISTHPDLNIRGGASFVPGEPSTQDGNGHGTHAAGTIAALNNSIGVLGVAPSAELYAVKVLGASGSGAISSIAQGLEWAGNNGMHVANLSLGSPSPSATLEQAVNSATSRGVLVVAASGNSGADSISYPARYANAMAVGATDQNNNRASFSQYGAGLDIVAPGVNVQSTYPGSTYASLNGTSMATPHVAGAAVLVKHKNPSWSNVRIRDHLKKTATRLGSTNLYGSGLVNAEAATR

SEQ ID NO: 61683 - protein, 269 aa, Unidentified
AQSVPWGISRVQAPAAHNRGLQGSGVKVAVLDTGISTHPDLNIRGGASFVPGEPSTQDGNGHGTHVAGTIAALNNSIGVLGVAPSAELYAVKVLGASGGGAISSIAQGLEWAGNNGMHVANLSLGSPSPSATLEQAVNSATSRGVLVVAASGNSGADSISYPARYANAMAVGATDQNNNRADFSQYGAGLDIVAPGVNVQSTYPGSTYASLNGTSMATPHVAGAAVLVKQKNPSWSNVVIREHLKNTATSLGSTNLYGSGLVNAFAATR

SEQ ID NO: 61684 - protein, 269 aa, Unidentified
AQSVPWGISRVQAPAAHNRGLQGSGVKVAVLDTGISTHPDLNIRGGASFVPGEPSTQDGNGHGTHVAGTIAALNNSIGVLGVAPSAELYAVKVLGASGGGAISSIAQGLEWAGNNGMHVANLSLGSPSPSATLEQAVNSATSRGVLVVAASGNSGADSISYPARYANAMAVGATDQNNNRAEFSQYGAGLDIVAPGVNVQSTYPGSTYASLNGTSMATPHVAGAALLVKQKNPSWSNVRIRDHLKNTATSLGSTNLYGSGLVNAHAATR

SEQ ID NO: 61685 - protein, 269 aa, Unidentified
AQSVPWGISRVQAPAAHNRGLQGSGVKVAVLDTGISTHPDLNIRGGASFVPGEPSTQDGNGHGTHVAGTIAALNNSIGVLGVAPSAELYAVKVLGASGGGAISSIAQGLEWAGNNGMHVANLSLGSPSPSATLEQAVNSATSRGVLVVAASGNSGADSISYPARYANAMAVGATDQNNNRAEFSQYGAGLDIVAPGVNVQSTYPGSTYASLNGTSMATPHVAGAALLVKQKNPSWSNVRIRHHLKNTATSLGSTNLYGSGLVNAHAATR

SEQ ID NO: 61686 - protein, 269 aa, Unidentified
AQSVPWGISRVQAPAAHNRGLTGRGVKVAVLDTGISTHPDLNIRGGASFVPGEPSTQDGNGHGTHVAGTIAALDNNIGVLGVAPRAELYAVKVLGASGSGSVSSIAQGLEWAGNNRMHVANLSLGLQAPSATLEQAVNSATSRGVLVVAASGNSGAGSISYPARYANAMAVGATDQNNNRASFSQYGAGLDIVAPGVNVLSTYPGSTYASKNGTSMATPHVAGAAALVKQKNPSWSNVQIRNHLKNTATSLGSTNLYGSGLVNAEAATR

SEQ ID NO: 61687 - protein, 269 aa, Unidentified
AQSVPWGISRVQAPAAHNRGLQGSGVKVAVLDTGISTHPDLNIRGGASFVPGEPSTQDGNGHGTHVAGTIAALNNSIGVLGVAPSAELYAVKVLGASGGGAISSIAQGLEWAGNNGMHVANLSLGSPSPSATLEQAVNSATSRGVLVVAASGNSGADSISYPARYANAMAVGATDQNNNRADFSQYGAGLDIVAPGVNVQSTYPGSTYASLNGTSMATPHVAGAATLVKQKNPSWSNVRIRHHLKNTATSLGSTNLYGSGLVNALAATR

SEQ ID NO: 61688 - protein, 269 aa, Unidentified
AQSVPWGISRVQAPAAHRRRLTGRGVKVAVLDTGISTHPDLNIRGGASFVPGEPSTQDGNGHGTHVAGTIAALDNSIGVLGVAPSAELYAVKVLGASGAGSVSSIAQGLEWAGNNGMHVANLSLGSPSPSATLEQAVNSATSRGVLVVAASGNSGAGSISYPARYANAMAVGATDQDNNRASFSQYGAGLDIVAPGVNVQSTYPQSAYFSLNGTSMATPHVAGAAALVKQKNPSWSNVQIRNRLKNTATSLGSTNLYGSGLVNAEAATR

SEQ ID NO: 61689 - protein, 269 aa, Unidentified
AQSVPWGISRVQAPAAHRRGLTGRGVKVAVLDTGISTHPDLNIRGGASFVPGEPSTQDGNGHGTHVAGTIAALDNSIGVLGVAPSAELYAVKVLGASGAGSVSSIAQGLEWAGANGMHVANLSLGSPSPSATLEQAVNSATSRGVLVVAASGNSGAGSISYPARYANAMAVGATDQDNNRASFSQYGAGLDLVAPGVNVQSTYPGSAYFSLNGTSMATPHVAGAAALVKQKNPSWSNVQIRNRLKNTATSLGSTNLYGSGLVNAEAATR

SEQ ID NO: 61690 - protein, 269 aa, Unidentified
AQVVPWGISRVQAPAAHNRGLTGSGVKVAVLDTGISTHEDLNIRGGASFVPGEPSTQDGNGHGTHVAGTIAALDNGIGVLGVAPSAELYAVKVLGASGSGSVSSIAQGLEWAGNNRMHVANLSLGLQAPSATLEQAVNSATSRGVLVVAASGNSGAGSISYPARYANAMAVGATDQNNNRASFSQYGAGLDIVAPGVNVQSTYPGSTYKSLNGTSMATPHVAGAAALVKQKNPSWSNVQIRNHLKNTATSLGSTILYGSGLVNAEAATR

SEQ ID NO: 61691 - protein, 269 aa, Synthetic construct
AQTIPWGISRVQAPAAHNRGLTGSGVKVAVLDTGISTHPDLNIRGGASFVPGEPSTQDGNAHGTHVAGTIAALNNSIGVLGVAPSAELYAVKVLGADGRGAISSIAQGLEWAGNNGMHVANLSLGSPSPSATLEQAVNSATSRGVLVVAASGNSGASSISYPARYANAMAVGATDQNNNRASFSQYGAGLDIVAPGVNIQSTYPGSTYASDNGTSMATPHVAGAAALVKQKNPSWSNVQIRNHLKNTATSLGSTNLYGSGLVNAEAATR

SEQ ID NO: 61692 - protein, 269 aa, Unidentified
AQSVPWGISRVQAPAAHNRGLTGRGVKVAVLDTGISTHPDLNIRGGASFVPGEPSTQDGEGHGTHVAGTIAALNNGIGVLGVAPSAELYAVKVLGASGSGSVSSIAQGLEWAGNNSMHVANLSLGSESPSATLEQAVNSATSRGVLVVAASGNSGADSISYPARYANAMAVGATDQNNNRADFSQYGAGLDIVAPGVNVQSTYPGSTYASLNGTSMATPHVAGAAALVKQKNPSWSNVRIRDRLKNTATSLGSTNLYGSGLVNAEAATR

SEQ ID NO: 61693 - protein, 269 aa, Unidentified
AQSVPWGISRVQAPAAHNRGLTGRGVKVAVLDTGISTHPDLNIRGGASFVPGEPSTQDGNGHGTHVAGTIAALNNSIGVLGVAPSAELYAVKVLGASGGGAISSIAQGLEWAGNNGMHVANLSLGSPSPSATLEQAVNSATSRGVLVVAASGNSGEESISYPARYANAMAVGATDQNNNRADFSQYGAGLDIVAPGVNVQSTYPGSTYASLNGTSMATPHVAGAAVLVKQKNPSWSNVRIRDHLKNTATSLGSTNLYGSGLVNAEAATR

SEQ ID NO: 61694 - protein, 269 aa, Unidentified
AQSVPWGISRVQAPAAHNRGLQGSGVKVAVLDTGISTHPDLNIRGGASFVPGEPSTQDGNGHGTHVAGTIAALNNSIGVLGVAPSAELYAVKVLGASGGGAISSIAQGLEWAGNNGMHVANLSLGSPSPSATLEQAVNSATSRGVLVVAASGNSGADSISYPARYANAMAVGATDQNNNRAEFSQYGAGLDIVAPGVNVQSTYPGSTYASLNGTSMATPHVAGAASLVKQKNPSWSNVRIREHLKNTATSLGSTNLYGSGLVNAHAATR

SEQ ID NO: 61695 - protein, 269 aa, Unidentified
AQSVPWGISRVQAPAAHNRRLTGSGVKVAVLDTGISTHPDLNITGGASFVPGEPSTQDGNGHGTHVAGTIAALDNRIGVLGVAPSAELYAVKVLGASGGGAISSIAQGLEWAGNNGMHVANLSLGSPSPSATLEQAVNSATSRGVLVVAASGNSGAGSISYPARYANAMAVGATDQNNNRASFSQYGAGLDIVAPGVNVQSTYPGSTYASLNGTSMATPHVAGAAVLVKQKNPSWSNVRIRNRLKNTATSLGSTNLYGSGLVNAEAATR

SEQ ID NO: 61696 - protein, 269 aa, Unidentified
AQSVPWGISRVQAPAAHRRRLWGRGVKVAVLDTGISTHPDLNIRGGASFVPGEPSTQDGNGHGTHVAGTIAALDNSIGVLGVAPSAELYAVKVLGASGSGSVSSIAQGLEWAGANGMHVANLSLGSPSPSATLEQAVNSATSRGVLVVAASGNSGAGSISYPARYANAMAVGATDQNNNRASFSQYGAGLDLVAPGVNVQSTYPQSTYFSLNGTSMATPHVAGAAALVKQKNPSWSNVQIRNRLKNTATSLGSTNLYGSGLVNAEAATR

SEQ ID NO: 61697 - protein, 269 aa, Unidentified
AQSVPWGISRVQAPAAHNRGLAGRGVKVAVLDTGISTHPDLRIRGGASFVPGEPSTQDGNGHGTHVAGTIAALNNSIGVLGVAPSAELYAVKVLGASGSGSISSIAQGLEWAGNNRMHVANLSLGSPSPSATLEQAVNSATSRGVLVVAASGNSGADSISYPARYANAMAVGATDQNNNRADFSQYGAGLDIVAPGVNVQSTYPGSTYASDNGTSMATPHVAGAAVLVKQKNPSWSNVQIRDHLKNTATSLGSTNLYGSGLVNAEAATR

SEQ ID NO: 61698 - protein, 269 aa, Unidentified
AQSVPWGISRVQAPAAHRRGLTGRGVKVAVLDTGISTHPDLNITGGASFVPGEPSTQDGNGHGTHVAGTIAALDNSIGVLGVAPSAELYAVKVLGASGGGAISSIAQGLEWAGNNGMHVANLSLGSPSPSATLEQAVNSATSRGVLVVAASGNSGAGSISYPARYANAMAVGATDQNNNRASFSQYGAGLDIVAPGVNVQSTYPGSTYASLNGTSMATPHVAGAAVLVKQKNPSWSNVRIRNRLKNTATSLGSTNLYGSGLVNAEAATR

SEQ ID NO: 61699 - protein, 269 aa, Unidentified
AQSVPWGISRVQAPAAHNRGLAGGGVKVAVLDTGISTHPDLNIRGGASFVPGEPSTQDGNGHGTHVAGTIAALNNSIGVLGVAPSAELYAVKVLAASGQGAISSIAQGLEWAGNNGMHVANLSLGAPSPSATLEQAVNSATSRGVLVVAASGNSGAGSISYPARYANAMAVGATDQNNNRASFSQYGAGLDIVAPGVNVQSTYPGSTYASQNGTSMATPHVAGAAVLVKQKNPSWSNVRIRNHLKNTATSLGSTNLYGSGLVNAEAATR

SEQ ID NO: 61700 - protein, 269 aa, Unidentified
AQSVPWGISRVQAPAAHNRGLAGSGVKVAVLDTGISTHPDLNIRGGASFVPGEPSTQDGNGHGTHVAGTIAALNNSIGVLGVAPSAELYAVKVLGASGGGAISSIAQGLEWAGNNGMHVANLSLGSPSPSATLEQAVNSATSRGVLVVAASGNSGADSISYPARYANAMAVGATDQNNNRADFSQYGAGLDIVAPGVNVQSTYPGSTYASLNGTSMATPHVAGAALLVKQKNPSWSNVVIREHLKNTATSLGSTNLYGSGLVNATAATR

SEQ ID NO: 61701 - protein, 269 aa, Unidentified
AQSVPWGISRVQAPAAHNRGLAGRGVKVAVLDTGISTHPDLRIRGGASFVPGEPSTQDGNGHGTHVAGTIAALNNSIGVLGVAPSAELYAVKVLGASGSGSISSIAQGLEWAGNNGMHVANLSLGSPSPSATLEQAVNSATSRGVLVVAASGNSGADSISYPARYANAMAVGATDQNNNRADFSQYGAGLDIVAPGVNVQSTYPGSTYASDNGTSMATPHVAGAAVLVKQKNPSWSNVQIRDHLKNTATSLGSTNLYGSGLVNAFAATR

SEQ ID NO: 61702 - protein, 269 aa, Unidentified
AQSVPWGISRVQAPAAHNRGLTGTGVKVAVLDTGISTHPDLNIRGGASFVPGEPSTQDGNGHGTHAAGTIAALDNSIGVLGVAPSAELYAVKVLGASGSGAISSIAQGLEWAGNNGMHVANLSLGSPSPSATLEQAVNSATSRGVLVVAASGNSGADSISYPARYANAMAVGATDQNNNRASFSQYGAGLDIVAPGVNVQSTYPGSTYASLNGTSMATPHVAGAAVLVKHKNPSWSNVRIRNHLKKTATSLGSTNLYGSGLVNAEAATR

SEQ ID NO: 61703 - protein, 269 aa, Unidentified
AQSVPWGISRVQAPAAHNRGLTGSGVKVAVLDTGISTHPDLNIRGGASFVPGEPSTQDGNGHGTHAAGTIAALNNSIGVLGVAPSAELYAVKVLGASGSGAISSIAQGLEWAGNNGMHVANLSLGSPSPSATLEQAVNSATSRGVLVVAASGNSGADSISYPARYANAMAVGATDQNNNRASFSQYGAGLDIVAPGVNVQSTYSGSTYASLNGTSMATPHVAGAAVLVKHKNPSWSNVRIRDHLKKTATSLGSTNLYGSGLVNAEAATR

SEQ ID NO: 61704 - protein, 269 aa, Synthetic construct
AQSVPWGISRVQAPAAHNRGLTGSGVKVAVLDTGISTHPDLKELGSESFVPGEPSTQDGNGHGTHVAGTIAALNNSIGVLGVAPSAELYAVKVLGADGEGAISSIAQGLEWAGNNGMHVANLSLGSPSPSATLEQAVNSATSRGVLVVAASGNSGASSISYPARYANAMAVGATDQNNNRASFSQYGAGLDIVAPGVNVQSTYPGSTYASLNGTSMATPHVAGAAALVKQKNPSWSNVQIRNHLKNTATSLGSTNLYGSGLVNAEAATR

SEQ ID NO: 61705 - protein, 269 aa, Unidentified
AQSVPWGISRVQAPAAHNRGLAGGGVKVAVLDTGISTHPDLNIRGGASFVPGEPSTQDGNGHGTHVAGTIAALNNNIGVLGVAPSAELYAVKVLSASGNGALSSIAQGLEWAGNNGMHVANLSLGSPSPSATLEQAVNSATSRGVLVVAASGNSGAGSISYPARYANAMAVGATDQNNNRASFSQYGAGLDIVAPGVNVQSTYPGSTYASQNGTSMATPHVAGAAVLVKQKNPSWSNVRIRNHLKNTATSLGSTNLYGSGLVNAEAATR

SEQ ID NO: 61706 - protein, 269 aa, Unidentified
AQSVPWGISRVQAPAAHRRRLTGRGVKVAVLDTGISTHPDLNIRGGASFVPGEPSTQDGNGHGTHVAGTIAALDNSIGVLGVAPSAELYAVKVLGASGAGSVSSIAQGLEWAGNNGMHVANLSLGSPSPSATLEQAVNSATSRGVLVVAASGNSGAGSISYPARYANAEAVGATDQDNNRASFSQYGAGLDIVAPGVNVQSTYPQSTYFSLNGTSMATPHVAGAAALVKQKNPSWSNVQIRNRLKNTATSLGSTNLYGSGLVNAEAATR

SEQ ID NO: 61707 - protein, 269 aa, Unidentified
AQSVPWGISRVQAPAAHRRGLWGRGVKVAVLDTGISTHPDLNIRGGASFVPGEPSTQDGNGHGTHVAGTIAALDNSIGVLGVAPSAELYAVKVLGASGAGSVSSIAQGLEWAGANGMHVANLSLGSPSPSATLEQAVNSATSRGVLVVAASGNSGAGSISYPARYANAMAVGATDQDNNRASFSQYGAGLDLVAPGVNVQSTYPGSTYFSLNGTSMATPHVAGAAALVKQKNPSWSNVQIRNRLKNTATSLGSTNLYGSGLVNAEAATR

SEQ ID NO: 61708 - protein, 269 aa, Unidentified
AQSVPWGISRVQAPASHNRGLTGSGVKVAVLDSGISTHPDLNIRGGASFVPGEPSTQDGNGHGTHVAGTIAALNNSIGVLGVAPSAELYAVKVLGASGGGAISSIAQGLEWAGLNGMHVANLSLGSPSPSATLEQAVNSATSRGVLVVAASGNSGAGSISYPARYANAMAVGATDQNNNRASFSQYGAGLDIVAPGVNVQSTVPQSAYASLNGTSMATPHVAGAAVLVKQKNPSWSNVQIRNHLKNTATSLGSTNLYGSGLVNAEAATR

SEQ ID NO: 61709 - protein, 269 aa, Unidentified
AQSVPWGISRVQAPAAHNRGLAGGGVKVAVLDTGISTHPDLNIRGGASFVPGEPSTQDGNGHGTHVAGTIAALNNNIGVLGVAPSAELYAVKVLGASGQGAISSIAQGLEWAGNNGMHVANLSLGAPSPSATLEQAVNSATSRGVLVVAASGNSGAGSISYPARYANAMAVGATDQNNNRASFSQYGAGLDIVAPGVNVQSTYPGSTYASQNGTSMATPHVAGAAVLVKQKNPSWSNVRIRNHLKNTATSLGSTNLYGSGLVNAEAATR

SEQ ID NO: 61710 - protein, 269 aa, Unidentified
AQSVPWGISRVQAPAAHNRGLQGSGVKVAVLDTGISTHPDLNIRGGASFVPGEPSTQDGNGHGTHVAGTIAALNNSIGVLGVAPSAELYAVKVLGASGGGAISSIAQGLEWAGNNGMHVANLSLGSPSPSATLEQAVNSATSRGVLVVAASGNSGADSISYPARYANAMAVGATDQNNNRAEFSQYGAGLDIVAPGVNVQSTYPGSTYASLNGTSMATPHVAGAAVLVKQKNPSWSNVVIRHHLKNTATSLGSTNLYGSGLVNAFAATR

SEQ ID NO: 61711 - protein, 269 aa, Unidentified
AQSVPWGISRVQAPAAHNRGLTGSGVKVAVLDTGISTHPDLNIRGGASFVPGEPSTQDGNGHGTHAAGTIAALDNSIGVLGVAPSAELYAVKVLGASGSGAISSIAQGLEWAGNNGMHVANLSLGSPSPSATLEQAVNSATSRGVLVVAASGNSGADSISYPARYANAMAVGATDQNNNRASFSQYGAGLDIVAPGVNVQSTYIGSTYASLNGTSMATPHVAGAAVLVKHKNPSWSNVRIRNHLKNTATSLGSANLYGSGLVNAEAATR

SEQ ID NO: 61712 - protein, 269 aa, Unidentified
AQSVPWGISRVQAPAAHRRGLTGSGVKVAVLDTGISTHPDLRITGGASFVPGEPSTQDGNGHGTHVAGTIAALNNRIGVLGVAPSAELYAVKVLGASGGGAISSIAQGLEWAGNNGMHVANLSLGSPSPSATLEQAVNSATSRGVLVVAASGNSGAGSISYPARYANAMAVGATDQNNNRASFSQYGAGLDIVAPGVNVQSTYPGSTYASENGTSMATPHVAGAAVLVKQKNPSWSNVRIRNHLKNTATSLGSTNLYGSGLVNAEAATR

SEQ ID NO: 61713 - protein, 269 aa, Unidentified
AQSVPWGISRVQAPAAHNRGLAGGGVKVAVLDTGISTHPDLNIRGGASFVPGEPSTQDGNGHGTHVAGTIAALNNSIGVLGVAPSAELYAVKVLAASGGGAISSIAQGLEWAGNNGMHVANLSLGAPSPSATLEQAVNSATSRGVLVVAASGNSGAGSISYPARYANAMAVGATDQNNNRASFSQYGAGLDIVAPGVNVQSTYPGSTYASQNGTSMATPHVAGAAVLVKQKNPSWSNVRIRNHLKNTATSLGSTNLYGSGLVNAEAATR

SEQ ID NO: 61714 - protein, 269 aa, Unidentified
AQSVPWGISRVQAPAAHNRGLQGSGVKVAVLDTGISTHPDLNIRGGASFVPGEPSTQDGNGHGTHVAGTIAALNNSIGVLGVAPSAELYAVKVLGASGGGAISSIAQGLEWAGNNGMHVANLSLGSPSPSATLEQAVNSATSRGVLVVAASGNSGADSISYPARYANAMAVGATDQNNNRADFSQYGAGLDIVAPGVNVQSTYPGSTYASLNGTSMATPHVAGAAVLVKQKNPSWSNVVIRDHLKNTATSLGSTNLYGSGLVNAFAATR

SEQ ID NO: 61715 - protein, 269 aa, Unidentified
AQSVPWGISRVQAPAAHNRGLAGSGVKVAVLDTGISTHPDLNIRGGASFVPGEPSTQDGNGHGTHVAGTIAALNNSIGVLGVAPSAELYAVKVLGASGGGAISSIAQGLEWAGLNGMHVANLSLGNPSPSATLEQAVNSATSRGVLVVAASGNSGAGSISYPARYANAMAVGATDQNNNRASFSQYGAGLDIVAPGVNVQSTAPQSAYASLNGTSMATPHVAGAAVLVKQKNPSWSNVQIRNHLKNTATSLGSTNLYGSGLVNAEAATR

SEQ ID NO: 61716 - protein, 269 aa, Unidentified
AQSVPWGISRVQAPAAHNRGLAGSGVKVAVLDTGISTHPDLRIRGGASFVPGEPSTQDGEGHGTHVAGTIAALNNSIGVLGVAPSAELYAVKVLGASGSGSISSIAQGLEWAGNNGMHVANLSLGSPSPSATLEQAVNSATSRGVLVVAASGNSGADSISYPARYANAMAVGATDQNNNRADFSQYGAGLDIVAPGVNVQSTYPGSTYASLNGTSMATPHVAGAAVLVKQKNPSWSNVRIRDHLKNTATSLGSTNLYGSGLVNAFAATR

SEQ ID NO: 61717 - protein, 269 aa, Unidentified
AQSVPWGISRVQAPAAHNRGLTGSGVKVAVLDTGISTHPDLNIRGGASFVPGEPSTQDGNGHGTHAAGTIAALDNSIGVLGVAPRAELYAVKVLGASGSGAISSIAQGLEWAGNNGMHVANLSLGSPSPSATLEQAVNSATSRGVLVVAASGNSGADSISYPARYANAMAVGATDQNNNRASFSQYGAGLDIVAPGVNVQSTYPGSTYASLNGTSMATPHVAGAAVLVKHKNPSWSNVRIRNHLKNTATSLGSVNLYGSGLVNAEAATR

SEQ ID NO: 61718 - protein, 269 aa, Unidentified
AQSVPWGISRVQAPAAHRRGLWGRGVKVAVLDTGISTHPDLNIRGGASFVPGEPSTQDGNGHGTHVAGTIAALDNSIGVLGVAPSAELYAVKVLGASGAGSVSSIAQGLEWAGANGMHVANLSLGSPSPSATLEQAVNSATSRGVLVVAASGNSGAGSISYPARYANAMAVGATDQNNNRASFSQYGAGLDIVAPGVNVQSTYPGSAYFSLNGTSMATPHVAGAAALVKQKNPSWSNVQIRNRLKNTATSLGSTNLYGSGIVNAEAATR

SEQ ID NO: 61719 - protein, 269 aa, Unidentified
AQSVPWGISRVQAPAAHNRGLQGSGVKVAVLDTGISTHPDLNIRGGASFVPGEPSTQDGNGHGTHVAGTIAALNNSIGVLGVAPSAELYAVKVLGASGGGAISSIAQGLEWAGNNGMHVANLSLGSPSPSATLEQAVNSATSRGVLVVAASGNSGADSISYPARYANAMAVGATDQNNNRAEFSQYGAGLDIVAPGVNVQSTYPGSTYASLNGTSMATPHVAGAALLVKQKNPSWSNVTIRHHLKNTATSLGSTNLYGSGLVNALAATR

SEQ ID NO: 61720 - protein, 269 aa, Unidentified
AQSVPWGIERVQAPAAHNRGLTGSGVKVAVLDTGISTHPDLRIRGGASFVPGEPSTQDGNGHGTHVAGTIAALDNSIGVLGVAPSAELYAVKVLGASGSGSVSSIAQGLEWAGNNGMHVANLSLGSPSPSATLEQAVNSATSRGVLVVAASGNSGADEISYPARYANAMAVGATDQNNNRASFSQYGPGLDIVAPGVNVLSTWPGSTYASLNGTSMATPHVAGAAALVKQKNPSWSNVQIRNHLKNTATSLGDTNEYGSGLVNAEAATR

SEQ ID NO: 61721 - protein, 269 aa, Unidentified
AQSVPWGISRVQAPAAHNRGLTGSGVKVAVLDTGISTHPDLNIRGGASFVPGEPSTQDGNGHGTHVAGTIAALNNSIGVLGVAPSAELYAVKVLGASGGGSIASIAQGLEWAGNNGMHVANLSLGSPSPSATLEQAVNSATSRGVLVVAASGNSGEESISYPARYANAMAVGATDQNNNRADFSQYGAGLDIVAPGVNVQSTYPGSTYASLNGTSMATPHVAGAAVLVKQKRPSWSNVRIRDHLKNTATSLGSTNLYGSGLVNAEAATR

SEQ ID NO: 61722 - protein, 269 aa, Unidentified
AQSVPWGISRVQAPAAHNRGLTGSGVKVAVLDTGISTHPDLNIRGGASFVPGEPSTQDGNGHGTHVAGTIAALDNSIGVLGVAPSAELYAVKVLGASGSGAISSIAQGLEWAGNNGMHVANLSLGSPSPSATLEQAVNSATSRGVLVVAASGNSGADSISYPARYANAMAVGATDQNNNRASFSQYGAGLDIVAPGVNVQSTYPGSRYASLNGTSMATPHVAGAAVLVKHKNPSWSNVRIRNHLKNTATSLGSANLYGSGLVNAGAATR

SEQ ID NO: 61723 - protein, 269 aa, Unidentified
AQSVPWGISRVQAPAAHNRGLAGSGVKVAVLDTGISTHPDLNIRGGASFVPGEPSTQDGNGHGTHVAGTIAALNNSIGVLGVAPSAELYAVKVLGASGGGAISSIAQGLEWAGNNGMHVANLSLGSPSPSATLEQAVNSATSRGVLVVAASGNSGADSISYPARYANAMAVGATDQNNNRADFSQYGAGLDIVAPGVNVQSTYPGSTYASLNGTSMATPHVAGAAVLVKQKNPSWSNVTIRHHLKNTATSLGSTNLYGSGLVNALAATR

SEQ ID NO: 61724 - protein, 269 aa, Unidentified
AQSVPWGISRVQAPAAHNRGLTGSGVKVAVLDTGISTHPDLNIRGGASFVPGEPSTQDGNGHGTHVAGTIAALNNSIGVLGVAPSAELYAVKVLGASGGGAISSIAQGLEWAGNNGMHVANLSLGSPSPSATLEQAVNSATSRGVLVVAASGNSGADSISYPARYANAMAVGATDQNNNRASFSQYGAGLDIVAPGVNVQSTWPGSTYASLNGTSMATPHVAGAAVLVKHKNPSWSNVRIRDHLKKTATSLGSTNLYGSGLVNAEAATR

SEQ ID NO: 61725 - protein, 269 aa, Unidentified
AQSVPWGISRVQAPAAHRRRLWGRGVKVAVLDTGISTHPDLNIRGGASFVPGEPSTQDGNGHGTHVAGTIAALDNSIGVLGVAPSAELYAVKVLGASGAGSVSSIAQGLEWAGANGMHVANLSLGSPSPSATLEQAVNSATSRGVLVVAASGNSGAGSISYPARYANAMAVGATDQDNNRASFSQYGAGLDLVAPGVNVQSTYPGSTYASLNGTSMATPHVAGAAALVKQKNPSWSNVQIRNRLKNTATSLGSTNLYGSGLVNAEAATR

SEQ ID NO: 61726 - protein, 269 aa, Unidentified
AQSVPWGISRVQAPAAHNRGLAGSGVKVAVLDTGISTHPDLNIRGGASFVPGEPSTQDGNGHGTHVAGTIAALNNSIGVLGVAPSAELYAVKVLGASGGGAISSIAQGLEWAGNNGMHVANLSLGSPSPSATLEQAVNSATSRGVLVVAASGNSGADSISYPARYANAMAVGATDQNNNRAEFSQYGAGLDIVAPGVNVQSTYPGSTYASLNGTSMATPHVAGAAVLVKQKNPSWSNVRIRDHLKNTATSLGSTNLYGSGLVNALAATR

SEQ ID NO: 61727 - protein, 269 aa, Unidentified
AQSVPWGISRVQAPAAHNRGLTGRGVKVAVLDTGISTHPDLNIRGGASFVPGEPSTQDGEGHGTHVAGTIAALDNSIGVLGVAPSAELYAVKVLGASGAGAISSIAQGLEWAGNNGMHVANLSLGSPSPSATLEQAVNSATSRGVLVVAASGNSGAGSISYPARYANAMAVGATDQNNNRADFSQYGAGLDIVAPGVNVQSTYIGSTYASLNGTSMATPHVAGAAVLVKQKNPSWSNVRIRNHLKNTATSLGSTNLYGSGLVNAEAATR

SEQ ID NO: 61728 - protein, 269 aa, Unidentified
AQSVPWGISRVQAPAAHNRGLAGSGVKVAVLDTGISTHPDLNIRGGASFVPGEPSTQDGNGHGTHVAGTIAALNNSIGVLGVAPSAELYAVKVLGASGGGAISSIAQGLEWAGNNGMHVANLSLGSPSPSATLEQAVNSATSRGVLVVAASGNSGADSISYPARYANAMAVGATDQNNNRAEFSQYGAGLDIVAPGVNVQSTYPGSTYASLNGTSMATPHVAGAALLVKQKNPSWSNVRIRHHLKNTATSLGSTNLYGSGLVNAHAATR

SEQ ID NO: 61729 - protein, 269 aa, Unidentified
AQSVPWGISRVQAPAAHNRGLQGSGVKVAVLDTGISTHPDLNIRGGASFVPGEPSTQDGNGHGTHVAGTIAALNNSIGVLGVAPSAELYAVKVLGASGGGAISSIAQGLEWAGNNGMHVANLSLGSPSPSATLEQAVNSATSRGVLVVAASGNSGADSISYPARYANAMAVGATDQNNNRAEFSQYGAGLDIVAPGVNVQSTYPGSTYASLNGTSMATPHVAGAAVLVKQKNPSWSNVTIREHLKNTATSLGSTNLYGSGLVNALAATR

SEQ ID NO: 61730 - protein, 269 aa, Unidentified
AQSVPWGISRVQAPAAHNRGLAGSGVKVAVLDTGISTHPDLNIRGGASFVPGEPSTQDGNGHGTHVAGTIAALNNSIGVLGVAPSAELYAVKVLGASGGGAISSIAQGLEWAGNNGMHVANLSLGSPSPSATLEQAVNSATSRGVLVVAASGNSGADSISYPARYANAMAVGATDQNNNRAEFSQYGAGLDIVAPGVNVQSTYPGSTYASLNGTSMATPHVAGAASLVKQKNPSWSNVVIRDHLKNTATSLGSTNLYGSGLVNALAATR

SEQ ID NO: 61731 - protein, 269 aa, Unidentified
AQSVPWGISRVQAPAAHNRGLAGSGVKVAVLDTGISTHPDLNIRGGASFVPGEPSTQDGNGHGTHVAGTIAALNNSIGVLGVAPSAELYAVKVLGASGGGAISSIAQGLEWAGNNGMHVANLSLGSPSPSATLEQAVNSATSRGVLVVAASGNSGADSISYPARYANAMAVGATDQNNNRADFSQYGAGLDIVAPGVNVQSTYPGSTYASLNGTSMATPHVAGAAVLVKQKNPSWSNVTIRHHLKNTATSLGSTNLYGSGLVNAFAATR

SEQ ID NO: 61732 - protein, 269 aa, Unidentified
AQSVPWGISRVQAPAAHNRGLAGRGVKVAVLDTGISTHPDLNIRGGASFVPGEPSTQDGNGHGTHVAGTIAALNNSIGVLGVAPSAELYAVKVLGASGSGAISSIAQGLEWAGNNRMHVANLSLGSPSPSATLEQAVNSATSRGVLVVAASGNSGADSISYPARYANAMAVGATDQNNNRADFSQYGAGLDIVAPGVNVQSTYPGSTYASDNGTSMATPHVAGAAVLVKQKNPSWSNVQIRDHLKNTATSLGSTNLYGSGLVNAEAATR

SEQ ID NO: 61733 - protein, 269 aa, Unidentified
AQSVPWGISRVQAPAAHNRGLQGSGVKVAVLDTGISTHPDLNIRGGASFVPGEPSTQDGNGHGTHVAGTIAALNNSIGVLGVAPSAELYAVKVLGASGGGAISSIAQGLEWAGNNGMHVANLSLGSPSPSATLEQAVNSATSRGVLVVAASGNSGADSISYPARYANAMAVGATDQNNNRAEFSQYGAGLDIVAPGVNVQSTYPGSTYASLNGTSMATPHVAGAATLVKQKNPSWSNVRIREHLKNTATSLGSTNLYGSGLVNAHAATR

SEQ ID NO: 61734 - protein, 269 aa, Unidentified
AQSVPWGISRVQAPAAHRRRLTGSGVKVAVLDTGISTHPDLRITGGASFVPGEPSTQDGNGHGTHVAGTIAALDNSIGVLGVAPSAELYAVKVLGASGGGAISSIAQGLEWAGNNGMHVANLSLGSPSPSATLEQAVNSATSRGVLVVAASGNSGAGSISYPARYANAMAVGATDQNNNRASFSQYGAGLDIVAPGVNVQSTYPGSTYASLNGTSMATPHVAGAAVLVKQKNPSWSNVRIRNHLKNTATSLGSTNLYGSGLVNAEAATR

SEQ ID NO: 61735 - protein, 269 aa, Unidentified
AQSVPWGISRVQAPAAHNRKLTGSGVKVAVLDTGISTHPDLNIRGGASFVPGEPSTQDGEGHGTHVAGTIAALNNNIGVLGVAPSAELYAVKVLSASGQGSVSSIAGGLEWAGLNGMHVANLSLGAPSPSATLEQAVNSATSRGVLVVAASGNSGAGSISYPARYANAMAVGATDQNNNRADFSQYGAGLDIVAPGVNVQSTYPGSTYASQNGTSMATPHVAGAAALVKQKNPSWSNVQIRNHLKNTATSLGSTNLYGSGLVNAEAATR

SEQ ID NO: 61736 - protein, 269 aa, Unidentified
AQSVPWGISRVQAPAAHNRGLQGSGVKVAVLDTGISTHPDLNIRGGASFVPGEPSTQDGNGHGTHVAGTIAALNNSIGVLGVAPSAELYAVKVLGASGGGAISSIAQGLEWAGNNGMHVANLSLGSPSPSATLEQAVNSATSRGVLVVAASGNSGADSISYPARYANAMAVGATDQNNNRADFSQYGAGLDIVAPGVNVQSTYPGSTYASLNGTSMATPHVAGAASLVKQKNPSWSNVVIRDHLKNTATSLGSTNLYGSGLVNATAATR

SEQ ID NO: 61737 - protein, 269 aa, Unidentified
AQSVPWGISRVQAPAAHNRGLAGSGVKVAVLDTGISTHPDLNIRGGASFVPGEPSTQDGNGHGTHVAGTIAALNNSIGVLGVAPSAELYAVKVLGASGGGAISSIAQGLEWAGNNGMHVANLSLGSPSPSATLEQAVNSATSRGVLVVAASGNSGADSISYPARYANAMAVGATDQNNNRADFSQYGAGLDIVAPGVNVQSTYPGSTYASLNGTSMATPHVAGAATLVKQKNPSWSNVVIREHLKNTATSLGSTNLYGSGLVNAHAATR

SEQ ID NO: 61738 - protein, 269 aa, Unidentified
AQSVPWGISRVQAPAAHNRGLAGSGVKVAVLDTGISTHPDLNIRGGASFVPGEPSTQDGNGHGTHVAGTIAALDNSIGVLGVAPSAELYAVKVLGASGGGAISSVAQGLEWAGNNGMHVANLSLGSGSPSATLEQAVNSATSRGVLVVAASGNSGAGSISYPARYANAMAVGATDQNNNRASFSQYGAGLDIVAPGVNVQSTYPGSTYASLNGTSMATPHVAGAAVLVKQKNPSWSNVRIRNHLKNTATSLGSTNLYGSGLVNAEVATR

SEQ ID NO: 61739 - protein, 269 aa, Unidentified
AQSVPWGISRVQAPAAHNRGLAGGGVKVAVLDTGISTHPDLNIRGGASFVPGEPSTQDRNGHGTHVAGTIAALNNNIGVLGVAPSAELYAVKVLGASGGGAISSIAQGLEWAGNNGMHVANLSLGAPSPSATLEQAVNSATSRGVLVVAASGNSGAGSISYPARYANAMAVGATDQNNNRASFSQYGAGLDIVAPGVNVQSTYPGSTYASLNGTSMATPHVAGAAVLVKQKNPSWSNVRIRNHLKNTATSLGSTNLYGSGLVNAEAATR

SEQ ID NO: 61740 - protein, 269 aa, Unidentified
AQSVPWGISRVQAPAAHNRGLTGFGVKVAVLDSGISTHPDLNIRGGASFVPGEPSTQDGNGHGTHVAGTIAALNNSIGVLGVAPSAELYAVKVLGASGGGAISSIAQGLEWAGLNGMHVANLSLGNPSPSATLEQAVNSATSRGVLVVAASGNSGAGSISYPARYANAMAVGATDQNNNRASFSQYGAGLDIVAPGVNVQSTAPGSAYASLNGTSMATPHVAGAAVLVKQKNPSWSNVQIRNHLKNTATSLGSTNLYGSGLVNAEAATR

SEQ ID NO: 61741 - protein, 275 aa, Unidentified
AQTIPWGISRVQAPAAHNRGLTGSGVKVAVLDTGIXSTHPDLNIRGGASFVPGEPXSTQDGNGHGTHVAGTIAALNNSIGVLGVAPSAELYAVKVLGADGEGAISSIAQGLEWAGNNGMHVANLSLGSPSPSATLEQAVNSATSRGVLVVAASGNSGAXSSISXXXYPARYANAMAVGATDQNNNRASFSQYGAGLDIVAPGVNIQSTWPGSTYASLNGTSMATPHVAGAAALVKQKNPSWSNVQIRNHLKNTATSLGSTWLYGSGLVNAEAATR

SEQ ID NO: 61742 - protein, 269 aa, Unidentified
AQTIPWGISRVQAPAAHNRGLTGSGVKVAVLDTGISTHPDLNIRGGASFVPGEPSTQDGNGHGTHVAGTIAALNNSIGVLGVAPSAELYAVKVLGADGEGAISSIAQGLEWAGNNGMHVANLSLGSPSPSDTLEQAVNSATSRGVLVVAASGNSGASSISYPARYANAMAVGATDENNNRASFSQYGAGLDIVAPGVNIQSTYPGSTYASLNGTSMATPHVAGAAALVKQKNPSWSNVQIRNHLKNTATSLGSTNLYGSGLVNAEAATR

SEQ ID NO: 61743 - protein, 269 aa, Unidentified
AQSVPWGISRVQAPAAHRRGLTGRGVKVAVLDTGISTHPDLNIRGGASFVPGEPSTQDGNGHGTHVAGTIAALDNSIGVLGVAPSAELYAVKVLGASGAGSVSSIAQGLEWAGANGMHVANLSLGSPSPSATLEQAVNSATSRGVLVVAASGNSGAGSISYPARYANAMAVGATDQDNNRASFSQYGAGLDLVAPGVNVQSTYPQSAYASLNGTSMATPHVAGAAALVKQKNPSWSNVQIRNRLKNTATSLGSTNLYGSGLVNAEAATR

SEQ ID NO: 61744 - protein, 269 aa, Unidentified
AQSVPWGISRVQAPASHNRGLAGSGVKVAVLDSGISTHPDLNIRGGASFVPGEPSTQDGNGHGTHVAGTIAALNNSIGVLGVAPSAELYAVKVLGASGGGAISSIAQGLEWAGLNGMHVANLSLGSPSPSATLEQAVNSATSRGVLVVAASGNSGAGSISYPARYANAMAVGATDQNNNRASFSQYGAGLDIVAPGVNVQSTVPQSTYASLNGTSMATPHVAGAAVLVKQKNPSWSNVQIRNHLKNTATSLGSTNLYGSGLVNAEAATR

SEQ ID NO: 61745 - protein, 269 aa, Unidentified
AQSVPWGISRVQAPAAHNRGLAGSGVKVAVLDTGISTHPDLNIRGGASFVPGEPSTQDGNGHGTHVAGTIAALNNSIGVLGVAPSAELYAVKVLGASGGGAISSIAQGLEWAGNNGMHVANLSLGSPSPSATLEQAVNSATSRGVLVVAASGNSGADSISYPARYANAMAVGATDQNNNRAEFSQYGAGLDIVAPGVNVQSTYPGSTYASLNGTSMATPHVAGAAVLVKQKNPSWSNVTIREHLKNTATSLGSTNLYGSGLVNAHAATR

SEQ ID NO: 61746 - protein, 269 aa, Unidentified
AQSVPWGISRVQAPAAHNRGLTGSGVKVAVLDTGISTHPDLNIRGGVSFVPGEPSTQDGNGHGTHAAGTIAALNNSIGVLGVAPSAELYAVKVLGASGSGAISSIAQGLEWAGNNGMHVANLSLGSPSPSATLEQAVNSATSRGVLVVAASGNSGADSISYPARYANAMAVGATDQNNNRASFSQYGAGLDIVAPGVNVQSTYPGSTYASLNGTSMATPHVAGAAVLVKHKNPSWSNVRIRNHLKNTATSVGSTWLYGSGLVNAEAATR

SEQ ID NO: 61747 - protein, 269 aa, Unidentified
AQSVPWGISRVQAPASHNRGLTGSGVKVAVLDSGISTHPDLNIRGGASFVPGEPSTQDGNGHGTHVAGTIAALNNSIGVLGVAPSAELYAVKVLGASGGGAISSIAQGLEWAGLNGMHVANLSLGNPSPSATLEQAVNSATSRGVLVVAASGNSGAGSISYPARYANAMAVGATDQNNNRASFSQYGAGLDIVAPGVNVQSTVPGSAYASLNGTSMATPHVAGAAVLVKQKNPSWSNVQIRNHLKNTATSLGSTNLYGSGLVNAEAATR

SEQ ID NO: 61748 - protein, 269 aa, Unidentified
AQSVPWGISRVQAPAAHNRGLQGSGVKVAVLDTGISTHPDLNIRGGASFVPGEPSTQDGNGHGTHVAGTIAALNNSIGVLGVAPSAELYAVKVLGASGGGAISSIAQGLEWAGNNGMHVANLSLGSPSPSATLEQAVNSATSRGVLVVAASGNSGADSISYPARYANAMAVGATDQNNNRADFSQYGAGLDIVAPGVNVQSTYPGSTYASLNGTSMATPHVAGAAVLVKQKNPSWSNVVIRDHLKNTATSLGSTNLYGSGLVNATAATR

SEQ ID NO: 61749 - protein, 269 aa, Unidentified
AQSVPWGISRVQAPAAHNRGLAGSGVKVAVLDTGISTHPDLNIRGGASFVPGEPSTQDGNGHGTHVAGTIAALNNSIGVLGVAPSAELYAVKVLGASGGGAISSIAQGLEWAGNNGMHVANLSLGSPSPSATLEQAVNSATSRGVLVVAASGNSGADSISYPARYANAMAVGATDQNNNRADFSQYGAGLDIVAPGVNVQSTYPGSTYASLNGTSMATPHVAGAALLVKQKNPSWSNVRIREHLKNTATSLGSTNLYGSGLVNAHAATR

SEQ ID NO: 61750 - protein, 269 aa, Unidentified
AQSVPWGISRVQAPAAHSRGLTGSGVKVAVLDTGISTHPDLNIRGGASFVPGEPSTQDGNGHGTHAAGTIAALNNSIGVLGVAPSAELYAVKVLGASGSGAISSIAQGLEWAGNNGMHVANLSLGSPSPSATLEQAVNSATSRGVLVVAASGNSGADSISYPARYANAMAVGATDQNNNRASFSQYGAGLDIVAPGVNVQSTYPGSTYASLNGTSMATPHVAGAAVLVKHKNPSWSNVRIRDHLKKTATSLGSTNLYGSGLVNAEAATR

SEQ ID NO: 61751 - protein, 269 aa, Unidentified
AQSVPWGISRVQAPAAHNRGLTGSGVKVAVLDTGISTHPDLNIRGGASFVPGEPSTQDGNGHGTHVAGTIAALNNSIGVLGVAPSAELYAVKVLGASGGAAISSIAQGLEWAGNNGMHVANLSLGSPSPSATLEQAVNSATSRGVLVVAASGNSGADSISYPARYANAMAVGATDQNNNRASFSQYGAGLDIVAPGVNVQSTYPGSTYASLNGTSMATPHVAGAAVLVKHKNPSWSNVRIRDHLKKTATSLGSTNLYGSGLVNAEAATR

SEQ ID NO: 61752 - protein, 269 aa, Unidentified
AQSVPWGISRVQAPAAHNRGLQGSGVKVAVLDTGISTHPDLNIRGGASFVPGEPSTQDGNGHGTHVAGTIAALNNSIGVLGVAPSAELYAVKVLGASGGGAISSIAQGLEWAGNNGMHVANLSLGSPSPSATLEQAVNSATSRGVLVVAASGNSGADSISYPARYANAMAVGATDQNNNRADFSQYGAGLDIVAPGVNVQSTYPGSTYASLNGTSMATPHVAGAAVLVKQKNPSWSNVRIRHHLKNTATSLGSTNLYGSGLVNAFAATR

SEQ ID NO: 61753 - protein, 269 aa, Unidentified
AQSVPWGISRVQAPAAHRRGLTGSGVKVAVLDTGISTHPDLNVRGGASFVPGEPSTQDGNGHGTHVAGTIAALDNNIGVLGVAPRAELYAVKVLGASGSGSVSSIAQGLEWAGNNGMHVANLSLGLQAPSATLEQAVNSATSRGVLVVAASGNSGAGSISYPARYANAMAVGATDQNNNRASFSQYGAGLDIVAPGVNVLSTYPGSTYASLNGTSMATPHVAGAAALVKQKNPSWSNVQIRNRLKNTATSLGSTNLYGSGLVNAEAATR

SEQ ID NO: 61754 - protein, 269 aa, Unidentified
AQSVPWGISRVQAPAAHRRRLWGRGVKVAVLDTGISTHPDLNIRGGASFVPGEPSTQDGNGHGTHVAGTIAALDNSIGVLGVAPSAELYAVKVLGASGAGSVSSIAQGLEWAGNNGMHVANLSLGSPSPSATLEQAVNSATSRGVLVVAASGNSGAGSISYPARYANAMAVGATDQNNNRASFSQYGAGLDLVAPGVNVQSTYPQSTYFSLNGTSMATPHVAGAAALVKQKNPSWSNVQIRNRLKNTATSLGSTNLYGSGLVNAEAATR

SEQ ID NO: 61755 - protein, 269 aa, Unidentified
AQSVPWGISRVQAPAAHNRGLTGSGVKVAVLDTGISTHPDLNIRGGASFVPGEPSTQDGNGHGTHAAGTIAALNNSIGVLGVAPSAELYAVKVLGASGSGAISSIAQGLEWAGNNGMHVANLSLGSPSPSATLEQAVNSATSRGVLVVAASGNSGADSISYPARYANAMAVGATDQNNNRASFSQYGAGLDIVAPGVNVQSTYPGSTYVSLNGTSMATPHVAGAAVLVKHKNPSWSNVRIRDHLKKTATSLGSTNLYGSGLVNAEAATR

SEQ ID NO: 61756 - protein, 275 aa, Unidentified
AQTIPWGISRVQAPAAHNRGLTGSGVKVAVLDTGIXSTHPDLRIRGGASFVPGEPXSTQDGNGHGTHVAGTIAALNNSIGVLGVAPSAELYAVKVLGADGEGAISSIAQGLEWAGNNGMHVANLSLGSPSPSATLEQAVNSATSRGVLVVAASGNSGAXSEISXXXYPARYANAMAVGATDQNNNRASFSQYGAGLDIVAPGVNIQSTWPGSTYASLNGTSMATPHVAGAAALVKQKNPSWSNVQIRNHLKNTATSLGSTNLYGSGLVNAEAATR

SEQ ID NO: 61757 - protein, 269 aa, Unidentified
AQSVPWGISRVQAPAAHNRGLTGSGVKVAVLDTGISTHPDLNIRGGASFVPGEPSTQDGNGHGTHVAGTIAALNNSIGVLGVAPSAELYAVKVLGASGGGAISSIAQGLEWAGNNGMHVANLSLGSESPSATLEQAVNSATSRGVLVVAASGNSGEGSISYPARYANAMAVGATDQNNNRADFSQYGAGLDIVAPGVNVQSTYPGSTYASLNGTSMATPHVAGAAVLVKQKNPSWSNVRIRDRLKNTATSLGSTNLYGSGLVNAEAATR

SEQ ID NO: 61758 - protein, 269 aa, Unidentified
AQSVPWGISRVQAPAAHNRGLTGRGVKVAVLDTGISTHPDLNIRGGASFVPGEPSTQDGNGHGTHVAGTIAALNNSIGVLGVAPSAELYAVKVLGASGGGAISSIAQGLEWAGNNGMHVANLSLGNPSPSATLEQAVNSATSRGVLVVAASGNSGAESISYPARYANAMAVGATDQNNNRADFSQYGAGLDIVAPGVNVQSTYPGSTYASLNGTSMATPHVAGAAVLVKQKNPSWSNVRIRDHLKNTATSLGSTNLYGSGLVNAEAATR

SEQ ID NO: 61759 - protein, 269 aa, Unidentified
AQSVPWGISRVQAPAAHNRGLQGSGVKVAVLDTGISTHPDLNIRGGASFVPGEPSTQDGNGHGTHVAGTIAALNNSIGVLGVAPSAELYAVKVLGASGGGAISSIAQGLEWAGNNGMHVANLSLGSPSPSATLEQAVNSATSRGVLVVAASGNSGADSISYPARYANAMAVGATDQNNNRADFSQYGAGLDIVAPGVNVQSTYPGSTYASLNGTSMATPHVAGAASLVKQKNPSWSNVRIRHHLKNTATSLGSTNLYGSGLVNAHAATR

SEQ ID NO: 61760 - protein, 269 aa, Unidentified
AQSVPWGISRVQAPAAHNRGLTGSGVKVAVLDTGISTHPDLNIRGGASFVPGEPSTQDGNGHGTHAAGTIAALNNSIGVLGVAPSAELYAVKVLGASGSGAISSIAQGLEWAGNNGMHVANLSLGSPSPSATLEQAVNSATSRGVLVVAASGNSGADSISYPARYANAMAVGATDQNNNRASFSQYGAGLDIVAPGVNVQSTYTGSTYASLNGTSMATPHVAGAAVLVKHKNPSWSNVRIRDHLKKTATSLGSTNLYGSGLVNAEAATR

SEQ ID NO: 61761 - protein, 269 aa, Unidentified
AQSVPWGISRVQAPAAHNRGLAGSGVKVAVLDTGISTHPDLNIRGGASFVPGEPSTQDGNGHGTHVAGTIAALNNSIGVLGVAPSAELYAVKVLGASGGGAISSIAQGLEWAGNNGMHVANLSLGSPSPSATLEQAVNSATSRGVLVVAASGNSGADSISYPARYANAMAVGATDQNNNRAEFSQYGAGLDIVAPGVNVQSTYPGSTYASLNGTSMATPHVAGAAVLVKQKNPSWSNVRIREHLKNTATSLGSTNLYGSGLVNALAATR

SEQ ID NO: 61762 - protein, 269 aa, Unidentified
AQSVPWGISRVQAPAAHNRGLTGSGVKVAVLDTGISTHPDLNIRGGASFVPGEPSTQDGNGHGTHAAGTIAALNNSIGVLGVAPSAELYAVKVLGASGSGAISSIAQGLEWAGNNGMHVANLSLGSPSPSATLEQAVNSATSRGVLVVAASGNSGADSISYPARYANAMAVGATDQNNNRASFSQYGAGLDIVAPGVNVQSTYPGSTYASLNGTSMATPHVAGAAVLVKHKNPSWSNVRIRDHLKKTATSLDSTNLYGSGLVNAEAATR

SEQ ID NO: 61763 - protein, 269 aa, Unidentified
AQSVPWGISRVQAPAAHNRRLTGRGVKVAVLDTGISTHPDLNIRGGASFVPGEPSTQDGEGHGTHVAGTIAALNNDIGVLGVAPSAELYAVKVLGASGSGSVSSIAQGLEWAGNNSMHVANLSLGSESPSATLEQAVNSATSRGVLVVAASGNSGAGSISYPARYANAMAVGATDQNNNRADFSQYGAGLDIVAPGVNVQSTYPGSTYASLNGTSMATPHVAGAAALVKQKNPSWSNVRIRDRLKNTATSLGSTNLYGSGLVNAEAATR

SEQ ID NO: 61764 - protein, 269 aa, Unidentified
AQSVPWGISRVQAPAAHNRGLQGSGVKVAVLDTGISTHPDLNIRGGASFVPGEPSTQDGNGHGTHVAGTIAALNNSIGVLGVAPSAELYAVKVLGASGGGAISSIAQGLEWAGNNGMHVANLSLGSPSPSATLEQAVNSATSRGVLVVAASGNSGADSISYPARYANAMAVGATDQNNNRAEFSQYGAGLDIVAPGVNVQSTYPGSTYASLNGTSMATPHVAGAAVLVKQKNPSWSNVTIRHHLKNTATSLGSTNLYGSGLVNALAATR

SEQ ID NO: 61765 - protein, 269 aa, Unidentified
AQSVPWGISRVQAPAAHNRRLTGSGVKVAVLDTGISTHPDLNITGGASFVPGEPSTQDGNGHGTHVAGTIAALDNRIGVLGVAPSAELYAVKVLGASGGGAISSIAQGLEWAGNNGMHVANLSLGSPSPSATLEQAVNSATSRGVLVVAASGNSGAGSISYPARYANAMAVGATDQNNNRASFSQYGAGLDIVAPGVNVQSTYPGSTYASLNGTSMATPHVAGAAVLVKQKNPSWSNVRIRNHLKNTATSLGSTNLYGSGLRNAEAATR

SEQ ID NO: 61766 - protein, 269 aa, Unidentified
AQTIPWGISRVQAPAAHNRGLTGSGVKVAVLDTGISTHPDLNIRGGASFVPGEPSTQDGNGHGTHVAGTIAALNNSIGVLGVAPSAELYAVKVLGADGEGAISSIAQGLEWAGNNGMHVANLSLGSPSPSATLEQAVNRATSRGVLVVAASGNSGASSISYPARYANAMAVGATDQNNNRASFSQYGAGLDIVAPGVNIQSTYPGSTYASLNGTSMATPHVAGAAALVKQKNPSWSNVQIRNHLKNTATNLGSTNLYGSGLVNAEAATR

SEQ ID NO: 61767 - protein, 269 aa, Unidentified
AQSVPWGISRVRAPAAHNRGLTGSGVKVAVLDTGISTHPDLNIRGGASFVPGEPSTQDGNGHGTHAAGTIAALDNSIGVLGVAPSAELYAVKVLGASGSGAISSIAQGLEWAGNNGMHVANLSLGSPSPSATLEQAVNSATSRGVLVVAASGNSGADSISYPARYANAMAVGATDQNNNRASFSQYGAGLDIVAPGVNVQSTYPGSTYASLNGTSMATPHVAGAAVLVKHKNPSWSNVRIRNHLKNTATSLGSTNLYGSGLVNAESATR

SEQ ID NO: 61768 - protein, 269 aa, Unidentified
AQSVPWGISRVQAPAAHNRGLAGRGVKVAVLDTGISTHPDLNIRGGASFVPGEPSTQDGNGHGTHVAGTIAALDNSIGVLGVAPSAELYAVKVLGASGGGAISSIAQGLEWAGNNGMHVANLSLGSPSPSATLEQAVNSATSRGVLVVAASGNSGAGSISYPARYANAMAVGATDQNNNRASFSQYGAGLDIVAPGVNVQSTYPGSTYASLNGTSMATPHVAGAAVLVKQKYPSWSNVRIRNHLKNTATSLGSTNLYGSGLVNVEAATR

SEQ ID NO: 61769 - protein, 269 aa, Unidentified
AQSVPWGISRVQAPAAHNRGLTGFGVKVAVLDSGISTHPDLNIRGGASFVPGEPSTQDGNGHGTHVAGTIAALNNSIGVLGVAPSAELYAVKVLGASGGGAISSIAQGLEWAGLNGMHVANLSLGNPSPSATLEQAVNSATSRGVLVVAASGNSGAGSISYPARYANAMAVGATDQNNNRASFSQYGAGLDIVAPGVNVQSTVPQSTYASLNGTSMATPHVAGAAVLVKQKNPSWSNVQIRNHLKNTATSLGSTNLYGSGLVNAEAATR

SEQ ID NO: 61770 - protein, 269 aa, Unidentified
AQSVPWGISRVQAPAAHNRGLQGSGVKVAVLDTGISTHPDLNIRGGASFVPGEPSTQDGNGHGTHVAGTIAALNNSIGVLGVAPSAELYAVKVLGASGGGAISSIAQGLEWAGNNGMHVANLSLGSPSPSATLEQAVNSATSRGVLVVAASGNSGADSISYPARYANAMAVGATDQNNNRADFSQYGAGLDIVAPGVNVQSTYPGSTYASLNGTSMATPHVAGAASLVKQKNPSWSNVRIREHLKNTATSLGSTNLYGSGLVNATAATR

SEQ ID NO: 61771 - protein, 269 aa, Unidentified
AQSVPWGISRVQAPASHNRGLAGSGVKVAVLDTGISTHPDLNIRGGASFVPGEPSTQDGNGHGTHVAGTIAALNNSIGVLGVAPSAELYAVKVLGASGGGAISSIAQGLEWAGANGMHVANLSLGNPSPSATLEQAVNSATSRGVLVVAASGNSGAGSISYPARYANAMAVGATDQNNNRASFSQYGAGLDIVAPGVNVQSTVPGSAYASLNGTSMATPHVAGAAVLVKQKNPSWSNVQIRNHLKNTATSLGSTNLYGSGLVNAEAATR

SEQ ID NO: 61772 - protein, 269 aa, Unidentified
AQSVPWGISRVQAPAAHNRGLTGRGVKVAVLDTGISTHPDLNIRGGASFVPGEPSTQDGNGHGTHVAGTIAALNNSIGVLGVAPSAELYAVKVLGASGGGAISSIAQGLEWAGNNGMHVANLSLGSESPSATLEQAVNSATSRGVLVVAASGNSGAESISYPARYANAMAVGATDQNNNRASFSQYGAGLDIVAPGVNVQSTYPGSTYASLNGTSMATPHVAGAAVLVKQKRPSWSNVRIRDHLKNTATSLGSTNLYGSGLVNAEAATR

SEQ ID NO: 61773 - protein, 269 aa, Unidentified
AQSVPWGISRVQAPAAHNRGLAGFGVKVAVLDTGISTHPDLNIRGGASFVPGEPSTQDGNGHGTHVAGTIAALNNSIGVLGVAPSAELYAVKVLGASGGGAISSIAQGLEWAGLNGMHVANLSLGNPSPSATLEQAVNSATSRGVLVVAASGNSGAGSISYPARYANAMAVGATDQNNNRASFSQYGAGLDIVAPGVNVQSTAPQSTYASLNGTSMATPHVAGAAVLVKQKNPSWSNVQIRNHLKNTATSLGSTNLYGSGLVNAEAATR

SEQ ID NO: 61774 - protein, 269 aa, Unidentified
AQSVPWGISRVQAPAAHRRRLWGRGVKVAVLDTGISTHPDLNIRGGASFVPGEPSTQDGNGHGTHVAGTIAALDNSIGVLGVAPSAELYAVKVLGASGAGSVSSIAQGLEWAGNNGMHVANLSLGSPSPSATLEQAVNSATSRGVLVVAASGNSGAGSISYPARYANAMAVGATDQDNNRASFSQYGAGLDIVAPGVNVQSTYPGSAYFSLNGTSMATPHVAGAAALVKQKNPSWSNVQIRNRLKNTATSLGSTNLYGSGLVNAEAATR

SEQ ID NO: 61775 - protein, 269 aa, Unidentified
AQSVPWGISRVQAPAAHNRGLTGSGVKVAVLDTGISTHPDLNIRGGASFVPGESSTQDGNGHGTHAAGTIAALNNSIGVLGVAPSAELYAVKVLGASGSGAISSIAQGLEWAGNNGMHVANLSLGSPSPSATLEQAVNSATSRGVLVVAASGNSGADSISYPARYANAMAVGATDQNNNRASFSQYGAGLDIVAPGVNVQSTYPGSTYASLNGTSMATPHVAGAAVLVKHKNPSWSNVRIRDHLKFTATSLGSTNLYGSGLVNAEAATR

SEQ ID NO: 61776 - protein, 269 aa, Unidentified
AQSVPWGISRVQAPAAHNRGLAGSGVKVAVLDTGISTHPDLNIRGGASFVPGEPSTQDGNGHGTHVAGTIAALNNSIGVLGVAPSAELYAVKVLGASGGGAISSIAQGLEWAGNNGMHVANLSLGSPSPSATLEQAVNSATSRGVLVVAASGNSGADSISYPARYANAMAVGATDQNNNRAEFSQYGAGLDIVAPGVNVQSTYPGSTYASLNGTSMATPHVAGAASLVKQKNPSWSNVTIRDHLKNTATSLGSTNLYGSGLVNALAATR

SEQ ID NO: 61777 - protein, 269 aa, Unidentified
AQSVPWGISRVQAPAAHNRGLAGSGVKVAVLDTGISTHPDLNIRGGASFVPGEPSTQDGNGHGTHVAGTIAALNNSIGVLGVAPSAELYAVKVLGASGGGAISSIAQGLEWAGNNGMHVANLSLGSPSPSATLEQAVNSATSRGVLVVAASGNSGADSISYPARYANAMAVGATDQNNNRAEFSQYGAGLDIVAPGVNVQSTYPGSTYASLNGTSMATPHVAGAAVLVKQKNPSWSNVRIRDHLKNTATSLGSTNLYGSGLVNAHAATR

SEQ ID NO: 61778 - protein, 269 aa, Unidentified
AQSVPWGISRVQAPAAHNRGLAGGGVKVAVLDTGISTHPDLNIRGGASFVPGEPSTQDGNGHGTHVAGTIAALDNSIGVLGVAPSAELYAVKVLAASGQGAISSIAGGLEWAGNNGMHVANLSLGSPSPSATLEQAVNSATSRGVLVVAASGNSGAGSISYPARYANAMAVGATDQNNNRASFSQYGAGLDIVAPGVNVQSTYPGSTYASLNGTSMATPHVAGAAVLVKQKNPSWSNVRIRNHLKNTATSLGSTNLYGSGLVNAEAATR

SEQ ID NO: 61779 - protein, 269 aa, Unidentified
AQSVPWGISRVQAPAAHNRGLTGSGVKVAVLDTGISTHPDLNIRGGASFVPGEPSTQDGNGHGTHVAGTIAALDNNIGVLGVAPRAELYAVKVLGASGGGAISSIAQGLEWAGNNRMHVANLSLTSRSPSATLEQAVNSATSRGVLVVAASGNSGAGSISYPARYANAMAVGATDQNNNRASFSQYGAGLDIVAPGVNVLSTYPGSTYASLNGTSMATPHVAGAAALVKQKNPSWSNVQIRNHLKNTATSLGSTNLYGSGLVNAEAATR

SEQ ID NO: 61780 - protein, 269 aa, Unidentified
AQSVPWGISRVQAPAAHNRGLAGSGVKVAVLDTGISTHPDLNIRGGASFVPGEPSTQDGNGHGTHVAGTIAALNNSIGVLGVAPSAELYAVKVLGASGGGAISSIAQGLEWAGNNGMHVANLSLGSPSPSATLEQAVNSATSRGVLVVAASGNSGADSISYPARYANAMAVGATDQNNNRAEFSQYGAGLDIVAPGVNVQSTYPGSTYASLNGTSMATPHVAGAASLVKQKNPSWSNVTIRHHLKNTATSLGSTNLYGSGLVNAHAATR

SEQ ID NO: 61781 - protein, 269 aa, Unidentified
AQSVPWGISRVQAPAAHRRRLTGRGVKVAVLDTGISTHPDLNIRGGASFVPGEPSTQDGNGHGTHVAGTIAALDNSIGVLGVAPSAELYAVKVLGASGSGSVSSIAQGLEWAGANGMHVANLSLGSPSPSATLEQAVNSATSRGVLVVAASGNSGAGSISYPARYANAMAVGATDQNNNRASFSQYGAGLDLVAPGVNVQSTYPQSTYFSLNGTSMATPHVAGAAALVKQKNPSWSNVQIRNRLKNTATSLGSTNLYGSGLVSAEAATR

SEQ ID NO: 61782 - protein, 269 aa, Unidentified
AQSVPWGISRVQAPAAHNRGLQGSGVKVAVLDTGISTHPDLNIRGGASFVPGEPSTQDGNGHGTHVAGTIAALNNSIGVLGVAPSAELYAVKVLGASGGGAISSIAQGLEWAGNNGMHVANLSLGSPSPSATLEQAVNSATSRGVLVVAASGNSGADSISYPARYANAMAVGATDQNNNRAEFSQYGAGLDIVAPGVNVQSTYPGSTYASLNGTSMATPHVAGAALLVKQKNPSWSNVRIREHLKNTATSLGSTNLYGSGLVNATAATR

SEQ ID NO: 61783 - protein, 269 aa, Unidentified
AQSVPWGISRVQAPAAHNRGLAGSGVKVAVLDTGISTHPDLNIRGGASFVPGEPSTQDGNGHGTHVAGTIAALNNSIGVLGVAPSAELYAVKVLGASGGGAISSIAQGLEWAGNNGMHVANLSLGSPSPSATLEQAVNSATSRGVLVVAASGNSGADSISYPARYANAMAVGATDQNNNRADFSQYGAGLDIVAPGVNVQSTYPGSTYASLNGTSMATPHVAGAATLVKQKNPSWSNVVIRDHLKNTATSLGSTNLYGSGLVNALAATR

SEQ ID NO: 61784 - protein, 269 aa, Unidentified
AQSVPWGISRVQAPAAHNRGLTGRGVKVAVLDTGISTHPDLRITGGASFVPGEPSTQDGNGHGTHVAGTIAALNNRIGVLGVAPSAELYAVKVLGASGGGAISSIAQGLEWAGNNGMHVANLSLGSPSPSATLEQAVNSATSRGVLVVAASGNSGAGSISYPARYANAMAVGATDQNNNRASFSQYGAGLDIVAPGVNVQSTYPGSTYASENGTSMATPHVAGAAVLVKQKNPSWSNVRIRNHLKNTATSLGSTNLYGSGLVNAEAATR

SEQ ID NO: 61785 - protein, 269 aa, Unidentified
AQSVPWGISRVQAPAAHNRGLTGSGVKVAVLDTGISTHPDLNIRGGASFVPGEPSTQDGNGHGTHVAGTIAALNNSIGVLGVAPSAELYAVKVLGASGSAAISSIAQGLEWAGNNGMHVANLSLGSPSPSATLEQAVNSATSRGVLVVAASGNSGADSISYPARYANAMAVGATDQNNNRASFSQYGAGLDIVAPGVNVQSTYPGSRYASLNGTSMATPHVAGAAVLVKHKNPSWSNVRIRDHLKKTATSLGSTNLYGSGLVNAEAATR

SEQ ID NO: 61786 - protein, 268 aa, Unidentified
AQSVPWGISRVQAPAAHNRGLAGSGVKVAVLDTGISTHPDLNIRGGASFVPGEPSTQDGNGHGTHVAGTIAALNNSIGVLGVAPSAELYAVKVLGASGNGAISSIAQGLEWAGNNGMHVANLSGSPSPSATLEQAVNSATSRGVLVVAASGNSGADSISYPARYANAMAVGATDQNNNRADFSQYGAGLDIVAPGVNVQSTYPGSTYASLNGTSMATPHVAGAAVLVKQKNPSWSNVRIRDHLKNTATSLGSTNLYGSGLVNAFAATR

SEQ ID NO: 61787 - protein, 268 aa, Unidentified
AQSVPWGISRVQAPAAHNRGLAGSGVKVAVLDTGISTHPDLNIRGGASFVPGEPSTQDGNGHGTHVAGTIAALNNSIGVLGVAPSAELYAVKVLASGNGAISSIAQGLEWAGNNGMHVANLSLGSPSPSATLEQAVNSATSRGVLVVAASGNSGADSISYPARYANAMAVGATDQNNNRADFSQYGAGLDIVAPGVNVQSTYPGSTYASLNGTSMATPHVAGAAVLVKQKNPSWSNVRIRDHLKNTATSLGSTNLYGSGLVNAFAATR

SEQ ID NO: 61788 - protein, 268 aa, Unidentified
AQSVPWGISRVQAPAAHNRGLAGSGVKVAVLDTGISTHPDLNIRGGASFVPGEPSTQDGNGHGTHVAGTIAALNNSIGVLGVAPSAELYAVKVLGASGGAISSIAQGLEWAGNNGMHVANLSLGSPSPSATLEQAVNSATSRGVLVVAASGNSGADSISYPARYANAMAVGATDQNNNRADFSQYGAGLDIVAPGVNVQSTYPGSTYASQNGTSMATPHVAGAAVLVKQKNPSWSNVRIRDHLKNTATSLGSTNLYGSGLVNAFAATR

SEQ ID NO: 61789 - protein, 268 aa, Unidentified
AQSVPWGISRVQAPAAHNRGLAGSGVKVAVLDTGISTHPDLNIRGGASFVPGEPSTQDGNGHGTHVAGTIAALNNSIGVLGVAPSAELYAVKVLGASGGAISSIAQGLEWAGNNRMHVANLSLGSPSPSATLEQAVNSATSRGVLVVAASGNSGADSISYPARYANAMAVGATDQNNNRADFSQYGAGLDIVAPGVNVQSTYPGSTYASLNGTSMATPHVAGAAVLVKQKNPSWSNVRIRDHLKNTATSLGSTNLYGSGLVNAFAATR

SEQ ID NO: 61790 - protein, 268 aa, Unidentified
AQSVPWGISRVQAPAAHNRGLAGFGVKVAVLDGISTHPDLNIRGGASFVPGEPSTQDGNGHGTHVAGTIAALNNSIGVLGVAPSAELYAVKVLGASGGGAISSIAQGLEWAGLNGMHVANLSLGSPSPSATLEQAVNSATSRGVLVVAASGNSGAGSISYPARYANAMAVGATDQNNNRASFSQYGAGLDIVAPGVNVQSTVPGSAYASLNGTSMATPHVAGAAVLVKQKNPSWSNVQIRNHLKNTATSLGSTNLYGSGLVNAEDATR

SEQ ID NO: 61791 - protein, 268 aa, Unidentified
AQSVPWGISRVQAPAHNRGLTGFGVKVAVLDTGISTHPDLNIRGGASFVPGEPSTQDGNGHGTHVAGTIAALNNSIGVLGVAPSAELYAVKVLGASGGGAISSIAQGLEWAGLNGMHVANLSLGNPSPSATLEQAVNSATSRGVLVVAASGNSGAGSISYPARYANAMAVGATDQNNNRASFSQYGAGLDIVAPGVNVQSTAPQLTYASLNGTSMATPHVAGAAVLVKQKNPSWSNVQIRNHLKNTATSLGSTNLYGSGLVNAEAATR

SEQ ID NO: 61792 - protein, 268 aa, Unidentified
AQSVPWGISRVQAPASHNRGLAGFGVKVAVLDTGISTHPDLNIRGGASFVPGEPSTQDGNGHGTHVAGTIAALNNSIGVLGVAPSAELYAVKVLGASGGGASSIAQGLEWAGANGMHVANLSLGNPSPSATLEQAVNSATSRGVLVVAASGNSGAGSISYPARYANAMAVGATDQNNNRASFSQYGAGLDIVAPGVNVQSTVPGSAYASLNGTSMATPHVAGAAVLVKQKNPSWSNVQIRNHLKNTATSLGSTNLYGSGLVNAEAATR

SEQ ID NO: 61793 - protein, 268 aa, Unidentified
QSVPWGISRVQAPAAHNRGLAGSGVKVAVLDTGISTHPDLNIRGGASFVPGEPSTQDGNGHGTHVAGTIAALNNSIGVLGVAPSAELYAVKVLGASGGGAISSIAQGLEWAGNNGMHVANLSLGSPSPSATLEQAVNSATSRGVLVVAASGNSGADSISYPARYANAMAVGATDQNNNRADFSQYGAGLDIVAPGVNVQSTYPGSTYASLNGTSMATPHVAGAALLVKQKNPSWSNVTIRHHLKNTATSLGSTNLYGSGLVNALAATR

SEQ ID NO: 61794 - protein, 217 aa, Bacillus licheniformis
AQSVPWGISRVQAPAAHNRGLTGSGVKVAVLDTGISTHPDLNIRGGASFVPGEPSTQDGNGHGTHVAGTIAALNNSIGVLGVAPSAELYAVKVLGASGSGSVSSIAQGLEWAGNNGMHVANLSLGSPSPSATLEQAVNSATSRGVLVVAASGNSGAGSISYPARYANAMAVGATDQNNNRASFSQYGAGLDIVAPGVNVQSTYPGSCLDLKTQVQTP

SEQ ID NO: 61795 - protein, 216 aa, Unidentified
AQSVPWGISRVQAPAAHNRGLTGSGVKVAVLDTGISTHPDLNIRGGASFVPGEPSTQDGNGHGTHVAGTIAALNNSIGVLGVAPSAELYAVKVLGASGSGSVSSIAQGLEWAGNNGMHVANLSLGSPSPSATLEQAVNSATSRGVLVVAASGNSGAGSISYPARYANAMAVGATDQNNNRASFSQYGAGLDIVAPGVNVQSTYPGALALDTALPTP

SEQ ID NO: 61796 - protein, 216 aa, Bacillus licheniformis
AQSVPWGISRVQAPAAHNRGLTGSGVKVAVLDTGISTHPDLNIRGGASFVPGEPSTQDGNGHGTHVAGTIAALNNSIGVLGVAPSAELYAVKVLGASGSGSVSSIAQGLEWAGNNGMHVANLSLGSPSPSATLEQAVNSATSRGVLVVAASGNSGAGSISYPARYANAMAVGATDQNNNRASFSQYGAGLDIVAPGVNVQSTYPGSCFVPGTLVNT

SEQ ID NO: 61797 - protein, 216 aa, Unidentified
AQSVPWGISRVQAPAAHNRGLTGSGVKVAVLDTGISTHPDLNIRGGASFVPGEPSTQDGNGHGTHVAGTIAALNNSIGVLGVAPSAELYAVKVLGASGSGSVSSIAQGLEWAGNNGMHVANLSLGSPSPSATLEQAVNSATSRGVLVVAASGNSGAGSISYPARYANAMAVGATDQNNNRASFSQYGAGLDIVAPGVNVQSTYPGQLALDTPIPTP

SEQ ID NO: 61798 - protein, 215 aa, Unidentified
AQSVPWGISRVQAPAAHNRGLTGSGVKVAVLDTGISTHPDLNIRGGASFVPGEPSTQDGNGHGTHVAGTIAALNNSIGVLGVAPSAELYAVKVLGASGSGSVSSIAQGLEWAGNNGMHVANLSLGSPSPSATLEQAVNSATSRGVLVVAASGNSGAGSISYPARYANAMAVGATDQNNNRASFSQYGAGLDIVAPGVNVQSTYPGCFIEGTEVLT

SEQ ID NO: 61799 - protein, 308 aa, Unidentified
AEEAKEKYLIGFNEQEAVSEFVEQVEANDEVAILSEEEEVEIELLHEFETIPVLSVELSPEDVDALELDPAISYIEEDAEVTTMAQSVPWGISRVQAPAAHNRGLTGSGVKVAVLDTGISTHPDLNIRGGASFVPGEPSTQDGNGHGTHVAGTIAALNNSIGVLGVAPSAELYAVKVLGASGSGSVSSIAQGLEWAGNNGMHVANLSLGSPSPSATLEQAVNSATSRGVLVVAASGNSGAGSISYPARYANAMAVGATDQNNNRASFSQYGAGLDIVAPGVNVQSTYPGSIPGDEVVWAKVDGEAKLI

SEQ ID NO: 61800 - protein, 380 aa, Unidentified
VRSKKLWIVASTALLISVAFSSSIASAAEEAKEKYLIGFNEQEAVSEFVEQVEANDEVAILSEEEEVEIELLHEFETIPVLSVELSPEDVDALELDPAISYIEEDAEVTTMAQSVPWGISRVQAPAAHNRGLTGRGVKVAVLDTGISTHPDLNIRGGASFVPGEPSTQDGNGHGTHVAGTIAALNNSIGVLGVAPSAELYAVKVLGASGSGSVSSIAQGLEWAGNNGMHVANLSLGSPSPSATLEQAVNSATSRGVLVVAASGNSGAGSISYPARYANAMAVGATDQNNNRASFSQYGAGLDIVAPGVNVQSTYPGSTYASLNGTSMATPHVAGAAALVKQKNPSRSNVQIRNHLKNTATSLGSTNLYGSGLVNAEAATR

SEQ ID NO: 61801 - protein, 380 aa, Unidentified
VRSKKLWIVASTALLISVAFSSSIASAAEEAKEKYLIGFNEQEAVSEFVEQVEANDEVAILSEEEEVEIELLHEFETIPVLSVELSPEDVDALELDPAISYIEEDAEVTTMAQSVPWGISRVQAPAAHNRRLTGSGVKVAVLDTGISTHPDLNIRGGASFVPGEPSTQDGNGHGTHVAGTIAALDNSIGVLGVAPSAELYAVKVLGASGSGSVSSIAQGLEWAGNNGMHVANLSLGSPSPSATLEQAVNSATSRGVLVVAASGNSGAGSISYPARYANAMAVGATDQNNNRASFSQYGAGLDIVAPGVNVQSTYPGSTYASLNGTSMATPHVAGAAALVKQKNPSWSNVQIRNHLKNTATSLGSTNLYGSGLVNAEAATR

SEQ ID NO: 61802 - protein, 380 aa, Unidentified
VRSKKLWIVASTALLISVAFSSSIASAAEEAKEKYLIGFNEQEAVSEFVEQVEANDEVAILSEEEEVEIELLHEFETIPVLSVELSPEDVDALELDPAISYIEEDAEVTTMAQSVPWGISRVQAPAAHNRGLTGSGVKVAVLDTGISTHPDLNIRGGASFVPGEPSTQDGNGHGTHVAGTIAALDNSIGVLGVAPSAELYAVKVLGASGSGSVSSIAQGLEWAGNNGMHVANLSLGSPSPSATLEQAVNSATSRGVLVVAASGNSGAGSISYPARYANAMAVGATDQNNNRASFSQYGAGLDIVAPGVNVQSTYPGSTYASLNGTSMATPHVAGAAALVKQKNPSWSNVQIRNRLKNTATSLGSTNLYGSGLVNAEAATR

SEQ ID NO: 61803 - protein, 380 aa, Unidentified
VRSKKLWIVASTALLISVAFSSSIASAAEEAKEKYLIGFNEQEAVSEFVEQVEANDEVAILSEEEEVEIELLHEFETIPVLSVELSPEDVDALELDPAISYIEEDAEVTTMAQSVPWGISRVQAPAAHNRGLTGSGVKVAVLDSGISTHPDLNIRGGASFVPGEPSTQDGNGHGTHVAGTIAALNNSIGVLGVAPSAELYAVKVLGASGSGSVSSIAQGLEWAGNNGMHVANLSLGSPSPSATLEQAVNSATSRGVFVVAASGNSGAGSISYPARYANAMAVGATDQNNNRASFSQYGAGLDIVAPGVNVQSTYPGSTYASLNGTSMATPHVAGAAALVKQKNPSWSNVQIRNHLKNTATSLGSTNLYGSGLVNAEAATR

SEQ ID NO: 61804 - protein, 380 aa, Unidentified
VRSKKLWIVASTALLISVAFSSSIASAAEEAKEKYLIGFNEQEAVSEFVEQVEANDEVAILSEEEEVEIELLHEFETIPVLSVELSPEDVDALELDPAISYIEEDAEVTTMAQSVPWGISRVQAPAAHNRGLTGSGVKVAVLDTGISTHPDLNIRGGASFVPGEPSTQDGNGHGTHVAGTIAALNNSIGVLGVAPSAELYAVKVLGASGSGSVSSIAQGLEWAGNNRMHVANLSLGSPSPSATLEQAVNSATSRGVLVVAASGNSGAGSISYPARYANAMAVGATDQNNNRASFSQYGAGLDIVAPGVNVQSTAPGSTYASLNGTSMATPHVAGAAALVKQKNPSWSNVQIRNHLKNTATSLGSTNLYGSGLVNAEAATR

SEQ ID NO: 61805 - protein, 380 aa, Unidentified
VRSKKLWIVASTALLISVAFSSSIASAAEEAKEKYLIGFNEQEAVSEFVEQVEANDEVAILSEEEEVEIELLHEFETIPVLSVELSPEDVDALELDPAISYIEEDAEVTTMAQSVPWGISRVQAPAAHNRGLTGSGVKVAVLDTGISTHPDLNIRGGASFVPGEPSTQDGNGHGTHVAGTIAALNNSIGVLGVAPSAELYAVKVLGASGSGSVSSIAQGLEWAGNNRMHVANLSLGSPSPSATLEQAVNSATSRGVLVVAASGNSGAGSISYPARYVNAMAVGATDQNNNRASFSQYGAGLDIVAPGVNVQSTYPGSTYASLNGTSMATPHVAGAAALVKQKNPSWSNVQIRNHLKNTATSLGSTNLYGSGLVNAEAATR

SEQ ID NO: 61806 - protein, 380 aa, Unidentified
VRSKKLWIVASTALLISVAFSSSIASAAEEAKEKYLIGFNEQEAVSEFVEQVEANDEVAILSEEEEVEIELLHEFETIPVLSVELSPEDVDALELDPAISYIEEDAEVTTMAQSVPWGISRVQAPAAHNRGLTGSGVKVAVLDTGISTHPDLNIRGGASFVPGEPSTQDGNGHGTHVAGTIAALNNSIGVLGVAPSAELYAVKVLGASGSGSVSSIAQGLEWAGNNGMHVANLSLGSPSPSATLEQAVNSATSRGVLVVAASGNSGAGSISYPARYANAMAVGATDQNNNRASFSQYGAGLDIVAPGVNVQSTYPGSTYASLNGTSMATPHVAGAAVLVKQKNPSWSNVRIRNHLKNTATSLGSTNLYGSGLVNAEAATR

SEQ ID NO: 61807 - protein, 380 aa, Unidentified
VRSKKLWIVASTALLISVAFSSSIASAAEEAKEKYLIGFNEQEAVSEFVEQVEANDEVAILSEEEEVEIELLHEFETIPVLSVELSPEDVDALELDPAISYIEEDAEVTTMAQSVPWGISRVQAPAAHNRGLTGRGVKVAVLDTGISTHPDLNIRGGASFVPGEPSTQDGNGHGTHVAGTIAALNNSIGVLGVAWSAELYAVKVLGASGSGSVSSIAQGLEWAGNNGMHVANLSLGSPSPSATLEQAVNSATSRGVLVVAASGNSGAGSISYPARYANAMAVGATDQNNNRASFSQYGAGLDIVAPGVNVQSTYPGSTYASLNGTSMATPHVAGAAALVKQKNPSWSNVQIRNHLKNTATSLGSTNLYGSGLVNAEAATR

SEQ ID NO: 61808 - protein, 380 aa, Unidentified
VRSKKLWIVASTALLISVAFSSSIASAAEEAKEKYLIGFNEQEAVSEFVEQVEANDEVAILSEEEEVEIELLHEFETIPVLSVELSPEDVDALELDPAISYIEEDAEVTTMAQSVPWGISRVQAPAAHNRGLTGSGVKVAVLDTGISTHPDLNIRGGASFVPGEPSTQDGNGHGTHVAGTIAALNNSIGVLGVAPSAELYAVKVLGASGSGSVSSIAQGLEWAGNNGMHVANLSLGSPSPSATLEQAVNSATSRGVLVVAASGNSGAGSISYPARYANAMAVGATDQNNNRASFSQYGAGLDIVAPGVNVQSTYPGSTYASLNGTSMATPHVAGAAVLVKQKNPSWSNVQIRNRLKNTATSLGSTNLYGSGLVNAEAATR

SEQ ID NO: 61809 - protein, 380 aa, Unidentified
VRSKKLWIVASTALLISVAFSSSIASAAEEAKEKYLIGFNEQEAVSEFVEQVEANDEVAILSEEEEVEIELLHEFETIPVLSVELSPEDVDALELDPAISYIEEDAEVTTMAQSVPWGISRVQAPAAHRRGLTGSGVKVAVLDTGISTHPDLNIRGGASFVPGEPSTQDGNGHGTHVAGTIAALNNSIGVLGVAPSAELYAVKVLGASGSGSISSIAQGLEWAGNNGMHVANLSLGSPSPSATLEQAVNSATSRGVLVVAASGNSGAGSISYPARYANAMAVGATDQNNNRASFSQYGAGLDIVAPGVNVQSTYPGSTYASLNGTSMATPHVAGAAALVKQKNPSWSNVQIRNHLKNTATSLGSTNLYGSGLVNAEAATR

SEQ ID NO: 61810 - protein, 380 aa, Unidentified
VRSKKLWIVASTALLISVAFSSSIASAAEEAKEKYLIGFNEQEAVSEFVEQVEANDEVAILSEEEEVEIELLHEFETIPVLSVELSPEDVDALELDPAISYIEEDAEVTTMAQSVPWGISRVQAPAAHNRGLTGRGVKVAVLDTGISTHPDLNITGGASFVPGEPSTQDGNGHGTHVAGTIAALNNSIGVLGVAPSAELYAVKVLGASGSGSVSSIAQGLEWAGNNGMHVANLSLGSPSPSATLEQAVNSATSRGVLVVAASGNSGAGSISYPARYANAMAVGATDQNNNRASFSQYGAGLDIVAPGVNVQSTYPGSTYASLNGTSMATPHVAGAAALVKQKNPSWSNVQIRNHLKNTATSLGSTNLYGSGLVNAEAATR

SEQ ID NO: 61811 - protein, 380 aa, Unidentified
VRSKKLWIVASTALLISVAFSSSIASAAEEAKEKYLIGFNEQEAVSEFVEQVEANDEVAILSEEEEVEIELLHEFETIPVLSVELSPEDVDALELDPAISYIEEDAEVTTMAQSVPWGISRVQAPAAHNRGLTGRGVKVAVLDTGISTHPDLNIRGGASFVPGEPSTQDGNGHGTHVAGTIAALNNSIGVLGVAPSAELYAVKVLGASGGGSVSSIAQGLEWAGNNGMHVANLSLGSPSPSATLEQAVNSATSRGVLVVAASGNSGAGSISYPARYANAMAVGATDQNNNRASFSQYGAGLDIVAPGVNVQSTYPGSTYASLNGTSMATPHVAGAAALVKQKNPSWSNVQIRNHLKNTATSLGSTNLYGSGLVNAEAATR

SEQ ID NO: 61812 - protein, 380 aa, Unidentified
VRSKKLWIVASTALLISVAFSSSIASAAEEAKEKYLIGFNEQEAVSEFVEQVEANDEVAILSEEEEVEIELLHEFETIPVLSVELSPEDVDALELDPAISYIEEDAEVTTMAQSVPWGISRVQAPAAHNRGLTGSGVKVAVLDTGISTHPDLNIRGGASFVPGEPSTQDGNGHGTHVAGTIAALNNRIGVLGVAPSAELYAVKVLGASGSGSVSSIAQGLEWAGNNGMHVANLSLGSPSPSATLEQAVNSATSRGVLVVAASGNSGAGSISYPARYANAMAVGATDQNNNRASFSQYGAGLDIVAPGVNVQSTYPGSTYASLNGTSMATPHVAGAAALVFQKNPSWSNVQIRNHLKNTATSLGSTNLYGSGLVNAEAATR

SEQ ID NO: 61813 - protein, 380 aa, Unidentified
VRSKKLWIVASTALLISVAFSSSIASAAEEAKEKYLIGFNEQEAVSEFVEQVEANDEVAILSEEEEVEIELLHEFETIPVLSVELSPEDVDALELDPAISYIEEDAEVTTMAQSVPWGISRVQAPAAHNRGLTGSGVKVAVLDTGISTHPDLNIRGGASFVPGEPSTQDGNGHGTHVAGTIAALNNSIGVLGVAPSAELYAVKVLGASGSGSVSSIAQGLEWAGNNGMHVANLSLGSPSPSATLEQAVNSATSRGVLVVAASGNSGAGSISYPARYANAMAVGATDQNNNRASFSQYGAGLDIVAPGVNVQSTYPGSTYASLNGTSMATPHVAGAAALVFQKNPSWSFVQIRNHLKNTATSLGSTNLYGSGLVNAEAATR

SEQ ID NO: 61814 - protein, 380 aa, Unidentified
VRSKKLWIVASTALLISVAFSSSIASAAEEAKEKYLIGFNEQEAVSEFVEQVEANDEVAILSEEEEVEIELLHEFETIPVLSVELSPEDVDALELDPAISYIEEDAEVTTMAQSVPWGISRVQAPAAHNRGLTGSGVKVAVLDTGISTHPDLNIRGGASFVPGEPSTQDGNGHGTHVAGTIAALNNSIGVLGVAPSAELYAVKVLGASGGGSVSSIAQGLEWAGNNGMHVANLSLGSPSPSATLEQAVNSATSRGVLVVAASGNSGAGSISYPARYANAMAVGATDQNNNRASFSQYGAGLDIVAPGVNVQSTYPGSTYASLNGTSMATPHVAGAAALVKQKNPSWSNVQIRNRLKNTATSLGSTNLYGSGLVNAEAATR

SEQ ID NO: 61815 - protein, 380 aa, Unidentified
VRSKKLWIVASTALLISVAFSSSIASAAEEAKEKYLIGFNEQEAVSEFVEQVEANDEVAILSEEEEVEIELLHEFETIPVLSVELSPEDVDALELDPAISYIEEDAEVTTMAQSVPWGISRVQAPAAHNRGLTGSGVKVAVLDTGISTHPDLNIRGGASFVPGEPSTQDGNGHGTHVAGTIAALNNRIGVLGVAPSAELYAVKVLGASGSGSVSSIAQGLEWAGNNRMHVANLSLGSPSPSATLEQAVNSATSRGVLVVAASGNSGAGSISYPARYANAMAVGATDQNNNRASFSQYGAGLDIVAPGVNVQSTYPGSTYASLNGTSMATPHVAGAAALVKQKNPSWSNVQIRNHLKNTATSLGSTNLYGSGLVNAEAATR

SEQ ID NO: 61816 - protein, 380 aa, Unidentified
VRSKKLWIVASTALLISVAFSSSIASAAEEAKEKYLIGFNEQEAVSEFVEQVEANDEVAILSEEEEVEIELLHEFETIPVLSVELSPEDVDALELDPAISYIEEDAEVTTMAQSVPWGISRVQAPAAHRRGLTGSGVKVAVLDTGISTHPDLNIRGGASFVPGEPSTQDGNGHGTHVAGTIAALNNSIGVLGVAPSAELYAVKVLGASGSGSVSSIAQGLEWAGNNGMHVANLSLGSPSPSATLEQAVNSATSRGVLVVAASGNSGAGSISYPARYANAMAVGATDQNNNRASFSQYGAGLDIVAPGVNVQSTYPGSTYASLNGTSMATPHVAGAAALVKQKNPSWSNVRIRNHLKNTATSLGSTNLYGSGLVNAEAATR

SEQ ID NO: 61817 - protein, 380 aa, Unidentified
VRSKKLWIVASTALLISVAFSSSIASAAEEAKEKYLIGFNEQEAVSEFVEQVEANDEVAILSEEEEVEIELLHEFETIPVLSVELSPEDVDALELDPAISYIEEDAEVTTMAQSVPWGISRVQAPAAHNRGLTGSGVKVAVLDTGISTHPDLNIRGGASFVPGEPSTQDGNGHGTHVAGTIAALNNSIGVLGVAPSAELYAVKVLGASGGGSVSSIAQGLEWAGNNGMHVANLSLGSPSPSATLEQAVNSATSRGVLVVAASGNSGAGSISYPARYANAMAVGATDQNNNRASFSQYGAGLDIVAPGVNVQSTYPGSTYASLNGTSMATPHVAGAAVLVKQKNPSWSNVQIRNHLKNTATSLGSTNLYGSGLVNAEAATR

SEQ ID NO: 61818 - protein, 380 aa, Unidentified
VRSKKLWIVASTALLISVAFSSSIASAAEEAKEKYLIGFNEQEAVSEFVEQVEANDEVAILSEEEEVEIELLHEFETIPVLSVELSPEDVDALELDPAISYIEEDAEVTTMAQSVPWGISRVQAPAAHNRGLTGSGVKVAVLDTGISTHPDLNIRGGASFVPGEPSTQDGNGHGTHVAGTIAALNNSIGVLGVAPSAELYAVKVLGASGGGSISSIAQGLEWAGNNGMHVANLSLGSPSPSATLEQAVNSATSRGVLVVAASGNSGAGSISYPARYANAMAVGATDQNNNRASFSQYGAGLDIVAPGVNVQSTYPGSTYASLNGTSMATPHVAGAAALVKQKNPSWSNVQIRNHLKNTATSLGSTNLYGSGLVNAEAATR

SEQ ID NO: 61819 - protein, 380 aa, Unidentified
VRSKKLWIVASTALLISVAFSSSIASAAEEAKEKYLIGFNEQEAVSEFVEQVEANDEVAILSEEEEVEIELLHEFETIPVLSVELSPEDVDALELDPAISYIEEDAEVTTMAQSVPWGISRVQAPAAHNRGLTGSGVKVAVLDSGISTHPDLNIRGGASFVPGEPSTQDGNGHGTHVAGTIAALNNSIGVLGVAPSAELYAVKVLGASGSGSVSSIAQGLEWAGNNGMHVANLSLGSPSPSATLEQAVNSATSRGVLVVAASGNSGAGSISYPARYANAMAVGATDQNNNRASFSQYGAGLDIVAPGVNVQSTYPGSTYASLNGTSMATPHVAGAAALVKQKNPSWSFVQIRNHLKNTATSLGSTNLYGSGLVNAEAATR

SEQ ID NO: 61820 - protein, 380 aa, Unidentified
VRSKKLWIVASTALLISVAFSSSIASAAEEAKEKYLIGFNEQEAVSEFVEQVEANDEVAILSEEEEVEIELLHEFETIPVLSVELSPEDVDALELDPAISYIEEDAEVTTMAQSVPWGISRVQAPAAHNRGLTGSGVKVAVLDTGISTHPDLNIRGGASFVPGEPSTQDGNGHGTHVAGTIAALNNSIGVLGVAPSAELYAVKVLGASGSGSVSSIAQGLEWAGNNRMHVANLSLGSPSPSATLEQAVNSATSRGVLVVAASGNSGAGSISYPARYANAMAVGATDQNNNRASFSQYGTGLDIVAPGVNVQSTYPGSTYASLNGTSMATPHVAGAAALVKQKNPSWSNVQIRNHLKNTATSLGSTNLYGSGLVNAEAATR

SEQ ID NO: 61821 - protein, 380 aa, Unidentified
VRSKKLWIVASTALLISVAFSSSIASAAEEAKEKYLIGFNEQEAVSEFVEQVEANDEVAILSEEEEVEIELLHEFETIPVLSVELSPEDVDALELDPAISYIEEDAEVTTMAQSVPWGISRVQAPAAHNRGLTGSGVKVAVLDTGISTHPDLNIRGGASFVPGEPSTQDGNGHGTHVAGTIAALNNSIGVLGVAPSAELYAVKVLGASGSGSISSIAQGLEWAGNNGMHVANLSLGSPSPSATLEQAVNSATSRGVLVVAASGNSGAGSISYPARYANAMAVGATDQNNNRASFSQYGAGLDIVAPGVNVQSTYPGSTYASLNGTSMATPHVAGAAVLVKQKNPSWSNVQIRNHLKNTATSLGSTNLYGSGLVNAEAATR

SEQ ID NO: 61822 - protein, 380 aa, Unidentified
VRSKKLWIVASTALLISVAFSSSIASAAEEAKEKYLIGFNEQEAVSEFVEQVEANDEVAILSEEEEVEIELLHEFETIPVLSVELSPEDVDALELDPAISYIEEDAEVTTMAQSVPWGISRVQAPAAHNRKLTGFGVKVAVLDTGISTHPDLNIRGGASFVPGEPSTQDGNGHGTHVAGTIAALNNSIGVLGVAPSAELYAVKVLGASGSGSVSSIAQGLEWAGNNGMHVANLSLGSPSPSATLEQAVNSATSRGVLVVAASGNSGAGSISYPARYANAMAVGATDQNNNRASFSQYGAGLDIVAPGVNVQSTYPGSTYASLNGTSMATPHVAGAAALVKQKNPSWSNVQIRNHLKNTATSLGSTNLYGSGLVNAEAATR

SEQ ID NO: 61823 - protein, 380 aa, Unidentified
VRSKKLWIVASTALLISVAFSSSIASAAEEAKEKYLIGFNEQEAVSEFVEQVEANDEVAILSEEEEVEIELLHEFETIPVLSVELSPEDVDALELDPAISYIEEDAEVTTMAQSVPWGISRVQAPAAHNRGLTGRGVKVAVLDTGISTHPDLNIRGGASFVPGEPSTQDGNGHGTHVAGTIAALNNSIGVLGVAPSAELYAVKVLGASGSGSVSSIAQGLEWAGNNRMHVANLSLGSPSPSATLEQAVNSATSRGVLVVAASGNSGAGSISYPARYANAMAVGATDQNNNRASFSQYGAGLDIVAPGVNVQSTYPGSTYASLNGTSMATPHVAGAAALVKQKNPSWSNVQIRNHLKNTATSLGSTNLYGSGLVNAEAATR

SEQ ID NO: 61824 - protein, 380 aa, Unidentified
VRSKKLWIVASTALLISVAFSSSIASAAEEAKEKYLIGFNEQEAVSEFVEQVEANDEVAILSEEEEVEIELLHEFETIPVLSVELSPEDVDALELDPAISYIEEDAEVTTMAQSVPWGISRVQAPAAHNRGLTGRGVKVAVLDTGISTHPDLNIRGGASFVPGEPSTQDGNGHGTHVAGTIAALNNSIGVLGVAPSAELYAVKVLGASGSGSVSSIAQGLEWAGNNGMHVANLSLGSPSPSATLEQAVNSATSRGVLVVAASGNSGAGSISYPARYANAMAVGATDQNNNRASFSQYGAGLDIVAPGVNVQSTYPGSTYASLNGTSMATPHVAGAAALVKQKNPSWSNVQIRNHLKNTATSLGSTNLYGSGLVCAEAATR

SEQ ID NO: 61825 - protein, 380 aa, Unidentified
VRSKKLWIVASTALLISVAFSSSIASAAEEAKEKYLIGFNEQEAVSEFVEQVEANDEVAILSEEEEVEIELLHEFETIPVLSVELSPEDVDALELDPAISYIEEDAEVTTMAQSVPWGISRVQAPAAHRRGLTGSGVKVAVLDTGISTHPDLNITGGASFVPGEPSTQDGNGHGTHVAGTIAALNNSIGVLGVAPSAELYAVKVLGASGSGSVSSIAQGLEWAGNNGMHVANLSLGSPSPSATLEQAVNSATSRGVLVVAASGNSGAGSISYPARYANAMAVGATDQNNNRASFSQYGAGLDIVAPGVNVQSTYPGSTYASLNGTSMATPHVAGAAALVKQKNPSWSNVQIRNHLKNTATSLGSTNLYGSGLVNAEAATR

SEQ ID NO: 61826 - protein, 380 aa, Unidentified
MRSKKLWIVASTALLISVAFSSSIASAAEEAKEKYLIGFNEQEAVSEFVEQVEANDEVAILSEEEEVEIELLHEFETIPVLSVELSPEDVDALELDPAISYIEEDAEVTTMAQSVPWGISRVQAPAAHNRGLTGSGVKVAVLDTGISTHPDLNIRGGASFVPGEPSTQDGNGHGTHVAGTIAALNNSIGVLGVAPNAELYAVKVLGASGGGSNSSIAQGLEWAGNNGMHVANLSLGSPSPSATLEQAVNSATSRGVLVVAASGNSGAGSISYPARYANAMAVGATDQNNNRASFSQYGAGLDIVAPGVNVQSTYPGSTYASLNGTSMATPHVAGAAALVKQKNPSWSNVQIRNHLKNTATSLGSTNLYGSGLVNAEAATR

SEQ ID NO: 61827 - protein, 380 aa, Unidentified
VRSKKLWIVASTALLISVAFSSSIASAAEEAKEKYLIGFNEQEAVSEFVEQVEANDEVAILSEEEEVEIELLHEFETIPVLSVELSPEDVDALELDPAISYIEEDAEVTTMAQSVPWGISRVQAPAAHNRGLTGRGVKVAVLDTGISTHPDLNIRGGASFVPGEPSTQDGNGHGTHVAGTIAALNNSIGVLGVARSAELYAVKVLGASGSGSVSSIAQGLEWAGNNGMHVANLSLGSPSPSATLEQAVNSATSRGVLVVAASGNSGAGSISYPARYANAMAVGATDQNNNRASFSQYGAGLDIVAPGVNVQSTYPGSTYASLNGTSMATPHVAGAAALVKQKNPSWSNVQIRNHLKNTATSLGSTNLYGSGLVNAEAATR

SEQ ID NO: 61828 - protein, 380 aa, Unidentified
VRSKKLWIVASTALLISVAFSSSIASAAEEAKEKYLIGFNEQEAVSEFVEQVEANDEVAILSEEEEVEIELLHEFETIPVLSVELSPEDVDALELDPAISYIEEDAEVTTMAQSVPWGISRVQAPAAHNRKLTGSGVKVAVLDTGISTHPDLNIRGGASFVPGEPSTQDGEGHGTHVAGTIAALNNSIGVLGVAPSAELYAVKVLGASGSGSVSSIAQGLEWAGNNGMHVANLSLGSPSPSATLEQAVNSATSRGVLVVAASGNSGAGSISYPARYANAMAVGATDQNNNRASFSQYGAGLDIVAPGVNVQSTYPGSTYASLNGTSMATPHVAGAAALVKQKNPSWSNVQIRNHLKNTATSLGSTNLYGSGLVNAEAATR

SEQ ID NO: 61829 - protein, 380 aa, Unidentified
VRSKKLWIVASTALLISVAFSSSIASAAEEAKEKYLIGFNEQEAVSEFVEQVEANDEVAILSEEEEVEIELLHEFETIPVLSVELSPEDVDALELDPAISYIEEDAEVTTMAQSVPWGISRVQAPAAHNRGLTGSGVKVAVLDTGISTHPDLNIRGGASFVPGEPSTQDGNGHGTHVAGTIAALNNSIGVLGVAWSAELYAVKVLGASGSGSVSSIAQGLEWAGNNGMHVANLSLGSPSPSATLEQAVNSATSRGVLVVAASGNSGAGSISYPARYANAMAVGATDQNNNRASFSQYGAGLDIVAPGVNVQSTYPGSTYASLNGTSMATPHVAGAAALVFQKNPSWSNVQIRNHLKNTATSLGSTNLYGSGLVNAEAATR

SEQ ID NO: 61830 - protein, 380 aa, Unidentified
VRSKKLWIVASTALLISVAFSSSIASAAEEAKEKYLIGFNEQEAVSEFVEQVEANDEVAILSEEEEVEIELLHEFETIPVLSVELSPEDVDALELDPAISYIEEDAEVTTMAQSVPWGISRVQAPAAHNRGLTGRGVKVAVLDTGISTHPDLNIRGGASFVPGEPSTQDGNGHGTHVAGTIAALNNSIGVLGVAPSAELYAVKVLGASGSGSVSSIAQGLEWAGNNGMHVANLSLGSPSPSATLEQAVNSATSRGVLVVAASGNSGAGSISYPARYANAMAVGATDQNNNRASFSQYGAGLDIVAPGVNVQSTYPGSTYASLNGTSMATPHVAGAAALVKQKNPSWSNVQIHNHLKNTATSLGSTNLYGSGLVNAEAATR

SEQ ID NO: 61831 - protein, 380 aa, Unidentified
VRSKKLWIVASTALLISVAFSSSIASAAEEAKEKYLIGFNEQEAVSEFVEQVEANDEVAILSEEEEVEIELLHEFETIPVLSVELSPEDVDALELDPAISYIEEDAEVTTMAQSVPWGISRVQAPAAHNRGLTGSGVKVAVLDSGISTHPDLNIRGGASFVPGEPSTQDGNGHGTHVAGTIAALNNSIGVLGVAPSAELYAVKVLGASGSGSVSSIAQGLEWAGNNGMHVANLSLGSPSPSATLEQAVNSATSRGVLVVAASGNSGAGSISYPARYANAMAVGATDQNNNRASFSQYGAGLDIVAPGVNVQSTYPGSTYASLNGTSMATPHVAGAAALVFQKNPSWSNVQIRNHLKNTATSLGSTNLYGSGLVNAEAATR

SEQ ID NO: 61832 - protein, 380 aa, Unidentified
VRSKKLWIVASTALLISVAFSSSIASAAEEAKEKYLIGFNEQEAVSEFVEQVEANDEVAILSEEEEVEIELLHEFETIPVLSVELSPEDVDALELDPAISYIEEDAEVTTMAQSVPWGISRVQAPAAHNRGLTGRGVKVAVLDSGISTHPDLNIRGGASFVPGEPSTQDGNGHGTHVAGTIAALNNSIGVLGVAPSAELYAVKVLGASGSGSVSSIAQGLEWAGNNGMHVANLSLGSPSPSATLEQAVNSATSRGVLVVAASGNSGAGSISYPARYANAMAVGATDQNNNRASFSQYGAGLDIVAPGVNVQSTYPGSTYASLNGTSMATPHVAGAAALVKQKNPSWSNVQIRNHLKNTATSLGSTNLYGSGLVNAEAATR

SEQ ID NO: 61833 - protein, 380 aa, Unidentified
VRSKKLWIVASTALLISVAFSSSIASAAEEAKEKYLIGFNEQEAVSEFVEQVEANDEVAILSEEEEVEIELLHEFETIPVLSVELSPEDVDALELDPAISYIEEDAEVTTMAQSVPWGISRVQAPAAHNRGLTGSGVKVAVLDSGISTHPDLNIRGGASFVPGEPSTQDGNGHGTHVAGTIAALNNSIGVLGVAPSAELYAVKVLGASGSGSVSSIAQGLEWAGNNGMHVANLSLGSPSPSATLEQAVNSATSRGVLVVAASGNSGAGSISYPARYANAMAVGATDQNNNRASFSQYGAGLDIVAPGVNVQSTYPGSTYASLNGTSMATPHVAGAAALVKQKNPSRSNVQIRNHLKNTATSLGSTNLYGSGLVNAEAATR

SEQ ID NO: 61834 - protein, 380 aa, Unidentified
VRSKKLWIVASTALLISVAFSSSIASAAEEAKEKYLIGFNEQEAVSEFVEQVEANDEVAILSEEEEVEIELLHEFETIPVLSVELSPEDVDALELDPAISYIEEDAEVTTMAQSVPWGISRVQAPAAHNRGLTGSGVKVAVLDTGISTHPDLNIRGGASFVPGEPSTQDGNGHGTHVAGTIAALNNSIGVLGVAPSAELYAVKVLGASGSGSVSSIAQGLEWAGNNGMHVANLSLGSPSPSATLEQAVNSATSRGVLVVAASGNSGAGSISYPARYANAMAVGATDQNNNRASFSQYGAGLDIVAPGVNVQSTAPGSTYASLNGTSMATPHVAGAAALVKQKNPSRSNVQIRNHLKNTATSLGSTNLYGSGLVNAEAATR

SEQ ID NO: 61835 - protein, 380 aa, Unidentified
VRSKKLWIVASTALLISVAFSSSIASAAEEAKEKYLIGFNEQEAVSEFVEQVEANDEVAILSEEEEVEIELLHEFETIPVLSVELSPEDVDALELDPAISYIEEDAEVTTMAQSVPWGISRVQAPAAHNRGLTGSGVKVAVLDSGISTHPDLNIRGGASFVPGEPSTQDGNGHGTHVAGTIAALNNSIGVLGVAPSAELYAVKVLGASGSGSVSSIAQGLEWAGNNGMHVANLSLGSPSPSATLEQAVNSATSRGVLVVAASGNSGAGSISYPARYANAMAVGATDQNNNRASFSQYGAGLDIVAPGVNVQSTYPGSTYASLNGTSMATPHVAGAAALVKQKNTSWSNVQIRNHLKNTATSLGSTNLYGSGLVNAEAATR

SEQ ID NO: 61836 - protein, 380 aa, Unidentified
VRSKKLWIVASTALLISVAFSSSIASAAEEAKEKYLIGFNEQEAVSEFVEQVEANDEVAILSEEEEVEIELLHEFETIPVLSVELSPEDVDALELDPAISYIEEDAEVTTMAQSVPWGISRVQAPAAHNRGLTGRGVKVAVLDTGISTHPDLNIRGGASFVPGEPSTQDGNGHGTHVAGTIAALNNSIGVLGVAPSAELYAVKVLGASGSGSVSSIAQGLEWAGNNGMHVANLSLGSPSPSATLEQAVNSATSRGVLVVAASGNSGAGSISYPARYANAMAVGATDQNNNRASFSQYGAGLDIVAPGVNVQSTYPGSTYASLNGTSMATPHVAGAAALVFQKNPSWSNVQIRNHLKNTATSLGSTNLYGSGLVNAEAATR

SEQ ID NO: 61837 - protein, 380 aa, Unidentified
VRSKKLWIVASTALLISVAFSSSIASAAEEAKEKYLIGFNEQEAVSEFVEQVEANDEVAILSEEEEVEIELLHEFETIPVLSVELSPEDVDALELDPAISYIEEDAEVTTMAQSVPWGISRVQAPAAHNRGLTGSGVKVAVLDSGISTHPDLNIRGGASFVPGEPSTQDGNGHGTHVAGTIAALNNSIGVLGVAPSAELYAVKVLGASGSGSVSSIAQGLEWAGNNGMHVANLSLGSPSPSATLEQAVNSATSRGVLVVAASGNSGAGSISYPARYANAMAVGATDQNNNRASFSQYGAGLDIVAPGVNVQSTYPGSTYASLNGTSMATPHVAGAAALVKQKNPSWSNVQIRNHLKNAATSLGSTNLYGSGLVNAEAATR

SEQ ID NO: 61838 - protein, 380 aa, Unidentified
VRSKKLWIVASTALLISVAFSSSIASAAEEAKEKYLIGFNEQEAVSEFVEQVEANDEVAILSEEEEVEIELLHEFETIPVLSVELSPEDVDALELDPAISYIEEDAEVTTMAQSVPWGISRVQAPAAHNRGLTGSGVKVAVLDSGISTHPDLNIRGGASFVPGEPSTQDGNGHGTHVAGTIAALNNSIGVLGVAWSAELYAVKVLGASGSGSVSSIAQGLEWAGNNGMHVANLSLGSPSPSATLEQAVNSATSRGVLVVAASGNSGAGSISYPARYANAMAVGATDQNNNRASFSQYGAGLDIVAPGVNVQSTYPGSTYASLNGTSMATPHVAGAAALVKQKNPSWSNVQIRNHLKNTATSLGSTNLYGSGLVNAEAATR

SEQ ID NO: 61839 - protein, 380 aa, Unidentified
VRSKKLWIVASTALLISVAFSSSIASAAEEAKEKYLIGFNEQEAVSEFVEQVEANDEVAILSEEEEVEIELLHEFETIPVLSVELSPEDVDALELDPAISYIEEDAEVTTMAQSVPWGISRVQAPAAHNRGLTGRGVKVAVLDTGISTHPDLNIRGGASFVPGEPSTQDGNGHGTHVAGTIAALNNSIGVLGVAPSAELYAVKVLGASGSGSVSSIAQGLEWAGNNGMHVANLSLGSPSPSATLEQAVNSATSRGVLVVAASGNSGAGSISYPARYANAMAVGATDQNNNRASFSQYGAGLDIVAPGVNVQSTYPGSTYASLNGTSMATPHVAGAAVLVKQKNPSWSNVQIRNHLKNTATSLGSTNLYGSGLVNAEAATR

SEQ ID NO: 61840 - protein, 380 aa, Unidentified
VRSKKLWIVASTALLISVAFSSSIASAAEEAKEKYLIGFNEQEAVSEFVEQVEANDEVAILSEEEEVEIELLHEFETIPVLSVELSPEDVDALELDPAISYIEEDAEVTTMAQSVPWGISRVQAPAAHNRGLTGSGVKVAVLDTGISTHPDLNIRGGASFVPGEPSTQDGNGHGTHVAGTIAALNNSIGVLGVAPSAELYAVKVLGASGSGSVSSIAQGLEWAGNNGMHVANLSLGSPSPSATLEQAVNSATSRGVLVVAASGNSGAGSISYPARYANAMAVGATDQNNNRASFSQYGAGLDIVAPGVNVQSTAPGSTYASLNGTSMATPHVAGAAALVKQKNPSWSFVQIRNHLKNTATSLGSTNLYGSGLVNAEAATR

SEQ ID NO: 61841 - protein, 380 aa, Unidentified
VRSKKLWIVASTALLISVAFSSSIASAAEEAKEKYLIGFNEQEAVSEFVEQVEANDEVAILSEEEEVEIELLHEFETIPVLSVELSPEDVDALELDPAISYIEEDAEVTTMAQSVPWGISRVQAPAAHNRGLTGSGVKVAVLDTGISTHPDLNIRGGASFVPGEPSTQDGNGHGTHVAGTIAALNNSIGVLGVAPSAELYAVKVLGASGSGSVSSIAQGLEWAGNNGMHVANLSLGSPSPSATLEQAVNSATSRGVLVVAASGNSGAGSISYPARYANAMAVGATDQNNNRASFSQYGAGLDIVAPGVNVQSTAPGSTYASLNGTSMATPHVAGAAALVFQKNPSWSNVQIRNHLKNTATSLGSTNLYGSGLVNAEAATR

SEQ ID NO: 61842 - protein, 380 aa, Unidentified
VRSKKLWIVASTALLISVAFSSSIASAAEEAKEKYLIGFNEQEAVSEFVEQVEANDEVAILSEEEEVEIELLHEFETIPVLSVELSPEDVDALELDPAISYIEEDAEVTTMAQSVPWGISRVQAPAAHNRGLTGSGVKVAVLDTGISTHPDLNIRGGASFVPGEPSTQDGNGHGTHVAGTIAALNNSIGVLGVAPSAELYAVKVLGASGSGAVSSIAQGLEWAGNNGMHVANLSLGSPSPSATLEQAVNSATSRGVLVVAASGNSGAGSISYPARYANAMAVGATDQNNNRASFSQYGAGLDIVAPGVNVQSTYPGSTYASLNGTSMATPHVAGAAVLVKQKNPSWSNVQIRNHLKNTATSLGSTNLYGSGLVNAEAATR

SEQ ID NO: 61843 - protein, 380 aa, Unidentified
VRSKKLWIVASTALLISVAFSSSIASAAEEAKEKYLIGFNEQEAVSEFVEQVEANDEVAILSEEEEVEIELLHEFETIPVLSVELSPEDVDALELDPAISYIEEDAEVTTMAQSVPWGISRVQAPAAHNRGLTGFGVKVAVLDTGISTHPDLNIRGGASFVPGEPSTQDGNGHGTHVAGTIAALNNSIGVLGVAPSAELYAVKVLGASGSGSVSSIAQGLEWAGLNGMHVANLSLGSPSPSATLEQAVNSATSRGVLVVAASGNSGAGSISYPARYANAMAVGATDQNNNRASFSQYGAGLDIVAPGVNVQSTYPGSTYASLNGTSMATPHVAGAAALVKQKNPSWSNVQIRNHLKNTATSLGSTNLYGSGLVNAEAATR

SEQ ID NO: 61844 - protein, 380 aa, Unidentified
VRSKKLWIVASTALLISVAFSSSIASAAEEAKEKYLIGFNEQEAVSEFVEQVEANDEVAILSEEEEVEIELLHEFETIPVLSVELSPEDVDALELDPAISYIEEDAEVTTMAQSVPWGISRVQAPAAHNRGLTGSGVKVAVLDTGISTHPDLNIRGGASFVPGEPSTQDGNGHGTHVAGTIAALNNSIGVLGVAWSAELYAVKVLGASGSGSVSSIAQGLEWAGNNGMHVANLSLGSPSPSATLEQAVNSATSRGVLVVAASGNSGAGSISYPARYANAMAVGATDQNNNRASFSQYGAGLDIVAPGVNVQSTYPGSTYASLNGTSMATPHVAGAAALVKQKNPSWSFVQIRNHLKNTATSLGSTNLYGSGLVNAEAATR

SEQ ID NO: 61845 - protein, 380 aa, Unidentified
VRSKKLWIVASTALLISVAFSSSIASAAEEAKEKYLIGFNEQEAVSEFVEQVEANDEVAILSEEEEVEIELLHEFETIPVLSVELSPEDVDALELDPAISYIEEDAEVTTMAQSVPWGISRVQAPAAHNRGLTGSGVKVAVLDTGISTHPDLNIRGGASFVPGEPSTQDGNGHGTHVAGTIAALNNSIGVLGVAPSAELYAVKVLGASGSGSVSSIAQGLEWAGNNGMHVANLSLGSPSPSATLEQAVNSAASRGVLVVAASGNSGAGSISYPARYANAMAVGATDQNNNRASFSQYGAGLDIVAPGVNVQSTAPGSTYASLNGTSMATPHVAGAAALVKQKNPSWSNVQIRNHLKNTATSLGSTNLYGSGLVNAEAATR

SEQ ID NO: 61846 - protein, 380 aa, Unidentified
VRSKKLWIVASTALLISVAFSSSIASAAEEAKEKYLIGFNEQEAVSEFVEQVEANDEVAILSEEEEVEIELLHEFETIPVLSVELSPEDVDALELDPAISYIEEDAEVTTMAQSVPWGISRVQAPAAHNRGLTGSGVKVAVLDTGISTHPDLNIRGGASFVPGEPSTQDGNGHGTHVAGTIAALDNSIGVLGVAPSAELYAVKVLGASGSGSVSSIAQGLEWAGNNGMHVANLSLGSPSPSATLEQAVNSATSRGVLVVAASGNSGAGSISYPARYANAMAVGATDQNNNRASFSQYGAGLDIVAPGVNVQSTYPGSTYASLNGTSMATPHVAGAAALVKQKNPSWSNVRIRNHLKNTATSLGSTNLYGSGLVNAEAATR

SEQ ID NO: 61847 - protein, 380 aa, Unidentified
VRSKKLWIVASTALLISVAFSSSIASAAEEAKEKYLIGFNEQEAVSEFVEQVEANDEVAILSEEEEVEIELLHEFETIPVLSVELSPEDVDALELDPAISYIEEDAEVTTMAQSVPWGISRVQAPAAHNRGLTGRGVKVAVLDTGISTHPDLNIRGGASFVPGEPSTQDGNGHGTHVAGTIAALNNSIGVLGVAPSAELYAVKVLGASGSGSVSSIAQGLEWAGNNGMHVANLSLGSPSPSATLEQAVNGATSRGVLVVAASGNSGAGSISYPARYANAMAVGATDQNNNRASFSQYGAGLDIVAPGVNVQSTYPGSTYASLNGTSMATPHVAGAAALVKQKNPSWSNVQIRNHLKNTATSLGSTNLYGSGLVNAEAATR

SEQ ID NO: 61848 - protein, 380 aa, Unidentified
VRSKKLWIVASTALLISVAFSSSIASAAEEAKEKYLIGFNEQEAVSEFVEQVEANDEVAILSEEEEVEIELLHEFETIPVLSVELSPEDVDALELDPAISYIEEDAEVTTMAQSVPWGISRVQAPAAHNRGLTGRGVKVAVLDTGISTHPDLNIRGGASFVPGEPSTQDGNGHGTHVAGTIAALNNSIGVLGVAPSAELYAVKVLGASGSGSVSSIAQGLEWAGNNGMHVANLSLGSPSPSATLEQAVNSATSRGVLVVAASGNSGAGSISYPARYANAMAVGATDQNNNRASFSQYGAGLDIVAPGVNVQSTYPGSTYASLNGTSMATPHVAGAAALVKQKNPSWSNVQIRNHLKNTATSLGSTNLYGSGLVNAEPATR

SEQ ID NO: 61849 - protein, 380 aa, Unidentified
VRSKKLWIVASTALLISVAFSSSIASAAEEAKEKYLIGFNEQEAVSEFVEQVEANDEVAILSEEEEVEIELLHEFETIPVLSVELSPEDVDALELDPAISYIEEDAEVTTMAQSVPWGISRVQAPAAHNRGLTGRGVKVAVLDTGISTHPDLNIRGGASFVPGEPSTQDGNGHGTHVAGTIAALNNSIGVLGVAPSAELYAVKVLGASGSGSVSSIAQGLEWAGNNGMHVANLSLGSPSPSATLEQAVNSATSRGVLVVAASGNSGAGSISYPARYANAMAVGATDQNNNRASFSQYGAGLDIVAPGVNVQSTAPGSTYASLNGTSMATPHVAGAAALVKQKNPSWSNVQIRNHLKNTATSLGSTNLYGSGLVNAEAATR

SEQ ID NO: 61850 - protein, 380 aa, Unidentified
VRSKKLWIVASTALLISVAFSSSIASAAEEAKEKYLIGFNEQEAVSEFVEQVEANDEVAILSEEEEVEIELLHEFETIPVLSVELSPEDVDALELDPAISYIEEDAEVTTMAQSVPWGISRVQAPAAHNRGLTGSGVKVAVLDTGISTHPDLNIRGGASFVPGEPSTQDGNGHGTHVAGTIAALNNSIGVLGVAPSAELYAVKVLGASGSGSVSSIAQGLEWAGNNRMHVANLSLGSPSPSATLEQAVNSATSRGVLVVAASGNSGAGSISYPARYANAMAVGATDQNNNRASFSQYGAGLDIVAPGVNVQSTYPGSTYASLNGTSMATPHVAGAAALVFQKNPSWSNVQIRNHLKNTATSLGSTNLYGSGLVNAEAATR

SEQ ID NO: 61851 - protein, 380 aa, Unidentified
VRSKKLWIVASTALLISVAFSSSIASAAEEAKEKYLIGFNEQEAVSEFVEQVEANDEVAILSEEEEVEIELLHEFETIPVLSVELSPEDVDALELDPAISYIEEDAEVTTMAQSVPWGISRVQAPAAHNRGLTGSGVKVAVLDTGISTHPDLNIRGGASFVPGEPSTQDGNGHGTHVAGTIAALNNSIGVLGVAPSAELYAVKVLGASGSGSVSSIAQGLEWAGNNGMHVANLSLGSPSPSATLEQAVNSATSRGVLVVAASGNSGAGSISYPARYANAMAVGATDQNNNRASFSQYGAGLDIVAPGVNVQSTYPGSTYASLNGTSMATPHVAGEAALVKQKNPSWSNVQIRNRLKNTATSLGSTNLYGSGLVNAEAATR

SEQ ID NO: 61852 - protein, 380 aa, Unidentified
VRSKKLWIVASTALLISVAFSSSIASAAEEAKEKYLIGFNEQEAVSEFVEQVEANDEVAILSEEEEVEIELLHEFETIPVLSVELSPEDVDALELDPAISYIEEDAEVTTMAQSVPWGISRVQAPAAHNRGLTGSGVKVAVLDSGISTHPDLNIRGGASFVPGEPSTQDGNGHGTHVAGTIAALNNRIGVLGVAPSAELYAVKVLGASGSGSVSSIAQGLEWAGNNGMHVANLSLGSPSPSATLEQAVNSATSRGVLVVAASGNSGAGSISYPARYANAMAVGATDQNNNRASFSQYGAGLDIVAPGVNVQSTYPGSTYASLNGTSMATPHVAGAAALVKQKNPSWSNVQIRNHLKNTATSLGSTNLYGSGLVNAEAATR

SEQ ID NO: 61853 - protein, 380 aa, Unidentified
VRSKKLWIVASTALLISVAFSSSIASAAEEAKEKYLIGFNEQEAVSEFVEQVEANDEVAILSEEEEVEIELLHEFETIPVLSVELSPEDVDALELDPAISYIEEDAEVTTMAQSVPWGISRVQAPAAHNRGLTGRGVKVAVLDTGISTHPDLNIRGGASFVPGEPSTQDGNGHGTHVAGTIAALNNSIGVLGVAPSAELYAVKVLGASGSGSVSSIAQGLEWAGNNGMHVANLSLGSPSPSATLEQAVNSATSRGVLVVAASGNSGAGSISYPARYANTMAVGATDQNNNRASFSQYGAGLDIVAPGVNVQSTYPGSTYASLNGTSMATPHVAGAAALVKQKNPSWSNVQIRNHLKNTATSLGSTNLYGSGLVNAEAATR

SEQ ID NO: 61854 - protein, 380 aa, Unidentified
VRSKKLWIVASTALLISVAFSSSIASAAEEAKEKYLIGFNEQEAVSEFVEQVEANDEVAILSEEEEVEIELLHEFETIPVLSVELSPEDVDALELDPAISYIEEDAEVTTMAQSVPWGISRVQAPAAHNRGLTGSGVKVAVLDSGISTHPDLNIRGGASFVPGEPSTQDGNGHGTHVAGTIAALNNSIGVLGVAPSAELYAVKVLGASGSGSVSSIAQGLEWAGNNRMHVANLSLGSPSPSATLEQAVNSATSRGVLVVAASGNSGAGSISYPARYANAMAVGATDQNNNRASFSQYGAGLDIVAPGVNVQSTYPGSTYASLNGTSMATPHVAGAAALVKQKNPSWSNVQIRNHLKNTATSLGSTNLYGSGLVNAEAATR

SEQ ID NO: 61855 - protein, 380 aa, Unidentified
VRSKKLWIVASTALLISVAFSSSIASAAEEAKEKYLIGFNEQEAVSEFVEQVEANDEVAILSEEEEVEIELLHEFETIPVLSVELSPEDVDALELDPAISYIEEDAEVTTMAQSVPWGISRVQAPAAHNRGLTGRGVKVAVLDTGISTHPDLNIRGGASFVPGEPSTQDGNGHGTHVAGTIAALNNSIGVLGVAPSAELYAVKVLGASGSGSVSSIAQGLEWAGNNGMHVANLSLGSPSPSATLEQAVNSATSRGVLVVAASGNSGAGSISYPARYANAMAVGATDQNNNRASFSQYGAGLDIVAPGVNVQSTYPGSTYASLNGTSMATPHVAGAAALVKQKNQSWSNVQIRNHLKNTATSLGSTNLYGSGLVNAEAATR

SEQ ID NO: 61856 - protein, 380 aa, Unidentified
VRSKKLWIVASTALLISVAFSSSIASAAEEAKEKYLIGFNEQEAVSEFVEQVEANDEVAILSEEEEVEIELLHEFETIPVLSVELSPEDVDALELDPAISYIEEDAEVTTMAQSVPWGISRVQAPAAHNRGLTGRGVKVAVLDTGISTHPDLNIRGGASFVPGEPSTQDGNGHGTHVAGTIAALDNSIGVLGVAPSAELYAVKVLGASGSGSVSSIAQGLEWAGNNGMHVANLSLGSPSPSATLEQAVNSATSRGVLVVAASGNSGAGSISYPARYANAMAVGATDQNNNRASFSQYGAGLDIVAPGVNVQSTYPGSTYASLNGTSMATPHVAGAAALVKQKNPSWSNVQIRNHLKNTATSLGSTNLYGSGLVNAEAATR

SEQ ID NO: 61857 - protein, 380 aa, Unidentified
VRSKKLWIVASTALLISVAFSSSIASAAEEAKEKYLIGFNEQEAVSEFVEQVEANDEVAILSEEEEVEIELLHEFETIPVLSVELSPEDVDALELDPAISYIEEDAEVTTMAQSVPWGISRVQAPAAHNRGLTGRGVKVAVLDTGISTHPDLNIRGGASFVPGEPSTQDGNGHGTHVAGTIAALNNSIGVLGVAPSAELYAVKVLGASGSGSVSSIAQGLEWAGNNGMHVANLSLGSPSPSATLEQAVNSATSRGVLVVAASGNSGAGSISYPARYANAMAVGATDQNNNRASFSQYGAGLDIVAPGVNVQSTYPGSTYASLNGTSMATPHVAGAAALVKQKNPSWSFVQIRNHLKNTATSLGSTNLYGSGLVNAEAATR

SEQ ID NO: 61858 - protein, 380 aa, Unidentified
VRSKKLWIVASTALLISVAFSSSIASAAEEAKEKYLIGFNEQEAVSEFVEQVEANDEVAILSEEEEVEIELLHEFETIPVLSVELSPEDVDALELDPAISYIEEDAEVTTMAQSVPWGISRVQAPAAHNRGLTGRGVKVAVLDTGISTHPDLNIRGGASFVPGEPSTQDGNGHGTHVAGTIAALNNSIGVLGVAPSAELYAVKVLGASGSGSVSSIAQGLEWAGNNGMHVANLSLGSPSPSATLEQAVNSATSRGVLVVAASGNSGAGSISYPARYANAMAVGATDQNNNRASFSQYGAGLDIVAPGVNVQSTYPGSTYASLNGTSMATPHVAGAAALVKQKNPSWSNVQIRNHLKNTATSLGSTNLYGSGLVNAEAAIR

SEQ ID NO: 61859 - protein, 380 aa, Unidentified
VRSKKLWIVASTALLISVAFSSSIASAAEEAKEKYLIGFNEQEAVSEFVEQVEANDEVAILSEEEEVEIELLHEFETIPVLSVELSPEDVDALELDPAISYIEEDAEVTTMAQSVPWGISRVQAPAAHNRGLTGSGVKVAVLDSGISTHPDLNIRGGASFVPGEPSTQDGNGHGTHVAGTIAALNNSIGVLGVAPSAELYAVKVLGASGSGSVSSIAQGLEWAGNNGMHVANLSLGSPSPSATLEQAVNSATSRGVLVVAASGNSGAGSISYPARYANAMAVGATDQNNNRASFSQYGAGLDIVAPGVNVQSTAPGSTYASLNGTSMATPHVAGAAALVKQKNPSWSNVQIRNHLKNTATSLGSTNLYGSGLVNAEAATR

SEQ ID NO: 61860 - protein, 380 aa, Unidentified
VRSKKLWIVASTALLISVAFSSSIASAAEEAKEKYLIGFNEQEAVSEFVEQVEANDEVAILSEEEEVEIELLHEFETIPVLSVELSPEDVDALELDPAISYIEEDAEVTTMAQSVPWGTSRVQAPAAHNRGLTGRGVKVAVLDTGISTHPDLNIRGGASFVPGEPSTQDGNGHGTHVAGTIAALNNSIGVLGVAPSAELYAVKVLGASGSGSVSSIAQGLEWAGNNGMHVANLSLGSPSPSATLEQAVNSATSRGVLVVAASGNSGAGSISYPARYANAMAVGATDQNNNRASFSQYGAGLDIVAPGVNVQSTYPGSTYASLNGTSMATPHVAGAAALVKQKNPSWSNVQIRNHLKNTATSLGSTNLYGSGLVNAEAATR

SEQ ID NO: 61861 - protein, 380 aa, Unidentified
VRSKKLWIVASTALLISVAFSSSIASAAEEAKEKYLIGFNEQEAVSEFVEQVEANDEVAILSEEEEVEIELLHEFETIPVLSVELSPEDVDALELDPAISYIEEDAEVTTMAQSVPWGISRVQAPTAHNRGLTGSGVKVAVLDSGISTHPDLNIRGGASFVPGEPSTQDGNGHGTHVAGTIAALNNSIGVLGVAPSAELYAVKVLGASGSGSVSSIAQGLEWAGNNGMHVANLSLGSPSPSATLEQAVNSATSRGVLVVAASGNSGAGSISYPARYANAMAVGATDQNNNRASFSQYGAGLDIVAPGVNVQSTYPGSTYASLNGTSMATPHVAGAAALVKQKNPSWSNVQIRNHLKNTATSLGSTNLYGSGLVNAEAATR

SEQ ID NO: 61862 - protein, 380 aa, Unidentified
VRSKKLWIVASTALLISVAFSSSIASAAEEAKEKYLIGFNEQEAVSEFVEQVEANDEVAILSEEEEVEIELLHEFETIPVLSVELSPEDVDALELDPAISYIEEDAEVTTMAQSVPWGISRVQAPAAHNRGLTGSGVKVAVLDTGISTHPDLNIRGGASFVPGEPSTQDGNGHGTHVAGTIAALNNSIGVLGVAWSAELYAVKVLGASGSGSVSSIAQGLEWAGNNRMHVANLSLGSPSPSATLEQAVNSATSRGVLVVAASGNSGAGSISYPARYANAMAVGATDQNNNRASFSQYGAGLDIVAPGVNVQSTYPGSTYASLNGTSMATPHVAGAAALVKQKNPSWSNVQIRNHLKNTATSLGSTNLYGSGLVNAEAATR

SEQ ID NO: 61863 - protein, 380 aa, Unidentified
VRSKKLWIVASTALLISVAFSSSIASAAEEAKEKYLIGFNEQEAVSEFVEQVEANDEVAILSEEEEVEIELLHEFETIPVLSVELSPEDVDALELDPAISYIEEDAEVTTMAQSVPWGISRVQAPAAHNRGLTGSGVKVAVLDSGISTHPDLNIRGGASFVPGEPSTQDGNGHGTHVAGTIAALNNSIGVLGVAPSAELYAVKVLGASGSGSVSSIAQGLEWAGNNGMHVANLSLGSPSPSATLEQAVNSATSRGVLVVAASGNSGAGSISYPARYANAMAVGATDQNNNRASFSQYGAGLDIVASGVNVQSTYPGSTYASLNGTSMATPHVAGAAALVKQKNPSWSNVQIRNHLKNTATSLGSTNLYGSGLVNAEAATR

SEQ ID NO: 61864 - protein, 380 aa, Unidentified
VRSKKLWIVASTALLISVAFSSSIASAAEEAKEKYLIGFNEQEAVSEFVEQVEANDEVAILSEEEEVEIELLHEFETIPVLSVELSPEDVDALELDPAISYIEEDAEVTTMAQSVPWGISRVQAPAAHNRGLTGCGVKVAVLDSGISTHPDLNIRGGASFVPGEPSTQDGNGHGTHVAGTIAALNNSIGVLGVAPSAELYAVKVLGASGSGSVSSIAQGLEWAGNNGMHVANLSLGSPSPSATLEQAVNSATSRGVLVVAASGNSGAGSISYPARYANAMAVGATDQNNNRASFSQYGAGLDIVAPGVNVQSTYPGSTYASLNGTSMATPHVAGAAALVKQKNPSWSNVQIRNHLKNTATSLGSTNLYGSGLVNAEAATR

SEQ ID NO: 61865 - protein, 380 aa, Unidentified
VRSKKLWIVASTALLISVAFSSSIASAAEEAKEKYLIGFNEQEAVSEFVEQVEANDEVAILSEEEEVEIELLHEFETIPVLSVELSPEDVDALELDPAISYIEEDAEVTTMAQSVPWGISRVQAPAAHNRGLTGSGVKVAVLDSGISTHPDLNIRGGTSFVPGEPSTQDGNGHGTHVAGTIAALNNSIGVLGVAPSAELYAVKVLGASGSGSVSSIAQGLEWAGNNGMHVANLSLGSPSPSATLEQAVNSATSRGVLVVAASGNSGAGSISYPARYANAMAVGATDQNNNRASFSQYGAGLDIVAPGVNVQSTYPGSTYASLNGTSMATPHVAGAAALVKQKNPSWSNVQIRNHLKNTATSLGSTNLYGSGLVNAEAATR

SEQ ID NO: 61866 - protein, 380 aa, Unidentified
VRSKKLWIVASTALLISVAFSSSIASAAEEAKEKYLIGFNEQEAVSEFVEQVEANDEVAILSEEEEVEIELLHEFETIPVLSVELSPEDVDALELDPAISYIEEDAEVTTMAQSVPWGISRVQAPAAHNRGLTGSGVKVAVLDTGISTHPDLNIRGGASFVPGEPSTQDGNGHGTHVAGTIAALNNSIGVLGVAWSAELYAVKVLGASGSGSVSSIAQGLEWAGNNGMHVANLSLGSPSPSATLEQAVNSATSRGVLVVAASGNSGAGSISYPARYANAMAVGATDQNNNRASFSQYGAGLDIVAPGVNVQSTAPGSTYASLNGTSMATPHVAGAAALVKQKNPSWSNVQIRNHLKNTATSLGSTNLYGSGLVNAEAATR

SEQ ID NO: 61867 - protein, 380 aa, Unidentified
VRSKKLWIVASTALLISVAFSSSIASAAEEAKEKYLIGFNEQEAVSEFVEQVEANDEVAILSEEEEVEIELLHEFETIPVLSVELSPEDVDALELDPAISYIEEDAEVTTMAQSVPWGISRVQAPAAHRRGLTGSGVKVAVLDTGISTHPDLNIRGGASFVPGEPSTQDGNGHGTHVAGTIAALNNSIGVLGVAPSAELYAVKVLGASGSGAVSSIAQGLEWAGNNGMHVANLSLGSPSPSATLEQAVNSATSRGVLVVAASGNSGAGSISYPARYANAMAVGATDQNNNRASFSQYGAGLDIVAPGVNVQSTYPGSTYASLNGTSMATPHVAGAAALVKQKNPSWSNVQIRNHLKNTATSLGSTNLYGSGLVNAEAATR

SEQ ID NO: 61868 - protein, 380 aa, Unidentified
VRSKKLWIVASTALLISVAFSSSIASAAEEAKEKYLIGFNEQEAVSEFVEQVEANDEVAILSEEEEVEIELLHEFETIPVLSVELSPEDVDALELDPAISYIEEDAEVTTMAQSVPWGISRVQAPAAHNRGLTGSGVKVAVLDTGISTHPDLNIRGGASFVPGEPSTQDGNGHGTHVAGTIAALNNRIGVLGVAWSAELYAVKVLGASGSGSVSSIAQGLEWAGNNGMHVANLSLGSPSPSATLEQAVNSATSRGVLVVAASGNSGAGSISYPARYANAMAVGATDQNNNRASFSQYGAGLDIVAPGVNVQSTYPGSTYASLNGTSMATPHVAGAAALVKQKNPSWSNVQIRNHLKNTATSLGSTNLYGSGLVNAEAATR

SEQ ID NO: 61869 - protein, 380 aa, Unidentified
VRSKKLWIVASTALLISVAFSSSIASAAEEAKEKYLIGFNEQEAVSEFVEQVEANDEVAILSEEEEVEIELLHEFETIPVLSVELSPEDVDALELDPAISYIEEDAEVTTMAQSVPWGISRVQAPAAHNRGLTGRGVKVAVLDTGISTHPDLNIRGGASFVPGEPSTQDGNGHGTHVAGTIAALNNSIGVLGVAPSAELYAVKVLGASGSGSASSIAQGLEWAGNNGMHVANLSLGSPSPSATLEQAVNSATSRGVLVVAASGNSGAGSISYPARYANAMAVGATDQNNNRASFSQYGAGLDIVAPGVNVQSTYPGSTYASLNGTSMATPHVAGAAALVKQKNPSWSNVQIRNHLKNTATSLGSTNLYGSGLVNAEAATR

SEQ ID NO: 61870 - protein, 306 aa, Unidentified
AEEAKEKYLIGFNEQEAVSEFVEQVEANDEVAILSEEEEVEIELLHEFETIPVLSVELSPEDVDALELDPAISYIEEDAEVTTMAQSVPWGISRVQAPAAHNRGLTGSGVKVAVLDTGISTHPDLNIRGGASFVPGEPSTQDGNGHGTHVAGTIAALNNSIGVLGVAPSAELYAVKVLGASGSGSVSSIAQGLEWAGNNGMHVANLSLGSPSPSATLEQAVNSATSRGVLVVAASGNSGAGSISYPARYANAMAVGATDQNNNRASFSQYGAGLDIVAPGVNVQSTYPGCSWTNARAVTRRGFVHV

SEQ ID NO: 61871 - protein, 232 aa, Unidentified
AEEAKEKYLIGFNEQEAVSEFVEQVEANDEVAILSEEEEVEIELLHEFETIPVLSVELSPEDVDALELDPAISYIEEDAEVTTMAQSVPWGISRVQAPAAHNRGLTGSGVKVAVLDTGISTHPDLNIRGGASFVPGEPSTQDGNGHGTHVAGTIAALNNSIGVLGVAPSAELYAVKVLGASGSGSVSSIAQGLEWAGNNGMHVANLSLGSPSPSACLAEGSLVLDAATGQRV

SEQ ID NO: 61872 - protein, 274 aa, Bacillus licheniformis
AQVVPYGIELIKADKVQAQGFKGANVKVAVLDTGIQASHPDLNVVGGASFVAGEAYNTDGNGHGTHVSGTVAALDNNTGVLGVAPSVSLYAVKVLNSSGSGSYSGIVSGIEWATTNGMDVINISLGGPSGSTAMKQAVDNAYARGVVVVAAAGNSGSSGNTNTIQYPAKYDSVIAVGAVDSNSQRASFSSVGAELEVMAPGVGVYSTYPPNTYATLSGTSMASPHVAGAAALILSKHPNLSASQVRNRLSSTATYLGPSFYYGKGLINVEAAAQ

SEQ ID NO: 61873 - protein, 274 aa, Bacillus licheniformis
AQVVPYGIPLIKADKVQAQGFKGANVKVAVLDTGAQASHPDLNVVGGASFVAGEAYNTDGNGHGTHVAGTVAALDNNTGVLGVAPSSSLYAVKVLNSSGSGSYSGIVSGIEWATTNGMDVINISLGGPSGSTAMKQAVDNAYARGAVVVAAAGNSGSSGNTNTIQYPAKYDSVIAVGAVDSNSQRASFSSVGAELEVMAPGVGVYSTYPTNTYATLSGTSMASPHVAGAAALILSKHPNLSGSQVRNRLSSTATYLGSSFYYGKGLINVEAAAQ

SEQ ID NO: 61874 - protein, 274 aa, Bacillus licheniformis
AQVVPYGIPLIKADKVQAQGFKGANVKVAVLDTGIQASHPDLNVVGGASFVAGEAYNTDGNGHGTHVSGTVAALDNNTGVLGVAPSVSLYAVKVLNSSGSGSYSGIVSGIEWATTNGMDVINISLGSPSGSTAMKQAVDNAYARGVVVVAAAGNSGSSGNTNTIQYPAKYDSVIAVGAVDSNSQRASFSSVGAELEVMAPGVGVYSTYPTNTYATQSGTSMASPHVAGAAALILSKHPNLSASQVRNRLSSTATYLGPSFYYGKGLINVEAAAQ

SEQ ID NO: 61875 - protein, 274 aa, Bacillus licheniformis
AQVVPYGIPLIKADKVQAQGFKGANVKVAVLDTGIQASHPDLNVVGGASFVAGEAYNTDGNGHGTHVAGTVAALDNNTGVLGVAPSVSLYAVKVLNSSGNGSYSNIVSGIEWATTNGMDVINMSLGGPSGSTAMKQAVDNAYARGVVVVAAAGNSGSNGDQNTIAYPAKYDSVIAVGAVDSNSQRASFSSVGAELEVMAPGAGVYSTYPTNTYATLSGTSMASPHVAGAAALILSKHPNLSASQVRNRLSSTATYLGPSFYYGKGLINVEAAAQ

SEQ ID NO: 61876 - protein, 274 aa, Bacillus licheniformis
AQVVPYGIPLIKADKVQAQGFKGANVKVAVLDTGAQASHPDLNVVGGASFVAGEAYNTDGNGHGTHVAGTVAALDNNTGVLGVAPSSSLYAVKVLNSSGSGSYSGIVSGIEWATTNGMDVINMSLGTPSGSTAMKQAVDNAYARGVVVVAAAGNSGSSGNTNTIQYPAKYDSVIAVGAVDSNSQRASFSSVGAELEVMAPGVGVYSTYPTNTYATLSGTSMASPHVAGAAALILSKHPNLSGSQVRNRLSSTATYLGPSFYYGKGLINVEAAAQ

SEQ ID NO: 61877 - protein, 274 aa, Bacillus licheniformis
AQVVPYGIPLIKADKVQAQGFKGANVKVAVIDTGIQASHPDLNVVGGASFVAGEAYNTDGNGHGTHVSGTVAALDNNTGVLGVAPSVSLYAVKVLNSSGSGSYSGIVSGIEWATTNGMDVINISLGSPSGSTAMKQAVDNAYARGVVVVAAAGNSGSSGNTNTIQYPAKYDSVIAVGAVDSNSQRASFSSVGAELEVMAPGVGVYSTYPTNTYATLSGTSMASPHVAGAAALILSKHPNLSASQVRNRLSSTATYLGPSFYYGKGLINVEAAAQ

SEQ ID NO: 61878 - protein, 274 aa, Bacillus licheniformis
AQVVPYGIPLIKADKVQAQGFKGANVKVAVLDTGIQASHPDLNVVGGASFVAGEAYNTDGNGHGTHVSGTVAALDNNTGVLGVAPSVSLYAVKVLNSSGSGSYSGIVSGIEWATTNGMDVINISLGGPSGSTAMKQAVDNAYARGVVVVAAAGNSGSSGNTNTIQYPAKYDSVIAVGAVDSNSQRASFSSVGAELEVMAPGVEVYSTYPPNTYATLSGTSMASPHVAGAAALILSKHPNLSASQVRNRLSSTATYLGPSFYYGKGLINVEAAAQ

SEQ ID NO: 61879 - protein, 274 aa, Bacillus licheniformis
AQTVPYGIPLIKADKVQAQGFKGQNVKVAVLDTGIQASHPDLNVVGGASFVAGEAYNTDGNGHGTHVSGTVAALDNNIGVLGVAPSVSLYAVKVLNSSGSGSYSGIVSGIEWATTNGMDVINMSLGSPSGSTAMKQAVDNAYARGVVVVAAAGNSGSSGNTNTIQYPAKYDSVIAVGAVDSNSQRASFSSVGAELEVMAPGVGVYSTYPTNTYATQSGTSMASPHVAGAAALILSKHPNLSASQVRNRLSSTATYLGPSFYYGKGLINVEAAAQ

SEQ ID NO: 61880 - protein, 274 aa, Bacillus licheniformis
AQVVPYGIPLIKADKVQAQGFKGANVKVAVLDTGIQASHPDLNVVGGASFVAGEAYNTDGNGHGTHVSGTVAALDNNTGVLGVAPSVSLYAVKVLNSSGSGSYSGIVSGIEWATTNGMDVINISLGSPSGSTAMKQAVDNAYARGVVVVAAAGNSGSSGNTNTIQYPAKYDSVIAVGAVDSNSQRAEFSSVGAELEVMAPGVGVYSTYPTNTYATLSGTSMASPHVAGAAALILSKHPNLSASQVRNRLSSTATYLGPSFYYGKGLINVEAAAQ

SEQ ID NO: 61881 - protein, 274 aa, Bacillus licheniformis
AQVVPYGIPLIKADKVQAQGFKGANVKVAVLDTGAQASHPDLNVVGGASFVAGEAYNTDGNGHGTHVSGTVAALDNNTGVLGVAPSVSLYAVKVLNSSGSGSYSGIVSGIEWATTNGMDVINISLGSPSGSTAMKQAVDNAYARGVVVVAAAGNSGSSGNTNTIQYPAKYDSVIAVGAVDSNSQRASFSSVGAELEVMAPGVGVYSTYPTNTYATLSGTSMASPHVAGAAALILSKHPNLSASQVRNRLSSTATYLGPSFYYGKGLINVEAAAQ

SEQ ID NO: 61882 - protein, 274 aa, Bacillus licheniformis
AQVVPYGIPLIKADKVQAQGFKGANVKVAVLDTGIQASHPDLNVVGGASFVAGEAYNTDGNGHGTHVSGTVAALDNNTGVLGVAPSVSLYAVKVLNSSGSGSYSGIVSGIEWATTNGMDVINMSLGSPSGSTAMKQAVDNAYARGVVVVAAAGNSGSSGNTNTIQYPAKYDSVIAVGAVDSNSQRASFSSVGAELEVMAPGVEVYSTYPPNTYATLSGTSMASPHVAGAAALILSKHPNLSASQVRNRLSSTATYLGPSFYYGKGLINVEAAAQ

SEQ ID NO: 61883 - protein, 274 aa, Bacillus licheniformis
AQVVPYGIPLIKADKVQAQGFKGANVKVAVLDTGIQASHPDLNVVGGASFVAGEAYNTDGNGHGTHVSGTVAALDNNTGVLGVAPSVSLYAVKVLNSSGSGSYSGIVSGIEWATTNGMDVINISLGSPSGSTAMKQAVDNAYARGVVVVAAAGNSGSQGNTNTIQYPAKYDSVIAVGAVDSNSQRASFSSVGAELEVMAPGVGVYSTYPTNTYATLSGTSMASPHVAGAAALILSKHPNLSASQVRNRLSSTATYLGPSFYYGKGLINVEAAAQ

SEQ ID NO: 61884 - protein, 274 aa, Bacillus licheniformis
AQTVPYGIPLIKADKVQAQGFKGANVKVAVLDTGIQASHPDLNVVGGASFVAGEAYNTDGNGHGTHVSGTVAALDNNIGVLGVAPSVSLYAVKVLNSSGSGSYSGIVSGIEWATTNGMDVINMSLGSPSGSTAMKQAVDNAYARGVVVVAAAGNSGSSGNTNTIQYPAKYDSVIAVGAVDSNSQRASFSSVGAELEVMAPGVGVYSTYPPNTYATQSGTSMASPHVAGAAALILSKHPNLSASQVRNRLSSTATYLGPSFYYGKGLINVEAAAQ

SEQ ID NO: 61885 - protein, 274 aa, Bacillus licheniformis
AQVVPYGIPLIKADKVQAQGFKGANVKVAVLDTGIQASHPDLNVVGGASFVAGEAYNTDGNGHGTHVSGTVAALDNNTGVLGVAPSVSLYAVKVLNSSGSGSYSGIVSGIEWATTNGMDVINISLGSPSGSTAMKQAVDNAYARGVVVVAAAGNSGSSGNTNTIQYPAKYDSVIAVGAVDSNSQRASFSSVGAELEVMAPGVGVYSTYPTNTYATLSGTSMASPHVAGAAALILSKHPNLSGSQVRNRLSSTATYLGPSFYYGKGLINVEAAAQ

SEQ ID NO: 61886 - protein, 274 aa, Bacillus licheniformis
AQVVPYGIPLIKADKVQAQGFKGANVKVAVLDTGIQASHPDLNVVGGASFVAGEAYNTDGNGHGTHVSGTVAALDNNTGVLGVAPSVSLYAVKVLNSSGSGSYSGIVSGIEWATTNGMDVINISLGSPSGSTAMKQAVDNAYARGVVVVAAAGNSGSSGNTNTIQYPAKYDSVIAVGAVDSNSQRASFSSVGQELEVMAPGVGVYSTYPTNTYATLSGTSMASPHVAGAAALILSKHPNLSASQVRNRLSSTATYLGPSFYYGKGLINVEAAAQ

SEQ ID NO: 61887 - protein, 274 aa, Bacillus licheniformis
AQVVPYGIPMIKADKVQAQGFKGANVKVAVLDTGIQASHPDLNVVGGASFVAGEAYNTDGNGHGTHVSGTVAALDNNTGVLGVAPSVSLYAVKVLNSSGSGSYSGIVSGIEWATTNGMDVINISLGSPSGSTAMKQAVDNAYARGVVVVAAAGNSGSSGNTNTIQYPAKYDSVIAVGAVDSNSQRASFSSVGAELEVMAPGVGVYSTYPTNTYATLSGTSMASPHVAGAAALILSKHPNLSASQVRNRLSSTATYLGPSFYYGKGLINVEAAAQ

SEQ ID NO: 61888 - protein, 274 aa, Bacillus licheniformis
AQVVPYGIPLIKADKVQAQGFKGANVKVAVLDTGIQASHPDLNVVGGASFVAGEAYNTDGNGHGTHVSGTVAALDNNTGVLGVAPSVSLYAVKVLNSSGSGSYSGIVSGIEWATTNGMDVINISLGSPSGSTAMKQAVDNAYARGVVVVAAAGNSGSSGNTNTIQYPAKYDSVIAVGAVDSNSQRASFSSVGAELEVMAPGVGVYSTYPTSTYATLSGTSMASPHVAGAAALILSKHPNLSASQVRNRLSSTATYLGPSFYYGKGLINVEAAAQ

SEQ ID NO: 61889 - protein, 274 aa, Bacillus licheniformis
AQVVPYGIPLIKADKVQAQGFKGANVKVAVLDTGIQASHPDLNVQGGASFVAGEAYNTDGNGHGTHVSGTVAALDNNTGVLGVAPSVSLYAVKVLNSSGSGSYSGIVSGIEWATTNGMDVINISLGSPSGSTAMKQAVDNAYARGVVVVAAAGNSGSSGNTNTIQYPAKYDSVIAVGAVDSNSQRASFSSVGAELEVMAPGVGVYSTYPTNTYATLSGTSMASPHVAGAAALILSKHPNLSASQVRNRLSSTATYLGPSFYYGKGLINVEAAAQ

SEQ ID NO: 61890 - protein, 274 aa, Bacillus licheniformis
AQVVPYGIPLIKADKVQAQGFKGANVKVAVLDTGIQASHPDLNVVGGASFVAGEAYNTDGNGHGTHVSGTVAALDNNTGVLGVAPSVSLYAVKVLNSSGSGSYSGIVSGIEWATTNGMDVINISLGSPSGSTAMKQAVDNAYARGVVVVAAAGNSGSSGNTNTIQYPAKYDSVIAVGAVDSNSQRASFSSVGAELEVMAPGVGVYSTYPTNTYATLSGTSMASPHVAGAAALILSKHPNLSASQVRNRLSSTATYLGPSFYYGHGLINVEAAAQ

SEQ ID NO: 61891 - protein, 274 aa, Bacillus licheniformis
AQTVPYGIELIKADKVQAQGFKGANVKVAVLDTGIQASHPDLNVVGGASFVAGEAYNTDGNGHGTHVSGTVAALDNNIGVLGVAPSVSLYAVKVLNSSGSGSYSGIVSGIEWATTNGMDVINMSLGSPSGSTAMKQAVDNAYARGVVVVAAAGNSGSSGNTNTIQYPAKYDSVIAVGAVDSNSQRASFSSVGAELEVMAPGVGVYSTYPTNTYATQSGTSMASPHVAGAAALILSKHPNLSASQVRNRLSSTATYLGPSFYYGKGLINVEAAAQ

SEQ ID NO: 61892 - protein, 274 aa, Bacillus licheniformis
AQVVPYGIPLIKADKVQAQGFKGANVKVAVLDTGIQASHPDLNVVGGASFVAGEAYNTDGNGHGTHVSGTVAALDNNTGVLGVAPSVSLYAVKVLNSSGSGSYSGIVSGIEWATTNGMDVINISLGSPSGSTAMKQAVDNAYARGVVVVAAAGNSGSSGNTNTIQYPAKYDSVIAVGAVDSNSQRASFSSVGAELEVMAPGVGVYSTYPPNTYATLSGTSMASPHVAGAAALILSKHPNLSASQVRNRLSSTATYLGPSFYYGKGLINVEAAAQ

SEQ ID NO: 61893 - protein, 274 aa, Bacillus licheniformis
AQTVPYGIELIKADKVQAQGFKGANVKVAVLDTGIQASHPDLAVRGGASFVAGEAYNTDGNGHGTHVAGTVAALDNQTGVLGVAPSTSLYAVKVLNSSGSGSYSGIVSGIEWATTNGMDVINISLGGASGSTAMKRAVDNAYARGVVVVAAAGNSGSSGNTNTIQYPAKYDSVIAVGAVDSNSQRASFSSVGAELEVMAPGAGVYSTYPTNTYATLSGTSMASPHVAGAAALILSKHPSLSASQVRNRLSSTATYLGESFYYGKGLINVEAAAQ

SEQ ID NO: 61894 - protein, 274 aa, Bacillus licheniformis
AQVVPYGIPLIKADKVQAQGFKGANVKVAVLDTGIQASHPDLNVVGGASFVAGEAYNTDGNGHGTHVSGTVAALDNNTGVLGVAPSVSLYAVKVLNSSGSASYSGIVSGIEWATTNGMDVINISLGGPSGSTAMKQAVDNAYARGVVVVAAAGNSGSSGNTNTIQYPAKYDSVIAVGAVDSNSQRASFSSVGAELEVMAPGVGVYSTYPPNTYATLSGTSMASPHVAGAAALILSKHPNLSASQVRNRLSSTATYLGPSFYYGKGLINVEAAAQ

SEQ ID NO: 61895 - protein, 274 aa, Bacillus clausii
AQTVPYGIPLIKADKVQAQGFKGANVKVAVLDTGIQASHPDLNVVGGASFVAGEAYNTDGNGHGTHVSGTVAALDNNIGVLGVAPSVSLYAVKVLNSFGLGSYSGIVSGIEWATTNGMDVINMSLGSPSGSTAMKQAVDNAYARGVVVVAAAGNSGSSGNTNTIQYPAKYDSVIAVGAVDSNSQRASFSSVGAELEVMAPGVGVYSTYPTNTYATLSGTSMASPHVAGAAALILSKHPNLSASQVRNRLSSTATYLGPSFYYGKGLINVEAAAQ

SEQ ID NO: 61896 - protein, 274 aa, Bacillus licheniformis
AQTVPYGIELIKADKVQAQGFKGANVKVAVLDTGIQASHPDLAVRGGASFVAGEAYNTDGNGHGTHVAGTVAALDNHTGVLGVAPSTSLYAVKVLNSSGSGSYSGIVSGIEWATTNGMDVINISLGGASGSTAMKRAVDNAYARGVVVVAAAGNSGSSGNTNTIQYPAKYDSVIAVGAVDSNSQRAPFSSVGAELEVMAPGAGVYSTYPTNTYATLNGTSMASPHVAGAAALILSKHPSLSASQVRNRLSSTATYLGPSFYYGKGLINVEAAAQ

SEQ ID NO: 61897 - protein, 274 aa, Bacillus licheniformis
AQVVPYGIPLIKADKVQAQGFKGANVKVAVLDTGIQASHPDLNVVGGASFVAGEAYNTDGNGHGTHVSGTVAALDNNTGVLGVAPSVSLYAVKVLNSSGSGSYSGIVSGIEWATTNGMDVINISLGSPSGSTAMKQAVDNAYQRGVVVVAAAGNSGSSGNTNTIQYPAKYDSVIAVGAVDSNSQRASFSSVGAELEVMAPGVGVYSTYPTNTYATLSGTSMASPHVAGAAALILSKHPNLSASQVRNRLSSTATYLGPSFYYGKGLINVEAAAQ

SEQ ID NO: 61898 - protein, 274 aa, Bacillus licheniformis
AQVVPYGIPLIKADKVQAQGFKGANVKVAVLDTGIQASHPDLNVVGGASFVAGEAYNTDGNGHGTHVSGTVAALDNNTGVLGVAPSVSLYAVKVLNSSGSGSYSGIVSGIEWATTNGMDVINISLGSPSGSTAMKQAVDNAYARGVVVVAAAGNSGSSGNTNTIQYPAKYDSVIAVGAVDSNSQRASFSSVGAELEVMAPGVGVYSTYPTNTYATLSGTSMASPHVAGAAALILSKHPNLSASQVRNRLSSTATYLGPPFYYGKGLINVEAAAQ

SEQ ID NO: 61899 - protein, 274 aa, Bacillus licheniformis
AQVVPYGIPLIKADKVQAQGFKGANVKVAVLDTGIQASHPDLNVVGGASFVAGEAYNTDGNGHGTHVSGTVAALDNNTGVLGVAPSSSLYAVKVLNSSGSGSYSGIVSGIEWATTNGMDVINISLGSPSGSTAMKQAVDNAYARGVVVVAAAGNSGSSGNTNTIQYPAKYDSVIAVGAVDSNSQRASFSSVGAELEVMAPGVGVYSTYPTNTYATLSGTSMASPHVAGAAALILSKHPNLSASQVRNRLSSTATYLGPSFYYGKGLINVEAAAQ

SEQ ID NO: 61900 - protein, 274 aa, Bacillus licheniformis
AQVVPYGIPLIKADKVQAQGFKGANVKVAVLDTGIQASHPDLNVVGGASFVAGEAYNTDGNGHGTHVSGTVAALDNNIGVLGVAPSVSLYAVKVLNSSGSGSYSGIVSGIEWATTNGMDVINISLGSPSGSTAMKQAVDNAYARGVVVVAAAGNSGSSGNTNTIQYPAKYDSVIAVGAVDSNSQRASFSSVGAELEVMAPGVGVYSTYPTNTYATLSGTSMASPHVAGAAALILSKHPNLSASQVRNRLSSTATYLGDSFYYGKGLINVEAAAQ

SEQ ID NO: 61901 - protein, 274 aa, Bacillus licheniformis
AQVVPYGIPLIKADKVQAQGFKGANVKVAVLDTGIQASHPDLNVVGGASFVAGEAYNTDGNGHGTHVSGTVAALDNETGVLGVAPSVSLYAVKVLNSSGSGSYSGIVSGIEWATTNGMDVINISLGTPSGSTAMKQAVDNAYARGVVVVAAAGNSGSSGNTNTIEYPAKYDSVIAVGAVDSNSQRASFSSVGAELEVMAPGVGVYSTYPTNTYATLSGTSMASPHVAGAAALILSKHQNLSASQVRNRLSSTATYLGPSFYYGKGLINVEAAAQ

SEQ ID NO: 61902 - protein, 274 aa, Bacillus licheniformis
AQVVPYGIPLIKADKVQAQGFKGANVKVAVLDTGIQASHEDLNVVGGASFVAGEAYNTDGNGHGTHVSGTVAALDNNTGVLGVAPSVSLYAVKVLNSSGSGSYSGIVSGIEWATTNGMDVINISLGSPSGSTAMKQAVDNAYARGVVVVAAAGNSGSSGNTNTIQYPAKYDSVIAVGAVDSNSQRASFSSVGAELEVMAPGVGVYSTYPTNTYATLSGTSMASPHVAGAAALILSKHPNLSASQVRNRLSSTATYLGPSFYYGKGLINVEAAAQ

SEQ ID NO: 61903 - protein, 274 aa, Bacillus licheniformis
AQVVPYGIPLIKADKVQAQGFKGANVKVAVLDTGIQASHPDLNVVGGASFVAGEAYNTDGNGHGTHVSGTVAALDNNTGVLGVAPSVSLYAVKVLNSSGSGSYSGIVSGIEWATTNSMDVINISLGSPSGSTAMKQAVDNAYARGVVVVAAAGNSGSSGNTNTIQYPAKYDSVIAVGAVDSNSQRASFSSVGAELEVMAPGVGVYSTYPTNTYATLSGTSMASPHVAGAAALILSKHPNLSASQVRNRLSSTATYLGPSFYYGKGLINVEAAAQ

SEQ ID NO: 61904 - protein, 274 aa, Bacillus clausii
AQTVPYGIPLIKADKVQAQGFKGANVKVAVLDTGIQASHPDLNVVGGASFVAGEAYNTDGNGHGTHVSGTVAALDNNIGVLGVAPSVSLYAVKVLNSFGLGSYSGIVSGIEWATTNGMDVINMSLGSPSGSTAMKQAVDNAYARGVVVVAAAGNSGSSGNTNTIRYPAKYDSVIAVGAVDSNSQRASFSSVGAELEVMAPGVGVYSTYPTNTYATLSGTSMASPHVAGAAALILSKHPNLSASQVRNRLSSTATYLGPSFYYGKGLINVEAAAQ

SEQ ID NO: 61905 - protein, 274 aa, Bacillus licheniformis
AQVVPYGIPLIKADKVQAQGFKGANVKVAVLDTGIQASHPDLNVVGGASFVAGEAYNTDGNGHGTHVSGTVAALDNNTGVLGVAPSVSLYAVKVLNSSGSGSYSGIVSGIEWATTNGMDVINISLGSPSGSTAMKQAVDNAYARGVVVVAAAGNSGSSGNTNTIQYPAKYDSVIAVGAVDSNSQRASFSSVGAELEVMAPGVGVYSTYPTNTYATLSGTSMASPHVAGAAALILSKHPNLSASQVRNRLSSTATYLGPSWYYGKGLINVEAAAQ

SEQ ID NO: 61906 - protein, 274 aa, Bacillus licheniformis
AQVVPYGIPLIKADKVQAQGFKGANVKVAVLDTGIQASHPDLNVVGGASFVAGEAYNTDGNGHGTHVSGTVAALDNNTGVLGVAPSVSLYAVKVLNSSGSGSYSGIVSGIEWATTNGMDVINISLGSPSGSTAMKQAVDNAYARGVVVVAAAGNSGSSGNQNTIQYPAKYDSVIAVGAVDSNSQRASFSSVGAELEVMAPGVGVYSTYPTNTYATLSGTSMASPHVAGAAALILSKHPNLSASQVRNRLSSTATYLGPSFYYGKGLINVEAAAQ

SEQ ID NO: 61907 - protein, 274 aa, Bacillus licheniformis
AQVVPYGIPLIKADKVQAQGFKGANVKVAVLDTGIQASHPDLNVVGGASFVAGEAYNTDGNGHGTHVSGTVAALDNNTGVLGVAPSVSLYAVKVLNSSGSGTYSGIVSGIEWATTNGMDVINISLGSPSGSTAMKQAVDNAYARGVVVVAAAGNSGSSGNTNTIQYPAKYDSVIAVGAVDSNSQRASFSSVGAELEVMAPGVGVYSTYPTNTYATLSGTSMASPHVAGAAALILSKHPNLSASQVRNRLSSTATYLGPSFYYGKGLINVEAAAQ

SEQ ID NO: 61908 - protein, 274 aa, Bacillus licheniformis
AQVVPYGIPMIKADKVQAQGFKGANVKVAVLDTGIQASHPDLNVVGGASFVAGEAYNTDGNGHGTHVSGTVAALDNNTGVLGVAPSVSLYAVKVLNSSGSGSYSGIVSGIEWATTNGMDVINISLGGPSGSTAMKQAVDNAYARGVVVVAAAGNSGSSGNTNTIQYPAKYDSVIAVGAVDSNSQRASFSSVGAELEVMAPGVGVYSTYPPNTYATLSGTSMASPHVAGAAALILSKHPNLSASQVRNRLSSTATYLGPSFYYGKGLINVEAAAQ

SEQ ID NO: 61909 - protein, 274 aa, Bacillus licheniformis
AQVVPYGIPMIKADKVQAQGFKGANVKVAVLDTGIQASHPDLNVVGGASFVAGEAYNTDGNGHGTHVSGTVAALDNNTGVLGVAPSVSLYAVKVLNSSGSGSYSGIVSGIEWATTNGMDVINMSLGSPSGSTAMKQAVDNAYARGVVVVAAAGNSGSSGNTNTIQYPAKYDSVIAVGAVDSNSQRASFSSVGAELEVMAPGVGVYSTYPPNTYATLSGTSMASPHVAGAAALILSKHPNLSASQVRNRLSSTATYLGPSFYYGKGLINVEAAAQ

SEQ ID NO: 61910 - protein, 274 aa, Bacillus licheniformis
AQTVPYGIELIKADKVQAQGFKGANVKVAVLDTGIQASHPDLNVVGGASFVRGEAYNTDGNGHGTHVAGTVAALDNTTGVLGVAPRVSLYAVKVLNSSGSGSYSGIVSGIQWATTNGMDVINMSLGGARGSTAMKQAVDNAYARGVVVVAAAGNSGSQGNTNTIEYPAKYDSVIAVGAVDSNSNRASFSSVGAELEVMAPGAGIYSTYPINTYATLNGTSMASPHVAGAAALILSKHPNLSASQVRNRLSSTATYLGDEFYYGQGLINVEAAAQ

SEQ ID NO: 61911 - protein, 274 aa, Bacillus licheniformis
AQVVPYGIPLIKADKVQAQGFKGANVKVAVLDTGIQASHPDLNVVGGASFVAGEAYNTDGNGHGTHVSGTVAALDNNIGVLGVAPSVSLYAVKVLNSSGSGSYSGIVSGIEWATTNGMDVINISLGSPSGSTAMKQAVDNAYARGVVVVAAAGNSGSSGNTNTIQYPAKYDSVIAVGAVDSNSQRASFSSVGAELEVMAPGVGVYSTYPTNTYATLSGTSMASPHVAGAAALILSKHPNLSASQVRNRLSSTATYLGPSFYYGKGLINVEAAAQ

SEQ ID NO: 61912 - protein, 274 aa, Bacillus licheniformis
AQVVPYGIPLIKADKVQAQGFKGANVKVSVLDTGIQASHPDLNVVGGASFVAGEAYNTDGNGHGTHVSGTVAALDNNTGVLGVAPSVSLYAVKVLNSSGSGSYSGIVSGIEWATTNGMDVINISLGSPSGSTAMKQAVDNAYARGVVVVAAAGNSGSSGNTNTIQYPAKYDSVIAVGAVDSNSQRASFSSVGAELEVMAPGVGVYSTYPTNTYATLSGTSMASPHVAGAAALILSKHPNLSASQVRNRLSSTATYLGPSFYYGKGLINVEAAAQ

SEQ ID NO: 61913 - protein, 274 aa, Bacillus licheniformis
AQVVPYGIPLIKADKVQAQGFKGANVKVAVLDTGIQASHPDLNVVGGASFVAGEAYNTDGNGHGTHVSGTVAALDNNTGVLGVAPSVSLYAVKVLNSSGSASYSGIVSGIEWATTNGMDVINMSLGSPSGSTAMKQAVDNAYARGVVVVAAAGNSGSSGNTNTIQYPAKYDSVIAVGAVDSNSQRASFSSVGAELEVMAPGVGVYSTYPPNTYATLSGTSMASPHVAGAAALILSKHPNLSASQVRNRLSSTATYLGPSFYYGKGLINVEAAAQ

SEQ ID NO: 61914 - protein, 274 aa, Bacillus licheniformis
AQVVPYGIELIKADKVQAQGFKGANVKVAVLDTGIQASHPDLNVVGGASFVAGEAYNTDGNGHGTHVSGTVAALDNNTGVLGVAPSVSLYAVKVLNSSGSGSYSGIVSGIEWATTNGMDVINMSLGSPSGSTAMKQAVDNAYARGVVVVAAAGNSGSSGNTNTIQYPAKYDSVIAVGAVDSNSQRASFSSVGAELEVMAPGVGVYSTYPPNTYATLSGTSMASPHVAGAAALILSKHPNLSASQVRNRLSSTATYLGPSFYYGKGLINVEAAAQ

SEQ ID NO: 61915 - protein, 274 aa, Bacillus licheniformis
AQVVPYGIPLIKADKVQAQGFKGANVKVAVLDTGIQASHPDLNVVGGASFVAGEAYNTDGNGHGTHVSGTVAALDNNTGVLGVAPSVSLYAVKVLNSSGSGSYSGIVSGIEWATTNGMDVINISLGGPSGSTAMKQAVDNAYARGVVVVAAAGNSGSSGNTNTIQYPAKYDSVIAVGAVDSNSQRAEFSSVGAELEVMAPGVGVYSTYPPNTYATLSGTSMASPHVAGAAALILSKHPNLSASQVRNRLSSTATYLGPSFYYGKGLINVEAAAQ

SEQ ID NO: 61916 - protein, 274 aa, Bacillus licheniformis
AQVVPYGIPLIKADKVQAQGFKGANVKVAVLDTGIQASHPDLNVVGGVSFVAGEAYNTDGNGHGTHVSGTVAALDNNTGVLGVAPSVSLYAVKVLNSSGSGSYSGIVSGIEWATTNGMDVINISLGSPSGSTAMKQAVDNAYARGVVVVAAAGNSGSSGNTNTIQYPAKYDSVIAVGAVDSNSQRASFSSVGAELEVMAPGVGVYSTYPTNTYATLSGTSMASPHVAGAAALILSKHPNLSASQVRNRLSSTATYLGPSFYYGKGLINVEAAAQ

SEQ ID NO: 61917 - protein, 274 aa, Bacillus licheniformis
AQVVPYGIPLIKADKVQAQGFKGANVKVAVLDTGIQASHPDLNVVGGTSFVAGEAYNTDGNGHGTHVSGTVAALDNNTGVLGVAPSVSLYAVKVLNSSGSGSYSGIVSGIEWATTNGMDVINISLGSPSGSTAMKQAVDNAYARGVVVVAAAGNSGSSGNTNTIQYPAKYDSVIAVGAVDSNSQRASFSSVGAELEVMAPGVGVYSTYPTNTYATLSGTSMASPHVAGAAALILSKHPNLSASQVRNRLSSTATYLGPSFYYGKGLINVEAAAQ

SEQ ID NO: 61918 - protein, 274 aa, Bacillus licheniformis
AQVVPYGIPLIKADKVQAQGFKGANVKVAVLDTGIQASHPDLNVVGGASFVAGEAYNTDGNGHGTHVSGTVAALDNNIGVLGVAPSVSLYAVKVLNSSSSGSYSGIVSGIEWATTNGMDVINMSLGSPSGSTAMKQAVDNAYARGVVVVAAAGNSGSSGNTNTIQYPAKYDSVIAVGAVDSNSNRASFSSVGAELEVMAPGAGVYSTYPPNTYATLNGTSMASPHVAGAAALILSKHPNLSGSQVRNRLSSTATYLGPSFYYGHGLINVEAAAQ

SEQ ID NO: 61919 - protein, 274 aa, Bacillus licheniformis
AQVVPYGIPLIKADKVQAQGFKGANVKVAVLDTGIQASHPDLNVVGGASFVAGEAYNTDGNGHGTHVSGTVAALDNNIGVLGVAPSVSLYAVKVLNSSGSGSYSGIVSGIEWATTNGMDVINMSLGSPSGSTAMKQAVDNAYARGVVVVAAAGNSGSSGNTNTIQYPAKYDSVIAVGAVDSNSQRASFSSVGAELEVMAPGVGVYSTYPTNTYATQSGTSMASPHVAGAAALILSKHPNLSASQVRNRLSSTATYLGDSFYYGKGLINVEAAAQ

SEQ ID NO: 61920 - protein, 274 aa, Bacillus licheniformis
AQVVPYGIPLIKADKVQAQGFKGANVKVAVLDTGIQASHPDLNVVGGASFVAGEAYNTDGNGHGTHVSGTVAALDNNTGVLGVAPSVSLYAVKVLNSSSSGSYSGIVSGIEWATTNGMDVINISLGSPSGSTAMKQAVDNAYARGVVVVAAAGNSGSSGNTNTIQYPAKYDSVIAVGAVDSNSQRASFSSVGAELEVMAPGVGVYSTYPTNTYATLSGTSMASPHVAGAAALILSKHPNLSASQVRNRLSSTATYLGPSFYYGKGLINVEAAAQ

SEQ ID NO: 61921 - protein, 274 aa, Bacillus licheniformis
AQTVPYGIPLIKADKVQAQGFKGANVKVAVLDTGIQASHPDLNVVGGASFVAGEAYNTDGNGHGTHVSGTVAALDNNIGVLGVAPDVSLYAVKVLNSSGSGSYSGIVSGIEWATTNGMDVINMSLGSPSGSTAMKQAVDNAYARGVVVVAAAGNSGSSGNTNTIQYPAKYDSVIAVGAVDSNSQRASFSSVGAELEVMAPGVGVYSTYPTNTYATQSGTSMASPHVAGAAALILSKHPNLSASQVRNRLSSTATYLGPSFYYGKGLINVEAAAQ

SEQ ID NO: 61922 - protein, 274 aa, Bacillus licheniformis
AQVVPYGIPLIKADKVQAQGFKGANVKVAVLDTGIQASHPDLNVVGGASFVAGEAYNTDGNGHGTHVSGTVAALDNNIGVLGVAPSVSLYAVKVLNSSSSASYSGIVSGIEWATTNGMDVINMSLGSPSGSTAMKQAVDNAYARGVVVVAAAGNSGSSGNTNTIQYPAKYDSVIAVGAVDSNSNRASFSSVGAELEVMAPGAGVYSTYPPNTYATLNGTSMASPHVAGAAALILSKHPNLSGSQVRNRLSSTATYLGPSFYYGKGLINVEAAAQ

SEQ ID NO: 61923 - protein, 274 aa, Bacillus licheniformis
AQVVPYGIELIKADKVQAQGFKGANVKVAVLDTGIQASHPDLNVVGGASFVAGEAYNTDGNGHGTHVSGTVAALDNNTGVLGVAPSVSLYAVKVLNSSQSGSYSGIVSGIEWATTNGMDVINMSLGGPSGSTAMKQAVDNAYARGVVVVAAAGNSGSSGNTNTIQYPAKYDSVIAVGAVDSNSQRASFSSVGAELEVMAPGVGVYSTYPPNTYATLSGTSMASPHVAGAAALILSKHPNLSASQVRNRLSSTATYLGPSFYYGKGLINVEAAAQ

SEQ ID NO: 61924 - protein, 274 aa, Bacillus licheniformis
AQVVPYGIPLIKADKVQAQGFKGANVKVAVLDTGIQASHPDLNVVGGASFVAGEAYNTDGNGHGTHVSGTVAALDNNTGVLGVAPSVSLYAVKVLNSSGSGSYSGIVSGIEWATTNGMDVINMSLGSPSGSTAMKQAVDNAYARGVVVVAAAGNSGSSGNTNTIQYPAKYDSVIAVGAVDSNSQRAEFSSVGAELEVMAPGVGVYSTYPPNTYATLSGTSMASPHVAGAAALILSKHPNLSASQVRNRLSSTATYLGPSFYYGKGLINVEAAAQ

SEQ ID NO: 61925 - protein, 274 aa, Bacillus licheniformis
AQVVPYGIELIKADKVQAQGFKGANVKVAVLDTGIQASHPDLNVVGGASFVAGEAYNTDGNGHGTHVSGTVAALDNNTGVLGVAPSVSLYAVKVLNSSGSGSYSGIVSGIEWATTNGMDVINISLGSPSGSTAMKQAVDNAYARGVVVVAAAGNSGSSGNTNTIQYPAKYDSVIAVGAVDSNSQRASFSSVGAELEVMAPGVGVYSTYPTNTYATLSGTSMASPHVAGAAALILSKHPNLSASQVRNRLSSTATYLGPSFYYGKGLINVEAAAQ

SEQ ID NO: 61926 - protein, 273 aa, Bacillus licheniformis
QTVPYGIPLIKADKVQAQGFKGANVKVAVLDTGIQASHPDLNVVGGASFVAGEAYNTDGNGHGTHVAGTVAALDNTTGVLGVAPSVSLYAVKVLNSSGSGSYSGIVSGIEWVTTNGMDVINMSLGGASGSTAMKQAVDNAYARGVVVVAAAGNSGSSGNTNTIGYPAKCDSVIPVGGEDSNSNRSSFSSVGAELEVMAPVSGVYSTYPTNTYTTLNGTSMASPHVAGTSALILSKHPNLSASQVRNRLSRTATYLGSSFYYGKGLINVEAAAQ

SEQ ID NO: 61927 - protein, 269 aa, Unidentified
AQSVPWGISRVQAPAAHNRGLRGGGVKVAVLDTGISTHPDLNIRGGASFVPGEPSTQDGNGHGTHVAGTIAALNNNIGVLGVAPSAELYAVKVLAASGQGAISSIAQGLEWAGNNGMHVANLSLGAPSPSATLEQAVNSATSRGVLVVAASGNSGAGSISYPARYANAMAVGATDQNNNRASFSQYGAGLDIVAPGVNVQSTYPGSTYASQNGTSMATPHVAGAAVLVKQKNPSWSNVRIRNHLKNTATSLGSTNLYGSGLVNAEAATR

SEQ ID NO: 61928 - protein, 269 aa, Unidentified
AQSVPWGISRVQAPAAHNRGLTGSGVKVAVLDTGISTHPDLNIRGGASFVPGEPSTQDENGHGTHAAGTIAALNNSIGVLGVAPSAELYAVKVLGASGSGAISSIAQGLEWAGNNGMHVANLSLGSPSPSATLEQAVNSATSRGVLVVAASGNSGADVISYPARYANAMAVGATDQNNNRASFSQYGAGLDIVAPGVNVQSTYPGSTYASLNGTSMATPHVAGAAVLVKHKNPSWSNVRIRDHLKKTATSLGSTNLYGSGLVNAEAATR

SEQ ID NO: 61929 - protein, 269 aa, Unidentified
AQSVPWGISRVQAPAAHNRGLAGSGVKVAVLDTGISTHPDLRIRGGASFVPGEPSTQDGNGHGTHVAGTIAALNNSIGVLGVAPSAELYAVKVLGASGGGAISSIAQGLEWAGNNGMHVANLSLGSPSPSATLEQAVNSATSRGVLVVAASGNSGAESISYPARYANAMAVGATDQNNNRADFSQYGAGLDIVAPGVNVQSTYPGSTYASLNGTSMATPHVAGAAVLVKQKNPSWSNVRIRDHLKNTATSLGSTNLYGSGLVNAFAATR

SEQ ID NO: 61930 - protein, 269 aa, Unidentified
AQSVPWGISRVQAPAAHNRGLAGSGVKVAVLDTGISTHPDLNIRGGASFVPGEPSTQDGNGHGTHVAGTIAALNNSIGVLGVAPSAELYAVKVLGASGGGAISSIAQGLEWAGLNGMQVANLSLGNPSPSATLEQAVNSATSRGVLVVAASGNSGAGSISYPARYANAMAVGATDQNNNRASFSQYGAGLDIVAPGVNVQSTAPQSAYASLNGTSMATPHVAGAAVLVKQKNPSWSNVQIRNHLKNTATSLGSTNLYGSGLVNAEAATR

SEQ ID NO: 61931 - protein, 269 aa, Unidentified
AQSVPWGISRVQAPAAHNRGLQGSGVKVAVLDTGISTHPDLNIRGGASFVPGEPSTQDGNGHGTHVAGTIAALNNSIGVLGVAPSAELYAVKVLGASGGGAISSIAQGLEWAGNNGMHVANLSLGSPSPSATLEQAVNSATSRGVLVVAASGNSGADSISYPARYANAMAVGATDQNNNRADFSQYGAGLDIVAPGVNVQSTYPGSTYASLNGTSMATPHVAGAATLVKQKNPSWSNIRIRHHLKNTATSLGSTNLYGSGLVNALAATR

SEQ ID NO: 61932 - protein, 269 aa, Unidentified
AQSVPWGISRVQAPAAHNRGLAGRGVKVAVLDTGISTHPDLNIRGGASFVPGEPSTQDGNGHGTHVAGTIAALDNSIGVLGVAPSAELYAVKVLGASGGGAISSIAQGLEWAGNNGMHVANLSLGSPSPSATLEQAVNSATSRGVLVVAASGNSGAGSISYPARYANAMAVGATDQNNNRADFSQYGAGLDIVAPGVNVQSTYPGSTYASLNGTSMATPHVAGAAVLVKQKNPSWSNVRIRDHLKNTATSLGSTNLYGSGLVNAFAATR

SEQ ID NO: 61933 - protein, 269 aa, Unidentified
AQSVPWGISRVQAPAAHNRGLAGSGVKVAVLDTGISTHPDLRIRGGASFVPGEPSTQDGEGHGTHVAGTIAALNNSIGVLGVAPSAELYAVKVLGASGSGAISSIAQGLEWAGNNGMHVANLSLGSPSPSATLEQAVNSATSRGVLVVAASGNSGADSISYPARYANAMAVGATDQNNNRADFSQYGAGLDIVAPGVNVQSTYPGSTYASLNGTSMATPHVAGAAVLVKQKNPSWSNVRIRDHLKNTATSLGSTNLYGSGLVNAFAATR

SEQ ID NO: 61934 - protein, 269 aa, Unidentified
AQSVPWGISRVQAPAAHNRRLWGSGVKVAVLDTGISTHPDLNIRGGASFVPGEPSTQDGNGHGTHVAGTIAALNNRIGVLGVAPSAELYAVKVLGASGGGAISSIAQGLEWAGANGMHVANLSLGSPSPSATLEQAVNSATSRGVLVVAASGNSGAGSISYPARYANAMAVGATDQDNNRASFSQYGAGLDIVAPGVNVQSTYPQSTYASLNGTSMATPHVAGAAVLVKQKNPSWSNVRIRNHLKNTATSLGSTNLYGSGLVNAEAATR

SEQ ID NO: 61935 - protein, 269 aa, Unidentified
AQSVPWGISRVQAPAAHNRGLTGSGVKVAVLDTGISTHPDLNIRGGASFVPGEPSTQDGNGHGTHVAGTIAALNNSIGVLGVAPSAELYAVKVLGASGAGAISSIAQGLEWAGNNGMHVANLSLGSPSPSATLEQAVNSATSRGVLVVAASGNSGEGSISYPARYANAMAVGATDQNNNRADFSQYGAGLDIVAPGVNVQSTYPGSTYASENGTSMATPHVAGAAVLVKQKNPSWSNVRIRDRLKNTATSLGSTNLYGSGLVNAFAATR

SEQ ID NO: 61936 - protein, 269 aa, Unidentified
AQSVPWGISRVQAPAAHNRGLAGRGVKVAVLDTGISTHPDLNIRGGASFVPGEPSTQDGNGHGTHVAGTIAALNNSIGVLGVAPSAELYAVKVLGASGGGAISSIAQGLEWAGNNGMHVANLSLGSESPSATLEQAVNSATSRGVLVVAASGNSGAGSISYPARYANAMAVGATDQNNNRADFSQYGAGLDIVAPGVNVQSTYPGSTYASLNGTSMATPHVAGAAVLVKQKNPSWSNVRIRDHLKNTATSLGSTNLYGSGLVNAFAATR

SEQ ID NO: 61937 - protein, 269 aa, Unidentified
AQSVPWGISRVQAPAAHNRGLAGRGVKVAVLDTGISTHPDLNIRGGASFVPGEPSTQDGNGHGTHVAGTIAALNNSIGVLGVAPSAELYAVKVLGASGGGAISSIAQGLEWAGNNGMHVANLSLGSPSPSATLEQAVNSATSRGVLVVAASGNSGAESISYPARYANAMAVGATDQNNNRADFSQYGAGLDIVAPGVNVQSTYPGSTYASLNGTSMATPHVAGAAVLVKQKNPSWSNVRIRDHLKNTATSLGSTNLYGSGLVNAFAATR

SEQ ID NO: 61938 - protein, 269 aa, Unidentified
AQSVPWGISRVQAPAAHNRGLWGSGVKVAVLDTGISTHPDLNIRGGASFVPGEPSTQDGNGHGTHVAGTIAALDNNIGVLGVAPRAELYAVKVLGASGSGSVSSIAQGLEWAGNNRMHVANLSLGLQAPSATLEQAVNSATSRGILVVAASGNSGAGSISYPARYANAMAVGATDQNNNRASFSQYGPGLDIVAPGVNVQSTYPGSTYVSLNGTSMATPHVAGAAALVKQKNPSWSNVQIRNHLKNTATSLGSTNLYGSGLVNAEAATR

SEQ ID NO: 61939 - protein, 269 aa, Unidentified
AQSVPWGISRVQAPASHNRGLTGFGVKVAVLDTGISTHPDLNIRGGASFVPGEPSTQDGNGHGTHVAGTIAALNNSIGVLGVAPSAELYAVKVLGASGGGAISSIAQGLEWAGANGMHVANLSLGNPSPSATLEQAVNSATSRGVLVVAASGNSGAGSIDYPARYANAMAVGATDQNNNRASFSQYGAGLDIVAPGVNVQSTVPGSAYASLNGTSMATPHVAGAAVLVKQKNPSWSNVQIRNHLKNTATSLGSTNLYGSGLVNAEAATR

SEQ ID NO: 61940 - protein, 269 aa, Unidentified
AQSVPWGISRVRAPAAHNRGLTGSGVKVAVLDTGISTHPDLNIRGGASFVPGEPSTQDGNGHGTHVAGTIAALNNSIGVLGVAPSAELYAVKVLGASGSAAISSIAQGLEWAGNNGMHVANLSLGSPSPSATLEQAVNSATSRGVLVVAASGNSGADSISYPARYANAMAVGATDQNNNRASFSQYGAGLDIVAPGVNVQSTYPGGTYASLNGTSMATPHVAGAAVLVKHKNPSWSNVRIRDHLKKTATSLGSTNLYGSGLVNAEAATR

SEQ ID NO: 61941 - protein, 269 aa, Unidentified
AQSVPWGISRVQAPAAHNRRLWGSGVKVAVLDTGISTHPDLNIRGGASFVPGEPSTQDGNGHGTHVAGTIAALNNSIGVLGVAPSAELYAVKVLGASGGGAISSIAQGLEWAGNNGMHVANLSLGSPSPSATLEQAVNSATSRGVLVVAASGNSGAGSISYPARYANAMAVGATDQDNNRASFSQYGAGLDLVAPGVNVQSTYPGSAYFSLNGTSMATPHVAGAAVLVKQKNPSWSNVRIRNHLKNTATSLGSTNLYGSGLVNAEAATR

SEQ ID NO: 61942 - protein, 269 aa, Unidentified
AQSVPWGISRVQAPAAHNRGLAGSGVKVAVLDTGISTHPDLNIRGGASFVPGEPSTQDGNGHGTHVAGTIAALDNSIGVLGVAPSAELYAVKVLGASGGGAISSIAQGLEWAGNNGMHVANLSLGSESPSATLEQAVNSATSRGVLVVAASGNSGAESISYPARYANAMAVGATDQNNNRADFSQYGAGLDIVAPGVNVQSTYPGSTYASLNGTSMATPHVAGAAVLVKQKNPSWSNVRIRDHLKNTATSLGSTNLYGSGLVNAEAATR

SEQ ID NO: 61943 - protein, 269 aa, Unidentified
AQSVPWGISRVQAPAAHNRRLWGSGVKVAVLDTGISTHPDLNIRGGASFVPGEPSTQDGNGHGTHVAGTIAALNNSIGVLGVAPSAELYAVKVLGASGGGAISSIAQGLEWAGANGMHVANLSLGSPSPSATLEQAVNSATSRGVLVVAASGNSGAGSISYPARYANAMAVGATDQDNNRASFSQYGAGLDIVAPGVNVQSTYPQSTYASLNGTSMATPHVAGAAVLVKQKNPSWSNVRIRNHLKNTATSLGSTNLSGSGLVNAEAATR

SEQ ID NO: 61944 - protein, 269 aa, Unidentified
AQSVPWGISRVQAPAAHNRGLTGSGVKVAVLDTGISTHPDLNIRGGASFVPGEPSTQDGNGHGTHVAGTIAALNNSIGVLGVAPSAELYAVKVLGASGGGAISSIAQGLEWAGNNGMHVANLSLGLQSPSATLEQAVNSATSRGVLVVAASGNSGEGSISYPARYANAMAVGATDQNNNRADFSQYGAGLDIVAPGVNVQSTYPGSTYASLNGTSMATPHVAGAAVLVKQKNPSWSNVRIRDRLKNTATSLGSTNLYGSGLVNAEAATR

SEQ ID NO: 61945 - protein, 269 aa, Unidentified
AQSVPWGISRVQAPAAHNRGLAGFGVKVAVLDSGISTHPDLNIRGGASFVPGEPSTQDGNGHGTHVAGTIAALNNSIGVLGVAPSAELYAVKVLGASGGGAISSIAQGLEWAGLNGMHVANLSLGSPSPSATLEQAVNSATSRGVLVVAASGNSGAGSISYPARYANAMAVGATDQNNNRASFSQYGAGLDIVAPGVNVQSTVPQSAYASLNGTSMATPHVAGAAVLVKQKNPSWSNVQIRNHLKNTATSLGSTNLYGSGLVNAEAATR

SEQ ID NO: 61946 - protein, 269 aa, Unidentified
AQSVPWGVSRVQAPAAHNRGLTGSGVKVAVLDTGISTHPDLNIRGGASFVPGEPSTQDGNGHGTHAAGTIAALNNSIGVLGVAPSAELYAVKVLGASGSGAISSIAQGLEWAGNNGMHVANLSLGSPSPSATLEQAVNSATSRGVLVVAASGNSGADSISYPARYANAMAVGATDQNNNRASFSQYGAGLDIVAPGVNVQSTYPGSTYASLNGTSMATPHVAGAAVLVKHKNPSWSNVRIRDHLKKTATSLGSTNLYGSGLVDAEAATR

SEQ ID NO: 61947 - protein, 269 aa, Unidentified
AQSVPWGISRVQAPAAHNRGLTGSGVKVAVLDTGISTHPDLNIRGGASFVPGEPSTQDGNGHGTHVAGTIAALNNSIGVLGVAPSAELYAVKVLGASGGGAISSIAQGLEWAGNNGMHVANLSLGSPSPSATLEQAVNSATSRGVLVVAASGNSGADSISYPARYANAMAVGATDQNNNRASFSQYGAGLDIVAPGVNVQSTWPGSTYASLNGTSMATPHVAGAAVLVKHKNPSWSNVRIRDHLKKTATSLGSANLYGSGLVNAEAATR

SEQ ID NO: 61948 - protein, 269 aa, Unidentified
AQSVPWGISRVQAPASHNRGLAGFGVKVAVLDTGISTHPDLNIRGGASFVPGEPSTQDGNGHGTHVAGTIAALNNSIGVLGVAPSAELYAVKVLGASGGGAISSIAQGLEWAGLNVMHVANLSLGSPSPSATLEQAVNSATSRGVLVVAASGNSGAGSISYPARYANAMAVGATDQNNNRASFSQYGAGLDIVAPGVNVQSTVPGSAYASLNGTSMATPHVAGAAVLVKQKNPSWSNVQIRNHLKNTATSLGSTNLYGSGLVNAEAATR

SEQ ID NO: 61949 - protein, 269 aa, Bacillus clausii
AQSVPWGIERVQAPAAHNRGLTGSGVKVAVLDTGISTHPDLRIRGGASFVPGEPSTQDGNGHGTHVAGTIAALDNSIGVLGVAPSAELYAVKVLGASGLGSISSIAQGLEWAGNNGMHVANLSLGSPSPSATLEQAVNSATSRGVLVVAASGNSGAGSISYPARYANAMAVGATDQNNNRASFSQYGAGLDIVAPGVNILSTWPGSTYASLNGTSMATPHVAGAAALVKQKNPSWSNVQIRNHLKNTATSLGDTWEYGSGLVNAEAATR

SEQ ID NO: 61950 - protein, 269 aa, Unidentified
AQSVPWGISRVQAPAAHRRRLTGRGVKVAVLDTGISTHPDLNIRGGASFVPGEPSTQDGNGHGTHVAGTIAALDNSIGVLGVAPSAELYAVKVLGASGAGSVSSIAQGLEWAGANGMHVANLSLGSPSPSATLEQAVNSATSRGVLVVAASGNSGAGSISYPARYANAMAVGATDQDNNRASFSQYGAGLDLVAPGVNVQSTYPQSAYASLNGTSMATPHVAGAAALVKQKNPSWSNVQIRNRLKNTATSLGSTNLYGSGLVNAEAATR

SEQ ID NO: 61951 - protein, 269 aa, Unidentified
AQSVPWGISRVQAPAAHNRGLVGFGVKVAVLDSGISTHPDLNIRGGASFVPGEPSTQDGNGHGTHVAGTIAALNNSIGVLGVAPSAELYAVKVLGASGGGAISSIAQGLEWAGLNGMHVANLSLGSPSPSATLEQAVNSATSRGVLVVAASGNSGAGSISYPARYANAMAVGATDQNNNRASFSQYGAGLDIVAPGVNVQSTAPQSAYASLNGTSMATPHVAGAAVLVKQKNPSWSNVQIRNHLKNTATSLGSTNLYGSGLVNAEAATR

SEQ ID NO: 61952 - protein, 269 aa, Unidentified
AQSVPWGISRVQAPAAHNRRLWGSGVKVAVLDTGISTHPDLNIRGGASFVPGEPSTQDGNGHGTHVAGTIAALNNSIGVLGVAPSAELYAVKVLGASGAGAISSIAQGLEWAGANGMHVANLSLGSPSPSATLEQAVNSATSRGVLVVAASGNSGAGSISYPARYANAMAVGATDQDNNRASFSQYGAGLDIVAPGVNVQSTYPQSAYASLNGTSMATPHVAGAAVLVKQKNPSWSNVRIRNHLKNTATSLGSTNLYGSGLVNAEAATR

SEQ ID NO: 61953 - protein, 269 aa, Unidentified
AQSVPWGISRVQAPAAHNRGLTGSGVKVAVLDTGISTHEDLNVRGGVSFVPGETSYQDGNGHGTHVAGTIAALNNSIGVVGVAPSADLYAVKVLGASGRGSVSSIAQGLEWAGQNGMHVANLSLGSPEPSATLEQAVNSATSRGVLVVAASGNSGAGSISYPARYANAMAVGATDQNNNRASFSQYGAGLDIVAPGVNVQSTYPGSTYASLNGTSMATPHVAGAAALVKQKNPSWSNVQIRDHLKNTATSLGSTNLYGSGLVNAEAATR

SEQ ID NO: 61954 - protein, 269 aa, Unidentified
AQSVPWGISRVQAPAAHNRGLAGSGVKVAVLDSGISTHPDLNIRGGASFVPGEPSTQDGNGHGTHVAGTIAALNNSIGVLGVAPSAELYAVKVLGASGGGAISSIAQGLEWAGANGMHVANLSLGNPSPSATLEQAVNSATSRGVLVVAASGNSGAGSISYPARYANAMAVGATDQNNNRASFSQYGAGLDIVAPGVNVQSTVPQSAYASLNGTSMATPHVAGAAVLVKQKNPSWSNVQIRNHLKNTATSLGSTNLYGSGLVNAEAATR

SEQ ID NO: 61955 - protein, 269 aa, Unidentified
AQSVPWGISRVQAPAAHNRGLAGFGVKVAVLDSGISTHPDLNIRGGASFVPGEPSTQDGNGHGTHVAGTIAALNNSIGVLGVAPSAELYAVKVLGASGGGAISSIAQGLEWAGLNGMHVANLSLGNPSPSATLEQAVNSATSRGVLVVAASGNSGAGSISYPARYANAMAVGATDQNNNRASFSQYGAGLDIVAPGVNVQSTVPQSTYASLNGTSMATPHVAGAAVLVKQKNPSWSNVQIRNHLKNTATSLGSTNLYGSGLVNAEAATR

SEQ ID NO: 61956 - protein, 269 aa, Unidentified
AQSVPWGISRVQAPAAHNRGLTGSGVKVAVLDTGISTHPDLNIRGGASFVPGEPSTQDGNGHGTHAAGTIAALDNSIGVLGVAPSAELYAVKVLGASGSGAISSIAQGLEWAGTNGMHVANLSLGSPSPSATLEQAVNSATSRGVLVVAASGNSGADSISYPASYANAMAVGATDQNNSRASFSQYGAGLDIVAPGVNVQSTYPGSTYASLNGTSMATPHVAGAAVLVKHKNPSWSNVRIRNHLKNTATSLGSTNLYGSGLVNAEAATR

SEQ ID NO: 61957 - protein, 269 aa, Unidentified
AQSVPWGISRVQAPAAHNRGLTGSGVKVAVLDTGISTHPDLNIRGGASFVPGEPSTQDGNGHGTHAAGTIAALDNSIGVLGVAPSAELYAVKVLGASGSGAISSIAQGLEWAGNNGMHVANLSLGSPSPSATLEQAVNSATSRGVLVVAASGNSGADSISYPARYANAMAVGATDQNNNRASFSQYGAGLDIVAPGVNVQSTWPGSRYASLNGTSMATPHVAGAAVLVKHKNPSWSNVRIRNHLKNTATSLGSANLYGSGLVNAEAATR

SEQ ID NO: 61958 - protein, 269 aa, Unidentified
AQSVPWGISRVQAPAAHNRGLAGKGVKVAVLDTGISTHPDLNIRGGASFVPGEPSTQDGNGHGTHVAGTIAALNNSIGVLGVAPSAELYAVKVLGASGGGAISSIAQGLEWAGNNGMHVANLSLGNPSPSATLEQAVNSATSRGVLVVAASGNSGEESISYPARYANAMAVGATDQNNNRASFSQYGAGLDIVAPGVNVQSTYPGSTYASLNGTSMATPHVAGAAVLVKQKNPSWSNVRIRDHLKNTATSLGSTNLYGSGLVNAEAATR

SEQ ID NO: 61959 - protein, 269 aa, Unidentified
AQSVPWGISRVQAPAAHNRGLTGSGVKTAVLDTGISTHPDLNIRGGASFVPGEPSTQDGNGHGTHVAGTIAALDNNIGVLGVAPRAELYAVKVLGASGFGSVSSIAQGLEWAGNNRMHVANLSLGLQAPSATLEQAVNSATSRGVLVVAASGNSGAGSISYPARYANAMAVGATDQNNNRASFSQYGDGLDIVAPGVNVLSTYPGSTYASLNGTSMATPHVAGAAALVKQKNPSWSNVQIRNHLKNTATSLGSTNLYGSGLVNAEAATR

SEQ ID NO: 61960 - protein, 269 aa, Unidentified
AQSVPWGISRVQAPAAHRRRLTGSGVKVAVLDTGISTHPDLDITGGASFVPGEPSTQDGNGHGTHVAGTIAALDNSIGVLGVAPSAELYAVKVLGASGGGAISSIAQGLEWAGNNGMHVANLSLGSPSPSATLEQAVNSATSRGVLVVAASGNSGAGSISYPARYANAMAVGATDQNNNRASFSQYGAGLDIVAPGVNVQSTYPGSTYASLNGTSMATPHVAGAAVLVKQKNPSWSNVRIRNHLKNTATSLGSTNLYGSGLVRAEAATR

SEQ ID NO: 61961 - protein, 269 aa, Unidentified
AQSVPWGISRVQAPAAHNRGLAGSGVKVAVLDTGISTHPDLNIRGGASFVPGEPSTQDGNGHGTHVAGTIAALNNSIGVLGVAPSAELYAVKVLGASGNGAISSIAGGLEWAGNNGMHVANLSLGSPSPSATLEQAVNSATSRGVLVVAASGNSGADSISYPARYANAMAVGATDQNNNRADFSQYGAGLDIVAPGVNVQSTYPGSTYASLNGTSMATPHVAGAAVLVKQKNPSWSNVRIRDHLKNTATSLGSTNLYGSGLVNAFAATR

SEQ ID NO: 61962 - protein, 269 aa, Unidentified
AQSVPWGISRVQAPAAHRRRLTGRGVKVAVLDTGISTHPDLNIRGGASFVPGEPSTQDGNGHGTHVAGTIAALDNSIGVLGVAPSAELYAVKVLGASGAGSVSSIAQGLEWAGANGMHVANLSLGSPSPSATLEQAVNSATSRGVLVVAASGNSGAGSISYPARYANAMAVGATDQDNNRASFSQYGAGLDLVAPGVNVQSTYPQSTYFSLNGTSMATPHVAGAAALVKQKNPSWSNVQIRNRLKNTATSLGSTNLYGSGLVNAEAATR

SEQ ID NO: 61963 - protein, 269 aa, Unidentified
AQSVPWGISRVQAPAAHNRGLTGSGVKVAVLDTGISTHPDLNIRGGASFVPGEPSTQDGNGHGTHAAGTIAALNNSIGVLGVAPSAELYAVKVLGASGSGAISSIAQGLEWAGNNGMHVANLSLGSPSPSATLEQAVNSATSRGVLVVAASGNSGADSISYPARYANAMAVGATDQNNDRASFSQYGAGLDIVAPGVNVQSTYLGSTYASLNGTSMATPHVAGAAVLVKHKNPSWSNVRIRDHLKKTATSLGSTNLYGSGLVNAEAATR

SEQ ID NO: 61964 - protein, 269 aa, Unidentified
AQSVPWGISRVQAPAAHNRGLAGSGVKVAVLDTGISTHPDLNIRGGASFVPGEPSTQDGNGHGTHVAGTIAALNNSIGVLGVAPSAELYAVKVLGASGNGAISSIANGLEWAGNNGMHVANLSLGSPSPSATLEQAVNSATSRGVLVVAASGNSGADSISYPARYANAMAVGATDQNNNRADFSQYGAGLDIVAPGVNVQSTYPGSTYASLNGTSMATPHVAGAAVLVKQKNPSWSNVRIRDHLKNTATSLGSTNLYGSGLVNAFAATR

SEQ ID NO: 61965 - protein, 269 aa, Unidentified
AQSVPWGISRVQAPASHNRGLTGFGVKVAVLDSGISTHPDLNIRGGASFVPGEPSTQDGNGHGTHVAGTIAALNNSIGVLGVAPSAELYAVKVLGASGGGAISSIAQGLEWAGLNGMHVANLSLGNPSPSATLEQAVNSATSRGVLVVAASGNSGAGSISYPARYANAMAVGATDQNNNRASFSQYGAGLDIVAPGVNVQSTAPGSAYASLNGTSMATPHVAGAAVLVKQKNPSWSNVQIRNHLKNTATSLGSTNLYGSGLVNAEAATR

SEQ ID NO: 61966 - protein, 269 aa, Unidentified
AQSVPWGISRVQAPAAHRRRLTGSGVKVAVLDTGISTHPDLDIRGGASFVPGEPSTQDGNGHGTHVAGTIAALNNRIGVLGVAPSAELYAVKVLGASGGGAISSIAQGLEWAGNNGMHVANLSLGSPSPSATLEQAVNSATSRGVLVVAASGNSGAGSISYPARYANAMAVGATDQNNNRASFSQYGAGLDIVAPGVNVQSTYPGSTYASENGTSMATPHVAGAAVLVKQKNPSWSNVRIRNHLKNTATSLGSTNLYGSGLVNAEAETR

SEQ ID NO: 61967 - protein, 269 aa, Unidentified
AQSVPWGISRVQAPAAHNRGLAGSGVKVAVLDTGISTHPDLNIRGGASFVPGEPSTQDGNGHGTHVAGTIAALNNSIGVLGVAPSAELYAVKVLGASGGGAISSIAQGLEWAGLNGMHVANLSLGSPSPSATLEQAVNSATSRGVLVVAASGNSGADSISYPARYANAMAVGATDQNNNRADFSQYGAGLDIVAPGVNVQSTYPGSTYASLNGTSMATPHVAGAAVLVKQKNPSWSNVRIRDHLKNTATSLGSTNLYGSGLVNAFAATR

SEQ ID NO: 61968 - protein, 269 aa, Unidentified
AQSVPWGISRVQAPAAHNRGLAGSGVKVAVLDTGISTHPDLNIRGGASFVPGEPSTQDGNGHGTHVAGTIAALNNSIGVLGVAPSAELYAVKVLGASGGGAISSIAQGLEWAGNNGMHVANLSLGSPSPSATLEQAVNSATSRGVLVVAASGNSGADSISYPARYANAMAVGATDQNNNRADFSQYGAGLDIVAPGVNVQSTYPGSTYASLNGTSMATPHVAGAASLVKQKNPSWSNVRIRDHLKNTATSLGSTNLYGGGLVNAHAATR

SEQ ID NO: 61969 - protein, 269 aa, Unidentified
AQSVPWGISRVQAPAAHNRGLQGSGVKVAVLDTGISTHPDLNIRGGASFVPGEPSTQDGNGHGTHVAGTIAALNNSIGVLGVAPSAELYAVKVLGASGGGAISSIAQGLEWAGNNGMHVANLSLGSPSPSATLEQAVNSATSRGVLVVAASGNSGADSISYPARYANAMAVGATDQNNNRAEFSQYGAGLDIVAPGVNVQSTYPGLTYASLNGTSMATPHVAGAASLVKQKNPSWSNVVIRDHLKNTATSLGSTNLYGSGLVNATAATR

SEQ ID NO: 61970 - protein, 269 aa, Unidentified
AQSVPWGISRVQAPAAHNRGLAGSGVKVAVLDTGISTHPDLNIRGGASFVPGEPSTQDGNGHGTHVAGTIAALNNSIGVLGVAPSAELYAVKVLGASGGGAISSIANGLEWAGNNGMHVANLSLGSPSPSATLEQAVNSATSRGVLVVAASGNSGADSISYPARYANAMAVGATDQNNNRADFSQYGAGLDIVAPGVNVQSTYPGSTYASLNGTSMATPHVAGAAVLVKQKNPSWSNVRIRDHLKNTATSLGSTNLYGSGLVNAFAATR

SEQ ID NO: 61971 - protein, 269 aa, Unidentified
AQSVPWGISRVQAPASHNRGLTGRGVKVAVLDTGISTHPDLNIRGGASFVPGEPSTQDGNGHGTHVAGTIAALNNSIGVLGVAPSAELYAVKVLGASGGGAISSIAQGLEWAGNNGMHVANLSLGSPSPSATLEQAVNSATSRGVLVVAASGNSGEGSISYPARYANAMAVGATDQNNNRADFSQYGAGLDIVAPGVNVQSTYPGSTYASLNGTSMATPHVAGAAVLVKQKNPSWSNVRIRDRLKNTATSLGSTNLYGSGLVNAEAATR

SEQ ID NO: 61972 - protein, 269 aa, Unidentified
AQSVPWGISRVQAPAAHNRGLTGSGVKVAVLDTGISTHPDLNIRGGASFVPGEPSTQDGNGHGTHVAGTIAALNNSIGVLGVAPSAELYAVKVLGASGGGAISSIAQGLEWAGNNGMHVANLSLGQPAPSATLEQAVNSATSRGVLVVAASGNSGEGSISYPARYANAMAVGATDQNNNRADFSQYGAGLDIVAPGVNVQSTYPGSTYASLNGTSMATPHVAGAAVLVKQKNPSWSNVRIRDRLKNTATSLGSTNLYGSGLVNAEAATR

SEQ ID NO: 61973 - protein, 269 aa, Unidentified
AQSVPWGISRVQAPASHNRGLAGFGVKVAVLDTGISTHPDLNIRGGASFVPGEPSTQDGNGHGTHVAGTIAALNNSIGVLGVAPSAELYAVKVLGASGGGAISSIAQGLEWAGANGMHVANLSLGNPSPSATLEQAVNSATSRGVLVVAASGNSGAGSISYPARYANAMAVGATDQNNNRASFSQYGAGLDIVAPGVNVQSTAPGSAYASLNGTSMATPHVAGAAVLVKQKNPSWSNVQIRNHLKNTATSLGSTNLYGSGLVNAEAATR

SEQ ID NO: 61974 - protein, 269 aa, Bacillus lentus
AQSVPWGISRVQAPAAHNRGLTGSGVKVAVLDTGISTHEDLNVRGGVSFVPGETSYQDGNGHGTHVAGTIAALNNSIGVVGVAPSADLYAVKVLGASGEGSVSSIAQGLEWAGQNGMHVANLSLGSDSPSATLEQAVNSATSRGVLVVAASGNSGAGSISYPARYANAMAVGATDQNNNRASFSQYGAGLDIVAPGVNVQSTYPGSTYASLNGTSMATPHVAGAAALVKQKNPSWSNVQIRDHLKNTATSLGSTNLYGSGLVNAEAATR

SEQ ID NO: 61975 - protein, 269 aa, Unidentified
AQSVPWGISRVQAPAAHNRRLWGSGVKVAVLDTGISTHPDLNIRGGASFVPGEPSTQDGNGHGTHVAGTIAALNNRIGVLGVAPSAELYAVKVLGASGAGAISSIAQGLEWAGSNGMHVANLSLGSPSPSATLEQAVNSATSRGVLVVAASGNSGAGSISYPARYANAMAVGATDQNNNRASFSQYGAGLDIVAPGVNVQSTYPGSAYFSLNGTSMATPHVAGAAVLVKQKNPSWSNVRIRNHLKNTATSLGSTNLYGSGLVNAEAATR

SEQ ID NO: 61976 - protein, 269 aa, Unidentified
AQSVPWGISRVQAPASHNRGLAGFGVKVAVLDTGISTHPDLNIRGGASFVPGEPSTQDGNGHGTHVAGTIAALNNSIGVLGVAPSAELYAVKVLGASGGGAISSIAQGLEWAGLNGMHVANLSLGSPSPSATLEQAVNSATSRGVLVVAASGNSGAGSISYPARYANAMAVGATDQNNNRASFSQYGAGLDIVAPGVNVQSTVPQSAYASLNGTSMATPHVAGAAVLVKQKNPSWSNVQIRNHLKNTATSLGSTNLYGSGLVNAEAATR

SEQ ID NO: 61977 - protein, 269 aa, Unidentified
AQSVPWGISRVQAPAAHNRGLAGSGVKVAVLDTGISTHPDLNIRGGASFVPGEPSTQDGNGHGTHVAGTIAALNNSIGVLGVAPSAELYAVKVLGASGGGAISSIAQGLEWAGNNGMHVANLSLGSPSPSATLEQAVNSATSRGVLVVAASGNSGAESISYPARYANAMAVGATDQNNNRADFSQYGAGLDIVAPGVNVQSTYPGSTYASLNGTSMATPHVAGAAVLVKQKNPSWSNVRIRDHLKNTATSLGSTNLYGSGLVNAFVATR

SEQ ID NO: 61978 - protein, 269 aa, Unidentified
AQSVPWGISRVQAPAAHNRGLAGRGVKVAVLDTGISTHPDLNIRGGASFVPGEPSTQDGNGHGTHVAGTIAALNNSIGVLGVAPSAELYAVKVLGASGGGAISSIAQGLEWAGNNGMHVANLSLGNPSPSATLEQAVNSATSRGVLVVAASGNSGEGSISYPARYANAMAVGATDQNNNRADFSQYGAGLDIVAPGVNVQSTYPGSTYASLNGTSMATPHVAGAAVLVKQKNPSWSNVRIRDHLKNTATSLGSTNLYGSGLVNAEAATR

SEQ ID NO: 61979 - protein, 269 aa, Unidentified
AQSVPWGISRVQAPASHNRGLTGFGVKVAVLDTGISTHPDLNIRGGASFVPGEPSTQDGNGHGTHVAGTIAALNNSIGVLGVAPSAELYAVKVLGASGGGAISSIAQGLEWAGANGMHVANLSLGNPSPSATLEQAVNSATSRGVLVVAASGNSGAGSISYPARYANAMAVGATDQNNNRADFSQYGAGLDIVAPGVNVQSTVPGSAYASLNGTSMATPHVAGAAVLVKQKNPSWSNVQIRNHLKNTATSLGSTNLYGSGLVNAEAATR

SEQ ID NO: 61980 - protein, 269 aa, Bacillus lentus
AQSVPWGISRVQAPAAHNRGLTGSGVKVAVLDTGISTHEDLNVRGGVSFVPGEPSYQDGNGHGTHVAGTIAALNNSIGVVGVAPSADLYAVKVLGASGRGSVSSIAQGLEWAGQNGMHVANLSLGSDEPSATLEQAVNSATSRGVLVVAASGNSGAGSISYPARYANAMAVGATDQNNNRASFSQYGAGLDIVAPGVNVQSTYPGSTYASLNGTSMATPHVAGAAALVKQKNPSWSNVQIRDHLKNTATSLGSTNLYGSGLVNAEAATR

SEQ ID NO: 61981 - protein, 269 aa, Unidentified
AQSVPWGISRVQAPAAHNRGLAGSGVKVAVLDTGISTHPDLNIRGGASFVPGEPSTQDGNGHGTHVAGTIAALNNSIGVLGVAPSAELYAVKVLGASGQGAISSIANGLEWAGNNGMHVANLSLGSPSPSATLEQAVNSATSRGVLVVAASGNSGADSISYPARYANAMAVGATDQNNNRADFSQYGAGLDIVAPGVNVQSTYPGSTYASLNGTSMATPHVAGAAVLVKQKNPSWSNVRIRDHLKNTATSLGSTNLYGSGLVNAFAATR

SEQ ID NO: 61982 - protein, 269 aa, Unidentified
AQSVPWGISRVQAPAAHNRRLWGSGVKVAVLDTGISTHPDLNIRGGASFVPGEPSTQDGNGHGTHVAGTIAALNNSIGVLGVAPSAELYAVKVLGASGGGAISSIAQGLEWAGANGMHVANLSLGSPSPSATLEQAVNSATSRGVLVVAASGNSGAGSISYPARYANAMAVGATDQDNNRASFSQYGAGLDIVAPGVNVQSTYPGSAYFSLNGTSMATPHVAGAAVLVKQKNPSWSNVRIRNHLKNTATSLGSTNLYGSGLVNAEAATR

SEQ ID NO: 61983 - protein, 269 aa, Unidentified
AQSVPWGISRVQAPAAHNRGLAGFGVKVAVLDSGISTHPDLNIRGGASFVPGEPSTQDGNGHGTHVAGTIAALNNSIGVLGVAPSAELYAVKVLGASGGGAISSIAQGLEWAGLNGMHVANLSLGNPSPSATLEQAVNSATSRGVLVVAASGNSGAGSISYPARYANAMAVGATDQNNNRASFSQYGAGLDIVAPGVNVQSTAPGSAYASLNGTSMATPHVAGAAVLVKQKNPSWSNVQIRNHLKNTATSLGSTNLYGSGLVNAEAATR

SEQ ID NO: 61984 - protein, 269 aa, Unidentified
AQSVPWGISRVQAPASHNRGLAGFGVKVAVLDTGISTHPDLNIRGGASFVPGEPSTQDGNGHGTHVAGTIAALNNSIGVLGVAPSAELYAVKVLGASGGGAISSIAQGLEWAGLNGMHVANLSLGNPSPSATLEQAVNSATSRGVLVVAASGNSGAGSISYPARYANAMAVGATDQNNNRASFSQYGAGLDIVAPGVNVQSTAPGSAYASLNGTSMATPHVAGAAVLVKQKNPSWSNVQIRNHLKNTATSLGSTNLYGSGLVNAEAATR

SEQ ID NO: 61985 - protein, 275 aa, Unidentified
AQTIPWGISRVQAPAAHNRGLTGSGVKVAVLDTGIXSTHPDLNIRGGASFVPGEPXSTQDGNGHGTHVAGTIAALNNSIGVLGVAPSAELYAVKVLGADGEGAISSIAQGLEWAGNNGMHVANLSLGSPSPSATLEQAVNSATSRGVLVVAASGNSGAXSSISXXXYPARYANAMAVGATDQNNNRASFSQYGAGLDIVAPGVNIQSTWPGGTYASLNGTSMATPHVAGAAALVKQKNPSWSNVQIRNHLKNTATSLGSTWLYGSGLVNAEAATR

SEQ ID NO: 61986 - protein, 269 aa, Unidentified
AQSVPWGISRVQAPAAHNRGLAGSGVKVAVLDTGISTHPDLNIRGGASFVPGEPSTQDGNGHGTHVAGTIAALNNNIGVLGVAPSAELYAVKVLGASGGGAISSIAQGLEWAGNNGMHVANLSLGSPSPSATLEQAVNSATSRGVLVVAASGNSGADSISYPARYANAMAVGATDQNNNRADFSQYGAGLDIVAPGVNVQSTYPGSTYASLNGTSMATPHVAGAAVLVKQKNPSWSNVRIRDHLKNTATSLGSTNLYGSGLVNAFAATR

SEQ ID NO: 61987 - protein, 269 aa, Unidentified
AQSVPWGISRVQAPAAHNRGLAGSGVKVAVLDTGISTHPDLNIRGGASFVPGEPSTQDGNGHGTHVAGTIAALNNNIGVLGVAPSAELYAVKVLGASGQGAISSIAQGLEWAGNNGMHVANLSLGSPSPSATLEQAVNSATSRGVLVVAASGNSGADSISYPARYANAMAVGATDQNNNRADFSQYGAGLDIVAPGVNVQSTYPGSTYASLNGTSMATPHVAGAAVLVKQKNPSWSNVRIRDHLKNTATSLGSTNLYGSGLVNAFAATR

SEQ ID NO: 61988 - protein, 269 aa, Unidentified
AQSVPWGISRVQAPAAHNRGLAGGGVKVAVLDTGISTHPDLNIRGGASFVPGEPSTQDGNGHGTHVAGTIAALNNSIGVLGVAPSAELYAVKVLGASGQGAISSIAQGLEWAGNNGMHVANLSLGSPSPSATLEQAVNSATSRGVLVVAASGNSGADSISYPARYANAMAVGATDQNNNRADFSQYGAGLDIVAPGVNVQSTYPGSTYASLNGTSMATPHVAGAAVLVKQKNPSWSNVRIRDHLKNTATSLGSTNLYGSGLVNAFAATR

SEQ ID NO: 61989 - protein, 269 aa, Unidentified
AQSVPWGISRVQAPAAHNRGLAGRGVKVAVLDTGISTHPDLNIRGGASFVPGEPSTQDGNGHGTHVAGTIAALNNSIGVLGVAPSAELYAVKVLGASGSGAISSIAQGLEWAGNNRMHVANLSLGIESPSATLEQAVNSATSRGVLVVAASGNSGADSISYPARYANAMAVGATDQNNNRADFSQYGAGLDIVAPGVNVQSTYPGSTYASLNGTSMATPHVAGAAVLVKQKNPSWSNVQIRDHLKNTATSLGSTNLYGSGLVNAEAATR

SEQ ID NO: 61990 - protein, 269 aa, Unidentified
AQSVPWGISRVQAPAAHNRGLTGFGVKVAVLDSGISTHPDLNIRGGASFVPGEPSTQDGNGHGTHVAGTIAALNNSIGVLGVAPSAELYAVKVLGASGGGAISSVAQGLEWAGANGMHVANLSLGSPSPSATLEQAVNSATSRGVLVVAASGNSGAGSISYPARYANAMAVGATDQNNNRASFSQYGAGLDIVAPGVNVQSTAPQSAYASLNGTSMATPHVAGAAVLVKQKNPSWSNVQIRNHLKNTATSLGSTNLYGSGLVNAEAATR

SEQ ID NO: 61991 - protein, 269 aa, Unidentified
AQSVPWGISRVQAPAAHNRGLAGSGVKVAVLDTGISTHPDLNIRGGASFVPGEPSTQDGNGHGTHVAGTIAALNNSIGVLGVAPSAELYAVKVLGASGNGAISSIAQGLEWAGNNGMHVANLSLGAPSPSATLEQAVNSATSRGVLVVAASGNSGADSISYPARYANAMAVGATDQNNNRADFSQYGAGLDIVAPGVNVQSTYPGSTYASLNGTSMATPHVAGAAVLVKQKNPSWSNVRIRDHLKNTATSLGSTNLYGSGLVNAFAATR

SEQ ID NO: 61992 - protein, 269 aa, Unidentified
AQSVPWGISRVQAPAAHNRRLWGSGVKVAVLDTGISTHPDLNIRGGASFVPGEPSTQDGNGHGTHVAGTIAALNNSIGVLGVAPSAELYAVKVLGASGGGAISSIAQGLEWAGANGMHVANLSLGSPSPSATLEQAVNSATSRGVLVVAASGNSGAGSISYPARYANAMAVGATDQDNNRASFSQYGAGLDIVAPGVNVQSTYPQSAYASLNGTSMATPHVAGAAVLVKQKNPSWSNVRIRNHLKNTATSLGSTNLYGSGLVNAEAATR

SEQ ID NO: 61993 - protein, 269 aa, Unidentified
AQSVPWGISRVQAPAAHNRGLAGSGVKVAVLDTGISTHPDLRIRGGASFVPGEPSTQDGNGHGTHVAGTIAALNNSIGVLGVAPSAELYAVKVLGASGSGAISSIAQGLEWAGNNRMHVANLSLGIESPSATLEQAVNSATSRGVLVVAASGNSGADSISYPARYANAMAVGATDQNNNRADFSQYGAGLDIVAPGVNVQSTYPGSTYASLNGTSMATPHVAGAAVLVKQKNPSWSNVQIRDHLKNTATSLGSTNLYGSGLVNAEAATR

SEQ ID NO: 61994 - protein, 269 aa, Unidentified
AQSVPWGISRVQAPASHNRGLTGFGVKVAVLDSGISTHPDLNIRGGASFVPGEPSTQDGNGHGTHVAGTIAALNNSIGVLGVAPSAELYAVKVLGASGGGAISSIAQGLEWAGLNGMHVANLSLGSPSPSATLEQAVNSATSRGVLVVAASGNSGAGSISYPARYANAMAVGATDQNNNRASFSQYGAGLDIVAPGVNVQSTVPQSAYASLNGTSMATPHVAGAAVLVKQKNPSWSNVQIRNHLKNTATSLGSTNLYGSGLVNAEAATR

SEQ ID NO: 61995 - protein, 269 aa, Unidentified
AQSVPWGISRVQAPAAHNRGLTGRGVKVAVLDTGISTHPDLNIRGGASFVPGEPSTQDGNGHGTHVAGTIAALNNSIGVLGVAPSAELYAVKVLGASGGGAISSIAQGLEWAGNNGMHVANLSLGSESPSATLEQAVNSATSRGVLVVAASGNSGAESISYPARYANAMAVGATDQNNNRADFSQYGAGLDIVAPGVNVQSTYPGSTYASLNGTSMATPHVAGAAVLVKQKRPSWSNVRIRDHLKNTATSLGSTNLYGSGLVNAEAATR

SEQ ID NO: 61996 - protein, 269 aa, Unidentified
AQSVPWGISRVQAPAAHNRGLAGSGVKVAVLDTGISTHPDLNIRGGASFVPGEPSTQDGNGHGTHVAGTIAALNNSIGVLGVAPSAELYAVKVLGASGQGAISSIAQGLEWAGNNGMHVANLSLGAPSPSATLEQAVNSATSRGVLVVAASGNSGADSISYPARYANAMAVGATDQNNNRADFSQYGAGLDIVAPGVNVQSTYPGSTYASLNGTSMATPHVAGAAVLVKQKNPSWSNVRIRDHLKNTATSLGSTNLYGSGLVNAFAATR

SEQ ID NO: 61997 - protein, 269 aa, Unidentified
AQSVPWGISRVQAPASHNRGLAGFGVKVAVLDSGISTHPDLNIRGGASFVPGEPSTQDGNGHGTHVAGTIAALNNSIGVLGVAPSAELYAVKVLGASGGGAISSIAQGLEWAGANGMHVANLSLGSPSPSATLEQAVNSATSRGVLVVAASGNSGAGSISYPARYANAMAVGATDQNNNRASFSQYGAGLDIVAPGVNVQSTAPQSTYASLNGTSMATPHVAGAAVLVKQKNPSWSNVQIRNHLKNTATSLGSTNLYGSGLVNAEAATR

SEQ ID NO: 61998 - protein, 269 aa, Unidentified
AQSVPWGISRVQAPAAHNRGLAGGGVKVAVLDTGISTHPDLNIRGGASFVPGEPSTQDGNGHGTHVAGTIAALNNNIGVLGVAPSAELYAVKVLSASGNGAISSIAQGLEWAGNNGMHVANLSLGAPSPSATLEQAVNSATSRGVLVVAASGNSGAGSISYPARYANAMAVGATDQNNNRASFSQYGAGLDIVAPGVNVQSTYPGSTYASQNGTSMATPHVAGAAVLVKQKNPSWSNVRIRNHLKNTATSLGSTNLYGSGLVNAEAATR

SEQ ID NO: 61999 - protein, 269 aa, Unidentified
AQSVPWGISRVQAPASHNRGLAGFGVKVAVLDSGISTHPDLNIRGGASFVPGEPSTQDGNGHGTHVAGTIAALNNSIGVLGVAPSAELYAVKVLGASGGGAISSIAQGLEWAGANGMHVANLSLGSPSPSATLEQAVNSATSRGVLVVAASGNSGAGSISYPARYANAMAVGATDQNNNRASFSQYGAGLDIVAPGVNVQSTVPGSAYASLNGTSMATPHVAGAAVLVKQKNPSWSNVQIRNHLKNTATSLGSTNLYGSGLVNAEAATR

SEQ ID NO: 62000 - protein, 269 aa, Unidentified
AQSVPWGISRVQAPAARNRGLAGSGVKVAVLDTGISTHPDLNIRGGASFVPGEPSTQDGNGHGTHVAGTIAALDNSIGVLGVAPSAELYAVKVLGASGGGAISSIAQGLEWAGNNGMHVANLSLGSPSPSATLEQAVNSATSRGVLVVAASGNSGADSISYPARYANAMAVGATDQNNNRASFSQYGAGLDIVAPGVNVQSTYPGSTYASLNGTSMATPHVAGAAVLVKQKNPSWSNVRIRDHLKNTATSLGSTNLYGSGLVNAFAATR

SEQ ID NO: 62001 - protein, 269 aa, Unidentified
AQSVPWGISRVQAPAAHNRGLAGRGVKVAVLDTGISTHPDLRIRGGASFVPGEPSTQDGNGHGTHVAGTIAALNNSIGVLGVAPSAELYAVKVLGASGSGAISSIAQGLEWAGNNGMHVANLSLGSPSPSATLEQAVNSATSRGVLVVAASGNSGADSISYPARYANAMAVGATDQNNNRADFSQYGAGLDIVAPGVNVQSTYPGSTYASDNGTSMATPHVAGAAVLVKQKNPSWSNVQIRDHLKNTATSLGSTNLYGSGLVNAFAATR

SEQ ID NO: 62002 - protein, 269 aa, Unidentified
AQSVPWGISRVQAPAAHRRGLTGRGVKVAVLDTGISTHPDLNIRGGASFVPGEPSTQDGNGHGTHVAGTIAALDNNIGVLGVAPRAELYAVKVLGASGSGSVSSIAQGLEWAGNNRMHVANLSLGLQAPSATLEQAVNSATSRGVLVVAASGNSGAGSISYPARYANAMAVGATDQNNNRASFSQYGAGLDIVAPGVNVLSTYPGSTYASLNGTSMATPHVAGAAALVKQKNPSWSNVQIRNNLKNTATSLGSTNLYGSGLVNAEAATR

SEQ ID NO: 62003 - protein, 269 aa, Unidentified
AQSVPWGISRVQAPAAHRRRLWGRGVKVAVLDTGISTHPDLNIRGGASFVPGEPSTQDGNGHGTHVAGTIAALDNSIGVLGVAPSAELYAVKVLGASGAGSVSSIAQGLEWAGANGMHVANLSLGSPSPSATLEQAVNSATSRGVLVVAASGNSGAGSISYPARYANAMAVGATDQDNNRASFSQYGAGLDLVAPGVNVQSTYPGSTYFSLNGTSMATPHVAGAAALVKQKNPSWSNVQIRNRLKNTATSLGSTNLYGSGLVNAEAATR

SEQ ID NO: 62004 - protein, 269 aa, Unidentified
AQSVPWGISRVQAPAAHRRGLWGRGVKVAVLDTGISTHPDLNIRGGASFVPGEPSTQDGNGHGTHVAGTIAALDNSIGVLGVAPSAELYAVKVLGASGAGSVSSIAQGLEWAGANGMHVANLSLGSPSPSATLEQAVNSATSRGVLVVAASGNSGAGSISYPARYANAMAVGATDQDNNRASFSQYGAGLDIVAPGVNVQSTYPQSAYFSLNGTSMATPHVAGAAALVKQKNPSWSNVQIRNRLKNTATSLGSTNLYGSGLVNAEAATR

SEQ ID NO: 62005 - protein, 269 aa, Unidentified
AQSVPWGISRVQAPAAHRRGLWGRGVKVAVLDTGISTHPDLNIRGGASFVPGEPSTQDGNGHGTHVAGTIAALDNSIGVLGVAPSAELYAVKVLGASGSGSVSSIAQGLEWAGANGMHVANLSLGSPSPSATLEQAVNSATSRGVLVVAASGNSGAGSISYPARYANAMAVGATDQDNNRASFSQYGAGLDLVAPGVNVQSTVPQSAYASLNGTSMATPHVAGAAALVKQKNPSWSNVQIRNRLKNTATSLGSTNLYGSGLVNAEAATR

SEQ ID NO: 62006 - protein, 269 aa, Unidentified
AQSVPWGISRVQAPAAHNRGLAGGGVKVAVLDTGISTHPDLNIRGGASFVPGEPSTQDGNGHGTHVAGTIAALDNNIGVLGVAPSAELYAVKVLSASGNGAISSIAGGLEWAGNNGMHVANLSLGSPSPSATLEQAVNSATSRGVLVVAASGNSGAGSISYPARYANAMAVGATDQNNNRASFSQYGAGLDIVAPGVNVQSTYPGSTYASLNGTSMATPHVAGAAVLVKQKNPSWSNVRIRNHLKNTATSLGSTNLYGSGLVNAEAATR

SEQ ID NO: 62007 - protein, 269 aa, Unidentified
AQSVPWGISRVQAPASHNRGLTGFGVKVAVLDTGISTHPDLNIRGGASFVPGEPSTQDGNGHGTHVAGTIAALNNSIGVLGVAPSAELYAVKVLGASGGGAISSIAQGLEWAGANGMHVANLSLGNPSPSATLEQAVNSATSRGVLVVAASGNSGAGSISYPARYANAMAVGATDQNNNRASFSQYGAGLDIVAPGVNVQSTVPGSAYASLNGTSMATPHVAGAAVLVKQKNPSWSNGQIRNHLKNTATSLGSTNLYGSGLVNAEAATR

SEQ ID NO: 62008 - protein, 269 aa, Unidentified
AQSVPWGISRVQAPAAHNRGLTGSGVKVAVLDTGISTHPDLNIRGGASFVPGEPSTQDGNGHGTHAAGTIAALDNSIGVLGVAPSAELYAVKVLGASGSGAISSIAQGLEWAGNNGMHVANLSLGSPSPSATLEQAVNSATSRGVLVVAASGNSGADSISYPARYANAMAVGATDQNNNRASFSQYGAGLDIVAPGVNIQSTYPGSRYASLNGTSMATPHVAGAAVLVKHKNPSWSNVRIRNHLKNTATSLGSANLYGSGLVNAEAATR

SEQ ID NO: 62009 - protein, 269 aa, Unidentified
AQSVPWGISRVQAPAAHRRGLTGRGVKVAVLDTGISTHPDLNIRGGASFVPGEPSTQDGNGHGTHVAGTIAALDNNIGVLGVAPRAELYAVKVLGASGSGSVSSIAQGLEWAGNNRMHVANLSLGLQAPSATLEQAVNSATSRGVLVVAASGNSGAGSISYPARYANAMAVGATDQNNNRASFSQYGAGLDIVAPGVNVLSTYPGSTYASLNGTSMATPHVAGAAALVTQKNPSWSNVQIRNHLKNTATSLGSTNLYGSGLVNAEAATR

SEQ ID NO: 62010 - protein, 269 aa, Unidentified
AQSVPWGISRVQAPAAHNRRLWGSGVKVAVLDTGISTHPDLNIRGGASFVPGEPSTQDGNGHGTHVAGTIAALNNRIGVLGVAPSAELYAVKVLGASGAGAISSIAQGLEWAGANGMHVANLSLGSPSPSATLEQAVNSATSRGVLVVAASGNSGAGSISYPARYANAMAVGATDQDNNRASFSQYGAGLDIVAPGVNVQSTYPGSTYFSLNGTSMATPHVAGAAVLVKQKNPSWSNVRIRNHLKNTATSLGSTNLYGSGLVNAEAATR

SEQ ID NO: 62011 - protein, 269 aa, Unidentified
AQSVPWGISRVQAPAAHNRGLAGSGVKVAVLDTGISTHPDLNIRGGASFVPGEPSTQDGNGHGTHVAGTIAALNNSIGVLGVAPSAELYAVKVLGASGGGAISSIAQGLEWAGNNGMHVANLSLGAPSPSATLEQAVNSATSRGVLVVAASGNSGADSISYPARYANAMAVGATDQNNNRADFSQYGAGLDIVAPGVNVQSTYPGSTYASLNGTSMATPHVAGAAVLVKQKNPSWSNVRIRDHLKNTATSLGSTNLYGSGLVNAFAATR

SEQ ID NO: 62012 - protein, 269 aa, Unidentified
AQSVPWGISRVQAPAAHNRGLTGSGVKVAVLDTGISTHPDLNIRGGASFVPGEPSTQDGDGHGTHVAGTIAALNNSIGVLGVAPSAELYAVKVLGASGSGAISSIAQGLEWAGNNGMHVANLSLGSPSPSATLEQAVNSATSRGVLVVAASGNSGADSISYPARYANAMAVGATDQNNNRASFSQYGAGLDIVAPGVNVQSTYPGSRYASLNGTSMATPHVAGAAVLVKHKNPSWSNVRIRDHLKKTATRLGSTNLYGSGLVNAEAATR

SEQ ID NO: 62013 - protein, 269 aa, Unidentified
AQSVPWGISRVQAPAAHNRGLTGSGVKVAVLDTGISTHPDLNIRGGASFVPGEPSTQDGDGHGTHVAGTIAALNNSIGVLGVAPSAELYAVKVLGASGSGAISSIAQGLEWAGNNGMHVANLSLGSPSPSATLEQAVNSATSRGVLVVAASGNSGADSISYPARYANAMAVGATDQNNNRASFSQYGAGLDIVAPGVNVQSTYPGGRYASLNGTSMATPHVAGAAVLVKHKNPSWSNVRIRDHLKKTATSLGSTNLYGSGLVNAEAATR

SEQ ID NO: 62014 - protein, 269 aa, Unidentified
AQSVPWGISRVQAPAAHNRGLAGRGVKVAVLDTGISTHPDLNIRGGASFVPGEPSTQDGNGHGTHVAGTIAALNNSIGVLGVAPSAELYAVKVLGASGGGAISSIAQGLEWAGNNGMHVANLSLGSPSPSATLEQAVNSATSRGVLVVAASGNSGEGSISYPARYANAMAVGATDQNNNRADFSQYGAGLDIVAPGVNVQSTYPGSTYASLNGTSMATPHVAGAAVLVKQKNPSWSNVRIRDHLKNTATSLGSTNLYGSGLVNAFAATR

SEQ ID NO: 62015 - protein, 269 aa, Unidentified
AQSVPWGISRVQAPAAHNRGLAGSGVKVAVLDTGISTHPDLNIRGGASFVPGEPSTQDGNGHGTHVAGTIAALNNSIGVLGVAPSAELYAVKVLGASGGGAISSIAQGLEWAGNNGMHVANLSLGLPSPSATLEQAVNSATSRGVLVVAASGNSGADSISYPARYANAMAVGATDQNNNRADFSQYGAGLDIVAPGVNVQSTYPGSTYASLNGTSMATPHVAGAAVLVKQKNPSWSNVRIRDHLKNTATSLGSTNLYGSGLVNAFAATR

SEQ ID NO: 62016 - protein, 269 aa, Unidentified
AQSVPWGISRVQAPAAHNRGLTGSGVKVAVLDTGISTHEDLNVRGGVSFVPGETSYQDGNGHGTHVAGTIAALNNSIGVVGVAPSADLYAVKVLGASGRGSVSSIAQGLEWAGQNGMHVANLSLGSESPSATLEQAVNSATSRGVLVVAASGNSGAGSISYPARYANAMAVGATDQNNNRASFSQYGAGLDIVAPGVNVQSTYPGSTYASLNGTSMATPHVAGAAALVKQKNPSWSNVQIRDHLKNTATSLGSTNLYGSGLVNAEAATR

SEQ ID NO: 62017 - protein, 269 aa, Unidentified
AQSVPWGISRVQAPAAHNRGLAGSGVKVAVLDTGISTHPDLNIRGGASFVPGEPSTQDGNGHGTHVAGTIAALNNSIGVLGVAPSAELYAVKVLGASGGGAISSIAQGLEWAGNNGMHVANLSLGSESPSATLEQAVNSATSRGVLVVAASGNSGAESISYPARYANAMAVGATDQNNNRADFSQYGAGLDIVAPGVNVQSTYPGSTYASLNGTSMATPHVAGAAVLVKQKNPSWSNVRIRDRLKNTATSLGSTNLYGSGLVNAEAATR

SEQ ID NO: 62018 - protein, 269 aa, Unidentified
AQSVPWGISRVQAPAAHNRGLAGSGVKVAVLDTGISTHPDLNIRGGASFVPGEPSTQDGNGHGTHVAGTIAALNNSIGVLGVAPSAELYAVKVLAASGGGAISSIAQGLEWAGNNGMHVANLSLGSPSPSATLEQAVNSATSRGVLVVAASGNSGADSISYPARYANAMAVGATDQNNNRADFSQYGAGLDIVAPGVNVQSTYPGSTYASLNGTSMATPHVAGAAVLVKQKNPSWSNVRIRDHLKNTATSLGSTNLYGSGLVNAFAATR

SEQ ID NO: 62019 - protein, 269 aa, Unidentified
AQSVPWGISRVQAPAAHRRRLTGRGVKVAVLDTGISTHPDLNITGGASFVPGEPSTQDGNGHGTHVAGTIAALDNSIGVLGVAPSAELYAVKVLGASGGGAISSIAQGLEWAGNNGMHVANLSLGSPSPSATLEQAVNSATSRGVLVVAASGNSGAGSISYPARYANAMAVGATDQNNNRASFSQYGAGLDIVAPGVNVQSTYPGSTYASLNGTSMATPHVAGAAVLVKQKNPSWSNVRIRNHLKNTATSLGSTNLYGSGLVRAEAATR

SEQ ID NO: 62020 - protein, 269 aa, Unidentified
AQSVPWGISRVQAPAAHRRRLWGRGVKVAVLDTGISTHPDLNIRGGASFVPGEPSTQDGNGHGTHVAGTIAALDNSIGVLGVAPSAELYAVKVLGASGSGSVSSIAQGLEWAGANGMHVANLSLGSPSPSATLEQAVNSATSRGVLVVAASGNSGAGSISYPARYANAMAVGATDQDNNRASFSQYGAGLDIVAPGVNVQSTYPQSAYFSLNGTSMATPHVAGAAALVKQKNPSWSNVQIRNRLKNTATSLGSTNLYGSGLVNAEAATR

SEQ ID NO: 62021 - protein, 269 aa, Unidentified
AQSVPWGISRVQAPAAHNRGLAASGVKVAVLDSGISTHPDLNIRGGASFVPGEPSTQDGNGHGTHVAGTIAALNNSIGVLGVAPSAELYAVKVLGASGGGAISSIAQGLEWAGANGMHVANLSLGSPSPSATLEQAVNSATSRGVLVVAASGNSGAGSISYPARYANAMAVGATDQNNNRASFSQYGAGLDIVAPGVNVQSTAPQSAYASLNGTSMATPHVAGAAVLVKQKNPSWSNVQIRNHLKNTATSLGSTNLYGSGLVNAEAATR

SEQ ID NO: 62022 - protein, 269 aa, Unidentified
AQSVPWGISRVQAPAAHRRRLWGRGVKVAVLDTGISTHPDLNIRGGASFVPGEPSTQDGNGHGTHVAGTIAALDNSIGVLGVAPSAELYAVKVLGASGSGSVSSIAQGLEWAGANGMHVANLSLGSPSPSATLEQAVNSATSRGVLVVAASGNSGAGSISYPARYANAMAVGATDQDNNRASFSQYGAGLDLVAPGVNVQSTYPQSTYFSLNGTSMATPHVAGAAALVKQKNPSWSNVQIRNRLKNTATSLGSTNLYGSGLVNAEAATR

SEQ ID NO: 62023 - protein, 269 aa, Unidentified
AQSVPWGISRVQAPAAHNRGLAGGGVKVAVLDTGISTHPDLNIRGGASFVPGEPSTQDGNGHGTHVAGTIAALDNNIGVLGVAPSAELYAVKVLAASGNGAISSIAQGLEWAGNNGMHVANLSLGAPSPSATLEQAVNSATSRGVLVVAASGNSGAGSISYPARYANAMAVGATDQNNNRASFSQYGAGLDIVAPGVNVQSTYPGSTYASLNGTSMATPHVAGAAVLVKQKNPSWSNVRIRNHLKNTATSLGSTNLYGSGLVNAEAATR

SEQ ID NO: 62024 - protein, 275 aa, Unidentified
AQTIPWGISRVQAPAAHNRGLTGSGVKVAVLDTGIXSTHPDLNIRGGASFVPGEPXSTQDGNGHGTHVAGTIAALNNSIGVLGVAPSAELYAVKVLGADGEGAISSIAQGLEWAGNNGMHVANLSLGSPSPSATLEQAVNSATSRGVLVVAASGNSGAXSSISXXXYPARYANAMAVGATDQNNNRASFSQYGAGLDIVAPGVNIQSTWPGSTYAVLNGTSMATPHVAGAAALVKQKNPSWSNVQIRNHLKNTATSLGSTWLYGSGLVNAEAATR

SEQ ID NO: 62025 - protein, 269 aa, Unidentified
AQSVPWGISRVQAPAAHNRGLRGGGVKVAVLDTGISTHPDLNIRGGASFVPGEPSTQDGNGHGTHVAGTIAALNNNIGVLGVAPSAELYAVKVLSASGNGAISSIAGGLEWAGNNGMHVANLSLGSPSPSATLEQAVNSATSRGVLVVAASGNSGAGSISYPARYANAMAVGATDQNNNRASFSQYGAGLDIVAPGVNVQSTYPGSTYASQNGTSMATPHVAGAAVLVKQKNPSWSNVRIRNHLKNTATSLGSTNLYGSGLVNAEAATR

SEQ ID NO: 62026 - protein, 275 aa, Unidentified
AQTIPWGISRVQAPAAHNRGLTGSGVKVAVLDTGIXSTHPDLNIRGGASFVPGEPXSTQDGNGHGTHVAGTIAALNNSIGVLGVAPSAELYAVKVLGADGEGAISSIAQGLEWAGNNGMHVANLSLGSPSPSATLEQAVNSATSRGVLVVAASGNSGAXSSISXXXYPARYANAMAVGATDQNNNRASFSQYGAGLDIVAPGVNIQSTWPGGTYAVLNGTSMATPHVAGAAALVKQKNPSWSNVQIRNHLKNTATSLGSTNLYGSGLVNAEAATR

SEQ ID NO: 62027 - protein, 269 aa, Unidentified
AQSVPWGISRVQAPAAHNRGLAGRGVKVAVLDTGISTHPDLNIRGGASFVPGEPSTQDGNGHGTHVAGTIAALNNSIGVLGVAPSAELYAVKVLGASGGGAISSIAQGLEWAGNNGMHVANLSLGSPSPSATLEQAVNSATSRGVLVVAASGNSGADSISYPARYANAMAVGATDQNNNRADFSQYGAGLDIVAPGVNVQSTYPGSTYASLNGTSMATPHVAGAAVLVKQKNPSWSNVRIRDHLKNTATSLGSTNLYGSGLVNAFAATR

SEQ ID NO: 62028 - protein, 269 aa, Unidentified
AQSVPWGISRVQAPAAHNRGLAGSGVKVAVLDTGISTHPDLNIRGGASFVPGEPSTQDGNGHGTHVAGTIAALDNSIGVLGVAPSAELYAVKVLGASGGGAISSIAQGLEWAGNNGMHVANLSLGSPSPSATLEQAVNSATSRGVLVVAASGNSGADSISYPARYANAMAVGATDQNNNRASFSQYGAGLDIVAPGVNVQSTYPGSTYASLNGTSMATPHVAGAAVLVKQKNPSWSNVRIRDRLKNTATSLGSTNLYGSGLVNAFAATR

SEQ ID NO: 62029 - protein, 269 aa, Unidentified
AQSVPWGIERVQAPAAHNRGLTGSGVKVAVLDTGISTHPDLRIRGGASFVPGEPSTQDGNGHGTHVAGTAAALDNSIGVLGVAPSAELYAVKVLGASGSGSVSSIAQGLEWAGNNGMHVANLSLGSPSPSATLEHAVNHATSHGVLVVAASGNSGEPSISYPARYANAMAVGATDQNNNRASFSQYGPGLDIVAPGVNVQSTYPGSTYASLNGTSMATPHVAGAAALVKQKNPSWSNVQIRNHLKNTATSLGSTNEYGSGLVNAEAATR

SEQ ID NO: 62030 - protein, 269 aa, Unidentified
AQSVPWGISRVQAPAAHNRGLAGSGVKVAVLDTGISTHPDLNIRGGASFVPGEPSTQDGNGHGTHVAGTIAALNNSIGVLGVAPSAELYAVKVLGASGSGAISSIAQGLEWAGNNRMHVANLSLGSESPSATLEQAVNSATSRGVLVVAASGNSGADSISYPARYANAMAVGATDQNNNRADFSQYGAGLDIVAPGVNVQSTYPGSTYASLNGTSMATPHVAGAAVLVKQKNPSWSNVRIRDHLKNTATSLGSTNLYGSGLVNAFAATR

SEQ ID NO: 62031 - protein, 269 aa, Unidentified
AQSVPWGISRVQAPAAHNRGLAGSGVKVAVLDTGISTHPDLNIRGGASFVPGEPSTQDGNGHGTHVAGTIAALNNSIGVLGVAPSAELYAVKVLGASGGGAISSIAQGLEWAGNNGMHVANLSLGSESPSATLEQAVNSATSRGVLVVAASGNSGEGSISYPARYANAMAVGATDQNNNRADFSQYGAGLDIVAPGVNVQSTYPGSTYASLNGTSMATPHVAGAAVLVKQKNPSWSNVRIRDRLKNTATSLGSTNLYGSGLVNAEAATR

SEQ ID NO: 62032 - protein, 269 aa, Unidentified
AQSVPWGISRVQAPASHNRGLTGFGVKVAVLDTGISTHPDLNIRGGASFVPGEPSTQDGNGHGTHVAGTIAALNNSIGVLGVAPSAELYAVKVLGASGGGAISSIAQGLEWAGLNGMHVANLSLGNPSPSATLEQAVNSATSRGVLVVAASGNSGAGSISYPARYANAMAVGATDQNNNRASFSQYGAGLDIVAPGVNVQSTAPQSAYASLNGTSMATPHVAGAAVLVKQKNPSWSNVQIRNHLKNTATSLGSTNLYGSGLVNAEAATR

SEQ ID NO: 62033 - protein, 269 aa, Unidentified
AQSVPWGISRVQAPAAHNRGLTGSGVKVAVLDSGISTHPDLNIRGGASFVPGEPSTQDGNGHGTHAAGTIAALDNSIGVLGVAPSAELYAVKVLGASGSGAISSIAQGLEWAGNNGMHVANLSLGSPSPSATLEQAVNSATSRGVLVVAASGNSGADSISYPARYANAMAVGATDQNNNRASFSQYGAGLDIVAPGVNVQSTYPGSTYASLNGTSMATPHVAGAAVLVKHKNPSWSNVRIRDHLKKTATSLGSTNLYGSGLVNAEAATR

SEQ ID NO: 62034 - protein, 269 aa, Unidentified
AQSVPWGISRVQAPAAHNRRLWGSGVKVAVLDTGISTHPDLNIRGGASFVPGEPSTQDGNGHGTHVAGTIAALNNRIGVLGVAPSAELYAVKVLGASGGGAISSIAQGLEWAGANGMHVANLSLGSPSPSATLEQAVNSATSRGVLVVAASGNSGAGSISYPARYANAMAVGATDQDNNRASFSQYGAGLDIVAPGVNVQSTYPGSTYFSLNGTSMATPHVAGAAVLVKQKNPSWSNVRIRNHLKNTATSLGSTNLYGSGLVNAEAATR

SEQ ID NO: 62035 - protein, 269 aa, Unidentified
AQSVPWGISRVQAPAAHNRRLTGSGVKVAVLDTGISTHPDLNIRGGASFVPGEPSTQDGDGHGTHVAGTIAALNNSIGVLGVAPSAELYAVKVLGASGSGAISSIAQGLEWAGNNGMHVANLSLGSPSPSATLEQAVNSATSRGVLVVAASGNSGADSISYPARYANAMAVGATDQNNNRASFSQYGAGLDIVAPGVNVQSTYPGSRYASLNGTSMATPHVAGAAVLVKHKNPSWSNVRIRDHLKKTATSLGSTNLYGSGLVNAEAATR

SEQ ID NO: 62036 - protein, 275 aa, Unidentified
AQTIPWGISRVQAPAAHNRGLTGSGVKVAVLDTGIXSTHPDLNIRGGASFVPGEPXSTQDGNGHGTHVAGTIAALNNSIGVLGVAPSAELYAVKVLGADGEGAISSIAQGLEWAGNNGMHVANLSLGSPSPSATLEQAVNSATSRGVLVVAASGNSGAXSSISXXXYPARYANAMAVGATDQNNNRASFSQYGPGLDIVAPGVNIQSTWPGGTYASLNGTSMATPHVAGAAALVKQKNPSWSNVQIRNHLKNTATSLGSTNLYGSGLVNAEAATR

SEQ ID NO: 62037 - protein, 269 aa, Unidentified
AQSVPWGISRVQAPAAHNRGLAGGGVKVAVLDTGISTHPDLNIRGGASFVPGEPSTQDGNGHGTHVAGTIAALDNNIGVLGVAPSAELYAVKVLGASGNGAISSIAGGLEWAGNNGMHVANLSLGAPSPSATLEQAVNSATSRGVLVVAASGNSGAGSISYPARYANAMAVGATDQNNNRASFSQYGAGLDIVAPGVNVQSTYPGSTYASLNGTSMATPHVAGAAVLVKQKNPSWSNVRIRNHLKNTATSLGSTNLYGSGLVNAEAATR

SEQ ID NO: 62038 - protein, 269 aa, Unidentified
AQSVPWGISRVQAPAAHNRGLAGRGVKVAVLDTGISTHPDLNIRGGASFVPGEPSTQDGNGHGTHVAGTIAALNNSIGVLGVAPSAELYAVKVLGASGGGAISSIAQGLEWAGNNGMHVANLSLGSPSPSATLEQAVNSATSRGVLVVAASGNSGEESISYPARYANAMAVGATDQNNNRADFSQYGAGLDIVAPGVNVQSTYPGSTYASLNGTSMATPHVAGAAVLVKQKNPSWSNVRIRDHLKNTATSLGSTNLYGSGLVNAEAATR

SEQ ID NO: 62039 - protein, 269 aa, Unidentified
AQSVPWGISRVQAPAAHNRGLTGSGVKVAVLDTGISTHPDLNIRGGASFVPGEPSTQDGDGHGTHVAGTIAALNNSIGVLGVAPSAELYAVKVLGASGSGAISSIAQGLEWAGNNGMHVANLSLGGPSPSATLEQAVNSATSRGVLVVAASGNSGADSISYPARYANAMAVGATDQNNNRASFSQYGAGLDIVAPGVNVQSTYPGSRYASLNGTSMATPHVAGAAVLVKHKNPSWSNVRIRDHLKKTATSLGSTNLYGSGLVNAEAATR

SEQ ID NO: 62040 - protein, 269 aa, Unidentified
AQSVPWGISRVQAPASHNRGLTGSGVKVAVLDTGISTHPDLNIRGGASFVPGEPSTQDGNGHGTHVAGTIAALNNSIGVLGVAPSAELYAVKVLGASGGGAISSIAQGLEWAGLNGMHVANLSLGNPSPSVTLEQAVNSATSRGVLVVAASGNSGAGSISYPARYANAMAVGATDQNNNRASFSQYGAGLDIVAPGVNVQSTAPQSAYASLNGTSMATPHVAGAAVLVKQKNPSWSNVQIRNHLKNTATSLGSTNLYGSGLVNAEAATR

SEQ ID NO: 62041 - protein, 269 aa, Unidentified
AQSVPWGISRVQAPAAHRRRLWGRGVKVAVLDTGISTHPDLNIRGGASFVPGEPSTQDGNGHGTHVAGTIAALDNSIGVLGVAPSAELYAVKVLGASGAGSVSSIAQGLEWAGNNGMHVANLSLGSPSPSATLEQAVNSATSRGVLVVAASGNSGAGSISYPARYANAMAVGATDQNNNRASFSQYGAGLDLVAPGVNVQSTYPQSAYFSLNGTSMATPHVAGAAALVKQKNPSWSNVQIRNRLKNTATSLGSTNLYGSGLVNAEAATR

SEQ ID NO: 62042 - protein, 269 aa, Unidentified
AQSVPWGISRVQAPAAHNRGLAGRGVKVAVLDTGISTHPDLNIRGGASFVPGEPSTQDGNGHGTHVAGTIAALNNSIGVLGVAPSAELYAVKVLGASGDGSISSIAQGLEWAGNNRMHVANLSLGIPSPSATLEQAVNSATSRGVLVVAASGNSGADSISYPARYANAMAVGATDQNNNRADFSQYGAGLDIVAPGVNVQSTYPGSTYASLNGTSMATPHVAGAAVLVKQKNPSWSNVRIRDHLKNTATSLGSTNLYGSGLVNAEAATR

SEQ ID NO: 62043 - protein, 269 aa, Unidentified
AQSVPWGISRVQAPAAHNRGLAGSGVKVAVLDTGISTHPDLNIRGGASFVPGEPSTQDGNGHGTHVAGTIAALDNSIGVLGVAPSAELYAVKVLGASGGGAISSIAQGLEWAGNNGMHVANLSLGSPSPSATLEQAVNSATSRGVLVVAASGNSGEGSISYPARYANAMAVGATDQNNNRADFSQYGAGLDIVAPGVNVQSTYPGSTYASLNGTSMATPHVAGAAVLVKQKNPSWSNVRIRDHLKNTATSLGSTNLYGSGLVNAFAATR

SEQ ID NO: 62044 - protein, 269 aa, Synthetic construct
AQSVPWGISRVQAPAAHNRGLTGSGVKVAVLDTGISTHPDLNIRGGASFVPGEPSTQDGNGHGTHVAGTIAALNNSIGVLGVAPSAELYAVKVLGADGEGAISSIAQGLEWAGNNGMHVANLSLGSPSPSATLEQAVNSATSRGVLVVAASGNSGASSISYPARYANAMAVGATDQNNNRASFSQYGAGLDIVAPGVNVQSTYPGSTYASLNGTSMATPHVAGAAALVKQKNPSWSNVQIRAIKTYLATSLGSTNLYGSGLVNAEAATR

SEQ ID NO: 62045 - protein, 269 aa, Unidentified
AQSVPWGISRVQAPAAHNRGLTGRGVKVAVLDTGISTHPDLNIRGGASFVPGEPSTQDGNGHGTHVAGTIAALNNSIGVLGVAPSAELYAVKVLGASGGGAISSIAQGLEWAGNNGMHVANLSLGSESPSATLEQAVNSATSRGVIVVAASGNSGEGSISYPARYANAMAVGATDQNNNRADFSQYGAGLDIVAPGVNVQSTYPGSTYASLNGTSMATPHVAGAAVLVKQKNPSWSNVRIRDHLKNTATSLGSTNLYGSGLVNAEAATR

SEQ ID NO: 62046 - protein, 269 aa, Synthetic construct
AQSVPWGISRVQAPAAHNRGLTGSGVKVAVLDTGISTHPDLNIRGGASFIVNDIRTQDGNGHGTHVAGTIAALNNSIGVLGVAPSAELYAVKVLGADGEGAISSIAQGLEWAGNNGMHVANLSLGSPSPSATLEQAVNSATSRGVLVVAASGNSGASSISYPARYANAMAVGATDQNNNRASFSQYGAGLDIVAPGVNVQSTYPGSTYASLNGTSMATPHVAGAAALVKQKNPSWSNVQIRNHLKNTATSLGSTNLYGSGLVNAEAATR

SEQ ID NO: 62047 - protein, 269 aa, Unidentified
AQSVPWGISRVQAPAAHNRGLAGSGVKVAVLDTGISTHPDLRIRGGASFVPGEPSTQDGNGHGTHVAGTIAALNNSIGVLGVAPSAELYAVKVLGASGSGAISSIAQGLEWAGNNGMHVANLSLGIESPSATLEQAVNSATSRGVLVVAASGNSGADSISYPARYANAMAVGATDQNNNRADFSQYGAGLDIVAPGVNVQSTYPGSTYASLNGTSMATPHVAGAAVLVKQKNPSWSNVRIRDHLKNTATSLGSTNLYGSGLVNAEAATR

SEQ ID NO: 62048 - protein, 269 aa, Unidentified
AQSVPWGISRVQAPAAHNRGLAGSGVKVAVLDTGISTHPDLNIRGGASFVPGEPSTQDGNGHGTHVAGTIAALNNSIGVLGVAPSAELYAVKVLGASGGGAISSIAQGLEWAGNNGMHVANLSLGSPSPSATLEQAVNSATSRGVLVVAASGNSGADSISYPARYANAMAVGATDQNNNRADFSQYGAGLDIVAPGVNVQSTYPGSTYASLNGTSMATPHVAGAASLVKQKNPSWSNVRIRDRLKNTATSLGSTNLYGSGLVNAFAATR

SEQ ID NO: 62049 - protein, 269 aa, Unidentified
AQSVPWGISRVQAPAAHNRGLAGRGVKVAVLDTGISTHPDLNIRGGASFVPGEPSTQDGNGHGTHVAGTIAALNNSIGVLGVAPSAELYAVKVLGASGGGAISSIAQGLEWAGNNGMHVANLSLGNESPSATLEQAVNSATSRGVLVVAASGNSGAGSISYPARYANAMAVGATDQNNNRADFSQYGAGLDIVAPGVNVQSTYPGSTYASLNGTSMATPHVAGAAVLVKQKNPSWSNVRIRDHLKNTATSLGSTNLYGSGLVNAEAATR

SEQ ID NO: 62050 - protein, 269 aa, Unidentified
AQSVPWGISRVQAPAAHNRGLAGSGVKVAVLDTGISTHPDLNIRGGASFVPGEPSTQDGNGHGTHVAGTIAALNNSIGVLGVAPSAELYAVKVLGASGGGAISSIAQGLEWAGNNGMHVANLSLGSPSPSATLEQAVNSATSRGVLVVAASGNSGADSISYPARYANAMAVGATDQNNNRAEFSQYGAGLDIVAPGVNVQSTYLGSTYASLNGTSMATPHVAGAATLVKQKNPSWSNVTIRDHLKNTATSLGSTNLYGSGLVNATAATR

SEQ ID NO: 62051 - protein, 269 aa, Unidentified
AQSVPWGISRVQAPAAHRRRLTGSGVKVAVLDTGISTHPDLDIRGGASFVPGEPSTQDGNGHGTHVAGTIAALDNRIGVLGVAPSAELYAVKVLGASGGGAISSIAQGLEWAGNNGMHVANLSLGSPSPSATLEQAVNSATSRGVLVVAASGNSGAGSISYPARYANAMAVGATDQNNNRASFSQYGAGLDIVAPGVNVQSTYPGSTYASENGTSMATPHVAGAAVLVKQKNPSWSNVRIRNHLKNTATSLGSTNLYGSGLVNAEAATR

SEQ ID NO: 62052 - protein, 269 aa, Unidentified
AQSVPWGISRVQAPAAHNRGLTGRGVKVAVLDTGISTHPDLNIRGGASFVPGEPSTQDGNGHGTHVAGTIAALNNSIGVLGVAPSAELYAVKVLGASGGGAISSIAQGLEWAGNNGMHVANLSLGSQSPSATLEQAVNSATSRGVLVVAASGNSGEGSISYPARYANAMAVGATDQNNNRADFSQYGAGLDIVAPGVNVQSTYPGSTYASLNGTSMATPHVAGAAVLVKQKNPSWSNVRIRDRLKNTATSLGSTNLYGSGLVNAEAATR

SEQ ID NO: 62053 - protein, 269 aa, Unidentified
AQSVPWGISRVQAPAAHNRGLQGSGVKVAVLDTGISTHPDLNIRGGASFVPGEPSTQDGNGHGTHVAGTIAALNNSIGVLGVAPSAELYAVKVLGASGGGAISSIAQGLEWAGNNGMHVANLSLGSPSPSATLEQAVNSATSRGVLVVAASGNSGADSISYPARYANAMAVGATDQNNNRADFSQYGAGLDIVAPGVNVQSTYPGSTYASLNGTSMATPHVAGAATLVKQKNPSWSNVRIRDHLKNTAMSLGSTNLYGSGLVNATAATR

SEQ ID NO: 62054 - protein, 269 aa, Unidentified
AQSVPWGISRVQAPAAHNRGLAGSGVKVAVLDTGISTHPDLNIRGGASFVPGEPSTQDGNGHGTHVAGTIAALNNSIGVLGVAPSAELYAVKVLGASGGGAISSIAQGLEWAGNNGMHVANLSLGSESPSATLEQAVNSATSRGVLVVAASGNSGEESISYPARYANAMAVGATDQNNNRASFSQYGAGLDIVAPGVNVQSTYPGSTYASLNGTSMATPHVAGAAVLVKQKRPSWSNVRIRDHLKNTATSLGSTNLYGSGLVNAEAATR

SEQ ID NO: 62055 - protein, 269 aa, Unidentified
AQSVPWGISRVQAPAAHNRRLWGSGVKVAVLDTGISTHPDLNIRGGASFVPGEPSTQDGNGHGTHVAGTIAALNNRIGVLGVAPSAELYAVKVLGASGAGAISSIAQGLEWAGANGMHVANLSLGSPSPSATLEQAVNSATSRGVLVVAASGNSGAGSISYPARYANAMAVGATDQDNNRASFSQYGAGLDIVAPGVNVQSTYPGSAYASLNGTSMATPHVAGAAVLVKQKNPSWSNVRIRNHLKNTATSLGSTNLYGSGLVNAEAATR

SEQ ID NO: 62056 - protein, 269 aa, Unidentified
AQSVPWGISRVQAPAAHNRGLAGRGVKVAVLDTGISTHPDLNIRGGASFVPGEPSTQDGNGHGTHVAGTIAALNNSIGVLGVAPSAELYAVKVLGASGGGAISSIAQGLEWAGNNGMHVANLSLGSESPSATLEQAVNSATSRGVLVVAASGNSGEGSISYPARYANAMAVGATDQNNNRASFSQYGAGLDIVAPGVNVQSTYPGSTYASLNGTSMATPHVAGAAVLVKQKNPSWSNVRIRDRLKNTATSLGSTNLYGSGLVNAEAATR

SEQ ID NO: 62057 - protein, 269 aa, Bacillus lentus
AQTIPWGISRVQAPAAHNRGLTGSGVKVAVLDTGISTHPDLNIRGGASFVPGEPSTQDGNGHGTHVAGTIAALNNSIGVLGVAPSAELYAVKVLGADGRGAISSIAQGLEWAGNNGMHVANLSLGSPSPSATLEQAVNSATSRGVLVVAASGNSGASSISYPARYANAMAVGATDQNNNRASFSQYGAGLDIVAPGVNVQSTYPGSTYASNNGTSMATPHVAGVAALVKQKNPSWSNVQIRNHLKNTATGLGNTNLYGSGLVNAEAATR

SEQ ID NO: 62058 - protein, 269 aa, Unidentified
AQSVPWGISRVRAPAAHNRGLTGSGVKVAVLDTGISTHPDLNIRGGASFVPGEPSTQDGDGHGTHVAGTIAALNNSIGVLGVAPSAELYAVKVLGASGSGAISSIAQGLEWAGNNGMHVANLSLGSPSPSATLEQAVNSATSRGVLVVAASGNSGADSISYPARYANAMAVGATDQNNNRASFSQYGAGLDIVAPGVNVQSTYPGSRYASLNGTSMATPHVAGAAVLVKHKNPSWSNVRIRDHLKKTATSLGSTNLYGSGLVNAEAATR

SEQ ID NO: 62059 - protein, 269 aa, Unidentified
AQSVPWGISRVQAPAAHNRGLTGSGVKVAVLDTGISTHPDLNIRGGASFVPGEPSTQDGNGHGTHVAGTIAALNNSIGVLGVAPSAELYAVKVLGASGGGAISSIAQGLEWAGNNGMHVANLSLGSQSPSATLEQAVNSATSRGVLVVAASGNSGEGSISYPARYANAMAVGATDQDNNRADFSQYGAGLDIVAPGVNVQSTYPGSTYASLNGTSMATPHVAGAAVLVKQKNPSWSNVRIRDRLKNTATSLGSTNLYGSGLVNAEAATR

SEQ ID NO: 62060 - protein, 269 aa, Unidentified
AQSVPWGISRVQAPASHNRGLAGSGVKVAVLDSGISTHPDLNIRGGASFVPGEPSTQDGNGHGTHVAGTIAALNNSIGVLGVAPSAELYAVKVLGASGGGAISSIAQGLEWAGLNGMHVANLSLGSPSPSATLEQAVNSATSRGVLVVAASGNSGAGSISYPARYANAMAVGATDQNNNRASFSQYGAGLDIVAPGVNVQSTAQGSAYASLNGTSMATPHVAGAAVLVKQKNPSWSNVQIRNHLKNTATSLGSTNLYGSGLVNAEAATR

SEQ ID NO: 62061 - protein, 269 aa, Unidentified
AQSVPWGISRVQAPAAHNRRLTGSGVKVAVLDTGISTHPDLNIRGGASFVPGEPSTQDGNGHGTHVAGTIAALNNSIGVLGVAPSAELYAVKVLGASGAGAISSIAQGLEWAGANGMHVANLSLGSPSPSATLEQAVNSATSRGVLVVAASGNSGAGSISYPARYANAMAVGATDQDNNRASFSQYGAGLDIVAPGVNVQSTYPQSAYFSLNGTSMATPHVAGAAVLVKQKNPSWSNVRIRNHLKNTATSLGSTNLYGSGLVNAEAATR

SEQ ID NO: 62062 - protein, 269 aa, Synthetic construct
AQSVPWGISRVQAPAAHNRGLTGSGVKVAVLDTGISTHPDLNIRGGASFVPGEPSTQDGNGHGTHVAGTIAALNNSIGVLGVAPSAELYAVKVLGADGEGAISSIAQGLEWAGNNGMHVANLSLGSPSPSATLEQAVNSATSRGVLVVAASGNSGASSISYPARYANAMAVGATDQNNNRASFSQYGAGLDIVAPGVNVQSTYPGSTYASLNGTSMATPHVAGAAALVKQKNPSWSNVQIRATIAQLATSLGSTNLYGSGLVNAEAATR

SEQ ID NO: 62063 - protein, 269 aa, Unidentified
AQSVPWGISRVQAPAAHNRGLRGGGVKVAVLDTGISTHPDLNIRGGASFVPGEPSTQDGNGHGTHVAGTIAALNNSIGVLGVAPSAELYAVKVLAASGQGAISSIAGGLEWAGLNGMHVANLSLGAPSPSATLEQAVNSATSRGVLVVAASGNSGAGSISYPARYANAMAVGATDQNNNRASFSQYGAGLDIVAPGVNVQSTYPGSTYASLNGTSMATPHVAGAAVLVKQKNPSWSNVRIRNHLKNTATSLGSTNLYGSGLVNAEAATR

SEQ ID NO: 62064 - protein, 269 aa, Unidentified
AQSVPWGISRVQAPAAHNRGLTGRGVKVAVLDTGISTHPDLNIRGGASFVPGEPSTQDGNGHGTHVAGTIAALNNSIGVLGVAPSAELYAVKVLGASGGGAISSIAQGLEWAGNNGMHVANLSLGSESPSATLEQAVNSATSRGVLVVAASGNSGAESISYPARYANAMAVGATDQNNNRADFSQYGAGLDIVAPGVNVQSTYPGSTYASLNGTSMATPHVAGAAVLVKQKNPSWSNVRIRDRLKNTATSLGSTNLYGSGLVNAEAATR

SEQ ID NO: 62065 - protein, 269 aa, Unidentified
AQSVPWGISRVQAPAAHNRGLAGSGVKVAVLDTGISTHPDLNIRGGASFVPGEPSTQDGNGHGTHVAGTIAALNNSIGVLGVAPSAELYAVKVLGARGQGAISSIAQGLEWAGNNGMHVANLSLGSPSPSATLEQAVNSATSRGVLVVAASGNSGADSISYPARYANAMAVGATDQNNNRADFSQYGAGLDIVAPGVNVQSTYPGSTYASLNGTSMATPHVAGAAVLVKQKNPSWSNVRIRDHLKNTATSLGSTNLYGSGLVNAFAATR

SEQ ID NO: 62066 - protein, 269 aa, Unidentified
AQSVPWGISRVQAPASHNRGLTGFGVKVAVLDSGISTHPDLNIRGGASFVPGEPSTQDGNGHGTHVAGTIAALNNSIGVLGVAPSAELYAVKVLGASGGGAISSIAQGLEWAGANGMHVANLSLGSPSPSATLEQAVNSATSRGVLVVAASGNSGAGSISYPARYANAMAVGATDQNNNRASFSQYGAGLDIVAPGVNVQSTAPQSAYASLNGTSMATPHVAGAAVLVKQKNPSWSNVQIRNHLKNTATSLGSTNLYGSGLVNAEAATR

SEQ ID NO: 62067 - protein, 269 aa, Unidentified
AQSVPWGISRVQAPAAHNRGLAGSGVKVAVLDTGISTHPDLNIRGGASFVPGEPSTQDGNGHGTHVAGTIAALNNSIGVLGVAPSAELYAVKVLGASGGGAISSIAQGLEWAGNNGMHVANLSLGNESPSATLEQAVNSATSRGVLVVAASGNSGAGSISYPARYANAMAVGATDQNNNRADFSQYGAGLDIVAPGVNVQSTYPGSTYASLNGTSMATPHVAGAAVLVKQKRPSWSNVRIRDHLKNTATSLGSTNLYGSGLVNAEAATR

SEQ ID NO: 62068 - protein, 269 aa, Unidentified
AQSVPWGISRVQAPAAHNRGLAGSGVKVAVLDTGISTHPDLRIRGGASFVPGEPSTQDGNGHGTHVAGTIAALNNSIGVLGVAPSAELYAVKVLGASGSGAISSIAQGLEWAGNNRMHVANLSLGSPSPSATLEQAVNSATSRGVLVVAASGNSGADSISYPARYANAMAVGATDQNNNRADFSQYGAGLDIVAPGVNVQSTYPGSTYASDNGTSMATPHVAGAAVLVKQKNPSWSNVQIRDHLKNTATSLGSTNLYGSGLVNAFAATR

SEQ ID NO: 62069 - protein, 269 aa, Unidentified
AQSVPWGISRVQAPAAHNRGLAGSGVKVAVLDTGISTHPDLNIRGGASFVPGEPSTQDGNGHGTHVAGTIAALDNSIGVLGVAPSAELYAVKVLGASGGGAISSIAQGLEWAGNNGMHVANLSLGSPSPSATLEQAVNSATSRGVLVVAASGNSGAESISYPARYANAMAVGATDQNNNRADFSQYGAGLDIVAPGVNVQSTYPGSTYASLNGTSMATPHVAGAAVLVKQKNPSWSNVRIRDHLKNTATSLGSTNLYGSGLVNAFAATR

SEQ ID NO: 62070 - protein, 269 aa, Unidentified
AQSVPWGISRVQAPASHNRGLAGFGVKVAVLDTGISTHPDLNIRGGASFVPGEPSTQDGNGHGTHVAGTIAALNNSIGVLGVAPSAELYAVKVLGASGGGAISSIAQGLEWAGANGMHVANLSLGNPSPSATLEQAVNSATSRGVLVVAASGNSGAGSISYPARYANAMAVGATDQNNNRASFSQYGAGLDIVAPGVNVQSTAPQSTYASLNGTSMATPHVAGAAVLVKQKNPSWSNVQIRNHLKNTATSLGSTNLYGSGLVNAEAATR

SEQ ID NO: 62071 - protein, 269 aa, Unidentified
AQSVPWGISRVQAPAAHNRGLAGSGVKVAVLDTGISTHPDLNIRGGASFVPGEPSTQDGNGHGTHVAGTIAALNNSIGVLGVAPSAELYAVKVLGASGGGAISSIAQGLEWAGNNGMHVANLSLGSPSPSATLEQAVNSATSRGVLVVAASGNSGEESISYPARYANAMAVGATDQNNNRADFSQYGAGLDIVAPGVNVQSTYPGSTYASLNGTSMATPHVAGAAVLVKQKNPSWSNVRIRDRLKNTATSLGSTNLYGSGLVNAEAATR

SEQ ID NO: 62072 - protein, 269 aa, Unidentified
AQSVPWGISRVQAPAAHNRGLTGSGVKVAVLDTGISTHPDLNIRGGASFVPGEPSTQDENGHGTHAAGTIAALNNSIGVLGVAPSAELYAVKVLGASGSGAISSIAQGLEWAGNNGMHVANLSLGSPSPSATLEQAVNSATSRGVLVVAASGNSGADSISFPARYANAMAVGATDQNNNRASFSQYGAGLDIVAPGVNVQSTYPGSTYASLNGTSMATPHVAGAAVLVKHKNPSWSNVRIRDHLKKTATSLGSTNLYGSGLVNAEAATR

SEQ ID NO: 62073 - protein, 269 aa, Unidentified
AQSVPWGISRVQAPAAHNRGLTGSGVKVAVLDTGISTHPDLNIRGGASFVPGEPSTQDGDGHGTHVAGTIAALNNSIGVLGVAPSAELYAVKVLGASGSGAISSIAQGLEWAGNNGMHVANLSLGLPSPSATLEQAVNSATSRGVLVVAASGNSGADSISYPARYANAMAVGATDQNNNRASFSQYGAGLDIVAPGVNVQSTYPGSRYASLNGTSMATPHVAGAAVLVKHKNPSWSNVRIRDHLKKTATSLGSTNLYGSGLVNAEAATR

SEQ ID NO: 62074 - protein, 269 aa, Unidentified
AQSVPWGISRVQAPAAHNRGLTGSGVKVAVLDTGISTHPDLNIRGGASFVPGEPSTQDGNGHGTHVAGTIAALNNSIGVLGVAPSAELYAVKVLGASGAGAISSIAQGLEWAGNNGMHVANLSLGSPSPSATLEQAVNSATSRGVLVVAASGNSGEGSIDYPARYANAMAVGATDQNNNRADFSQYGAGLDIVAPGVNVQSTYPGSTYASLNGTSMATPHVAGAAVLVKQKNPSWSNVRIRDRLKNTATSLGSTNLYGSGLVNAFAATR

SEQ ID NO: 62075 - protein, 269 aa, Unidentified
AQSVPWGISRVQAPAAHNRGLAGSGVKVAVLDTGISTHPDLNIRGGASFVPGEPSTQDGNGHGTHVAGTIAALNNSIGVLGVAPSAELYAVKVLGASGQGAISSIAQGLEWAGNNGMHVANLSLGSPSPSATLEQAVNSATSRGVLVVAASGNSGADSISYPARYANAMAVGATDQNNNRADFSQYGAGLDIVAPGVNVQSTYPGSTYASQNGTSMATPHVAGAAVLVKQKNPSWSNVRIRDHLKNTATSLGSTNLYGSGLVNAFAATR

SEQ ID NO: 62076 - protein, 269 aa, Unidentified
AQSVPWGISRVQAPAAHNRGLTGRGVKVAVLDTGISTHPDLNIRGGASFVPGEPSTQDGNGHGTHVAGTIAALNNSIGVLGVAPSAELYAVKVLGASGGGAISSIAQGLEWAGNNGMHVANLSLGSPSPSATLEQAVNSATSRGVLVVAASGNSGEGSISYPARYANAMAVGATDQNNNRADFSQYGAGLDIVAPGVNVQSTYPGSTYASENGTSMATPHVAGAAVLVKQKNPSWSNVRIRDRLKNTATSLGSTNLYGSGLVNAEAATR

SEQ ID NO: 62077 - protein, 269 aa, Unidentified
AQSVPWGISRVQAPAAHNRRLWGSGVKVAVLDTGISTHPDLNIRGGASFVPGEPSTQDGNGHGTHVAGTIAALNNRIGVLGVAPSAELYAVKVLGASGGGAISSIAQGLEWAGANGMHVANLSLGSPSPSATLEQAVNSATSRGVLVVAASGNSGAGSISYPARYANAMAVGATDQDNNRASFSQYGAGLDIVAPGVNVQSTYPGSAYASLNGTSMATPHVAGAAVLVKQKNPSWSNVRIRNHLKNTATSLGSTNLYGSGLVNAEAATR

SEQ ID NO: 62078 - protein, 269 aa, Unidentified
AQSVPWGISRVQAPAAHRRGLWGRGVKVAVLDTGISTHPDLNIRGGASFVPGEPSTQDGNGHGTHVAGTIAALDNSIGVLGVAPSAELYAVKVLGASGAGSVSSIAQGLEWAGANGMHVANLSLGSPSPSATLEQAVNSATSRGVLVVAASGNSGAGSISYPARYANAMAVGATDQNNNRASFSQYGAGLDLVAPGVNVQSTYPQSAYFSLNGTSMATPHVAGAAALVKQKNPSWSNVQIRNRLKNTATSLGSTNLYGSGLVNAEAATR

SEQ ID NO: 62079 - protein, 269 aa, Unidentified
AQVVPWGISRVQAPAAHNRGLTGRGVKVAVLDTGISTHPDLNIRGGASFVPGEPSTQDGNGHGTHVAGTIAALDNNIGVLGVAPDAELYAVKVLGASGGGAISSIAQGLEWAGNNRMHVANLSLGSPSPSATLEQAVNSATSRGVLVVAASGNSGAGSISYPARYANAMAVGATDQNNNRASFSQYGAGLDIVAPGVNVQSTWPGSTYASLNGTSQATPHVAGAAALVKQKNPSWSNVQIRNRLKNTATSLGSTNLYGSGLVNAEAATR

SEQ ID NO: 62080 - protein, 269 aa, Unidentified
AQTIPWGISRVQAPAAHNRGLTGSGVKVAVLDTGISTHPDLNIRGGASFVPGEPSTQDGNGHGTHVAGTIAALNNSIGVLGVAPSAELYAVKVLGADGEGAISSIAQGLEWAGNNGMHVANLSLGSPSPSATLEQAVNSATSRGVLVVAASGNSGASSISYPARYANAMAVGATDQNNNRASFSQYGAGLDIVAPGVNILSTWPGSTYASLNGTSMATPHVAGAAALVKQKNPSWSNVQIRNHLKNTATSLGSTNEYGSGLVNAEAATR

SEQ ID NO: 62081 - protein, 269 aa, Unidentified
AQTIPWGISRVQAPAAHNRGFTGSGVKVAVLDTGISTHPDLNIRGGASFVPGEPSTQDGNGHGTHVAGTIAALNNSIGVLGVAPSAELYAVKVLGADGEGAISSIAQGLEWAGNNGMHVANLSLGSPSPSATLEQAVNSATSRGVLVVAASGNSGASSISYPARYANAMAVGATDQNNNRASFSQYGAGLDIVAPGVDIQSTYPGSTYASLNGTSMATPHVAGAAALVKQKNPAWSNVQIRNHLKNTATSLGSTNLYGSGLVNAEAATR

SEQ ID NO: 62082 - protein, 269 aa, Unidentified
AQSIPWGISRVQAPAAHNRGLTGSGVKVAVLDTGISTHEDLNIRGGASFVPGEPSTQDGNGHGTHVAGTIAALDNSIGVLGVAPSAELYAVKVLGADGEGAISSIAQGLEWAGNNGMHVANLSLGSPSPSATLEQAVNSATSRGVLVVAASGNSGASSIGYPARYANAMAVGATDQNNNRASFSRYGAGLDIVAPGVNVQSTYPGSTYASLNGTSMATPHVAGAAALVKQKNPSWSNVQIRNHLKNTATSLGDTNLYGSGLVNAEAATR

SEQ ID NO: 62083 - protein, 269 aa, Unidentified
AQSVPWGISRVQAPAAHNRGLTGSGVKVAVLDTGISTHPDLNIRGGASFVPGEPSTQDGNGHGTHVAGTIAALNNSIGVLGVAPSAELYAVKVLGASGSAAISSIAQGLEWAGNNGMHVANLSLGSPSVSATLEQAVNSATSRGVLVVAASGNSGADSISYPARYANAMAVGATDQNNNRASFSQYGAGLDIVAPGVNVQSTYPGSRYASLNGTSMATPHVAGAAVLVKHKNPSWSNVRIRDHLKKTATSLGSTNLYGSGLVNAEAATR

SEQ ID NO: 62084 - protein, 269 aa, Unidentified
AQSVPWGISRVQAPAAHNRGLTGRGVKVAVLDTGISTHPDLNIRGGASFVPGEPSTQDGNGHGTHVAGTIAALNNSIGVLGVAPSAELYAVKVLGASGGGAISSIAQGLEWAGNNGMHVANLSLGNPSPSATLEQAVNSATSRGVLVVAASGNSGEESISYPARYANAMAVGATDQNNNRADFSQYGAGLDIVAPGVNVQSTYPGSTYASLNGTSMATPHVAGAAVLVKQKNPSWSNVRIRDHLKNTATSLGSTNLYGSGLVNAEAATR

SEQ ID NO: 62085 - protein, 269 aa, Unidentified
AQSVPWGISRVQAPAAHNRGLTGRGVKVAVLDTGISTHPDLNIRGGASFVPGEPSTQDGNGHGTHVAGTIAALNNSIGVLGVAPSAELYAVKVLGASGGGAISSIAQGLEWAGNNGMHVANLSLGSPAPSATLEQAVNSATSRGVLVVAASGNSGEGSISYPARYANAMAVGATDQNNNRADFSQYGAGLDIVAPGVNVQSTYPGSTYASLNGTSMATPHVAGAAVLVKQKNPSWSNVRIRDRLKNTATSLGSTNLYGSGLVNAEAATR

SEQ ID NO: 62086 - protein, 269 aa, Unidentified
AQSVPWGISRVQAPASHNRGLTGFGVKVAVLDTGISTHPDLNIRGGASFVPGEPSTQDGNGHGTHVAGTIAALNNSIGVLGVAPSAELYAVKVLGASGGGAISSIAQGLEWAGANGMHVANLSLGNPSPSATLEQAVNSATSRGVLVVAASGNSGAGSISYPARYANAMAVGATDQNNNRASFSQYGAGLDIVAPGVNVQSTVPQSAYASLNGTSMATPHVAGAAVLVKQKNPSWSNVQIRNHLKNTATSLGSTNLYGSGLVNAEAATR

SEQ ID NO: 62087 - protein, 269 aa, Unidentified
AQSVPWGISRVQAPAAHRRRLTGRGVKVAVLDTGISTHPDLDIRGGASFVPGEPSTQDGNGHGTHVAGTIAALDNSIGVLGVAPSAELYAVKVLGASGGGAISSIAQGLEWAGNNGMHVANLSLGSPSPSATLEQAVNSATSRGVLVVAASGNSGAGSISYPARYANAMAVGATDQNNNRASFSQYGAGLDIVAPGVNVQSTYPGSTYASLNGTSMATPHVAGAAVLVKQKNPSWSNVRIRNHLKNTATSLGSTNLYGSGLVRAEAATR

SEQ ID NO: 62088 - protein, 269 aa, Unidentified
AQSVPWGISRVQAPAAHNRGLAGSGVKVAVLDTGISTHPDLNIRGGASFVPGEPSTQDGNGHGTHVAGTIAALNNSIGVLGVAPSAELYAVKVLGASGQGAISSIAQGLEWAGNNGMHVANTSLGSPSPSATLEQAVNSATSRGVLVVAASGNSGADSISYPARYANAMAVGATDQNNNRADFSQYGAGLDIVAPGVNVQSTYPGSTYASLNGTSMATPHVAGAAVLVKQKNPSWSNVRIRDHLKNTATSLGSTNLYGSGLVNAFAATR

SEQ ID NO: 62089 - protein, 269 aa, Unidentified
AQSVPWGISRVQAPAAHNRRLTGSGVKVAVLDTGISTHPDLNIRGGASFVPGEPSTQDGNGHGTHVAGTIAALNNRIGVLGVAPSAELYAVKVLGASGGGAISSIAQGLEWAGNNGMHVANLSLGSPSPSATLEQAVNSATSRGVLVVAASGNSGAGSISYPARYANAMAVGATDQDNNRASFSQYGAGLDIVAPGVNVQSTYPQSAYASLNGTSMATPHVAGAAVLVKQKNPSWSNVRIRNHLKNTATSLGSTNLYGSGLVNAGAATR

SEQ ID NO: 62090 - protein, 269 aa, Unidentified
AQSVPWGISRVHAPAAHNRRLTGSGVKVAVLDTGISTHPDLNIRGGASFVPGEPSTQDGNGHGTHVAGTIAALNNRIGVLGVAPSAELYAVKVLGASGGGAISSIAQGLEWAGNNGMHVANLSLGSPSPSATLEQAVNSATSRGVLVVAASGNSGAGSISYPARYANAMAVGATDQNNNRASFSQYGAGLDLVAPGVNVQSTYPQSAYASLNGTSMATPHVAGAAVLVKQKNPSWSNVRIRNHLKNTATSLGSTNLYGSGLVNAEAATR

SEQ ID NO: 62091 - protein, 269 aa, Unidentified
AQSVPWGISRVQAPAAHNRGLTGSGVKVAVLDTGISTHPDLNIRGGASFVPGEPSTQDGNGHGTHVAGTIAALNNSIGVLGVAPSAELYAVKVLGASGGGAISSIAQGLEWAGNNGMHVANLSLGSPSPSATLEQAVNSATSRGVLVVAASGNSGEGSIDYPARYANAMAVGATDQNNNRADFSQYGAGLDIVAPGVNVQSTYPGSTYASLNGTSMATPHVAGAAVLVKQKNPSWSNVRIRDRLKNTATSLGSTNLYGSGLVNAFAATR

SEQ ID NO: 62092 - protein, 269 aa, Unidentified
AQSVPWGISRVQAPAAHNRGLAGRGVKVAVLDTGISTHPDLNIRGGASFVPGEPSTQDGNGHGTHVAGTIAALNNSIGVLGVAPSAELYAVKVLGASGGGAISSIAQGLEWAGNNGMHVANLSLGSESPSATLEQAVNSATSRGVLVVAASGNSGAGSISYPARYANAMAVGATDQNNNRASFSQYGAGLDIVAPGVNVQSTYPGSTYASLNGTSMATPHVAGAAVLVKQKYPSWSNVRIRNHLKNTATSLGSTNLYGSGLVNVEVATR

SEQ ID NO: 62093 - protein, 269 aa, Unidentified
AQSVPWGISRVQAPAAHNRGLTGSGVKVAVLDTGISTHPDLNIRGGASFVPGEPSTQDGNGHGTHAAGTIAALDNSIGVLGVAPSAELYAVKVLGASGSGAISSIAQGLEWAGNNGMHVANLSLGSPSPSATLEQAVNSATSRGVLVVAASGNSGADSISYPARYANAMAVGATDQNNNRASFSQYGAGLDIVAPGVNVQSTYPGSRYASLNGTSMATPHVAGAAVLVKHKNPSWSNVRIRNHLKNTATSLGSAWLYGSGLVNAEAATR

SEQ ID NO: 62094 - protein, 269 aa, Unidentified
AQSVPWGISRVQAPAAHNRRLWGSGVKVAVLDTGISTHPDLNIRGGASFVPGEPSTQDGNGHGTHVAGTIAALNNSIGVLGVAPSAELYAVKVLGASGAGAISSIAQGLEWAGANGMHVANLSLGSPSPSATLEQAVNSATSRGVLVVAASGNSGAGSISYPARYANAMAVGATDQNNNRASFSQYGAGLDIVAPGVNVQSTYPQSAYFSLNGTSMATPHVAGAAVLVKQKNPSWSNVRIRNHLKNTATSLGSTNLYGSGLVNAEAATR

SEQ ID NO: 62095 - protein, 269 aa, Unidentified
AQSVPWGISRVQAPAAHNRGLAGFGVKVAVLDTGISTHPDLNIRGGASFVPGEPSTQDGNGHGTHVAGTIAALNNSIGVLGVAPSAELYAVKVLGASGGGAISSIAQGLEWAGANGMHVANLSLGNPSPSATLEQAVNSATSRGVLVVAASGNSGAGSISYPARYANAMAVGATDQNNNRASFSQYGAGLDIVAPGVNVQSTAPQSAYASLNGTSMATPHVAGAAVLVKQKNPSWSNVQIRNHLKNTATSLGSTNLYGSGLVNAEAATR

SEQ ID NO: 62096 - protein, 269 aa, Unidentified
AQSVPWGISRVQAPAAHNRGLAGSGVKVAVLDTGISTHPDLRIRGGASFVPGEPSTQDGNGHGTHVAGTIAALNNSIGVLGVAPSAELYAVKVLGASGGGAISSIAQGLEWAGNNGMHVANLSLGSPSPSATLEQAVNSATSRGVLVVAASGNSGAGSISYPARYANAMAVGATDQNNNRADFSQYGAGLDIVAPGVNVQSTYPGSTYASLNGTSMATPHVAGAAVLVKQKNPSWSNVRIRDHLKNTATSLGSTNLYGSGLVNAFVATR

SEQ ID NO: 62097 - protein, 269 aa, Unidentified
AQSVPWGISRVQAPAAHRRGLTGRGVKVAVLDTGISTHPDLNIRGGASFVPGEPSTQDGNGHGTHVAGTIAALDNSIGVLGVAPSAELYAVKVLGASGAGSVSSIAQGLEWAGANGMHVANLSLGSPSPSATLEQAVNSATSRGVLVVAASGNSGAGSISYPARYANAMAVGATDQDNNRASFSQYGAGLDLVAPGVNVQSTYPQSAYFSLNGTSMATPHVAGAAALVKQKNPSWSNVQIRNRLKNTATSLGSTNLYGSGLVNAEAATR

SEQ ID NO: 62098 - protein, 269 aa, Unidentified
AQSVPWGIERVQAPAAHNRGLTGSGVKVAVLDTGISTHPDLRIRGGASFVPGEPSTQDGNGHGTHVAGTIAALNDSIGVLGVAPSAELYAVKVLGASGSGSVSSIAQGLEWAGNNGMHVANLSLGSPSPSATLEQAVNSATSRGVLVVAASGNSGAGSISYPARYANAMAVGATDQNNERAEFSNYGPGLDIVAPGVNVLSTWPGSTYASLNGTSMATPHVAGAAALVKQKNPSWSNVQIRNHLKNTATSLGDTNEYGSGLVNAEAATR

SEQ ID NO: 62099 - protein, 269 aa, Unidentified
AQSVPWGISRVQAPAAHRRGLWGRGVKVAVLDTGISTHPDLNIRGGASFVPGEPSTQDGNGHGTHVAGTIAALDNSIGVLGVAPSAELYAVKVLGASGAGSVSSIAQGLEWAGANGMHVANLSLGSPSPSATLEQAVNSATSRGVLVVAASGNSGAGSISYPARYANAMAVGATDQDNNRASFSQYGAGLDLVAPGVNVQSTYPQSAYASLNGTSMATPHVAGAAALVKQKNPSWSNVQIRNRLKNTATSLGSTNLYGSGLVNAEAATR

SEQ ID NO: 62100 - protein, 269 aa, Unidentified
AQSVPWGISRVQAPAAHNRGLRGGGVKVAVLDTGISTHPDLNIRGGASFVPGEPSTQDGNGHGTHVAGTIAALNNSIGVLGVAPSAELYAVKVLAASGQGAISSIAGGLEWAGLNGMHVANLSLGSPSPSATLEQAVNSATSRGVLVVAASGNSGAGSISYPARYANAMAVGATDQNNNRASFSQYGAGLDIVAPGVNVQSTYPGSTYASQNGTSMATPHVAGAAVLVKQKNPSWSNVRIRNHLKNTATSLGSTNLYGSGLVNAEAATR

SEQ ID NO: 62101 - protein, 269 aa, Unidentified
AQSVPWGISRVQAPAAHNRGLAGSGVKVAVLDTGISTHPDLNIRGGASFVPGEPSTQDGNGHGTHVAGTIAALDNSIGVLGVAPSAELYAVKVLGASGNGAISSIAQGLEWAGNNGMHVANLSLGSPSPSATLEQAVNSATSRGVLVVAASGNSGADSISYPARYANAMAVGATDQNNNRADFSQYGAGLDIVAPGVNVQSTYPGSTYASLNGTSMATPHVAGAAVLVKQKNPSWSNVRIRDHLKNTATSLGSTNLYGSGLVNAFAATR

SEQ ID NO: 62102 - protein, 269 aa, Unidentified
AQSVPWGISRVQAPAAHRRRLTGRGVKVAVLDTGISTHPDLNIRGGASFVPGEPSTQDGNGHGTHVAGTIAALDNSIGVLGVAPSAELYAVKVLGASGSGSVSSIAQGLEWAGANGMHVANLSLGSPSPSATLEQAVNSATSRGVLVVAASGNVGAGSISYPARYANAMAVGATDQDNNRASFSQYGAGLDIVAPGVNVQSTYPQSTYFSLNGTSMATPHVAGAAALVKQKNPSWSNVQIRNRLKNTATSLGSTNLYGSGLVSAEAATR

SEQ ID NO: 62103 - protein, 275 aa, Unidentified
AQTIPWGISRVQAPAAHNRGLTGSGVKVAVLDTGIXSTHPDLNIRGGASFVPGEPXSTQDGNGHGTHVAGTIAALNNSIGVLGVAPSAELYAVKVLGADGEGAISSIAQGLEWAGNNGMHVANLSLGSPSPSATLEQAVNSATSRGVLVVAASGNSGAXSSISXXXYPARYANAMAVGATDQNNNRASFSQYGPGLDIVAPGVNIQSTWPGSTYAVLNGTSMATPHVAGAAALVKQKNPSWSNVQIRNHLKNTATSLGSTNLYGSGLVNAEAATR

SEQ ID NO: 62104 - protein, 269 aa, Unidentified
AQSVPWGISRVQAPAAHNRGLTGRGVKVAVLDTGISTHPDLNIRGGASFVPGEPSTQDGNGHGTHVAGTIAALNNSIGVLGVAPSAELYAVKVLGASGGGAISSIAQGLEWAGNNGMHVANLSLGSESPSATLEQAVNSATSRGVLVVAASGNSGEESISYPARYANAMAVGATDQNNNRASFSQYGAGLDIVAPGVNVQSTYPGSTYASLNGTSMATPHVAGAAVLVKQKRPSWSNVRIRDHLKNTATSLGSTNLYGSGLVNAEAATR

SEQ ID NO: 62105 - protein, 269 aa, Synthetic construct
AQSVPWGISRVQMLRILDRGLTGSGVKVAVLDTGISTHPDLNIRGGASFVPGEPSTQDGNGHGTHVAGTIAALNNSIGVLGVAPSAELYAVKVLGADGEGAISSIAQGLEWAGNNGMHVANLSLGSPSPSATLEQAVNSATSRGVLVVAASGNSGASSISYPARYANAMAVGATDQNNNRASFSQYGAGLDIVAPGVNVQSTYPGSTYASLNGTSMATPHVAGAAALVKQKNPSWSNVQIRNHLKNTATSLGSTNLYGSGLVNAEAATR

SEQ ID NO: 62106 - protein, 269 aa, Unidentified
AQSVPWGISRVQAPAAHNRGLTGSGVKVAVLDTGISTHPDLNIRGGASFVPGEPSTQDGNGHGTHVAGTIAALNNSIGVLGVAPSAELYAVKVLGASGGGAISSIAQGLEWAGNNGMHVANLSLGSQSPSATLEQAVNSATSRGVLVVAASGNSGEGSISYPARYANAMAVGATDQNNNRADFSQYGAGLDIVAPGVNVQSTYPGSTYASENGTSMATPHVAGAAVLVKQKNPSWSNVRIRDRLKNTATSLGSTNLYGSGLVNAEAATR

SEQ ID NO: 62107 - protein, 269 aa, Unidentified
AQSVPWGISRVQAPAAHNRGLAGGGVKVAVLDTGISTHPDLNIRGGASFVPGEPSTQDGNGHGTHVAGTIAALNNNIGVLGVAPSAELYAVKVLSASGQGAISSIAQGLEWAGNNGMHVANLSLGAPSPSATLEQAVNSATSRGVLVVAASGNSGAGSISYPARYANAMAVGATDQNNNRASFSQYGAGLDIVAPGVNVQSTYPGSTYASQNGTSMATPHVAGAAVLVKQKNPSWSNVRIRNHLKNTATSLGSTNLYGSGLVNAEAATR

SEQ ID NO: 62108 - protein, 269 aa, Unidentified
AQTIPWGISRVQAPAAHNRGLTGSGVKVAVLDTGISTHPDLNIRGGASFVPGEPSTQDGNGHGTHVAGTIAALNNSIGVLGVAPSAELYAVKVLGADGGGAISSIAQGLEWAGNNGMHVANLSLGSPSPSATLEQAVNSATSRGVLVVAASGNSGASSISYPARYANAMAVGATDQNNNRASFSQYGPGLDIMAPGVNIQSTYPGSTYASDNGTSMATPHVAGAAALVKQKNPSWSNVQIRNHLKNTATSLGSTNLYGSGLVNAEAATR

SEQ ID NO: 62109 - protein, 269 aa, Unidentified
AQSVPWGISRVQAPAAHNRRLWGSGVKVAVLDTGISTHPDLNIRGGASFVPGEPSTQDGNGHGTHVAGTIAALNNRIGVLGVAPSAELYAVKVLGASGGGAISSIAQGLEWAGANGMHVANLSLGSPSPSATLEQAVNSATSRGVLVVAASGNSGAGSISYPARYANAMAVGATDQNNNRASFSQYGAGLDIVAPGVNVQSTYPGSAYFSLNGTSMATPHVAGAAVLVKQKNPSWSNVRIRNHLKNTATSLGSTNLYGSGLVNAEAATR

SEQ ID NO: 62110 - protein, 269 aa, Unidentified
AQSVPWGISRVQAPAAHNRGLTGSGVKVAVLDTGISTHPDLNIRGGASFVPGEPSTQDGNGHGTHAAGTIAALNNSIGVLGVAPSAELYAVKVLGANGSGAISSIAQGLEWAGNNGMHVANLSLGSPSPSATLEQAVNSATSRGVLVVAASGNSGADSISYPARYANAMAVGATDQNDNRASFSQYGAGLDIVAPGVNVQSTYPGSTYASLNGTSMATPHVAGAAVLVKHKNPSWSNVRIRDHLKKTATSLGSTNLYGSGLVNAEAATR

SEQ ID NO: 62111 - protein, 269 aa, Unidentified
AQTIPWGISRVQAPAAHNRGLTGSGVKVAVLDTGISTHPDLNIRGGASFVPGEPSTQDGNGHGTHVAGTIAALDNSIGVLGVAPSAELYAVKVLGADGEGAISSIAQGLEWAGNNGMHVANLSLGSPSPSATLEQAVNSATSRGVLVVAASGNSGASSISYPARYANAMAVGATDQNNNRASFSQYGAGLDIVAPGVNILSTWPGSTYASLNGTSMATPHVAGAAALVKQKNPSWSNVQIRNHLKNTATSLGSTNLYGSGLVNAEAATR

SEQ ID NO: 62112 - protein, 269 aa, Unidentified
AQSVPWGISRVQAPAAHNRGLAGGGVKVAVLDTGISTHPDLNIRGGASFVPGEPSTQDGNGHGTHVAGTIAALNNNIGVLGVAPSAELYAVKVLAASGGGAISSIAQGLEWAGNNGMHVANLSLGAPSPSATLEQAVNSATSRGVLVVAASGNSGAGSISYPARYANAMAVGATDQNNNRASFSQYGAGLDIVAPGVNVQSTYPGSTYASQNGTSMATPHVAGAAVLVKQKNPSWSNVRIRNHLKNTATSLGSTNLYGSGLVNAEAATR

SEQ ID NO: 62113 - protein, 269 aa, Unidentified
AQSVPWGISRVQAPAAHNRGLTGRGVKVAVLDTGISTHPDLRIRGGASFVPGEPSTQDGNGHGTHVAGTIAALNNSIGVLGVAPSAELYAVKVLGASGAGAISSIAQGLEWAGNNGMHVANLSLGSPSPSATLEQAVNSATSRGVLVVAASGNSGEGSISYPARYANAMAVGATDQNNNRADFSQYGAGLDIVAPGVNVQSTYPGSTYASLNGTSMATPHVAGAAVLVKQKNPSWSNVRIRDRLKNTATSLGSTNLYGSGLVNAEAATR

SEQ ID NO: 62114 - protein, 269 aa, Unidentified
AQSVPWGISRVQAPAAHNRGLAGSGVKVAVLDTGISTHPDLNIRGGASFVPGEPSTQDGNGHGTHVAGTIAALNNSIGVLGVAPSAELYAVKVLGASGSGAISSIAQGLEWAGNNRMHVANLSLGSPSPSATLEQAVNSATSRGVLVVAASGNSGADSISYPARYANAMAVGATDQNNNRADFSQYGAGLDIVAPGVNVQSTYPGSTYASDNGTSMATPHVAGAAVLVKQKNPSWSNVRIRDHLKNTATSLGSTNLYGSGLVNAFAATR

SEQ ID NO: 62115 - protein, 269 aa, Unidentified
AQSVPWGISRVQAPAAHNRGLAGFGVKVAVLDTGISTHPDLNIRGGASFVPGEPSTQDGNGHGTHVAGTIAALNNSIGVLGVAPSAELYAVKVLGASGGGAISSIAQGLEWAGLNGMHVANLSLGNPSPSATLEQAVNSATSRGVLVVAASGNSGAGSISYPARYANAMAVGATDQNNNRASFSQYGAGLDIVAPGVNVQSTVPQSAYASLNGTSMATPHVAGAAVLVKQKNPSWSNVQIRNHLKNTATSLGSTNLYGSGLVNAEAATR

SEQ ID NO: 62116 - protein, 269 aa, Unidentified
AQTIPWGISRVQAPAAHNRGLTGSGVKVAVLDTGISTHPDLNIRGGASFVPGEPSTQDGNGHGTHVAGTIAALNNSIGVLGVAPSAELYAVKVLGADGXGAISSIAQGLEWAGNNGMHVANLSLGSPSPSATLEQAVNSATSRGVLVVAASGNSGASSISYPARYANAMAVGATDQNNNRASFSQYGPGLDIMAPGVNIQSTYPGSTYASSNGTSMATPHVAGAAALVKQKNPSWSNVQIRNHLKNTATSLGSTNLYGSGLVNAEAATR

SEQ ID NO: 62117 - protein, 269 aa, Unidentified
AQSVPWGISRVQAPAAHNRGLTGSGVKVAVLDTGISTHPDLNIRGGASFVPGEPSTQDGNGHGTHVAGTIAALDNNIGVLGVAPRAELYAVKVLGASGSGSVSSIAQGLEWAGNNRMHVANLSLGLQAPSATLEQAVNSATSRGILVVAASGNSGAGSISYPARYANAMAVGATDQNNNRASFSQYGPGLDIVAPGVNVQSTYPGSTYVSLNGTSMATPHVAGAAALVKQKNPSWSNVQIRNHLKNTATSLGSTNLYGSGLVNADAATR

SEQ ID NO: 62118 - protein, 275 aa, Unidentified
AQTIPWGISRVQAPAAHNRGLTGSGVKVAVLDTGIXSTHPDLNIRGGASFVPGEPXSTQDGNGHGTHVAGTIAALNNSIGVLGVAPSAELYAVKVLGADGEGAISSIAQGLEWAGNNGMHVANLSLGSPSPSATLEQAVNSATSRGVLVVAASGNSGAXSSISXXXYPARYANAMAVGATDQNNNRASFSQYGAGLDIVAPGVNILSTWPGGTYASLNGTSMATPHVAGAAALVKQKNPSWSNVQIRNHLKNTATSLGSTNLYGSGLVNAEAATR

SEQ ID NO: 62119 - protein, 269 aa, Unidentified
AQSVPWGISRVQAPAAHNRGLWGSGVKVAVLDTGISTHPDLNIRGGASFVPGEPSTQDGNGHGTHVAGTIAALDNNIGVLGVAPRAELYAVKVLGASGSGSVSSIAQGLEWAGNNRMHVANLSLGLQAPSATLEQAVNSATSRGILVVAASGNSGAGSISYPARYANAMAVGATDQNNNRASFSQYGAGLDIVAPGVNVQSTYPGSTYVSLNGTSMATPHVAGAAALVKQKNPSWSNVQIRNHLKNTATSLGSTNLYGSGLVNADAATR

SEQ ID NO: 62120 - protein, 269 aa, Unidentified
AQSVPWGISRVQAPAAHRRGLTGRGVKVAVLDTGISTHPDLNIRGGASFVPGEPSTQDGNGHGTHVAGTIAALDNNIGVLGVAPRAELYAVKVLGASGSGSVSSIAQGLEWAGNNRMHVANLSLGLQAPSATLEQAVNSATSRGVLVVAASGNSGAGSISYPARYANAMAVGATDQNNNRASFSQYGAGLDIVAPGVNVLSTYPGSTYASLNGTSMATPHVAGAAALVKQKNPSWSNVQIRNHLKNTATSLGSTNLYGSGLVNTEAATR

SEQ ID NO: 62121 - protein, 269 aa, Unidentified
AQSVPWGISRVQAPAAHNRGLTGSGVKVAVLDTGISTHPDLNIRGGASFVPGEPSTQDENGHGTHKAGTIAALNNSIGVLGVAPSAELYAVKVLGASGSGAISSIAQGLEWAGNNGMHVANLSLGSPAPSATLEQAVNSATSRGVLVVAASGNSGADSISYPARYANAMAVGATDQNNNRASFSQYGAGLDIVAPGVNVQSTYPGSTYASLNGTSMATPHVAGAAVLVKHKNPSWSNVRIRDHLKKTATSLGSTNLYGSGLVNAEAATR

SEQ ID NO: 62122 - protein, 269 aa, Unidentified
AQSVPWGISRVQAPAAHNRGLAGSGVKVAVLDTGISTHPDLNIRGGASFVPGEPSTQDGNGHGTHVAGTIAALDNSIGVLGVAPSAELYAVKVLGASGGGAISSIAQGLEWAGNNGMHVANLSLGSESPSATLEQAVNSATSRGVLVVAASGNSGAGSISYPARYANAMAVGATDQNNNRADFSQYGAGLDIVAPGVNVQSTYPGSTYASLNGTSMATPHVAGAAVLVKQKNPSWSNVRIRDHLKNTATSLGSTNLYGSGLVNAFAATR

SEQ ID NO: 62123 - protein, 269 aa, Unidentified
AQSVPWGISRVQAPASHNRGLTGSGVKVAVLDSGISTHPDLNIRGGASFVPGEPSTQDGNGHGTHVAGTIAALNNSIGVLGVAPSAELYAVKVLGASGGGAISSIAQGLEWAGLNGMHVANLSLGNPSPSATLEQAVNSATSRGVLVVAASGNSGAGSISYPARYANAMAVGATDQNNNRASFSQYGAGLDIVAPGVNVQSTAPQSAYASLNGTSMATPHVAGAAVLVKQKNPSWSNVQIRNHLKNTATSLGSTNLYGSGLVNAEAATR

SEQ ID NO: 62124 - protein, 275 aa, Unidentified
AQTIPWGISRVQAPAAHNRGLTGSGVKVAVLDTGIXSTHPDLNIRGGASFVPGEPXSTQDGNGHGTHVAGTIAALNNSIGVLGVAPSAELYAVKVLGADGEGAISSIAQGLEWAGNNGMHVANLSLGSPSPSATLEQAVNSATSRGVLVVAASGNSGAXSSISXXXYPARYANAMAVGATDQNNNRASFSQYGPGLDIVAPGVNIQSTWPGSTYASLNGTSMATPHVAGAAALVKQKNPSWSNVQIRNHLKNTATSLGSTWLYGSGLVNAEAATR

SEQ ID NO: 62125 - protein, 269 aa, Unidentified
AQSVPWGISRVQAPAAHRRRLWGRGVKVAVLDTGISTHPDLNIRGGASFVPGEPSTQDGNGHGTHVAGTIAALDNSIGVLGVAPSAELYAVKVLGASGAGSVSSIAQGLEWAGANGMHVANLSLGSPSPSATLEQAVNSATSRGVLVVAASGNSGAGSISYPARYANAMAVGATDQNNNRASFSQYGAGLDLVAPGVNVQSTYPGSAYFSLNGTSMATPHVAGAAALVKQKNPSWSNVQIRNRLKNTATSLGSTNLYGSGLVNAEAATR

SEQ ID NO: 62126 - protein, 269 aa, Bacillus lentus
AQTIPWGISRVQAPAAHNRGLTGSGVKVAVLDTGISTHPDLNIRGGASFVPGEPSTQDGNGHGTHVAGTIAALNNSIGVLGVAPSAELYAVKVLGADGRGAISSIAQGLEWAGNNGMHVANLSLGSPSPSATLEQAVNSATSRGVLVVAASGNSGASSISYPARYANAMAVGATDQNNNRASFSQYGAGLDIVAPGVNVQSTYPGSTYASDNGTSMATPHVAGVAALVKQKNPSWSNVQIRNHLKNTATGLGNTNLYGSGLVNAEAATR

SEQ ID NO: 62127 - protein, 269 aa, Unidentified
AQSVPWGISRVQAPAAHNRGLAGRGVKVAVLDTGISTHPDLNIRGGASFVPGEPSTQDGNGHGTHVAGTIAALNNSIGVLGVAPSAELYAVKVLGASGGGAISSIAQGLEWAGNNGMHVANLSLGNESPSATLEQAVNSATSRGVLVVAASGNSGEGSISYPARYANAMAVGATDQNNNRASFSQYGAGLDIVAPGVNVQSTYPGSTYASLNGTSMATPHVAGAAVLVKQKNPSWSNVRIRDHLKNTATSLGSTNLYGSGLVNAEAATR

SEQ ID NO: 62128 - protein, 269 aa, Unidentified
AQSVPWGISRVQAPAAHNRGLAGRGVKVAVLDTGISTHPDLNIRGGASFVPGEPSTQDGNGHGTHVAGTIAALNNSIGVLGVAPSAELYAVKVLGASGSGAISSIAQGLEWAGNNGMHVANLSLGSPSPSATLEQAVNSATSRGVLVVAASGNSGADSISYPARYANAMAVGATDQNNNRADFSQYGAGLDIVAPGVNVQSTYPGSTYASDNGTSMATPHVAGAAVLVKQKNPSWSNVRIRDHLKNTATSLGSTNLYGSGLVNAFAATR

SEQ ID NO: 62129 - protein, 269 aa, Unidentified
AQSVPWGIERVQAPAAHNRGLTGSGVKVAVLDTGISTHPDLRIRGGASFVPGEPSTQDGNGHGTHVAGTIAALDNSIGVLGVAPSAELYAVKVLGASGSGSVSSIAQGLEWAGNNGMHVANLSLGSPSPSATLEQAVNSATSRGVLVVAASGNSGEPEISYPARYANAMAVGATDQNNNRASFSQYGPGLDIVAPGVNVLSTWPGSTYASLNGTSMATPHVAGAAALVKQKNPSWSNVQIRNHLKNTATSLGDTNEYGSGLVNAEAATR

SEQ ID NO: 62130 - protein, 269 aa, Unidentified
AQSVPWGISRVQAPAAHNRGLAGRGVKVAVLDTGISTHPDLNIRGGASFVPGEPSTQDGNGHGTHVAGTIAALNNSIGVLGVAPSAELYAVKVLGASGGGAISSIAQGLEWAGNNGMHVANLSLGSPSPSATLEQAVNSATSRGVIVVAASGNSGEGSISYPARYANAMAVGATDQNNNRADFSQYGAGLDIVAPGVNVQSTYPGSTYASLNGTSMATPHVAGAAVLVKQKNPSWSNVRIRDHLKNTATSLGSTNLYGSGLVNAEAATR

SEQ ID NO: 62131 - protein, 269 aa, Unidentified
AQSVPWGISRVQAPAAHNRGLAGSGVKVAVLDTGISTHPDLNIRGGASFVPGEPSTQDGNGHGTHVAGTIAALNNSIGVLGVAPSAELYAVKVLGASGGGAISSIAQGLEWAGNNGMHVANLSLGSESPSATLEQAVNSATSRGVLVVAASGNSGEESISYPARYANAMAVGATDQNNNRASFSQYGAGLDIVAPGVNVQSTYPGSTYASLNGTSMATPHVAGAAVLVKQKNPSWSNVRIRDRLKNTATSLGSTNLYGSGLVNAEAATR

SEQ ID NO: 62132 - protein, 269 aa, Unidentified
AQSVPWGISRVQAPAAHNRGLAGSGVKVAVLDTGISTHPDLNIRGGASFVPGEPSTQDGNGHGTHVAGTIAALNNSIGVLGVAPSAELYAVKVLGASGGGAISSIAQGLEWAGNNGMHVANLSLGSPSPSATLEQAVNSATSRGVLVVAASGNSGADSISYPARYANAMAVGATDQNNNRADFSQYGAGLDIVAPGVNVQSTYPGSTYASLNGTSMATPHVAGAAVLVKQKNPSWSNVRIRDHLKNTATSLGSTNLYGSGLVNVFAATR

SEQ ID NO: 62133 - protein, 269 aa, Unidentified
AQSVPWGISRVQAPAAHNRRLTGSGVKVAVLDTGISTHPDLNIRGGASFVPGEPSTQDGNGHGTHVAGTIAALNNRIGVLGVAPSAELYAVKVLGASGAGAISSIAQGLEWAGANGMHVANLSLGSPSPSATLEQAVNSATSRGVLVVAASGNSGAGSISYPARYANAMAVGATDQDNNRASFSQYGAGLDIVAPGVNVQSTYPQSAYASLNGTSMATPHVAGAAVLVKQKNPSWSNVRIRNHLKNTATSLGSTNLYGSGLVNAEAATR

SEQ ID NO: 62134 - protein, 269 aa, Unidentified
AQSVPWGISRVQAPAAHRRGLWGRGVKVAVLDTGISTHPELNIRGGASFVPGEPSTQDGNGHGTHVAGTIAALDNSIGVLGVAPSAELYAVKVLGASGAGSVSSIAQGLEWAGNNGMHVANLSLGSPSPSATLEQAVNSATSRGVLVVAASGNSGAGTISYPARYANAMAVGATDQDNNRASFSQYGAGLDIVAPGVNVQSTYPQSAYASLNGTSMATPHVAGAAALVKQKNPSWSNVQIRNRLKNTATSLGSTNLYGSGLVNAEAATR

SEQ ID NO: 62135 - protein, 269 aa, Unidentified
AQSVPWGISRVQAPAAHRRGLTGRGVKVAVLDTGISTHPDLNITGGASFVPGEPSTQDGNGHGTHVAGTIAALDNRIGVLGVAPSAELYAVKVLGASGGGAISSIAQGLEWAGNNGMHVANLSLGSPSPSATLEQAVNSATSRGVLVVAASGNSGAGSISYPARYANAMAVGATDQNNNRASFSQYGAGLDIVAPGVNVQSTYPGSTYASLNGTSMATPHVAGAAVLVKQKNPSWSNVRIRNHLKNTATSLGSTNLYGSGLVRAEAATR

SEQ ID NO: 62136 - protein, 269 aa, Unidentified
AQSVPWGISRVQAPAAHNRGLTGSGVKVAVLDTGISTHPDLNIRGGASFVPGEPSTQDGNGHGTHVAGTIAALDNSIGVLGVAPSAELYAVKVLGASGAGAISSIAQGLEWAGNNGMHVANLSLGSPSPSATLEQAVNSATSRGVLVVAASGNSGEGSISYPARYANAMAVGATDQNNNRADFSQYGAGLDIVAPGVNVQSTYPGSTYASLNGTSMATPHVAGAAVLVKQKNPSWSNVRIRDRLKNTATSLGSTNLYGSGLVNAFAATR

SEQ ID NO: 62137 - protein, 275 aa, Unidentified
AQTIPWGISRVQAPAAHNRGLTGSGVKVAVLDTGIXSTHPDLNIRGGASFVPGEPXSTQDGNGHGTHVAGTIAALNNSIGVLGVAPSAELYAVKVLGADGEGAISSIAQGLEWAGNNGMHVANLSLGSPSPSATLEQAVNSATSRGVLVVAASGNSGAXSSISXXXYPARYANAMAVGATDQNNNRASFSQYGAGLDIVAPGVNILSTWPGSTYASLNGTSMATPHVAGAAALVKQKNPSWSNVQIRNHLKNTATSLGSTWLYGSGLVNAEAATR

SEQ ID NO: 62138 - protein, 269 aa, Unidentified
AQSVPWGIERVQAPAAHNRGLTGSGVKVAVLDTGISTHPDLRIRGGASFVPGEPSTQDGNGHGTHVAGTIAALDNSIGVLGVAPSAELYAVKVLGASGSGSVSSIAQGLEWAGNNGMHVANLSLGSPSPSATLEQAVNSATSRGVLVVAASGNSGAGSISYPARYANAMAVGATDQNNERAEFSNYGPGLDIVAPGVNVLSTWPGSTYASLNGTSMATPHVAGAAALVKQKNPSWSNVQIRNHLKNTATSLGDTNEYGSGLVNAEAATR

SEQ ID NO: 62139 - protein, 269 aa, Unidentified
AQSVPWGISRVQAPAAHRRGLWGRGVKVAVLDTGISTHPDLNIRGGASFVPGEPSTQDGNGHGTHVAGTIAALDNSIGVLGVAPSAELYAVKVLGASGAGSVSSIAQGLEWAGANGMHVANLSLGSPSPSATLEQAVNSATSRGVLVVAASGNSGAGSISYPARYANAMAVGATDQDNNRASFSQYGAGLDIVAPGVNVQSTYPQSTYFSLNGTSMATPHVAGAAALVKQKNPSWSNVQIRNRLKNTATSLGSANLYGSGLVNAEAATR

SEQ ID NO: 62140 - protein, 269 aa, Unidentified
AQSVPWGISRVQAPAAHNRGLTGSGVKVAVLDTGISTHPDLNIRGGASFVPGEPSTQDGNGHGTHVAGTIAALDNSIGVLGVAPSAELYAVKVLGASGGGAISSIAQGLEWAGNNGMHVANLSLGSPSPSATLEQAVNSATSRGVLVVAASGNSGADSISYPARYANAMAVGATDQNNNRASFSQYGPGLDIVAPGVNVQSTYPGSTYASLNGTSMATPHVAGAAVLVKHKNPSWSNVRIRDHLKKTATSLGSTNLYGSGLVNAEAATR

SEQ ID NO: 62141 - protein, 269 aa, Unidentified
AQTIPWGISRVQAPAAHNRGLTGSGVKVAVLDTGISTHPDLNIRGGASFVPGEPSTQDGNGHGTHVAGTIAALNNSIGVLGVAPSAELYAVKVLGADGRGAISSIAQGLEWAGNNGMHVANLSLGSPSPSATLEQAVNSATSRGVLVVAASGNDGASSISYPARYANAMAVGATDQNNNRASFSQYGPGLDIMAPGVNIQSTYPGSTYASLNGTSMATPHVAGAAALVKQKNPSWSNVQIRNHLKNTATSLGSTNLYGSGLVNAEAATR

SEQ ID NO: 62142 - protein, 269 aa, Unidentified
AQSVPWGISRVQAPAAHNRGLTGSGVKVAVLDTGISTHPDLNIRGGASFVPGEPSTQDGNGHGTHVAGTIAALNNSIGVLGVAPSAELYAVKVLGLSGSAAISSIAQGLEWAGNNGMHVANLSLGSPSPSATLEQAVNSATSRGVLVVAASGNSGADSISYPARYANAMAVGATDQNNNRASFSQYGAGLDIVAPGVNVQSTYPGGTYASLNGTSMATPHVAGAAVLVKHKNPSWSNVRIRDHLKKTATSLGSTNLYGSGLVNAEAATR

SEQ ID NO: 62143 - protein, 269 aa, Unidentified
AQSVPWGISRVQAPAAHNRGLAGSGVKVAVLDTGISTHPDLNIRGGASFVPGEPSTQDGNGHGTHVAGTIAALNNSIGVLGVAPSAELYAVKVLGASGGGAISSIAQGLEWAGNNGMHVANLSIGSPSPSATLEQAVNSATSRGVLVVAASGNSGADSISYPARYANAMAVGATDQNNNRADFSQYGAGLDIVAPGVNVQSTYPGSTYASLNGTSMATPHVAGAAVLVKQKNPSWSNVRIRDHLKNTATSLGSTNLYGSGLVNAFAATR

SEQ ID NO: 62144 - protein, 269 aa, Unidentified
AQSVPWGISRVQAPAAHNRGLTGSGVKVAVLDTGISTHPDLRIRGGASFVPGEPSTQDGNGHGTHVAGTIAALNNSIGVLGVAPSAELYAVKVLGASGAGAISSIAQGLEWAGNNGMHVANLSLGSPSPSATLEQAVNSATSRGVLVVAASGNSGEGSISYPARYANAMAVGATDQNNNRADFSQYGAGLDIVAPGVNVQSTYPGSTYASENGTSMATPHVAGAAVLVKQKNPSWSNVRIRDRLKNTATSLGSTNLYGSGLVNAEAATR

SEQ ID NO: 62145 - protein, 269 aa, Unidentified
AQVVPWGISRVQAPAAHNRGLTGRGVKVAVLDTGISTHPDLNIRGGASFVPGEPSTQDGNGHGTHVAGTIAALDNNIGVLGVAPDAELYAVKVLGASGGGAISSIAQGLEWAGNNRMHVANLSLGSPSPSATLEQAVNSATSRGVLVVAASGNSGAGSISYPARYANAMAVGATDQNNNRASFSQYGAGLDIVAPGVNVQSTWPGSTYASLNGTSMATPHVAGAAALVKQKNPSWSNVQIRNRLKNTATSLGSTNLYGSGLVNAEAATR

SEQ ID NO: 62146 - protein, 269 aa, Unidentified
AQSVPWGISRVQAPAAHNRGLAGSGVKVAVLDTGISTHPDLNIRGGASFVPGEPSTQDGNGHGTHVAGTIAALNNSIGVLGVAPSAELYAVKVLAASGNGAISSIAQGLEWAGNNGMHVANLSLGSPSPSATLEQAVNSATSRGVLVVAASGNSGADSISYPARYANAMAVGATDQNNNRADFSQYGAGLDIVAPGVNVQSTYPGSTYASLNGTSMATPHVAGAAVLVKQKNPSWSNVRIRDHLKNTATSLGSTNLYGSGLVNAFAATR

SEQ ID NO: 62147 - protein, 269 aa, Unidentified
AQSVPWGISRVQAPAAHNRGLRGSGVKVAVLDTGISTHPDLNIRGGASFVPGEPSTQDGNGHGTHVAGTIAALNNNIGVLGVAPSAELYAVKVLSASGGGAISSIAQGLEWAGLNGMHVANLSLGAPSPSATLEQAVNSATSRGVLVVAASGNSGAGSISYPARYANAMAVGATDQNNNRASFSQYGAGLDIVAPGVNVQSTYPGSTYASQNGTSMATPHVAGAAVLVKQKNPSWSNVRIRNHLKNTATSLGSTNLYGSGLVNAEAATR

SEQ ID NO: 62148 - protein, 269 aa, Unidentified
AQSVPWGISRVQAPAAHNRGLAGSGVKVAVLDTGISTHPDLNIRGGASFVPGEPSTQDGNGHGTHVAGTIAALNNSIGVLGVAPSAELYAVKVLGASGNGAISSIAQGLEWAGNNGMHVANLSLGSESPSATLEQAVNSATSRGVLVVAASGNSGADSISYPARYANAMAVGATDQNNNRADFSQYGAGLDIVAPGVNVQSTYPGSTYASLNGTSMATPHVAGAAVLVKQKNPSWSNVRIRDHLKNTATSLGSTNLYGSGLVNAFAATR

SEQ ID NO: 62149 - protein, 269 aa, Unidentified
AQSVPWGISRVQAPAAHRRGLTGSGVKVAVLDTGISTHPDLDITGGASFVPGEPSTQDGNGHGTHVAGTIAALDNRIGVLGVAPSAELYAVKVLGASGGGAISSIAQGLEWAGNNGMHVANLSLGSPSPSATLEQAVNSATSRGVLVVAASGNSGAGSISYPARYANAMAVGATDQNNNRASFSQYGAGLDIVAPGVNVQSTYPGSTYASLNGTSMATPHVAGAAVLVKQKNPSWSNVRIRNHLKNTATSLGSTNLYGSGLVRAEAATR

SEQ ID NO: 62150 - protein, 269 aa, Unidentified
AQSVPWGISRVQAPAAHNRGLTGFGVKVAVLDSGISTHPDLNIRGGASFVPGEPSTQDGNGHGTHVAGTIAALNNSIGVLGVAPSAELYAVKVLGASGGGAISSIAQGLEWAGLNGMHVANLSLGNPSPSATLEQAVNSATSRGVLVVAASGNSGAGSISYPARYANAMAVGATDQNNNRASFSQYGAGLDIVAPGVNVQSTAPQSAYASLNGTSMATPHVAGAAVLVKQKNPSWSNVQIRNHLKNTATSLGSTNLYGSGLVNAEAATR

SEQ ID NO: 62151 - protein, 269 aa, Unidentified
AQSVPWGISRVQAPAAHNRGLAGSGVKVAVLDTGISTHPDLNIRGGASFVPGEPSTQDGNGHGTHVAGTIAALNNSIGVLGVAPSAELYAVKVLGASGGGAISSIAQGLEWAGNNGMHVANLSLGSPSPSATLEQAVNSATSRGVLVVAASGNSGEESISYPARYANAMAVGATDQNNNRADFSQYGAGLDIVAPGVNVQSTYPGSTYASLNGTSMATPHVAGAAVLVKQKNPSWSNVRIRDHLKNTATSLGSTNLYGSGLVNAFAATR

SEQ ID NO: 62152 - protein, 269 aa, Unidentified
AQSVPWGISRVQAPAAHNRGLAGSGVKVAVLDTGISTHPDLRIRGGASFVPGEPSTQDGNGHGTHVAGTIAALNNSIGVLGVAPSAELYAVKVLGASGGGAISSIAQGLEWAGNNGMHVANLSLGSESPSATLEQAVNSATSRGVLVVAASGNSGAGSISYPARYANAMAVGATDQNNNRADFSQYGAGLDIVAPGVNVQSTYPGSTYASLNGTSMATPHVAGAAVLVKQKNPSWSNVRIRDHLKNTATSLGSTNLYGSGLVNAFAATR

SEQ ID NO: 62153 - protein, 269 aa, Unidentified
AQSVPWGISRVQAPAAHNRGLTGSGVKVAVLDTGISTHPDLNIRGGASFVPGEPSTQDENGHGTHAAGTIAALNNSIGVLGVAPSAELYAVKVLGASGSGAISSIAQGLEWAGNNGMHVANLSLGSPAPSATLEQAVNSATSRGVLVVAASGNSGADSISYPARYANAMAVGATDQNNNRASFSQYGAGLDIVAPGVNVQSTYPGSTYASLNGTSMATPHVAGAAVLVKHKNPSWSNVRIRDHLKKTATSLGSTNLYGSGLVNAEAATR

SEQ ID NO: 62154 - protein, 269 aa, Unidentified
AQSVPWGISRVQAPAAHNRGLAGSGVKVAVLDTGISTHPDLNIRGGASFVPGEPSTQDGNGHGTHVAGTIAALNNSIGVLGVAPSAELYAVKVLGASGGGAISSIAQGLEWAGNNGMHVANLSLGSPSLSATLEQAVNSATSRGVLVVAASGNSGADSISYPARYANAMAVGATDQNNNRADFSQYGAGLDIVAPGVNVQSTYPGSTYASLNGTSMATPHVAGAAVLVKQKNPSWSNVRIRDHLKNTATSLGSTNLYGSGLVNAFAATR

SEQ ID NO: 62155 - protein, 269 aa, Unidentified
AQSVPWGISRVQAPAAHRRGLWGRGVKVAVLDTGISTHPDLNIRGGASFVPGEPSTQDGNGHGTHVAGTIAALDNSIGVLGVAPSAELYAVKVLGASGSGSVSSIAQGLEWAGANGMHVANLSLGSPSPSATLEQAVNSATSRGVLVVAASGNSGAGSISYPARYANAMAVGATDQDNNRASFSQYGAGLDLVAPGVNVQSTYPQSAYFSLNGTSMATPHVAGAAALVKQKNPSWSNVQIRNRLKNTATSLGSTNLYGSGLVNAEAATR

SEQ ID NO: 62156 - protein, 269 aa, Unidentified
AQSVPWGISRVQAPAAHNRRLTGSGVKVAVLDTGISTHPDLNIRGGASFVPGEPSTQDGNGHGTHVAGTIAALNNSIGVLGVAPSAESYAVKVLGASGGGAISSIAQGLEWAGANGMHVANLSLGSPSPSATLEQAVNSATSRGVLVVAASGNSGAGSISYPARYANAMAVGATDQDNNRASFSQYGAGLDIVAPGVNVQSTYPGSAYFSLNGTSMATPHVAGAAVLVKQKNPSWSNVRIRNHLKNTATSLGSTNLYGSGLVNAEAATR

SEQ ID NO: 62157 - protein, 269 aa, Unidentified
AQSVPWGISRVQAPAAHNRGLAGSGVKVAVLDTGISTHPDLNIRGGASFVPGEPSTQDGQGHGTHVAGTIAALNNSIGVLGVAPSAELYAVKVLGASGGGAISSIAQGLEWAGNNGMHVANLSLGSPSPSATLEQAVNSATSRGVLVVAASGNSGADSISYPARYANAMAVGATDQNNNRADFSQYGAGLDIVAPGVNVQSTYPGSTYASLNGTSMATPHVAGAAVLVKQKNPSWSNVRIRDHLKNTATSLGSTNLYGSGLVNAFAATR

SEQ ID NO: 62158 - protein, 269 aa, Unidentified
AQLVPWGISRVQAPAAHNRGLTGSGVKVAVLDTGISTHPDLNIRGGASFVPGEPSTQDENGHGTHAAGTIAALDNSIGVLGVAPSAELYAVKVLGASGSGAISSIAQGLEWAGNNGMHVANLSLGSPSPSATLEQAVNSATSRGVLVVAASGNSGAGSISYPARYANAMAVGATDQNNNRASFSQYGAGLDIVAPGVNVQSTYPGSTYASLNGTSMATPHVAGAAVLVKHKNPSWSNVRIRDHLKKTATSLGSTNLYGSGLVNAEAATR

SEQ ID NO: 62159 - protein, 269 aa, Unidentified
AQSVPWGISRVQAPAAHNRGLRGGGVKVAVLDTGISTHPDLNIRGGASFVPGEPSTQDGNGHGTHVAGTIAALNNNIGVLGVAPSAELYAVKVLGASGNGAISSIANGLEWAGLNGMHVANLSLGAPSPSATLEQAVNSATSRGVLVVAASGNSGAGSISYPARYANAMAVGATDQNNNRASFSQYGAGLDIVAPGVNVQSTYPGSTYASLNGTSMATPHVAGAAVLVKQKNPSWSNVRIRNHLKNTATSLGSTNLYGSGLVNAEAATR

SEQ ID NO: 62160 - protein, 269 aa, Bacillus lentus
AQTIPWGISRVQAPAAHNRGLTGSGVKVAVLDTGISTHPDLNIRGGASFVPGEPSTQDGNGHGTHVAGTIAALNNSIGVLGVAPSAELYAVKVLGADGRGAISSIAQGLEWAGNNGMHVANLSLGSPSPSATLEQAVNSATSRGVLVVAASGNSGASSISYPARYANAMAVGATDQNNNRASFSQYGAGLDIVAPGVNVQSTYPGSTYASENGTSMATPHVAGVAALVKQKNPSWSNVQIRNHLKNTATGLGNTNLYGSGLVNAEAATR

SEQ ID NO: 62161 - protein, 269 aa, Unidentified
AQSVPWGISRVQAPAAHNRGLTGSGVKVAVLDTGISTHPDLNIRGGASFVPGEPSTQDGNGHGTHAAGTIAALNNSIGVLGVAPSAELYAVKVLGASGSGAISSIAQGLEWAGNNGMHVANLSLGSPSPSATLEQAVNSATSRGVLVVAASGNSGADSISYPARYANAMAVGATDQNNNRASFSQYGAGLDIVAPGVNIQSTWIGSTYASLNGTSMATPHVAGAAVLVKHKNPSWSNVRIRNHLKNTATSLGSANLYGSGLVNAEAATR

SEQ ID NO: 62162 - protein, 269 aa, Unidentified
AQSVPWGISRVQAPAAHNRGLTGRGVKVAVLDTGISTHPDLNIRGGASFVPGEPSTQDGNGHGTHVAGTIAALNNSIGVLGVAPSAELYAVKVLGASGGGAISSIAQGLEWAGNNGMHVANLSLGNESPSATLEQAVNSATSRGVLVVAASGNSGEGSISYPARYANAMAVGATDQNNNRASFSQYGAGLDIVAPGVNVQSTYPGSTYASLNGTSMATPHVAGAAVLVKQKNPSWSNVRIRDRLKNTATSLGSTNLYGSGLVNAEAATR

SEQ ID NO: 62163 - protein, 269 aa, Unidentified
AQSVPWGISRVQAPAAHRRRLTGRGVKVAVLDTGISTHPDLDIRGGASFVPGEPSTQDGNGHGTHVAGTIAALDNRIGVLGVAPSAELYAVKVLGASGGGAISSIAQGLEWAGNNGMHVANLSLGSPSPSATLEQAVNSATSRGVLVVAASGNSGAGSISYPARYANAMAVGATDQNNNRASFSQYGAGLDIVAPGVNVQSTYPGSTYASLNGTSMATPHVAGAAVLVKQKNPSWSNVRIRNHLKNTATSLGSTNLYGSGLVNAEAATR

SEQ ID NO: 62164 - protein, 269 aa, Unidentified
AQSVPWGISRVQAPAAHNRGLAGRGVKVAVLDTGISTHPDLNIRGGASFVPGEPSTQDGNGHGTHVAGTIAALNNSIGVLGVAPSAELYAVKVLGASGDGAISSIAQGLEWAGNNRMHVANLSLGSPSPSATLEQAVNSATSRGVLVVAASGNSGADSISYPARYANAMAVGATDQNNNRADFSQYGAGLDIVAPGVNVQSTYPGSTYASLNGTSMATPHVAGAAVLVKQKNPSWSNVQIRDHLKNTATSLGSTNLYGSGLVNAFAATR

SEQ ID NO: 62165 - protein, 269 aa, Unidentified
AQSVPWGISRVQAPAAHNRGLTGRGVKVAVLDTGISTHPDLNIRGGASFVPGEPSTQDGNGHGTHVAGTIAALNNSIGVLGVAPSAELYAVKVLGASGGGAISSIAQGLEWAGNNGMHVANLSLGSPSPSATLEQAVNSATSRGVLVVAASGNSGEGSISYPARYANAMAVGATDQDNNRADFSQYGAGLDIVAPGVNVQSTYPGSTYASLNGTSMATPHVAGAAVLVKQKNPSWSNVRIRDRLKNTATSLGSTNLYGSGLVNAEAATR

SEQ ID NO: 62166 - protein, 269 aa, Unidentified
AQSVPWGISRVQAPAAHNRGLAGSGVKVAVLDTGISTHPDLNIRGGASFVPGEPSTQDGNGHGTHVAGTIAALNNSIGVLGVAPSAELYAVKVLGASGGGAISSIAQGLEWAGNNGMHVANLSLGSPSPSATLEQAVNSATSRGVLVVAASGNSGADSISYPARYANAMAVGATDQNNNRADFSQYGAGLDIVAPGVNVQSTYPGSTYASLNGTSMATPHVAGAAVLVKQKYPSWSNVRIRDHLKNTATSLGSTNLYGSGLVNAFAATR

SEQ ID NO: 62167 - protein, 269 aa, Unidentified
AQSVPWGISRVQAPAAHNRGLAGGGVKVAVLDTGISTHPDLNIRGGASFVPGEPSTQDGNGHGTHVAGTIAALDNSIGVLGVAPSAELYAVKVLSASGGGAISSIAQGLEWAGNNGMHVANLSLGAPSPSATLEQAVNSATSRGVLVVAASGNSGAGSISYPARYANAMAVGATDQNNNRASFSQYGAGLDIVAPGVNVQSTYPGSTYASQNGTSMATPHVAGAAVLVKQKNPSWSNVRIRNHLKNTATSLGSTNLYGSGLVNAEAATR

SEQ ID NO: 62168 - protein, 269 aa, Unidentified
AQSVPWGISRVQAPAAHNRGLAGSGVKVAVLDTGISTHPDLNIRGGASFVPGEPSTQDGNGHGTHVAGTIAALNNSIGVLGVAPSAELYAVKVLGASGNGAISSIAQGLEWAGNNGMHVANLSLGSPSPSATLEQAVNSATSRGVLVVAASGNSGADSISYPARYANAMAVGATDQNNNRADFSQYGAGLDIVAPGVNVQSTYPGSTYASQNGTSMATPHVAGAAVLVKQKNPSWSNVRIRDHLKNTATSLGSTNLYGSGLVNAFAATR

SEQ ID NO: 62169 - protein, 269 aa, Unidentified
AQSVPWGISRVQAPAAHNRGLAGSGVKVAVLDTGISTHPDLRIRGGASFVPGEPSTQDGNGHGTHVAGTIAALNNSIGVLGVAPSAELYAVKVLGASGGGAISSIAQGLEWAGNNGMHVANLSLGSPSPSATLEQAVNSATSRGVLVVAASGNSGEGSISYPARYANAMAVGATDQNNNRADFSQYGAGLDIVAPGVNVQSTYPGSTYASLNGTSMATPHVAGAAVLVKQKNPSWSNVRIRDHLKNTATSLGSTNLYGSGLVNAFAATR

SEQ ID NO: 62170 - protein, 269 aa, Unidentified
AQSVPWGISRVQAPAAHNRGLAGSGVKVAVLDTGISTHPDLNIRGGASFVPGEPSTQDGNGHGTHVAGTIAALDNSIGVLGVAPSAELYAVKVLGASGGGAISSIAQGLEWAGNNGMHVANLSLGSPSPSATLEQAVNSATSRGVLVVAASGNSGADSISYPARYANAMAVGATDQNNNRADFSQYGAGLDIVAPGVNVQSTYPGSTYASLNGTSMATPHVAGAAVLVKQKNPSWSNVRIRDHLKNTATSLGSTNLYGSGLVNAFAATR

SEQ ID NO: 62171 - protein, 269 aa, Unidentified
AQSVPWGISRVQAPAAHNRGLAGSGVKVAVLDTGISTHPDLNIRGGASFVPGEPSTQDGNGHGTHVAGTIAALNNSIGVLGVAPSAELYAVKVLGASGNGAISSIAQGLEWAGNNGMHVANLSLGSSSPSATLEQAVNSATSRGVLVVAASGNSGADSISYPARYANAMAVGATDQNNNRADFSQYGAGLDIVAPGVNVQSTYPGSTYASLNGTSMATPHVAGAAVLVKQKNPSWSNVRIRDHLKNTATSLGSTNLYGSGLVNAFAATR

SEQ ID NO: 62172 - protein, 269 aa, Unidentified
AQSVPWGISRVQAPAAHNRGLAGSGVKVAVLDTGISTHPDLNIRGGASFVPGEPSTQDGNGHGTHVAGTIAALNNSIGVLGVAPSAELYAVKVLGASGGGAISSIAQGLEWAGNNGMHVANLSLGSESPSATLEQAVNSATSRGVLVVAASGNSGADSISYPARYANAMAVGATDQNNNRADFSQYGAGLDIVAPGVNVQSTYPGSTYASLNGTSMATPHVAGAAVLVKQKNPSWSNVRIRDHLKNTATSLGSTNLYGSGLVNAFAATR

SEQ ID NO: 62173 - protein, 269 aa, Unidentified
AQSVPWGIERVQAPAAHNRGLTGSGVKVAVLDTGISTHPDLRIRGGASFVPGEPSTQDGNGHGTHVAGTIAALDNSIGVLGVAPSAELYAVKVLGASGSGSVSSIAQGLEWAGNNGMHVANLSLGSPSPSATLEHAVNHATSHGVLVVAASGNSGAGSISYPARYANAMAVGATDQNNNRASFSQYGPGLDIVAPGVNVLSTWPGSTYASLNGTSMATPHVAGAAALVKQKNPSWSNVQIRNHLKNTATSLGDTNEYGSGLVNAEAATR

SEQ ID NO: 62174 - protein, 269 aa, Unidentified
AQSVPWGISRVQAPAAHRRGLTGRGVKVAVLDTGISTHPDLNIRGGASFVPGEPSTQDGNGHGTHVAGTIAALNNSIGVLGVAPRAELYAVKVLGASGSGSVSSIAQGLEWAGNNRMHVANLSLGLQAPSATLEQAVNSATSRGVLVVAASGNSGAGSISYPARYANAMAVGATDQNNNRASFSQYGAGLDIVAPGVNVYSTWPGSAYASLNGTSMATPHVAGAAALVKQKNPSWSNVQIRNRLKNTATSLGSTNLYGSGLVNAEAATR

SEQ ID NO: 62175 - protein, 269 aa, Unidentified
AQSVPWGISRVQAPAAHNRGLTGGGVKVAVLDTGISTHPDLNIRGGASFVPGEPSTQDGNGHGTHVAGTIAALNNNIGVLGVAPSTELYAVKVLGASGNGSVSSIAGGLEWAGTNGMHVANLSLGAPSPSATLEQAVNSATSRGVLVVAASGNSGSGSISYPARYANAMAVGATDQNNNRASFSQYGAGLDIVAPGVNVQSTYPGSTYASQSGTSMATPHVAGAAALVKQKNPSWSNVQIRNHLKNTATSGGSTNLYGSGLVNAEAATR

SEQ ID NO: 62176 - protein, 269 aa, Unidentified
AQSVPWGISRVQAPAAHNRGLAGSGVKVAVLDSGISTHPDLNIRGGASFVPGEPSTQDGNGHGTHVAGTIAALNNSIGVLGVAPSAELYAVKVLGASGGGAISSIAQGLEWAGLSGMHVANLSLGSPSPSATLEQAVNSATSRGVLVVAASGNSGAGSISYPARYANAMAVGATDQNNNRASFSQYGAGLDIVAPGVNVQSTAPQSAYASLNGTSMATPHVAGAAVLVKQKNPSWSNVQIRNHLKNTATSLGSTNLYGSGLVNAEAATR

SEQ ID NO: 62177 - protein, 269 aa, Unidentified
AQSVPWGISRVQAPAAHNRGLTGSGVKVAVLDTGISTHPDLNIRGGASFVPGEPSTQDGDGHGTHVAGTIAALNNSIGVLGVAPSAELYAVKVLGASGSGAISSIARGLEWAGNNGMHVANLSLGSPSPSATLEQAVNSATSRGVLVVAASGNSGADSISYPARYANAMAVGATDQNNNRASFSQYGAGLDIVAPGVNVQSTYPGSRYASLNGTSMATPHVAGAAVLVKHKNPSWSNVRIRDHLKKTATSLGSTNLYGSGLVNAEAATR

SEQ ID NO: 62178 - protein, 269 aa, Unidentified
AQSVPWGISRVQAPAAHNRRLTGRGVKVAVLDTGISTHPDLDIRGGASFVPGEPSTQDGNGHGTHVAGTIAALDNRIGVLGVAPSAELYAVKVLGASGGGAISSIAQGLEWAGNNGMHVANLSLGSPSPSATLEQAVNSATSRGVLVVAASGNSGAGSISYPARYANAMAVGATDQNNNRASFSQYGAGLDIVAPGVNVQSTYPGSTYASLNGTSMATPHVAGAAVLVKQKNPSWSNVRIRNHLKNTATSLGSTNLYGSGLVRAEAATR

SEQ ID NO: 62179 - protein, 269 aa, Unidentified
AQSVPWGISRVQAPASHNRGLAGFGVKVAVLDSGISTHPDLNIRGGASFVPGEPSTQDGNGHGTHVAGTIAALNNSIGVLGVAPSAELYAVKVLGASGGGAISSIAQGLEWAGLNGMHVANLSLGNPSPSATLEQAVNSATSRGVLVVAASGNSGAGSISYPARYANAMAVGATDQNNNRASFSQYGAGLDIVAPGVNVQSTVPGSTYASLNGTSMATPHVAGAAVLVKQKNPSWSNVQIRNHLKNTATSLGSTNLYGSGLVNAEAATR

SEQ ID NO: 62180 - protein, 269 aa, Unidentified
AQSVPWGISRVQAPAAHNRGLTGRGVKVAVLDTGISTHPDLNIRGGASFVPGEPSTQDGNGHGTHVAGTIAALNNSIGVLGVAPSAELYAVKVLGASGGGAISSIAQGLEWAGNNGMHVANLSLGSESPSATLEQAVNSATSRGVLVVAASGNSGEESISYPARYANAMAVGATDQNNNRASFSQYGAGLDIVAPGVNVQSTYPGSTYASLNGTSMATPHVAGAAVLVKQKNPSWSNVRIRDRLKNTATSLGSTNLYGSGLVNAEAATR

SEQ ID NO: 62181 - protein, 269 aa, Unidentified
AQSVPWGISRVQAPAAHRRRLWGRGVKVAVLDTGISTHPDLNIRGGASFVPGEPSTQDGNGHGTHVAGTIAALDNSIGVLGVAPSAELYAVKVLGASGAGSVSSIAQGLEWAGNNGMHVANLSLGSPSPSATLEQAVNSATSRGVLVVAASGNSGAGSISYPARYANAMAVGATDQDNNRASFSQYGAGLDLVAPGVNVQSTYPGSAYFSLNGTSMATPHVAGAAALVKQKNPSWSNVQIRNRLKNTATSLGSTNLYGSGLVNAEAATR

SEQ ID NO: 62182 - protein, 269 aa, Unidentified
AQTIPWGISRVQAPAAHNRGLTGSGVKVAVLDTGISTHPDLNIRGGASFVPGEPSTQDGNGHGTHVAGTIAALNNSIGVLGVAPSAELYAVKVLGADGRGAISSIAQGLEWAGNNGMHVANLSLGSPSPSATLEQAVNSATSRGVLVVAASGNSGASSISYPARYANAMAVGATDQNNNRASFSQYGPGLDIMAPGVNIQSTYPGSTYASDNGTSMATPHVAGAAALVKQKNPSWSNVQIRNHLKNTATSLGSTNLYGSGLVNAEAATR

SEQ ID NO: 62183 - protein, 269 aa, Unidentified
AQSVPWGISRVQAPAAHNRGLTGSGVKVAVLDTGISTHPDLNIRGGASFVPGEPSTQDGDGHGTHVAGTIAALNNSIGVLGVAPSAELYAVKVLGASGSGAISSIAQGLEWAGNNGMHVANLSLGSPGPSATLEQAVNSATSRGVLVVAASGNSGADSISYPARYANAMAVGATDQNNNRASFSQYGAGLDIVAPGVNVQSTYPGSRYASLNGTSMATPHVAGAAVLVKHKNPSWSNVRIRDHLKKTATSLGSTNLYGSGLVNAEAATR

SEQ ID NO: 62184 - protein, 269 aa, Unidentified
AQSVPWGISRVQAPAAHNRGLAGSGVKVAVLDSGISTHPDLNIRGGASFVPGEPSTQDGNGHGTHVAGTIAALNNSIGVLGVAPSAELYAVKVLGASGGGAISSIAQGLEWAGNNGMHVANLSLGSPSPSATLEQAVNSATSRGVLVVAASGNSGADSISYPARYANAMAVGATDQNNNRADFSQYGAGLDIVAPGVNVQSTYPGSTYASLNGTSMATPHVAGAAVLVKQKNPSWSNVRIRDHLKNTATSLGSTNLYGSGLVNAFAATR

SEQ ID NO: 62185 - protein, 269 aa, Unidentified
AQSVPWGISRVQAPASHNRGLAGFGVKVAVLDTGISTHPDLNIRGGASFVPGEPSTQDGNGHGTHVAGTIAALNNSIGVLGVAPSAELYAVKVLGASGGGAISSIAQGLEWAGLNGMHVANLSLGNPSPSATLEQAVNSATSRGVLVVAASGNSGAGSISYPARYANAMAVGATDQNNNRASFSQYGAGLDIVAPGVNVQSTVPQSTYASLNGTSMATPHVAGAAVLVKQKNPSWSNVQIRNHLKNTATSLGSTNLYGSGLVNAEAATR

SEQ ID NO: 62186 - protein, 269 aa, Unidentified
AQSVPWGISRVQAPAAHNRRLWGSGVKVAVLDTGISTHPDLNIRGGASFVPGEPSTQDGNGHGTHVAGTIAALNNSIGVLGVAPSAELYAVKVLGASGGGAISSIAQGLEWAGANGMHVANLSLGSPSPSATLEQAVNSATSRGVLVVAASGNSGAGSISYPARYANAMAVGATDQDNNRASFSQYGAGLDIVAPGVNVQSTYPQSTYFSLNGTSMATPHVAGAAVLVKQKNPSWSNVRIRNHLKNTATSLGSTNLYGSGLVNAEAATR

SEQ ID NO: 62187 - protein, 269 aa, Unidentified
AQSVPWGISRVQAPAAHNRGLTGSGVKVAVLDTGISTHPDLNIRGGASFVPGEPSTQDGNGHGTHAAGTIAALDNSIGVLGVAPSAELYAVKVLGASGSGAISSIAQGLEWAGNNGMHVANLSLGSPSPSATLEQAVNSATSRGVLVVAASGNSGADSISYPARYANAMAVGATDQNNNRASFSQYGAGLDIVAPGVNVQSTYLGSRYASLNGTSMATPHVAGAAVLVKHKNPSWSNVRIRNHLKNTATSLGSANLYGSGLVNAEAATR

SEQ ID NO: 62188 - protein, 269 aa, Unidentified
AQSVPWGISRVQAPAAHNRGLTGSGVKVAVLDTGISTHPDLNIRGGASFVPGEPSTQDGNGHGTHVAGTIAALDNSIGVLGVAPSAELYAVKVLGASGGGAISSIAQGLEWVGNNGMHVANLSLGSPSPSATLEQAVNSATSRGVLVVAASGNSGDGSISYPARYANAMAVGATDQNNNRASFSQYGAGLDIVAPGVNVQSTYPGSTYASLNGTSMATPHVAGAAVLVKQKNPSWSNVRIRDRLKNTATSLGSTNLYGSGLVNAFAATR

SEQ ID NO: 62189 - protein, 269 aa, Unidentified
AQSVPWGISRVQAPAAHNRGLAGSGVKVAVLDTGISTHPDLNIRGGASFVPGEPSTQDGNGHGTHVAGTIAALNNSIGVLGVAPSAELYAVKVLGASGGAAISSIAQGLEWAGNNGMHVANLSLGSPSPSATLEQAVNSATSRGVLVVAASGNSGADSISYPARYANAMAVGATDQNNNRADFSQYGAGLDIVAPGVNVQSTYPGSTYASLNGTSMATPHVAGAAVLVKQKNPSWSNVRIRDHLKNTATSLGSTNLYGSGLVNAFAATR

SEQ ID NO: 62190 - protein, 269 aa, Unidentified
AQSVPWGISRVQAPAAHNRGLAGFGVKVAVLDTGISTHPDLNIRGGASFVPGEPSTQDGNGHGTHVAGTIAALNNSIGVLGVAPSAELYAVKVLGASGGGAISSIAQGLEWAGLNGMHVANLSLGNPSPSATLEQAVNSATSRGVLVVAASGNSGAGSISYPARYANAMAVGATDQNNNRASFSQYGAGLDIVAPGVNVQSTAPQSAYASLNGTSMATPHVAGAAVLVKQKNPSWSNVQIRNHLKNTATSLGSTNLYGSGLVNAEAATR

SEQ ID NO: 62191 - protein, 269 aa, Unidentified
AQSVPWGISRVQAPASHNRGLAGSGVKVAVLDSGISTHPDLNIRGGASFVPGEPSTQDGNGHGTHVAGTIAALNNSIGVLGVAPSAELYAVKVLGASGGGAISSIAQGLEWAGLNGMHVANLSLGNPSPSATLEQAVNSATSRGVLVVAASGNSGAGSISYPARYANAMAVGATDQNNNRASFSQYGAGLDIVAPGVNVQSTVPQSTYASLNGTSMATPHVAGAAVLVKQKNPSWSNVQIRNHLKNTATSLGSTNLYGSGLVNAEAATR

SEQ ID NO: 62192 - protein, 269 aa, Unidentified
AQSVPWGISRVQAPAAHNRGLAGSGVKVAVLDTGISTHPDLNIRGGASFVPGEPSTQDGNGHGTHVAGTIAALNNSIGVLGVAPSAELYAVKVLGASGGGAISSVAQGLEWAGNNGMHVANLSLGSPSPSATLEQAVNSATSRGVLVVAASGNSGADSISYPARYANAMAVGATDQNNNRADFSQYGAGLDIVAPGVNVQSTYPGSTYASLNGTSMATPHVAGAAVLVKQKNPSWSNVRIRDHLKNTATSLGSTNLYGSGLVNAFAATR

SEQ ID NO: 62193 - protein, 269 aa, Unidentified
AQSVPWGISRVQAPAAHNRRLTGRGVKVAVLDTGISTHPDLNIRGGASFVPGEPSTQDGEGHGTHVAGTIAALNNGIGVLGVAPSAELYAVKVLGASGSGSVSSIAQGLEWAGNNDMHVANLSLGSESPSATLEQAVNSATSRGVLVVAASGNSGADSISYPARYANAMAVGATDQNNNRADFSQYGAGLDIVAPGVNVQSTYPGSTYASLNGTSMATPHVAGAAALVKRKNPSWSNVRIRDHLKNTATSLGSTNLYGSGLVNAEAATR

SEQ ID NO: 62194 - protein, 269 aa, Unidentified
AQSVPWGISRVQAPAAHNRGLAGGGVKVAVLDTGISTHPDLNIRGGASFVPGEPSTQDGNGHGTHVAGTIAALNNSIGVLGVAPSAELYAVKVLGASGGGAISSIAQGLEWAGNNGMHVANLSLGSPSPSATLEQAVNSATSRGVLVVAASGNSGADSISYPARYANAMAVGATDQNNNRADFSQYGAGLDIVAPGVNVQSTYPGSTYASLNGTSMATPHVAGAAVLVKQKNPSWSNVRIRDHLKNTATSLGSTNLYGSGLVNAFAATR

SEQ ID NO: 62195 - protein, 269 aa, Unidentified
AQSVPWGISRVQAPAAHNRKLTGGGVKVAVLDTGISTHPDLNIRGGASFVPGEPSTQDGEGHGTHVAGTIAALNNNIGVLGVAPSAELYAVKVLSASGQGSVSSIANGLEWAGLNGMHVANLSLGAPSPSATLEQAVNSATSRGVLVVAASGNSGAGSISYPARYANAMAVGATDQNNNRADFSQYGAGLDIVAPGVNVQSTYPGSTYASQNGTSMATPHVAGAAALVKQKNPSWSNVQIRNHLKNTATSLGSTNLYGSGLVNAEAATR

SEQ ID NO: 62196 - protein, 269 aa, Bacillus lentus
AQTIPWGISRVQAPAAHNRGLTGSGVKVAVLDTGISTHPDLNVRGGASFVPGEPSTQDGNGHGTHVAGTIAALNNSIGVLGVAPSAELYAVKVLGADGRGAISSIAQGLEWAGNNGMHVANLSLGSPSPSATLEQAVNSATSRGVLVVAASGNSGASSISYPARYANAMAVGATDQNNNRASFSQYGAGLDIVAPGVNVQSTYPGSTYASLNGTSMATPHVAGVAALVKQKNPSWSNVQIRNHLKNTATGLGNTNLYGSGLVNAEAATR

SEQ ID NO: 62197 - protein, 269 aa, Unidentified
AQSVPWGISRVQAPAAHNRGLRGGGVKVAVLDTGISTHPDLNIRGGASFVPGEPSTQDGNGHGTHVAGTIAALNNSIGVLGVAPSAELYAVKVLSASGGGAISSIAGGLEWAGLNGMHVANLSLGAPSPSATLEQAVNSATSRGVLVVAASGNSGAGSISYPARYANAMAVGATDQNNNRASFSQYGAGLDIVAPGVNVQSTYPGSTYASLNGTSMATPHVAGAAVLVKQKNPSWSNVRIRNHLKNTATSLGSTNLYGSGLVNAEAATR

SEQ ID NO: 62198 - protein, 269 aa, Unidentified
AQSVPWGISRVQAPAAHNRRLWGSGVKVAVLDTGISTHPDLNIRGGASFVPGEPSTQDGNGHGTHVAGTIAALNNSIGVLGVAPSAELYAVKVLGASGAGAISSIAQGLEWAGNNGMHVANLSLGSPSPSATLEQAVNSATSRGVLVVAASGNSGAGSISYPARYANAMAVGATDQDNNRASFSQYGAGLDIVAPGVNVQSTYPQSAYFSLNGTSMATPHVAGAAVLVKQKNPSWSNVRIRNHLKNTATSLGSTNLYGSGLVNAEAATR

SEQ ID NO: 62199 - protein, 269 aa, Unidentified
AQSVPWGISRVQAPAAHNRGLTGSGVKVAVLDTGISTHPDLRIRGGASFVPGEPSTQDGNGHGTHVAGTIAALNNSIGVLGVAPSAELYAVKVLGASGAGAISSIAQGLEWAGNNGMHVANLSLGSPSPSATLEQAVNSATSRGVLVVAASGNSGEGSIDYPARYANAMAVGATDQNNNRADFSQYGAGLDIVAPGVNVQSTYPGSTYASLNGTSMATPHVAGAAVLVKQKNPSWSNVRIRDRLKNTATSLGSTNLYGSGLVNAEAATR

SEQ ID NO: 62200 - protein, 269 aa, Unidentified
AQSVPWGISRVQAPAAHNRRLTGSGVKVAVLDTGISTHPDLNIRGGASFVPGEPSTQDGNGHGTHVAGTIAALNNSIGVLGVAPSAELYAVKVLGASGGGAISSIAQGLEWAGANGMHVANLSLGSPSPSATLEQAVNSATSRGVLVVAASGNSGAGSISYPARYANAMAVGATDQDNNRASFSQYGAGLDIVAPGVNVQSTYPQSAYFSLNGTSMATPHVAGAAVLVKQKNPSWSNVRIRNHLKNTATSLGSTNLYGSGLVNAEAATR

SEQ ID NO: 62201 - protein, 269 aa, Unidentified
AQSVPWGISRVQAPAAHNRGLAGSGVKVAVLDTGISTHPDLNIRGGASFVPGEPSTQDGNGHGTHVAGTIAALNNSIGVLGVAPSAELYAVKVLGASGQGAISSIAQGLEWAGNNGMHVANLSLGSESPSATLEQAVNSATSRGVLVVAASGNSGADSISYPARYANAMAVGATDQNNNRADFSQYGAGLDIVAPGVNVQSTYPGSTYASLNGTSMATPHVAGAAVLVKQKNPSWSNVRIRDHLKNTATSLGSTNLYGSGLVNAFAATR

SEQ ID NO: 62202 - protein, 269 aa, Unidentified
AQTIPWGISRVQAPAAHNRGLTGSGVKVAVLDTGISTHPDLNIRGGASFVPGEPSTQDGNGHGTHVAGTIAALNNSIGVLGVAPSAELYAVKVLGADGRGAISSIAQGLEWAGNNGMHVANLSLGSPSPSATLEQAVNSATSRGVLVVAASGNXGASSISYPARYANAMAVGATDQNNNRASFSQYGPGLDIMAPGVNIQSTYPGSTYASLNGTSMATPHVAGAAALVKQKNPSWSNVQIRNHLKNTATSLGSTNLYGSGLVNAEAATR

SEQ ID NO: 62203 - protein, 269 aa, Unidentified
AQSVPWGISRVQAPAAHNRGLAGSGVKVAVLDTGISTHPDLRIRGGASFVPGEPSTQDGNGHGTHVAGTIAALNNSIGVLGVAPSAELYAVKVLGASGDGSISSIAQGLEWAGNNRMHVANLSLGSESPSATLEQAVNSATSRGVLVVAASGNSGADSISYPARYANAMAVGATDQNNNRADFSQYGAGLDIVAPGVNVQSTYPGSTYASLNGTSMATPHVAGAAVLVKQKNPSWSNVQIRDHLKNTATSLGSTNLYGSGLVNAFAATR

SEQ ID NO: 62204 - protein, 269 aa, Unidentified
AQSVPWGISRVQAPAAHRRRLWGRGVKVAVLDTGISTHPDLNIRGGASFVPGEPSTQDGNGHGTHVAGTIAALDNSIGVLGVAPSAELYAVKVLGASGAGSVSSIAQGLEWAGANGMHVANLSLGSPSPSATLEQAVNSATSRGVLVVAASGNSGAGSISYPARYANAMAVGATDQNNNRASFSQYGAGLDLVAPGVNVQSTYPQSTYFSLNGTSMATPHVAGAAALVKQKNPSWSNVQIRNRLKNTATSLGSTNLYGSGLVNAEAATR

SEQ ID NO: 62205 - protein, 269 aa, Unidentified
AQSVPWGISRVQAPAAHNRGLRGGGVKVAVLDTGISTHPDLNIRGGASFVPGEPSTQDGNGHGTHVAGTIAALNNSIGVLGVAPSAELYAVKVLAASGGGAISSIAQGLEWAGLNGMHVANLSLGAPSPSATLEQAVNSATSRGVLVVAASGNSGAGSISYPARYANAMAVGATDQNNNRASFSQYGAGLDIVAPGVNVQSTYPGSTYASQNGTSMATPHVAGAAVLVKQKNPSWSNVRIRNHLKNTATSLGSTNLYGSGLVNAEAATR

SEQ ID NO: 62206 - protein, 269 aa, Unidentified
AQSVPWGISRVQAPAAHNRGLAGSGVKVAVLDTGISTHPDLNIRGGASFVPGEPSTQDGNGHGTHVAGTIAALNNSIGVLGVAPSAELYAVKVLSASGQGAISSIAQGLEWAGNNGMHVANLSLGSPSPSATLEQAVNSATSRGVLVVAASGNSGADSISYPARYANAMAVGATDQNNNRADFSQYGAGLDIVAPGVNVQSTYPGSTYASLNGTSMATPHVAGAAVLVKQKNPSWSNVRIRDHLKNTATSLGSTNLYGSGLVNAFAATR

SEQ ID NO: 62207 - protein, 269 aa, Unidentified
AQSVPWGIERVQAPAAHNRGLTGSGVKVAVLDTGISTHPDLRIRGGASFVPGEPSTQDGNGHGTHVAGTIAALDNSIGVLGVAPSAELYAVKVLGASGSGSVSSIAQGLEWAGNNGMHVANLSLGSPSPSATLEQAVNSATSRGVLVVAASGNSGAGSISYPARYANAMAVGATDQNNNRASFSQYGPGLDIVAPGVDILSTWPGGTYAVLNGTSMATPHVAGAAALVKQKNPSWSNVQIRNHLKNTATSLGSTNEYGSGLVNAEAATR

SEQ ID NO: 62208 - protein, 275 aa, Unidentified
AQTIPWGISRVQAPAAHNRGLTGSGVKVAVLDTGIXSTHPDLNIRGGASFVPGEPXSTQDGNGHGTHVAGTIAALNNSIGVLGVAPSAELYAVKVLGADGEGAISSIAQGLEWAGNNGMHVANLSLGSPSPSATLEQAVNSATSRGVLVVAASGNSGAXSSISXXXYPARYANAMAVGATDQNNNRASFSQYGPGLDIVAPGVNILSTWPGSTYASLNGTSMATPHVAGAAALVKQKNPSWSNVQIRNHLKNTATSLGSTNLYGSGLVNAEAATR

SEQ ID NO: 62209 - protein, 269 aa, Unidentified
AQSVPWGISRVQAPAAHNRRLTGSGVKVAVLDTGISTHPDLNIRGGASFVPGEPSTQDGNGHGTHVAGTIAALNNRIGVLGVAPSAELYAVKVLGASGGGAISSIAQGLEWAGANGMHVANLSLVSPSPSATLEQAVNSATSRGVLVVAASGNSGAGSISYPARYANAMAVGATDQDNNRASFSQYGAGLDIVAPGVNVQSTYPGSAYASLNGTSMATPHVAGAAVLVKQKNPSWSNVRIRNHLKNTATSLGSTNLYGSGLVNAEAATR

SEQ ID NO: 62210 - protein, 269 aa, Unidentified
AQSVPWGISRVQAPAAHNRGLTGSGVKVAVLDTGISTHPDLNIRGGASFVPGEPSTQDENGHGTHAAGTIAALDNSIGVLGVAPSAELYAVKVLGASGSGAISSIAQGLEWAGNNGMHVANLSLGSPSPSATLEQAVNSATSRGVLVVAASGNSGADSISYPARYANAMAVGATDQNNNRASFSQYGAGLDIVAPGVNVQSTYPGSTYASLNGTSMATPHVAGAAVLVKHKNPSWSNVRIRDHLKKTATSLGSTNLYGSGLVNAEAATR

SEQ ID NO: 62211 - protein, 269 aa, Unidentified
AQSVPWGISRVQAPAAHNRGLAGFGVKVAVLDSGISTHPDLNIRGGASFVPGEPSTQDGNGHGTHVAGTIAALNNSIGVLGVAPSAELYAVKVLGASGGGAISSIAQGLEWAGLNGMHVANLSLGNPSPSATLEQAVNSATSRGVLVVAASGNSGAGSISYPARYANAMAVGATDQNNNRASFSQYGAGLDIVAPGVNVQSTVPGSAYASLNGTSMATPHVAGAAVLVKQKNPSWSNVQIRNHLKNTATSLGSTNLYGSGLVNAEAATR

SEQ ID NO: 62212 - protein, 269 aa, Unidentified
AQSVPWGISRVQAPAAHNRGLAGSGVKVAVLDTGISTHPDLNIRGGASFVPGEPSTQDGNGHGTHVAGTIAALNNSIGVLGVAPSAELYAVKVLGASGGGAISSIAQGLEWAGNNGMHVANLSLGSESPSATLEQAVNSATSRGVLVVAASGNSGEGSISYPARYANAMAVGATDQNNNRADFSQYGAGLDIVAPGVNVQSTYPGSTYASLNGTSMATPHVAGAAVLVKQKNPSWSNVRIRDHLKNTATSLGSTNLYGSGLVNAFAATR

SEQ ID NO: 62213 - protein, 269 aa, Unidentified
AQSVPWGISRVQAPAAHNRGLAGSGVKVAVLDTGISTHPDLNIRGGASFVPGEPSTQDGNGHGTHVAGTIAALNNSIGVLGVAPSAELYAVKVLAASGQGAISSIAQGLEWAGNNGMHVANLSLGSPSPSATLEQAVNSATSRGVLVVAASGNSGADSISYPARYANAMAVGATDQNNNRADFSQYGAGLDIVAPGVNVQSTYPGSTYASLNGTSMATPHVAGAAVLVKQKNPSWSNVRIRDHLKNTATSLGSTNLYGSGLVNAFAATR

SEQ ID NO: 62214 - protein, 269 aa, Unidentified
AQSVPWGISRVQAPAAHNRGLAGSGVKVAVLDTGISTHPDLRIRGGASFVPGEPSTQDGNGHGTHVAGTIAALNNSIGVLGVAPSAELYAVKVLGASGSGAISSIAQGLEWAGNNRMHVANLSLGSESPSATLEQAVNSATSRGVLVVAASGNSGADSISYPARYANAMAVGATDQNNNRADFSQYGAGLDIVAPGVNVQSTYPGSTYASLNGTSMATPHVAGAAVLVKQKNPSWSNVRIRDHLKNTATSLGSTNLYGSGLVNAEAATR

SEQ ID NO: 62215 - protein, 269 aa, Unidentified
AQSVPWGISRVQAPAAHNRGLAGSGVKVAVLDTGISTHPDLNIRGGASFVPGEPSTQDGEGHGTHVAGTIAALNNSIGVLGVAPSAELYAVKVLGASGGGAISSIAQGLEWAGNNGMHVANLSLGSESPSATLEQAVNSATSRGVLVVAASGNSGAGSISYPARYANAMAVGATDQNNNRADFSQYGAGLDIVAPGVNVQSTYPGSTYASLNGTSMATPHVAGAAVLVKQKNPSWSNVRIRDHLKNTATSLGSTNLYGSGLVNAFAATR

SEQ ID NO: 62216 - protein, 269 aa, Unidentified
AQSVPWGISRVQAPAAHNRGLAGRGVKVAVLDTGISTHPDLNIRGGASFVPGEPSTQDGNGHGTHVAGTIAALNNSIGVLGVAPSAELYAVKVLGASGSGAISSIAQGLEWAGNNRMHVANLSLGSESPSATLEQAVNSATSRGVLVVAASGNSGADSISYPARYANAMAVGATDQNNNRADFSQYGAGLDIVAPGVNVQSTYPGSTYASLNGTSMATPHVAGAAVLVKQKNPSWSNVQIRDHLKNTATSLGSTNLYGSGLVNAFAATR

SEQ ID NO: 62217 - protein, 269 aa, Unidentified
AQSVPWGISRVQAPAAHNRRLTGSGVKVAVLDTGISTHPDLNIRGGASFVPGEPSTQDGNGHGTHVAGTIAALNNRIGVLGVAPSAELYAVKVLGASGAGAISSIAQGLEWAGANGMHVANLSLGSPSPSATLEQAVNSATSRGVLVVAASGNSGAGSISYPARYANAMAVGATDQDNNRASFSQYGAGLDLVAPGVNVQSTYPGSTYFSLNGTSMATPHVAGAAVLVKQKNPSWSNVRIRNHLKNTATSLGSTNLYGSGLVNAEAATR

SEQ ID NO: 62218 - protein, 269 aa, Unidentified
AQSVPWGISRVQAPAAHNRGLRGGGVKVAVLDTGISTHPDLNIRGGASFVPGEPSTQDGNGHGTHVAGTIAALNNNIGVLGVAPSAELYAVKVLAASGNGAISSIAQGLEWAGNNGMHVANLSLGAPSPSATLEQAVNSATSRGVLVVAASGNSGAGSISYPARYANAMAVGATDQNNNRASFSQYGAGLDIVAPGVNVQSTYPGSTYASQNGTSMATPHVAGAAVLVKQKNPSWSNVRIRNHLKNTATSLGSTNLYGSGLVNAEAATR

SEQ ID NO: 62219 - protein, 269 aa, Unidentified
AQSVPWGISRVQAPAAHNRGLAGSGVKVAVLDTGISTHPDLNIRGGASFVPGEPSTQDGNGHGTHVAGTIAALNNSIGVLGVAPSAELYAVKVLGASGGGAISSIAQGLEWAGNNGMHVANLSLGSPSPSATLEQAVNSATSRGVLVVAASGNSGEGSISYPARYANAMAVGATDQNNNRADFSQYGAGLDIVAPGVNVQSTYPGSTYASLNGTSMATPHVAGAAVLVKQKNPSWSNVRIRDHLKNTATSLGSTNLYGSGLVNAFVATR

SEQ ID NO: 62220 - protein, 269 aa, Unidentified
AQSVPWGISRVQAPASHNRGLAGSGVKVAVLDSGISTHPDLNIRGGASFVPGEPSTQDGNGHGTHVAGTIAALNNSIGVLGVAPSAELYAVKVLGASGGGAISSIAQGLEWAGANGMHVANLSLGSPSPSATLEQAVNSATSRGVLVVAASGNSGAGSISYPARYANAMAVGATDQNNNRASFSQYGAGLDIVAPGVNVQSTVPQSAYASLNGTSMATPHVAGAAVLVKQKNPSWSNVQIRNHLKNTATSLGSTNLYGSGLVNAEAATR

SEQ ID NO: 62221 - protein, 269 aa, Unidentified
AQSVPWGISRVQAPAAHNRRLWGSGVKVAVLDTGISTHPDLNIRGGASFVPGEPSTQDGNGHGTHVAGTIAALNNSIGVLGVAPSAELYAVKVLGASGAGAISSIAQGLEWAGANGMHVANLSLGSPSPSATLEQAVNSATSRGVLVVAASGNSGAGSISYPARYANAMAVGATDQDNNRASFSQYGAGLDIVAPGVNVQSTYPQSTYFSLNGTSMATPHVAGAAVLVKQKNPSWSNVRIRNHLKNTATSLGSTNLYGSGLVNAEAATR

SEQ ID NO: 62222 - protein, 269 aa, Unidentified
AQSVPWGISRVQAPAAHRRRLWGRGVKVAVLDTGISTHPDLNIRGGASFVPGEPSTQDGNGHGTHVAGTIAALDNSIGVLGVAPSAELYAVKVLGASGSGSVSSIAQGLEWAGANGMHVANLSLGSPSPSATLEQAVNSATSRGVLVVAASGNSGAGSISYPARYANAMAVGATDQDNNRASFSQYGAGLDLVAPGVNVQSTYPGSAYFSLNGTSMATPHVAGAAALVKQKNPSWSNVQIRNRLKNTATSLGSTNLYGSGLVNAEAATR

SEQ ID NO: 62223 - protein, 269 aa, Unidentified
AQSVPWGISRVQAPAAHNRGLAGSGVKVAVLDTGISTHPDLNIRGGASFVPGEPSTQDGNGHGTHVAGTIAALNNSIGVLGVAPSAELYAVKVLGASGGGAISSIAQGLEWAGNNGMHVANLSLGSPSPSATLEQAVNSATSRGVLVVAASGNSGADSISYPARYANAMAVGATDQNNNRADFSQYGAGLDIVAPGVNVQSTYPGSAYASLNGTSMATPHVAGAAVLVKQKNPSWSNVRIRDHLKNTATSLGSTNLYGSGLVNAFAATR

SEQ ID NO: 62224 - protein, 269 aa, Unidentified
AQSVPWGISRVQAPAAHNRGLTGSGVKVAVLDTGISTHPDLNIRGGASFVPGEPSTQDGDGHGTHVAGTIAALNNSIGVLGVAPSAELYAVKVLGASGGGAISSIAQGLEWAGNNGMHVANLSLGSPSPSATLEQAVNSATSRGVLVVAASGNSGADSISYPARYANAMAVGATDQNNNRASFSQYGAGLDIVAPGVNVQSTYPGSRYASLNGTSMATPHVAGAAVLVKHKNPSWSNVRIRDHLKKTATSLGSTNLYGSGLVNAEAATR

SEQ ID NO: 62225 - protein, 269 aa, Unidentified
AQSVPWGISRVQAPAAHNRGLTGSGVKVAVLDTGISTHPDLNIRGGASFVPGEPSTQDGNGHGTHVAGTIAALNNSIGVLGVAPSAELYAVKVLGASGGGAISSIAQGLEWAGNNGMHVANLSLGSQAPSATLEQAVNSATSRGVLVVAASGNSGEGSISYPARYANAMAVGATDQNNNRADFSQYGAGLDIVAPGVNVQSTYPGSTYASLNGTSMATPHVAGAAVLVKQKNPSWSNVRIRDRLKNTATSLGSTNLYGSGLVNAEAATR

SEQ ID NO: 62226 - protein, 275 aa, Unidentified
AQTIPWGISRVQAPAAHNRGLTGSGVKVAVLDTGIXSTHPDLRIRGGASFVPGEPXSTQDGNGHGTHVAGTIAALDNSIGVLGVAPSAELYAVKVLGADGEGAISSIAQGLEWAGNNGMHVANLSLGSPSPSATLEQAVNSATSRGVLVVAASGNSGAXSSISXXXYPARYANAMAVGATDQNNNRASFSQYGAGLDIVAPGVNIQSTWPGSTYASLNGTSMATPHVAGAAALVKQKNPSWSNVQIRNHLKNTATSLGSTNLYGSGLVNAEAATR

SEQ ID NO: 62227 - protein, 269 aa, Unidentified
AQSVPWGISRVQAPAAHNRRLTGSGVKVAVLDTGISTHPDLNIRGGASFVPGEPSTQDGNGHGTHVAGTIAALNNRIGVLGVAPSAELYAVKVLGASGGGAISSIAQGLEWAGANGMHVANLSLGSPSVSATLEQAVNSATSRGVLVVAASGNSGAGSISYPARYANAMAVGATDQDNNRASFSQYGAGLDIVAPGVNVQSTYPGSAYASLNGTSMATPHVAGAAVLVKQKNPSWSNVRIRNHLKNTATSLGSTNLYGSGLVNAEAATR

SEQ ID NO: 62228 - protein, 269 aa, Unidentified
AQSVPWGISRVQAPAAHNRGLAGRGVKVAVLDTGISTHPDLRIRGGASFVPGEPSTQDGNGHGTHVAGTIAALNNSIGVLGVAPSAELYAVKVLGASGSGAISSIAQGLEWAGNNRMHVANLSLGSPSPSATLEQAVNSATSRGVLVVAASGNSGADSISYPARYANAMAVGATDQNNNRADFSQYGAGLDIVAPGVNVQSTYPGSTYASDNGTSMATPHVAGAAVLVKQKNPSWSNVQIRDHLKNTATSLGSTNLYGSGLVNAEAATR

SEQ ID NO: 62229 - protein, 269 aa, Unidentified
AQSVPWGISRVQAPAAHNRGLAGRGVKVAVLDTGISTHPDLNIRGGASFVPGEPSTQDGNGHGTHVAGTIAALNNSIGVLGVAPSAELYAVKVLGASGDGSISSIAQGLEWAGNNRMHVANLSLGSESPSATLEQAVNSATSRGVLVVAASGNSGADSISYPARYANAMAVGATDQNNNRADFSQYGAGLDIVAPGVNVQSTYPGSTYASLNGTSMATPHVAGAAVLVKQKNPSWSNVRIRDHLKNTATSLGSTNLYGSGLVNAEAATR

SEQ ID NO: 62230 - protein, 269 aa, Unidentified
AQSVPWGISRVQAPAAHNRGLAGGGVKVAVLDTGISTHPDLNIRGGASFVPGEPSTQDGNGHGTHVAGTIAALNNSIGVLGVAPSAELYAVKVLGASGNGAISSIAQGLEWAGNNGMHVANLSLGSPSPSATLEQAVNSATSRGVLVVAASGNSGADSISYPARYANAMAVGATDQNNNRADFSQYGAGLDIVAPGVNVQSTYPGSTYASLNGTSMATPHVAGAAVLVKQKNPSWSNVRIRDHLKNTATSLGSTNLYGSGLVNAFAATR

SEQ ID NO: 62231 - protein, 269 aa, Unidentified
AQSVPWGISRVQAPAAHNRGLRGGGVKVAVLDTGISTHPDLNIRGGASFVPGEPSTQDGNGHGTHVAGTIAALNNSIGVLGVAPSAELYAVKVLAASGGGAISSIAGGLEWAGLNGMHVANLSLGSPSPSATLEQAVNSATSRGVLVVAASGNSGAGSISYPARYANAMAVGATDQNNNRASFSQYGAGLDIVAPGVNVQSTYPGSTYASQNGTSMATPHVAGAAVLVKQKNPSWSNVRIRNHLKNTATSLGSTNLYGSGLVNAEAATR

SEQ ID NO: 62232 - protein, 269 aa, Unidentified
AQSVPWGISRVQAPAAHNRGLAGSGVKVAVLDTGISTHPDLNIRGGASFVPGEPSTQDGNGHGTHVAGTIAALNNSIGVLGVAPSAELYAVKVLGASGGGAISSIAQGLEWAGNNGMHVANLSLGSPSPSATLEQAVNSATSRGVLVVAASGNSGADSISYPARYANAMAVGATDQNNNRADFSQYGAGLDIVAPGVNVQSTYPGSTYASLNGTSMATPHVAGAAVLVKQKNPSWSNVRIRDRLKNTATSLGSTNLYGSGLVNAFAATR

SEQ ID NO: 62233 - protein, 269 aa, Unidentified
AQSVPWGISRVQAPAAHNRGLAGSGVKVAVLDTGISTHPDLRIRGGASFVPGEPSTQDGNGHGTHVAGTIAALDNSIGVLGVAPSAELYAVKVLGASGGGAISSIAQGLEWAGNNGMHVANLSLGSPSPSATLEQAVNSATSRGVLVVAASGNSGAGSISYPARYANAMAVGATDQNNNRADFSQYGAGLDIVAPGVNVQSTYPGSTYASLNGTSMATPHVAGAAVLVKQKNPSWSNVRIRDHLKNTATSLGSTNLYGSGLVNAFAATR

SEQ ID NO: 62234 - protein, 269 aa, Unidentified
AQSVPWGISRVQAPAAHNRGLAGSGVKVAVLDTGISTHPDLNIRGGASFVPGEPSTQDGNGHGTHVAGTIAALNNNIGVLGVAPSAELYAVKVLGASGNGAISSIAQGLEWAGNNGMHVANLSLGSPSPSATLEQAVNSATSRGVLVVAASGNSGADSISYPARYANAMAVGATDQNNNRADFSQYGAGLDIVAPGVNVQSTYPGSTYASLNGTSMATPHVAGAAVLVKQKNPSWSNVRIRDHLKNTATSLGSTNLYGSGLVNAFAATR

SEQ ID NO: 62235 - protein, 269 aa, Unidentified
AQSVPWGISRVQAPAAHNRGLAGSGVKVAVLDTGISTHPDLNIRGGASFVPGEPSTQDGNGHGTHVAGTIAALNNSIGVLGVAPSAELYAVKVLGASGGGAISSIAQGLEWAGNNGMHVANLSLGSPSPSATLEQAVNSATSRGVLVVAASGNSGADSISYPARYANAMAVGATDQNNNRADFSQYGAGLDIVAPGVNVQSTYPGSTYASLNGTSMATPHVAGAAVLVKQKNPSWSNVRIRDHLKNTATSLGSTNLYGSGLVNAFVATR

SEQ ID NO: 62236 - protein, 269 aa, Unidentified
AQSVPWGISRVQAPAAHNRGLTGRGVKVAVLDTGISTHPDLNIRGGASFVPGEPSTQDGNGHGTHVAGTIAALDNSIGVLGVAPSAELYAVKVLGASGGGAISSIAQGLEWAGNNGMHVANLSLGSPSPSATLEQAVNSATSRGVLVVAASGNSGDGSISYPARYANAMAVGATDQNNNRASFSQYGAGLDIVAPGVNVQSTYPGSTYASLNGTSMATPHVAGAAVLVKQKNPSWSNVRIRDRLKNTATSLGSTNLYGSGLVNAFAATR

SEQ ID NO: 62237 - protein, 275 aa, Unidentified
AQTIPWGISRVQAPAAHNRGLTGSGVKVAVLDTGIXSTHPDLRIRGGASFVPGEPXSTQDGNGHGTHVAGTIAALNNSIGVLGVAPSAELYAVKVLGADGEGAISSIAQGLEWAGNNGMHVANLSLGSPSPSATLEQAVNSATSRGVLVVAASGNSGEXSSISXXXYPARYANAMAVGATDQNNNRASFSQYGAGLDIVAPGVNIQSTWPGSTYASLNGTSMATPHVAGAAALVKQKNPSWSNVQIRNHLKNTATSLGSTNLYGSGLVNAEAATR

SEQ ID NO: 62238 - protein, 269 aa, Alkalihalobacillus clausii
AQSVPWGIERVQAPAAHNRGLTGSGVKVAVLDTGISTHPDLRIRGGASFVPGEPSTQDGNGHGTHVAGTIAALDNSIGVLGVAPSEALYAVKVLGASGSGSVSSIAQGLEWAGNNGMHVANLSLGSPSPSATLEQAVNSATSRGVLVVAASGNSGAGSISYPARYANAMAVGATDQNNNRASFSQYGAGLDIVAPGVNILSTWPGSTYASLNGTSMATPHVAGAAALVKQKNPSWSNVQIRNHLKNTATSLGDTWEYGSGLVNAEAATR

SEQ ID NO: 62239 - protein, 269 aa, Unidentified
AQSVPWGISRVQAPAAHNRRLTGSGVKVAVLDTGISTHPDLNIRGGASFVPGEPSTQDGNGHGTHVAGTIAALNNSIGVLGVAPSAELYAVKVLGASSGGAISSIAQGLEWAGANGMHVANLSLGSPSPSATLEQAVNSATSRGVLVVAASGNSGAGSISYPARYANAMAVGATDQDNNRASFSQYGAGLDIVAPGVNVQSTYPGSAYFSLNGTSMATPHVAGAAVLVKQKNPSWSNVRIRNHLKNTATSLGSTNLYGSGLVNAEAATR

SEQ ID NO: 62240 - protein, 269 aa, Unidentified
AQSVPWGISRVQAPAAHNRGLAGFGVKVAVLDTGISTHPDLNIRGGASFVPGEPSTQDGNGHGTHVAGTIAALNNSIGVLGVAPSAELYAVKVLGASGGGAISSIAQGLEWAGANGMHVANLSLGNPSPSATLEQAVNSATSRGVLVVAASGNSGAGSISYPARYANAMAVGATDQNNNRASFSQYGAGLDIVAPGVNVQSTVPQSAYASLNGTSMATPHVAGAAVLVKQKNPSWSNVQIRNHLKNTATSLGSTNLYGSGLVNAEAATR

SEQ ID NO: 62241 - protein, 269 aa, Unidentified
AQSVPWGISRVQAPAAHNRGLAGSGVKVAVLDTGISTHPDLNIRGGASFVPGEPSTQDGNGHGTHVAGTIAALNNSIGVLGVAPSAELYAVKVLGASGGGAISSIAQGLEWAGNNGMHVANLSLGNESPSATLEQAVNSATSRGVLVVAASGNSGEGSISYPARYANAMAVGATDQNNNRASFSQYGAGLDIVAPGVNVQSTYPGSTYASLNGTSMATPHVAGAAVLVKQKRPSWSNVRIRDHLKNTATSLGSTNLYGSGLVNAEAATR

SEQ ID NO: 62242 - protein, 269 aa, Unidentified
AQSVPWGISRVQAPAAHRRRLWGRGVKVAVLDTGISTHPDLNIRGGASFVPGEPSTQDGNGHGTHVAGTIAALDNSIGVLGVAPSAELYAVKVLGASGAGSVSSIAQGLEWAGANGMHVANLSLGSPSPSATLEQAVNSATSRGVLVVAASGNSGAGSISYPARYANAMAVGATDQDNNRASFSQYGAGLDIVAPGVNVQSTYPQSTYFSLNGTSMATPHVAGAAALVKQKNPSWSNVQIRNRLKNTATSLGSTNLYGSGLVNAEAATR

SEQ ID NO: 62243 - protein, 269 aa, Unidentified
AQSVPWGISRVQAPAAHNRGLAGSGVKVAVLDTGISTHPDLNIRGGASFVPGEPSTQDGNGHGTHAAGTIAALNNSIGVLGVAPSAELYAVKVLGASGGGAISSIAQGLEWAGNNGMHVANLSLGSPSPSATLEQAVNSATSRGVLVVAASGNSGADSISYPARYANAMAVGATDQNNNRADFSQYGAGLDIVAPGVNVQSTYPGSTYASLNGTSMATPHVAGAAVLVKQKNPSWSNVRIRDHLKNTATSLGSTNLYGSGLVNAFAATR

SEQ ID NO: 62244 - protein, 269 aa, Unidentified
AQSVPWGISRVQAPAAHNRGLTGSGVKVAVLDTGISTHPDLNIRGGASFVPGEPSTQDGNGHGTHVAGTIAALNNSIGVLGVAPSAELYAVKVLGASGGGAISSIAQGLEWAGNNGMHVANLSLGSQSPSATLEQAVNSATSRGVLVVAASGNSGEGSISYPARYANAMAVGATDQNNNRADFSQYGDGLDIVAPGVNVQSTYPGSTYASLNGTSMATPHVAGAAVLVKQKNPSWSNVRIRDRLKNTATSLGSTNLYGSGLVNAEAATR

SEQ ID NO: 62245 - protein, 269 aa, Lederbergia lentus
AQTIPWGISRVQAPAAHNRGLTGSGVKVAVLDTGISTHPDLNIRGGASFVPGEPSTQDGNGHGTHVAGTIAALNNSIGVLGVAPSAELYAVKVLGADGEGAISSIAQGLEWAGNNGMHVANLSLGSPSPSATLEQAVNSATSRGVLVVAASGNDGASSISYPARYANAMAVGATDQNNNRASFSQYGAGLDIVAPGVNILSTWPGSTYASLNGTSMATPHVAGAAALVKQKNPSWSNVQIRNHLKNTATSLGSTNLYGSGLVNAEAATR

SEQ ID NO: 62246 - protein, 269 aa, Unidentified
AQSVPWGISRVQAPAAHRRRLTGRGVKVAVLDTGISTHPDLNIRGGASFVPGEPSTQDGNGHGTHVAGTIAALDNSIGVLGVAPSAELYAVKVLGASGSGSISSIAQGLEWAGANGMHVANLSLGSPSPSATLEQAVNSATSRGVLVVAASGNSGAGSISYPARYANAMAVGATDQNNNRASFSQYGAGLDIVAPGVNVQSTYPQSAYFSLNGTSMATPHVAGAAALVKQKNPSWSNVRIRNRLKNTATSLGSTNLYGSGLVNAEAATR

SEQ ID NO: 62247 - protein, 269 aa, Unidentified
AQSVPWGISRVQAPAAHNRGLAGRGVKVAVLDTGISTHPDLRIRGGASFVPGEPSTQDGNGHGTHVAGTIAALNNSIGVLGVAPSAELYAVKVLGASGGGAISSIAQGLEWAGNNGMHVANLSLGSPSPSATLEQAVNSATSRGVLVVAASGNSGAGSISYPARYANAMAVGATDQNNNRADFSQYGAGLDIVAPGVNVQSTYPGSTYASLNGTSMATPHVAGAAVLVKQKNPSWSNVRIRDHLKNTATSLGSTNLYGSGLVNAFAATR

SEQ ID NO: 62248 - protein, 269 aa, Unidentified
AQSVPWGISRVQAPAAHNRGLAGRGVKVAVLDTGISTHPDLRIRGGASFVPGEPSTQDGNGHGTHVAGTIAALNNSIGVLGVAPSAELYAVKVLGASGDGAISSIAQGLEWAGNNGMHVANLSLGSPSPSATLEQAVNSATSRGVLVVAASGNSGADSISYPARYANAMAVGATDQNNNRADFSQYGAGLDIVAPGVNVQSTYPGSTYASLNGTSMATPHVAGAAVLVKQKNPSWSNVRIRDHLKNTATSLGSTNLYGSGLVNAEAATR

SEQ ID NO: 62249 - protein, 269 aa, Unidentified
AQSVPWGISRVQAPAAHNRGLAGFGVKVAVLDTGISTHPDLNIRGGASFVPGEPSTQDGNGHGTHVAGTIAALNNSIGVLGVAPSAELYAVKVLGASGGGAISSIAQGLEWAGLNVMHVANLSLGSPSPSATLEQAVNSATSRGVLVVAASGNSGAGSISYPARYANAMAVGATDQNNNRASFSQYGAGLDIVAPGVNVQSTAPQSAYASLNGTSMATPHVAGAAVLVKQKNPSWSNVQIRNHLKNTATSLGSTNLYGSGLVNAEAATR

SEQ ID NO: 62250 - protein, 269 aa, Unidentified
AQTIPWGISRVQAPAAHNRGLTGSGVKVAVLDTGISTHPDLNIRGGASFVPGEPSTQDGNGHGTHVAGTIAALNNSIGVLGVAPSAELYAVKVLGADGRGAISSIAQGLEWAGNNGMHVANLSLGSPSPSATLEQAVNSATSRGVLVVAASGNSGASSISYPARYANAMAVGATDQNNNRASFSQYGPGLDIMAPGVNIQSTYPGSTYASXNGTSMATPHVAGAAALVKQKNPSWSNVQIRNHLKNTATSLGSTNLYGSGLVNAEAATR

SEQ ID NO: 62251 - protein, 269 aa, Unidentified
AQSVPWGIERVQAPAAHNRGLTGSGVKVAVLDTGISTHPDLNIRGGASFVPGEPSTQDENGHGTHVAGTIAALDNSIGVLGVAPSAELYAVKVLGASGSGSVSSIAQGLEWAGNNGMHVANLSLGSPSPSATLEHAVNHATSHGVLVVAASGNSGEPEISYPARYANAMAVGATDQNNNRASFSQYGAGLDIVAPGVNVLSTYPGSTYASLNGTSMATPHVAGAAALVKQKNPSWSNVQIRNHLKNTATSLGSTNEYGSGLVNAEAATR

SEQ ID NO: 62252 - protein, 275 aa, Unidentified
AQTIPWGISRVQAPAAHNRGLTGSGVKVAVLDTGIXSTHPDLRIRGGASFVPGEPXSTQDGNGHGTHVAGTIAALNNSIGVLGVAPSAELYAVKVLGADGEGAISSIAQGLEWAGNNGMHVANLSLGSPSPSATLEQAVNSATSRGVLVVAASGNSGAXSSISXXXYPARYANAMAVGATDQNNNRASFSQYGAGLDIVAPGVNIQSTWPGSTYASLNGTSMATPHVAGAAALVKQKNPSWSNVQIRNHLKNTATSLGDTNLYGSGLVNAEAATR

SEQ ID NO: 62253 - protein, 269 aa, Unidentified
AQSVPWGISRVQAPAAHNRGLAGSGVKVAVLDTGISTHPDLNIRGGASFVPGEPSTQDGNGHGTHVAGTIAALNNSIGVLGVAPSAELYAVKVLGASGGGAISSIAQGLEWAGNNGMHVANLSLGSPSPSATLEQAVNSATSRGVLVVAASGNSGADSISYPARYANAMAVGATDQNNNRADFSQYGAGLDIVAPGVNVQSTYPGSTYASLNGTSMATPHVAGAATLVKQKNPSWSNARIRHHLKNTATSLGSTNLYGSGLVNAHAATR

SEQ ID NO: 62254 - protein, 269 aa, Unidentified
AQSVPWGISRVQAPAAHNRGLRGGGVKVAVLDTGISTHPDLNIRGGASFVPGEPSTQDGNGHGTHVAGTIAALNNNIGVLGVAPSAELYAVKVLAASGGGAISSIAQGLEWAGLNGMHVANLSLGSPSPSATLEQAVNSATSRGVLVVAASGNSGAGSISYPARYANAMAVGATDQNNNRASFSQYGAGLDIVAPGVNVQSTYPGSTYASQNGTSMATPHVAGAAVLVKQKNPSWSNVRIRNHLKNTATSLGSTNLYGSGLVNAEAATR

SEQ ID NO: 62255 - protein, 269 aa, Unidentified
AQSVPWGISRVQAPAAHNRGLAGSGVKVAVLDTGISTHPDLNIRGGASFVPGEPSTQDGNGHGTHVAGTIAALNNSIGVLGVAPSAELYAVKVLGASGQGAISSIAQGLEWAGNNGMHVANLSIGSPSPSATLEQAVNSATSRGVLVVAASGNSGADSISYPARYANAMAVGATDQNNNRADFSQYGAGLDIVAPGVNVQSTYPGSTYASLNGTSMATPHVAGAAVLVKQKNPSWSNVRIRDHLKNTATSLGSTNLYGSGLVNAFAATR

SEQ ID NO: 62256 - protein, 269 aa, Unidentified
AQSVPWGISRVQAPASHNRGLTGFGVKVAVLDSGISTHPDLNIRGGASFVPGEPSTQDGNGHGTHVAGTIAALNNSIGVLGVAPSAELYAVKVLGASGGGAISSIAQGLEWAGANGMHVANLSLGSPSPSATLEQAVNSATSRGVLVVAASGNSGAGSISYPARYANAMAVGATDQNNNRASFSQYGAGLDIVAPGVNVQSTVPQSAYASLNGTSMATPHVAGAAVLVKQKNPSWSNVQIRNHLKNTATSLGSTNLYGSGLVNAEAATR

SEQ ID NO: 62257 - protein, 269 aa, Unidentified
AQSVPWGISRVQAPAAHNRGLTGRGVKVAVLDTGISTHPDLNIRGGASFVPGEPSTQDGNGHGTHVAGTIAALNNSIGVLGVAPSAELYAVKVLGASGGGAISSIAQGLEWAGNNGMHVANLSLGSESPSATLEQAVNSATSRGVLVVAASGNSGEGSISYPARYANAMAVGATDQNNNRADFSQYGAGLDIVAPGVNVQSTYPGSTYASLNGTSMATPHVAGAAVLVKQKNPSWSNVRIRDRLKNTATSLGSTNLYGSGLVNAEAATR

SEQ ID NO: 62258 - protein, 269 aa, Unidentified
AQTIPWGISRVQAPAAHNRGLTGSGVKVAVLDTGISTHPDLNIRGGASFVPGEPSTQDGNGHGTHVAGTIAALNNSIGVLGVAPSAELYAVKVLGADGXGAISSIAQGLEWAGNNGMHVANLSLGSPSPSATLEQAVNSATSRGVLVVAASGNSGASSISYPARYANAMAVGATDQNNNRASFSQYGPGLDIMAPGVNIQSTYPGSTYASXNGTSMATPHVAGAAALVKQKNPSWSNVQIRNHLKNTATSLGSTNLYGSGLVNAEAATR

SEQ ID NO: 62259 - protein, 269 aa, Unidentified
AQSVPWGISRVQAPASHNRGLTGFGVKVAVLDSGISTHPDLNIRGGASFVPGEPSTQDGNGHGTHVAGTIAALNNSIGVLGVAPSAELYAVKVLGASGGGAISSIAQGLEWAGLNGMHVANLSLGNPSPSATLEQAVNSATSRGVLVVAASGNSGAGSISYPARYANAMAVGATDQNNNRASFSQYGAGLDIVAPGVNVQSTVPGSAYASLNGTSMATPHVAGAAVLVKQKNPSWSNVQIRNHLKNTATSLGSTNLYGSGLVNAEAATR

SEQ ID NO: 62260 - protein, 269 aa, Unidentified
AQSVPWGISRVQAPAAHNRGLTGSGVKVAVLDTGISTHPDLNIRGGASFVPGEPSTQDGNGHGTHVAGTIAALNNSIGVLGVAPSAELYAVKVLGASGGAAISSIAQGLEWAGNNGMHVANLSLGSPSPSATLEQAVNSATSRGVLVVAASGNSGADSISYPARYANAMAVGATDQNNNRASFSQYGAGLDIVAPGVNVQSTYPGGTYASLNGTSMATPHVAGAAVLVKHKNPSWSNVRIRDHLKKTATSLGSTNLYGSGLVNAEAATR

SEQ ID NO: 62261 - protein, 269 aa, Unidentified
AQSVPWGISRVQAPAAHNRGLTGRGVKTAVLDTGISTHPDLNIRGGASFVPGEPSTQDGNGHGTHVAGTIAALDNNIGVLGVAPRAELYAVKVLGASGSGSVSSIAQGLEWAGNNRMHVANLSLGLQAPSATLEQAVNSATSRGVLVVAASGNSGAGSISYPARYANAMAVGATDQNNNRASFSQYGDGLDIVAPGVNVLSTYPGSTYASLNGTSMATPHVAGAAALVKQKNPSWSNVQIRNHLKNTATSLGSTNLYGSGLVNAEAATR

SEQ ID NO: 62262 - protein, 269 aa, Unidentified
AQSVPWGISRVQAPAAHNRGLAGSGVKVAVLDTGISTHPDLNIRGGASFVPGEPSTQDGNGHGTHVAGTIAALNNSIGVLGVAPSAELYAVKVLGASGQGAISSIAQGLEWAGNNGMHVANLSLGSSSPSATLEQAVNSATSRGVLVVAASGNSGADSISYPARYANAMAVGATDQNNNRADFSQYGAGLDIVAPGVNVQSTYPGSTYASLNGTSMATPHVAGAAVLVKQKNPSWSNVRIRDHLKNTATSLGSTNLYGSGLVNAFAATR

SEQ ID NO: 62263 - protein, 269 aa, Bacillus lentus
AQTIPWGISRVQAPAAHNRGLTGSGVKVAVLDTGISTHPDLNIRGGASFVPGEPSTQDGNGHGTHVAGTIAALNNSIGVLGVAPSAELYAVKVLGADGRGAISSIAQGLEWAGNNGMHVANLSLGSPSPSATLEQAVNSATSRGVLVVAASGNSGASSISYPARYANAMAVGATDQNNNRASFSQYGAGLDIVAPGVNVQSTYPGSTYASQNGTSMATPHVAGVAALVKQKNPSWSNVQIRNHLKNTATGLGNTNLYGSGLVNAEAATR

SEQ ID NO: 62264 - protein, 269 aa, Unidentified
AQSVPWGISRVQAPAAHNRGLTGSGVKVAVLDTGISTHPDLNIRGGASFVPGEPSTQDENGHGTHAAGTIAALNNSIGVLGVAPSAELYAVKVLGASGSGAISSIAQGLEWAGNNGMHVANLSLGSPSPSATLEQAVNSATSRGVLVVAASGNSGADSIVYPARYANAMAVGATDQNNNRASFSQYGAGLDIVAPGVNVQSTYPGSTYASLNGTSMATPHVAGAAVLVKHKNPSWSNVRIRDHLKKTATSLGSTNLYGSGLVNAEAATR

SEQ ID NO: 62265 - protein, 275 aa, Unidentified
AQTIPWGIERVQAPAAHNRGLTGSGVKVAVLDTGIXSTHPDLRIRGGASFVPGEPXSTQDGNGHGTHVAGTIAALNNSIGVLGVAPSAELYAVKVLGADGEGAISSIAQGLEWAGNNGMHVANLSLGSPSPSATLEQAVNSATSRGVLVVAASGNSGAXSSISXXXYPARYANAMAVGATDQNNNRASFSQYGAGLDIVAPGVNIQSTWPGSTYASLNGTSMATPHVAGAAALVKQKNPSWSNVQIRNHLKNTATSLGSTNLYGSGLVNAEAATR

SEQ ID NO: 62266 - protein, 269 aa, Unidentified
AQSVPWGISRVQAPAAHNRGLAGSGVKVAVLDTGISTHPDLRIRGGASFVPGEPSTQDGNGHGTHVAGTIAALNNSIGVLGVAPSAELYAVKVLGASGDGAISSIAQGLEWAGNNRMHVANLSLGSESPSATLEQAVNSATSRGVLVVAASGNSGADSISYPARYANAMAVGATDQNNNRADFSQYGAGLDIVAPGVNVQSTYPGSTYASDNGTSMATPHVAGAAVLVKQKNPSWSNVQIRNHLKNTATSLGSTNLYGSGLVNAEAATR

SEQ ID NO: 62267 - protein, 269 aa, Unidentified
AQSVPWGISRVQAPAAHNRGLTGRGVKVAVLDTGISTHPDLNIRGGASFVPGEPSTQDGNGHGTHVAGTIAALNNSIGVLGVAPSAELYAVKVLGASGGGAISSIAQGLEWAGNNGMHVANLSLGLPSPSATLEQAVNSATSRGVLVVAASGNSGEGSISYPARYANAMAVGATDQNNNRADFSQYGAGLDIVAPGVNVQSTYPGSTYASLNGTSMATPHVAGAAVLVKQKNPSWSNVRIRDRLKNTATSLGSTNLYGSGLVNAEAATR

SEQ ID NO: 62268 - protein, 269 aa, Unidentified
AQSVPWGISRVQAPAAHNRGLTGSGVKVAVLDTGISTHPDLNIRGGASFVPGEPSTQDGNGHGTHVAGTIAALNNSIGVLGVAPSAELYAVKVLGASGAGAISSIAQGLEWAGNNGMHVANLSLGSPSPSATLEQAVNSATSRGVLVVAASGNSGEGSISYPARYANAMAVGATDQNNNRADFSQYGAGLDIVAPGVNVQSTYPGSTYASFNGTSMATPHVAGAAVLVKQKNPSWSNVRIRDRLKNTATSLGSTNLYGSGLVNAFAATR

SEQ ID NO: 62269 - protein, 269 aa, Unidentified
AQSVPWGISRVQAPASHNRGLTGFGVKVAVLDTGISTHPDLNIRGGASFVPGEPSTQDGNGHGTHVAGTIAALNNSIGVLGVAPSAELYAVKVLGASGGGAISSIAQGLEWAGANGMHVANLSLGNPDPSATLEQAVNSATSRGVLVVAASGNSGAGSISYPARYANAMAVGATDQNNNRASFSQYGAGLDIVAPGVNVQSTVPGSAYASLNGTSMATPHVAGAAVLVKQKNPSWSNVQIRNHLKNTATSLGSTNLYGSGLVNAEAATR

SEQ ID NO: 62270 - protein, 275 aa, Unidentified
AQTIPWGISRVQAPAAHNRGLTGSGVKVAVLDTGIXSTHPDLRIRGGASFVPGEPXSTQDGNGHGTHVAGTIAALNNSIGVLGVAPSAELYAVKVLGADGEGAISSIAQGLEWAGNNGMHVANLSLGSPSPSATLEQAVNSATSRGVLVVAASGNSGAXSSISXXXYPARYANAMAVGATDQNNNRASFSQYGAGLDIVAPGVNIQSTWPGSTYASLNGTSMATPHVAGAAALVKQKNPSWSNVQIRNHLKNTATSLGSTNEYGSGLVNAEAATR

SEQ ID NO: 62271 - protein, 269 aa, Unidentified
AQSVPWGISRVQAPAAHNRGLAGSGVKVAVLDTGISTHPDLNIRGGASFVPGEPSTQDGNGHGTHVAGTIAALDNSIGVLGVAPSAELYAVKVLGASGQGAISSIAQGLEWAGNNGMHVANLSLGSPSPSATLEQAVNSATSRGVLVVAASGNSGADSISYPARYANAMAVGATDQNNNRADFSQYGAGLDIVAPGVNVQSTYPGSTYASLNGTSMATPHVAGAAVLVKQKNPSWSNVRIRDHLKNTATSLGSTNLYGSGLVNAFAATR

SEQ ID NO: 62272 - protein, 269 aa, Unidentified
AQSVPWGIGRVQAPAAHNRGLAGSGVKVAVLDTGISTHPDLNIRGGASFVPGEPSTQDGNGHGTHVAGTIAALNNNIGVLGVAPSAELYAVKVLGASGQGAISSIAGGLEWAGNNGMHVANLSLGAPSPSATLEQAVNSATSRGVLVVAASGNSGAGSISYPARYANAMAVGATDQNNNRASFSQYGAGLDIVAPGVNVQSTYPGSTYASQNGTSMATPHVAGAAVLVKQKNPSWSNVRIRNHLKNTATSLGSTNLYGSGLVNAEAATR

SEQ ID NO: 62273 - protein, 269 aa, Unidentified
AQSVPWGISRVQAPASHNRGLAGFGVKVAVLDTGISTHPDLNIRGGASFVPGEPSTQDGNGHGTHVAGTIAALNNSIGVLGVAPSAELYAVKVLGASGGGAISSIAQGLEWAGLNGMHVANLSLGSPSPSATLEQAVNSATSRGVLVVAASGNSGAGSISYPARYANAMAVGATDQNNNRASFSQYGAGLDIVAPGVNVQSTAPQSAYASLNGTSMATPHVAGAAVLVKQKNPSWSNVQIRNHLKNTATSLGSTNLYGSGLVNAEAATR

SEQ ID NO: 62274 - protein, 269 aa, Unidentified
AQSVPWGISRVQAPAAHNRGLAGRGVKVAVLDTGISTHPDLNIRGGASFVPGEPSTQDGNGHGTHVAGTIAALNNSIGVLGVAPSAELYAVKVLGASGGGAISSIAQGLEWAGNNGMHVANLSLGSESPSATLEQAVNSATSRGVLVVAASGNSGEESISYPARYANAMAVGATDQNNNRASFSQYGAGLDIVAPGVNVQSTYPGSTYASLNGTSMATPHVAGAAVLVKQKNPSWSNVRIRDHLKNTATSLGSTNLYGSGLVNAEAATR

SEQ ID NO: 62275 - protein, 269 aa, Unidentified
AQSVPWGISRVQAPAAHRRGLTGRGVKVAVLDTGISTHPDLNIRGGASFVPGEPSTQDGNGHGTHVAGTIAALDNNIGVLGVAPRAELYAVKVLGASGSGSVSSIAQGLEWAGNNRMHVANLSLGLQAPSATLEQAVNSATSRGVLVVAASGNSGAGSISYPARYANAMAVGATDQNNNRASFSQYGAGLDIVAPGVNVLSTYPGSTYASLNGTSMATPHVAGAAALVKQKNPSWSNVQIRNRLKNTATSLGSTNLYGSGLVNAEAATR

SEQ ID NO: 62276 - protein, 269 aa, Unidentified
AQSVPWGISRVQAPAAHNRGLTGSGVKVAVLDTGISTHPDLRIRGGASFVPGEPSTQDGNGHGTHVAGTIAALDNSIGVLGVAPSAELYAVKVLGASGAGAISSIAQGLEWAGNNGMHVANLSLGSPSPSATLEQAVNSATSRGVLVVAASGNSGDGSISYPARYANAMAVGATDQNNNRASFSQYGAGLDIVAPGVNVQSTYPGSTYASLNGTSMATPHVAGAAVLVKQKNPSWSNVRIRDRLKNTATSLGSTNLYGSGLVNAFAATR

SEQ ID NO: 62277 - protein, 269 aa, Unidentified
AQSVPWGISRVQAPAAHNRGLTGSGVKVAVLDTGISTHEDLNIRGGASFVPGEPSTQDGNGHGTHVAGTIAALDNSIGVLGVAPSAELYAVKVLGADGEGAISSIAQGLEWAGNNGMHVANLSLGSPSPSATLEQAVNSATSRGVLVVAASGNSGASSIGYPARYANAMAVGATDQNNNRASFSRYGAGLDIVAPGVNIQSTYPGSTYASLNGTSMATPHVAGAAALVKQKNPSWSNVQIRNHLKNTATSLGDTNLYGSGLVNAEAATR

SEQ ID NO: 62278 - protein, 269 aa, Unidentified
AQSVPWGISRVQAPASHNRGLAGFGVKVAVLDSGISTHPDLNIRGGASFVPGEPSTQDGNGHGTHVAGTIAALNNSIGVLGVAPSAELYAVKVLGASGGGAISSIAQGLEWAGLNGMHVANLSLGSPSPSATLEQAVNSATSRGVLVVAASGNSGAGSISYPARYANAMAVGATDQNNNRASFSQYGAGLDIVAPGVNVQSTVPGSAYASLNGTSMATPHVAGAAVLVKQKNPSWSNVQIRNHLKNTATSLGSTNLYGSGLVNAEAATR

SEQ ID NO: 62279 - protein, 269 aa, Unidentified
AQSVPWGISRVQAPAAHNRGLAGSGVKVAVLDTGISTHPDLNIRGGASFVPGEPSTQDGNGHGTHVAGTIAALNNSIGVLGVAPSAELYAVKVLGASGGGAISSIAQGLEWAGNNGMHVANLSLGSESPSATLEQAVNSATSRGVLVVAASGNSGAGSISYPARYANAMAVGATDQNNNRADFSQYGAGLDIVAPGVNVQSTYPGSTYASLNGTSMATPHVAGAAVLVKQKNPSWSNVRIRDHLKNTATSLGSTNLYGSGLVNAFVATR

SEQ ID NO: 62280 - protein, 269 aa, Unidentified
AQTVPWGISRVQAPAAHNRGLTGSGVKVAVLDTGISTHEDLNIRGGASFVPGEPSTQDGNGHGTHVAGTIAALDNSIGVLGVAPSAELYAVKVLGADGEGAISSIAQGLEWAGNNGMHVANLSLGSPSPSATLEQAVNSATSRGVLVVAASGNSGASSIGYPARYANAMAVGATDQNNNRASFSRYGAGLDIVAPGVNVQSTYPGSTYASLNGTSMATPHVAGAAALVKQKNPSWSNVQIRNHLKNTATSLGDTNLYGSGLVNAEAATR

SEQ ID NO: 62281 - protein, 269 aa, Unidentified
AQSVPWGISRVQAPAAHNRRLTGSGVKVAVLDTGISTHPDLNIRGGASFVPGEPSTQDGNGHGTHVAGTIAALNNRIGVLGVAPSAELYAVKVLGASGGGAISSIAQGLEWAGANGMHVANLSLGSPSPSATLEQAVNSATSRGVLVVAASGNSGAGSISYPARYANAMAVGATDQDNNRASFSQYGAGLDIVAPGVNVQSTYPQSAYFSLNGTSMATPHVAGAAVLVKQKNPSWSNVQIRNHLKNTATSLGSTNLYGSGLVNAEAATR

SEQ ID NO: 62282 - protein, 269 aa, Unidentified
AQSVPWGISRVQAPAAHNRGLTGSGVKVAVLDTGISTHPDLNIRGGASFVPGEPSTQDGNGHGTHAAGTIAALDNSIGVLGVAPSAELYAVKVLGASGSGAISSIAQGLEWAGNNGMHVANLSLGSPSPSATLEQAVNSATSRGVLVVAASGNSGADSISYPARYANAMAVGATDQNNNRASFSQYGAGLDIVAPGVNVQSTYIGSRYASLNGTSMATPHVAGAAVLVKHKNPSWSNVRIRNHLKNTATSLGSANLYGSGLVNAEAATR

SEQ ID NO: 62283 - protein, 269 aa, Bacillus lentus
AQSVPWGISRVQAPAAHNRGLTGSGVKVAVLDTGISTHEDLNVRGGVSFVPGETSYQDGNGHGTHVAGTIAALNNSIGVVGVAPSADLYAVKVLGASGRGSVSSIAQGLEWAGQNGMHVANLSLGSDSPSATLEQAVNSATSRGVLVVAASGNSGAGSISYPARYANAMAVGATDQNNNRASFSQYGAGLDIVAPGVNVQSTYPGSTYASLNGTSMATPHVAGAAALVKQKNPSWSNVQIRDHLKNTATSLGSTNLYGSGLVNAEAATR

SEQ ID NO: 62284 - protein, 269 aa, Unidentified
AQSVPWGISRVQAPAAHNRGLAGSGVKVAVLDTGISTHPDLNIRGGASFVPGEPSTQDGNGHGTHVAGTIAALNNSIGVLGVAPSAELYAVKVLGASGGGAISSIAQGLEWAGNNGMHVANLSLGSPSPSATLEQAVNSATSRGVLVVAASGNSGADSISYPARYANAMAVGATDQNNNRADFSQYGAGLDIVAPGVNVQSTYPGSTYASLNGTSMATPHVAGAATLVKQKNPSWSNVTIRDHLKNTATSLGSTNLYGGGLVNALAATR

SEQ ID NO: 62285 - protein, 269 aa, Unidentified
AQSVPWGISRVQAPASHNRGLAGFGVKVAVLDTGISTHPDLNIRGGASFVPGEPSTQDGNGHGTHVAGTIAALNNSIGVLGVAPSAELYAVKVLGASGGGAISSIAQGLEWAGANGMHVANLSLGNPSPSATLEQAVNSATSRGVLVVAASGNSGAGSISYPARYANAMAVGATDQNNNRASFSQYGAGLDIVAPGVNVQSTVPGSAYASLNGTSMATPHVAGAAVLVKQKNPSWSNVQIRNHLKNTATSLGSTNLYGSGLVNAEAATR

SEQ ID NO: 62286 - protein, 269 aa, Unidentified
AQTIPWGISRVQAPAAHNRGLTGSGVKVAVLDTGISTHPDLNIRGGASFVPGEPSTQDGNGHGTHVAGTIAALNNSIGVLGVAPSAELYAVKVLGADGRGAISSIAQGLEWAGNNGMHVANLSLGSPSPSATLEQAVNSATSRGVLVVAASGNEGASSISYPARYANAMAVGATDQNNNRASFSQYGPGLDIMAPGVNIQSTYPGSTYASLNGTSMATPHVAGAAALVKQKNPSWSNVQIRNHLKNTATSLGSTNLYGSGLVNAEAATR

SEQ ID NO: 62287 - protein, 382 aa, Unidentified
VRSKKLWISLLFALTLIFTMAFSNMSAQAAEEAKEKYLIGFNEQEAVSEFVEQVEANDEVAILSEEEEVEIELLHEFETIPVLSVELSPEDVDALELDPAISYIEEDAEVTTMAQSVPWGISRVQAPAAHNRGLTGSGVKVAVLDTGISTHPDLNIRGGASFVPGEPSTQDGNGHGTHVAGTIAALDNSIGVLGVAPSAELYAVKVLGASGSGAISSIAQGLEWAGNNGMHVANLSLGSPSPSATLEQAVNSATSRGVLVVAASGNSGAGSISYPARYANAMAVGATDQNNNRASFSQYGAGLDIVAPGVNVQSTYPGSTYASLNGTSMATPHVAGAAALVKQKNPSWSNVQIRNHLKNTATSLGSTNLYGSGLVNAEAATR

SEQ ID NO: 62288 - protein, 382 aa, Unidentified
VRSKKLWISLLFALTLIFTMAFSNMSAQAAEEAKEKYLIGFNEQEAVSEFVEQVEANDEVAILSEEEEVEIELLHEFETIPVLSVELSPEDVDALELDPAISYIEEDAEVTTMAQSVPWGISRVQAPAAHNRGLTGSGVKVAVLDTGISTHPDLNIRGGASFVPGEPSTQDGNGHGTHVAGTIAALNNSIGVLGVAPNAELYAVKVLGASGGGSNSSIAQGLEWAGNNGMHVANLSLGSPSPSATLEQAVNSATSRGVLVVAASGNSGAGSISYPARYANAMAVGATDQNNNRASFSQYGAGLDIVAPGVNVQSTYPGSTYASLNGTSMATPHVAGAAALVKQKNPSWSNVQIRNHLKNTATSLGSTNLYGSGLVNAEAATR

SEQ ID NO: 62289 - protein, 268 aa, Unidentified
AQSVPWGISRVQAPAAHNRGLAGGGVKVAVLDTGISTHPDLNIRGGASFVPGEPSTQDGNGHGTHVAGTIAALNNSIGVLGVAPSAELYAVKVLGASGGAISSIANGLEWAGNNGMHVANLSLGSPSPSATLEQAVNSATSRGVLVVAASGNSGADSISYPARYANAMAVGATDQNNNRADFSQYGAGLDIVAPGVNVQSTYPGSTYASLNGTSMATPHVAGAAVLVKQKNPSWSNVRIRDHLKNTATSLGSTNLYGSGLVNAFAATR

SEQ ID NO: 62290 - protein, 268 aa, Unidentified
AQSVPWGISRVQAPAAHNRGLAGSGVKVAVLDTGISTHPDLNIRGGASFVPGEPSTQDGNGHGTHVAGTIAALNNSIGVLGVAPSAELYAVKVLGASGGGASSIAQGLEWAGNNGMHVANLSLGSESPSATLEQAVNSATSRGVLVVAASGNSGEGSISYPARYANAMAVGATDQNNNRADFSQYGAGLDIVAPGVNVQSTYPGSTYASLNGTSMATPHVAGAAVLVKQKNPSWSNVRIRDHLKNTATSLGSTNLYGSGLVNAFVATR

SEQ ID NO: 62291 - protein, 268 aa, Unidentified
AQSVPWGISRVQAPAAHNRGLAGSGVKVAVLDTGISTHPDLNIRGGASFVPGEPSTQDGNGHGTHVAGTIAALNNSIGVLGVAPSAELYAVKVLAASGGGASSIAQGLEWAGNNGMHVANLSLGAPSPSATLEQAVNSATSRGVLVVAASGNSGADSISYPARYANAMAVGATDQNNNRADFSQYGAGLDIVAPGVNVQSTYPGSTYASLNGTSMATPHVAGAAVLVKQKNPSWSNVRIRDHLKNTATSLGSTNLYGSGLVNAFAATR

SEQ ID NO: 62292 - protein, 268 aa, Unidentified
AQSVPWGISRVQAPAAHNRGLAGFGVKVAVLDGISTHPDLNIRGGASFVPGEPSTQDGNGHGTHVAGTIAALNNSIGVLGVAPSAELYAVKVLGASGGGAISSIAQGLEWAGANGMHVANLSLGNPSPSATLEQAVNSATSRGVLVVAASGNSGAGSISYPARYANAMAVGATDQNNNRASFSQYGAGLDIVAPGVNVQSTAPQSAYASLNGTSMATPHVAGAAVLVKQKNPSWSNVQIRNHLKNTATSLGSTNLYGSGLVNAEAATR

SEQ ID NO: 62293 - protein, 268 aa, Bacillus subtilis
AQSVPWGISRVKAPAAHNRGLTGSGVKVAVLDTGISTHPDLNIRGGASFVPGEPSTQDGNGHGTHVAGTIAALNNSIGVLGVAPSAELYAVKVLDRNGRGSVSSIAQGLEWAGNNGMHVANMSLGSPSPSATLEQAVNSATSRGVLVVGASGSGRGSISYPARYANAMAVGATDQNGNRASFSQYGPGLDIVAPGVNVQSTYPGSTYASLSGTSMATPHVAGAAALVKQKNPSWSNVQIRNHLKNTATSLGSTNLYGSGLVNAEAATR

SEQ ID NO: 62294 - protein, 268 aa, Unidentified
AQSVPWGISRVQAPAAHNRGLAGGVKVAVLDTGISTHPDLNIRGGASFVPGEPSTQDGNGHGTHVAGTIAALDNSIGVLGVAPSAELYAVKVLGASGNGAISSIAQGLEWAGNNGMHVANLSLGSPSPSATLEQAVNSATSRGVLVVAASGNSGADSISYPARYANAMAVGATDQNNNRADFSQYGAGLDIVAPGVNVQSTYPGSTYASLNGTSMATPHVAGAAVLVKQKNPSWSNVRIRDHLKNTATSLGSTNLYGSGLVNAFAATR

SEQ ID NO: 62295 - protein, 380 aa, Unidentified
VRSKKLWIVASTALLISVAFSSSIASAAEEAKEKYLIGFNEQEAVSEFVEQVEANDEVAILSEEEEVEIELLHEFETIPVLSVELSPEDVDALELDPAISYIEEDAEVTTMAQSVPWGISRVQAPAAHNRGLTGSGVKVAVLDTGISTHPDLNIRRGASFVPGEPSTQDGNGHGTHVAGTIAALNNSIGVLGVAPSAELYAVKVLGASGSGSVSSIAQGLEWAGNNGMHVANLSLGSPSPSATLEQAVNSATSRGVLVVAASGNSGAGSISYPARYANAMAVGATDQDNNRASFSQYGAGLDIVAPGVNVQSTYPGSTYASLNGTSMATPHVAGAAALVKQKLPSWSNVQIRNHLKNTATSLGSTNLYGSGLVNAEAATR

SEQ ID NO: 62296 - protein, 380 aa, Unidentified
VRSKKLWIVASTALLISVAFSSSIASAAEEAKEKYLIGFNEQEAVSEFVEQVEANDEVAILSEEEEVEIELLHEFETIPVLSVELSPEDVDALELDPAISYIEEDAEVTTMAQSVPWGISRVQAPAAHNRGLTGSGVKVAVLDTGISTHPDLRIRGGASFVPGEPSTQDGNGHGTHVAGTIAALNNSIGVLGVAPSAELYAVKVLGASGAGSVSSIAQGLEWAGNNGMHVANLSLGSPSPSATLEQAVNSATSRGVLVVAASGNSGAGSISYPARYANAMAVGATDQNNNRASFSQYGAGLDIVAPGVNVQSTYPGSTYASLNGTSMATPHVAGAAALVKQKNPSWSNVQIRNHLKNTATSLGSTNLYGSGLVRAEAATR

SEQ ID NO: 62297 - protein, 380 aa, Unidentified
VRSKKLWIVASTALLISVAFSSSIASAAEEAKEKYLIGFNEQEAVSEFVEQVEANDEVAILSEEEEVEIELLHEFETIPVLSVELSPEDVDALELDPAISYIEEDAEVTTMAQSVPWGISRVQAPAAHNRGLTGSGVKVAVLDSGISTHPDLNIRGGASFVPGEPSTQDGNGHGTHVAGTIAALNNSIGVLGVAWSAELYAVKVLGASGSGSVSSIAQGLEWAGNNGMHVANLSLGSPSPSATLEQAVNSATSRGVLVVAASGNSGAGSISYPARYANAMAVGATDQNNNRASFSQYGAGLDIVAPGVNVQSTYPGSTYASLNGTSMATPHVAGAAALVKQKNPSWSFVQIRNHLKNTATSLGSTNLYGSGLVNAEAATR

SEQ ID NO: 62298 - protein, 380 aa, Unidentified
VRSKKLWIVASTALLISVAFSSSIASAAEEAKEKYLIGFNEQEAVSEFVEQVEANDEVAILSEEEEVEIELLHEFETIPVLSVELSPEDVDALELDPAISYIEEDAEVTTMAQSVPWGISRVQAPAAHNRGLTGRGVKVAVLDTGISTHPDLNIRGGASFVPGEPSTQDGNGHGTHVAGTIAALNNSIGVLGVAPSAELYAVKVLGASGSGSVSSIAQGLEWAGNNGMHVANLSLGSPSPSATLEQAVNSATSRGVLVVAASGNSGAGSISYPARYANAMAVGATDQNNNRASFSQYGAGLDIVAPGVNVQSTAPGSTYASLNGTSMATPHVAGAAALVFQKNPSWSNVQIRNHLKNTATSLGSTNLYGSGLVNAEAATR

SEQ ID NO: 62299 - protein, 380 aa, Unidentified
VRSKKLWIVASTALLISVAFSSSIASAAEEAKEKYLIGFNEQEAVSEFVEQVEANDEVAILSEEEEVEIELLHEFETIPVLSVELSPEDVDALELDPAISYIEEDAEVTTMAQSVPWGISRVQAPAAHRRRLTGSGVKVAVLDTGISTHPDLRIRGGASFVPGEPSTQDGNGHGTHVAGTIAALNNSIGVLGVAPSAELYAVKVLGASGSGSVSSIAQGLEWAGNNGMHVANLSLGSPSPSATLEQAVNSATSRGVLVVAASGNSGAGSISYPARYANAMAVGATDQNNNRASFSQYGAGLDIVAPGVNVQSTYPGSTYASLNGTSMATPHVAGAAALVKQKNPSWSNVQIRNHLKNTATSLGSTNLYGSGLVNAEAATR

SEQ ID NO: 62300 - protein, 380 aa, Unidentified
VRSKKLWIVASTALLISVAFSSSIASAAEEAKEKYLIGFNEQEAVSEFVEQVEANDEVAILSEEEEVEIELLHEFETIPVLSVELSPEDVDALELDPAISYIEEDAEVTTMAQSVPWGISRVQAPAAHNRGLTGSGVKVAVLDTGISTHPDLNIRGGASFVPGEPSTQDGNGHGTHVAGTIAALNNSIGVLGVAPSAELYAVKVLGASGSGSVSSIAQGLEWAGNNRMHVANLSLGSPSPSATLEQAVNSATSRGVLVVAASGNSGAGSISYPARYANAMAVGATDQNNNRASFSQYGAGLDIVAPGVNVQSTAPGSTYASLNGTSMATPHVAGAAALVKQKNPSWSFVQIRNHLKNTATSLGSTNLYGSGLVNAEAATR

SEQ ID NO: 62301 - protein, 380 aa, Unidentified
VRSKKLWIVASTALLISVAFSSSIASAAEEAKEKYLIGFNEQEAVSEFVEQVEANDEVAILSEEEEVEIELLHEFETIPVLSVELSPEDVDALELDPAISYIEEDAEVTTMAQSVPWGISRVQAPAAHNRGLTGSGVKVAVLDTGISTHPDLNIRGGASFVPGEPSRQDGNGHGTHVAGTIAALNNSIGVLGVAPSAELYAVKVLGASGSGSVSSIAQGLEWAGNNGMHVANLSLGSPSPSATLEQAVNSATSRGVLVVAASGNSGAGSISYPARYANAMAVGATDQDNNRASFSQYGAGLDIVAPGVNVQSTYPGSTYASLNGTSMATPHVAGAAALVKNKNPSWSNVQIRNHLKNTATSLGSTNLYGSGLVNAEAATR

SEQ ID NO: 62302 - protein, 380 aa, Unidentified
VRSKKLWIVASTALLISVAFSSSIASAAEEAKEKYLIGFNEQEAVSEFVEQVEANDEVAILSEEEEVEIELLHEFETIPVLSVELSPEDVDALELDPAISYIEEDAEVTTMAQSVPWGISRVQAPAAHNRGLTGRGVKVAVLDTGISTHPDLRIRGGASFVPGEPSTQDGNGHGTHVAGTIAALNNSIGVLGVAPSAELYAVKVLGASGSGSVSSIAQGLEWAGNNGMHVANLSLGSPSPSATLEQAVNSATSRGVLVVAASGNSGAGSISYPARYANAMAVGATDQNNNRASFSQYGAGLDIVAPGVNVQSTYPGSTYFSLNGTSMATPHVAGAAALVKQKNPSWSNVQIRNHLKNTATSLGSTNLYGSGLVNAEAATR

SEQ ID NO: 62303 - protein, 380 aa, Unidentified
VRSKKLWIVASTALLISVAFSSSIASAAEEAKEKYLIGFNEQEAVSEFVEQVEANDEVAILSEEEEVEIELLHEFETIPVLSVELSPEDVDALELDPAISYIEEDAEVTTMAQSVPWGISRVQAPAAHNRGLWGSGVKVAVLDTGISTHPDLNIRGGASFVPGEPSTQDGNGHGTHVAGTIAALNNSIGVLGVAPSAILYAVKVLGASGSGSVSSIAQGLEWAGNNGMHVANLSLGSPSPSATLEQAVNSATSRGVLVVAASGNSGAGSISYPARYANAMAVGATDQNNNRASFSQYGAGLDIVAPGVNVQSTYPGSTYAFLNGTSMATPHVAGAAALVKQKNPSWSNVQIRNHLKNTATSLGSTNLYGSGLVNAEAATR

SEQ ID NO: 62304 - protein, 380 aa, Unidentified
VRSKKLWIVASTALLISVAFSSSIASAAEEAKEKYLIGFNEQEAVSEFVEQVEANDEVAILSEEEEVEIELLHEFETIPVLSVELSPEDVDALELDPAISYIEEDAEVTTMAQSVPWGISRVQAPAAHNRRLTGSGVKVAVLDTGISTHPDLNIRGGASFVPGEPSTQDGNGHGTHVAGTIAALNNSIGVLGVAPSAILYAVKVLGASGSGSVSSIAQGLEWAGNNGMHVANLSLGSPSPSATLEQAVNSATSRGVLVVAASGNSGAGSISYPARYANAMAVGATDQNNNRASFSQYGAGLDIVAPGVNVQSTYPGSTYASENGTSMATPHVAGAAALVKQKNPSWSNVQIRNHLKNTATSLGSTNLYGSGLVNAEAATR

SEQ ID NO: 62305 - protein, 380 aa, Unidentified
VRSKKLWIVASTALLISVAFSSSIASAAEEAKEKYLIGFNEQEAVSEFVEQVEANDEVAILSEEEEVEIELLHEFETIPVLSVELSPEDVDALELDPAISYIEEDAEVTTMAQSVPWGISRVQAPAAHNRGLTGSGVKVAVLDSGISTHPDLNIRGGASFVPGEPSTQDGNGHGTHVAGTIAALNNSIGVLGVAPSAELYAVKVLGASGSGSVSSIAQGLEWAGNNRMHVANLSLGSPSPSATLEQAVNSATSRGVLVVAASGNSGAGSISYPARYANAMAVGATDQNNNRASFSQYGAGLDIVAPGVNVQSTYPGSTYASLNGTSMATPHVAGAAALVKQKNPSWSFVQIRNHLKNTATSLGSTNLYGSGLVNAEAATR

SEQ ID NO: 62306 - protein, 380 aa, Unidentified
VRSKKLWIVASTALLISVAFSSSIASAAEEAKEKYLIGFNEQEAVSEFVEQVEANDEVAILSEEEEVEIELLHEFETIPVLSVELSPEDVDALELDPAISYIEEDAEVTTMAQSVPWGISRVQAPAAHNRGLTGSGVKVAVLDTGISTHPDLNIRGGASFVPGEPSTQDGNGHGTHVAGTIAALNNSIGVLGVAWSAELYAVKVLGASGSGSVSSIAQGLEWAGNNGMHVANLSLGSPSPSATLEQAVNSATSRGVLVVAASGNSGAGSISYPARYANAMAVGATDQNNNRASFSQYGAGLDIVAPGVNVQSTAPGSTYASLNGTSMATPHVAGAAALVFQKNPSWSNVQIRNHLKNTATSLGSTNLYGSGLVNAEAATR

SEQ ID NO: 62307 - protein, 380 aa, Unidentified
VRSKKLWIVASTALLISVAFSSSIASAAEEAKEKYLIGFNEQEAVSEFVEQVEANDEVAILSEEEEVEIELLHEFETIPVLSVELSPEDVDALELDPAISYIEEDAEVTTMAQSVPWGISRVHAPAAHNRGLTGSGVKVAVLDTGISTHPDLNIRGGASFVPGEPSTQDGNGHGTHVAGTIAALNNSIGVLGVAPSAELYAVKVLGASGSGSASSIAQGLEWAGNNRMHVANLSLGSPSPSATLEQAVNSATSRGVLVVAASGNSGAGSISYPARYANAMAVGATDQNNNRASFSQYGAGLDIVAPGVNVQSTYPGSTYASLNGTSMATPHVAGAAALVKQKNPSWSNVQIRNHLKNTATSLGSTNLYGSGLVNAEAATR

SEQ ID NO: 62308 - protein, 380 aa, Unidentified
VRSKKLWIVASTALLISVAFSSSIASAAEEAKEKYLIGFNEQEAVSEFVEQVEANDEVAILSEEEEVEIELLHEFETIPVLSVELSPEDVDALELDPAISYIEEDAEVTTMAQSVPWGISRVQAPAAHRRGLTGSGVKVAVLDTGISTHPDLNIRGGASFVPGEPSTQDGNGHGTHVAGTIAALDNSIGVLGVAPSAELYAVKVLGASGSGSVSSIAQGLEWAGNNGMHVANLSLGSPSPSATLEQAVNSATSRGVLVVAASGNSGAGSISYPARYANAMAVGATDQNNNRASFSQYGAGLDIVAPGVNVQSTYPGSTYASLNGTSMATPHVAGAAVLVKQKNPSWSNVQIRNHLKNTATSLGSTNLYGSGLVNAEAATR

SEQ ID NO: 62309 - protein, 380 aa, Unidentified
VRSKKLWIVASTALLISVAFSSSIASAAEEAKEKYLIGFNEQEAVSEFVEQVEANDEVAILSEEEEVEIELLHEFETIPVLSVELSPEDVDALELDPAISYIEEDAEVTTMAQSVPWGISRVQAPAAHRRGLTGRGVKVAVLDTGISTHPDLNIRGGASFVPGEPSTQDGNGHGTHVAGTIAALNNSIGVLGVAPSAELYAVKVLGASGSGSVSSIAQGLEWAGNNGMHVANLSLGSPSPSATLEQAVNSATSRGVLVVAASGNSGAGSISYPARYANAMAVGATDQNNNRASFSQYGAGLDIVAPGVNVQSTYPGSTYASLNGTSMATPHVAGAAALVKQKNPSWSNVRIRNHLKNTATSLGSTNLYGSGLVNAEAATR

SEQ ID NO: 62310 - protein, 380 aa, Unidentified
VRSKKLWIVASTALLISVAFSSSIASAAEEAKEKYLIGFNEQEAVSEFVEQVEANDEVAILSEEEEVEIELLHEFETIPVLSVELSPEDVDALELDPAISYIEEDAEVTTMAQSVPWGISRVQAPAAHNRGLTGRGVKVAVLDSGISTHPDLNIRGGASFVPGEPSTQDGNGHGTHVAGTIAALNNSIGVLGVAPSAELYAVKVLGASGSGSVSSIAQGLEWAGNNGMHVANLSLGSPSPSATLEQAVNSATSRGVLVVAASGNSGAGSISYPARYANAMAVGATDQNNNRASFSQYGAGLDIVAPGVNVQSTYPGSTYASLNGTSMATPHVTGAAALVKQKNPSWSNVQIRNHLKNTATSLGSTNLYGSGLVNAEAATR

SEQ ID NO: 62311 - protein, 380 aa, Unidentified
VRSKKLWIVASTALLISVAFSSSIASAAEEAKEKYLIGFNEQEAVSEFVEQVEANDEVAILSEEEEVEIELLHEFETIPVLSVELSPEDVDALELDPAISYIEEDAEVTTMAQSVPWGISRVQAPAAHNRRLRGSGVKVAVLDTGISTHPDLRIRGGASFVPGEPSTQDGNGHGTHVAGTIAALNNSIGVLGVAPSAELYAVKVLGASGSGSVSSIAQGLEWAGNNGMHVANLSLGSPSPSATLEQAVNSATSRGVLVVAASGNSGAGSISYPARYANAMAVGATDQNNNRASFSQYGAGLDIVAPGVNVQSTYPGSTYASLNGTSMATPHVAGAAALVKQKNPSWSNVQIRNHLKNTATSLGSTNLYGSGLVNAEAATR

SEQ ID NO: 62312 - protein, 380 aa, Unidentified
VRSKKLWIVASTALLISVAFSSSIASAAEEAKEKYLIGFNEQEAVSEFVEQVEANDEVAILSEEEEVEIELLHEFETIPVLSVELSPEDVDALELDPAISYIEEDAEVTTMAQSVPWGISRVQAPAAHNRGLTGRGVKVAVLDTGISTHPDLNIRGGASFVPGEPSTQDGNGHGTHVAGTIAALNNSIGVLGVAPSAELYAVKVLGASGSGSVSSIAQGLEWAGNNGMHVANLSLGSPSPSATLEQAVNSATSRGVLVVAASGNSGAGSISYPARYANAMAVGATDQNNNRASFSQYGAGLDIVAPGVNVQSTAPGSTYASLNGTSMATPHVAGAAALVKQKNPSWSFVQIRNHLKNTATSLGSTNLYGSGLVNAEAATR

SEQ ID NO: 62313 - protein, 380 aa, Unidentified
VRSKKLWIVASTALLISVAFSSSIASAAEEAKEKYLIGFNEQEAVSEFVEQVEANDEVAILSEEEEVEIELLHEFETIPVLSVELSPEDVDALELDPAISYIEEDAEVTTMAQSVPWGISRVQAPAAHNRGLAGSGVKVAVLDTGISTHPDLNIRGGASFVPGEPSTQDGEGHGTHVAGTIAALNNSIGVLGVAPSAELYAVKVLGASGSGSVSSIAQGVEWAGNNGMHVANLSLGSPSPSATLEQAVNSATSRGVLVVAASGNSGAGSISYPARYANAMAVGATDQNNNRASFSQYGAGLDIVAPGVNVQSTYPGSTYASLNGTSMATPHVAGAAALVKQKNPSWSNVQIRNHLKNTATSLGSTNLYGSGLVNAEAATR

SEQ ID NO: 62314 - protein, 380 aa, Unidentified
VRSKKLWIVASTALLISVAFSSSIASAAEEAKEKYLIGFNEQEAVSEFVEQVEANDEVAILSEEEEVEIELLHEFETIPVLSVELSPEDVDALELDPAISYIEEDAEVTTMAQSVPWGISRVQAPAAHNRGLTGSGVKVAVLDTGISTHPDLNIRGGASFVPGEPSTQDGEGHGTHVAGTIAALNNSIGVLGVAPSAELYAVKVLGASGSGSVSSIAQGLEWAGNNGMHVANLSLGSPSPSATLEQAVNSATSRGVLVVAASGNSGAGSISYPARYANAMAVGATDQNNNHASFSQYGAGLDIVAPGVNVQSTYPGSTYASLNGTSMATPHVAGAAALVKQKNPSWSNVQIRNRLKNTATSLGSTNLYGSGLVNAEAATR

SEQ ID NO: 62315 - protein, 380 aa, Unidentified
VRSKKLWIVASTALLISVAFSSSIASAAEEAKEKYLIGFNEQEAVSEFVEQVEANDEVAILSEEEEVEIELLHEFETIPVLSVELSPEDVDALELDPAISYIEEDAEVTTMAQSVPWGISRVQAPAAHNRGLTGSGVKVAVLDTGISTHPDLNIRGGASFVPGEPSTQDGNGHGTHVAGTIAALNNSIGVLGVAPSAELYAVKVLGASGSGAISSIAQGLEWAGNNGMHVANLSLGSPSPSATLEQAVNSATSRGVLVVAASGNSGAGSISYPARYANAMAVGATDQNNNRASFSQYGAGLDIVAPGVNVQSTYPGSTYASLNGTSMATPHVAGAAVLVKQKNPSWSNVQIRNHLKNTATSLGSTNLYGSGLVNAEAATR

SEQ ID NO: 62316 - protein, 380 aa, Unidentified
VRSKKLWIVASTALLISVAFSSSIASAAEEAKEKYLIGFNEQEAVSEFVEQVEANDEVAILSEEEEVEIELLHEFETIPVLSVELSPEDVDALELDPAISYIEEDAEVTTMAQSVPWGISRVQAPAAHNRGLTGRGVKVAVLDTGISTHPDLNIRGGASFVPGEPSTQDGNGHGTHVAGTIAALNNSIGVLGVAPSAELYAVKVLGASGSGSVSSIAQGLEWAGNNGMHVANLSLGSPSPSATLEQAVNSATSRGVLVVAASGNSGAGSISYPARYANAMAVGATDQNNNRASFSQYGAGLDIVAPGVNVQSTAPGSTYASLNGTSMATPHVAGAAALVKQKNPSRSNVQIRNHLKNTATSLGSTNLYGSGLVNAEAATR

SEQ ID NO: 62317 - protein, 380 aa, Unidentified
VRSKKLWIVASTALLISVAFSSSIASAAEEAKEKYLIGFNEQEAVSEFVEQVEANDEVAILSEEEEVEIELLHEFETIPVLSVELSPEDVDALELDPAISYIEEDAEVTTMAQSVPWGISRVQAPAAHNRGLTGSGVKVAVLDTGISTHPDLNIRGGASFVPGEPSTQDGEGHGTHVAGTIAALNNSIGVLGVAPSAELYAVKVLGASGSGSVSSIAQGVEWAGNNGMHVANLSLGNPSPSATLEQAVNSATSRGVLVVAASGNSGAGSISYPARYANAMAVGATDQNNNRASFSQYGAGLDIVAPGVNVQSTYPGSTYASLNGTSMATPHVAGAAALVKQKNPSWSNVQIRNHLKNTATSLGSTNLYGSGLVNAEAATR

SEQ ID NO: 62318 - protein, 380 aa, Unidentified
VRSKKLWIVASTALLISVAFSSSIASAAEEAKEKYLIGFNEQEAVSEFVEQVEANDEVAILSEEEEVEIELLHEFETIPVLSVELSPEDVDALELDPAISYIEEDAEVTTMAQSVPWGISRVQAPAAHNRGLTGRGVKVAVLDTGISTHPDLRIRGGASFVPGEPSTQDGNGHGTHVAGTIAALDNSIGVLGVAPSAELYAVKVLGASGSGSVSSIAQGLEWAGNNGMHVANLSLGSPSPSATLEQAVNSATSRGVLVVAASGNSGAGSISYPARYANAMAVGATDQNNNRASFSQYGAGLDIVAPGVNVQSTYPGSTYASLNGTSMATPHVAGAAALVKQKNPSWSNVQIRNHLKNTATSLGSTNLYGSGLVNAEAATR

SEQ ID NO: 62319 - protein, 380 aa, Unidentified
VRSKKLWIVASTALLISVAFSSSIASAAEEAKEKYLIGFNEQEAVSEFVEQVEANDEVAILSEEEEVEIELLHEFETIPVLSVELSPEDVDALELDPAISYIEEDAEVTTMAQSVPWGISRVQAPAAHNRGLTGSGVKVAVLDTGISTHPDLNIRGGASFVPGEPSTQDGNGHGTHVAGTIAALNNSIGVLGVAPSAELYAVKVLGASGSGSVSSIAQGLEWAGNNGMHVANLSLGNPSPSATLEQAVNSATSRGVLVVAASGNSGEGSISYPARYANAMAVGATDQNNNRASFSQYGAGLDIVAPGVNVQSTEPGSTYASLNGTSMATPHVAGAAALVKQKNPSWSNVQIRNHLKNTATSLGSTNLYGSGLVNAEAATR

SEQ ID NO: 62320 - protein, 380 aa, Unidentified
VRSKKLWIVASTALLISVAFSSSIASAAEEAKEKYLIGFNEQEAVSEFVEQVEANDEVAILSEEEEVEIELLHEFETIPVLSVELSPEDVDALELDPAISYIEEDAEVTTMAQSVPWGISRVQAPAAHRRRLTGSGVKVAVLDTGISTHPDLNIRGGASFVPGEPSTQDGNGHGTHVAGTIAALNNSIGVLGVAPSAELYAVKVLGASGSGSVSSIAQGLEWAGNNGMHVANLSLGSPSPSATLEQAVNSATSRGVLVVAASGNSGAGSISYPARYANAMAVGATDQNNNRASFSQYGAGLDIVAPGVNVQSTYPGSTYASLNGTSMATPHVAGAAALVKQKNPSWSNVQIRNRLKNTATSLGSTNLYGSGLVNAEAATR

SEQ ID NO: 62321 - protein, 380 aa, Unidentified
VRSKKLWIVASTALLISVAFSSSIASAAEEAKEKYLIGFNEQEAVSEFVEQVEANDEVAILSEEEEVEIELLHEFETIPVLSVELSPEDVDALELDPAISYIEEDAEVTTMAQSVPWGISRVQAPAAHNRGLTGRGVKVAVLDTGISTHPDLNIRGGASFVPGEPSTQDGNGHGTHVAGTIAALNNSIGVLGVAPSAELYAVKVLGASGSGSVSSIAQGLEWAGNNGMHVANLSLGSPSPSATLEQAVNSATSRGVLVVAASGNSGAGSISYPARYANAMAVGATDQNNNRASFSQYGAGLDIVAPGVNVQSTAPGSTYASLNGTSMATPHVAGAAALVKQKNPSWPNVQIRNHLKNTATSLGSTNLYGSGLVNAEAATR

SEQ ID NO: 62322 - protein, 380 aa, Unidentified
VRSKKLWIVASTALLISVAFSSSIASAAEEAKEKYLIGFNEQEAVSEFVEQVEANDEVAILSEEEEVEIELLHEFETIPVLSVELSPEDVDALELDPAISYIEEDAEVTTMAQSVPWGISRVQAPAAHNRGLTGSGVKVAVLDTGISTHPDLRIRGGASFVPGEPSTQDGNGHGTHVAGTIAALNNSIGVLGVAPSAELYAVKVLGASGSGSVSSIAQGLEWAGNNGMHVANLSLGSPSPSATLEQAVNSATSRGVLVVAASGNSGAGSISYPARYANAMAVGATDQNNNRASFSQYGAGLDIVAPGVNVQSTYPGSTYASLNGTSMATPHVAGEAALVKQKNPSWSNVQIRNRLKNTATSLGSTNLYGSGLVNAEAATR

SEQ ID NO: 62323 - protein, 380 aa, Unidentified
VRSKKLWIVASTALLISVAFSSSIASAAEEAKEKYLIGFNEQEAVSEFVEQVEANDEVAILSEEEEVEIELLHEFETIPVLSVELSPEDVDALELDPAISYIEEDAEVTTMAQSVPWGISRVQAPAAHNRGLTGSGVKVAVLDTGISTHPDLNIRGGASFVPGEPSTQDGNGHGTHVAGTIAALNNSIGVLGVAPSAELYAVKVLGASGSGSVSSIAQGLEWAGNNGMHVANLSLGSPSPSATLEQAVNSATSRGVIVVAASGNSGAGSISYPARYANAMAVGATDQNNNRASFSQYGAGLDIVAPGVNVQSTYPGSAYASLNGTSMATPHVAGAAALVKQKNPSWSNVQIRNHLKRTATSLGSTNLYGSGLVNAEAATR

SEQ ID NO: 62324 - protein, 380 aa, Unidentified
VRSKKLWIVASTALLISVAFSSSIASAAEEAKEKYLIGFNEQEAVSEFVEQVEANDEVAILSEEEEVEIELLHEFETIPVLSVELSPEDVDALELDPAISYIEEDAEVTTMAQSRPWGIARVQAPAAHNRGLTGSGVKVAVLDTGISTHPDLNIRGGASFVPGEPSTQDGNGHGTHVAGTIAALNNSIGVLGVAPSAELYAVKVLGASGSGSVSSIAQGLEWAGNNGMHVANLSLGSPSPSATLEQAVNSATSRGVLVVAASGNSGAGSISYPARYANAMAVGATDQNNNRASFSQYGAGLDIVAPGVNVQSTYPGSTYASLNGTSMATPHVAGAAALVKQKNPSRSNVQIRNHLKNTATSLGSTNLYGSGLVNAEAATR

SEQ ID NO: 62325 - protein, 380 aa, Unidentified
VRSKKLWIVASTALLISVAFSSSIASAAEEAKEKYLIGFNEQEAVSEFVEQVEANDEVAILSEEEEVEIELLHEFETIPVLSVELSPEDVDALELDPAISYIEEDAEVTTMAQSVPWGISRVQAPAAHNRGLTGSGVKVAVLDSGISTHPDLNIRGGASFVPGEPSTQDGNGHGTHVAGTIAALNNRIGVLGVAWSAELYAVKVLGASGSGSVSSIAQGLEWAGNNGMHVANLSLGSPSPSATLEQAVNSATSRGVLVVAASGNSGAGSISYPARYANAMAVGATDQNNNRASFSQYGAGLDIVAPGVNVQSTYPGSTYASLNGTSMATPHVAGAAALVKQKNPSWSNVQIRNHLKNTATSLGSTNLYGSGLVNAEAATR

SEQ ID NO: 62326 - protein, 380 aa, Unidentified
VRSKKLWIVASTALLISVAFSSSIASAAEEAKEKYLIGFNEQEAVSEFVEQVEANDEVAILSEEEEVEIELLHEFETIPVLSVELSPEDVDALELDPAISYIEEDAEVTTMAQSVPWGISRVQAPAAHNRGLTGSGVKVAVLDTGISTHPDLNIRGGASFVPGEPSTQDGEGHGTHVAGTIAALNNSIGVLGVAPSAELYAVKVLGASGSGSVSSIAQGLEWAGNNGMHVANLSLGNPSPSATLEQAVNSATSRGVLVVAASGNSGEGSISYPARYANAMAVGATDQNNNRASFSQYGAGLDIVAPGVNVQSTYPGSTYASLNGTSMATPHVAGAAALVKQKNPSWSNVQIRNHLKNTATSLGSTNLYGSGLVNAEAATR

SEQ ID NO: 62327 - protein, 380 aa, Unidentified
VRSKKLWIVASTALLISVAFSSSIASAAEEAKEKYLIGFNEQEAVSEFVEQVEANDEVAILSEEEEVEIELLHEFETIPVLSVELSPEDVDALELDPAISYIEEDAEVTTMAQSVPWGISRVQAPAAHNRGLTGSGVKVAVLDTGISTHPDLNIRGGASFVPGEPSTQDGEGHGTHVAGTIAALNNSIGVLGVAPSAELYAVKVLGASGSGSVSSIAQGLEWAGNNGMHVANLSLGSPSPSATLEQAVNSATSRGVIVVAASGNSGAESISYPARYANAMAVGATDQNNNRASFSQYGAGLDIVAPGVNVQSTYPGSTYASLNGTSMATPHVAGAAALVKQKNPSWSNVQIRNHLKNTATSLGSTNLYGSGLVNAEAATR

SEQ ID NO: 62328 - protein, 380 aa, Unidentified
VRSKKLWIVASTALLISVAFSSSIASAAEEAKEKYLIGFNEQEAVSEFVEQVEANDEVAILSEEEEVEIELLHEFETIPVLSVELSPEDVDALELDPAISYIEEDAEVTTMAQSVPWGISRVQAPAAHNRGLTGSGVKVAVLDTGISTHPDLNIRGGASFVPGEPSTQDGNGHGTHVAGTIAALNNSIGVLGVAWSAELYAVKVLGASGSGSVSSIAQGLEWAGNNGMHVANLSLGSPSPSATLEQAVNSATSRGVLVVAASGNSGAGSISYPARYANAMAVGATDQNNNRASFSQYGAGLDIVAPGVNVQSTAPGSTYASLNGTSMATPHVAGAAALVKQKNPSWSFVQIRNHLKNTATSLGSTNLYGSGLVNAEAATR

SEQ ID NO: 62329 - protein, 380 aa, Unidentified
VRSKKLWIVASTALLISVAFSSSIASAAEEAKEKYLIGFNEQEAVSEFVEQVEANDEVAILSEEEEVEIELLHEFETIPVLSVELSPEDVDALELDPAISYIEEDAEVTTMAQSVPWGISRVQAPAAHNRGLTGSGVKVAVLDSGISTHPDLNIRGGASFVPGEPSTQDGNGHGTHVAGTIAALNNSIGVLGVAPSAELYAVKVLGASGSGSVSSIAQGLEWAGNNGMHVANLSLGSPSPSATLEQAVNSATSRGVLVVAASGNSGAGSISYPARYANAMAVGATDQNNNRASFSQYGAGLDIVAPGVNVQSTAPGSTYASLNGTSMATPHVAGAAALVKQKNPSWSFVQIRNHLKNTATSLGSTNLYGSGLVNAEAATR

SEQ ID NO: 62330 - protein, 380 aa, Unidentified
VRSKKLWIVASTALLISVAFSSSIASAAEEAKEKYLIGFNEQEAVSEFVEQVEANDEVAILSEEEEVEIELLHEFETIPVLSVELSPEDVDALELDPAISYIEEDAEVTTMAQSVPWGISRVQAPAAHNRGLTGRGVKVAVLDTGISTHPDLNIRGGASFVPGEPSTQDGNGHGTHVAGTIAALNNSIGVLGVAPSAELYAVKVLGASGAGSVSSIAQGLEWAGNNGMHVANLSLGSPSPSATLEQAVNSATSRGVLVVAASGNSGAGSISYPARYANAMAVGATDQNNNRASFSQYGAGLDIVAPGVNVQSTYPGSTYASLNGTSMATPHVAGAAALVKQKNPSWSNVQIRNHLKNTATSLGSTNLYGSGLVRAEAATR

SEQ ID NO: 62331 - protein, 380 aa, Unidentified
VRSKKLWIVASTALLISVAFSSSIASAAEEAKEKYLIGFNEQEAVSEFVEQVEANDEVAILSEEEEVEIELLHEFETIPVLSVELSPEDVDALELDPAISYIEEDAEVTTMAQSVPWGISRVQAPAAHNRRLTGSGVKVAVLDTGISTHPDLRIRGGASFVPGEPSTQDGNGHGTHVAGTIAALNNSIGVLGVAPSAELYAVKVLGASGSGSVSSIAQGLEWAGNNGMHVANLSLGSPSPSATLEQAVNSATSRGVLVVAASGNSGAGSISYPARYANAMAVGATDQNNNRASFSQYGAGLDIVAPGVNVQSTYPGSTYASLNGTSMATPHVAGAAALVKQKNPSWSNVQIRNHLKNTATSLGSTNLYGSGLVNALAATR

SEQ ID NO: 62332 - protein, 380 aa, Unidentified
VRSKKLWIVASTALLISVAFSSSIASAAEEAKEKYLIGFNEQEAVSEFVEQVEANDEVAILSEEEEVEIELLHEFETIPVLSVELSPEDVDALELDPAISYIEEDAEVTTMAQSVPWGIARVQAPAAHNRGLTGSGVKVAVLDTGISTHPDLRIRGGASFVPGEPSTQDGNGHGTHVAGTIAALNNSIGVLGVAPSAELYAVKVLGASGSGSVSSIAQGLEWAGNNGMHVANLSLGSPSPSATLEQAVNSATSRGVLVVAASGNSGAGSISYPARYANAMAVGATDQNNNRASFSQYGAGLDIVAPGVNVQSTYPGFTYASLNGTSMATPHVAGAAALVKQKNPSWSNVQIRNHLKNTATSLGSTNLYGSGLVNAEAATR

SEQ ID NO: 62333 - protein, 380 aa, Unidentified
VRSKKLWIVASTALLISVAFSSSIASAAEEAKEKYLIGFNEQEAVSEFVEQVEANDEVAILSEEEEVEIELLHEFETIPVLSVELSPEDVDALELDPAISYIEEDAEVTTMAQSVPWGISRVQAPAAHNRGLTGSGVKVAVLDSGISTHPDLNIRGGASFVPGEPSTQDGNGHGTHVAGTIAALNNSIGVLGVAPSAELYAVKVLGASGSGSVSSIAQGLEWAGNNGMHVANLSLGSPSPSATLEQAVNSATSRGVLVVAASGNSGAGSISYPARYANAMAVGATDQNNNRASFSQYGAGLDIVAPGVNVQSTAPGSTYASLNGTSMATPHVAGAAALVFQKNPSWSNVQIRNHLKNTATSLGSTNLYGSGLVNAEAATR

SEQ ID NO: 62334 - protein, 380 aa, Unidentified
VRSKKLWIVASTALLISVAFSSSIASAAEEAKEKYLIGFNEQEAVSEFVEQVEANDEVAILSEEEEVEIELLHEFETIPVLSVELSPEDVDALELDPAISYIEEDAEVTTMAQSVPWGISRVQAPAAHNRGLTGSGVKVAVLDTGISTHPDLNIRGGASFVPGEPSTQDGNGHGTHVAGTIAALNNSIGVLGVAPSAELYAVKVLGASGAGSVSSIAQGVEWAGNNGMHVANLSLGSESPSATLEQAVNSATSRGVLVVAASGNSGAGSISYPARYANAMAVGATDQNNNRASFSQYGAGLDIVAPGVNVQSTYPGSTYASLNGTSMATPHVAGAAALVKQKNPSWSNVQIRNHLKNTATSLGSTNLYGSGLVNAEAATR

SEQ ID NO: 62335 - protein, 380 aa, Unidentified
VRSKKLWIVASTALLISVAFSSSIASAAEEAKEKYLIGFNEQEAVSEFVEQVEANDEVAILSEEEEVEIELLHEFETIPVLSVELSPEDVDALELDPAISYIEEDAEVTTMAQSVPWGISRVQAPAAHNRGLTGRGVKVAVLDSGISTHPDLNIRGGASFVPGEPSTQDGNGHGTHVAGTIAALNNSIGVLGVAPSAELYAVKVLGASGSGSVSSIAQGLEWAGNNRMHVANLSLGSPSPSATLEQAVNSATSRGVLVVAASGNSGAGSISYPARYANAMAVGATDQNNNRASFSQYGAGLDIVAPGVNVQSTYPGSTYASLNGTSMATPHVAGAAALVKQKNPSWSNVQIRNHLKNTATSLGSTNLYGSGLVNAEAATR

SEQ ID NO: 62336 - protein, 380 aa, Unidentified
VRSKKLWIVASTALLISVAFSSSIASAAEEAKEKYLIGFNEQEAVSEFVEQVEANDEVAILSEEEEVEIELLHEFETIPVLSVELSPEDVDALELDPAISYIEEDAEVTTMAQSVPWGISRVQAPAAHNRGLTGRGVKVAVLDTGISTHPDLNIRGGASFVPGEPSTQDGNGHGTHVAGTIAALNNSIGVLGVAPSAELYAVKVLGASGSGAVSSIAQGLEWAGNNGMHVANLSLGSPSPSATLEQAVNSATSRGVLVVAASGNSGAGSISYPARYANAMAVGATDQNNNRASFSQYGAGLDIVAPGVNVQSTYPGSTYASLNGTSMATPHVAGAAVLVKQKNPSWSNVQIRNHLKNTATSLGSTNLYGSGLVNAEAATR

SEQ ID NO: 62337 - protein, 380 aa, Unidentified
VRSKKLWIVASTALLISVAFSSSIASAAEEAKEKYLIGFNEQEAVSEFVEQVEANDEVAILSEEEEVEIELLHEFETIPVLSVELSPEDVDALELDPAISYIEEDAEVTTMAQSVPWGISRVQAPAAHNRGLTGSGVKVAVLDTGISTHPDLWIRGGASFVPGEPSTQDGEGHGTHVAGTIAALNNSIGVLGVAPSAELYAVKVLGASGSGSVSSIAQGLEWAGLNGMHVANLSLGSPSPSATLEQAVNSATSRGVLVVAASGNSGAGSISYPARYANAMAVGATDQNNNRASFSQYGAGLDIVAPGVNVQSTYPGSTYASLNGTSMATPHVAGAAALVKQKNPSWSNVQIRNHLKNTATSLGSTNLYGSGLVNAEAATR

SEQ ID NO: 62338 - protein, 380 aa, Unidentified
VRSKKLWIVASTALLISVAFSSSIASAAEEAKEKYLIGFNEQEAVSEFVEQVEANDEVAILSEEEEVEIELLHEFETIPVLSVELSPEDVDALELDPAISYIEEDAEVTTMAQSVPWGISRVQAPAAHNRGLAGSGVKVAVLDTGISTHPDLNIRGGASFVPGEPSTQDGNGHGTHVAGTIAALNNSIGVLGVAPSAELYAVKVLGASGAGSVSSIAQGLEWAGNNGMHVANLSLGSPSPSATLEQAVNSATSRGVLVVAASGNSGAESISYPARYANAMAVGATDQNNNRASFSQYGAGLDIVAPGVNVQSTYPGSTYASLNGTSMATPHVAGAAALVKQKNPSWSNVQIRNHLKNTATSLGSTNLYGSGLVNAEAATR

SEQ ID NO: 62339 - protein, 380 aa, Unidentified
VRSKKLWIVASTALLISVAFSSSIASAAEEAKEKYLIGFNEQEAVSEFVEQVEANDEVAILSEEEEVEIELLHEFETIPVLSVELSPEDVDALELDPAISYIEEDAEVTTMAQSVPWGISRVQAPAAHNRGLTGSGVKVAVLDTGISTHPDLNIRGGASFVPGEPSTQDGNGHGTHVAGTIAALNNRIGVLGVAPSAELYAVKVLGASGSGSVSSIAQGLEWAGNNGMHVANLSLGSPSPSATLEQAVNSATSRGVLVVAASGNSGAGSISYPARYANAMAVGATDQNNNRASFSQYGAGLDIVAPGVNVQSTAPGSTYASLNGTSMATPHVAGAAALVFQKNPSWSNVQIRNHLKNTATSLGSTNLYGSGLVNAEAATR

SEQ ID NO: 62340 - protein, 380 aa, Unidentified
VRSKKLWIVASTALLISVAFSSSIASAAEEAKEKYLIGFNEQEAVSEFVEQVEANDEVAILSEEEEVEIELLHEFETIPVLSVELSPEDVDALELDPAISYIEEDAEVTTMAQSVPWGISRVQAPAAHRRGLTGRGVKVAVLDTGISTHPDLNIRGGASFVPGEPSTQDGNGHGTHVAGTIAALNNSIGVLGVAPSAELYAVKVLGASGSGSVSSIAQGLEWAGNNGMHVANLSLGSPSPSATLEQAVNSATSRGVLVVAASGNSGAGSISYPARYANAMAVGATDQNNNRASFSQYGAGLDIVAPGVNVQSTYPGSTYASLNGTSMATPHVAGAAALVKQKNPSWSNRQIRNHLKNTATSLGSTNLYGSGLVNAEAATR

SEQ ID NO: 62341 - protein, 380 aa, Unidentified
VRSKKLWIVASTALLISVAFSSSIASAAEEAKEKYLIGFNEQEAVSEFVEQVEANDEVAILSEEEEVEIELLHEFETIPVLSVELSPEDVDALELDPAISYIEEDAEVTTMAQSVPWGISRVQAPAAHNRRLTGSGVKVAVLDTGISTHPDLNIRGGASFVPGEPSTQDGNGHGTHVAGTIAALNNSIGVLGVAPSAELYAVKVLGASGSGSVSSIAQGLEWAGANGMHVANLSLGSPSPSATLEQAVNSATSRGVLVVAASGNSGAGSISYPARYANAMAVGATDQNNNRASFSQYGAGLDIVAPGVNVQSTYPGSTYASLNGTSMATPHVAGAAALVKQKNPSWSNVQIRNHLKNTATSLGSTNLYGSGLVRAEAATR

SEQ ID NO: 62342 - protein, 380 aa, Unidentified
VRSKKLWIVASTALLISVAFSSSIASAAEEAKEKYLIGFNEQEAVSEFVEQVEANDEVAILSEEEEVEIELLHEFETIPVLSVELSPEDVDALELDPAISYIEEDAEVTTMAQSVPWGISRVQAPAAHNRRLTGSGVKVAVLDTGISTHPDLNIRGGASFVPGEPSTQDGNGHGTHVAGTIAALNNSIGVLGVAPSAELYAVKVLGASGSGSVSSIAQGLEWAGNNGMHVANLSLGSPSPSATLEQAVNSATSRGVLVVAASGNSGAGSISYPARYANAMAVGATDQNNNRASFSQYGAGLDIVAPGVNVQSTYPGSTYASLNGTSMATPHVAGAAVLVKQKNPSWSNVRIRNHLKNTATSLGSTNLYGSGLVNAEAATR

SEQ ID NO: 62343 - protein, 380 aa, Unidentified
VRSKKLWIVASTALLISVAFSSSIASAAEEAKEKYLIGFNEQEAVSEFVEQVEANDEVAILSEEEEVEIELLHEFETIPVLSVELSPEDVDALELDPAISYIEEDAEVTTMAQSVPWGISRVQAPAAHNRGLAGSGVKVAVLDTGISTHPDLNIRGGASFVPGEPSTQDGNGHGTHVAGTIAALNNSIGVLGVAPSAELYAVKVLGASGSGSVSSIAQGLEWAGNNGMHVANLSLGSPSPSATLEQAVNSATSRGVLVVAASGNSGAGSISYPARYANAMAVGATDQNNNRASFSQYGAGLDIVAPGVNVQSTEPGSTYASLNGTSMATPHVAGAAALVKQKNPSWSNVQIRNHLKNTATSLGSTNLYGSGLVNAFAATR

SEQ ID NO: 62344 - protein, 380 aa, Unidentified
VRSKKLWIVASTALLISVAFSSSIASAAEEAKEKYLIGFNEQEAVSEFVEQVEANDEVAILSEEEEVEIELLHEFETIPVLSVELSPEDVDALELDPAISYIEEDAEVTTMAQSRPWGISRVQAPAAHNRRLTGSGVKVAVLDTGISTHPDLNIRGGASFVPGEPSTQDGNGHGTHVAGTIAALNNSIGVLGVAPSAELYAVKVLGASGSGSVSSIAQGLEWAGNNGMHVANLSLGSPSPSATLEQAVNSATSRGVLVVAASGNSGAGSISYPARYANAMAVGATDQNNNRASFSQYGAGLDIVAPGVNVQSTYPGSTYASLNGTSMATPHVAGAAALVKQKNPSWSNVQIRNRLKNTATSLGSTNLYGSGLVNAEAATR

SEQ ID NO: 62345 - protein, 380 aa, Unidentified
VRSKKLWIVASTALLISVAFSSSIASAAEEAKEKYLIGFNEQEAVSEFVEQVEANDEVAILSEEEEVEIELLHEFETIPVLSVELSPEDVDALELDPAISYIEEDAEVTTMAQSVPWGISRVQAPASHNRGLTGSGVKVAVLDTGISTHPDLNIRGGASFVPGEPSTQDGNGHGTHVAGTIAALNNSIGVLGVAPSAELYAVKVLGASGSGSVSSIAQGLEWAGNNGMHVANLSLGSPSPSATLEQAVNSATSRGVLVVAASGNSGEGSISYPARYANAMAVGATDQNNNRASFSQYGAGLDIVAPGVNVQSTYPGSTYASLNGTSMATPHVAGAAALVKQKNPSWSNVQIRNRLKNTATSLGSTNLYGSGLVNAEAATR

SEQ ID NO: 62346 - protein, 380 aa, Unidentified
VRSKKLWIVASTALLISVAFSSSIASAAEEAKEKYLIGFNEQEAVSEFVEQVEANDEVAILSEEEEVEIELLHEFETIPVLSVELSPEDVDALELDPAISYIEEDAEVTTMAQSVPWGISRVQAPAAHNRGLTGSGVKVAVLDTGISTHPDLNIRGGASFVPGEPSTQDGNGHGTHVAGTIAALNNSIGVLGVAPSAELYAVKVLGASGSGAVSSIAQGLEWAGNNGMHVANLSLGSPSPSATLEQAVNSATSRGVLVVAASGNSGAGSISYPARYANAMAVGATDQNNNRASFSQYGAGLDIVAPGVNVQSTYPGSTYASLNGTSMATPHVAGAAVLVKQKNPSWSNVRIRNHLKNTATSLGSTNLYGSGLVNAEAATR

SEQ ID NO: 62347 - protein, 380 aa, Unidentified
VRSKKLWIVASTALLISVAFSSSIASAAEEAKEKYLIGFNEQEAVSEFVEQVEANDEVAILSEEEEVEIELLHEFETIPVLSVELSPEDVDALELDPAISYIEEDAEVTTMAQSVPWGISRVQAPAAHNRGLTGSGVKVAVLDTGISTHPDLNIRGGASFVPGEPSTQDGEGHGTHVAGTIAALNNSIGVLGVAPSAELYAVKVLGASGSGSVSSIAQGLEWAGLNGMHVANLSLGSPSPSATLEQAVNSATSRGVLVVAASGNSGAGSISYPARYANAMAVGATDQNNNRADFSQYGAGLDIVAPGVNVQSTYPGSTYASLNGTSMATPHVAGAAALVKQKNPSWSNVQIRNHLKNTATSLGSTNLYGSGLVNAEAATR

SEQ ID NO: 62348 - protein, 380 aa, Unidentified
VRSKKLWIVASTALLISVAFSSSIASAAEEAKEKYLIGFNEQEAVSEFVEQVEANDEVAILSEEEEVEIELLHEFETIPVLSVELSPEDVDALELDPAISYIEEDAEVTTMAQSVPWGISRVQAPAAHNRRLTGSGVKVAVLDTGISTHPDLNIRGGASFVPGEPSTQDGNGHGTHVAGTIAALNNSIGVLGVAPSAELYAVKVLGASGSGSVSSIAQGLEWAGNNGMHVANLSLGSPSPSATLEQAVNSATSRGVLVVAASGNSGAGSISYPARYANAMAVGATDQNNNRASFSQYGAGLDIVAPGVNVQSTYPGSTYASLNGTSMATPHVAGAAALVKQKNPSWRNVQIRNHLKNTATSLGSTNLYGSGLVRAEAATR

SEQ ID NO: 62349 - protein, 380 aa, Unidentified
VRSKKLWIVASTALLISVAFSSSIASAAEEAKEKYLIGFNEQEAVSEFVEQVEANDEVAILSEEEEVEIELLHEFETIPVLSVELSPEDVDALELDPAISYIEEDAEVTTMAQSVPWGISRVQAPAAHNRGLTGSGVKVAVLDTGISTHPDLNIRGGASFVPGEPSTQDGNGHGTHVAGTIAALNNSIGVLGVAPSAELYAVKVLGASGSGSVSSIAQGIEWAGNNGMHVANLSLGSPSPSATLEQAVNSATSRGVLVVAASGNSGAGSISYPARYANAMAVGATDQNNNRASFSQYGAGLDIVAPGVNVQSTYPGSTYFSLNGTSMATPHVAGAAALVKQKNSSWSNVQIRNHLKNTATSLGSTNLYGSGLVNAEAATR

SEQ ID NO: 62350 - protein, 380 aa, Unidentified
VRSKKLWIVASTALLISVAFSSSIASAAEEAKEKYLIGFNEQEAVSEFVEQVEANDEVAILSEEEEVEIELLHEFETIPVLSVELSPEDVDALELDPAISYIEEDAEVTTMAQSVPWGISRVQAPAAHNRGLTGRGVKVAVLDTGISTHPDLNIRGGASFVPGEPSTQDGNGHGTHVAGTIAALNNSIGVLGVAPSAELYAVKVLGASGSGSVSSIAQGLEWAGNNGMHVANLSLGSPSPSATLEQAVNSATSRGVLVVAASGNSGAGSISYPARYANAMAVGATDQNNNRASFSQYGAGLDIVAPGVNVQSTYPGSTYASLNGTSMATPHVAGAAALVFQKNPSWSFVQIRNHLKNTATSLGSTNLYGSGLVNAEAATR

SEQ ID NO: 62351 - protein, 380 aa, Unidentified
VRSKKLWIVASTALLISVAFSSSIASAAEEAKEKYLIGFNEQEAVSEFVEQVEANDEVAILSEEEEVEIELLHEFETIPVLSVELSPEDVDALELDPAISYIEEDAEVTTMAQSVPWGISRVQAPAAHNRGMTGRGVKVAVLDSGISTHPDLNIRGGASFVPGEPSTQDGNGHGTHVAGTIAALNNSIGVLGVAPSAELYAVKVLGASGSGSVSSIAQGLEWAGNNGMHVANLSLGSPSPSATLEQAVNSATSRGVLVVAASGNSGAGSISYPARYANAMAVGATDQNNNRASFSQYGAGLDIVAPGVNVQSTYPGSTYASLNGTSMATPHVAGAAALVKQKNPSWSNVQIRNHLKNTATSLGSTNLYGSGLVNAEAATR

SEQ ID NO: 62352 - protein, 380 aa, Unidentified
VRSKKLWIVASTALLISVAFSSSIASAAEEAKEKYLIGFNEQEAVSEFVEQVEANDEVAILSEEEEVEIELLHEFETIPVLSVELSPEDVDALELDPAISYIEEDAEVTTMAQSVPWGISRVQAPAAHNRGLTGSGVKVAVLDTGISTHPDLNIRGGASFVPGEPSTQDGNGHGTHVAGTIAALNNSIGVLGVAPSAELYAVKVLGASGSGSISSIAQGLEWAGNNGMHVANLSLGSPSPSATLEQAVNSATSRGVLVVAASGNSGAGSISYPARYANAMAVGATDQNNNRASFSQYGAGLDIVAPGVNVQSTYPGSTYASLNGTSMATPHVAGAAVLVKQKNPSWSNVQIRNRLKNTATSLGSTNLYGSGLVNAEAATR

SEQ ID NO: 62353 - protein, 380 aa, Unidentified
VRSKKLWIVASTALLISVAFSSSIASAAEEAKEKYLIGFNEQEAVSEFVEQVEANDEVAILSEEEEVEIELLHEFETIPVLSVELSPEDVDALELDPAISYIEEDAEVTTMAQSVPWGISRVQAPAAHNRGLTGSGVKVAVLDTGISTHPDLNIRGGASFVPGEPSTQDGEGHGTHVAGTIAALNNSIGVLGVAPSAELYAVKVLGASGSGSVSSIAQGLEWAGNNGMHVANLSLGSPSPSATLEQAVNSATSRGVLVVAASGNSGAGSISYPARYANAMAVGATDQNNNRADFSQYGAGLDIVAPGVNVQSTYPGSTYASLNGTSMATPHVAGAAALVKQKNGSWSNVQIRNHLKNTATSLGSTNLYGSGLVNAEAATR

SEQ ID NO: 62354 - protein, 380 aa, Unidentified
VRSKKLWIVASTALLISVAFSSSIASAAEEAKEKYLIGFNEQEAVSEFVEQVEANDEVAILSEEEEVEIELLHEFETIPVLSVELSPEDVDALELDPAISYIEEDAEVTTMAQSVPWGISRVQAPAAHNRGLTGRGVKVAVLDTGISTHPDLNIRGGASFVPGEPSTQDGNGHGTHVAGTIAALNNSIGVLGVAPSAELYAVKVLGASGGGAVSSIAQGLEWAGNNGMHVANLSLGSPSPSATLEQAVNSATSRGVLVVAASGNSGAGSISYPARYANAMAVGATDQNNNRASFSQYGAGLDIVAPGVNVQSTYPGSTYASLNGTSMATPHVAGAAALVKQKNPSWSNVQIRNHLKNTATSLGSTNLYGSGLVNAEAATR

SEQ ID NO: 62355 - protein, 380 aa, Unidentified
VRSKKLWIVASTALLISVAFSSSIASAAEEAKEKYLIGFNEQEAVSEFVEQVEANDEVAILSEEEEVEIELLHEFETIPVLSVELSPEDVDALELDPAISYIEEDAEVTTMAQSVPWGISRVQAPAAHNRGLTGRGVKVAVLDTGISTHPDLDIRGGASFVPGEPSTQDGNGHGTHVAGTIAALNNSIGVLGVAPSAELYAVKVLGASGSGSVSSIAQGLEWAGNNGMHVANLSLGSPSPSATLEQAVNSATSRGVLVVAASGNSGAGSISYPARYANAMAVGATDQNNNRASFSQYGAGLDIVAPGVNVQSTYPGSTYASLNGTSMATPHVAGAAALVKQKNPSWSNVQIRNRLKNTATSLGSTNLYGSGLVNAEAATR

SEQ ID NO: 62356 - protein, 380 aa, Unidentified
VRSKKLWIVASTALLISVAFSSSIASAAEEAKEKYLIGFNEQEAVSEFVEQVEANDEVAILSEEEEVEIELLHEFETIPVLSVELSPEDVDALELDPAISYIEEDAEVTTMAQSVPWGIARVQAPAAHNRGLTGSGVKVAVLDTGISTHPDLRIRGGASFVPGEPSTQDGNGHGTHVAGTIAALNNSIGVLGVAPSAELYAVKVLGASGSGSVSSIAQGLEWAGNNGMHVANLSLGSPSPSATLEQAVNSATSRGVLVVAASGNSGAGSISYPARYANAMAVGATDQNNNRASFSQYGAGLDIVAPGVNVQSTYPGSTYASLNGTSMATPHVAGAAALVKQKNPSRSNVQIRNHLKNTATSLGSTNLYGSGLVNAEAATR

SEQ ID NO: 62357 - protein, 380 aa, Unidentified
VRSKKLWIVASTALLISVAFSSSIASAAEEAKEKYLIGFNEQEAVSEFVEQVEANDEVAILSEEEEVEIELLHEFETIPVLSVELSPEDVDALELDPAISYIEEDAEVTTMAQSVPWGISRVQAPAAHNRGLTGRGVKVAVLDTGISTHPDLNIRGGASFVPGEPSTQDGNGHGTHVAGTIAALNNSIGVLGVAPSAELYAVKVLGASGSGSISSIAQGLEWAGNNGMHVANLSLGSPSPSATLEQAVNSATSRGVLVVAASGNSGAGSISYPARYANAMAVGATDQNNNRASFSQYGAGLDIVAPGVNVQSTYPGSTYASLNGTSMATPHVAGAAVLVKQKNPSWSNVQIRNHLKNTATSLGSTNLYGSGLVNAEAATR

SEQ ID NO: 62358 - protein, 380 aa, Unidentified
VRSKKLWIVASTALLISVAFSSSIASAAEEAKEKYLIGFNEQEAVSEFVEQVEANDEVAILSEEEEVEIELLHEFETIPVLSVELSPEDVDALELDPAISYIEEDAEVTTMAQSVPWGISRVQAPAAHNRGLTGSGVKVAVLDTGISTHPDLNIRGGASFVPGEPSTQDGNGHGTHVAGTIAALNNSIGVLGVAPSAELYAVKVLGASGSGSVSSIAQGLEWAGNFGMHVANLSLGSPSPSATLEQAVNSATSRGVLVVAASGNSGAGSISYPARYANAMAVGATDQNNNRASFSQYGAGLDIVAPGVNVQSTYPGSAYFSLNGTSMATPHVAGAAALVKQKNPSWSNVQIRNHLKNTATSLGSTNLYGSGLVNAEAATR

SEQ ID NO: 62359 - protein, 380 aa, Unidentified
VRSKKLWIVASTALLISVAFSSSIASAAEEAKEKYLIGFNEQEAVSEFVEQVEANDEVAILSEEEEVEIELLHEFETIPVLSVELSPEDVDALELDPAISYIEEDAEVTTMAQSVPWGISRVQAPAAHNRRLTGSGVKVAVLDTGISTHPDLNIRGGASFVPGEPSTQDGNGHGTHVAGTIAALNNSIGVLGVAPSAELYAVKVLGASGSGSVSSIAQGLEWAGNNGMHVANLSLGSPSPSATLEQAVNSATSRGVLVVAASGNSGAGSISYPARYANAMAVGATDQNNNRASFSQYGAGLDIVAPGVNVQSTYPGSTYASLNGTSMATPHVAGAAALVKQKNPSWSNVQIRNRLKNTATSLGSTNLYGSGLVRAEAATR

SEQ ID NO: 62360 - protein, 380 aa, Unidentified
VRSKKLWIVASTALLISVAFSSSIASAAEEAKEKYLIGFNEQEAVSEFVEQVEANDEVAILSEEEEVEIELLHEFETIPVLSVELSPEDVDALELDPAISYIEEDAEVTTMAQSVPWGISRVQAPASHNRGLTGSGVKVAVLDTGISTHPDLNIRGGASFVPGEPSTQDGNGHGTHVAGTIAALNNSIGVLGVAPSAELYAVKVLGASGSGSVSSIAQGVEWAGNNGMHVANLSLGSPSPSATLEQAVNSATSRGVLVVAASGNSGAGSISYPARYANAMAVGATDQNNNRADFSQYGAGLDIVAPGVNVQSTYPGSTYASLNGTSMATPHVAGAAALVKQKNPSWSNVQIRNHLKNTATSLGSTNLYGSGLVNAEAATR

SEQ ID NO: 62361 - protein, 380 aa, Unidentified
VRSKKLWIVASTALLISVAFSSSIASAAEEAKEKYLIGFNEQEAVSEFVEQVEANDEVAILSEEEEVEIELLHEFETIPVLSVELSPEDVDALELDPAISYIEEDAEVTTMAQSVPWGISRVQAPAAHNRGLTGSGVKVAVLDTGISTHPDLNIRGGASFVPGEPSTQDGEGHGTHVAGTIAALNNSIGVLGVAPSAELYAVKVLGASGSGSVSSIAQGLEWAGNNGMHVANLSLGSPSPSATLEQAVNSATSRGVLVVAASGNSGEGSISYPARYANAMAVGATDQNNNRASFSQYGAGLDIVAPGVNVQSTYPGSTYASLNGTSMATPHVAGAAALVKQKNPSWSNVQIRNRLKNTATSLGSTNLYGSGLVNAEAATR

SEQ ID NO: 62362 - protein, 380 aa, Unidentified
VRSKKLWIVASTALLISVAFSSSIASAAEEAKEKYLIGFNEQEAVSEFVEQVEANDEVAILSEEEEVEIELLHEFETIPVLSVELSPEDVDALELDPAISYIEEDAEVTTMAQSVPWGISRVQAPAAHRRGLTGSGVKVAVLDTGISTHPDLNIRGGASFVPGEPSTQDGNGHGTHVAGTIAALDNSIGVLGVAPSAELYAVKVLGASGSGSVSSIAQGLEWAGNNGMHVANLSLGSPSPSATLEQAVNSATSRGVLVVAASGNSGAGSISYPARYANAMAVGATDQNNNRASFSQYGAGLDIVAPGVNVQSTYPGSTYASLNGTSMATPHVAGAAALVKQKNPSWSNVRIRNHLKNTATSLGSTNLYGSGLVNAEAATR

SEQ ID NO: 62363 - protein, 380 aa, Unidentified
VRSKKLWIVASTALLISVAFSSSIASAAEEAKEKYLIGFNEQEAVSEFVEQVEANDEVAILSEEEEVEIELLHEFETIPVLSVELSPEDVDALELDPAISYIEEDAEVTTMAQSVPWGISRVQAPAAHNRGLAGSGVKVAVLDTGISTHPDLNIRGGASFVPGEPSTQDGNGHGTHVAGTIAALNNSIGVLGVAPSAELYAVKVLGASGSGGVSSIAQGLEWAGNNGMHVANLSLGSPSPSATLEQAVNSATSRGVLVVAASGNSGAESISYPARYANAMAVGATDQNNNRASFSQYGAGLDIVAPGVNVQSTYPGSTYASLNGTSMATPHVAGAAALVKQKNPSWSNVQIRNHLKNTATSLGSTNLYGSGLVNAEAATR

SEQ ID NO: 62364 - protein, 380 aa, Unidentified
VRSKKLWIVASTALLISVAFSSSIASAAEEAKEKYLIGFNEQEAVSEFVEQVEANDEVAILSEEEEVEIELLHEFETIPVLSVELSPEDVDALELDPAISYIEEDAEVTTMAQSVPWGISRVQAPAAHNRGLTGRGVKVAVLDSGISTHPDLNIRGGASFVPGEPSTQDGNGHGTHVAGTIAALNNSIGVLGVAPSAELYAVKVLGASGSGSVSSIAQGLEWAGNNGMHVANLSLGSPSPSVTLEQAVNSATSRGVLVVAASGNSGAGSISYPARYANAMAVGATDQNNNRASFSQYGAGLDIVAPGVNVQSTYPGSTYASLNGTSMATPHVAGAAALVKQKNPSWSNVQIRNHLKNTATSLGSTNLYGSGLVNAEAATR

SEQ ID NO: 62365 - protein, 380 aa, Unidentified
VRSKKLWIVASTALLISVAFSSSIASAAEEAKEKYLIGFNEQEAVSEFVEQVEANDEVAILSEEEEVEIELLHEFETIPVLSVELSPEDVDALELDPAISYIEEDAEVTTMAQSVPWGISRVQAPAAHNRGLTGRGVKVAVLDSGISTHPDLNIRGGASFVPGEPSTQDGNGHGTHVAGTIAALNNSIGVLGVAPSAELYAVKVLGASGSGSVSSIAQGLEWAGNNGMHVANLSLGSPSPSATLEQAVNSATSRGVLVVAASGNSGAGSISYPARYANAMAVGATDQNNNRASFSQYGAGLDIVAPGVNVQSTYPGSTYASLNGTSMATPHVAGAAALVKQKNPSRSNVQIRNHLKNTATSLGSTNLYGSGLVNAEAATR

SEQ ID NO: 62366 - protein, 380 aa, Unidentified
VRSKKLWIVASTALLISVAFSSSIASAAEEAKEKYLIGFNEQEAVSEFVEQVEANDEVAILSEEEEVEIELLHEFETIPVLSVELSPEDVDALELDPAISYIEEDAEVTTMAQSVPWGISRVQAPAAHNRGLTGSGVKVAVLDTGISTHPDLNIRGGASFVPGEPSTQDGNGHGTHVAGTIAALNNRIGVLGVAWSAELYAVKVLGASGSGSVSSIAQGLEWAGNNGMHVANLSLGSPSPSATLEQAVNSATSRGVLVVAASGNSGAGSISYPARYANAMAVGATDQNNNRASFSQYGAGLDIVAPGVNVQSTAPGSTYASLNGTSMATPHVAGAAALVKQKNPSWSNVQIRNHLKNTATSLGSTNLYGSGLVNAEAATR

SEQ ID NO: 62367 - protein, 380 aa, Unidentified
VRSKKLWIVASTALLISVAFSSSIASAAEEAKEKYLIGFNEQEAVSEFVEQVEANDEVAILSEEEEVEIELLHEFETIPVLSVELSPEDVDALELDPAISYIEEDAEVTTMAQSVPWGISRVQAPAAHNRRLTGSGVKVAVLDTGISTHPDLRIRGGASFVPGEPSTQDGNGHGTHVAGTIAALNNSIGVLGVAPSAELYAVKVLGASGSGSVSSIAQGLEWAGNNGMHVANLSLGSPSPSATLEQAVNSATSRGVLVVAASGNSGAGSISYPARYANAMAVGATDQNNNRASFSQYGAGLDIVAPGVNVQSTYPGSTYASLNGTSMATPHVAGAAALVKQKNPSWSNVQIRNHLKNTATSLGSTNLYGSGLVRAEAATR

SEQ ID NO: 62368 - protein, 380 aa, Unidentified
VRSKKLWIVASTALLISVAFSSSIASAAEEAKEKYLIGFNEQEAVSEFVEQVEANDEVAILSEEEEVEIELLHEFETIPVLSVELSPEDVDALELDPAISYIEEDAEVTTMAQSVPWGISRVQAPAAHRRRLTGSGVKVAVLDTGISTHPDLNITGGASFVPGEPSTQDGNGHGTHVAGTIAALNNSIGVLGVAPSAELYAVKVLGASGSGSVSSIAQGLEWAGNNGMHVANLSLGSPSPSATLEQAVNSATSRGVLVVAASGNSGAGSISYPARYANAMAVGATDQNNNRASFSQYGAGLDIVAPGVNVQSTYPGSTYASLNGTSMATPHVAGAAALVKQKNPSWSNVQIRNHLKNTATSLGSTNLYGSGLVNAEAATR

SEQ ID NO: 62369 - protein, 380 aa, Unidentified
VRSKKLWIVASTALLISVAFSSSIASAAEEAKEKYLIGFNEQEAVSEFVEQVEANDEVAILSEEEEVEIELLHEFETIPVLSVELSPEDVDALELDPAISYIEEDAEVTTMAQSVPWGISRVQAPAAHNRGLTGSGVKVAVLDTGISTHPDLNIRGGASFVPGEPSTQDGNGHGTHVAGTIAALNNSIGVLGVAPSAELYAVKVLGASGSGSLSSIAQGLEWAGNNGMHVANLSLGSPSPSATLEQAVNSATSRGVLVVAASGNSGEGSISYPARYANAMAVGATDQNNNRASFSQYGAGLDIVAPGVNVQSTYPGSTYASLNGTSMATPHVAGAAALVKQKNPSWSNVQIRNRLKNTATSLGSTNLYGSGLVNAEAATR

SEQ ID NO: 62370 - protein, 380 aa, Unidentified
VRSKKLWIVASTALLISVAFSSSIASAAEEAKEKYLIGFNEQEAVSEFVEQVEANDEVAILSEEEEVEIELLHEFETIPVLSVELSPEDVDALELDPAISYIEEDAEVTTMAQSVPWGISRVQAPAAHNRGLTGSGVKVAVLDTGISTHPDLNIRGGASFVPGEPSTQDGNGHGTHVAGTIAALNNSIGVLGVAPSAELYAVKVLGASGGGSISSIAQGLEWAGNNGMHVANLSLGSPSPSATLEQAVNSATSRGVLVVAASGNSGAGSISYPARYANAMAVGATDQNNNRASFSQYGAGLDIVAPGVNVQSTYPGSTYASLNGTSMATPHVAGAAVLVKQKNPSWSNVQIRNHLKNTATSLGSTNLYGSGLVNAEAATR

SEQ ID NO: 62371 - protein, 380 aa, Unidentified
VRSKKLWIVASTALLISVAFSSSIASAAEEAKEKYLIGFNEQEAVSEFVEQVEANDEVAILSEEEEVEIELLHEFETIPVLSVELSPEDVDALELDPAISYIEEDAEVTTMAQSVPWGISRVQAPAAHNRGLTGSGVKVAVLDTGISTHPDLRIRGGASFVPGEPSTQDGNGHGTHVAGTIAALNNSIGVLGVAPSAELYAVKVLGASGSGSVSSIAQGLEWAGNNGMHVANLSLGSPSPSATLEQAVNSATSRGVLVVAASGNSGAGSISYPARYANAMAVGATDQNNNRASFSQYGAGLDIVAPGVNVQSTYPGSTYASLNGTSMATPHVAGAAALVKQKNPSWRNVQIRNRLKNTATSLGSTNLYGSGLVNAEAATR

SEQ ID NO: 62372 - protein, 380 aa, Unidentified
VRSKKLWIVASTALLISVAFSSSIASAAEEAKEKYLIGFNEQEAVSEFVEQVEANDEVAILSEEEEVEIELLHEFETIPVLSVELSPEDVDALELDPAISYIEEDAEVTTMAQSVPWGISRVQAPAAHNRGLTGRGVKVAVLDTGISTHPDLNIRGGASFVPGEPSTQDGNGHGTHVAGTIAALNNRIGVLGVAWSAELYAVKVLGASGSGSVSSIAQGLEWAGNNGMHVANLSLGSPSPSATLEQAVNSATSRGVLVVAASGNSGAGSISYPARYANAMAVGATDQNNNRASFSQYGAGLDIVAPGVNVQSTYPGSTYASLNGTSMATPHVAGAAALVKQKNPSWSNVQIRNHLKNTATSLGSTNLYGSGLVNAEAATR

SEQ ID NO: 62373 - protein, 380 aa, Unidentified
VRSKKLWIVASTALLISVAFSSSIASAAEEAKEKYLIGFNEQEAVSEFVEQVEANDEVAILSEEEEVEIELLHEFETIPVLSVELSPEDVDALELDPAISYIEEDAEVTTMAQSVPWGISRVQAPAAHNRRLTGSGVKVAVLDTGISTHPDLNIRGGASFVPGEPSTQDGNGHGTHVAGTIAALNNSIGVLGVAPSAELYAVKVLGASGSGSVSSIAQGLEWAGNNGMHVANLSLGSPSPSATLEQAVNSATSRGVLVVAASGNSGAGSISYPARYANAMAVGATDQNNNRASFSQYGAGLDIVAPGVNVQSTYPGFTYASLNGTSMATPHVAGAAALVKQKNPSWSNVQIRNRLKNTATSLGSTNLYGSGLVNAEAATR

SEQ ID NO: 62374 - protein, 380 aa, Unidentified
VRSKKLWIVASTALLISVAFSSSIASAAEEAKEKYLIGFNEQEAVSEFVEQVEANDEVAILSEEEEVEIELLHEFETIPVLSVELSPEDVDALELDPAISYIEEDAEVTTMAQSVPWGISRVQAPAAHNRGLTGRGVKVAVLDTGISTHPDLNIRGGASFVPGEPSTQDGNGHGTHVAGTIAALNNSIGVLGVAWSAELYAVKVLGASGSGSVSSIAQGLEWAGNNGMHVANLSLGSPSPSATLEQAVNSATSRGVLVVAASGNSGAGSISYPARYANAMAVGATDQNNNRASFSQYGAGLDIVAPGVNVQSTYPGSTYASLNGTSMATPHVAGAAALVKQKNPSWSFVQIRNHLKNTATSLGSTNLYGSGLVNAEAATR

SEQ ID NO: 62375 - protein, 380 aa, Unidentified
VRSKKLWIVASTALLISVAFSSSIASAAEEAKEKYLIGFNEQEAVSEFVEQVEANDEVAILSEEEEVEIELLHEFETIPVLSVELSPEDVDALELDPAISYIEEDAEVTTMAQSVPWGISRVQAPAAHNRGLTGRGVKVAVLDTGISTHPDLRIRGGASFVPGEPSTQDGNGHGTHVAGTIAALNNSIGVLGVAPSAELYAVKVLGASGSGSVSSIAQGLEWAGNNGMHVANLSLGSPSPSATLEQAVNSATSRGVLVVAASGNSGAGSISYPARYANAMAVGATDQNNNRASFSQYGAGLDIVAPGVNVQSTYPGSTYASLNGTSMATPHVAGAAALVKQKNPSWRNVQIRNHLKNTATSLGSTNLYGSGLVNAEAATR

SEQ ID NO: 62376 - protein, 380 aa, Unidentified
VRSKKLWIVASTALLISVAFSSSIASAAEEAKEKYLIGFNEQEAVSEFVEQVEANDEVAILSEEEEVEIELLHEFETIPVLSVELSPEDVDALELDPAISYIEEDAEVTTMAQSVPWGISRVQAPAAHNRRLTGSGVKVAVLDTGISTHPDLNITGGASFVPGEPSTQDGNGHGTHVAGTIAALNNSIGVLGVAPSAELYAVKVLGASGSGSVSSIAQGLEWAGNNGMHVANLSLGSPSPSATLEQAVNSATSRGVLVVAASGNSGAGSISYPARYANAMAVGATDQNNNRASFSQYGAGLDIVAPGVNVQSTYPGSTYASLNGTSMATPHVAGAAALVKQKNPSWSNVQIRNRLKNTATSLGSTNLYGSGLVNAEAATR

SEQ ID NO: 62377 - protein, 380 aa, Unidentified
VRSKKLWIVASTALLISVAFSSSIASAAEEAKEKYLIGFNEQEAVSEFVEQVEANDEVAILSEEEEVEIELLHEFETIPVLSVELSPEDVDALELDPAISYIEEDAEVTTMAQSVPWGISRVQAPAAHNRRLTGSGVKVAVLDTGISTHPDLRIRGGASFVPGEPSTQDGNGHGTHVAGTIAALNNSIGVLGVAPSAELYAVKVLGASGSGSVSSIAQGLEWAGNNGMHVANLSLGSPSPSATLEQAVNSATSRGVLVVAASGNSGAGSISYPARYANAMAVGATDQNNNRASFSQYGAGLDIVAPGVNVQSTYPGSTYASLNGTSMATPHVAGEAALVKQKNPSWSNVQIRNHLKNTATSLGSTNLYGSGLVNAEAATR

SEQ ID NO: 62378 - protein, 380 aa, Unidentified
VRSKKLWIVASTALLISVAFSSSIASAAEEAKEKYLIGFNEQEAVSEFVEQVEANDEVAILSEEEEVEIELLHEFETIPVLSVELSPEDVDALELDPAISYIEEDAEVTTMAQSVPWGISRVQAPAAHNRKLTGFGVKVAVLDTGISTHPDLNIRGGASFVPGEPSTQDGEGHGTHVAGTIAALNNSIGVLGVAPSAELYAVKVLGASGSGSVSSIAQGLEWAGNNGMHVANLSLGSPSPSATLEQAVNSATSRGVLVVAASGNSGAGSISYPARYANAMAVGATDQNNNRASFSQYGAGLDIVAPGVNVQSTYPGSTYASLNGTSMATPHVAGAAALVKQKNPSWSNVQIRNHLKNTATSLGSTNLYGSGLVNAEAATR

SEQ ID NO: 62379 - protein, 380 aa, Unidentified
VRSKKLWIVASTALLISVAFSSSIASAAEEAKEKYLIGFNEQEAVSEFVEQVEANDEVAILSEEEEVEIELLHEFETIPVLSVELSPEDVDALELDPAISYIEEDAEVTTMAQSVPWGISRVQAPAAHRRGLTGSGVKVAVLDTGISTHPDLNIRGGASFVPGEPSTQDGNGHGTHVAGTIAALNNSIGVLGVAPSAELYAVKVLGASGGGSISSIAQGLEWAGNNGMHVANLSLGSPSPSATLEQAVNSATSRGVLVVAASGNSGAGSISYPARYANAMAVGATDQNNNRASFSQYGAGLDIVAPGVNVQSTYPGSTYASLNGTSMATPHVAGAAALVKQKNPSWSNVQIRNHLKNTATSLGSTNLYGSGLVNAEAATR

SEQ ID NO: 62380 - protein, 380 aa, Unidentified
VRSKKLWIVASTALLISVAFSSSIASAAEEAKEKYLIGFNEQEAVSEFVEQVEANDEVAILSEEEEVEIELLHEFETIPVLSVELSPEDVDALELDPAISYIEEDAEVTTMAQSVPWGISRVQAPAAHNRGLTGSGVKVAVLDTGISTHPDLNIRGGASFVPGEPSTQDGNGHGTHVAGTIAALNNSIGVLGVAWSAELYAVKVLGASGSGSVSSIAQGLEWAGNNRMHVANLSLGSPSPSVTLEQAVNSATSRGVLVVAASGNSGAGSISYPARYANAMAVGATDQNNNRASFSQYGAGLDIVAPGVNVQSTYPGSTYASLNGTSMATPHVAGAAALVKQKNPSWSNVQIRNHLKNTATSLGSTNLYGSGLVNAEAATR

SEQ ID NO: 62381 - protein, 380 aa, Unidentified
VRSKKLWIVASTALLISVAFSSSIASAAEEAKEKYLIGFNEQEAVSEFVEQVEANDEVAILSEEEEVEIELLHEFETIPVLSVELSPEDVDALELDPAISYIEEDAEVTTMAQSVPWGISRVQAPAAHNRGLTGSGVKVAVLDTGISTHPDLNIRGGASFVPGEPSTQDGNGHGTHVAGTIAALNNSIGVLGVAPSAELYAVKVLGASGSGSVSGIAQGLEWAGNFGMHVANLSLGSPSPSATLEQAVNSATSRGVLVVAASGNSGAGSISYPARYANAMAVGATDQNNNRASFSQYGAGLDIVAPGVNVQSTYPGSTYASLNGTSMATPHVAGAAALVKQKLPSWSNVQIRNHLKNTATSLGSTNLYGSGLVNAEAATR

SEQ ID NO: 62382 - protein, 380 aa, Unidentified
VRSKKLWIVASTALLISVAFSSSIASAAEEAKEKYLIGFNEQEAVSEFVEQVEANDEVAILSEEEEVEIELLHEFETIPVLSVELSPEDVDALELDPAISYIEEDAEVTTMAQSVPWGISRVQAPAAHNRGLTGRGVKVAVLDSGISTHPDLNIRGGASFVPGEPSTQDGNGHGTHVAGTIAALNNSIGVLGVAPSAELYAVKVLGASGSGSVSSIAQGLEWAGNNGMHVANLSLGSPSPSATLEQAVNSATSRGVLVVAASGNSGAGSISYPARYANAMAVGATDQNNNRASFSQYGAGLDIVAPGVNVQSTYPGSTYASLNGTSMATPHVAGAAALVKQKNPSWSFVQIRNHLKNTATSLGSTNLYGSGLVNAEAATR

SEQ ID NO: 62383 - protein, 380 aa, Unidentified
VRSKKLWIVASTALLISVAFSSSIASAAEEAKEKYLIGFNEQEAVSEFVEQVEANDEVAILSEEEEVEIELLHEFETIPVLSVELSPEDVDALELDPAISYIEEDAEVTTMAQSVPWGISRVQAPAAHNRGLTGRGVKVAVLDTGISTHPDLNIRGGASFVPGEPSTQDGNGHGTHVAGTIAALNNSIGVLGVAPSAELYAVKVLGASGSGSVSSIAQGLEWAGNNRMHVANLSLGSPSPSATLEQAVNSATSRGVLVVAASGNSGAGSISYPARYANAMAVGATDQNNNRASFSQYGAGLDIVAPGVNVQSTAPGSTYASLNGTSMATPHVAGAAALVKQKNPSWSNVQIRNHLKNTATSLGSTNLYGSGLVNAEAATR

SEQ ID NO: 62384 - protein, 380 aa, Unidentified
VRSKKLWIVASTALLISVAFSSSIASAAEEAKEKYLIGFNEQEAVSEFVEQVEANDEVAILSEEEEVEIELLHEFETIPVLSVELSPEDVDALELDPAISYIEEDAEVTTMAQSVPWGISRVQAPAAHNRGLTGSGVKVAVLDSGISTHPDLNIRGGASFVPGEPSTQDGNGHGTHVAGTIAALNNSIGVLGVAPSAELYAVKVLGASGSGSVSSIAQGLEWAGNNRMHVANLSLGSPSPSATLEQAVNSATSRGVLVVAASGNSGAGSISYPARYANAMAVGATDQNNNRASFSQYGAGLDIVAPGVNVQSTYPGSTYASLNGTSMATPHVAGAAALVKQKNPSRSNVQIRNHLKNTATSLGSTNLYGSGLVNAEAATR

SEQ ID NO: 62385 - protein, 380 aa, Unidentified
VRSKKLWIVASTALLISVAFSSSIASAAEEAKEKYLIGFNEQEAVSEFVEQVEANDEVAILSEEEEVEIELLHEFETIPVLSVELSPEDVDALELDPAISYIEEDAEVTTMAQSVPWGISRVQAPAAHNRGLTGRGVKVAVLDTGISTHPDLNIRGGASFVPGEPSTQDGNGHGTHVAGTIAALNNSIGVLGVAPSAELYAVKVLGASGSGSVSSIAQGLEWAGNNGMHVANLSLGSPSPSATLEQAVNSATSRGVLVVAASGNSGAGSISYPARYANAMAVGATDQNNNRASFSQYGAGLDIVAPGVNVQSTYPGSTYFSLNGTSMATPHVAGAAALVKQKNPSWSNVQIRNHLKNTATSLGSTNLYGSGLVRAEAATR

SEQ ID NO: 62386 - protein, 380 aa, Unidentified
VRSKKLWIVASTALLISVAFSSSIASAAEEAKEKYLIGFNEQEAVSEFVEQVEANDEVAILSEEEEVEIELLHEFETIPVLSVELSPEDVDALELDPAISYIEEDAEVTTMAQSVPWGISRVQAPAAHNRGLTGRGVKVAVLDTGISTHPDLNIRGGASFVPGEPSTQDGNGHGTHVAGTIAALNNSIGVLGVAWSAELYAVKVLGASGSGSVSSIAQGLEWAGNNRMHVANLSLGSPSPSATLEQAVNSATSRGVLVVAASGNSGAGSISYPARYANAMAVGATDQNNNRASFSQYGAGLDIVAPGVNVQSTYPGSTYASLNGTSMATPHVAGAAALVKQKNPSWSNVQIRNHLKNTATSLGSTNLYGSGLVNAEAATR

SEQ ID NO: 62387 - protein, 380 aa, Unidentified
VRSKKLWIVASTALLISVAFSSSIASAAEEAKEKYLIGFNEQEAVSEFVEQVEANDEVAILSEEEEVEIELLHEFETIPVLSVELSPEDVDALELDPAISYIEEDAEVTTMAQSVPWGISRVQAPAAHNRRLTGSGVKVAVLDTGISTHPDLRIRGGASFVPGEPSTQDGNGHGTHVAGTIAALNNSIGVLGVAPSAELYAVKVLGASGSGSVSSIAQGLEWAGNNGMHVANLSLGSPSPSATLEQAVNSATSRGVLVVAASGNSGAGSISYPARYANAMAVGATDQNNNRASFSQYGAGLDIVAPGVNVQSTYPGSTYASLNGTSMATPHVAGAAALVKQKNPSRSNVQIRNHLKNTATSLGSTNLYGSGLVNAEAATR

SEQ ID NO: 62388 - protein, 380 aa, Unidentified
VRSKKLWIVASTALLISVAFSSSIASAAEEAKEKYLIGFNEQEAVSEFVEQVEANDEVAILSEEEEVEIELLHEFETIPVLSVELSPEDVDALELDPAISYIEEDAEVTTMAQSVPWGISRVQAPAAHNRGLTGSGVKVAVLDTGISTHPDLNIRGGASFVPGEPSTQDGNGHGTHVAGTIAALNNSIGVLGVAPSAELYAVKVLGASGSGSVSSIAQGLEWAGNNGMHFANLSLGSPSPSATLEQAVNSATSRGVLVVAASGNSGAGSISYPARYANAMAVGATDQNNNRASFSQYGAGLDIVAPGVNVQSTYPGSTYASLNGTSMATPHVAGAAALVKQKNPSWSNVQIRNHLKRTATSLGSTNLYGSGLVNCEAATR

SEQ ID NO: 62389 - protein, 380 aa, Unidentified
VRSKKLWIVASTALLISVAFSSSIASAAEEAKEKYLIGFNEQEAVSEFVEQVEANDEVAILSEEEEVEIELLHEFETIPVLSVELSPEDVDALELDPAISYIEEDAEVTTMAQSVPWGISRVQAPAAHNRGLTGRGVKVAVLDTGISTHPDLNIRGGASFVPGEPSTQDGNGHGTHVAGTIAALNNSIGVLGVAWSAELYAVKVLGASGSGSVSSIAQGLEWAGNNGMHVANLSLGSPSPSATLEQAVNSATSRGVLVVAASGNSGAGSISYPARYANAMAVGATDQNNNRASFSQYGAGLDIVAPGVNVQSTAPGSTYASLNGTSMATPHVAGAAALVKQKNPSWSNVQIRNHLKNTATSLGSTNLYGSGLVNAEAATR

SEQ ID NO: 62390 - protein, 380 aa, Unidentified
VRSKKLWIVASTALLISVAFSSSIASAAEEAKEKYLIGFNEQEAVSEFVEQVEANDEVAILSEEEEVEIELLHEFETIPVLSVELSPEDVDALELDPAISYIEEDAEVTTMAQSVPWGISRVQAPAAHNRGLTGSGVKVAVLDTGISTHPDLNIRGGASFVPGEPSTQDGEGHGTHVAGTIAALNNSIGVLGVAPSAELYAVKVLGASGAGSVSSIAQGLEWAGNNGMHVANLSLGSPSPSATLEQAVNSATSRGVLVVAASGNSGAGSISYPARYANAMAVGATDQNNNHASFSQYGAGLDIVAPGVNVQSTYPGSTYASLNGTSMATPHVAGAAALVKQKNPSWSNVQIRNHLKNTATSLGSTNLYGSGLVNAEAATR

SEQ ID NO: 62391 - protein, 380 aa, Unidentified
VRSKKLWIVASTALLISVAFSSSIASAAEEAKEKYLIGFNEQEAVSEFVEQVEANDEVAILSEEEEVEIELLHEFETIPVLSVELSPEDVDALELDPAISYIEEDAEVTTMAQSVPWGISRVQAPAAHNRGLTGRGVKVAVLDTGISTHPDLNIRGGASFVPGEPSTQDGNGHGTHVAGTIAALNNSIGVLGVAPSAELYAVKVLGASGGGSVSSIAQGLEWAGNNGMHVANLSLGSPSPSATLEQAVNSATSRGVLVVAASGNSGAGSISYPARYANAMAVGATDQNNNRASFSQYGAGLDIVAPGVNVQSTYPGSTYASLNGTSMATPHVAGAAALVKQKNPSWSNVRIRNHLKNTATSLGSTNLYGSGLVNAEAATR

SEQ ID NO: 62392 - protein, 380 aa, Unidentified
VRSKKLWIVASTALLISVAFSSSIASAAEEAKEKYLIGFNEQEAVSEFVEQVEANDEVAILSEEEEVEIELLHEFETIPVLSVELSPEDVDALELDPAISYIEEDAEVTTMAQSVPWGISRVQAPAAHRRGLTGSGVKVAVLDTGISTHPDLNIRGGASFVPGEPSTQDGNGHGTHVAGTIAALDNSIGVLGVAPSAELYAVKVLGASGSGSVSSIAQGLEWAGNNGMHVANLSLGSPSPSATLEQAVNSATSRGVLVVAASGNSGAGSISYPARYANAMAVGATDQNNNRASFSQYGAGLDIVAPGVNVQSTYPGSTYASLNGTSMATPHVAGAAALVKQKNPSWRNVQIRNHLKNTATSLGSTNLYGSGLVNAEAATR

SEQ ID NO: 62393 - protein, 380 aa, Unidentified
VRSKKLWIVASTALLISVAFSSSIASAAEEAKEKYLIGFNEQEAVSEFVEQVEANDEVAILSEEEEVEIELLHEFETIPVLSVELSPEDVDALELDPAISYIEEDAEVTTMAQSVPWGISRVQAPAAHNRGLTGSGVKVAVLDTGISTHPDLNIRGGASFVPGEPSTQDGNGHGTHVAGTIAALNNSIGVLGVAWSAELYAVKVLGASGSGSVSSIAQGLEWAGNNRMHVANLSLGSPSPSATLEQAVNSATSRGVLVVAASGNSGAGSISYPARYANAMAVGATDQNNNRASFSQYGAGLDIVAPGVNVQSTYPGSTYASLNGTSMATPHVAGAAALVKQKNPSWSFVQIRNHLKNTATSLGSTNLYGSGLVNAEAATR

SEQ ID NO: 62394 - protein, 380 aa, Unidentified
VRSKKLWIVASTALLISVAFSSSIASAAEEAKEKYLIGFNEQEAVSEFVEQVEANDEVAILSEEEEVEIELLHEFETIPVLSVELSPEDVDALELDPAISYIEEDAEVTTMAQSVPWGISRVQAPAAHNRGLTGSGVKVAVLDTGISTHPDLNIRGGASFVPGEPSTQDGNGHGTHVAGTIAALNNSIGVLGVAPSAELYAVKVLGASGAGSVSSIAQGLEWAGNNGMHVANLSLGSPSPSATLEQAVNSATSRGVLVVAASGNSGAGSISYPARYANAMAVGATDQNNNRASFSQYGAGLDIVAPGVNVQSTEPGSTYASLNGTSMATPHVAGAAALVKQKNPSWSNVQIRNHLKNTATSLGSTNLYGSGLVNAFAATR

SEQ ID NO: 62395 - protein, 380 aa, Unidentified
VRSKKLWIVASTALLISVAFSSSIASAAEEAKEKYLIGFNEQEAVSEFVEQVEANDEVAILSEEEEVEIELLHEFETIPVLSVELSPEDVDALELDPAISYIEEDAEVTTMAQSVPWGISRVQAPAAHNRGLAGSGVKVAVLDTGISTHPDLNIRGGASFVPGEPSTQDGNGHGTHVAGTIAALNNSIGVLGVAPSAELYAVKVLGASGAGSVSSIAQGLEWAGNNGMHVANLSLGSPSPSATLEQAVNSATSRGVLVVAASGNSGAGSISYPARYANAMAVGATDQNNNRASFSQYGAGLDIVAPGVNVQSTYPGSTYASLNGTSMATPHVAGAAALVKQKNPSWSNVQIRNHLKNTATSLGSTNLYGSGLVNAFAATR

SEQ ID NO: 62396 - protein, 380 aa, Unidentified
VRSKKLWIVASTALLISVAFSSSIASAAEEAKEKYLIGFNEQEAVSEFVEQVEANDEVAILSEEEEVEIELLHEFETIPVLSVELSPEDVDALELDPAISYIEEDAEVTTMAQSVPWGISRVQAPAAHNRGLTGRGVKVAVLDSGISTHPDLNIRGGASFVPGEPSTQDGNGHGTHVAGTIAALNNSIGVLGVAPSAELYAVKVLGASGSGSVSSIAQGLEWAGNNGMHVANLSLGSPSPSATLEQAVNSATSRGVLVVAASGNSGAGSISYPARYANAMAVGATDQNNNRASFSQYGAGLDIVAPGVNVQSTAPGSTYASLNGTSMATPHVAGAAALVKQKNPSWSNVQIRNHLKNTATSLGSTNLYGSGLVNAEAATR

SEQ ID NO: 62397 - protein, 380 aa, Unidentified
VRSKKLWIVASTALLISVAFSSSIASAAEEAKEKYLIGFNEQEAVSEFVEQVEANDEVAILSEEEEVEIELLHEFETIPVLSVELSPEDVDALELDPAISYIEEDAEVTTMAQSVPWGISRVQAPAAHNRRLTGSGVKVAVLDTGISTHPDLRIRGGASFVPGEPSTQDGNGHGTHVAGTIAALDNSIGVLGVAPSAELYAVKVLGASGSGSVSSIAQGLEWAGNNGMHVANLSLGSPSPSATLEQAVNSATSRGVLVVAASGNSGAGSISYPARYANAMAVGATDQNNNRASFSQYGAGLDIVAPGVNVQSTYPGSTYASLNGTSMATPHVAGAAALVKQKNPSWSNVQIRNHLKNTATSLGSTNLYGSGLVNAEAATR

SEQ ID NO: 62398 - protein, 380 aa, Unidentified
VRSKKLWIVASTALLISVAFSSSIASAAEEAKEKYLIGFNEQEAVSEFVEQVEANDEVAILSEEEEVEIELLHEFETIPVLSVELSPEDVDALELDPAISYIEEDAEVTTMAQSVPWGISRVQAPAAHRRGLTGRGVKVAVLDTGISTHPDLNIRGGASFVPGEPSTQDGNGHGTHVAGTIAALNNSIGVLGVAPSAELYAVKVLGASGSGSVSSIAQGLEWAGNNGMHVANLSLGSPSPSATLEQAVNSATSRGVLVVAASGNSGAGSISYPARYANAMAVGATDQNNNRASFSQYGAGLDIVAPGVNVQSTYPGSTYASLNGTSMATPHVAGAAALVKQKNPSWRNVQIRNHLKNTATSLGSTNLYGSGLVNAEAATR

SEQ ID NO: 62399 - protein, 380 aa, Unidentified
VRSKKLWIVASTALLISVAFSSSIASAAEEAKEKYLIGFNEQEAVSEFVEQVEANDEVAILSEEEEVEIELLHEFETIPVLSVELSPEDVDALELDPAISYIEEDAEVTTMAQSVPWGISRVQAPAAHNRGLTGRGVKVAVLDSGISTHPDLNIRGGASFVPGEPSTQDGNGHGTHVAGTIAALNNSIGVLGVAPSAELYAVKVLGASGSGSVSSIAQGLEWAGNNGMHVANLSLGSPSPSATLEQAVNSATSRGVLVVVASGNSGAGSISYPARYANAMAVGATDQNNNRASFSQYGAGLDIVAPGVNVQSTYPGSTYASLNGTSMATPHVAGAAALVKQKNPSWSNVQIRNHLKNTATSLGSTNLYGSGLVNAEAATR

SEQ ID NO: 62400 - protein, 380 aa, Unidentified
VRSKKLWIVASTALLISVAFSSSIASAAEEAKEKYLIGFNEQEAVSEFVEQVEANDEVAILSEEEEVEIELLHEFETIPVLSVELSPEDVDALELDPAISYIEEDAEVTTMAQSVPWGISRVQAPAAHNRGLTGSGVKVAVLDTGISTHPDLNIRGGASFVPGEPSTQDGNGHGTHVAGTIAALDNSIGVLGVAPSAELYAVKVLGASGSGSISSIAQGLEWAGNNGMHVANLSLGSPSPSATLEQAVNSATSRGVLVVAASGNSGAGSISYPARYANAMAVGATDQNNNRASFSQYGAGLDIVAPGVNVQSTYPGSTYASLNGTSMATPHVAGAAALVKQKNPSWSNVRIRNHLKNTATSLGSTNLYGSGLVNAEAATR

SEQ ID NO: 62401 - protein, 380 aa, Unidentified
VRSKKLWIVASTALLISVAFSSSIASAAEEAKEKYLIGFNEQEAVSEFVEQVEANDEVAILSEEEEVEIELLHEFETIPVLSVELSPEDVDALELDPAISYIEEDAEVTTMAQSVPWGISRVQAPAAHRRGLTGRGVKVAVLDTGISTHPDLNIRGGASFVPGEPSTQDGNGHGTHVAGTIAALNNSIGVLGVAPSAELYAVKVLGASGSGSISSIAQGLEWAGNNGMHVANLSLGSPSPSATLEQAVNSATSRGVLVVAASGNSGAGSISYPARYANAMAVGATDQNNNRASFSQYGAGLDIVAPGVNVQSTYPGSTYASLNGTSMATPHVAGAAALVKQKNPSWSNVQIRNHLKNTATSLGSTNLYGSGLVNAEAATR

SEQ ID NO: 62402 - protein, 380 aa, Unidentified
VRSKKLWIVASTALLISVAFSSSIASAAEEAKEKYLIGFNEQEAVSEFVEQVEANDEVAILSEEEEVEIELLHEFETIPVLSVELSPEDVDALELDPAISYIEEDAEVTTMAQSVPWGISRVQAPAAHNRGLTGSGVKVAVLDTGISTHPDLRIRGGASFVPGEPSTQDGNGHGTHVAGTIAALNNSIGVLGVAPSAELYAVKVLGASGSGSVSSIAQGLEWAGANGMHVANLSLGSPSPSATLEQAVNSATSRGVLVVAASGNSGAGSISYPARYANAMAVGATDQNNNRASFSQYGAGLDIVAPGVNVQSTYPGSTYASLNGTSMATPHVAGAAALVKQKNPSWSNVQIRNHLKNTATSLGSTNLYGSGLVRAEAATR

SEQ ID NO: 62403 - protein, 380 aa, Unidentified
VRSKKLWIVASTALLISVAFSSSIASAAEEAKEKYLIGFNEQEAVSEFVEQVEANDEVAILSEEEEVEIELLHEFETIPVLSVELSPEDVDALELDPAISYIEEDAEVTTMAQSVPWGISRVQAPAAHNRGLTGRGVKVAVLDTGISTHPDLNIRGGASFVPGEPSTQDGNGHGTHVAGTIAALDNSIGVLGVAPSAELYAVKVLGASGGGSVSSIAQGLEWAGNNGMHVANLSLGSPSPSATLEQAVNSATSRGVLVVAASGNSGAGSISYPARYANAMAVGATDQNNNRASFSQYGAGLDIVAPGVNVQSTYPGSTYASLNGTSMATPHVAGAAALVKQKNPSWSNVQIRNHLKNTATSLGSTNLYGSGLVNAEAATR

SEQ ID NO: 62404 - protein, 380 aa, Unidentified
VRSKKLWIVASTALLISVAFSSSIASAAEEAKEKYLIGFNEQEAVSEFVEQVEANDEVAILSEEEEVEIELLHEFETIPVLSVELSPEDVDALELDPAISYIEEDAEVTTMAQSVPWGISRVQAPAAHRRGLTGRGVKVAVLDTGISTHPDLNIRGGASFVPGEPSTQDGNGHGTHVAGTIAALDNSIGVLGVAPSAELYAVKVLGASGSGSVSSIAQGLEWAGNNGMHVANLSLGSPSPSATLEQAVNSATSRGVLVVAASGNSGAGSISYPARYANAMAVGATDQNNNRASFSQYGAGLDIVAPGVNVQSTYPGSTYASLNGTSMATPHVAGAAALVKQKNPSWSNVQIRNHLKNTATSLGSTNLYGSGLVNAEAATR

SEQ ID NO: 62405 - protein, 380 aa, Unidentified
VRSKKLWIVASTALLISVAFSSSIASAAEEAKEKYLIGFNEQEAVSEFVEQVEANDEVAILSEEEEVEIELLHEFETIPVLSVELSPEDVDALELDPAISYIEEDAEVTTMAQSRPWGISRVQAPAAHNRRLTGSGVKVAVLDTGISTHPDLRIRGGASFVPGEPSTQDGNGHGTHVAGTIAALNNSIGVLGVAPSAELYAVKVLGASGSGSVSSIAQGLEWAGNNGMHVANLSLGSPSPSATLEQAVNSATSRGVLVVAASGNSGAGSISYPARYANAMAVGATDQNNNRASFSQYGAGLDIVAPGVNVQSTYPGSTYASLNGTSMATPHVAGAAALVKQKNPSWSNVQIRNHLKNTATSLGSTNLYGSGLVNAEAATR

SEQ ID NO: 62406 - protein, 380 aa, Unidentified
VRSKKLWIVASTALLISVAFSSSIASAAEEAKEKYLIGFNEQEAVSEFVEQVEANDEVAILSEEEEVEIELLHEFETIPVLSVELSPEDVDALELDPAISYIEEDAEVTTMAQSVPWGISRVQAPAAHNRGLTGSGVKVAVLDTGISTHPDLNIRGGASFVPGEPSTQDGNGHGTHVAGTIAALDNSIGVLGVAPSAELYAVKVLGASGSGSISSIAQGLEWAGNNGMHVANLSLGSPSPSATLEQAVNSATSRGVLVVAASGNSGAGSISYPARYANAMAVGATDQNNNRASFSQYGAGLDIVAPGVNVQSTYPGSTYASLNGTSMATPHVAGAAALVKQKNPSWSNVQIRNRLKNTATSLGSTNLYGSGLVNAEAATR

SEQ ID NO: 62407 - protein, 380 aa, Unidentified
VRSKKLWIVASTALLISVAFSSSIASAAEEAKEKYLIGFNEQEAVSEFVEQVEANDEVAILSEEEEVEIELLHEFETIPVLSVELSPEDVDALELDPAISYIEEDAEVTTMAQSVPWGISRVQAPAAHNRGLTGSGVKVAVLDTGISTHPDLNIRGGASFVPGEPSTQDGNGHGTHVAGTIAALNNSIGVLGVAPSAELYAVKVLGASGSGSVTSIAQGLEWAGNNGMHVANLSLGSPSPSATLEQAVNSATSRGVLVVAASGNSGAGSISYPARYANAMAVGATDQNNNRASFSQYGAGLDIVAPGVNVQSTYPQSTYAFLNGTSMATPHVAGAAALVKQKNPSWSNVQIRNHLKNTATSLGSTNLYGSGLVNAEAATR

SEQ ID NO: 62408 - protein, 380 aa, Unidentified
VRSKKLWIVASTALLISVAFSSSIASAAEEAKEKYLIGFNEQEAVSEFVEQVEANDEVAILSEEEEVEIELLHEFETIPVLSVELSPEDVDALELDPAISYIEEDAEVTTMAQSVPWGISRVQAPAAHNRGLTGSGVKVAVLDTGISTHPDLNIRGGASFVPGEPSTQDGNGHGTHVAGTIAALNNSIGVLGVAPSAELYAVKVLGASGSGAVSSIAQGLEWAGNNGMHVANLSLGSPSPSATLEQAVNSATSRGVLVVAASGNSGAGSISYPARYANAMAVGATDQNNNRASFSQYGAGLDIVAPGVNVQSTYPGSTYASLNGTSMATPHVAGAAVLVKQKNPSWSNVQIRNRLKNTATSLGSTNLYGSGLVNAEAATR

SEQ ID NO: 62409 - protein, 380 aa, Unidentified
VRSKKLWIVASTALLISVAFSSSIASAAEEAKEKYLIGFNEQEAVSEFVEQVEANDEVAILSEEEEVEIELLHEFETIPVLSVELSPEDVDALELDPAISYIEEDAEVTTMAQSVPWGISRVQAPAAHNRRLRGSGVKVAVLDTGISTHPDLNIRGGASFVPGEPSTQDGNGHGTHVAGTIAALNNSIGVLGVAPSAELYAVKVLGASGSGSVSSIAQGLEWAGNNGMHVANLSLGSPSPSATLEQAVNSATSRGVLVVAASGNSGAGSISYPARYANAMAVGATDQNNNRASFSQYGAGLDIVAPGVNVQSTYPGSTYASLNGTSMATPHVAGAAALVKQKNPSWRNVQIRNHLKNTATSLGSTNLYGSGLVNAEAATR

SEQ ID NO: 62410 - protein, 380 aa, Unidentified
VRSKKLWIVASTALLISVAFSSSIASAAEEAKEKYLIGFNEQEAVSEFVEQVEANDEVAILSEEEEVEIELLHEFETIPVLSVELSPEDVDALELDPAISYIEEDAEVTTMAQSVPWGISRVQAPAAHNRGLAGSGVKVAVLDTGISTHPDLNIRGGASFVPGEPSTQDGNGHGTHVAGTIAALNNSIGVLGVAPSAELYAVKVLGASGSGSVSSIAQGVEWAGNNGMHVANLSLGNPSPSATLEQAVNSATSRGVLVVAASGNSGAGSISYPARYANAMAVGATDQNNNRASFSQYGAGLDIVAPGVNVQSTYPGSTYASLNGTSMATPHVAGAAALVKQKNPSWSNVQIRNHLKNTATSLGSTNLYGSGLVNAEAATR

SEQ ID NO: 62411 - protein, 380 aa, Unidentified
VRSKKLWIVASTALLISVAFSSSIASAAEEAKEKYLIGFNEQEAVSEFVEQVEANDEVAILSEEEEVEIELLHEFETIPVLSVELSPEDVDALELDPAISYIEEDAEVTTMAQSVPWGISRVQAPAAHNRGLTGRGVKVAVLDTGISTHPDLNIRGGASFVPGEPSTQDGNGHGTHVAGTIAALNNSIGVLGVAPSAELYAVKVLGASGSGAISSIAQGLEWAGNNGMHVANLSLGSPSPSATLEQAVNSATSRGVLVVAASGNSGAGSISYPARYANAMAVGATDQNNNRASFSQYGAGLDIVAPGVNVQSTYPGSTYASLNGTSMATPHVAGAAALVKQKNPSWSNVQIRNHLKNTATSLGSTNLYGSGLVNAEAATR

SEQ ID NO: 62412 - protein, 380 aa, Unidentified
VRSKKLWIVASTALLISVAFSSSIASAAEEAKEKYLIGFNEQEAVSEFVEQVEANDEVAILSEEEEVEIELLHEFETIPVLSVELSPEDVDALELDPAISYIEEDAEVTTMAQSVPWGISRVQAPAAHNRGLTGRGVKVAVLDSGISTHPDLNIRGGASFVPGEPSTQDGNGHGTHVAGTIAALNNSIGVLGVAPSAELYAVKVLGASGSGSVSSIAQGLEWAGNNGMHVANLSLGSPSPSATLEQAVNSATSRGVLVVAASGNSGAGSISYPARYANAMAVGATDQNNNRASFSQYGTGLDIVAPGVNVQSTYPGSTYASLNGTSMATPHVAGAAALVKQKNPSWSNVQIRNHLKNTATSLGSTNLYGSGLVNAEAATR

SEQ ID NO: 62413 - protein, 380 aa, Unidentified
VRSKKLWIVASTALLISVAFSSSIASAAEEAKEKYLIGFNEQEAVSEFVEQVEANDEVAILSEEEEVEIELLHEFETIPVLSVELSPEDVDALELDPAISYIEEDAEVTTMAQSVPWGISRVQAPAAHNRGLTGSGVKVAVLDTGISTHPDLNIRGGASFVPGEPSTQDGNGHGTHVAGTIAALNNSIGVLGVAPSAELYAVKVLGASGGGAISSIAQGLEWAGNNGMHVANLSLGSPSPSATLEQAVNSATSRGVLVVAASGNSGAGSISYPARYANAMAVGATDQNNNRASFSQYGAGLDIVAPGVNVQSTYPGSTYASLNGTSMATPHVAGAAALVKQKNPSWSNVQIRNHLKNTATSLGSTNLYGSGLVNAEAATR

SEQ ID NO: 62414 - protein, 380 aa, Unidentified
VRSKKLWIVASTALLISVAFSSSIASAAEEAKEKYLIGFNEQEAVSEFVEQVEANDEVAILSEEEEVEIELLHEFETIPVLSVELSPEDVDALELDPAISYIEEDAEVTTMAQSVPWGISRVQAPAAHNRGLTGSGVKVAVLDTGISTHPDLRITGGASFVPGEPSTQDGNGHGTHVAGTIAALNNSIGVLGVAPSAELYAVKVLGASGSGSVSSIAQGLEWAGNNGMHVANLSLGSPSPSATLEQAVNSATSRGVLVVAASGNSGAGSISYPARYANAMAVGATDQNNNRASFSQYGAGLDIVAPGVNVQSTYPGSTYASLNGTSMATPHVAGAAALVKQKNPSWSNVQIRNRLKNTATSLGSTNLYGSGLVNAEAATR

SEQ ID NO: 62415 - protein, 380 aa, Unidentified
VRSKKLWIVASTALLISVAFSSSIASAAEEAKEKYLIGFNEQEAVSEFVEQVEANDEVAILSEEEEVEIELLHEFETIPVLSVELSPEDVDALELDPAISYIEEDAEVTTMAQSVPWGISRVQAPAAHNRGLTGSGVKVAVLDTGISTHPDLNIRGGASFVPGEPSTQDGNGHGTHVAGTIAALNNSIGVLGVAPSAELYAVKVLGASGSGSLSSIAQGLEWAGNNGMHVANLSLGSPSPSATLEQAVNSATSRGVLVVAASGNSGAGSISYPARYANAMAVGATDQNNNRASFSQYGAGLDIVAPGVNVQSTYPGSAYAFLNGTSMATPHVAGAAALVKQKNPSWSNVQIRNHLKNTATSLGSTNLYGSGLVNAEAATR

SEQ ID NO: 62416 - protein, 380 aa, Unidentified
VRSKKLWIVASTALLISVAFSSSIASAAEEAKEKYLIGFNEQEAVSEFVEQVEANDEVAILSEEEEVEIELLHEFETIPVLSVELSPEDVDALELDPAISYIEEDAEVTTMAQSVPWGISRVQAPAAHNRGLTGSGVKVAVLDSGISTHPDLNIRGGASFVPGEPSTQDGNGHGTHVAGTIAALNNSIGVLGVAPSAELYAVKVLGASGSGSVSSIAQGLEWAGNNGMHVANLSLGSPSPSATLEQAVNSATSRGVLVVAASGNSGAGSISYPARYVNAMAVGATDQNNNRASFSQYGAGLDIVAPGVNVQSTAPGSTYASLNGTSMATPHVAGAAALVKQKNPSWSNVQIRNHLKNTATSLGSTNLYGSGLVNAEAATR

SEQ ID NO: 62417 - protein, 380 aa, Unidentified
VRSKKLWIVASTALLISVAFSSSIASAAEEAKEKYLIGFNEQEAVSEFVEQVEANDEVAILSEEEEVEIELLHEFETIPVLSVELSPEDVDALELDPAISYIEEDAEVTTMAQSVPWGISRVQAPAAHNRGLTGSGVKVAVLDTGISTHPDLRIRGGASFVPGEPSTQDGNGHGTHVAGTIAALDNSIGVLGVAPSAELYAVKVLGASGSGSVSSIAQGLEWAGNNGMHVANLSLGSPSPSATLEQAVNSATSRGVLVVAASGNSGAGSISYPARYANAMAVGATDQNNNRASFSQYGAGLDIVAPGVNVQSTYPGSTYASLNGTSMATPHVAGAAALVKQKNPSWSNVQIRNRLKNTATSLGSTNLYGSGLVNAEAATR

SEQ ID NO: 62418 - protein, 380 aa, Unidentified
VRSKKLWIVASTALLISVAFSSSIASAAEEAKEKYLIGFNEQEAVSEFVEQVEANDEVAILSEEEEVEIELLHEFETIPVLSVELSPEDVDALELDPAISYIEEDAEVTTMAQSVPWGISRVQAPAAHNRGLTGRGVKVAVLDTGISTHPDLNIRGGASFVPGEPSTQDGNGHGTHVAGTIAALDNSIGVLGVAPSAELYAVKVLGASGSGSISSIAQGLEWAGNNGMHVANLSLGSPSPSATLEQAVNSATSRGVLVVAASGNSGAGSISYPARYANAMAVGATDQNNNRASFSQYGAGLDIVAPGVNVQSTYPGSTYASLNGTSMATPHVAGAAALVKQKNPSWSNVQIRNHLKNTATSLGSTNLYGSGLVNAEAATR

SEQ ID NO: 62419 - protein, 380 aa, Unidentified
VRSKKLWIVASTALLISVAFSSSIASAAEEAKEKYLIGFNEQEAVSEFVEQVEANDEVAILSEEEEVEIELLHEFETIPVLSVELSPEDVDALELDPAISYIEEDAEVTTMAQSVPWGISRVQAPAAHNRRLTGRGVKVAVLDTGISTHPDLNIRGGASFVPGEPSTQDGNGHGTHVAGTIAALNNSIGVLGVAPSAELYAVKVLGASGSGSVSSIAQGLEWAGNNGMHVANLSLGSPSPSATLEQAVNSATSRGVLVVAASGNSGAGSISYPARYANAMAVGATDQNNNRASFSQYGAGLDIVAPGVNVQSTYPGSAYASLNGTSMATPHVAGAAALVKQKNPSWSNVQIRNHLKNTATSLGSTNLYGSGLVNAEAATR

SEQ ID NO: 62420 - protein, 380 aa, Unidentified
VRSKKLWIVASTALLISVAFSSSIASAAEEAKEKYLIGFNEQEAVSEFVEQVEANDEVAILSEEEEVEIELLHEFETIPVLSVELSPEDVDALELDPAISYIEEDAEVTTMAQSVPWGISRVQAPAAHNRGLTGSGVKVAVLDTGISTHPDLNIRGGASFVPGEPSTQDGNGHGTHVAGTIAALNNRIGVLGVAWSAELYAVKVLGASGSGSVSSIAQGLEWAGNNGMHVANLSLGSPSPSATLEQAVNSATSRGVLVVAASGNSGAGSISYPARYANAMAVGATDQNNNRASFSQYGAGLDIVAPGVNVQSTYPGSTYASLNGTSMATPHVAGAAALVFQKNPSWSNVQIRNHLKNTATSLGSTNLYGSGLVNAEAATR

SEQ ID NO: 62421 - protein, 380 aa, Unidentified
VRSKKLWIVASTALLISVAFSSSIASAAEEAKEKYLIGFNEQEAVSEFVEQVEANDEVAILSEEEEVEIELLHEFETIPVLSVELSPEDVDALELDPAISYIEEDAEVTTMAQSVPWGIARVQAPAAHNRGLTGSGVKVAVLDTGISTHPDLRIRGGASFVPGEPSTQDGNGHGTHVAGTIAALNNRIGVLGVAPSAELYAVKVLGASGSGSVSSIAQGLEWAGNNGMHVANLSLGSPSPSATLEQAVNSATSRGVLVVAASGNSGAGSISYPARYANAMAVGATDQNNNRASFSQYGAGLDIVAPGVNVQSTYPGSTYASLNGTSMATPHVAGAAALVKQKNPSWSNVQIRNHLKNTATSLGSTNLYGSGLVNAEAATR

SEQ ID NO: 62422 - protein, 380 aa, Unidentified
VRSKKLWIVASTALLISVAFSSSIASAAEEAKEKYLIGFNEQEAVSEFVEQVEANDEVAILSEEEEVEIELLHEFETIPVLSVELSPEDVDALELDPAISYIEEDAEVTTMAQSVPWGISRVQAPAAHNRGLTGSGVKVAVLDTGISTHPDLNIRGGASFVPGEPSTQDGNGHGTHVAGTIAALNNSIGVLGVAPSAELYAVKVLGASGSGSVSSIAQGLEWAGNNGMHVANLSLGNESPSATLEQAVNSATSRGVLVVAASGNSGAGSISYPARYANAMAVGATDQNNNHASFSQYGAGLDIVAPGVNVQSTYPGSTYASLNGTSMATPHVAGAAALVKQKNPSWSNVQIRNHLKNTATSLGSTNLYGSGLVNAEAATR

SEQ ID NO: 62423 - protein, 380 aa, Unidentified
VRSKKLWIVASTALLISVAFSSSIASAAEEAKEKYLIGFNEQEAVSEFVEQVEANDEVAILSEEEEVEIELLHEFETIPVLSVELSPEDVDALELDPAISYIEEDAEVTTMAQSVPWGISRVQAPAAHNRGLTGSGVKVAVLDSGISTHPDLNIRGGASFVPGEPSTQDGNGHGTHVAGTIAALNNSIGVLGVAWSAELYAVKVLGASGSGSVSSIAQGLEWAGNNRMHVANLSLGSPSPSATLEQAVNSATSRGVLVVAASGNSGAGSISYPARYANAMAVGATDQNNNRASFSQYGAGLDIVAPGVNVQSTYPGSTYASLNGTSMATPHVAGAAALVKQKNPSWSNVQIRNHLKNTATSLGSTNLYGSGLVNAEAATR

SEQ ID NO: 62424 - protein, 380 aa, Unidentified
VRSKKLWIVASTALLISVAFSSSIASAAEEAKEKYLIGFNEQEAVSEFVEQVEANDEVAILSEEEEVEIELLHEFETIPVLSVELSPEDVDALELDPAISYIEEDAEVTTMAQSVPWGISRVQAPAAHNRGLTGSRVKVAVLDTGISTHPDLNIRRGASFVPGEPSTQDGNGHGTHVAGTIAALNNSIGVLGVAPSAELYAVKVLGASGSGSVSSIAQGLEWAGNNGMHFANLSLGSPSPSATLEQAVNSATSRGVLVVAASGNSGAGSISYPARYANAMAVGATDQNNNRASFSQYGAGLDIVAPGVNVQSTYPGSTYASLNGTSMATPHVAGAAALVKQKNPSWSNVQIRNHLKNTATSLGSTNLYGSGLVNAEAATR

SEQ ID NO: 62425 - protein, 380 aa, Unidentified
VRSKKLWIVASTALLISVAFSSSIASAAEEAKEKYLIGFNEQEAVSEFVEQVEANDEVAILSEEEEVEIELLHEFETIPVLSVELSPEDVDALELDPAISYIEEDAEVTTMAQSVPWGISRVQAPAAHNRGLTGRGVKVAVLDTGISTHPDLNIRGGASFVPGEPSTQDGNGHGTHVAGTIAALNNSIGVLGVAPSAELYAVKVLGASGSGSVSSIAQGLEWAGNNGMHVANLSLGSPSPSATLEQAVNSATSRGVLVVAASGNSGAGSISYPARYANAMAVGATDQNNNRASFSQYGAGLDIVAPGVNVQSTYPGSTYASLNGTSMATPHVAGAAVLVKQKNPSWSNVRIRNHLKNTATSLGSTNLYGSGLVNAEAATR

SEQ ID NO: 62426 - protein, 380 aa, Unidentified
VRSKKLWIVASTALLISVAFSSSIASAAEEAKEKYLIGFNEQEAVSEFVEQVEANDEVAILSEEEEVEIELLHEFETIPVLSVELSPEDVDALELDPAISYIEEDAEVTTMAQSVPWGISRVQAPAAHNRGLTGSGVKVAVLDTGISTHPDLNIRGGASFVPGEPSTQDGNGHGTHVAGTIAALNNSIGVLGVAPSAELYAVKVLGASGSGGVSSIAQGVEWAGNNGMHVANLSLGSPSPSATLEQAVNSATSRGVLVVAASGNSGAESISYPARYANAMAVGATDQNNNRASFSQYGAGLDIVAPGVNVQSTYPGSTYASLNGTSMATPHVAGAAALVKQKNPSWSNVQIRNHLKNTATSLGSTNLYGSGLVNAEAATR

SEQ ID NO: 62427 - protein, 380 aa, Unidentified
VRSKKLWIVASTALLISVAFSSSIASAAEEAKEKYLIGFNEQEAVSEFVEQVEANDEVAILSEEEEVEIELLHEFETIPVLSVELSPEDVDALELDPAISYIEEDAEVTTMAQSVPWGISRVQAPAAHNRRLTGRGVKVAVLDTGISTHPDLNIRGGASFVPGEPSTQDGNGHGTHVAGTIAALNNSIGVLGVAPSAELYAVKVLGASGSGSVSSIAQGLEWAGNNGMHVANLSLGSPSPSATLEQAVNSATSRGVLVVAASGNSGAGSISYPARYANAMAVGATDQNNNRASFSQYGAGLDIVAPGVNVQSTYPGSTYFSLNGTSMATPHVAGAAALVKQKNPSWSNVQIRNHLKNTATSLGSTNLYGSGLVNAEAATR

SEQ ID NO: 62428 - protein, 380 aa, Unidentified
VRSKKLWIVASTALLISVAFSSSIASAAEEAKEKYLIGFNEQEAVSEFVEQVEANDEVAILSEEEEVEIELLHEFETIPVLSVELSPEDVDALELDPAISYIEEDAEVTTMAQSVPWGISRVQAPAAHNRRLTGSGVKVAVLDTGISTHPDLNIRGGASFVPGEPSTQDGNGHGTHVAGTIAALNNSIGVLGVAPSAELYAVKVLGASGSGSVSSIAQGLEWAGNNGMHVANLSLGSPSPSATLEQAVNSATSRGVLVVAASGNSGAGSISYPARYANAMAVGATDQNNNRASFSQYGAGLDIVAPGVNVQSTYPGSTYASLNGTSMATPHVAGAAALVKQKNPSWRNVQIRNRLKNTATSLGSTNLYGSGLVNAEAATR

SEQ ID NO: 62429 - protein, 380 aa, Unidentified
VRSKKLWIVASTALLISVAFSSSIASAAEEAKEKYLIGFNEQEAVSEFVEQVEANDEVAILSEEEEVEIELLHEFETIPVLSVELSPEDVDALELDPAISYIEEDAEVTTMAQSVPWGISRVQAPAAHNRGLTGRGVKVAVLDTGISTHPDLNIRGGASFVPGEPSTQDGNGHGTHVAGTIAALNNSIGVLGVAPSAELYAVKVLGASGSGSVSSIAQGLEWAGNNGMHVANLSLGSPSPSATLEQAVNSATSRGVLVVAASGNSGAGSISYPARYANAMAVGATDQNNNRASFSQYGAGLDIVAPGVNVQSTYPGSTYASLNGTSMATPHVAGAAALVKQKNPSWSNVRIRNRLKNTATSLGSTNLYGSGLVNAEAATR

SEQ ID NO: 62430 - protein, 380 aa, Unidentified
VRSKKLWIVASTALLISVAFSSSIASAAEEAKEKYLIGFNEQEAVSEFVEQVEANDEVAILSEEEEVEIELLHEFETIPVLSVELSPEDVDALELDPAISYIEEDAEVTTMAQSVPWGISRVQAPAAHNRGLTGRGVKVAVLDTGISTHPDLNIRGGASFVPGEPSTQDGNGHGTHVAGTIAALNNSIGVLGVAPSAELYAVKVLGASGSGSVSSIAQGLEWAGNNRMHVANLSLGSPSPSATLEQAVNSATSRGVLVVAASGNSGAGSISYPARYANAMAVGATDQNNNRASFSQYGAGLDIVAPGVNVQSTYPGSTYASLNGTSMATPHVAGAAALVFQKNPSWSNVQIRNHLKNTATSLGSTNLYGSGLVNAEAATR

SEQ ID NO: 62431 - protein, 380 aa, Unidentified
VRSKKLWIVASTALLISVAFSSSIASAAEEAKEKYLIGFNEQEAVSEFVEQVEANDEVAILSEEEEVEIELLHEFETIPVLSVELSPEDVDALELDPAISYIEEDAEVTTMAQSVPWGISRVQAPAAHNRGLTGRGVKVAVLDTGISTHPDLNIRGGASFVPGEPSTQDGNGHGTHVAGTIAALNNSIGVLGVAPSAELYAVKVLGASGSGSISSIAQGLEWAGNNGMHVANLSLGSPSPSATLEQAVNSATSRGVLVVAASGNSGAGSISYPARYANAMAVGATDQNNNRASFSQYGAGLDIVAPGVNVQSTYPGSTYASLNGTSMATPHVAGAAALVKQKNPSWSNVQIRNRLKNTATSLGSTNLYGSGLVNAEAATR

SEQ ID NO: 62432 - protein, 380 aa, Unidentified
VRSKKLWIVASTALLISVAFSSSIASAAEEAKEKYLIGFNEQEAVSEFVEQVEANDEVAILSEEEEVEIELLHEFETIPVLSVELSPEDVDALELDPAISYIEEDAEVTTMAQSVPWGISRVQAPAAHRRGLTGSGVKVAVLDTGISTHPDLNITGGASFVPGEPSTQDGNGHGTHVAGTIAALNNSIGVLGVAPSAELYAVKVLGASGSGSVSSIAQGLEWAGNNGMHVANLSLGSPSPSATLEQAVNSATSRGVLVVAASGNSGAGSISYPARYANAMAVGATDQNNNRASFSQYGAGLDIVAPGVNVQSTYPGSTYASLNGTSMATPHVAGAAALVKQKNPSWSNVQIRNRLKNTATSLGSTNLYGSGLVNAEAATR

SEQ ID NO: 62433 - protein, 380 aa, Unidentified
VRSKKLWIVASTALLISVAFSSSIASAAEEAKEKYLIGFNEQEAVSEFVEQVEANDEVAILSEEEEVEIELLHEFETIPVLSVELSPEDVDALELDPAISYIEEDAEVTTMAQSVPWGISRVQAPAAHNRGLAGSGVKVAVLDTGISTHPDLNIRGGASFVPGEPSTQDGEGHGTHVAGTIAALNNSIGVLGVAPSAELYAVKVLGASGSGSVSSIAQGLEWAGNNGMHVANLSLGSPSPSATLEQAVNSATSRGVLVVAASGNSGEGSISYPARYANAMAVGATDQNNNRASFSQYGAGLDIVAPGVNVQSTYPGSTYASLNGTSMATPHVAGAAALVKQKNPSWSNVQIRNHLKNTATSLGSTNLYGSGLVNAEAATR

SEQ ID NO: 62434 - protein, 380 aa, Unidentified
VRSKKLWIVASTALLISVAFSSSIASAAEEAKEKYLIGFNEQEAVSEFVEQVEANDEVAILSEEEEVEIELLHEFETIPVLSVELSPEDVDALELDPAISYIEEDAEVTTMAQSVPWGISRVQAPAAHNRRLTGSGVKVAVLDTGISTHPDLRIRGGASFVPGEPSTQDGNGHGTHVAGTIAALNNSIGVLGVAPSAELYAVKVLGASGSGSVSSIAQGLEWAGNNGMHVANLSLGSPSPSATLEQAVNSATSRGVLVVAASGNSGAGSISYPARYANAMAVGATDQNNNRASFSQYGAGLDIVAPGVNVQSTYPGSTYASLNGTSMATPHVAGAAALVKQKNPSWRNVQIRNHLKNTATSLGSTNLYGSGLVNAEAATR

SEQ ID NO: 62435 - protein, 380 aa, Unidentified
VRSKKLWIVASTALLISVAFSSSIASAAEEAKEKYLIGFNEQEAVSEFVEQVEANDEVAILSEEEEVEIELLHEFETIPVLSVELSPEDVDALELDPAISYIEEDAEVTTMAQSVPWGISRVQAPAAHNRGLTGFGVKVAVLDTGISTHPDLNIRGGASFVPGEPSTQDGEGHGTHVAGTIAALNNSIGVLGVAPSAELYAVKVLGASGSGSVSSIAQGLEWAGLNGMHVANLSLGSPSPSATLEQAVNSATSRGVLVVAASGNSGAGSISYPARYANAMAVGATDQNNNRASFSQYGAGLDIVAPGVNVQSTYPGSTYASLNGTSMATPHVAGAAALVKQKNPSWSNVQIRNHLKNTATSLGSTNLYGSGLVNAEAATR

SEQ ID NO: 62436 - protein, 380 aa, Unidentified
VRSKKLWIVASTALLISVAFSSSIASAAEEAKEKYLIGFNEQEAVSEFVEQVEANDEVAILSEEEEVEIELLHEFETIPVLSVELSPEDVDALELDPAISYIEEDAEVTTMAQSVPWGISRVQAPAAHNRGLTGRGVKVAVLDTGISTHPDLNIRGGASFVPGEPSTQDGNGHGTHVAGTIAALDNSIGVLGVAPSAELYAVKVLGASGSGSVSSIAQGLEWAGNNGMHVANLSLGSPSPSATLEQAVNSATSRGVLVVAASGNSGAGSISYPARYANAMAVGATDQNNNRASFSQYGAGLDIVAPGVNVQSTYPGSTYASLNGTSMATPHVAGAAALVKQKNPSWSNVRIRNHLKNTATSLGSTNLYGSGLVNAEAATR

SEQ ID NO: 62437 - protein, 380 aa, Unidentified
VRSKKLWIVASTALLISVAFSSSIASAAEEAKEKYLIGFNEQEAVSEFVEQVEANDEVAILSEEEEVEIELLHEFETIPVLSVELSPEDVDALELDPAISYIEEDAEVTTMRQSVPWGIARVQAPAAHNRGLTGSGVKVAVLDTGISTHPDLRIRGGASFVPGEPSTQDGNGHGTHVAGTIAALNNSIGVLGVAPSAELYAVKVLGASGSGSVSSIAQGLEWAGNNGMHVANLSLGSPSPSATLEQAVNSATSRGVLVVAASGNSGAGSISYPARYANAMAVGATDQNNNRASFSQYGAGLDIVAPGVNVQSTYPGSTYASLNGTSMATPHVAGAAALVKQKNPSWSNVQIRNHLKNTATSLGSTNLYGSGLVNAEAATR

SEQ ID NO: 62438 - protein, 380 aa, Unidentified
VRSKKLWIVASTALLISVAFSSSIASAAEEAKEKYLIGFNEQEAVSEFVEQVEANDEVAILSEEEEVEIELLHEFETIPVLSVELSPEDVDALELDPAISYIEEDAEVTTMAQSVPWGISRVQAPAAHNRGLAGSGVKVAVLDTGISTHPDLNIRGGASFVPGEPSTQDGNGHGTHVAGTIAALNNSIGVLGVAPSAELYAVKVLGASGSGGVSSIAQGVEWAGNNGMHVANLSLGSPSPSATLEQAVNSATSRGVLVVAASGNSGAGSISYPARYANAMAVGATDQNNNRASFSQYGAGLDIVAPGVNVQSTYPGSTYASLNGTSMATPHVAGAAALVKQKNPSWSNVQIRNHLKNTATSLGSTNLYGSGLVNAEAATR

SEQ ID NO: 62439 - protein, 380 aa, Unidentified
VRSKKLWIVASTALLISVAFSSSIASAAEEAKEKYLIGFNEQEAVSEFVEQVEANDEVAILSEEEEVEIELLHEFETIPVLSVELSPEDVDALELDPAISYIEEDAEVTTMAQSVPWGISRVQAPAAHNRGLTGSGVKVAVLDTGISTHPDLNIRGGASFVPGEPSTQDGNGHGTHVAGTIAALNNSIGVLGVAPSAELYAVKVLGASGSGSVSSIAQGLEWAGNNRMHVANLSLGSPSPSATLEQAVNSATSRGVLVVAASGNSGAGSISYPARYANAMAVGATDQNNNRASFSQYGAGLDIVAPGVNVQSTAPGSTYASLNGTSMATPHVAGAAALVFQKNPSWSNVQIRNHLKNTATSLGSTNLYGSGLVNAEAATR

SEQ ID NO: 62440 - protein, 380 aa, Unidentified
VRSKKLWIVASTALLISVAFSSSIASAAEEAKEKYLIGFNEQEAVSEFVEQVEANDEVAILSEEEEVEIELLHEFETIPVLSVELSPEDVDALELDPAISYIEEDAEVTTMAQSVPWGISRVQAPAAHNRGLTGSGVKVAVLDSGISTHPDLNIRGGASFVPGEPSTQDGNGHGTHVAGTIAALNNRIGVLGVAPSAELYAVKVLGASGSGSVSSIAQGLEWAGNNGMHVANLSLGSPSPSATLEQAVNSATSRGVLVVAASGNSGAGSISYPARYANAMAVGATDQNNNRASFSQYGAGLDIVAPGVNVQSTAPGSTYASLNGTSMATPHVAGAAALVKQKNPSWSNVQIRNHLKNTATSLGSTNLYGSGLVNAEAATR

SEQ ID NO: 62441 - protein, 380 aa, Unidentified
VRSKKLWIVASTALLISVAFSSSIASAAEEAKEKYLIGFNEQEAVSEFVEQVEANDEVAILSEEEEVEIELLHEFETIPVLSVELSPEDVDALELDPAISYIEEDAEVTTMAQSVPWGISRVQAPAAHNRGLTGRGVKVAVLDTGISTHPDLRIRGGASFVPGEPSTQDGNGHGTHVAGTIAALNNSIGVLGVAPSAELYAVKVLGASGSGSVSSIAQGLEWAGNNGMHVANLSLGSPSPSATLEQAVNSATSRGVLVVAASGNSGAGSISYPARYANAMAVGATDQNNNRASFSQYGAGLDIVAPGVNVQSTYPGSTYASLNGTSMATPHVAGEAALVKQKNPSWSNVQIRNHLKNTATSLGSTNLYGSGLVNAEAATR

SEQ ID NO: 62442 - protein, 380 aa, Unidentified
VRSKKLWIVASTALLISVAFSSSIASAAEEAKEKYLIGFNEQEAVSEFVEQVEANDEVAILSEEEEVEIELLHEFETIPVLSVELSPEDVDALELDPAISYIEEDAEVTTMAQSVPWGISRVQAPAAHNRGLTGRGVKVAVLDTGISTHPDLNIRGGASFVPGEPSTQDGNGHGTHVAGTIAALNNSIGVLGVAPSAELYAVKVLGASGSGSISSIAQGLEWAGNNGMHVANLSLGSPSPSATLEQAVNSATSRGVLVVAASGNSGAGSISYPARYANAMAVGATDQNNNRASFSQYGAGLDIVAPGVNVQSTYPGSTYASLNGTSMATPHVAGAAALVKQKNPSWSNVRIRNHLKNTATSLGSTNLYGSGLVNAEAATR

SEQ ID NO: 62443 - protein, 380 aa, Unidentified
VRSKKLWIVASTALLISVAFSSSIASAAEEAKEKYLIGFNEQEAVSEFVEQVEANDEVAILSEEEEVEIELLHEFETIPVLSVELSPEDVDALELDPAISYIEEDAEVTTMAQSVPWGISRVQAPAAHNRGLTGSGVKVAVLDSGISTHPDLNIRGGASFVPGEPSTQDGNGHGTHVAGTIAALNNSIGVLGVAPSAELYAVKVLGASGSGSVSSIAQGLEWAGNNRMHVANLSLGSPSPSATLEQAVNSATSRGVLVVAASGNSGAGSISYPARYANAMAVGATDQNNNRASFSQYGAGLDIVAPGVNVQSTAPGSTYASLNGTSMATPHVAGAAALVKQKNPSWSNVQIRNHLKNTATSLGSTNLYGSGLVNAEAATR

SEQ ID NO: 62444 - protein, 380 aa, Unidentified
VRSKKLWIVASTALLISVAFSSSIASAAEEAKEKYLIGFNEQEAVSEFVEQVEANDEVAILSEEEEVEIELLHEFETIPVLSVELSPEDVDALELDPAISYIEEDAEVTTMAQSVPWGISRVQAPAAHRRGLTGSGVKVAVLDTGISTHPDLNIRGGASFVPGEPSTQDGNGHGTHVAGTIAALDNSIGVLGVAPSAELYAVKVLGASGSGSVSSIAQGLEWAGNNGMHVANLSLGSPSPSATLEQAVNSATSRGVLVVAASGNSGAGSISYPARYANAMAVGATDQNNNRASFSQYGAGLDIVAPGVNVQSTYPGSTYASLNGTSMATPHVAGAAALVKQKNPSWSNVQIRNRLKNTATSLGSTNLYGSGLVNAEAATR

SEQ ID NO: 62445 - protein, 380 aa, Unidentified
VRSKKLWIVASTALLISVAFSSSIASAAEEAKEKYLIGFNEQEAVSEFVEQVEANDEVAILSEEEEVEIELLHEFETIPVLSVELSPEDVDALELDPAISYIEEDAEVTTMAQSVPWGISRVQAPAAHNRRLRGSGVKVAVLDTGISTHPDLNIRGGASFVPGEPSTQDGNGHGTHVAGTIAALNNSIGVLGVAPSAELYAVKVLGASGSGSVSSIAQGLEWAGNNGMHVANLSLGSPSPSATLEQAVNSATSRGVLVVAASGNSGAGSISYPARYANAMAVGATDQNNNRASFSQYGAGLDIVAPGVNVQSTYPGSTYASLNGTSMATPHVAGAAALVKQKNPSWSNVQIRNHLKNTATSLGSTNLYGSGLVRAEAATR

SEQ ID NO: 62446 - protein, 380 aa, Unidentified
VRSKKLWIVASTALLISVAFSSSIASAAEEAKEKYLIGFNEQEAVSEFVEQVEANDEVAILSEEEEVEIELLHEFETIPVLSVELSPEDVDALELDPAISYIEEDAEVTTMAQSVPWGISRVQAPAAHNRGLTGSGVKVAVLDTGISTHPDLNIRGGASFVPGEPSTQDGNGHGTHVAGTIAALNNRIGVLGVAWSAELYAVKVLGASGSGSVSSIAQGLEWAGNNGMHVANLSLGSPSPSATLEQAVNSATSRGVLVVAASGNSGAGSISYPARYANAMAVGATDQNNNRASFSQYGAGLDIVAPGVNVQSTYPGSTYASLNGTSMATPHVAGAAALVKQKNPSWSFVQIRNHLKNTATSLGSTNLYGSGLVNAEAATR

SEQ ID NO: 62447 - protein, 380 aa, Unidentified
VRSKKLWIVASTALLISVAFSSSIASAAEEAKEKYLIGFNEQEAVSEFVEQVEANDEVAILSEEEEVEIELLHEFETIPVLSVELSPEDVDALELDPAISYIEEDAEVTTMAQSVPWGISRVQAPAAHNRGLTGRGVKVAVLDSGISTHPDLNIRGGASFVPGEPSTQDGNGHGTHVAGTIAALNNSIGVLGVAWSAELYAVKVLGASGSGSVSSIAQGLEWAGNNGMHVANLSLGSPSPSATLEQAVNSATSRGVLVVAASGNSGAGSISYPARYANAMAVGATDQNNNRASFSQYGAGLDIVAPGVNVQSTYPGSTYASLNGTSMATPHVAGAAALVKQKNPSWSNVQIRNHLKNTATSLGSTNLYGSGLVNAEAATR

SEQ ID NO: 62448 - protein, 380 aa, Unidentified
VRSKKLWIVASTALLISVAFSSSIASAAEEAKEKYLIGFNEQEAVSEFVEQVEANDEVAILSEEEEVEIELLHEFETIPVLSVELSPEDVDALELDPAISYIEEDAEVTTMAQSVPWGISRVQAPAAHNRGLTGSGVKVAVLDTGISTHPDLNIRRGASFVPGEPSTQDGNGHGTHVAGTIAALNNSIGVLGVAPSAELYAVKVLGASGSGSVSSIAQGLEWAGNNGMHVANLSLGSPSPSATLEQAVNSATSRGVLVVAASGNSGAGSISYPARYANAMAVGATDQNNNRASFSQYGFGLDIVAPGVNVQSTYPGMTYASLNGTSMATPHVAGAAALVKQKNPSWSNVQIRNHLKNTATSLGSTNLYGSGLVNAEAATR

SEQ ID NO: 62449 - protein, 380 aa, Unidentified
VRSKKLWIVASTALLISVAFSSSIASAAEEAKEKYLIGFNEQEAVSEFVEQVEANDEVAILSEEEEVEIELLHEFETIPVLSVELSPEDVDALELDPAISYIEEDAEVTTMAQSVPWGISRVQAPAAHNRGLTGRGVKVAVLDTGISTHPDLNIRGGASFVPGEPSTQDGNGHGTHVAGTIAALNNRIGVLGVAPSAELYAVKVLGASGSGSVSSIAQGLEWAGNNGMHVANLSLGSPSPSATLEQAVNSATSRGVLVVAASGNSGAGSISYPARYANAMAVGATDQNNNRASFSQYGAGLDIVAPGVNVQSTYPGFTYASLNGTSMATPHVAGAAALVKQKNPSWSNVQIRNHLKNTATSLGSTNLYGSGLVNAEAATR

SEQ ID NO: 62450 - protein, 380 aa, Unidentified
VRSKKLWIVASTALLISVAFSSSIASAAEEAKEKYLIGFNEQEAVSEFVEQVEANDEVAILSEEEEVEIELLHEFETIPVLSVELSPEDVDALELDPAISYIEEDAEVTTMAQSVPWGISRVQAPAAHNRRLTGSGVKVAVLDTGISTHPDLRIRGGASFVPGEPSTQDGNGHGTHVAGTIAALNNSIGVLGVAPSAELYAVKVLGASGSGSVSSIAQGLEWAGNNGMHVANLSLGSPSPSATLEQAVNSATSRGVLVVAASGNSGAGSISYPARYANAMAVGATDQNNNRASFSQYGAGLDIVAPGVNVQSTYPGSTYASLNGTSMATPHVAGAAALVKQKNPSWSNRQIRNHLKNTATSLGSTNLYGSGLVNAEAATR

SEQ ID NO: 62451 - protein, 380 aa, Unidentified
VRSKKLWIVASTALLISVAFSSSIASAAEEAKEKYLIGFNEQEAVSEFVEQVEANDEVAILSEEEEVEIELLHEFETIPVLSVELSPEDVDALELDPAISYIEEDAEVTTMAQSVPWGISRVQAPAAHNRRLTGSGVKVAVLDTGISTHPDLRIRGGASFVPGEPSTQDGNGHGTHVAGTIAALNNSIGVLGVAPSAELYAVKVLGASGSGSVSSIAQGLEWAGNNGMHVANLSLGSPSPSATLEQAVNSATSRGVLVVAASGNSGAGSISYPARYANAMAVGATDQNNNRASFSQYGAGLDIVAPGVNVQSTYPGSTYASLNGTSMATPHVAGAAALVKQKNPSWSNVQIRNRLKNTATSLGSTNLYGSGLVNAEAATR

SEQ ID NO: 62452 - protein, 380 aa, Unidentified
VRSKKLWIVASTALLISVAFSSSIASAAEEAKEKYLIGFNEQEAVSEFVEQVEANDEVAILSEEEEVEIELLHEFETIPVLSVELSPEDVDALELDPAISYIEEDAEVTTMAQSVPWGISRVQAPAAHNRKLTGSGVKVAVLDTGISTHPDLNIRGGASFVPGEPSTQDGEGHGTHVAGTIAALNNSIGVLGVAPSAELYAVKVLGASGSGSVSSIAQGLEWAGLNGMHVANLSLGSPSPSATLEQAVNSATSRGVLVVAASGNSGAGSISYPARYANAMAVGATDQNNNRASFSQYGAGLDIVAPGVNVQSTYPGSTYASLNGTSMATPHVAGAAALVKQKNPSWSNVQIRNHLKNTATSLGSTNLYGSGLVNAEAATR

SEQ ID NO: 62453 - protein, 380 aa, Unidentified
VRSKKLWIVASTALLISVAFSSSIASAAEEAKEKYLIGFNEQEAVSEFVEQVEANDEVAILSEEEEVEIELLHEFETIPVLSVELSPEDVDALELDPAISYIEEDAEVTTMAQSVPWGISRVQAPAAHNRGLTGSGVKVAVLDTGISTHPDLNIRGGASFVPGEPSTQDGNGHGTHVAGTIAALNNSIGVLGVAPSAELYAVKVLGASGSGSVSSIAQGLEWAGNNGMHVANLSLGSPSPSATLEQAVNSATSRGVLVVAASGNSGAGSISYPARYANAMAVGATDQNNNRASFSQYGFGLDIVAPGVNVQSTYPQSTYASLNGTSMATPHVAGAAALVKNKNPSWSNVQIRNHLKNTATSLGSTNLYGSGLVNAEAATR

SEQ ID NO: 62454 - protein, 380 aa, Unidentified
VRSKKLWIVASTALLISVAFSSSIASAAEEAKEKYLIGFNEQEAVSEFVEQVEANDEVAILSEEEEVEIELLHEFETIPVLSVELSPEDVDALELDPAISYIEEDAEVTTMAQSVPWGISRVQAPAAHNRGLTGSGVKVAVLDTGISTHPDLNIRGGASFVPGEPSTQDGNGHGTHVAGTIAALNNSIGVLGVAPSAELYAVKVLGASGSGSVSSIAQGLEWAGNNGMHVANLSLGNPSPSATLEQAVNSATSRGVLVVAASGNSGEGSISYPARYANAMAVGATDQNNNRASFSQYGAGLDIVAPGVNVQSTYPGSTYASLNGTSMATPHVAGAAALVKQKNPSWSNVQIRNRLKNTATSLGSTNLYGSGLVNAEAATR

SEQ ID NO: 62455 - protein, 380 aa, Unidentified
VRSKKLWIVASTALLISVAFSSSIASAAEEAKEKYLIGFNEQEAVSEFVEQVEANDEVAILSEEEEVEIELLHEFETIPVLSVELSPEDVDALELDPAISYIEEDAEVTTMAQSVPWGISRVQAPAAHNRGLAGSGVKVAVLDTGISTHPDLNIRGGASFVPGEPSTQDGNGHGTHVAGTIAALNNSIGVLGVAPSAELYAVKVLGASGAGSVSSIAQGLEWAGNNGMHVANLSLGSPSPSATLEQAVNSATSRGVLVVAASGNSGAGSISYPARYANAMAVGATDQNNNRASFSQYGAGLDIVAPGVNVQSTEPGSTYASLNGTSMATPHVAGAAALVKQKNPSWSNVQIRNHLKNTATSLGSTNLYGSGLVNAEAATR

SEQ ID NO: 62456 - protein, 380 aa, Unidentified
VRSKKLWIVASTALLISVAFSSSIASAAEEAKEKYLIGFNEQEAVSEFVEQVEANDEVAILSEEEEVEIELLHEFETIPVLSVELSPEDVDALELDPAISYIEEDAEVTTMAQSVPWGISRVQAPAAHNRGLTGRGVKVAVLDTGISTHPDLNIRGGASFVPGEPSTQDGNGHGTHVAGTIAALNNSIGVLGVASSAELYAVKVLGASGSGSVSSIAQGLEWAGNNGMHVANLSLGSPSPSATLEQAVNGATSRGVLVVAASGNSGAGSISYPARYANAMAVGATDQNNNRASFSQYGAGLDIVAPGVNVQSTYPGSTYASLNGTSMATPHVAGAAALVKQKNPSWSNVQIRNHLKNTATSLGSTNLYGSGLVNAEAATR

SEQ ID NO: 62457 - protein, 380 aa, Unidentified
VRSKKLWIVASTALLISVAFSSSIASAAEEAKEKYLIGFNEQEAVSEFVEQVEANDEVAILSEEEEVEIELLHEFETIPVLSVELSPEDVDALELDPAISYIEEDAEVTTMAQSVPWGISRVQAPAAHRRRLTGSGVKVAVLDTGISTHPDLDIRGGASFVPGEPSTQDGNGHGTHVAGTIAALNNSIGVLGVAPSAELYAVKVLGASGSGSVSSIAQGLEWAGNNGMHVANLSLGSPSPSATLEQAVNSATSRGVLVVAASGNSGAGSISYPARYANAMAVGATDQNNNRASFSQYGAGLDIVAPGVNVQSTYPGSTYASLNGTSMATPHVAGAAALVKQKNPSWSNVQIRNHLKNTATSLGSTNLYGSGLVNAEAATR

SEQ ID NO: 62458 - protein, 380 aa, Unidentified
VRSKKLWIVASTALLISVAFSSSIASAAEEAKEKYLIGFNEQEAVSEFVEQVEANDEVAILSEEEEVEIELLHEFETIPVLSVELSPEDVDALELDPAISYIEEDAEVTTMAQSVPWGISRVQAPAAHNRGLTGSGVKVAVLDTGISTHPDLDIRGGASFVPGEPSTQDGNGHGTHVAGTIAALNNSIGVLGVAPSAELYAVKVLGASGSGSVSSIAQGLEWAGNNGMHVANLSLGSPSPSATLEQAVNSATSRGVLVVAASGNSGAGSISYPARYANAMAVGATDQNNNRASFSQYGAGLDIVAPGVNVQSTYPGSTYASLNGTSMATPHVAGAAALVKQKNPSWRNVQIRNRLKNTATSLGSTNLYGSGLVNAEAATR

SEQ ID NO: 62459 - protein, 380 aa, Unidentified
VRSKKLWIVASTALLISVAFSSSIASAAEEAKEKYLIGFNEQEAVSEFVEQVEANDEVAILSEEEEVEIELLHEFETIPVLSVELSPEDVDALELDPAISYIEEDAEVTTMAQSVPWGISRVQAPAAHNRGLAGSGVKVAVLDTGISTHPDLNIRGGASFVPGEPSTQDGNGHGTHVAGTIAALNNSIGVLGVAPSAELYAVKVLGASGSGSVSSIAQGVEWAGNNGMHVANLSLGSPSPSATLEQAVNSATSRGVLVVAASGNSGAESISYPARYANAMAVGATDQNNNRASFSQYGAGLDIVAPGVNVQSTYPGSTYASLNGTSMATPHVAGAAALVKQKNPSWSNVQIRNHLKNTATSLGSTNLYGSGLVNAEAATR

SEQ ID NO: 62460 - protein, 380 aa, Unidentified
VRSKKLWIVASTALLISVAFSSSIASAAEEAKEKYLIGFNEQEAVSEFVEQVEANDEVAILSEEEEVEIELLHEFETIPVLSVELSPEDVDALELDPAISYIEEDAEVTTMAQSVPWGISRVQAPAAHRRGLTGSGVKVAVLDTGISTHPDLNIRGGASFVPGEPSTQDGNGHGTHVAGTIAALNNSIGVLGVAPSAELYAVKVLGASGGGSVSSIAQGLEWAGNNGMHVANLSLGSPSPSATLEQAVNSATSRGVLVVAASGNSGAGSISYPARYANAMAVGATDQNNNRASFSQYGAGLDIVAPGVNVQSTYPGSTYASLNGTSMATPHVAGAAALVKQKNPSWSNVRIRNHLKNTATSLGSTNLYGSGLVNAEAATR

SEQ ID NO: 62461 - protein, 380 aa, Unidentified
VRSKKLWIVASTALLISVAFSSSIASAAEEAKEKYLIGFNEQEAVSEFVEQVEANDEVAILSEEEEVEIELLHEFETIPVLSVELSPEDVDALELDPAISYIEEDAEVTTMAQSVPWGISRVQAPAAHNRGLTGSGVKVAVLDTGISTHPDLNIRGGASFVPGEPSTQDGNGHGTHVAGTIAALNNSIGVLGVAPSAELYAVKVLGASGSGSVSSIAQGLEWAGNNGMHVANLSLGSPSPSATLEQAVNSATSRGVLVVAASGNSGEGSISYPARYANAMAVGATDQNNNHASFSQYGAGLDIVAPGVNVQSTYPGSTYASLNGTSMATPHVAGAAALVKQKNPSWSNVQIRNRLKNTATSLGSTNLYGSGLVNAEAATR

SEQ ID NO: 62462 - protein, 380 aa, Unidentified
VRSKKLWIVASTALLISVAFSSSIASAAEEAKEKYLIGFNEQEAVSEFVEQVEANDEVAILSEEEEVEIELLHEFETIPVLSVELSPEDVDALELDPAISYIEEDAEVTTMAQSVPWGISRVQAPAAHNRRLRGSGVKVAVLDTGISTHPDLNIRGGASFVPGEPSTQDGNGHGTHVAGTIAALNNSIGVLGVAPSAELYAVKVLGASGSGSVSSIAQGLEWAGNNGMHVANLSLGSPSPSATLEQAVNSATSRGVLVVAASGNSGAGSISYPARYANAMAVGATDQNNNRASFSQYGAGLDIVAPGVNVQSTYPGSTYASLNGTSMATPHVAGAAALVKQKNPSRSNVQIRNHLKNTATSLGSTNLYGSGLVNAEAATR

SEQ ID NO: 62463 - protein, 380 aa, Unidentified
VRSKKLWIVASTALLISVAFSSSIASAAEEAKEKYLIGFNEQEAVSEFVEQVEANDEVAILSEEEEVEIELLHEFETIPVLSVELSPEDVDALELDPAISYIEEDAEVTTMAQSVPWGISRVQAPAAHRRGLTGSGVKVAVLDTGISTHPDLNIRGGASFVPGEPSTQDGNGHGTHVAGTIAALDNSIGVLGVAPSAELYAVKVLGASGGGSVSSIAQGLEWAGNNGMHVANLSLGSPSPSATLEQAVNSATSRGVLVVAASGNSGAGSISYPARYANAMAVGATDQNNNRASFSQYGAGLDIVAPGVNVQSTYPGSTYASLNGTSMATPHVAGAAALVKQKNPSWSNVQIRNHLKNTATSLGSTNLYGSGLVNAEAATR

SEQ ID NO: 62464 - protein, 380 aa, Unidentified
VRSKKLWIVASTALLISVAFSSSIASAAEEAKEKYLIGFNEQEAVSEFVEQVEANDEVAILSEEEEVEIELLHEFETIPVLSVELSPEDVDALELDPAISYIEEDAEVTTMAQSVPWGISRVQAPAAHNRGLTGRGVKVAVLDTGISTHPDLNIRGGASFVPGEPSTQDGNGHGTHVAGTIAALNNSIGVLGVARSAELYAVKVLGASGSGSVSSIAQGLEWAGNNRMHVANLSLGSPSPSATLEQAVNSATSRGVLVVAASGNSGAGSISYPARYANAMAVGATDQNNNRASFSQYGAGLDIVAPGVNVQSTYPGSTYASLNGTSMATPHVAGAAALVKQKNPSWSNVQIRNHLKNTATSLGSTNLYGSGLVNAEAATR

SEQ ID NO: 62465 - protein, 380 aa, Unidentified
VRSKKLWIVASTALLISVAFSSSIASAAEEAKEKYLIGFNEQEAVSEFVEQVEANDEVAILSEEEEVEIELLHEFETIPVLSVELSPEDVDALELDPAISYIEEDAEVTTMAQSVPWGISRVQAPAAHNRGLTGSGVKVAVLDTGISTHPDLNIRGGASFVPGEPSTQDGNGHGTHVAGTIAALDNSIGVLGVAPSAELYAVKVLGASGSGSVSSIAQGLEWAGNNGMHVANLSLGSPSPSATLEQAVNSATSRGVLVVAASGNSGAGSISYPARYANAMAVGATDQNNNRASFSQYGAGLDIVAPGVNVQSTYPGSTYASLNGTSMATPHVAGAAVLVKQKNPSWSNVRIRNHLKNTATSLGSTNLYGSGLVNAEAATR

SEQ ID NO: 62466 - protein, 380 aa, Unidentified
VRSKKLWIVASTALLISVAFSSSIASAAEEAKEKYLIGFNEQEAVSEFVEQVEANDEVAILSEEEEVEIELLHEFETIPVLSVELSPEDVDALELDPAISYIEEDAEVTTMAQSRPWGISRVQAPAAHNRRLTGRGVKVAVLDTGISTHPDLNIRGGASFVPGEPSTQDGNGHGTHVAGTIAALNNSIGVLGVAPSAELYAVKVLGASGSGSVSSIAQGLEWAGNNGMHVANLSLGSPSPSATLEQAVNSATSRGVLVVAASGNSGAGSISYPARYANAMAVGATDQNNNRASFSQYGAGLDIVAPGVNVQSTYPGSTYASLNGTSMATPHVAGAAALVKQKNPSWSNVQIRNHLKNTATSLGSTNLYGSGLVNAEAATR

SEQ ID NO: 62467 - protein, 380 aa, Unidentified
VRSKKLWIVASTALLISVAFSSSIASAAEEAKEKYLIGFNEQEAVSEFVEQVEANDEVAILSEEEEVEIELLHEFETIPVLSVELSPEDVDALELDPAISYIEEDAEVTTMAQSVPWGISRVQAPAAHNRGLTGRGVKVAVLDSGISTHPDLNIRGGASFVPGEPSTQDGNGHGTHVAGTIAALNNSIGVLGVAPSAELYAVKVLGASGSGSVSSIAQGLEWAGNNGMHVANLSLGSPSPSATLEQAVNSATSRGVLVVAASGNSGAGSISYPARYANAMAVGATDQNNNRASFSQYGAGLDIVAPGVNVQSTYPGSTYASLNGTSMATPHVAGAAALVFQKNPSWSNVQIRNHLKNTATSLGSTNLYGSGLVNAEAATR

SEQ ID NO: 62468 - protein, 380 aa, Unidentified
VRSKKLWIVASTALLISVAFSSSIASAAEEAKEKYLIGFNEQEAVSEFVEQVEANDEVAILSEEEEVEIELLHEFETIPVLSVELSPEDVDALELDPAISYIEEDAEVTTMAQSVPWGISRVQAPAAHNRGLTGSGVKVAVLDTGISTHPDLNIRGGASFVPGEPSTQDGEGHGTHVAGTIAALNNSIGVLGVAPSAELYAVKVLGASGSGSVSSIAQGLEWAGNNGMHVANLSLGSPSPSATLEQAVNSATSRGVLVVAASGNSGAESISYPARYANAMAVGATDQNNNRASFSQYGAGLDIVAPGVNVQSTYPGSTYASLNGTSMATPHVAGAAALVKQKNPSWSNVQIRNRLKNTATSLGSTNLYGSGLVNAEAATR

SEQ ID NO: 62469 - protein, 380 aa, Unidentified
VRSKKLWIVASTALLISVAFSSSIASAAEEAKEKYLIGFNEQEAVSEFVEQVEANDEVAILSEEEEVEIELLHEFETIPVLSVELSPEDVDALELDPAISYIEEDAEVTTMAQSVPWGISRVQAPAAHNRGLTGSGVKVAVLDTGISTHPDLNIRGGASFVPGEPSTQDGNGHGTHVAGTIAALNNSIGVLGVAWSAELYAVKVLGASGSGSVSSIAQGLEWAGNNRMHVANLSLGSPSPSATLEQAVNSATSRGVLVVAASGNSGAGSISYPARYANAMAVGATDQNNNRASFSQYGAGLDIVAPGVNVQSTAPGSTYASLNGTSMATPHVAGAAALVKQKNPSWSNVQIRNHLKNTATSLGSTNLYGSGLVNAEAATR

SEQ ID NO: 62470 - protein, 380 aa, Unidentified
VRSKKLWIVASTALLISVAFSSSIASAAEEAKEKYLIGFNEQEAVSEFVEQVEANDEVAILSEEEEVEIELLHEFETIPVLSVELSPEDVDALELDPAISYIEEDAEVTTMAQSEPWGISRVQAPAAHNRGLTGSGVKVAVLDSGISTHPDLNIRGGASFVPGEPSTQDGNGHGTHVAGTIAALNNRIGVLGVAPSAELYAVKVLGASGSGSVSSIAQGLEWAGNNGMHVANLSLGSPSPSATLEQAVNSATSRGVLVVAASGNSGAGSISYPARYANAMAVGATDQNNNRASFSQYGAGLDIVAPGVNVQSTYPGSTYASLNGTSMATPHVAGAAALVKQKNPSWSNVQIRNHLKNTATSLGSTNLYGSGLVNAEAATR

SEQ ID NO: 62471 - protein, 380 aa, Unidentified
VRSKKLWIVASTALLISVAFSSSIASAAEEAKEKYLIGFNEQEAVSEFVEQVEANDEVAILSEEEEVEIELLHEFETIPVLSVELSPEDVDALELDPAISYIEEDAEVTTMAQSVPWGISRVQAPAAHRRGLTGSGVKVAVLDTGISTHPDLNIRGGASFVPGEPSTQDGNGHGTHVAGTIAALNNSIGVLGVAPSAELYAVKVLGASGSGSISSIAQGLEWAGNNGMHVANLSLGSPSPSATLEQAVNSATSRGVLVVAASGNSGAGSISYPARYANAMAVGATDQNNNRASFSQYGAGLDIVAPGVNVQSTYPGSTYASLNGTSMATPHVAGAAVLVKQKNPSWSNVQIRNHLKNTATSLGSTNLYGSGLVNAEAATR

SEQ ID NO: 62472 - protein, 380 aa, Unidentified
VRSKKLWIVASTALLISVAFSSSIASAAEEAKEKYLIGFNEQEAVSEFVEQVEANDEVAILSEEEEVEIELLHEFETIPVLSVELSPEDVDALELDPAISYIEEDAEVTTMAQSVPWGISRVQAPAAHNRGLTGRGVKVAVLDTGISTHPDLRIRGGASFVPGEPSTQDGNGHGTHVAGTIAALNNSIGVLGVAPSAELYAVKVLGASGSGSVSSIAQGLEWAGNNGMHVANLSLGSPSPSATLEQAVNSATSRGVLVVAASGNSGAGSISYPARYANAMAVGATDQNNNRASFSQYGAGLDIVAPGVNVQSTYPGSTYASLNGTSMATPHVAGAAALVKQKNPSWSNVQIRNRLKNTATSLGSTNLYGSGLVNAEAATR

SEQ ID NO: 62473 - protein, 380 aa, Unidentified
VRSKKLWIVASTALLISVAFSSSIASAAEEAKEKYLIGFNEQEAVSEFVEQVEANDEVAILSEEEEVEIELLHEFETIPVLSVELSPEDVDALELDPAISYIEEDAEVTTMAQSVPWGISRVQAPAAHRRGLTGSGVKVAVLDTGISTHPDLNIRGGASFVPGEPSTQDGNGHGTHVAGTIAALDNSIGVLGVAPSAELYAVKVLGASGSGSISSIAQGLEWAGNNGMHVANLSLGSPSPSATLEQAVNSATSRGVLVVAASGNSGAGSISYPARYANAMAVGATDQNNNRASFSQYGAGLDIVAPGVNVQSTYPGSTYASLNGTSMATPHVAGAAALVKQKNPSWSNVQIRNHLKNTATSLGSTNLYGSGLVNAEAATR

SEQ ID NO: 62474 - protein, 380 aa, Unidentified
VRSKKLWIVASTALLISVAFSSSIASAAEEAKEKYLIGFNEQEAVSEFVEQVEANDEVAILSEEEEVEIELLHEFETIPVLSVELSPEDVDALELDPAISYIEEDAEVTTMAQSVPWGISRVQAPAAHNRGLTGSGVKVAVLDTGISTHPDLNIRGGASFVPGEPSRQDGNGHGTHVAGTIAALNNSIGVLGVAPSAELYAVKVLGASGSGSVSSIAQGLEWAGNNGMHVANLSLGSPSPSATLEQAVNSATSRGVLVVAASGNSGAGSISWPARYANAMAVGATDQNNNRASFSQYGAGLDIVAPGVNVQSTYPGSTYASLNGTSMATPHVAGAAALVKQKNPSWSNVQIRNRLKNTATSLGSTNLYGSGLVNAEAATR

SEQ ID NO: 62475 - protein, 380 aa, Unidentified
VRSKKLWIVASTALLISVAFSSSIASAAEEAKEKYLIGFNEQEAVSEFVEQVEANDEVAILSEEEEVEIELLHEFETIPVLSVELSPEDVDALELDPAISYIEEDAEVTTMAQSVPWGISRVQAPAAHNRRLTGRGVKVAVLDTGISTHPDLNIRGGASFVPGEPSTQDGNGHGTHVAGTIAALNNSIGVLGVAPSAELYAVKVLGASGSGSVSSIAQGLEWAGANGMHVANLSLGSPSPSATLEQAVNSATSRGVLVVAASGNSGAGSISYPARYANAMAVGATDQNNNRASFSQYGAGLDIVAPGVNVQSTYPGSTYASLNGTSMATPHVAGAAALVKQKNPSWSNVQIRNHLKNTATSLGSTNLYGSGLVNAEAATR

SEQ ID NO: 62476 - protein, 380 aa, Unidentified
VRSKKLWIVASTALLISVAFSSSIASAAEEAKEKYLIGFNEQEAVSEFVEQVEANDEVAILSEEEEVEIELLHEFETIPVLSVELSPEDVDALELDPAISYIEEDAEVTTMAQSVPWGISRVQAPAAHNRRLRGSGVKVAVLDTGISTHPDLNIRGGASFVPGEPSTQDGNGHGTHVAGTIAALNNSIGVLGVAPSAELYAVKVLGASGSGSVSSIAQGLEWAGNNGMHVANLSLGSPSPSATLEQAVNSATSRGVLVVAASGNSGAGSISYPARYANAMAVGATDQNNNRASFSQYGAGLDIVAPGVNVQSTYPGSTYASLNGTSMATPHVAGAAALVKQKNPSWSNVQIRNHLKNTATSLGSTNLYGSGLVNALAATR

SEQ ID NO: 62477 - protein, 380 aa, Unidentified
VRSKKLWIVASTALLISVAFSSSIASAAEEAKEKYLIGFNEQEAVSEFVEQVEANDEVAILSEEEEVEIELLHEFETIPVLSVELSPEDVDALELDPAISYIEEDAEVTTMAQSVPWGISRVQAPAAHNRGLTGSGVKVAVLDTGISTHPDLNIRGGASFVPGEPSTQDGNGHGTHVAGTIAALNNSIGVLGVAPSAELYAVKVLGASGAGGLSSIAQGLEWAGNNGMHVANLSLGSPSPSATLEQAVNSATSRGVLVVAASGNSGAGSISYPARYANAMAVGATDQNNNRASFSQYGAGLDIVAPGVNVQSTYPGSTYASLNGTSMATPHVAGAAALVKQKNPSWSNVQIRNHLKNTATSLGSTNLYGSGLVNAEAATR

SEQ ID NO: 62478 - protein, 380 aa, Unidentified
VRSKKLWIVASTALLISVAFSSSIASAAEEAKEKYLIGFNEQEAVSEFVEQVEANDEVAILSEEEEVEIELLHEFETIPVLSVELSPEDVDALELDPAISYIEEDAEVTTMAQSVPWGISRVQAPAAHRRRLTGSGVKVAVLDTGISTHPDLNIRGGASFVPGEPSTQDGNGHGTHVAGTIAALDNSIGVLGVAPSAELYAVKVLGASGSGSVSSIAQGLEWAGNNGMHVANLSLGSPSPSATLEQAVNSATSRGVLVVAASGNSGAGSISYPARYANAMAVGATDQNNNRASFSQYGAGLDIVAPGVNVQSTYPGSTYASLNGTSMATPHVAGAAALVKQKNPSWSNVQIRNHLKNTATSLGSTNLYGSGLVNAEAATR

SEQ ID NO: 62479 - protein, 380 aa, Unidentified
VRSKKLWIVASTALLISVAFSSSIASAAEEAKEKYLIGFNEQEAVSEFVEQVEANDEVAILSEEEEVEIELLHEFETIPVLSVELSPEDVDALELDPAISYIEEDAEVTTMAQSVPWGISRVQAPAAHNRGLTGRGVKVAVLDTGISTHPDLNIRGGASFVPGEPSTQDGNGHGTHVAGTIAALNNSIGVLGVAPSAELYAVKVLGASGSGAVSSIAQGLEWAGNNGMHVANLSLGSPSPSATLEQAVNSATSRGVLVVAASGNSGAGSISYPARYANAMAVGATDQNNNRASFSQYGAGLDIVAPGVNVQSTYPGSTYASLNGTSMATPHVAGAAALVKQKNPSWSNVRIRNHLKNTATSLGSTNLYGSGLVNAEAATR

SEQ ID NO: 62480 - protein, 380 aa, Unidentified
VRSKKLWIVASTALLISVAFSSSIASAAEEAKEKYLIGFNEQEAVSEFVEQVEANDEVAILSEEEEVEIELLHEFETIPVLSVELSPEDVDALELDPAISYIEEDAEVTTMAQSVPWGISRVQAPAAHNRGLTGSGVKVAVLDTGISTHPDLNIRGGASFVPGEPSTQDGNGHGTHVAGTIAALNNSIGVLGVAPSAELYAVKVLGASGSGAISSIAQGLEWAGNNGMHVANLSLGSPSPSATLEQAVNSATSRGVLVVAASGNSGAGSISYPARYANAMAVGATDQNNNRASFSQYGAGLDIVAPGVNVQSTYPGSTYASLNGTSMATPHVAGAAALVKQKNPSWSNVRIRNHLKNTATSLGSTNLYGSGLVNAEAATR

SEQ ID NO: 62481 - protein, 380 aa, Unidentified
VRSKKLWIVASTALLISVAFSSSIASAAEEAKEKYLIGFNEQEAVSEFVEQVEANDEVAILSEEEEVEIELLHEFETIPVLSVELSPEDVDALELDPAISYIEEDAEVTTMAQSVPWGISRVQAPAAHNRGLTGSGVKVAVLDTGISTHPDLNIRGGASFVPGEPSRQDGNGHGTHVAGTIAALNNSIGVLGVAPSAILYAVKVLGASGSGSVSSIAQGLEWAGNNGMHVANLSLGSPSPSATLEQAVNSATSRGVLVVAASGNSGAGSISYPARYANAMAVGATDQNNNRASFSQYGAGLDLVAPGVNVQSTYPGSTYASLNGTSMATPHVAGAAALVKQKNPSWSNVQIRNHLKNTATSLGSTNLYGSGLVNAEAATR

SEQ ID NO: 62482 - protein, 380 aa, Unidentified
VRSKKLWIVASTALLISVAFSSSIASAAEEAKEKYLIGFNEQEAVSEFVEQVEANDEVAILSEEEEVEIELLHEFETIPVLSVELSPEDVDALELDPAISYIEEDAEVTTMAQSVPWGISRVQAPAAHNRGLTGSGVKVAVLDTGISTHPDLNIRGGASFVPGEPSTQDGNGHGTHVAGTIAALNNSIGVLGVAPSAELYAVKVLGASGGGAVSSIAQGLEWAGNNGMHVANLSLGSPSPSATLEQAVNSATSRGVLVVAASGNSGAGSISYPARYANAMAVGATDQNNNRASFSQYGAGLDIVAPGVNVQSTYPGSTYASLNGTSMATPHVAGAAVLVKQKNPSWSNVQIRNHLKNTATSLGSTNLYGSGLVNAEAATR

SEQ ID NO: 62483 - protein, 380 aa, Unidentified
VRSKKLWIVASTALLISVAFSSSIASAAEEAKEKYLIGFNEQEAVSEFVEQVEANDEVAILSEEEEVEIELLHEFETIPVLSVELSPEDVDALELDPAISYIEEDAEVTTMAQSVPWGISRVQAPAAHNRRLTGSGVKVAVLDTGISTHPDLRIRGGASFVPGEPSTQDGNGHGTHVAGTIAALNNSIGVLGVAPSAELYAVKVLGASGSGSVSSIAQGLEWAGNNGMHVANLSLGSPSPSATLEQAVNSATSRGVLVVAASGNSGAGSISYPARYANAMAVGATDQNNNRASFSQYGAGLDIVAPGVNVQSTYPGFTYASLNGTSMATPHVAGAAALVKQKNPSWSNVQIRNHLKNTATSLGSTNLYGSGLVNAEAATR

SEQ ID NO: 62484 - protein, 380 aa, Unidentified
VRSKKLWIVASTALLISVAFSSSIASAAEEAKEKYLIGFNEQEAVSEFVEQVEANDEVAILSEEEEVEIELLHEFETIPVLSVELSPEDVDALELDPAISYIEEDAEVTTMAQSVPWGISRVQAPAAHNRGLTGSGVKVAVLDTGISTHPDLNITGGASFVPGEPSTQDGNGHGTHVAGTIAALNNSIGVLGVAPSAELYAVKVLGASGSGSVSSIAQGLEWAGNNGMHVANLSLGSPSPSATLEQAVNSATSRGVLVVAASGNSGAGSISYPARYANAMAVGATDQNNNRASFSQYGAGLDIVAPGVNVQSTYPGSTYASLNGTSMATPHVAGAAALVKQKNPSWRNVQIRNRLKNTATSLGSTNLYGSGLVNAEAATR

SEQ ID NO: 62485 - protein, 310 aa, Unidentified
AEEAKEKYLIGFNEQEAVSEFVEQVEANDEVAILSEEEEVEIELLHEFETIPVLSVELSPEDVDALELDPAISYIEEDAEVTTMAQSVPWGISRVQAPAAHNRGLTGSGVKVAVLDTGISTHPDLNIRGGASFVPGEPSTQDGNGHGTHVAGTIAALNNSIGVLGVAPSAELYAVKVLGASGSGSVSSIAQGLEWAGNNGMHVANLSLGSPSPSATLEQAVNSATSRGVLVVAASGNSGAGSISYPARYANAMAVGATDQNNNRASFSQYGAGLDIVAPGVNVQSTYPGCLASDTLVRTSEGDKPVAEVA

SEQ ID NO: 62486 - protein, 266 aa, Unidentified
AQSVPWGISRVQAPAAHNRGLTGSGVKVAVLDTGISTHPDLNIRGGASFVPGEPSTQDGNGHGTHVAVAGTIASYGSVSGVMHNATLVPVKVASGSGSVSSIAQGLEWAGNNGMHVANLSLGSPSPSATLEQAVNSATSRGVLVVAASGNSGAGSISYPARYANAMAVGATDQNNNRASFSQYGAGLDIVAPGVNVQSTYPGSTYASLNGTSMATPHVAGAAALVKQKNPSWSNVQIRNHLKNTATSLGSTNLYGSGLVNAEAATR

SEQ ID NO: 62487 - protein, 376 aa, Unidentified
LGKIVASTALLISVAFSSCIASAAEEAKEKYLIGFNEQEAVSEFVEQVEANDEVAILSEEEEVEIELLHEFETIPVLSVELSPEDVDALELDPAISYIEEDAEVTTMAQSVPWGISRVQAPAAHNRGLTGSGVKVAVLDTGISTHPDLNIRGGASFVPGEPSTQDGNGHGTHVAGTIAALNNSIGVLGVAPSAELYAVKVLGADGRGAISSIAQGLEWAGNNGMHVANLSLGSPSPSATLEQAVNSATSRGVLVVAASGNSGASSISYPARYANAMAVGATDQNNNRASFSQYGAGLDIVAPGVNVQSTYPGSTYASLNGTSMATPHVAGAAALVKQKNPSWSNVQIRNHLKNTATSLGSTNLYGSGLVNAEAATR

SEQ ID NO: 62488 - protein, 376 aa, Unidentified
LGKIVASTALLISVAFSSSIASAAEEAKEKYLIGFNEQEAVSEFVEQIEANDDVAILSEEEEVEIELLHEFETIPVLSVELSPEDVDALELDPTISYIEEDAEVTTMAQSVPWGISRVQAPAAHNRGLTGSGVKVAVLDTGISTHPDLNIRGGASFVPGEPSTQDGNGHGTHVAGTIAALNNSIGVLGVAPSAELYAVKVLGASGSGSVSSIAQGLEWAGNNGMHVANLSLGSPSPSATLEQAVNSATSRGVLVVAASGNSGAGSISYPARYANAMAVGATDQNNNRASFSQYGAGLDIVAPGVNVQSTYPGSTYASLNGTSMATPHVAGVAALVKQKNPSWSNVQIRNHLKNTATGLGNTNLYGSGLVNAEAATR

SEQ ID NO: 62489 - protein, 376 aa, Bacillus sp.
LGKIVASTALLISVAFSSSIASAAEEAKEKYLIGFNEQEAVSEFVEQVEANDEVAILSEEEEVEIELLHEFETIPVLSVELSPEDVDALELDPAISYIEEDAEVTTMAQSVPWGISRVQAPAAHNRGLTGSGVKVAVLDTGISTHPDLNIRGGASFVPGEPSTQDGNGHGTHVAGTIAALDNSIGVLGVAPSAELYAVKVLGASGSGAISSIAQGLEWAGNNGMHVANLSLGSPSPSATLEQAVNSATSRGVLVVAASGNEGAGSIDYPARYANAMAVGATDQNNNRASFSQYGAGLDIVAPGVNVQSTYPISTYASLNGTSMATPHVAGAAALVKQKNPSWSNVQIRNHLKNTATSLGSTNLYGSGLVNAEAATR

SEQ ID NO: 62490 - protein, 269 aa, Unidentified
PWVYDLQVPGYHNFLANGIFVHNSGVKVAVLDTGISTHPDLNIRGGASFVPGEPSTQDGNGHGTHVAGTIAALNNSIGVLGVAPSAELYAVKVLGASGSGSVSSIAQGLEWAGNNGMHVANLSLGSPSPSATLEQAVNSATSRGVLVVAASGNSGAGSISYPARYANAMAVGATDQNNNRASFSQYGAGLDIVAPGVNVQSTYPGSTYASLNGTSMATPHVAGAAALVKQKNPSWSNVQIRNHLKNTATSLGSTNLYGSGLVNAEAATR

SEQ ID NO: 62491 - protein, 308 aa, Unidentified
AEEAKEKYLIGFNEQEAVSEFVEQVEANDEVAILSEEEEVEIELLHEFETIPVLSVELSPEDVDALELDPAISYIEEDAEVTTMAQSVPWGISRVQAPAAHNRGLTGSGVKVAVLDTGISTHPDLNIRGGASFVPGEPSTQDGNGHGTHVAGTIAALNNSIGVLGVAPSAELYAVKVLGASGSGSVSSIAQGLEWAGNNGMHVANLSLGSPSPSATLEQAVNSATSRGVLVVAASGNSGAGSISYPARYANAMAVGATDQNNNRASFSQYGAGLDIVAPGVNVQSTYPGCMHYDTLVTLADGTQEKIG

SEQ ID NO: 62492 - protein, 216 aa, Unidentified
AQSVPWGISRVQAPAAHNRGLTGSGVKVAVLDTGISTHPDLNIRGGASFVPGEPSTQDGNGHGTHVAGTIAALNNSIGVLGVAPSAELYAVKVLGASGSGSVSSIAQGLEWAGNNGMHVANLSLGSPSPSATLEQAVNSATSRGVLVVAASGNSGAGSISYPARYANAMAVGATDQNNNRASFSQYGAGLDIVAPGVNVQSTYPGCVVGETRILTP

SEQ ID NO: 62493 - protein, 194 aa, Unidentified
AQSVPWGISRVQAPAAHNRGLTGSGVKVAVLDTGISTHPDLNIRGGASFVPGEPSTQDGNGHGTHVAGTIAALNNSIGVLGVAPSAELYAVKVLGASGSGSVSSIAQGLEWAGNNGMHVANLSLGSPSPSATLEQAVNSATSRGVLVVAASGNSGAGSISYPARYANAMAVGATDQNNNRACFAKGTNVLMADG

SEQ ID NO: 62494 - protein, 274 aa, Bacillus licheniformis
AQVVPYGIPLIKADKVQAQGFKGANVKVAVLDTGIQASHPDLNVVGGASFVAGEAYNTDGNGHGTHVSGTVAALDNNTGVLGVAPSVSLYAVKVLNSSGSGSYSGIVSGIEWATTNGMDVINISLGSPSGSTAMKQAVDNAYARGVVVVAAAGNSGSSGNTNTIQYPAKYDSVIAVGAVDSNSQRAEFSSVGAELEVMAPGVGVYSTYPPNTYATLSGTSMASPHVAGAAALILSKHPNLSASQVRNRLSSTATYLGPSFYYGKGLINVEAAAQ

SEQ ID NO: 62495 - protein, 274 aa, Bacillus licheniformis
AQVVPYGIPMIKADKVQAQGFKGANVKVAVLDTGIQASHPDLNVVGGASFVAGEAYNTDGNGHGTHVSGTVAALDNNTGVLGVAPSVSLYAVKVLNSSGSGSYSGIVSGIEWATTNGMDVINISLGSPSGSTAMKQAVDNAYARGVVVVAAAGNSGSSGNTNTIQYPAKYDSVIAVGAVDSNSQRASFSSVGAELEVMAPGVGVYSTYPPNTYATLSGTSMASPHVAGAAALILSKHPNLSASQVRNRLSSTATYLGPSFYYGKGLINVEAAAQ

SEQ ID NO: 62496 - protein, 274 aa, Bacillus licheniformis
AQVVPYGIPLIKADKVQAQGFKGANVKVAVLDTGIQASHPDLNVVGGASFVAGEAYNTDGNGHGTHVSGTVAALDNNIGVLGVAPSVSLYAVKVLNSSGSGSYSGIVSGIEWATTNGMDVINISLGSPSGSTAMKQAVDNAYARGVVVVAAAGNSGSSGNTNTIQYPAKYDSVIAVGAVDSNSQRASFSSVGAELEVMAPGVGVYSTYPPNTYATLSGTSMASPHVAGAAALILSKHPNLSASQVRNRLSSTATYLGPSFYYGKGLINVEAAAQ

SEQ ID NO: 62497 - protein, 274 aa, Bacillus licheniformis
AQVVPYGIELIKADKVQAQGFKGANVKVAVLDTGIQASHPDLNVVGGASFVAGEAYNTDGNGHGTHVSGTVAALDNNTGVLGVAPSVSLYAVKVLNSSGSGSYSGIVSGIEWATTNGMDVINISLGSPSGSTAMKQAVDNAYARGVVVVAAAGNSGSSGNTNTIQYPAKYDSVIAVGAVDSNSQRASFSSVGAELEVMAPGVGVYSTYPPNTYATLSGTSMASPHVAGAAALILSKHPNLSASQVRNRLSSTATYLGPSFYYGKGLINVEAAAQ

SEQ ID NO: 62498 - protein, 274 aa, Bacillus clausii
AQTVPYGIPLIKADKVQAQGFKGANVKVAVLDTGIQASHPDLNVVGGASFVAGEAYNTDGNGHGTHVSGTVAALDNNIGVLGVAPSVSLYAVKVLNSFGLGSYSGIVSGIEWATTNGMDVINMSLGSPSGSTAMKQAVDNAYARGVVVVAAAGNSGSSGNTNTIQYPAKYDSVIAVGAVDSNSQRASFSSVGPELEVMAPGVGVYSTYPTNTYATLSGTSMASPHVAGAAALILSKHPNLSASQVRNRLSSTATYLGPSFYYGKGLINVEAAAQ

SEQ ID NO: 62499 - protein, 274 aa, Bacillus licheniformis
AQTVPYGIELIKADKVQAQGFKGANVKVAVLDTGIQASHPDLAVRGGASFVAGEAYNTDGNGHGTHVAGTVAALDNHTGVLGVAPSTSLYAVKVLNSSGSGSYSGIVSGIEWATTNGMDVINISLGGASGSTAMKRAVDNAYARGVVVVAAAGNSGSSGNTNTIAYPAKYDSVIAVGAVDSNSQRAPFSSVGAELEVMAPGAGVYSTYPTNTYATLSGTSMASPHVAGAAALILSKHPSLSASQVRNRLSSTATYLGESFYYGKGLINVEAAAQ

SEQ ID NO: 62500 - protein, 274 aa, Bacillus licheniformis
AQVVPYGIPLIKADKVQAQGFKGANVKVAVLDTGIQASHPDLNVVGGASFVAGEAYNTDGNGHGTHVSGTVAALDNNTGVLGVAPSVSLYAVKVLNSSSSGSYSGIVSGIEWATTNGMDVINISLGSPSGSTAMKQAVDNAYARGVVVVAAAGNSGSSGNTNTIQYPAKYDSVIAVGAVDSNSQRASFSSVGAELEVMAPGVGVYSTYPTNTYATLSGTSMASPHVAGAAALILSKHPNLSASQVRNRLSSTATYLGPSWYYGKGLINVEAAAQ

SEQ ID NO: 62501 - protein, 274 aa, Bacillus licheniformis
AQVVPYGIPLIKADKVQAQGFKGANVKVAVLDTGIQASHPDLNVVGGASFVAGEAYNTDGNGHGTHVSGTVAALDNNTGVLGVAPSVSLYAVKVLNSSGSATYSGIVSGIEWATTNGMDVINISLGSPSGSTAMKQAVDNAYARGVVVVAAAGNSGSSGNTNTIQYPAKYDSVIAVGAVDSNSQRASFSSVGAELEVMAPGVGVYSTYPTNTYATLSGTSMASPHVAGAAALILSKHPNLSASQVRNRLSSTATYLGPSFYYGKGLINVEAAAQ

SEQ ID NO: 62502 - protein, 274 aa, Bacillus clausii
AQTVPYGIPLIKADKVQAQGFKGANVKVAVLDTGIQASHPDLNVVGGASFVAGEAYNTDGNGHGTHVSGTVAALDNNIGVLGVAPSVSLYAVKVLNSFGLGSYSGIVSGIEWATTNGMDVINMSLGSPSGSTAMKQAVDNAYARGVVVVAAAGNEGSSGNTNTIRYPAKYDSVIAVGAVDSNSQRASFSSVGAELEVMAPGVGVYSTYPTNTYATLSGTSMASPHVAGAAALILSKHPNLSASQVRNRLSSTATYLGPSFYYGKGLINVEAAAQ

SEQ ID NO: 62503 - protein, 274 aa, Bacillus licheniformis
AQVVPYGIPLIKADKVQAQGFKGANVKVAVLDTGIQASHPDLNVVGGASFVAGEAYNTDGNGHGTHVSGTVAALDNNTGVLGVAPSVSLYAVKVLNSSGSGTYSGIVSGIEWATTNGMDVINISLGSPSGSTAMKQAVDNAYARGVVVVAAAGNSGSSGNTNTIQYPAKYDSVIAVGAVDSNSQRASFSSVGAELEVMAPGVGVYSTYPTSTYATLSGTSMASPHVAGAAALILSKHPNLSASQVRNRLSSTATYLGPSFYYGKGLINVEAAAQ

SEQ ID NO: 62504 - protein, 274 aa, Bacillus licheniformis
AQVVPYGIPLIKADKVQAQGFKGANVKVAVLDTGIQASHPDLNVVGGASFVAGEAYNTDGNGHGTHVSGTVAALDNNTGVLGVAPSVSLYAVKVLNSSGSGSYSGIVSGIEWATTNGMDVINISLGSPSGSTAMKQAVDNAYARGVVVVAAAGNSGSSGNTNTIQYPAKYDSVIAVGAVDSNSQRASFSSVGAELEVMAPGVGVYSTYPPNTYATLSGTSMASPHVAGAAALILSKHPNLSAIQVRNRLSSTATYLGPSFYYGKGLINVEAAAQ

SEQ ID NO: 62505 - protein, 274 aa, Bacillus licheniformis
AQVVPYGIPLIKADKVQAQGFKGANVKVAVLDTGIQASHPDLNVVGGASFVAGEAYNTDGNGHGTHVSGTVAALDNNTGVLGVAPSVSLYAVKVLNSSGSGSYSGIVSGIEWATTNGMDVINISLGSPSGSTAMKQAVDNAYARGVVVVAAAGNSGSSGNTNTIQYPAKYDSVIAVGAVDSNSQRASFSSVGAELEVMAPGVEVYSTYPPNTYATLSGTSMASPHVAGAAALILSKHPNLSASQVRNRLSSTATYLGPSFYYGKGLINVEAAAQ

SEQ ID NO: 62506 - protein, 274 aa, Bacillus licheniformis
AQVVPYGIPLIKADKVQAQGFKGANVKVAVLDTGIQASHPDLNVVGGASFVAGEAYNTDGNGHGTHVSGTVAALDNNTGVLGVAPSSSLYAVKVLNSSGSGSYSGIVSGIEWATTNGMDVINISLGSPSGSTAMKQAVDNAYARGVVVVAAAGNSGSSGNTNTIQYPAKYDSVIAVGAVDSNSQRASFSSVGAELEVMAPGVGVYSTYPPNTYATLSGTSMASPHVAGAAALILSKHPNLSASQVRNRLSSTATYLGPSFYYGKGLINVEAAAQ

SEQ ID NO: 62507 - protein, 274 aa, Bacillus clausii
AQTVPYGIPLIKADKVQAQGFKGANVKVAVLDTGIQASHPDLNVVGGASFVAGEAYNTDGNGHGTHVSGTVAALDNNIGVLGVAPSVSLYAVKVLNSFGLGSYSGIVSGIEWATTNGMDVINMSLGSPSGSTAMKQAVDNAYARGVVVVAAAGNSGSSGNTNTIQYPAKYDSVIAVGAVDSNSQRASFSSVGAELEVMAPGVGVYSTYPTNTYKTLSGTSMASPHVAGAAALILSKHPNLSASQVRNRLSSTATYLGPSFYYGKGLINVEAAAQ

SEQ ID NO: 62508 - protein, 274 aa, Bacillus licheniformis
AQVVPYGIPLIKADKVQAQGFKGANQKVAVLDTGIQASHPDLNVVGGASFVAGEAYNTDGNGHGTHVSGTVAALDNNTGVLGVAPSVSLYAVKVLNSSGSGSYSGIVSGIEWATTNGMDVINISLGSPSGSTAMKQAVDNAYARGVVVVAAAGNSGSSGNTNTIEYPAKYDSVIAVGAVDSNSQRASFSSVGAELEVMAPGVGVYSTYPPNTYATLSGTSMASPHVAGAAALILSKHPNLSASQVRNRLSSTATYLGPSFYYGKGLINVEAAAQ

SEQ ID NO: 62509 - protein, 380 aa, Unidentified
VRSKKLWIVASTALLISVAFSSSIASAAEEAKEKYLIGFNEQEAVSEFVEQVEANDEVAILSEEEEVEIELLHEFETIPVLSVELSPEDVDALELDPAISYIEEDAEVTTMAQSVPWGISRVQAPAAHNRGLTGRGVKVAVLDTGISTHPDLRITGGASFVPGEPSTQDGNGHGTHVAGTIAALNNSIGVLGVAPSAELYAVKVLGASGSGSVSSIAQGLEWAGNNGMHVANLSLGSPSPSATLEQAVNSATSRGVLVVAASGNSGAGSISYPARYANAMAVGATDQNNNRASFSQYGAGLDIVAPGVNVQSTYPGSTYASLNGTSMATPHVAGAAALVKQKNPSWSNVQIRNHLKNTATSLGSTNLYGSGLVRAEAATR

SEQ ID NO: 62510 - protein, 380 aa, Unidentified
VRSKKLWIVASTALLISVAFSSSIASAAEEAKEKYLIGFNEQEAVSEFVEQVEANDEVAILSEEEEVEIELLHEFETIPVLSVELSPEDVDALELDPAISYIEEDAEVTTMAQSVPWGISRVQAPAAHNRRLTGRGVKVAVLDTGISTHPDLNIRGGASFVPGEPSTQDGNGHGTHVAGTIAALDNSIGVLGVAPSAELYAVKVLGASGSGSVSSIAQGLEWAGNNGMHVANLSLGSPSPSATLEQAVNSATSRGVLVVAASGNSGAGSISYPARYANAMAVGATDQNNNRASFSQYGAGLDIVAPGVNVQSTYPGSTYASLNGTSMATPHVAGAAALVKQKNPSWSNVQIRNRLKNTATSLGSTNLYGSGLVNAEAATR

SEQ ID NO: 62511 - protein, 380 aa, Unidentified
VRSKKLWIVASTALLISVAFSSSIASAAEEAKEKYLIGFNEQEAVSEFVEQVEANDEVAILSEEEEVEIELLHEFETIPVLSVELSPEDVDALELDPAISYIEEDAEVTTMAQSVPWGISRVQAPAAHNRGLTGSGVKVAVLDTGISTHPDLRIRGGASFVPGEPSTQDGNGHGTHVAGTIAALDNSIGVLGVAPSAELYAVKVLGASGSGSVSSIAQGLEWAGNNGMHVANLSLGSPSPSATLEQAVNSATSRGVLVVAAAGNSGAGSISYPARYANAMAVGATDQNNNRASFSQYGAGLDIVAPGVNVQSTYPGSTYASLNGTSMATPHVAGAAALVKQKNPSWSNVQIRNRLKNTATSLGSTNLYGSGLVNAEAATR

SEQ ID NO: 62512 - protein, 380 aa, Unidentified
VRSKKLWIVASTALLISVAFSSSIASAAEEAKEKYLIGFNEQEAVSEFVEQVEANDEVAILSEEEEVEIELLHEFETIPVLSVELSPEDVDALELDPAISYIEEDAEVTTMAQSVPWGISRVQAPAAHNRGLTGRGVKVAVLDTGISTHPDLNIRGGASFVPGEPSTQDGNGHGTHVAGTIAALNNSIGVLGVAPSAELYAVKVLGASGSGAISSIAQGLEWAGNNGMHVANLSLGSPSPSATLEQAVNSATSRGVLVVAASGNSGAGSISYPARYANAMAVGATDQNNNRASFSQYGAGLDIVAPGVNVQSTYPGSTYASLNGTSMATPHVAGAAALVKQKNPSWSNVQIRNRLKNTATSLGSTNLYGSGLVNAEAATR

SEQ ID NO: 62513 - protein, 380 aa, Unidentified
VRSKKLWIVASTALLISVAFSSSIASAAEEAKEKYLIGFNEQEAVSEFVEQVEANDEVAILSEEEEVEIELLHEFETIPVLSVELSPEDVDALELDPAISYIEEDAEVTTMAQSVPWGISRVQAPAAHNRGLTGSGVKVAVLDTGISTHPDLNIRGGASFVPGEPSTQDGNGHGTHVAGTIAALNNSIGVLGVAPSAELYAVKVLGASGSGNVSSIAQGLEWAGNNGMHVANLSLGSPSPSATLEQAVNSATSRGVLVVAASGNSGAGDISYPARYANAMAVGATDQNNNRASFSQYGAGLDIVAPGVNVQSTYPGSTYASLNGTSMATPHVAGAAALVKQKNPSWSNVQIRNHIKNTATNLGSTNLYGSGLVNAEAATR

SEQ ID NO: 62514 - protein, 380 aa, Unidentified
VRSKKLWIVASTALLISVAFSSSIASAAEEAKEKYLIGFNEQEAVSEFVEQVEANDEVAILSEEEEVEIELLHEFETIPVLSVELSPEDVDALELDPAISYIEEDAEVTTMAQSVPWGISRVQAPAAHNRGLTGSGVKVAVLDTGISTHPDLNIRGGASFVPGEPSTQDGNGHGTHVAGTIAALNNSIGVLGVAPSAELYAVKVLGASGGGAISSIAQGLEWAGNNGMHVANLSLGSPSPSATLEQAVNSATSRGVLVVAASGNSGAGSISYPARYANAMAVGATDQNNNRASFSQYGAGLDIVAPGVNVQSTYPGSTYASLNGTSMATPHVAGAAALVKQKNPSWSNVRIRNHLKNTATSLGSTNLYGSGLVNAEAATR

SEQ ID NO: 62515 - protein, 380 aa, Unidentified
VRSKKLWIVASTALLISVAFSSSIASAAEEAKEKYLIGFNEQEAVSEFVEQVEANDEVAILSEEEEVEIELLHEFETIPVLSVELSPEDVDALELDPAISYIEEDAEVTTMAQSVPWGISRVQAPAAHNRGLTGRGVKVAVLDTGISTHPDLNIRGGASFVPGEPSTQDGNGHGTHVAGTIAALNNSIGVLGVAPSAELYAVKVLGASGSGSVSSIAQGLEWAGNNRMHVANLSLGSPSPSATLEQAVNSATSRGVLVVAASGNSGAGSISYPARYANAMAVGATDQNNNRASFSQYGAGLDIVAPGVNVQSTAPGSTYASLNGTSMATPHVAGAAALVFQKNPSWSNVQIRNHLKNTATSLGSTNLYGSGLVNAEAATR

SEQ ID NO: 62516 - protein, 380 aa, Unidentified
VRSKKLWIVASTALLISVAFSSSIASAAEEAKEKYLIGFNEQEAVSEFVEQVEANDEVAILSEEEEVEIELLHEFETIPVLSVELSPEDVDALELDPAISYIEEDAEVTTMAQSVPWGISRVQAPAAHNRGLTGSGVKVAVLDTGISTHPDLNIRGGASFVPGEPSTQDGNGHGTHVAGTIAALNNSIGVLGVAPSAELYAVKVLGASGAGSVSSIAQGLEWAGNNGMHVANLSLGNPSPSATLEQAVNSATSRGVLVVAASGNSGEGSISYPARYANAMAVGATDQNNNRASFSQYGAGLDIVAPGVNVQSTYPGSTYASLNGTSMATPHVAGAAALVKQKNPSWSNVQIRNRLKNTATSLGSTNLYGSGLVNAEAATR

SEQ ID NO: 62517 - protein, 380 aa, Unidentified
VRSKKLWIVASTALLISVAFSSSIASAAEEAKEKYLIGFNEQEAVSEFVEQVEANDEVAILSEEEEVEIELLHEFETIPVLSVELSPEDVDALELDPAISYIEEDAEVTTMAQSVPWGISRVQAPAAHNRGLTGSGVKVAVLDSGISTHPDLNIRGGASFVPGEPSTQDGNGHGTHVAGTIAALNNSIGVLGVAPSAELYAVKVLGASGSGSVSSIAQGLEWAGNNDMHVANLSLGSPSPSATLEQVVNSATSRGVLVVAASGNSGAGSISYPARYANAMAVGATDQNNNRASFSQYGAGLDIVAPGVNVQSTAPGSTYASLNGTSMATPHVAGAAALVKQKNPSWSNVQIRNHLKNTATSLGSTNLYGSGLVNAEAATR

SEQ ID NO: 62518 - protein, 380 aa, Unidentified
VRSKKLWIVASTALLISVAFSSSIASAAEEAKEKYLIGFNEQEAVSEFVEQVEANDEVAILSEEEEVEIELLHEFETIPVLSVELSPEDVDALELDPAISYIEEDAEVTTMAQSVPWGISRVQAPAAHNRGLTGRGVKVAVLDSGISTHPDLNIRGGASFVPGEPSTQDGNGHGTHVAGTIAALNNSIGVLGVAPSAELYAVKVLGASGSGSVSSIAQGLEWAGNNGMHVANLSLGSPSPSATLEQAVNSATSRGVLVVAASGNSGAGSISYPARYANAMAVGATDQNNNRASFSQYGAGLDIVAPGVNVQSTAPGSTYASLNGTSMATPHVAGAAALVKQKNPSWSFVQIRNHLKNTATSLGSTNLYGSGLVNAEAATR

SEQ ID NO: 62519 - protein, 380 aa, Unidentified
VRSKKLWIVASTALLISVAFSSSIASAAEEAKEKYLIGFNEQEAVSEFVEQVEANDEVAILSEEEEVEIELLHEFETIPVLSVELSPEDVDALELDPAISYIEEDAEVTTMAQSVPWGISRVQAPAAHNRGLTGSGVKVAVLDTGISTHPDLNIRGGASFVPGEPSTQDGEGHGTHVAGTIAALNNSIGVLGVAPSAELYAVKVLGASGAGSVSSIAQGLEWAGNNGMHVANLSLGSPSPSATLEQAVNSATSRGVLVVAASGNSGEGSISYPARYANAMAVGATDQNNNRASFSQYGAGLDIVAPGVNVQSTYPGSTYASLNGTSMATPHVAGAAALVKQKNPSWSNVQIRNRLKNTATSLGSTNLYGSGLVNAEAATR

SEQ ID NO: 62520 - protein, 380 aa, Unidentified
VRSKKLWIVASTALLISVAFSSSIASAAEEAKEKYLIGFNEQEAVSEFVEQVEANDEVAILSEEEEVEIELLHEFETIPVLSVELSPEDVDALELDPAISYIEEDAEVTTMAQSVPWGISRVQAPAAHNRGLTGRGVKVAVLDSGISTHPDLNIRGGASFVPGEPSTQDGNGHGTHVAGTIAALNNRIGVLGVAPSAELYAVKVLGASGSGSVSSIAQGLEWAGNNGMHVANLSLGSPSPSATLEQAVNSATSRGVLVVAASGNSGAGSISYPARYANAMAVGATDQNNNRASFSQYGAGLDIVAPGVNVQSTAPGSTYASLNGTSMATPHVAGAAALVKQKNPSWSNVQIRNHLKNTATSLGSTNLYGSGLVNAEAATR

SEQ ID NO: 62521 - protein, 380 aa, Unidentified
VRSKKLWIVASTALLISVAFSSSIASAAEEAKEKYLIGFNEQEAVSEFVEQVEANDEVAILSEEEEVEIELLHEFETIPVLSVELSPEDVDALELDPAISYIEEDAEVTTMAQSVPWGISRVQAPAAHNRGLTGSGVKVAVLDTGISTHPDLNIRGGASFVPGEPSTQDGEGHGTHVAGTIAALNNSIGVLGVAPSAELYAVKVLGASGSGSVSSIAQGLEWAGNNGMHVANLSLGSPSPSATLEQAVNSATSRGVLVVAASGNSGEGSISYPARYANAMAVGATDQNNNHASFSQYGAGLDIVAPGVNVQSTYPGSTYASLNGTSMATPHVAGAAALVKQKNPSWSNVQIRNHLKNTATSLGSTNLYGSGLVNAFAATR

SEQ ID NO: 62522 - protein, 380 aa, Unidentified
VRSKKLWIVASTALLISVAFSSSIASAAEEAKEKYLIGFNEQEAVSEFVEQVEANDEVAILSEEEEVEIELLHEFETIPVLSVELSPEDVDALELDPAISYIEEDAEVTTMAQSVPWGISRVQAPAAHNRGLTGRGVKVAVLDTGISTHPDLNIRGGASFVPGEPSTQDGNGHGTHVAGTIAALNNSIGVLGVAPSAELYAVKVLGASGGGSISSIAQGLEWAGNNGMHVANLSLGSPSPSATLEQAVNSATSRGVLVVAASGNSGAGSISYPARYANAMAVGATDQNNNRASFSQYGAGLDIVAPGVNVQSTYPGSTYASLNGTSMATPHVAGAAALVKQKNPSWSNVQIRNRLKNTATSLGSTNLYGSGLVNAEAATR

SEQ ID NO: 62523 - protein, 380 aa, Unidentified
VRSKKLWIVASTALLISVAFSSSIASAAEEAKEKYLIGFNEQEAVSEFVEQVEANDEVAILSEEEEVEIELLHEFETIPVLSVELSPEDVDALELDPAISYIEEDAEVTTMAQSVPWGISRVQAPAAHNRGLTGRGVKVAVLDSGISTHPDLNIRGGASFVPGEPSTQDGNGHGTHVAGTIAALNNSIGVLGVAPSAELYAVKVLGASGSGSVSSIAQGLEWAGNNGMHVANLSLGSPSPSATLEQAVNSATSRGVLVVAASGNSGAGSISYPARYANAMAVGATDQNNNRASFSQYGAGLDIVAPGVNVQSTYPGSTYASLNGTSMATPHVAGAAALVFQKNPSRSNVQIRNHLKNTATSLGSTNLYGSGLVNAEAATR

SEQ ID NO: 62524 - protein, 380 aa, Unidentified
VRSKKLWIVASTALLISVAFSSSIASAAEEAKEKYLIGFNEQEAVSEFVEQVEANDEVAILSEEEEVEIELLHEFETIPVLSVELSPEDVDALELDPAISYIEEDAEVTTMAQSVPWGISRVQAPAAHNRGLTGSGVKVAVLDSGISTHPDLNIRGGASFVPGEPSTQDGNGHGTHVAGTIAALNNSIGVLGVAPSAELYAVKVLGASGSGSVSSIAQGLEWAGNNRMHVANLSLGSPSPSATLEQAVNSATSRGVLVVAASGNSGAGSISYPARYANAMAVGATDQNNNRASFSQYGAGLDIVAPGVNVQSTAPGSTYASLNGTSMATPHVAGAAALVKQKNPSWSFVQIRNHLKNTATSLGSTNLYGSGLVNAEAATR

SEQ ID NO: 62525 - protein, 380 aa, Unidentified
VRSKKLWIVASTALLISVAFSSSIASAAEEAKEKYLIGFNEQEAVSEFVEQVEANDEVAILSEEEEVEIELLHEFETIPVLSVELSPEDVDALELDPAISYIEEDAEVTTMAQSVPWGISRVQAPAAHNRKLTGSGVKVAVLDTGISTHPDLWIRGGASFVPGEPSTQDGNGHGTHVAGTIAALNNSIGVLGVAPSAELYAVKVLGASGSGSVSSIAQGLEWAGNNGMHVANLSLGSPSPSATLEQAVNSATSRGVLVVAASGNSGAGSISYPARYANAMAVGATDQNNNRADFSQYGAGLDIVAPGVNVQSTYPGSAYASLNGTSMATPHVAGAAALVKQKNPSWSNVQIRNHLKNTATSLGSTNLYGSGLVNAEAATR

SEQ ID NO: 62526 - protein, 380 aa, Unidentified
VRSKKLWIVASTALLISVAFSSSIASAAEEAKEKYLIGFNEQEAVSEFVEQVEANDEVAILSEEEEVEIELLHEFETIPVLSVELSPEDVDALELDPAISYIEEDAEVTTMAQSVPWGISRVQAPAAHNRGLTGSGVKVAVLDTGISTHPDLNIRGGASFVPGEPSTQDGEGHGTHVAGTIAALNNSIGVLGVAPSAELYAVKVLGASGSGSVSSIAQGLEWAGLNRMHVANLSLGSPSPSATLEQAVNSATSRGVLVVAASGNSGAGSISYPARYANAMAVGATDQNNNRASFSQYGAGLDIVAPGVNVQSTYPGSAYASLNGTSMATPHVAGAAALVKQKNPSWSNVQIRNHLKNTATSLGSTNLYGSGLVNAEAATR

SEQ ID NO: 62527 - protein, 380 aa, Unidentified
VRSKKLWIVASTALLISVAFSSSIASAAEEAKEKYLIGFNEQEAVSEFVEQVEANDEVAILSEEEEVEIELLHEFETIPVLSVELSPEDVDALELDPAISYIEEDAEVTTMAQSVPWGISRVQAPAAHNRGLTGSGVKVAVLDTGISTHPDLNIRGGASFVPGEPSTQDGEGHGTHVAGTIAALNNSIGVLGVAPSAELYAVKVLGASGSGSLSSIAQGLEWAGNNGMHVANLSLGSPSPSATLEQAVNSATSRGVLVVAASGNSGAESISYPARYANAMAVGATDQNNNRASFSQYGAGLDIVAPGVNVQSTYPGSTYASLNGTSMATPHVAGAAALVKQKNPSWSNVQIRNRLKNTATSLGSTNLYGSGLVNAEAATR

SEQ ID NO: 62528 - protein, 380 aa, Unidentified
VRSKKLWIVASTALLISVAFSSSIASAAEEAKEKYLIGFNEQEAVSEFVEQVEANDEVAILSEEEEVEIELLHEFETIPVLSVELSPEDVDALELDPAISYIEEDAEVTTMAQSVPWGISRVQAPAAHNRRLTGRGVKVAVLDTGISTHPDLNIRGGASFVPGEPSTQDGNGHGTHVAGTIAALNNSIGVLGVAPSAELYAVKVLGASGAGSVSSIAQGLEWAGANGMHVANLSLGSPSPSATLEQAVNSATSRGVLVVAASGNSGAGSISYPARYANAMAVGATDQNNNRASFSQYGAGLDIVAPGVNVQSTYPGSTYASLNGTSMATPHVAGAAALVKQKNPSWSNVQIRNHLKNTATSLGSTNLYGSGLVNAEAATR

SEQ ID NO: 62529 - protein, 380 aa, Unidentified
VRSKKLWIVASTALLISVAFSSSIASAAEEAKEKYLIGFNEQEAVSEFVEQVEANDEVAILSEEEEVEIELLHEFETIPVLSVELSPEDVDALELDPAISYIEEDAEVTTMAQSVPWGISRVQAPAAHRRGLTGRGVKVAVLDTGISTHPDLDIRGGASFVPGEPSTQDGNGHGTHVAGTIAALNNSIGVLGVAPSAELYAVKVLGASGSGSVSSIAQGLEWAGNNGMHVANLSLGSPSPSATLEQAVNSATSRGVLVVAASGNSGAGSISYPARYANAMAVGATDQNNNRASFSQYGAGLDIVAPGVNVQSTYPGSTYASLNGTSMATPHVAGEAALVKQKNPSWSNVQIRNHLKNTATSLGSTNLYGSGLVNAEAATR

SEQ ID NO: 62530 - protein, 380 aa, Unidentified
VRSKKLWIVASTALLISVAFSSSIASAAEEAKEKYLIGFNEQEAVSEFVEQVEANDEVAILSEEEEVEIELLHEFETIPVLSVELSPEDVDALELDPAISYIEEDAEVTTMAQSVPWGISRVQAPAAHNRRLTGRGVKVAVLDTGISTHPDLNIRGGASFVPGEPSTQDGNGHGTHVAGTIAALNNSIGVLGVAPSAELYAVKVLGASGSGSVSSIAQGLEWAGNNGMHVANLSLGSPSPSATLEQAVNSATSRGVLVVAASGNSGAGSISYPARYANAMAVGATDQNNNRASFSQYGAGLDIVAPGVNVQSTYPGSTYASLNGTSMATPHVAGAAALVKQKNPSWRNVQIRNRLKNTATSLGSTNLYGSGLVNAEAATR

SEQ ID NO: 62531 - protein, 380 aa, Unidentified
VRSKKLWIVASTALLISVAFSSSIASAAEEAKEKYLIGFNEQEAVSEFVEQVEANDEVAILSEEEEVEIELLHEFETIPVLSVELSPEDVDALELDPAISYIEEDAEVTTMAQSVPWGISRVQAPAAHNRKLTGSGVKVAVLDTGISTHPDLNIRGGASFVPGEPSTQDGNGHGTHVAGTIAALNNSIGVLGVAPSAELYAVKVLGASGSGSVSSIAQGLEWAGLNGMHVANLSLGSPSPSATLEQAVNSATSRGVLVVAASGNSGAGSISYPARYANAMAVGATDQNNNRADFSQYGAGLDIVAPGVNVQSTYPGSTYASLNGTSMATPHVAGAAALVKQKNGSWSNVQIRNHLKNTATSLGSTNLYGSGLVNAEAATR

SEQ ID NO: 62532 - protein, 380 aa, Unidentified
VRSKKLWIVASTALLISVAFSSSIASAAEEAKEKYLIGFNEQEAVSEFVEQVEANDEVAILSEEEEVEIELLHEFETIPVLSVELSPEDVDALELDPAISYIEEDAEVTTMAQSVPWGISRVQAPAAHRRGLTGSGVKVAVLDTGISTHPDLNIRGGASFVPGEPSTQDGNGHGTHVAGTIAALNNSIGVLGVAPSAELYAVKVLGASGSGSISSIAQGLEWAGNNGMHVANLSLGSPSPSATLEQAVNSATSRGVLVVAASGNSGAGSISYPARYANAMAVGATDQNNNRASFSQYGAGLDIVAPGVNVQSTYPGSTYASLNGTSMATPHVAGAAVLVKQKNPSWSNVQIRNRLKNTATSLGSTNLYGSGLVNAEAATR

SEQ ID NO: 62533 - protein, 380 aa, Unidentified
VRSKKLWIVASTALLISVAFSSSIASAAEEAKEKYLIGFNEQEAVSEFVEQVEANDEVAILSEEEEVEIELLHEFETIPVLSVELSPEDVDALELDPAISYIEEDAEVTTMAQSVPWGISRVQAPAAHNRRLTGSGVKVAVLDTGISTHPDLNIRGGASFVPGEPSTQDGNGHGTHVAGTIAALNNSIGVLGVAPSAELYAVKVLGASGAGSVSSIAQGLEWAGANGMHVANLSLGSPSPSATLEQAVNSATSRGVLVVAASGNSGAGSISYPARYANAMAVGATDQNNNRASFSQYGAGLDIVAPGVNVQSTYPGSTYASLNGTSMATPHVAGAAALVKQKNPSWSNVQIRNHLKNTATSLGSTNLYGSGLVRAEAATR

SEQ ID NO: 62534 - protein, 380 aa, Unidentified
VRSKKLWIVASTALLISVAFSSSIASAAEEAKEKYLIGFNEQEAVSEFVEQVEANDEVAILSEEEEVEIELLHEFETIPVLSVELSPEDVDALELDPAISYIEEDAEVTTMAQSVPWGISRVQAPAAHNRGLTGSGVKVAVLDSGISTHPDLNIRGGASFVPGEPSTQDGNGHGTHVAGTIAALNNSIGVLGVAPSAELYAVKVLGASGSGSVSSIAQGLEWAGNNRMHVANLSLGSPSPSATLEQAVNSATSRGVLVVAASGNSGADSISYPARYANAMAVGATDQNNNRASFSQYGAGLDIVAPGVNVQSTAPGSTYASLNGTSMATPHVAGAAALVKQKNPSWSNVQIRNHLKNTATSLGSTNLYGSGLVNAEAATR

SEQ ID NO: 62535 - protein, 380 aa, Unidentified
VRSKKLWIVASTALLISVAFSSSIASAAEEAKEKYLIGFNEQEAVSEFVEQVEANDEVAILSEEEEVEIELLHEFETIPVLSVELSPEDVDALELDPAISYIEEDAEVTTMAQSVPWGISRVQAPAAHNRRLTGRGVKVAVLDTGISTHPDLNIRGGASFVPGEPSTQDGNGHGTHVAGTIAALNNSIGVLGVAPSAELYAVKVLGASGAGSVSSIAQGLEWAGNNGMHVANLSLGSPSPSATLEQAVNSATSRGVLVVAASGNSGAGSISYPARYANAMAVGATDQNNNRASFSQYGAGLDIVAPGVNVQSTYPGSTYFSLNGTSMATPHVAGAAALVKQKNPSWSNVQIRNHLKNTATSLGSTNLYGSGLVNAEAATR

SEQ ID NO: 62536 - protein, 380 aa, Unidentified
VRSKKLWIVASTALLISVAFSSSIASAAEEAKEKYLIGFNEQEAVSEFVEQVEANDEVAILSEEEEVEIELLHEFETIPVLSVELSPEDVDALELDPAISYIEEDAEVTTMAQSVPWGISRVQAPAAHRRGLTGSGVKVAVLDTGISTHPDLRITGGASFVPGEPSTQDGNGHGTHVAGTIAALNNSIGVLGVAPSAELYAVKVLGASGSGSVSSIAQGLEWAGNNGMHVANLSLGSPSPSATLEQAVNSATSRGVLVVAASGNSGAGSISYPARYANAMAVGATDQNNNRASFSQYGAGLDIVAPGVNVQSTYPGSTYASLNGTSMATPHVAGAAALVKQKNPSWSNVQIRNRLKNTATSLGSTNLYGSGLVNAEAATR

SEQ ID NO: 62537 - protein, 380 aa, Unidentified
VRSKKLWIVASTALLISVAFSSSIASAAEEAKEKYLIGFNEQEAVSEFVEQVEANDEVAILSEEEEVEIELLHEFETIPVLSVELSPEDVDALELDPAISYIEEDAEVTTMAQSVPWGIARVQAPAAHNRGLRGSGVKVAVLDTGISTHPDLRIRGGASFVPGEPSTQDGNGHGTHVAGTIAALNNRIGVLGVAPSAELYAVKVLGASGSGSVSSIAQGLEWAGNNGMHVANLSLGSPSPSATLEQAVNSATSRGVLVVAASGNSGAGSISYPARYANAMAVGATDQNNNRASFSQYGAGLDIVAPGVNVQSTYPGSTYASLNGTSMATPHVAGAAALVKQKNPSWSNVQIRNHLKNTATSLGSTNLYGSGLVNAEAATR

SEQ ID NO: 62538 - protein, 380 aa, Unidentified
VRSKKLWIVASTALLISVAFSSSIASAAEEAKEKYLIGFNEQEAVSEFVEQVEANDEVAILSEEEEVEIELLHEFETIPVLSVELSPEDVDALELDPAISYIEEDAEVTTMAQSVPWGISRVQAPAAHNRGLTGSGVKVAVLDTGISTHPDLNIRGGASFVPGEPSTQDGNGHGTHVAGTIAALNNSIGVLGVAPSAELYAVKVLGASGSGSVSSIAQGLEWAGNNGMHVANLSLGNPSPSATLEQAVNSATSRGVLVVAASGNSGEGSISYPARYANAMAVGATDQNNNRADFSQYGAGLDIVAPGVNVQSTYPGSTYASLNGTSMATPHVAGAAALVKQKNPSWSNVQIRNRLKNTATSLGSTNLYGSGLVNAEAATR

SEQ ID NO: 62539 - protein, 380 aa, Unidentified
VRSKKLWIVASTALLISVAFSSSIASAAEEAKEKYLIGFNEQEAVSEFVEQVEANDEVAILSEEEEVEIELLHEFETIPVLSVELSPEDVDALELDPAISYIEEDAEVTTMAQSVPWGISRVQAPAAHNRGLTASGVKVAVLDTGISTHPDLNIRGGASFVPGEPSTQDGNGHGTHVAGTIAALNNSIGVLGVAPSAELYAVKVLGASSSGSVSSIAQGLEWAGNNGMHVANLSLGSPSPSATLEQAVNSATSRGVLVVAASGNSGAGSISYPARYANAMAVGATDQNNNRASFSQYGEGLDIVAPGVNVQSTYPGMTYASLNGTSMATPHVAGAAALVKQKNPSWSNVQIRNHLKNTATSLGSTNLYGSGLVNAEAATR

SEQ ID NO: 62540 - protein, 380 aa, Unidentified
VRSKKLWIVASTALLISVAFSSSIASAAEEAKEKYLIGFNEQEAVSEFVEQVEANDEVAILSEEEEVEIELLHEFETIPVLSVELSPEDVDALELDPAISYIEEDAEVTTMAQSVPWGISRVQAPAAHNRGLTGSGVKVAVLDTGISTHPDLWIRGGASFVPGEPSTQDGEGHGTHVAGTIAALNNSIGVLGVAPSAELYAVKVLGASGSGSVSSIAQGLEWAGLNGMHVANLSLGSPSPSATLEQAVNSATSRGVLVVAASGNSGAGSISYPARYANAMAVGATDQNNNRADFSQYGAGLDIVAPGVNVQSTYPGSTYASLNGTSMATPHVAGAAALVKQKNPSWSNVQIRNHLKNTATSLGSTNLYGSGLVNAEAATR

SEQ ID NO: 62541 - protein, 380 aa, Unidentified
VRSKKLWIVASTALLISVAFSSSIASAAEEAKEKYLIGFNEQEAVSEFVEQVEANDEVAILSEEEEVEIELLHEFETIPVLSVELSPEDVDALELDPAISYIEEDAEVTTMAQSVPWGISRVQAPAAHRRGLTGSGVKVAVLDTGISTHPDLNIRGGASFVPGEPSTQDGNGHGTHVAGTIAALNNSIGVLGVAPSAELYAVKVLGASGGGAISSIAQGLEWAGNNGMHVANLSLGSPSPSATLEQAVNSATSRGVLVVAASGNSGAGSISYPARYANAMAVGATDQNNNRASFSQYGAGLDIVAPGVNVQSTYPGSTYASLNGTSMATPHVAGAAALVKQKNPSWSNVQIRNHLKNTATSLGSTNLYGSGLVNAEAATR

SEQ ID NO: 62542 - protein, 380 aa, Unidentified
VRSKKLWIVASTALLISVAFSSSIASAAEEAKEKYLIGFNEQEAVSEFVEQVEANDEVAILSEEEEVEIELLHEFETIPVLSVELSPEDVDALELDPAISYIEEDAEVTTMAQSVPWGISRVQAPAAHNRGLTGSGVKVAVLDTGISTHPDLNIRGGASFVPGEPSTQDGNGHGTHVAGTIAALDNSIGVLGVAPSAELYAVKVLGASGSGSISSIAQGLEWAGNNGMHVANLSLGSPSPSATLEQAVNSATSRGVLVVAASGNSGAGSISYPARYANAMAVGATDQNNNRASFSQYGAGLDIVAPGVNVQSTYPGSTYASLNGTSMATPHVAGAAVLVKQKNPSWSNVQIRNRLKNTATSLGSTNLYGSGLVNAEAATR

SEQ ID NO: 62543 - protein, 380 aa, Unidentified
VRSKKLWIVASTALLISVAFSSSIASAAEEAKEKYLIGFNEQEAVSEFVEQVEANDEVAILSEEEEVEIELLHEFETIPVLSVELSPEDVDALELDPAISYIEEDAEVTTMAQSVPWGIARVQAPAAHNRRLTGSGVKVAVLDTGISTHPDLRIRGGASFVPGEPSTQDGNGHGTHVAGTIAALNNSIGVLGVAPSAELYAVKVLGASGSGSVSSIAQGLEWAGNNGMHVANLSLGSPSPSATLEQAVNSATSRGVLVVAASGNSGAGSISYPARYANAMAVGATDQNNNRASFSQYGAGLDIVAPGVNVQSTYPGSTYASLNGTSMATPHVAGAAALVKQKNPSRSNVQIRNHLKNTATSLGSTNLYGSGLVNAEAATR

SEQ ID NO: 62544 - protein, 380 aa, Unidentified
VRSKKLWIVASTALLISVAFSSSIASAAEEAKEKYLIGFNEQEAVSEFVEQVEANDEVAILSEEEEVEIELLHEFETIPVLSVELSPEDVDALELDPAISYIEEDAEVTTMAQSVPWGISRVQAPAAHNRGLTGRGVKVAVLDTGISTHPDLNIRGGASFVPGEPSTQDGNGHGTHVAGTIAALNNRIGVLGVAWSAELYAVKVLGASGSGSVSSIAQGLEWAGNNGMHVANLSLGSPSPSATLEQAVNSATSRGVLVVAASGNSGAGSISYPARYANAMAVGATDQNNNRASFSQYGAGLDIVAPGVNVQSTYPGSTYASLNGTSMATPHVAGAAALVKQKNPSWSFVQIRNHLKNTATSLGSTNLYGSGLVNAEAATR

SEQ ID NO: 62545 - protein, 380 aa, Unidentified
VRSKKLWIVASTALLISVAFSSSIASAAEEAKEKYLIGFNEQEAVSEFVEQVEANDEVAILSEEEEVEIELLHEFETIPVLSVELSPEDVDALELDPAISYIEEDAEVTTMAQSVPWGISRVQAPAAHNRGLTGRGVKVAVLDTGISTHPDLNIRGGASFVPGEPSTQDGNGHGTHVAGTIAALDNSIGVLGVAPSAELYAVKVLGASGSGSISSIAQGLEWAGNNGMHVANLSLGSPSPSATLEQAVNSATSRGVLVVAASGNSGAGSISYPARYANAMAVGATDQNNNRASFSQYGAGLDIVAPGVNVQSTYPGSTYASLNGTSMATPHVAGAAALVKQKNPSWSNVRIRNHLKNTATSLGSTNLYGSGLVNAEAATR

SEQ ID NO: 62546 - protein, 380 aa, Unidentified
VRSKKLWIVASTALLISVAFSSSIASAAEEAKEKYLIGFNEQEAVSEFVEQVEANDEVAILSEEEEVEIELLHEFETIPVLSVELSPEDVDALELDPAISYIEEDAEVTTMAQSVPWGISRVQAPAAHNRRLTGSGVKVAVLDTGISTHPDLNIRGGASFVPGEPSTQDGNGHGTHVAGTIAALNNSIGVLGVAPSAELYAVKVLGASGSGAVSSIAQGLEWAGNNGMHVANLSLGSPSPSATLEQAVNSATSRGVLVVAASGNSGAGSISYPARYANAMAVGATDQNNNRASFSQYGAGLDIVAPGVNVQSTYPGSTYASLNGTSMATPHVAGAAVLVKQKNPSWSNVRIRNHLKNTATSLGSTNLYGSGLVNAEAATR

SEQ ID NO: 62547 - protein, 380 aa, Unidentified
VRSKKLWIVASTALLISVAFSSSIASAAEEAKEKYLIGFNEQEAVSEFVEQVEANDEVAILSEEEEVEIELLHEFETIPVLSVELSPEDVDALELDPAISYIEEDAEVTTMAQSVPWGISRVQAPAAHNRGLTGSGVKVAVFDTGISTHPDLNIRGGASFVPGEPSTQDGNGHGTHVAGTIAALNNSIGVLGVAPSAELYAVKVLGASGSGSVTSIAQGLEWAGNNGMHVANLSLGSPSPSATLEQAVNSATSRGVLVVAASGNSGAGSISYPARYANAMAVGATDQNNNKADFSQYGAGLDIVAPGVNVQSTYPGSTYASLNGTSMATPHVAGAAALVKQKNPSWSNVQIRNHLKNTATSLGSTNLYGSGLVNAEAATR

SEQ ID NO: 62548 - protein, 380 aa, Unidentified
VRSKKLWIVASTALLISVAFSSSIASAAEEAKEKYLIGFNEQEAVSEFVEQVEANDEVAILSEEEEVEIELLHEFETIPVLSVELSPEDVDALELDPAISYIEEDAEVTTMAQSRPWGIARVQAPAAHNRGLTGSGVKVAVLDTGISTHPDLRIRGGASFVPGEPSTQDGNGHGTHVAGTIAALNNSIGVLGVAPSAELYAVKVLGASGSGSVSSIAQGLEWAGNNGMHVANLSLGSPSPSATLEQAVNSATSRGVLVVAASGNSGAGSISYPARYANAMAVGATDQNNNRASFSQYGAGLDIVAPGVNVQSTYPGSTYASLNGTSMATPHVAGAAALVKQKNPSRSNVQIRNHLKNTATSLGSTNLYGSGLVNAEAATR

SEQ ID NO: 62549 - protein, 380 aa, Unidentified
VRSKKLWIVASTALLISVAFSSSIASAAEEAKEKYLIGFNEQEAVSEFVEQVEANDEVAILSEEEEVEIELLHEFETIPVLSVELSPEDVDALELDPAISYIEEDAEVTTMAQSVPWGISRVQAPAAHNRGLTGRGVKVAVLDTGISTHPDLNITGGASFVPGEPSTQDGNGHGTHVAGTIAALNNSIGVLGVAPSAELYAVKVLGASGSGSVSSIAQGLEWAGNNGMHVANLSLGSPSPSATLEQAVNSATSRGVLVVAASGNSGAGSISYPARYANAMAVGATDQNNNRASFSQYGAGLDIVAPGVNVQSTYPGSTYASLNGTSMATPHVAGAAALVKQKNPSWRNVQIRNHLKNTATSLGSTNLYGSGLVNAEAVTR

SEQ ID NO: 62550 - protein, 380 aa, Unidentified
VRSKKLWIVASTALLISVAFSSSIASAAEEAKEKYLIGFNEQEAVSEFVEQVEANDEVAILSEEEEVEIELLHEFETIPVLSVELSPEDVDALELDPAISYIEEDAEVTTMAQSVPWGISRVQAPAAHRRGLTGSGVKVAVLDTGISTHPDLNIRGGASFVPGEPSTQDGNGHGTHVAGTIAALNNSIGVLGVAPSAELYAVKVLGASGSGAISSIAQGLEWAGNNGMHVANLSLGSPSPSATLEQAVNSATSRGVLVVAASGNSGAGSISYPARYANAMAVGATDQNNNRASFSQYGAGLDIVAPGVNVQSTYPGSTYASLNGTSMATPHVAGAAVLVKQKNPSWSNVQIRNHLKNTATSLGSTNLYGSGLVNAEAATR

SEQ ID NO: 62551 - protein, 380 aa, Unidentified
VRSKKLWIVASTALLISVAFSSSIASAAEEAKEKYLIGFNEQEAVSEFVEQVEANDEVAILSEEEEVEIELLHEFETIPVLSVELSPEDVDALELDPAISYIEEDAEVTTMAQSVPWGISRVQAPAAHNRGLTGSGVKVAVLDTGISTHPDLNIRGGASFVPGEPSTQDGNGHGTHVAGTIAALNNSIGVLGVAPSAILYAVKVLGASGSGSVSSIAQGLEWAGNFGMHVANLSLGSPSPSATLEQAVNSATSRGVLVVAASGNSGAGSISYPARYANAMAVGATDQNNNRASFSQYGAGLDIVAPGVNVQSTYPGSTYASLNGTSMAAPHVAGAAALVKQKNPSWSNVQIRNRLKNTATSLGSTNLYGSGLVNAEAATR

SEQ ID NO: 62552 - protein, 380 aa, Unidentified
VRSKKLWIVASTALLISVAFSSSIASAAEEAKEKYLIGFNEQEAVSEFVEQVEANDEVAILSEEEEVEIELLHEFETIPVLSVELSPEDVDALELDPAISYIEEDAEVTTMAQSVPWGISRVQAPAAHNRKLTGFGVKVAVLDTGISTHPDLNIRGGASFVPGEPSTQDGEGHGTHVAGTIAALNNSIGVLGVAPSAELYAVKVLGASGSGSVSSIAQGLEWAGNNGMHVANLSLGSPSPSATLEQAVNSATSRGVLVVAASGNSGAGSISYPARYANAMAVGATDQNNNRASFSQYGAGLDIVAPGVNVQSTYPGSTYASLNGTSMATPHVAGAAALVKQKNGSWSNVQIRNHLKNTATSLGSTNLYGSGLVNAEAATR

SEQ ID NO: 62553 - protein, 380 aa, Unidentified
VRSKKLWIVASTALLISVAFSSSIASAAEEAKEKYLIGFNEQEAVSEFVEQVEANDEVAILSEEEEVEIELLHEFETIPVLSVELSPEDVDALELDPAISYIEEDAEVTTMAQSVPWGISRVQAPAAHNRGLTGRGVKVAVLDTGISTHPDLDIRGGASFVPGEPSTQDGNGHGTHVAGTIAALNNSIGVLGVAPSAELYAVKVLGASGSGSVSSIAQGLEWAGNNGMHVANLSLGSPSPSATLEQAVNSATSRGVLVVAASGNSGAGSISYPARYANAMAVGATDQNNNRASFSQYGAGLDIVAPGVNVQSTYPGSTYASLNGTSMATPHVAGAAALVKQKNPSWRNVQIRNRLKNTATSLGSTNLYGSGLVNAEAATR

SEQ ID NO: 62554 - protein, 380 aa, Unidentified
VRSKKLWIVASTALLISVAFSSSIASAAEEAKEKYLIGFNEQEAVSEFVEQVEANDEVAILSEEEEVEIELLHEFETIPVLSVELSPEDVDALELDPAISYIEEDAEVTTMAQSVPWGISRVQAPAAHNRGLTGSGVKVAVLDTGISTHPDLNIRGGASFVPGEPSTQDGNGHGTHVAGTIAALNNSIGVLGVAPSAELYAVKVLGASGSGSVSSIAQGLEWAGNNGMHVANLSLGNPSPSATLEQAVNSATSRGVLVVAASGNSGEGSISYPARYANAMAVGATDQNNNHASFSQYGAGLDIVAPGVNVQSTYPGSTYASLNGTSMATPHVAGAAALVKQKNPSWSNVQIRNHLKNTATSLGSTNLYGSGLVNAFAATR

SEQ ID NO: 62555 - protein, 380 aa, Unidentified
VRSKKLWIVASTALLISVAFSSSIASAAEEAKEKYLIGFNEQEAVSEFVEQVEANDEVAILSEEEEVEIELLHEFETIPVLSVELSPEDVDALELDPAISYIEEDAEVTTMAQSVPWGISRVQAPAAHNRRLRGSGVKVAVLDTGISTHPDLNIRGGASFVPGEPSTQDGNGHGTHVAGTIAALNNRIGVLGVAPSAELYAVKVLGASGSGSVSSIAQGLEWAGNNGMHVANLSLGSPSPSATLEQAVNSATSRGVLVVAASGNSGAGSISYPARYANAMAVGATDQNNNRASFSQYGAGLDIVAPGVNVQSTYPGSTYASLNGTSMATPHVAGAAALVKQKNPSRSNVQIRNHLKNTATSLGSTNLYGSGLVNAEAATR

SEQ ID NO: 62556 - protein, 380 aa, Unidentified
VRSKKLWIVASTALLISVAFSSSIASAAEEAKEKYLIGFNEQEAVSEFVEQVEANDEVAILSEEEEVEIELLHEFETIPVLSVELSPEDVDALELDPAISYIEEDAEVTTMAQSVPWGISRVQAPAAHNRRLTGSGVKVAVLDTGISTHPDLRIRGGASFVPGEPSTQDGNGHGTHVAGTIAALNNSIGVLGVAPSAELYAVKVLGASGSGSVSSIAQGLEWAGNNGMHVANLSLGSPSPSATLEQAVNSATSRGVLVVAASGNSGAGSISYPARYANAMAVGATDQNNNRASFSQYGAGLDIVAPGVNVQSTYPGSTYASLNGTSMATPHVAGEAALVKQKNPSWRNVQIRNHLKNTATSLGSTNLYGSGLVNAEAATR

SEQ ID NO: 62557 - protein, 380 aa, Unidentified
VRSKKLWIVASTALLISVAFSSSIASAAEEAKEKYLIGFNEQEAVSEFVEQVEANDEVAILSEEEEVEIELLHEFETIPVLSVELSPEDVDALELDPAISYIEEDAEVTTMAQSVPWGISRVQAPAAHRRGLTGSGVKVAVLDTGISTHPDLNIRGGASFVPGEPSTQDGNGHGTHVAGTIAALDNSIGVLGVAPSAELYAVKVLGASGSGSVSSIAQGLEWAGNNGMHVANLSLGSPSPSATLEQAVNSATSRGVLVVAASGNSGAGSISYPARYANAMAVGATDQNNNRASFSQYGAGLDIVAPGVNVQSTYPGSTYASLNGTSMATPHVAGAAVLVKQKNPSWSNVQIRNRLKNTATSLGSTNLYGSGLVNAEAATR

SEQ ID NO: 62558 - protein, 380 aa, Unidentified
VRSKKLWIVASTALLISVAFSSSIASAAEEAKEKYLIGFNEQEAVSEFVEQVEANDEVAILSEEEEVEIELLHEFETIPVLSVELSPEDVDALELDPAISYIEEDAEVTTMAQSVPWGISRVQAPAAHNRGLTGSGFKVAVLDTGISTHPDLNIRGGASFWPGEPSTQDGNGHGTHVAGTIAALNNSIGVLGVAPSAELYAVKVLGASGSGSLSEIAQGLEWAGNNGMHVANLSLGSPSPSATLEQAVNSATSRGVLVVAASGNSGAGSISYPARYANAMAVGATDQNNNRASFSQYGAGLDIVAPGVNVQSTYPGSTYASLNGTSMATPHVAGAAALVKQKNPSWSNVQIRNHLKNTATSLGSTNLYGSGLVNAEAATR

SEQ ID NO: 62559 - protein, 380 aa, Unidentified
VRSKKLWIVASTALLISVAFSSSIASAAEEAKEKYLIGFNEQEAVSEFVEQVEANDEVAILSEEEEVEIELLHEFETIPVLSVELSPEDVDALELDPAISYIEEDAEVTTMAQSVPWGISRVQAPAAHNRGLTGSGVKVAVLDTGISTHPDLNIRGGASFVPGEPSTQDGNGHGTHVAGTIAALNNSIGVLGVAPSAELYAVKVLGASGSGSLSSIAQGLEWAGNNGMHVANLSLGSPSPSATLEQAVNSATSRGVIVVAASGNSGAGSISYPARYANAMAVGATDQNNNRADFSQYGAGLDIVAPGVNVQSTYPGSTYASLNGTSMATPHVAGAAALVKQKNPSWSNVQIRNRLKNTATSLGSTNLYGSGLVNAEAATR

SEQ ID NO: 62560 - protein, 380 aa, Unidentified
VRSKKLWIVASTALLISVAFSSSIASAAEEAKEKYLIGFNEQEAVSEFVEQVEANDEVAILSEEEEVEIELLHEFETIPVLSVELSPEDVDALELDPAISYIEEDAEVTTMAQSVPWGISRVQAPAAHNRGLTGSGFKVAVLDTGISTHPDLNIRGGASFVPGEPSTQDGNGHGTHVAGTIAALNNSIGVLGVAPSAELYAVKVLGASGSGSLSSIAQGLEWAGNNGMHVANLSLGSPSPSATLEQAVNSATSRGVLVVAASGNSGAGSISYPARYANAMAVGATDQNNNRASFSQYGAGLDIVAPGVNVQSTYPGSTYASLNGTSMATPHVAGAAALVKQKNPSWSNVQIRNHLKNTATNLGSTNLYGSGLVNAEFATR

SEQ ID NO: 62561 - protein, 380 aa, Unidentified
VRSKKLWIVASTALLISVAFSSSIASAAEEAKEKYLIGFNEQEAVSEFVEQVEANDEVAILSEEEEVEIELLHEFETIPVLSVELSPEDVDALELDPAISYIEEDAEVTTMAQSVPWGISRVQAPAAHNRGLTGSGVKVAVLDTGISTHPDLNIRGGASFVPGEPSTQDGNGHGTHVAGTIAALNNSIGVLGVAPSAELYAVKVLGASGAGSVSSIAQGLEWAGNNGMHVANLSLGNPSPSATLEQAVNSATSRGVLVVAASGNSGEGSISYPARYANAMAVGATDQNNNRASFSQYGAGLDIVAPGVNVQSTEPGSTYASLNGTSMATPHVAGAAALVKQKNPSWSNVQIRNHLKNTATSLGSTNLYGSGLVNAEAATR

SEQ ID NO: 62562 - protein, 380 aa, Unidentified
VRSKKLWIVASTALLISVAFSSSIASAAEEAKEKYLIGFNEQEAVSEFVEQVEANDEVAILSEEEEVEIELLHEFETIPVLSVELSPEDVDALELDPAISYIEEDAEVTTMAQSVPWGISRVQAPAAHNRGLTGRGVKVAVLDTGISTHPDLRIRGGASFVPGEPSTQDGNGHGTHVAGTIAALNNSIGVLGVAPSAELYAVKVLGASGAGSVSSIAQGLEWAGNNGMHVANLSLGSPSPSATLEQAVNSATSRGVLVVAASGNSGAGSISYPARYANAMAVGATDQNNNRASFSQYGAGLDIVAPGVNVQSTYPGSTYFSLNGTSMATPHVAGAAALVKQKNPSWSNVQIRNHLKNTATSLGSTNLYGSGLVNAEAATR

SEQ ID NO: 62563 - protein, 380 aa, Unidentified
VRSKKLWIVASTALLISVAFSSSIASAAEEAKEKYLIGFNEQEAVSEFVEQVEANDEVAILSEEEEVEIELLHEFETIPVLSVELSPEDVDALELDPAISYIEEDAEVTTMAQSVPWGISRVQAPAAHNRGLTGSGVKVAVLDTGISTHPDLAIRGGASFVPGEPSTQDGQGHGTHVAGTIAALNNSIGVLGVAPSAELYAVKVLGASGSGSVSSIAQGLEWAGNNGMHVANLSLGSPSPSATLEQAVNSATSRGVLVVAASGNSGAGSISYPARYANAMAVGATDQNNNRASFSQYGFGLDIVAPGVNVQSTYPQSTYASLNGTSMATPHVAGAAALVKQKNPSWSNVQIRNHLKNTATSLGSTNLYGSGLVNAEAATR

SEQ ID NO: 62564 - protein, 380 aa, Unidentified
VRSKKLWIVASTALLISVAFSSSIASAAEEAKEKYLIGFNEQEAVSEFVEQVEANDEVAILSEEEEVEIELLHEFETIPVLSVELSPEDVDALELDPAISYIEEDAEVTTMAQSVPWGISRVQAPAAHRRGLTGSGVKVAVLDTGISTHPDLNIRGGASFVPGEPSTQDGNGHGTHVAGTIAALNNSIGVLGVAPSAELYAVKVLGASGSGAISSIAQGLEWAGNNGMHVANLSLGSPSPSATLEQAVNSATSRGVLVVAASGNSGAGSISYPARYANAMAVGATDQNNNRASFSQYGAGLDIVAPGVNVQSTYPGSTYASLNGTSMATPHVAGAAALVKQKNPSWSNVQIRNRLKNTATSLGSTNLYGSGLVNAEAATR

SEQ ID NO: 62565 - protein, 380 aa, Unidentified
VRSKKLWIVASTALLISVAFSSSIASAAEEAKEKYLIGFNEQEAVSEFVEQVEANDEVAILSEEEEVEIELLHEFETIPVLSVELSPEDVDALELDPAISYIEEDAEVTTMAQSVPWGISRVQAPAAHNRRLTGRGVKVAVLDTGISTHPDLNIRGGASFVPGEPSTQDGNGHGTHVAGTIAALNNSIGVLGVAPSAELYAVKVLGASGSGSVSSIAQGLEWAGANGMHVANLSLGSPSPSATLEQAVNSATSRGVLVVAASGNSGAGSISYPARYANAMAVGATDQNNNRASFSQYGAGLDIVAPGVNVQSTYPGSAYASLNGTSMATPHVAGAAALVKQKNPSWSNVQIRNHLKNTATSLGSTNLYGSGLVNAEAATR

SEQ ID NO: 62566 - protein, 380 aa, Unidentified
VRSKKLWIVASTALLISVAFSSSIASAAEEAKEKYLIGFNEQEAVSEFVEQVEANDEVAILSEEEEVEIELLHEFETIPVLSVELSPEDVDALELDPAISYIEEDAEVTTMAQSVPWGISRVQAPAAHNRGLTGRGVKVAVLDTGISTHPDLRIRGGASFVPGEPSTQDGNGHGTHVAGTIAALNNSIGVLGVAPSAELYAVKVLGASGSGSVSSIAQGLEWAGNNGMHVANLSLGSPSPSATLEQAVNSATSRGVLVVAASGNSGAGSISYPARYANAMAVGATDQNNNRASFSQYGAGLDIVAPGVNVQSTYPGSTYASLNGTSMATPHVAGEAALVKQKNPSWRNVQIRNHLKNTATSLGSTNLYGSGLVNAEAATR

SEQ ID NO: 62567 - protein, 380 aa, Unidentified
VRSKKLWIVASTALLISVAFSSSIASAAEEAKEKYLIGFNEQEAVSEFVEQVEANDEVAILSEEEEVEIELLHEFETIPVLSVELSPEDVDALELDPAISYIEEDAEVTTMAQSVPWGISRVQAPAAHRRGLTGRGVKVAVLDTGISTHPDLDIRGGASFVPGEPSTQDGNGHGTHVAGTIAALNNSIGVLGVAPSAELYAVKVLGASGSGSVSSIAQGLEWAGNNGMHVANLSLGSPSPSATLEQAVNSATSRGVLVVAASGNSGAGSISYPARYANAMAVGATDQNNNRASFSQYGAGLDIVAPGVNVQSTYPGSTYASLNGTSMATPHVAGAAALVKQKNPSWRNVQIRNHLKNTATSLGSTNLYGSGLVNAEAATR

SEQ ID NO: 62568 - protein, 380 aa, Unidentified
VRSKKLWIVASTALLISVAFSSSIASAAEEAKEKYLIGFNEQEAVSEFVEQVEANDEVAILSEEEEVEIELLHEFETIPVLSVELSPEDVDALELDPAISYIEEDAEVTTMAQSVPWGISRVQAPAAHNRGLTGSGVKVAVLDTGISTHPDLNIRGGASFVPGEPSTQDGNGHGTHVAGTIAALNNSIGVLGVAPSAELYAVKVLGASGSGSVSSIAQGLEWAGNFGMHVANLSLGSPSPSATLEQAVNSATSRGVLVVAASGNSGAGSISYPARYANAMAVGATDQNNNRASFSQYGFGLDIVAPGVNVQSTYPGSAYASLNGTSMATPHVAGAAALVKQKNPSWSNVQIRNHLKNTATSLGSTNLYGSGLVNCEAATR

SEQ ID NO: 62569 - protein, 380 aa, Unidentified
VRSKKLWIVASTALLISVAFSSSIASAAEEAKEKYLIGFNEQEAVSEFVEQVEANDEVAILSEEEEVEIELLHEFETIPVLSVELSPEDVDALELDPAISYIEEDAEVTTMAQSVPWGISRVQAPAAHRRGLTGSGVKVAVLDTGISTHPDLNIRGGASFVPGEPSTQDGNGHGTHVAGTIAALDNSIGVLGVAPSAELYAVKVLGASGGGAVSSIAQGLEWAGNNGMHVANLSLGSPSPSATLEQAVNSATSRGVLVVAASGNSGAGSISYPARYANAMAVGATDQNNNRASFSQYGAGLDIVAPGVNVQSTYPGSTYASLNGTSMATPHVAGAAALVKQKNPSWSNVQIRNHLKNTATSLGSTNLYGSGLVNAEAATR

SEQ ID NO: 62570 - protein, 380 aa, Unidentified
VRSKKLWIVASTALLISVAFSSSIASAAEEAKEKYLIGFNEQEAVSEFVEQVEANDEVAILSEEEEVEIELLHEFETIPVLSVELSPEDVDALELDPAISYIEEDAEVTTMAQSVPWGISRVQAPAAHNRGLTGSGVKVAVLDTGISTHPDLRIRGGASFVPGEPSTQDGNGHGTHVAGTIAALDNSIGVLGVAPSAELYAVKVLGASGSGSVSSIAQGLEWAGNNGMHVANLSLGSPSPSATLEQAVNSATSRGVLVVAASGNSGAGSISYPARYANAMAVGATDQNNNRASFSQYGAGLDIVAPGVNVQSTYPGSTYASLNGTSMATPHVAGAAALVKQKNPSWRNVQIRNRLKNTATSLGSTNLYGSGLVNAEAATR

SEQ ID NO: 62571 - protein, 380 aa, Unidentified
VRSKKLWIVASTALLISVAFSSSIASAAEEAKEKYLIGFNEQEAVSEFVEQVEANDEVAILSEEEEVEIELLHEFETIPVLSVELSPEDVDALELDPAISYIEEDAEVTTMAQSVPWGISRVQAPAAHNRGLTGSGVKVAVLDTGISTHPDLNIRGGASFVPGEPSTQDGNGHGTHVAGTIAALNNSIGVLGVAPSAELYAVKVLGASGAGSVSSIAQGLEWAGNNGMHVANLSLGSPSPSATLEQAVNSATSRGVLVVAASGNSGEGSISYPARYANAMAVGATDQNNNHASFSQYGAGLDIVAPGVNVQSTYPGSTYASLNGTSMATPHVAGAAALVKQKNPSWSNVQIRNRLKNTATSLGSTNLYGSGLVNAEAATR

SEQ ID NO: 62572 - protein, 380 aa, Unidentified
VRSKKLWIVASTALLISVAFSSSIASAAEEAKEKYLIGFNEQEAVSEFVEQVEANDEVAILSEEEEVEIELLHEFETIPVLSVELSPEDVDALELDPAISYIEEDAEVTTMAQSVPWGISRVQAPAAHNRGLTGRGVKVAVLDTGISTHPDLNIRGGASFVPGEPSTQDGNGHGTHVAGTIAALDNSIGVLGVAPSAELYAVKVLGASGGGSVSSIAQGLEWAGNNGMHVANLSLGSPSPSATLEQAVNSATSRGVLVVAASGNSGAGSISYPARYANAMAVGATDQNNNRASFSQYGAGLDIVAPGVNVQSTYPGSTYASLNGTSMATPHVAGAAALVKQKNPSWSNVRIRNHLKNTATSLGSTNLYGSGLVNAEAATR

SEQ ID NO: 62573 - protein, 380 aa, Unidentified
VRSKKLWIVASTALLISVAFSSSIASAAEEAKEKYLIGFNEQEAVSEFVEQVEANDEVAILSEEEEVEIELLHEFETIPVLSVELSPEDVDALELDPAISYIEEDAEVTTMAQSVPWGISRVQAPAAHNRGLTGRGVKVAVLDTGISTHPDLNIRGGASFVPGEPSTQDGNGHGTHVAGTIAALNNSIGVLGVAPSAELYAVKVLGASGSGSVSSIAQGLEWAGNNRMHVANLSLGSPSPSATLEQAVNSATSRGVLVVAASGNSGAGSISYPARYANAMAVGATDQNNNRASFSQYGAGLDIVAPGVNVQSTAPGSTYASLNGTSMATPHVAGAAALVKQKNPSWSFVQIRNHLKNTATSLGSTNLYGSGLVNAEAATR

SEQ ID NO: 62574 - protein, 380 aa, Unidentified
VRSKKLWIVASTALLISVAFSSSIASAAEEAKEKYLIGFNEQEAVSEFVEQVEANDEVAILSEEEEVEIELLHEFETIPVLSVELSPEDVDALELDPAISYIEEDAEVTTMAQSVPWGISRVQAPAAHRRGLTGSGVKVAVLDTGISTHPDLRIRGGASFVPGEPSTQDGNGHGTHVAGTIAALNNSIGVLGVAPSAELYAVKVLGASGSGSVSSIAQGLEWAGNNGMHVANLSLGSPSPSATLEQAVNSATSRGVLVVAASGNSGAGSISYPARYANAMAVGATDQNNNRASFSQYGAGLDIVAPGVNVQSTYPGSTYASLNGTSMATPHVAGAAALVKQKNPSWRNVQIRNRLKNTATSLGSTNLYGSGLVNAEAATR

SEQ ID NO: 62575 - protein, 380 aa, Unidentified
VRSKKLWIVASTALLISVAFSSSIASAAEEAKEKYLIGFNEQEAVSEFVEQVEANDEVAILSEEEEVEIELLHEFETIPVLSVELSPEDVDALELDPAISYIEEDAEVTTMAQSVPWGISRVQAPAAHRRGLTGRGVKVAVLDTGISTHPDLNIRGGASFVPGEPSTQDGNGHGTHVAGTIAALDNSIGVLGVAPSAELYAVKVLGASGSGSVSSIAQGLEWAGNNGMHVANLSLGSPSPSATLEQAVNSATSRGVLVVAASGNSGAGSISYPARYANAMAVGATDQNNNRASFSQYGAGLDIVAPGVNVQSTYPGSTYASLNGTSMATPHVAGAAVLVKQKNPSWSNVQIRNHLKNTATSLGSTNLYGSGLVNAEAATR

SEQ ID NO: 62576 - protein, 380 aa, Unidentified
VRSKKLWIVASTALLISVAFSSSIASAAEEAKEKYLIGFNEQEAVSEFVEQVEANDEVAILSEEEEVEIELLHEFETIPVLSVELSPEDVDALELDPAISYIEEDAEVTTMAQSVPWGISRVQAPAAHNRGLTGSGVKVAVLDTGISTHPDLNIRGGASFVPGEPSTQDGNGHGTHVAGTIAALNNSIGVLGVAPSAELYAVKVLGAFGSGSVSSIAQGLEWAGNNGMHVANLSLGSPSPSATLEQAVNSATRRGVLVVAASGNSGAGSISWPARYANAMAVGATDQNNNRASFSQYGAGLDIVAPGVNVQSTYPGSTYASLNGTSMATPHVAGAAALVKQKNPSWSNVQIRNHLKRTATSLGSTNLYGSGLVNAEAATR

SEQ ID NO: 62577 - protein, 380 aa, Unidentified
VRSKKLWIVASTALLISVAFSSSIASAAEEAKEKYLIGFNEQEAVSEFVEQVEANDEVAILSEEEEVEIELLHEFETIPVLSVELSPEDVDALELDPAISYIEEDAEVTTMAQSVPWGISRVQAPAAHNRGLTGFGVKVAVLDTGISTHPDLNIRGGASFVPGEPSTQDGEGHGTHVAGTIAALNNSIGVLGVAPSAELYAVKVLGASGSGSVSSIAQGLEWAGLNGMHVANLSLGSPSPSATLEQAVNSATSRGVLVVAASGNSGAGSISYPARYANAMAVGATDQNNNRADFSQYGAGLDIVAPGVNVQSTYPGSTYASLNGTSMATPHVAGAAALVKQKNPSWSNVQIRNHLKNTATSLGSTNLYGSGLVNAEAATR

SEQ ID NO: 62578 - protein, 380 aa, Unidentified
VRSKKLWIVASTALLISVAFSSSIASAAEEAKEKYLIGFNEQEAVSEFVEQVEANDEVAILSEEEEVEIELLHEFETIPVLSVELSPEDVDALELDPAISYIEEDAEVTTMAQSVPWGISRVQAPAAHNRRLTGRGVKVAVLDTGISTHPDLDIRGGASFVPGEPSTQDGNGHGTHVAGTIAALNNSIGVLGVAPSAELYAVKVLGASGSGSVSSIAQGLEWAGNNGMHVANLSLGSPSPSATLEQAVNSATSRGVLVVAASGNSGAGSISYPARYANAMAVGATDQNNNRASFSQYGAGLDIVAPGVNVQSTYPGSTYASLNGTSMATPHVAGAAALVKQKNPSWSNVQIRNRLKNTATSLGSTNLYGSGLVNAEAATR

SEQ ID NO: 62579 - protein, 380 aa, Unidentified
VRSKKLWIVASTALLISVAFSSSIASAAEEAKEKYLIGFNEQEAVSEFVEQVEANDEVAILSEEEEVEIELLHEFETIPVLSVELSPEDVDALELDPAISYIEEDAEVTTMAQSVPWGISRVQAPAAHNRKLTGSGVKVAVLDTGISTHPDLNIRGGASFVPGEPSTQDGEGHGTHVAGTIAALNNSIGVLGVAPSAELYAVKVLGASGSGSVSSIAQGLEWAGLNGMHVANLSLGSPSPSATLEQAVNSATSRGVLVVAASGNSGAGSISYPARYANAMAVGATDQNNNRASFSQYGAGLDIVAPGVNVQSTYPGSAYASLNGTSMATPHVAGAAALVKQKNPSWSNVQIRNHLKNTATSLGSTNLYGSGLVNAEAATR

SEQ ID NO: 62580 - protein, 380 aa, Unidentified
VRSKKLWIVASTALLISVAFSSSIASAAEEAKEKYLIGFNEQEAVSEFVEQVEANDEVAILSEEEEVEIELLHEFETIPVLSVELSPEDVDALELDPAISYIEEDAEVTTMAQSVPWGISRVQAPAAHNRGLTGSGVKVAVLDTGISTHPDLNIRGGASFVPGEPSTQDGNGHGTHVAGTIAALDNSIGVLGVAPSAELYAVKVLGASGGGSISSIAQGLEWAGNNGMHVANLSLGSPSPSATLEQAVNSATSRGVLVVAASGNSGAGSISYPARYANAMAVGATDQNNNRASFSQYGAGLDIVAPGVNVQSTYPGSTYASLNGTSMATPHVAGAAALVKQKNPSWSNVQIRNRLKNTATSLGSTNLYGSGLVNAEAATR

SEQ ID NO: 62581 - protein, 380 aa, Unidentified
VRSKKLWIVASTALLISVAFSSSIASAAEEAKEKYLIGFNEQEAVSEFVEQVEANDEVAILSEEEEVEIELLHEFETIPVLSVELSPEDVDALELDPAISYIEEDAEVTTMAQSVPWGISRVQAPAAHNRRLRGRGVKVAVLDTGISTHPDLNIRGGASFVPGEPSTQDGNGHGTHVAGTIAALNNSIGVLGVAPSAELYAVKVLGASGSGSVSSIAQGLEWAGNNGMHVANLSLGSPSPSATLEQAVNSATSRGVLVVAASGNSGAGSISYPARYANAMAVGATDQNNNRASFSQYGAGLDIVAPGVNVQSTYPGSTYASLNGTSMATPHVAGAAALVKQKNPSWRNVQIRNHLKNTATSLGSTNLYGSGLVNAEAATR

SEQ ID NO: 62582 - protein, 380 aa, Unidentified
VRSKKLWIVASTALLISVAFSSSIASAAEEAKEKYLIGFNEQEAVSEFVEQVEANDEVAILSEEEEVEIELLHEFETIPVLSVELSPEDVDALELDPAISYIEEDAEVTTMAQSRPWGIARVQAPAAHNRGLTGSGVKVAVLDTGISTHPDLNIRGGASFVPGEPSTQDGNGHGTHVAGTIAALNNRIGVLGVAPSAELYAVKVLGASGSGSVSSIAQGLEWAGNNGMHVANLSLGSPSPSATLEQAVNSATSRGVLVVAASGNSGAGSISYPARYANAMAVGATDQNNNRASFSQYGAGLDIVAPGVNVQSTYPGSTYASLNGTSMATPHVAGAAALVKQKNPSRSNVQIRNHLKNTATSLGSTNLYGSGLVNAEAATR

SEQ ID NO: 62583 - protein, 380 aa, Unidentified
VRSKKLWIVASTALLISVAFSSSIASAAEEAKEKYLIGFNEQEAVSEFVEQVEANDEVAILSEEEEVEIELLHEFETIPVLSVELSPEDVDALELDPAISYIEEDAEVTTMAQSVPWGISRVQAPAAHNRRLTGRGVKVAVLDTGISTHPDLRIRGGASFVPGEPSTQDGNGHGTHVAGTIAALNNSIGVLGVAPSAELYAVKVLGASGSGSVSSIAQGLEWAGNNGMHVANLSLGSPSPSATLEQAVNSATSRGVLVVAASGNSGAGSISYPARYANAMAVGATDQNNNRASFSQYGAGLDIVAPGVNVQSTYPGSTYASLNGTSMATPHVAGAAALVKQKNPSWRNVQIRNHLKNTATSLGSTNLYGSGLVNAEAATR

SEQ ID NO: 62584 - protein, 380 aa, Unidentified
VRSKKLWIVASTALLISVAFSSSIASAAEEAKEKYLIGFNEQEAVSEFVEQVEANDEVAILSEEEEVEIELLHEFETIPVLSVELSPEDVDALELDPAISYIEEDAEVTTMAQSVPWGISRVQAPAAHNRGLTGSGVKVAVLDTGISTHPDLNIRGGASFVPGEPSTQDGNGHGTHVAGTIAALNNSIGVLGVAPSAELYAVKVLGASGAGGLSSIAQGLEWAGNNGMHVANLSLGSPSPSATLEQAVNSATSRGVLVVAASGNSGAESISYPARYANAMAVGATDQNNNRASFSQYGAGLDIVAPGVNVQSTYPGSTYASLNGTSMATPHVAGAAALVKQKNPSWSNVQIRNHLKNTATSLGSTNLYGSGLVNAEAATR

SEQ ID NO: 62585 - protein, 380 aa, Unidentified
VRSKKLWIVASTALLISVAFSSSIASAAEEAKEKYLIGFNEQEAVSEFVEQVEANDEVAILSEEEEVEIELLHEFETIPVLSVELSPEDVDALELDPAISYIEEDAEVTTMAQSVPWGISRVQAPAAHNRGLTGSGVKVAVLDTGISTHPDLNIRGGASFVPGEPSTQDGNGHGTHVAGTIAALDNSIGVLGVAPSAELYAVKVLGASGSGAISSIARGLEWAGNNGMHVANLSLGSPSPSATLEQAVNSATSRGVLVVAASGNSGAGSISYPARYANAMAVGATDQNNNRASFSQYGAGLDIVAPGVNVQSTYPGSTYASLNGTSMATPHVAGAAALVKQKNPSWSNVQIRNHLKNTATSLGSTNLYGSGLVNAEAATR

SEQ ID NO: 62586 - protein, 380 aa, Unidentified
VRSKKLWIVASTALLISVAFSSSIASAAEEAKEKYLIGFNEQEAVSEFVEQVEANDEVAILSEEEEVEIELLHEFETIPVLSVELSPEDVDALELDPAISYIEEDAEVTTMAQSVPWGIARVQAPAAHNRRLTGSGVKVAVLDTGISTHPDLRIRGGASFVPGEPSTQDGNGHGTHVAGTIAALNNSIGVLGVAPSAELYAVKVLGASGSGSVSSIAQGLEWAGNNGMHVANLSLGSPSPSATLEQAVNSATSRGVLVVAASGNSGAGSISYPARYANAMAVGATDQNNNRASFSQYGAGLDIVAPGVNVQSTYPGFTYASLNGTSMATPHVAGAAALVKQKNPSWSNVQIRNHLKNTATSLGSTNLYGSGLVNAEAATR

SEQ ID NO: 62587 - protein, 380 aa, Unidentified
VRSKKLWIVASTALLISVAFSSSIASAAEEAKEKYLIGFNEQEAVSEFVEQVEANDEVAILSEEEEVEIELLHEFETIPVLSVELSPEDVDALELDPAISYIEEDAEVTTMAQSVPWGISRVQAPAAHNRGLTGSGVKVAVLDTGISTHPDLNIRGGASFVPGEPSTQDGNGHGTHVAGTIAALNNSIGVLGVAPSAELYAVKVLGASSSGSVSSIAQGLEWAGLNGMHVANLSLGSPSPSATLEQAVNSATSRGVLVVAASGNSGEGSISYPARYANAMAVGATDQNNNRASFSQYGAGLDIVAPGVNVQSTYPGSAYASLNGTSMATPHVAGAAALVKQKNPSWSNVQIRNHLKNTATSLGSTNLYGSGLVNAEAATR

SEQ ID NO: 62588 - protein, 380 aa, Unidentified
VRSKKLWIVASTALLISVAFSSSIASAAEEAKEKYLIGFNEQEAVSEFVEQVEANDEVAILSEEEEVEIELLHEFETIPVLSVELSPEDVDALELDPAISYIEEDAEVTTMAQSVPWGISRVQAPAAHNRGLTASGVKVAVLDTGISTHPDLWIRGGASFVPGEPSTQDGNGHGTHVAGTIAALNNSIGVLGVAPSAELYAVKVLGASGSGSVSSIAQGLEWAGNNGMHVANLSLGSPSPSATLEQAVNSATSRGVLVVAASGNSGAGSISYPARYANAMAVGATDQNNNRADFSQYGAGLDIVAPGVNVQSTYPGSAYASLNGTSMATPHVAGAAALVKQKNPSWSNVQIRNHLKNTATSLGSTNLYGSGLVNAEAATR

SEQ ID NO: 62589 - protein, 380 aa, Unidentified
VRSKKLWIVASTALLISVAFSSSIASAAEEAKEKYLIGFNEQEAVSEFVEQVEANDEVAILSEEEEVEIELLHEFETIPVLSVELSPEDVDALELDPAISYIEEDAEVTTMAQSVPWGISRVQAPAAHNRGLTGSGVKVAVLDTGISTHPDLNIRGGASFVPGEPSTQDGNGHGTHVAGTIAALNNSIGVLGVAPSAELYAVKVLGASGGGAISSIAQGLEWAGNNGMHVANLSLGSPSPSATLEQAVNSATSRGVLVVAASGNSGAGSISYPARYANAMAVGATDQNNNRASFSQYGAGLDIVAPGVNVQSTYPGSTYASLNGTSSATPHVAGAAVLVKQKNPSWSNVRIRNHLKNTATSLGSTNLYGSGLVNAEAATR

SEQ ID NO: 62590 - protein, 380 aa, Unidentified
VRSKKLWIVASTALLISVAFSSSIASAAEEAKEKYLIGFNEQEAVSEFVEQVEANDEVAILSEEEEVEIELLHEFETIPVLSVELSPEDVDALELDPAISYIEEDAEVTTMAQSVPWGISRVQAPAAHRRGLTGRGVKVAVLDTGISTHPDLNIRGGASFVPGEPSTQDGNGHGTHVAGTIAALNNSIGVLGVAPSAELYAVKVLGASGGGSISSIAQGLEWAGNNGMHVANLSLGSPSPSATLEQAVNSATSRGVLVVAASGNSGAGSISYPARYANAMAVGATDQNNNRASFSQYGAGLDIVAPGVNVQSTYPGSTYASLNGTSMATPHVAGAAALVKQKNPSWSNVQIRNHLKNTATSLGSTNLYGSGLVNAEAATR

SEQ ID NO: 62591 - protein, 380 aa, Unidentified
VRSKKLWIVASTALLISVAFSSSIASAAEEAKEKYLIGFNEQEAVSEFVEQVEANDEVAILSEEEEVEIELLHEFETIPVLSVELSPEDVDALELDPAISYIEEDAEVTTMAQSVPWGISRVQAPAAHNRGLTASGVKVAVLDTGISTHPDLNIRGGASFVPGEPSTQDGEGHGTHVAGTIAALNNSIGVLGVAPSAELYAVKVLGASGSGSVSSIAQGLEWAGLNRMHVANLSLGSPSPSATLEQAVNSATSRGVLVVAASGNSGAGSISYPARYANAMAVGATDQNNNRASFSQYGAGLDIVAPGVNVQSTYPGSTYASLNGTSMATPHVAGAAALVKQKNPSWSNVQIRNHLKNTATSLGSTNLYGSGLVNAEAATR

SEQ ID NO: 62592 - protein, 380 aa, Unidentified
VRSKKLWIVASTALLISVAFSSSIASAAEEAKEKYLIGFNEQEAVSEFVEQVEANDEVAILSEEEEVEIELLHEFETIPVLSVELSPEDVDALELDPAISYIEEDAEVTTMAQSVPWGISRVQAPAAHNRGLTGSGVKVAVLDTGISTHPDLNIRGGRSFVPGEPSTQDGNGHGTHVAGTIAALNNSIGVLGVAPSAELYAVKVLGASGSGSVSSIAQGLEWAGNNGMHVANLSLGDPSPSATLEQAVNSATSRGVLVVAASGNSGAGSISYPARYANAMAVGATDQNNERASFSQYGAGLDIVAPGVNVQSTYPGSTYASLNGTSMATPHVAGAAALVKQKNGSWSNVQIRNHLKNTATSLGSTNLYGSGLVNAEAATR

SEQ ID NO: 62593 - protein, 380 aa, Unidentified
VRSKKLWIVASTALLISVAFSSSIASAAEEAKEKYLIGFNEQEAVSEFVEQVEANDEVAILSEEEEVEIELLHEFETIPVLSVELSPEDVDALELDPAISYIEEDAEVTTMAQSVPWGISRVQAPAAHNRGLTGSGVKVAVLDTGISTHPDLNIRGGASFVPGEPSTQDGNGHGTHVAGTIAALNNSIGVLGVAPSAELYAVKVLGASGSGSLSSIAQGLEWAGNNGMHVANLSLGNPSPSATLEQAVNSATSRGVLVVAASGNSGEGSISYPARYANAMAVGATDQNNNRASFSQYGAGLDIVAPGVNVQSTYPGSTYASLNGTSMATPHVAGAAALVKQKNPSWSNVQIRNRLKNTATSLGSTNLYGSGLVNAEAATR

SEQ ID NO: 62594 - protein, 380 aa, Unidentified
VRSKKLWIVASTALLISVAFSSSIASAAEEAKEKYLIGFNEQEAVSEFVEQVEANDEVAILSEEEEVEIELLHEFETIPVLSVELSPEDVDALELDPAISYIEEDAEVTTMAQSVPWGISRVQAPAAHNRGLTGSGVKVAVLDTGISTHPDLNIRGGASFVPGEPSTQDGNGHGTHVAGTIAALNNSIGVLGVAPSAELYAVKVLGASGSGSVSGIAQGLEWAGNNGMHVANLSLGSPSPSATLEQAVNSATSRGVLVVAASGNSGAGSISYPARYANAMAVGATDQNNIRASFSQYGAGLDIVAPGVNVQSTYPGSTYAFLNGTSMATPHVAGAAALVKNKNPSWSNVQIRNHLKNTATSLGSTNLYGSGLVNAEAATR

SEQ ID NO: 62595 - protein, 380 aa, Unidentified
VRSKKLWIVASTALLISVAFSSSIASAAEEAKEKYLIGFNEQEAVSEFVEQVEANDEVAILSEEEEVEIELLHEFETIPVLSVELSPEDVDALELDPAISYIEEDAEVTTMAQSVPWGISRVQAPAAHNRGLTGSGVKVAVLDTGISTHPDLNIRGGASFVPGEPSTQDGNGHGTHVAGTIAALDNSIGVLGVAPSAELYAVKVLGASGGGSISSIAQGLEWAGNNGMHVANLSLGSPSPSATLEQAVNSATSRGVLVVAASGNSGAGSISYPARYANAMAVGATDQNNNRASFSQYGAGLDIVAPGVNVQSTYPGSTYASLNGTSMATPHVAGAAALVKQKNPSWSNVRIRNHLKNTATSLGSTNLYGSGLVNAEAATR

SEQ ID NO: 62596 - protein, 380 aa, Unidentified
VRSKKLWIVASTALLISVAFSSSIASAAEEAKEKYLIGFNEQEAVSEFVEQVEANDEVAILSEEEEVEIELLHEFETIPVLSVELSPEDVDALELDPAISYIEEDAEVTTMAQSVPWGISRVQAPAAHRRRLTGSGVKVAVLDTGISTHPDLDIRGGASFVPGEPSTQDGNGHGTHVAGTIAALNNSIGVLGVAPSAELYAVKVLGASGSGSVSSIAQGLEWAGNNGMHVANLSLGSPSPSATLEQAVNSATSRGVLVVAASGNSGAGSISYPARYANAMAVGATDQNNNRASFSQYGAGLDIVAPGVNVQSTYPGSTYASLNGTSMATPHVAGAAALVKQKNPSWSNVQIRNRLKNTATSLGSTNLYGSGLVNAEAATR

SEQ ID NO: 62597 - protein, 380 aa, Unidentified
VRSKKLWIVASTALLISVAFSSSIASAAEEAKEKYLIGFNEQEAVSEFVEQVEANDEVAILSEEEEVEIELLHEFETIPVLSVELSPEDVDALELDPAISYIEEDAEVTTMAQSVPWGISRVQAPAAHNRGLTGSGVKVAVLDTGISTHPDLNIRGGASFVPGEPSTQDGNGHGTHVAGTIAALNNSIGVLGVAPSAELYAVKVLGASGSGSVSSIAQGLEWAGNNGMHVANLSLGNPSPSATLEQAVNSATSRGVLVVAASGNSGEESISYPARYANAMAVGATDQNNNRASFSQYGAGLDIVAPGVNVQSTYPGSTYASLNGTSMATPHVAGAAALVKQKNPSWSNVQIRNHLKNTATSLGSTNLYGSGLVNAFAATR

SEQ ID NO: 62598 - protein, 380 aa, Unidentified
VRSKKLWIVASTALLISVAFSSSIASAAEEAKEKYLIGFNEQEAVSEFVEQVEANDEVAILSEEEEVEIELLHEFETIPVLSVELSPEDVDALELDPAISYIEEDAEVTTMEQSVPWGISRVQAPAAHNRGLTGSGVKVAVLDTGISTHPDLNIRGGASFVPGEPSTQDGNGHGTHVAGTIAALNNSIGVLGVAPSAELYAVKVLGASGSGSVSSIAQGLEWAGNNGMHFANLSLGSPSPSATLEQAVNSATSRGVLVVAASGNSGAGSISYPARYANAMAVGATDQNNNRASFSQYGAGLDIVAPGVNVQSTYPGSTYASLNGTSMAAPHVAGAAALVKQKNGSWSNVQIRNHLKNTATSLGSTNLYGSGLVNAEAATR

SEQ ID NO: 62599 - protein, 380 aa, Unidentified
VRSKKLWIVASTALLISVAFSSSIASAAEEAKEKYLIGFNEQEAVSEFVEQVEANDEVAILSEEEEVEIELLHEFETIPVLSVELSPEDVDALELDPAISYIEEDAEVTTMAQSVPWGISRVQAPAAHNRGLTGSGVKVAVLDTGISTHPDLDITGGASFVPGEPSTQDGNGHGTHVAGTIAALDNSIGVLGVAPSAELYAVKVLGASGSGSVSSIAQGLEWAGNNGMHVANLSLGSPSPSATLEQAVNSATSRGVLVVAASGNSGAGSISYPARYANAMAVGATDQNNNRASFSQYGAGLDIVAPGVNVQSTYPGSTYASLNGTSMATPHVAGAAALVKQKNPSWSNVQIRNRLKNTATSLGSTNLYGSGLVNAEAATR

SEQ ID NO: 62600 - protein, 380 aa, Unidentified
VRSKKLWIVASTALLISVAFSSSIASAAEEAKEKYLIGFNEQEAVSEFVEQVEANDEVAILSEEEEVEIELLHEFETIPVLSVELSPEDVDALELDPAISYIEEDAEVTTMAQSVPWGISRVQAPAAHNRGLTGSGVKVAVLDTGISTHPDLNIRGGASFVPGEPSTQDGEGHGTHVAGTIAALNNNIGVLGVAPSAELYAVKVLGASGSGSVSSIAQGLEWAGNNGMHVANLSLGSPSPSATLEQAVNSATRRGVLVVAASGNSGAGSISYPARYANAMAVGATDQNNNRASFSQYGAGLDIVAPGVNVQSTYPGMTYASLNGTSMATPHVAGAAALVKQKNPSWSNVQIRNHLKNTATSLGSTNLYGSGLVNAEAATR

SEQ ID NO: 62601 - protein, 380 aa, Unidentified
VRSKKLWIVASTALLISVAFSSSIASAAEEAKEKYLIGFNEQEAVSEFVEQVEANDEVAILSEEEEVEIELLHEFETIPVLSVELSPEDVDALELDPAISYIEEDAEVTTMAQSVPWGISRVQAPAAHNRGLTGSGVKVAVFDTGISTHPDLNIRGGASFVPGEPSTQDGNGHGTHVAGTIAALNNSIGVLGVAPSAELYAVKVLGASGSGSVSSIAQGLEWAGLNGMHVANLSLGSPSPSATLEQAVNSATSRGVLVVAASGNSGAGSISYPARYANAMAVGATDQNNNRASFSQYGAGLDIVAPGVNVQSTYPGSTYASLNGTSMATPHVAGAAALVKQKNPSWSNVQIRNHLKNTATNLGSTNLYGSGLVNAEFATR

SEQ ID NO: 62602 - protein, 380 aa, Unidentified
VRSKKLWIVASTALLISVAFSSSIASAAEEAKEKYLIGFNEQEAVSEFVEQVEANDEVAILSEEEEVEIELLHEFETIPVLSVELSPEDVDALELDPAISYIEEDAEVTTMAQSVPWGISRVQAPAAHNRGLTGSGVKVAVLDTGISTHPDLRIRGGASFVPGEPSTQDGNGHGTHVAGTIAALNNSIGVLGVAPSAELYAVKVLGASGSGSVSSIAQGLEWAGNNGMHVANLSLGSPSPSATLEQAVNSATSRGVLVVAASGNSGAGSISYPARYANAMAVGATDQNNNRASFSQYGAGLDIVAPGVNVQSTYPGSAYFSLNGTSMATPHVAGAAALVKQKNPSWSNVQIRNHLKNTATSLGSTNLYGSGLVRAEAATR

SEQ ID NO: 62603 - protein, 380 aa, Unidentified
VRSKKLWIVASTALLISVAFSSSIASAAEEAKEKYLIGFNEQEAVSEFVEQVEANDEVAILSEEEEVEIELLHEFETIPVLSVELSPEDVDALELDPAISYIEEDAEVTTMAQSVPWGISRVQAPAAHNRGLTGFGVKVAVLDTGISTHPDLNIRGGASFVPGEPSTQDGEGHGTHVAGTIAALNNSIGVLGVAPSAELYAVKVLGASGSGSVSSIAQGLEWAGLNGMHVANLSLGSPSPSATLEQAVNSATSRGVLVVAASGNSGAGSISYPARYANAMAVGATDQNNNRASFSQYGAGLDIVAPGVNVQSTYPGSTYASLNGTSMATPHVAGAAALVKQKNGSWSNVQIRNHLKNTATSLGSTNLYGSGLVNAEAATR

SEQ ID NO: 62604 - protein, 380 aa, Unidentified
VRSKKLWIVASTALLISVAFSSSIASAAEEAKEKYLIGFNEQEAVSEFVEQVEANDEVAILSEEEEVEIELLHEFETIPVLSVELSPEDVDALELDPAISYIEEDAEVTTMAQSVPWGISRVQAPAAHNRGLTGSGVKVAVLDTGISTHPDLNIRGGASFVPGEPSTQDGNGHGTHVAGTIAALDNSIGVLGVAPSAELYAVKVLGASGGGAVSSIAQGLEWAGNNGMHVANLSLGSPSPSATLEQAVNSATSRGVLVVAASGNSGAGSISYPARYANAMAVGATDQNNNRASFSQYGAGLDIVAPGVNVQSTYPGSTYASLNGTSMATPHVAGAAALVKQKNPSWSNVRIRNHLKNTATSLGSTNLYGSGLVNAEAATR

SEQ ID NO: 62605 - protein, 380 aa, Unidentified
VRSKKLWIVASTALLISVAFSSSIASAAEEAKEKYLIGFNEQEAVSEFVEQVEANDEVAILSEEEEVEIELLHEFETIPVLSVELSPEDVDALELDPAISYIEEDAEVTTMAQSVPWGISRVQAPAAHRRGLTGSGVKVAVLDTGISTHPDLDIRGGASFVPGEPSTQDGNGHGTHVAGTIAALDNSIGVLGVAPSAELYAVKVLGASGSGSVSSIAQGLEWAGNNGMHVANLSLGSPSPSATLEQAVNSATSRGVLVVAASGNSGAGSISYPARYANAMAVGATDQNNNRASFSQYGAGLDIVAPGVNVQSTYPGSTYASLNGTSMATPHVAGAAALVKQKNPSWSNVQIRNRLKNTATSLGSTNLYGSGLVNAEAATR

SEQ ID NO: 62606 - protein, 380 aa, Unidentified
VRSKKLWIVASTALLISVAFSSSIASAAEEAKEKYLIGFNEQEAVSEFVEQVEANDEVAILSEEEEVEIELLHEFETIPVLSVELSPEDVDALELDPAISYIEEDAEVTTMAQSVPWGISRVQAPAAHNRKLTASGVKVAVLDTGISTHPDLNIRGGASFVPGEPSTQDGEGHGTHVAGTIAALNNSIGVLGVAPSAELYAVKVLGASGSGSVSSIAQGLEWAGLNGMHVANLSLGSPSPSATLEQAVNSATSRGVLVVAASGNSGAGSISYPARYANAMAVGATDQNNNRASFSQYGAGLDIVAPGVNVQSTYPGSTYASLNGTSMATPHVAGAAALVKQKNPSWSNVQIRNHLKNTATSLGSTNLYGSGLVNAEAATR

SEQ ID NO: 62607 - protein, 380 aa, Unidentified
VRSKKLWIVASTALLISVAFSSSIASAAEEAKEKYLIGFNEQEAVSEFVEQVEANDEVAILSEEEEVEIELLHEFETIPVLSVELSPEDVDALELDPAISYIEEDAEVTTMAQSVPWGISRVQAPAAHNRGLTGRGVKVAVLDTGISTHPDLNIRGGASFVPGEPSTQDGNGHGTHVAGTIAALNNSIGVLGVAPSAELYAVKVLGASGSGSVSSIAQGLEWAGNNGMHVANLSLGSPSPSATLEQAVNSATSRGVLVVAASGNSGAGSISWPARYANAMAVGATDQNNNRASFSQYGAGLDIVAPGVNVQSTYPGSTYASLNGTSMAAPHVAGAAALVKQKNPSWSNVQIRNRLKNTATSLGSTNLYGSGLVNAEAATR

SEQ ID NO: 62608 - protein, 380 aa, Unidentified
VRSKKLWIVASTALLISVAFSSSIASAAEEAKEKYLIGFNEQEAVSEFVEQVEANDEVAILSEEEEVEIELLHEFETIPVLSVELSPEDVDALELDPAISYIEEDAEVTTMAQSVPWGISRVQAPAAHNRGLTGFGVKVAVLDTGISTHPDLNIRGGASFVPGEPSTQDGEGHGTHVAGTIAALNNSIGVLGVAPSAELYAVKVLGASGSGSVSSIAQGLEWAGNNGMHVANLSLGSPSPSATLEQAVNSATSRGVLVVAASGNSGAGSISYPARYANAMAVGATDQNNNRADFSQYGAGLDIVAPGVNVQSTYPGSAYASLNGTSMATPHVAGAAALVKQKNPSWSNVQIRNHLKNTATSLGSTNLYGSGLVNAEAATR

SEQ ID NO: 62609 - protein, 380 aa, Unidentified
VRSKKLWIVASTALLISVAFSSSIASAAEEAKEKYLIGFNEQEAVSEFVEQVEANDEVAILSEEEEVEIELLHEFETIPVLSVELSPEDVDALELDPAISYIEEDAEVTTMAQSVPWGISRVQAPAAHRRGLTGRGVKVAVLDTGISTHPDLNIRGGASFVPGEPSTQDGNGHGTHVAGTIAALDNSIGVLGVAPSAELYAVKVLGASGSGSISSIAQGLEWAGNNGMHVANLSLGSPSPSATLEQAVNSATSRGVLVVAASGNSGAGSISYPARYANAMAVGATDQNNNRASFSQYGAGLDIVAPGVNVQSTYPGSTYASLNGTSMATPHVAGAAALVKQKNPSWSNVQIRNHLKNTATSLGSTNLYGSGLVNAEAATR

SEQ ID NO: 62610 - protein, 380 aa, Unidentified
VRSKKLWIVASTALLISVAFSSSIASAAEEAKEKYLIGFNEQEAVSEFVEQVEANDEVAILSEEEEVEIELLHEFETIPVLSVELSPEDVDALELDPAISYIEEDAEVTTMAQSVPWGISRVQAPAAHNRGLTGRGVKVAVLDSGISTHPDLNIRGGASFVPGEPSTQDGNGHGTHVAGTIAALNNSIGVLGVAPSAELYAVKVLGASGSGSVSSIAQGLEWAGNNRMHVANLSLGSPSPSATLEQAVNSATSRGVLVVAASGNSGAGSISYPARYANAMAVGATDQNNNRASFSQYGAGLDIVAPGVNVQSTYPGSTYASLNGTSMATPHVAGAAALVFQKNPSWSNVQIRNHLKNTATSLGSTNLYGSGLVNAEAATR

SEQ ID NO: 62611 - protein, 380 aa, Unidentified
VRSKKLWIVASTALLISVAFSSSIASAAEEAKEKYLIGFNEQEAVSEFVEQVEANDEVAILSEEEEVEIELLHEFETIPVLSVELSPEDVDALELDPAISYIEEDAEVTTMAQSVPWGISRVQAPAAHNRRLTGSGVKVAVLDTGISAHPDLRIRGGASFVPGEPSTQDGNGHGTHVAGTIAALNNSIGVLGVAPSAELYAVKVLGASGAGSVSSIAQGLEWAGNNGMHVANLSLGSPSPSATLEQAVNSATSRGVLVVAASGNSGAGSISYPARYANAMAVGATDQNNNRASFSQYGAGLDIVAPGVNVQSTYPGSTYASLNGTSMATPHVAGAAALVKQKNPSWSNVQIRNHLKNTATSLGSTNLYGSGLVNAEAATR

SEQ ID NO: 62612 - protein, 380 aa, Unidentified
VRSKKLWIVASTALLISVAFSSSIASAAEEAKEKYLIGFNEQEAVSEFVEQVEANDEVAILSEEEEVEIELLHEFETIPVLSVELSPEDVDALELDPAISYIEEDAEVTTMAQSVPWGISRVQAPAAHNRGLTGSGVKVAVLDTGISTHPDLNIRGGASFVPGEPSTQDGNGHGTHVAGTIAALNNSIGVLGVAPSAPLYAVKVLGASGAGSVSSIAQGLEWAGNNGMHVANLSLGSESPSATLEQAVNSATSRGVLVVAASGNSGAGSISYPARYANAMAVGATDQNNNHASFSQYGAGLDIVAPGVNVQSTYPGSTYASLNGTSMATPHVAGAAALVKQKNPSWSNVQIRNHLKNTATSLGSTNLYGSGLVNAEAATR

SEQ ID NO: 62613 - protein, 380 aa, Unidentified
VRSKKLWIVASTALLISVAFSSSIASAAEEAKEKYLIGFNEQEAVSEFVEQVEANDEVAILSEEEEVEIELLHEFETIPVLSVELSPEDVDALELDPAISYIEEDAEVTTMAQSVPWGISRVQAPAAHNRGLTGRGVKVAVLDSGISTHPDLNIRGGASFVPGEPSTQDGNGHGTHVAGTIAALNNSIGVLGVAPSAELYAVKVLGASGSGSVSSIAQGLEWAGNNRMHVANLSLGSPSPSATLEQAVNSATSRGVLVVAASGNSGAGSISYPARYANAMAVGATDQNNNRASFSQYGAGLDIVAPGVNVQSTAPGSTYASLNGTSMATPHVAGAAALVKQKNPSWSNVQIRNHLKNTATSLGSTNLYGSGLVNAEAATR

SEQ ID NO: 62614 - protein, 380 aa, Unidentified
VRSKKLWIVASTALLISVAFSSSIASAAEEAKEKYLIGFNEQEAVSEFVEQVEANDEVAILSEEEEVEIELLHEFETIPVLSVELSPEDVDALELDPAISYIEEDAEVTTMAQSVPWGISRVQAPAAHNRRLTGSGVKVAVLDTGISTHPDLRIRGGASFVPGEPSTQDGNGHGTHVAGTIAALNNSIGVLGVAPSAELYAVKVLGASGSGSVSSIAQGLEWAGNNGMHVANLSLGSPSPSATLEQAVNSATSRGVLVVAASGNSGAGSISYPARYANAMAVGATDQNNNRASFSQYGAGLDIVAPGVNVQSTYPGSTYASLNGTSMATPHVAGAAALVKQKNPSWSNVQIRNRLKNTATSLGSTNLYGSGLVNALAATR

SEQ ID NO: 62615 - protein, 380 aa, Unidentified
VRSKKLWIVASTALLISVAFSSSIASAAEEAKEKYLIGFNEQEAVSEFVEQVEANDEVAILSEEEEVEIELLHEFETIPVLSVELSPEDVDALELDPAISYIEEDAEVTTMAQSVPWGISRVQAPAAHNRRLTGSGVKVAVLDTGISTHPDLRIRGGASFVPGEPSTQDGNGHGTHVAGTIAALNNSIGVLGVAPSAELYAVKVLGASGSGSVSSIAQGLEWAGNNGMHVANLSLGSPSPSATLEQAVNSATSRGVLVVAASGNSGAGSISYPARYANAMAVGATDQNNNRASFSQYGAGLDIVAPGVNVQSTYPGSTYASLNGTSMATPHVAGAAALVKQKNPSWRNVQIRNHLKNTATSLGSTNLYGSGLVNALAATR

SEQ ID NO: 62616 - protein, 380 aa, Unidentified
VRSKKLWIVASTALLISVAFSSSIASAAEEAKEKYLIGFNEQEAVSEFVEQVEANDEVAILSEEEEVEIELLHEFETIPVLSVELSPEDVDALELDPAISYIEEDAEVTTMAQSVPWGISRVQAPAAHNRGLTGRGVKVAVLDTGISTHPDLNIRGGASFVPGEPSTQDGNGHGTHVAGTIAALNNSIGVLGVAPSAELYAVKVLGASGSGSVSSIAQGLEWAGANGMHVANLSLGSPSPSATLEQAVNSATSRGVLVVAASGNSGAGSISYPARYANAMAVGATDQNNNRASFSQYGAGLDIVAPGVNVQSTYPGSAYASLNGTSMATPHVAGAAALVKQKNPSWSNVQIRNHLKNTATSLGSTNLYGSGLVRAEAATR

SEQ ID NO: 62617 - protein, 380 aa, Unidentified
VRSKKLWIVASTALLISVAFSSSIASAAEEAKEKYLIGFNEQEAVSEFVEQVEANDEVAILSEEEEVEIELLHEFETIPVLSVELSPEDVDALELDPAISYIEEDAEVTTMAQSVPWGISRVQAPAAHNRGLTGSGVKVAVLDTGISTHPDLNIRGGASFVPGEPSTQDGNGHGTHVAGTIAALDNSIGVLGVAPSAELYAVKVLGASGSGAISSIAQGLEWAGNNGMHVANLSLGSPSPSATLEQAVNSATSRGVLVVAASGNSGAGSISYPARYANAMAVGATDQNNNRASFSQYGAGLDIVAPGVNVQSTYPGSTYASLNGTSMATPHVAGAAALVKQKNPSWSNVRIRNHLKNTATSLGSTNLYGSGLVNAEAATR

SEQ ID NO: 62618 - protein, 380 aa, Unidentified
VRSKKLWIVASTALLISVAFSSSIASAAEEAKEKYLIGFNEQEAVSEFVEQVEANDEVAILSEEEEVEIELLHEFETIPVLSVELSPEDVDALELDPAISYIEEDAEVTTMAQSVPWGISRVQAPAAHNRGLTGSGVKVAVLDTGISTHPDLNIRGGASFVPGEPSTQDGEGHGTHVAGTIAALNNSIGVLGVAPSAELYAVKVLGASGSGSVSSIAQGLEWAGLNRMHVANLSLGSPSPSATLEQAVNSATSRGVLVVAASGNSGAGSISYPARYANAMAVGATDQNNNRADFSQYGAGLDIVAPGVNVQSTYPGSTYASLNGTSMATPHVAGAAALVKQKNPSWSNVQIRNHLKNTATSLGSTNLYGSGLVNAEAATR

SEQ ID NO: 62619 - protein, 380 aa, Unidentified
VRSKKLWIVASTALLISVAFSSSIASAAEEAKEKYLIGFNEQEAVSEFVEQVEANDEVAILSEEEEVEIELLHEFETIPVLSVELSPEDVDALELDPAISYIEEDAEVTTMAQSVPWGISRVQAPAAHNRGLTGRGVKVAVLDSGISTHPDLNIRGGASFVPGEPSTQDGNGHGTHVAGTIAALNNSIGVLGVAWSAELYAVKVLGASGSGSVSSIAQGLEWAGNNRMHVANLSLGSPSPSATLEQAVNSATSRGVLVVAASGNSGAGSISYPARYANAMAVGATDQNNNRASFSQYGAGLDIVAPGVNVQSTYPGSTYASLNGTSMATPHVAGAAALVKQKNPSWSNVQIRNHLKNTATSLGSTNLYGSGLVNAEAATR

SEQ ID NO: 62620 - protein, 380 aa, Unidentified
VRSKKLWIVASTALLISVAFSSSIASAAEEAKEKYLIGFNEQEAVSEFVEQVEANDEVAILSEEEEVEIELLHEFETIPVLSVELSPEDVDALELDPAISYIEEDAEVTTMAQSVPWGISRVQAPAAHRRGLTGSGVKVAVLDTGISTHPDLNIRGGASFVPGEPSTQDGNGHGTHVAGTIAALDNSIGVLGVAPSAELYAVKVLGASGGGSISSIAQGLEWAGNNGMHVANLSLGSPSPSATLEQAVNSATSRGVLVVAASGNSGAGSISYPARYANAMAVGATDQNNNRASFSQYGAGLDIVAPGVNVQSTYPGSTYASLNGTSMATPHVAGAAALVKQKNPSWSNVQIRNHLKNTATSLGSTNLYGSGLVNAEAATR

SEQ ID NO: 62621 - protein, 380 aa, Unidentified
VRSKKLWIVASTALLISVAFSSSIASAAEEAKEKYLIGFNEQEAVSEFVEQVEANDEVAILSEEEEVEIELLHEFETIPVLSVELSPEDVDALELDPAISYIEEDAEVTTMAQSVPWGISRVQAPAAHNRGLTGSGVKVAVLDTGISTHPDLNIRGGASFVPGEPSTQDGEGHGTHVAGTIAALNNSIGVLGVAPSAELYAVKVLGASGAGSVSSIAQGLEWAGNNGMHVANLSLGSPSPSATLEQAVNSATSRGVLVVAASGNSGAGSISYPARYANAMAVGATDQNNNRADFSQYGAGLDIVAPGVNVQSTYPGSTYASLNGTSMATPHVAGAAALVKQKNPSWSNVQIRNRLKNTATSLGSTNLYGSGLVNAEAATR

SEQ ID NO: 62622 - protein, 380 aa, Unidentified
VRSKKLWIVASTALLISVAFSSSIASAAEEAKEKYLIGFNEQEAVSEFVEQVEANDEVAILSEEEEVEIELLHEFETIPVLSVELSPEDVDALELDPAISYIEEDAEVTTMAQSVPWGISRVQAPAAHNRGLAGSGVKVAVLDTGISTHPDLNIRGGASFVPGEPSTQDGNGHGTHVAGTIAALNNSIGVLGVAPSAELYAVKVLGASGSGSVSSIAQGLEWAGNNGMHVANLSLGNPSPSATLEQAVNSATSRGVLVVAASGNSGEGSISYPARYANAMAVGATDQNNNRASFSQYGAGLDIVAPGVNVQSTYPGSTYASLNGTSMATPHVAGAAALVKQKNPSWSNVQIRNRLKNTATSLGSTNLYGSGLVNAEAATR

SEQ ID NO: 62623 - protein, 380 aa, Unidentified
VRSKKLWIVASTALLISVAFSSSIASAAEEAKEKYLIGFNEQEAVSEFVEQVEANDEVAILSEEEEVEIELLHEFETIPVLSVELSPEDVDALELDPAISYIEEDAEVTTMAQSVPWGISRVQAPAAHNRGLTGSGVKVAVLDTGISTHPDLRIRGGASFVPGEPSTQDGNGHGTHVAGTIAALNNSIGVLGVAPSAELYAVKVLGASGAGSVSSIAQGLEWAGNNGMHVANLSLGSPSPSATLEQAVNSATSRGVLVVAASGNSGAGSISYPARYANAMAVGATDQNNNRASFSQYGAGLDIVAPGVNVQSTYPGSAYASLNGTSMATPHVAGAAALVKQKNPSWSNVQIRNHLKNTATSLGSTNLYGSGLVRAEAATR

SEQ ID NO: 62624 - protein, 380 aa, Unidentified
VRSKKLWIVASTALLISVAFSSSIASAAEEAKEKYLIGFNEQEAVSEFVEQVEANDEVAILSEEEEVEIELLHEFETIPVLSVELSPEDVDALELDPAISYIEEDAEVTTMAQSVPWGISRVQAPAAHNRRLTGSGVKVAVLDTGISTHPDLRIRGGASFVPGEPSTQDGNGHGTHVAGTIAALNNSIGVLGVAPSAELYAVKVLGASGAGSVSSIAQGLEWAGNNGMHVANLSLGSPSPSATLEQAVNSATSRGVLVVAASGNSGAGSISYPARYANAMAVGATDQNNNRASFSQYGAGLDIVAPGVNVQSTYPGSTYASLNGTSMATPHVAGAAALVKQKNPSWSNVQIRNHLKNTATSLGSTNLYGSGLVRAEAATR

SEQ ID NO: 62625 - protein, 380 aa, Unidentified
VRSKKLWIVASTALLISVAFSSSIASAAEEAKEKYLIGFNEQEAVSEFVEQVEANDEVAILSEEEEVEIELLHEFETIPVLSVELSPEDVDALELDPAISYIEEDAEVTTMAQSVPWGISRVQAPAAHNRGLTGRGVKVAVLDTGISTHPDLNIRGGASFVPGEPSTQDGNGHGTHVAGTIAALDNSIGVLGVAPSAELYAVKVLGASGSGAVSSIAQGLEWAGNNGMHVANLSLGSPSPSATLEQAVNSATSRGVLVVAASGNSGAGSISYPARYANAMAVGATDQNNNRASFSQYGAGLDIVAPGVNVQSTYPGSTYASLNGTSMATPHVAGAAALVKQKNPSWSNVQIRNRLKNTATSLGSTNLYGSGLVNAEAATR

SEQ ID NO: 62626 - protein, 380 aa, Unidentified
VRSKKLWIVASTALLISVAFSSSIASAAEEAKEKYLIGFNEQEAVSEFVEQVEANDEVAILSEEEEVEIELLHEFETIPVLSVELSPEDVDALELDPAISYIEEDAEVTTMAQSVSWGISRVQAPAAHNRGLTGRGVKVAVLDSGISTHPDLNIRGGASFVPGEPSTQDGNGHGTHVAGTIAALNNSIGVLGVAPSAELYAVKVLGASGSGSVSSIAQGLEWAGNNGMHVANLSLGSPSPSATLEQAVNSATSRGVLVVAASGNSGAGSISYPARYANAMAVGATDQNNNRASFSQYGAGLDIVAPGVNVQSTYPGSTYASLNGTSMATPHVAGAAALVKQKNPSWSFVQIRNHLKNTATSLGSTNLYGSGLVNAEAATR

SEQ ID NO: 62627 - protein, 380 aa, Unidentified
VRSKKLWIVASTALLISVAFSSSIASAAEEAKEKYLIGFNEQEAVSEFVEQVEANDEVAILSEEEEVEIELLHEFETIPVLSVELSPEDVDALELDPAISYIEEDAEVTTMAQSVPWGISRVQAPAAHNRGLTASGVKVAVLDTGISTHPDLNIRGGASFVPGEPSTQDGEGHGTHVAGTIAALNNSIGVLGVAPSAELYAVKVLGASGSGSVSSIAQGLEWAGLNGMHVANLSLGSPSPSATLEQAVNSATSRGVLVVAASGNSGAGSISYPARYANAMAVGATDQNNNRADFSQYGAGLDIVAPGVNVQSTYPGSTYASLNGTSMATPHVAGAAALVKQKNPSWSNVQIRNHLKNTATSLGSTNLYGSGLVNAEAATR

SEQ ID NO: 62628 - protein, 380 aa, Unidentified
VRSKKLWIVASTALLISVAFSSSIASAAEEAKEKYLIGFNEQEAVSEFVEQVEANDEVAILSEEEEVEIELLHEFETIPVLSVELSPEDVDALELDPAISYIEEDAEVTTMAQSVPWGISRVQAPAAHNRRLTGRGVKVAVLDTGISTHPDLNIRGGASFVPGEPSTQDGNGHGTHVAGTIAALNNSIGVLGVAPSAELYAVKVLGASGSGSVSSIAQGLEWAGANGMHVANLSLGSPSPSATLEQAVNSATSRGVLVVAASGNSGAGSISYPARYANAMAVGATDQNNNRASFSQYGAGLDIVAPGVNVQSTYPGSTYFSLNGTSMATPHVAGAAALVKQKNPSWSNVQIRNHLKNTATSLGSTNLYGSGLVNAEAATR

SEQ ID NO: 62629 - protein, 380 aa, Unidentified
VRSKKLWIVASTALLISVAFSSSIASAAEEAKEKYLIGFNEQEAVSEFVEQVEANDEVAILSEEEEVEIELLHEFETIPVLSVELSPEDVDALELDPAISYIEEDAEVTTMAQSVPWGISRVQAPAAHNRGLTGFGVKVAVLDTGISTHPDLWIRGGASFVPGEPSTQDGNGHGTHVAGTIAALNNSIGVLGVAPSAELYAVKVLGASGSGSVSSIAQGLEWAGNNRMHVANLSLGSPSPSATLEQAVNSATSRGVLVVAASGNSGAGSISYPARYANAMAVGATDQNNNRADFSQYGAGLDIVAPGVNVQSTYPGSTYASLNGTSMATPHVAGAAALVKQKNPSWSNVQIRNHLKNTATSLGSTNLYGSGLVNAEAATR

SEQ ID NO: 62630 - protein, 380 aa, Unidentified
VRSKKLWIVASTALLISVAFSSSIASAAEEAKEKYLIGFNEQEAVSEFVEQVEANDEVAILSEEEEVEIELLHEFETIPVLSVELSPEDVDALELDPAISYIEEDAEVTTMAQSVPWGISRVQAPAAHNRRLTGSGVKVAVLDTGISTHPDLNIRGGASFVPGEPSTQDGNGHGTHVAGTIAALDNSIGVLGVAPSAELYAVKVLGASGSGSVSSIAQGLEWAGNNGMHVANLSLGSPSPSATLEQAVNSATSRGVLVVAASGNSGAGSISYPARYANAMAVGATDQNNNRASFSQYGAGLDIVAPGVNVQSTYPGSTYASLNGTSMATPHVAGEAALVKQKNPSWRNVQIRNHLKNTATSLGSTNLYGSGLVNAEAATR

SEQ ID NO: 62631 - protein, 380 aa, Unidentified
VRSKKLWIVASTALLISVAFSSSIASAAEEAKEKYLIGFNEQEAVSEFVEQVEANDEVAILSEEEEVEIELLHEFETIPVLSVELSPEDVDALELDPAISYIEEDAEVTTMAQSVPWGISRVQAPAAHNRGLTGSGVKVAVLDTGISTHPDLNIRGGASFVPGEPSTQDGNGHGTHVAGTIAALNNSIGVLGVAPSAELYAVKVLGASGSGSVSSIAQGLEWAGNNGMHVANLSLGNPSPSATLEQAVNSATSRGVLVVAASGNSGEGSISYPARYANAMAVGATDQNNNRADFSQYGAGLDIVAPGVNVQSTYPGSTYASLNGTSMATPHVAGAAALVKQKNPSWSNVQIRNHLKNTATSLGSTNLYGSGLVNAFAATR

SEQ ID NO: 62632 - protein, 380 aa, Unidentified
VRSKKLWIVASTALLISVAFSSSIASAAEEAKEKYLIGFNEQEAVSEFVEQVEANDEVAILSEEEEVEIELLHEFETIPVLSVELSPEDVDALELDPAISYIEEDAEVTTMAQSVPWGISRVQAPAAHRRGLTGSGVKVAVLDTGISTHPDLNIRGGASFVPGEPSTQDGNGHGTHVAGTIAALDNSIGVLGVAPSAELYAVKVLGASGSGAVSSIAQGLEWAGNNGMHVANLSLGSPSPSATLEQAVNSATSRGVLVVAASGNSGAGSISYPARYANAMAVGATDQNNNRASFSQYGAGLDIVAPGVNVQSTYPGSTYASLNGTSMATPHVAGAAVLVKQKNPSWSNVQIRNHLKNTATSLGSTNLYGSGLVNAEAATR

SEQ ID NO: 62633 - protein, 380 aa, Unidentified
VRSKKLWIVASTALLISVAFSSSIASAAEEAKEKYLIGFNEQEAVSEFVEQVEANDEVAILSEEEEVEIELLHEFETIPVLSVELSPEDVDALELDPAISYIEEDAEVTTMAQSVPWGISRVQAPAAHNRGLTGSGVRVAVLDTGISFHPDLNIRGGASFVPGEPSTQDGNGHGTHVAGTIAALNNSIGVLGVAPSAELYAVKVLGASGSASVSSIAQGLEWAGLNGMHVANLSLGSPSPSATLEQAVNSATSRGVLVVAASGNSGAGSISYPARYANAMAVGATDQNNNRASFSQYGAGLDIVAPGVNVQSTYPGSTYASLNGTSMATPHVAGAAALVKQKNPSWSNVQIRNHLKNTATSLGSTNLYGSGLVNAEAATR

SEQ ID NO: 62634 - protein, 380 aa, Unidentified
VRSKKLWIVASTALLISVAFSSSIASAAEEAKEKYLIGFNEQEAVSEFVEQVEANDEVAILSEEEEVEIELLHEFETIPVLSVELSPEDVDALELDPAISYIEEDAEVTTMAQSVPWGISRVQAPAAHNRGLTGRGVKVAVLDTGISTHPDLNIRGGASFVPGEPSTQDGNGHGTHVAGTIAALDNSIGVLGVAPSAELYAVKVLGASGSGAVSSIAQGLEWAGNNGMHVANLSLGSPSPSATLEQAVNSATSRGVLVVAASGNSGAGSISYPARYANAMAVGATDQNNNRASFSQYGAGLDIVAPGVNVQSTYPGSTYASLNGTSMATPHVAGAAALVKQKNPSWSNVRIRNHLKNTATSLGSTNLYGSGLVNAEAATR

SEQ ID NO: 62635 - protein, 380 aa, Unidentified
VRSKKLWIVASTALLISVAFSSSIASAAEEAKEKYLIGFNEQEAVSEFVEQVEANDEVAILSEEEEVEIELLHEFETIPVLSVELSPEDVDALELDPAISYIEEDAEVTTMAQSVPWGISRVQAPAAHNRGLTGSGVKVAVLDTGISTHPDLNIRGGASFVPGEPSTQDGEGHGTHVAGTIAALNNSIGVLGVAPSAELYAVKVLGASGSGSVSSIAQGLEWAGLNGMHVANLSLGSPSPSATLEQAVNSATSRGVLVVAASGNSGAGSISYPARYANAMAVGATDQNNNRADFSQYGAGLDIVAPGVNVQSTYPGSAYASLNGTSMATPHVAGAAALVKQKNPSWSNVQIRNHLKNTATSLGSTNLYGSGLVNAEAATR

SEQ ID NO: 62636 - protein, 380 aa, Unidentified
VRSKKLWIVASTALLISVAFSSSIASAAEEAKEKYLIGFNEQEAVSEFVEQVEANDEVAILSEEEEVEIELLHEFETIPVLSVELSPEDVDALELDPAISYIEEDAEVTTMAQSVPWGISRVQAPAAHNRGLTGSGVKVAVLDTGISTHPDLNIRGGASFVPGEPSTQDGNGHGTHVAGTIAALNNSIGVLGVAPSAELYAVKVLGASGSGSLSSIAQGLEWAGNNGMHVANLSLGSPSPSATLEQAVNSATSRGVLVVAASGNSGEGSISYPARYANAMAVGATDQNNNHASFSQYGAGLDIVAPGVNVQSTYPGSTYASLNGTSMATPHVAGAAALVKQKNPSWSNVQIRNRLKNTATSLGSTNLYGSGLVNAEAATR

SEQ ID NO: 62637 - protein, 380 aa, Unidentified
VRSKKLWIVASTALLISVAFSSSIASAAEEAKEKYLIGFNEQEAVSEFVEQVEANDEVAILSEEEEVEIELLHEFETIPVLSVELSPEDVDALELDPAISYIEEDAEVTTMAQSVPWGISRVQAPAAHNRGLTGFGVKVAVLDTGISTHPDLNIRGGASFVPGEPSTQDGEGHGTHVAGTIAALNNSIGVLGVAPSAELYAVKVLGASGSGSVSSIAQGLEWAGNNGMHVANLSLGSPSPSATLEQAVNSATSRGVLVVAASGNSGAGSISYPARYANAMAVGATDQNNNRADFSQYGAGLDIVAPGVNVQSTYPGSTYASLNGTSMATPHVAGAAALVKQKNGSWSNVQIRNHLKNTATSLGSTNLYGSGLVNAEAATR

SEQ ID NO: 62638 - protein, 380 aa, Unidentified
VRSKKLWIVASTALLISVAFSSSIASAAEEAKEKYLIGFNEQEAVSEFVEQVEANDEVAILSEEEEVEIELLHEFETIPVLSVELSPEDVDALELDPAISYIEEDAEVTTMAQSVPWGISRVQAPAAHNRRLTGRGVKVAVLDTGISTHPDLNITGGASFVPGEPSTQDGNGHGTHVAGTIAALNNSIGVLGVAPSAELYAVKVLGASGSGSVSSIAQGLEWAGNNGMHVANLSLGSPSPSATLEQAVNSATSRGVLVVAASGNSGAGSISYPARYANAMAVGATDQNNNRASFSQYGAGLDIVAPGVNVQSTYPGSTYASLNGTSMATPHVAGAAALVKQKNPSWSNVQIRNHLKNTATSLGSTNLYGSGLVRAEAATR

SEQ ID NO: 62639 - protein, 380 aa, Unidentified
VRSKKLWIVASTALLISVAFSSSIASAAEEAKEKYLIGFNEQEAVSEFVEQVEANDEVAILSEEEEVEIELLHEFETIPVLSVELSPEDVDALELDPAISYIEEDAEVTTMAQSVPWGISRVQAPAAHNRRLTGRGVKVAVLDTGISTHPDLDIRGGASFVPGEPSTQDGNGHGTHVAGTIAALNNSIGVLGVAPSAELYAVKVLGASGSGSVSSIAQGLEWAGNNGMHVANLSLGSPSPSATLEQAVNSATSRGVLVVAASGNSGAGSISYPARYANAMAVGATDQNNNRASFSQYGAGLDIVAPGVNVQSTYPGSTYASLNGTSMATPHVAGAAALVKQKNPSWRNVQIRNHLKNTATSLGSTNLYGSGLVNAEAATR

SEQ ID NO: 62640 - protein, 380 aa, Unidentified
VRSKKLWIVASTALLISVAFSSSIASAAEEAKEKYLIGFNEQEAVSEFVEQVEANDEVAILSEEEEVEIELLHEFETIPVLSVELSPEDVDALELDPAISYIEEDAEVTTMAQSVPWGISRVQAPAAHNRGLTAFGVKVAVLDTGISTHPDLNIRGGASFWPGEPSTQDGNGHGTHVAGTIAALNNSIGVLGVAPSAELYAVKVLGASGSGSVSSIAQGLEWAGNNGMHVANLSLGSPSPSATLEQAVNSATSRGVLVVAASGNSGEGSISYPARYANAMAVGATDQNNNRASFSQYGAGLDIVAPGVNVQSTYPGSTYASLNGTSMATPHVAGAAALVKQKNPSWSNVQIRNHLKNTATSLGSTNLYGSGLVNAEAATR

SEQ ID NO: 62641 - protein, 380 aa, Unidentified
VRSKKLWIVASTALLISVAFSSSIASAAEEAKEKYLIGFNEQEAVSEFVEQVEANDEVAILSEEEEVEIELLHEFETIPVLSVELSPEDVDALELDPAISYIEEDAEVTTMAQSVPWGISRVQAPAAHNRGLTGRGVKVAVLDSGISTHPDLNIRGGASFVPGEPSTQDGNGHGTHVAGTIAALNNRIGVLGVAPSAELYAVKVLGASGSGSVSSIAQGLEWAGNNGMHVANLSLGSPSPSATLEQAVNSATSRGVLVVAASGNSGAGSISYPARYANAMAVGATDQNNNRASFSQYGAGLDIVAPGVNVQSTYPGSTYASLNGTSMATPHVAGAAALVKQKNPSWSFVQIRNHLKNTATSLGSTNLYGSGLVNAEAATR

SEQ ID NO: 62642 - protein, 380 aa, Unidentified
VRSKKLWIVASTALLISVAFSSSIASAAEEAKEKYLIGFNEQEAVSEFVEQVEANDEVAILSEEEEVEIELLHEFETIPVLSVELSPEDVDALELDPAISYIEEDAEVTTMAQSVPWGISRVQAPAAHNRKLTASGVKVAVLDTGISTHPDLNIRGGASFVPGEPSTQDGEGHGTHVAGTIAALNNSIGVLGVAPSAELYAVKVLGASGSGSVSSIAQGLEWAGNNGMHVANLSLGSPSPSATLEQAVNSATSRGVLVVAASGNSGAGSISYPARYANAMAVGATDQNNNRADFSQYGAGLDIVAPGVNVQSTYPGSTYASLNGTSMATPHVAGAAALVKQKNPSWSNVQIRNHLKNTATSLGSTNLYGSGLVNAEAATR

SEQ ID NO: 62643 - protein, 380 aa, Unidentified
VRSKKLWIVASTALLISVAFSSSIASAAEEAKEKYLIGFNEQEAVSEFVEQVEANDEVAILSEEEEVEIELLHEFETIPVLSVELSPEDVDALELDPAISYIEEDAEVTTMAQSVPWGISRVQAPAAHNRRLTGSGVKVAVLDTGISTHPDLNIRGGASFVPGEPSTQDGNGHGTHVAGTIAALNNSIGVLGVAPSAELYAVKVLGASGSGSLSSIAQGLEWAGNNGMHVANLSLGSPSPSATLEQAVNSATSRGVLVVAASGNSGAGSISYPARYANAMAVGATDQNNNRASFSQYGAGLDIVAPGVNVQSTYPGSTYASLNGTSMATPHVAGAAVLVKQKNPSWSNVRIRNHLKNTATSLGSTNLYGSGLVNAEAATR

SEQ ID NO: 62644 - protein, 380 aa, Unidentified
VRSKKLWIVASTALLISVAFSSSIASAAEEAKEKYLIGFNEQEAVSEFVEQVEANDEVAILSEEEEVEIELLHEFETIPVLSVELSPEDVDALELDPAISYIEEDAEVTTMAQSVPWGISRVQAPAAHNRRLTGRGVKVAVLDTGISTHPDLRITGGASFVPGEPSTQDGNGHGTHVAGTIAALNNSIGVLGVAPSAELYAVKVLGASGSGSVSSIAQGLEWAGNNGMHVANLSLGSPSPSATLEQAVNSATSRGVLVVAASGNSGAGSISYPARYANAMAVGATDQNNNRASFSQYGAGLDIVAPGVNVQSTYPGSTYASLNGTSMATPHVAGAAALVKQKNPSWSNVQIRNHLKNTATSLGSTNLYGSGLVNAEAATR

SEQ ID NO: 62645 - protein, 380 aa, Unidentified
VRSKKLWIVASTALLISVAFSSSIASAAEEAKEKYLIGFNEQEAVSEFVEQVEANDEVAILSEEEEVEIELLHEFETIPVLSVELSPEDVDALELDPAISYIEEDAEVTTMAQSVPWGISRVQAPAAHNRGLTGSGVKVAVLDTGISTHPDLNIRGGASFVPGEPSTQDGNGHGTHVAGTIAALNNSIGVLGVAPSAELYAVKVLGASGAGGLSSIAQGLEWAGNNGMHVANLSLGSPSPSATLEQAVNSATSRGVLVVAASGNSGAGSISYPARYANAMAVGATDQNNNRASFSQYGAGLDIVAPGVNVQSTEPGSTYASLNGTSMATPHVAGAAALVKQKNPSWSNVQIRNHLKNTATSLGSTNLYGSGLVNAEAATR

SEQ ID NO: 62646 - protein, 380 aa, Unidentified
VRSKKLWIVASTALLISVAFSSSIASAAEEAKEKYLIGFNEQEAVSEFVEQVEANDEVAILSEEEEVEIELLHEFETIPVLSVELSPEDVDALELDPAISYIEEDAEVTTMAQSVPWGISRVQAPAAHNRGLTGSGVKVAVLDTGISTHPDLRIRGGASFVPGEPSTQDGNGHGTHVAGTIAALNNSIGVLGVAPSAELYAVKVLGASGAGSVSSIAQGLEWAGANGMHVANLSLGSPSPSATLEQAVNSATSRGVLVVAASGNSGAGSISYPARYANAMAVGATDQNNNRASFSQYGAGLDIVAPGVNVQSTYPGSTYASLNGTSMATPHVAGAAALVKQKNPSWSNVQIRNHLKNTATSLGSTNLYGSGLVRAEAATR

SEQ ID NO: 62647 - protein, 380 aa, Unidentified
VRSKKLWIVASTALLISVAFSSSIASAAEEAKEKYLIGFNEQEAVSEFVEQVEANDEVAILSEEEEVEIELLHEFETIPVLSVELSPEDVDALELDPAISYIEEDAEVTTMAQSVPWGISRVQAPAAHRRGLTGSGVKVAVLDTGISTHPDLRITGGASFVPGEPSTQDGNGHGTHVAGTIAALNNSIGVLGVAPSAELYAVKVLGASGSGSVSSIAQGLEWAGNNGMHVANLSLGSPSPSATLEQAVNSATSRGVLVVAASGNSGAGSISYPARYANAMAVGATDQNNNRASFSQYGAGLDIVAPGVNVQSTYPGSTYASLNGTSMATPHVAGAAALVKQKNPSWRNVQIRNHLKNTATSLGSTNLYGSGLVNAEAATR

SEQ ID NO: 62648 - protein, 380 aa, Unidentified
VRSKKLWIVASTALLISVAFSSSIASAAEEAKEKYLIGFNEQEAVSEFVEQVEANDEVAILSEEEEVEIELLHEFETIPVLSVELSPEDVDALELDPAISYIEEDAEVTTMAQSVPWGISRVQAPAAHRRGLTGSGVKVAVLDTGISTHPDLNIRGGASFVPGEPSTQDGNGHGTHVAGTIAALNNSIGVLGVAPSAELYAVKVLGASGGGAVSSIAQGLEWAGNNGMHVANLSLGSPSPSATLEQAVNSATSRGVLVVAASGNSGAGSISYPARYANAMAVGATDQNNNRASFSQYGAGLDIVAPGVNVQSTYPGSTYASLNGTSMATPHVAGAAALVKQKNPSWSNVQIRNRLKNTATSLGSTNLYGSGLVNAEAATR

SEQ ID NO: 62649 - protein, 380 aa, Unidentified
VRSKKLWIVASTALLISVAFSSSIASAAEEAKEKYLIGFNEQEAVSEFVEQVEANDEVAILSEEEEVEIELLHEFETIPVLSVELSPEDVDALELDPAISYIEEDAEVTTMAQSVPWGISRVQAPAAHNRGLTGRGVKVAVLDTGISTHPDLNIRGGASFVPGEPSTQDGNGHGTHVAGTIAALNNSIGVLGVAPSAELYAVKVLGASGGGAVSSIAQGLEWAGNNGMHVANLSLGSPSPSATLEQAVNSATSRGVLVVAASGNSGAGSISYPARYANAMAVGATDQNNNRASFSQYGAGLDIVAPGVNVQSTYPGSTYASLNGTSMATPHVAGAAVLVKQKNPSWSNVQIRNHLKNTATSLGSTNLYGSGLVNAEAATR

SEQ ID NO: 62650 - protein, 380 aa, Unidentified
VRSKKLWIVASTALLISVAFSSSIASAAEEAKEKYLIGFNEQEAVSEFVEQVEANDEVAILSEEEEVEIELLHEFETIPVLSVELSPEDVDALELDPAISYIEEDAEVTTMAQSVPWGISRVQAPAAHRRGLTGSGVKVAVLDTGISTHPDLNIRGGASFVPGEPSTQDGNGHGTHVAGTIAALNNSIGVLGVAPSAELYAVKVLGASGSGAVSSIAQGLEWAGNNGMHVANLSLGSPSPSATLEQAVNSATSRGVLVVAASGNSGAGSISYPARYANAMAVGATDQNNNRASFSQYGAGLDIVAPGVNVQSTYPGSTYASLNGTSMATPHVAGAAVLVKQKNPSWSNVQIRNRLKNTATSLGSTNLYGSGLVNAEAATR

SEQ ID NO: 62651 - protein, 380 aa, Unidentified
VRSKKLWIVASTALLISVAFSSSIASAAEEAKEKYLIGFNEQEAVSEFVEQVEANDEVAILSEEEEVEIELLHEFETIPVLSVELSPEDVDALELDPAISYIEEDAEVTTMAQSVPWGISRVQAPAAHRRGLTGSGVKVAVLDTGISTHPDLNIRGGASFVPGEPSTQDGNGHGTHVAGTIAALNNSIGVLGVAPSAELYAVKVLGASGGGAVSSIAQGLEWAGNNGMHVANLSLGSPSPSATLEQAVNSATSRGVLVVAASGNSGAGSISYPARYANAMAVGATDQNNNRASFSQYGAGLDIVAPGVNVQSTYPGSTYASLNGTSMATPHVAGAAALVKQKNPSWSNVRIRNHLKNTATSLGSTNLYGSGLVNAEAATR

SEQ ID NO: 62652 - protein, 380 aa, Unidentified
VRSKKLWIVASTALLISVAFSSSIASAAEEAKEKYLIGFNEQEAVSEFVEQVEANDEVAILSEEEEVEIELLHEFETIPVLSVELSPEDVDALELDPAISYIEEDAEVTTMAQSVPWGISRVQAPAAHNRGLTGRGVKVAVLDSGISTHPDLNIRGGASFVPGEPSTQDGNGHGTHVAGTIAALNNRIGVLGVAWSAELYAVKVLGASGSGSVSSIAQGLEWAGNNGMHVANLSLGSPSPSATLEQAVNSATSRGVLVVAASGNSGAGSISYPARYANAMAVGATDQNNNRASFSQYGAGLDIVAPGVNVQSTYPGSTYASLNGTSMATPHVAGAAALVKQKNPSWSNVQIRNHLKNTATSLGSTNLYGSGLVNAEAATR

SEQ ID NO: 62653 - protein, 380 aa, Unidentified
VRSKKLWIVASTALLISVAFSSSIASAAEEAKEKYLIGFNEQEAVSEFVEQVEANDEVAILSEEEEVEIELLHEFETIPVLSVELSPEDVDALELDPAISYIEEDAEVTTMAQSRPWGISRVQAPAAHNRRLTGRGVKVAVLDTGISTHPDLNIRGGASFVPGEPSTQDGNGHGTHVAGTIAALNNSIGVLGVAPSAELYAVKVLGASGSGSVSSIAQGLEWAGNNGMHVANLSLGSPSPSATLEQAVNSATSRGVLVVAASGNSGAGSISYPARYANAMAVGATDQNNNRASFSQYGAGLDIVAPGVNVQSTYPGSTYASLNGTSMATPHVAGAAALVKQKNPSWSNRQIRNHLKNTATSLGSTNLYGSGLVNAEAATR

SEQ ID NO: 62654 - protein, 380 aa, Unidentified
VRSKKLWIVASTALLISVAFSSSIASAAEEAKEKYLIGFNEQEAVSEFVEQVEANDEVAILSEEEEVEIELLHEFETIPVLSVELSPEDVDALELDPAISYIEEDAEVTTMAQSVPWGISRVQAPAAHRRGLTGSGVKVAVLDTGISTHPDLNIRGGASFVPGEPSTQDGNGHGTHVAGTIAALDNSIGVLGVAPSAELYAVKVLGASGGGSVSSIAQGLEWAGNNGMHVANLSLGSPSPSATLEQAVNSATSRGVLVVAASGNSGAGSISYPARYANAMAVGATDQNNNRASFSQYGAGLDIVAPGVNVQSTYPGSTYASLNGTSMATPHVAGAAVLVKQKNPSWSNVQIRNHLKNTATSLGSTNLYGSGLVNAEAATR

SEQ ID NO: 62655 - protein, 380 aa, Unidentified
VRSKKLWIVASTALLISVAFSSSIASAAEEAKEKYLIGFNEQEAVSEFVEQVEANDEVAILSEEEEVEIELLHEFETIPVLSVELSPEDVDALELDPAISYIEEDAEVTTMAQSVPWGISRVQAPAAHNRRLTGSGVKVAVLDTGISTHPDLNIRGGASFVPGEPSTQDGNGHGTHVAGTIAALNNSIGVLGVAPSAELYAVKVLGASGAGSVSSIAQGLEWAGNNGMHVANLSLGSPSPSATLEQAVNSATSRGVLVVAASGNSGAGSISYPARYANAMAVGATDQNNNRASFSQYGAGLDIVAPGVNVQSTYPGSTYASLNGTSMATPHVAGAAVLVKQKNPSWSNVRIRNHLKNTATSLGSTNLYGSGLVNAEAATR

SEQ ID NO: 62656 - protein, 380 aa, Unidentified
VRSKKLWIVASTALLISVAFSSSIASAAEEAKEKYLIGFNEQEAVSEFVEQVEANDEVAILSEEEEVEIELLHEFETIPVLSVELSPEDVDALELDPAISYIEEDAEVTTMAQSVPWGIARVQAPAAHNRGLTGSGVKVAVLDTGISTHPDLRIRGGASFVPGEPSTQDGNGHGTHVAGTIAALNNRIGVLGVAPSAELYAVKVLGASGSGSVSSIAQGLEWAGNNGMHVANLSLGSPSPSATLEQAVNSATSRGVLVVAASGNSGAGSISYPARYANAMAVGATDQNNNRASFSQYGAGLDIVAPGVNVQSTYPGSTYASLNGTSMATPHVAGAAALVKQKNPSWRNVQIRNHLKNTATSLGSTNLYGSGLVNAEAATR

SEQ ID NO: 62657 - protein, 380 aa, Unidentified
VRSKKLWIVASTALLISVAFSSSIASAAEEAKEKYLIGFNEQEAVSEFVEQVEANDEVAILSEEEEVEIELLHEFETIPVLSVELSPEDVDALELDPAISYIEEDAEVTTMAQSVPWGISRVQAPAAHNRGLTGRGVKVAVLDTGISTHPDLRIRGGASFVPGEPSTQDGNGHGTHVAGTIAALNNSIGVLGVAPSAELYAVKVLGASGSGSVSSIAQGLEWAGANGMHVANLSLGSPSPSATLEQAVNSATSRGVLVVAASGNSGAGSISYPARYANAMAVGATDQNNNRASFSQYGAGLDIVAPGVNVQSTYPGSTYFSLNGTSMATPHVAGAAALVKQKNPSWSNVQIRNHLKNTATSLGSTNLYGSGLVNAEAATR

SEQ ID NO: 62658 - protein, 380 aa, Unidentified
VRSKKLWIVASTALLISVAFSSSIASAAEEAKEKYLIGFNEQEAVSEFVEQVEANDEVAILSEEEEVEIELLHEFETIPVLSVELSPEDVDALELDPAISYIEEDAEVTTMAQSVPWGISRVQAPAAHNRKLTASGVKVAVLDTGISTHPDLWIRGGASFVPGEPSTQDGNGHGTHVAGTIAALNNSIGVLGVAPSAELYAVKVLGASGSGSVSSIAQGLEWAGNNGMHVANLSLGSPSPSATLEQAVNSATSRGVLVVAASGNSGAGSISYPARYANAMAVGATDQNNNRASFSQYGAGLDIVAPGVNVQSTYPGSAYASLNGTSMATPHVAGAAALVKQKNPSWSNVQIRNHLKNTATSLGSTNLYGSGLVNAEAATR

SEQ ID NO: 62659 - protein, 380 aa, Unidentified
VRSKKLWIVASTALLISVAFSSSIASAAEEAKEKYLIGFNEQEAVSEFVEQVEANDEVAILSEEEEVEIELLHEFETIPVLSVELSPEDVDALELDPAISYIEEDAEVTTMAQSVPWGISRVQAPAAHNRRLTGSRVKVAVLDTGISTHPDLNIRGGASFVPGEPSTQDGNGHGTHVAGTIAALNNSIGVLGVAPSAELYAVKVLGASGSGSVSSIAQGLEWAGANGMHVANLSLGSPSPSATLEQAVNSATSRGVLVVAASGNSGAGSISWPARYANAMAVGATDQNNNRASFSQYGAGLDIVAPGVNVQSTYPGSTYASLNGTSMATPHVAGAAALVKQKNPSWSNVQIRNHLKNTATSLGSTNLYGSGLVNAEAATR

SEQ ID NO: 62660 - protein, 380 aa, Unidentified
VRSKKLWIVASTALLISVAFSSSIASAAEEAKEKYLIGFNEQEAVSEFVEQVEANDEVAILSEEEEVEIELLHEFETIPVLSVELSPEDVDALELDPAISYIEEDAEVTTMAQSVPWGISRVQAPASHNRGLTGSGVKVAVLDTGISTHPDLNIRGGASFVPGEPSTQDGNGHGTHVAGTIAALNNSIGVLGVAPSAELYAVKVLGASGSGSVSSIAQGLEWAGNNGMHVANLSLGSPSPSATLEQAVNSATSRGVLVVAASGNSGEGSISYPARYANAMAVGATDQNNNRASFSQYGAGLDIVAPGVNVQSTYPGSTYASLNGTSMATPHVAGAAALVKQKNPSWSNVQIRNRLKNTATSLGSTNLYGSGLVNAFAATR

SEQ ID NO: 62661 - protein, 380 aa, Unidentified
VRSKKLWIVASTALLISVAFSSSIASAAEEAKEKYLIGFNEQEAVSEFVEQVEANDEVAILSEEEEVEIELLHEFETIPVLSVELSPEDVDALELDPAISYIEEDAEVTTMAQSVPWGISRVQAPAAHNRGLTGSGVKVAVLDTGISTHPDLNIRGGASFVPGEPSTQDGNGHGTHVAGTIAALNNSIGVLGVAPSAELYAVKVLGASGGGAISSIAQGLEWAGNNGMHVANLSLGSPSPSATLEQAVNSATSRGVLVVAASGNSGADSISYPARYANAMAVGATDQNNNRASFSQYGAGLDIVAPGVNVQSTYPGSTYASLNGTSMATPHVAGAAALVKQKNPSWSNVQIRNHLKNTATSLGSTNLYGSGLVNAEAATR

SEQ ID NO: 62662 - protein, 380 aa, Unidentified
VRSKKLWIVASTALLISVAFSSSIASAAEEAKEKYLIGFNEQEAVSEFVEQVEANDEVAILSEEEEVEIELLHEFETIPVLSVELSPEDVDALELDPAISYIEEDAEVTTMAQSVPWGISRVQAPAAHNRRLRGSGVKVAVLDTGISTHPDLNIRGGASFVPGEPSTQDGNGHGTHVAGTIAALNNSIGVLGVAPSAELYAVKVLGASGSGSVSSIAQGLEWAGNNGMHVANLSLGSPSPSATLEQAVNSATSRGVLVVAASGNSGAGSISYPARYANAMAVGATDQNNNRASFSQYGAGLDIVAPGVNVQSTYPGFTYASLNGTSMATPHVAGAAALVKQKNPSRSNVQIRNHLKNTATSLGSTNLYGSGLVNAEAATR

SEQ ID NO: 62663 - protein, 380 aa, Unidentified
VRSKKLWIVASTALLISVAFSSSIASAAEEAKEKYLIGFNEQEAVSEFVEQVEANDEVAILSEEEEVEIELLHEFETIPVLSVELSPEDVDALELDPAISYIEEDAEVTTMAQSVPWGISRVQAPAAHNRGLAGSGVKVAVLDTGISTHPDLNIRGGASFVPGEPSTQDGNGHGTHVAGTIAALNNSIGVLGVAPSAELYAVKVLGASGSGSVSSIAQGLEWAGNNGMHVANLSLGNPSPSATLEQAVNSATSRGVLVVAASGNSGEGSISYPARYANAMAVGATDQNNNHASFSQYGAGLDIVAPGVNVQSTYPGSTYASLNGTSMATPHVAGAAALVKQKNPSWSNVQIRNHLKNTATSLGSTNLYGSGLVNAEAATR

SEQ ID NO: 62664 - protein, 380 aa, Unidentified
VRSKKLWIVASTALLISVAFSSSIASAAEEAKEKYLIGFNEQEAVSEFVEQVEANDEVAILSEEEEVEIELLHEFETIPVLSVELSPEDVDALELDPAISYIEEDAEVTTMAQSVPWGISRVQAPAAHNRGLTGSGVKVAVLDTGISTHPDLNIRGGASFVPGEPSTQDGNGHGTHVAGTIAALNNSIGVLGVAPSAELYAVKVLGASGSGSLSSIAQGLEWAGNNGMHVANLSLGNPSPSATLEQAVNSATSRGVLVVAASGNSGAESISYPARYANAMAVGATDQNNNRASFSQYGAGLDIVAPGVNVQSTYPGSTYASLNGTSMATPHVAGAAALVKQKNPSWSNVQIRNHLKNTATSLGSTNLYGSGLVNAFAATR

SEQ ID NO: 62665 - protein, 380 aa, Unidentified
VRSKKLWIVASTALLISVAFSSSIASAAEEAKEKYLIGFNEQEAVSEFVEQVEANDEVAILSEEEEVEIELLHEFETIPVLSVELSPEDVDALELDPAISYIEEDAEVTTMAQSVPWGISRVQAPAAHNRGLTGSGVKVAVLDTGISTHPDLWIRGGASFVPGEPSTQDGNGHGTHVAGTIAALNNSIGVLGVAPSAELYAVKVLGASGDGSVSSIAQGLEWAGNNGMHVANLSLGSPSPSATLEQAVNSATSRGVLVVAASGNSGAGSISYPARYANAMAVGATDQNNNRASFSQYGAGLDIVAPGVNVQSTYPGMTYASLNGTSMATPHVAGAAALVKQKNPSWSFVQIRNHLKNTATSLGSTNLYGSGLVNAEAATR

SEQ ID NO: 62666 - protein, 380 aa, Unidentified
MRSKKLWIVASTALLISVAFSSSIASAAEEAKEKYLIGFNEQEAVSEFVEQVEANDEVAILSEEEEVEIELLHEFETIPVLSVELSPEDVDALELDPAISYIEEDAEVTTMAQSVPWGISRVQAPAAHNRGLTGSGVKVAVLDTGISTHPDLNIRGGASFVPGEPSTQDGNGHGTHVAGTIAALNNSIGVLGVAPNAELYAVKVLGASGSGSVSSIAQGLEWAGNNVMHVANLSLGLQAPSATLEQAVNSATSRGVLVVAASGNSGAGSISYPARYANAMAVGATDQNNNRASFSQYGAGLDIVAPGVNVQSTYPGSTYASLNGTSMATPHVAGAAALVKQKNPSWSNVQIRNHLKNTATSLGSTNLYGSGLVNAEAATR

SEQ ID NO: 62667 - protein, 380 aa, Unidentified
VRSKKLWIVASTALLISVAFSSSIASAAEEAKEKYLIGFNEQEAVSEFVEQVEANDEVAILSEEEEVEIELLHEFETIPVLSVELSPEDVDALELDPAISYIEEDAEVTTMAQSVPWGISRVQAPAAHNRGLTGSGVKVAVLDTGISTHPDLNIRGGASFVPGEPSTQDGNGHGTHVAGTIAALNNSIGVLGVAPSAELYAVKVLGASGSANVTSIAQGLEWAGNNGMHVANLSLGSPSPSATLEQAVNSATSRGVLVVAASGNSGAGSISYPARYANAMAVGATDQNNNRASFSQYGEGLDIVAPGVNVQSTYPGSTYASLNGTSMATPHVAGAAALVKQKNPSWSNVQIRNHLKNTATSLGSTNLYGSGLVNAEAATR

SEQ ID NO: 62668 - protein, 380 aa, Unidentified
VRSKKLWIVASTALLISVAFSSSIASAAEEAKEKYLIGFNEQEAVSEFVEQVEANDEVAILSEEEEVEIELLHEFETIPVLSVELSPEDVDALELDPAISYIEEDAEVTTMAQSVPWGISRVQAPAAHNRGLTGRGVKVAVLDSGISTHPDLNIRGGASFVPGEPSTQDGNGHGTHVAGTIAALNNSIGVLGVAPSAELYAVKVLGASGSGSVSSIAQGLEWAGNNGMHVANLSLGSPSPSATLEQAVNSATSRGVLVVAASGNSGAGSISYPARYANVMAVGATDQNNNRASFSQYGAGLDIVAPGVNVQSTYPGSTYASLNGTSMATPHVAGAAALVFQKNPSWSNVQIRNHLKNTATSLGSTNLYGSGLVNAEAATR

SEQ ID NO: 62669 - protein, 380 aa, Unidentified
VRSKKLWIVASTALLISVAFSSSIASAAEEAKEKYLIGFNEQEAVSEFVEQVEANDEVAILSEEEEVEIELLHEFETIPVLSVELSPEDVDALELDPAISYIEEDAEVTTMAQSVPWGISRVQAPAAHNRGLTGRGVKVAVLDTGISTHPDLNIRGGASFVPGEPSTQDGNGHGTHVAGTIAALNNSIGVLGVAPSAELYAVKVLGASGGGAISSIAQGLEWAGNNGMHVANLSLGSPSPSATLEQAVNSATSRGVLVVAASGNSGAGSISYPARYANAMAVGATDQNNNRASFSQYGAGLDIVAPGVNVQSTYPGSTYASLNGTSMATPHVAGAAALVKQKNPSWSNVQIRNHLKNTATSLGSTNLYGSGLVNAEAATR

SEQ ID NO: 62670 - protein, 380 aa, Unidentified
VRSKKLWIVASTALLISVAFSSSIASAAEEAKEKYLIGFNEQEAVSEFVEQVEANDEVAILSEEEEVEIELLHEFETIPVLSVELSPEDVDALELDPAISYIEEDAEVTTMAQSVPWGISRVQAPAAHNRKLTGSGVKVAVLDTGISTHPDLWIRGGASFVPGEPSTQDGEGHGTHVAGTIAALNNSIGVLGVAPSAELYAVKVLGASGSGSVSSIAQGLEWAGNNRMHVANLSLGSPSPSATLEQAVNSATSRGVLVVAASGNSGAGSISYPARYANAMAVGATDQNNNRASFSQYGAGLDIVAPGVNVQSTYPGSTYASLNGTSMATPHVAGAAALVKQKNPSWSNVQIRNHLKNTATSLGSTNLYGSGLVNAEAATR

SEQ ID NO: 62671 - protein, 380 aa, Unidentified
VRSKKLWIVASTALLISVAFSSSIASAAEEAKEKYLIGFNEQEAVSEFVEQVEANDEVAILSEEEEVEIELLHEFETIPVLSVELSPEDVDALELDPAISYIEEDAEVTTMAQSVPWGISRVQAPAAHRRGLTGSGVKVAVLDTGISTHPDLDIRGGASFVPGEPSTQDGNGHGTHVAGTIAALNNSIGVLGVAPSAELYAVKVLGASGSGSVSSIAQGLEWAGNNGMHVANLSLGSPSPSATLEQAVNSATSRGVLVVAASGNSGAGSISYPARYANAMAVGATDQNNNRASFSQYGAGLDIVAPGVNVQSTYPGSTYASLNGTSMATPHVAGEAALVKQKNPSWSNVQIRNRLKNTATSLGSTNLYGSGLVNAEAATR

SEQ ID NO: 62672 - protein, 380 aa, Unidentified
VRSKKLWIVASTALLISVAFSSSIASAAEEAKEKYLIGFNEQEAVSEFVEQVEANDEVAILSEEEEVEIELLHEFETIPVLSVELSPEDVDALELDPAISYIEEDAEVTTMAQSVPWGISRVQAPAAHNRGLTGSGVKVAVLDTGISTHPDLNIRGGASFVPGEPSTQDGNGHGTHVAGTIAALNNSIGVLGVAPSAELYAVKVLGASGAGGLSSIAQGLEWAGNNGMHVANLSLGSPSPSATLEQAVNSATSRGVLVVAASGNSGAGSISYPARYANAMAVGATDQNNNRADFSQYGAGLDIVAPGVNVQSTYPGSTYASLNGTSMATPHVAGAAALVKQKNPSWSNVQIRNHLKNTATSLGSTNLYGSGLVNAEAATR

SEQ ID NO: 62673 - protein, 380 aa, Unidentified
VRSKKLWIVASTALLISVAFSSSIASAAEEAKEKYLIGFNEQEAVSEFVEQVEANDEVAILSEEEEVEIELLHEFETIPVLSVELSPEDVDALELDPAISYIEEDAEVTTMAQSVPWGISRVQAPAAHNRGLTGSGVKVAVLDTGISTHPDLNIRGGASFVPGEPSTQDGEGHGTHVAGTIAALNNSIGVLGVAPSAELYAVKVLGASGSGSVSSIAQGLEWAGNNGMHVANLSLGSPSPSATLEQAVNSATSRGVLVVAASGNSGAESISYPARYANAMAVGATDQNNNHASFSQYGAGLDIVAPGVNVQSTYPGSTYASLNGTSMATPHVAGAAALVKQKNPSWSNVQIRNRLKNTATSLGSTNLYGSGLVNAEAATR

SEQ ID NO: 62674 - protein, 380 aa, Unidentified
VRSKKLWIVASTALLISVAFSSSIASAAEEAKEKYLIGFNEQEAVSEFVEQVEANDEVAILSEEEEVEIELLHEFETIPVLSVELSPEDVDALELDPAISYIEEDAEVTTMAQSVPWGISRVQAPAAHNRGLTGSGVKVAVLDTGISTHPDLNIRGGASFVPGEPSTQDGNGHGTHVAGTIAALNNSIGVLGVAPSAELYAVKVLGASGGGAISSIAQGLEWAGNNGMHVANLSLGSPSPSATLEQAVNSATSRGVLVVAASGNSGAGSISYPARYANAMAVGATDQNNNRASFSQYGAGLDIVAPGVNVQSTYPGSTYASLNGTSMATPHVAGAAVLVKQKNPSWSNVQIRNHLKNTATSLGSTNLYGSGLVNAEAATR

SEQ ID NO: 62675 - protein, 380 aa, Unidentified
VRSKKLWIVASTALLISVAFSSSIASAAEEAKEKYLIGFNEQEAVSEFVEQVEANDEVAILSEEEEVEIELLHEFETIPVLSVELSPEDVDALELDPAISYIEEDAEVTTMAQSVPWGISRVQAPAAHNRGLTGSGVKVAVLDTGISTHPDLNIRGGASFVPGEPSTQDGNGHGTHVAGTIAALDNSIGVLGVAPSAELYAVKVLGASGSGSISSIAQGLEWAGNNGMHVANLSLGSPSPSATLEQAVNSATSRGVLVVAASGNSGAGSISYPARYANAMAVGATDQNNNRASFSQYGAGLDIVAPGVNVQSTYPGSTYASLNGTSMATPHVAGAAVLVKQKNPSWSNVRIRNHLKNTATSLGSTNLYGSGLVNAEAATR

SEQ ID NO: 62676 - protein, 380 aa, Unidentified
VRSKKLWIVASTALLISVAFSSSIASAAEEAKEKYLIGFNEQEAVSEFVEQVEANDEVAILSEEEEVEIELLHEFETIPVLSVELSPEDVDALELDPAISYIEEDAEVTTMAQSVPWGISRVQAPAAHNRGLTGRGVKVAVLDTGISTHPDLNIRRGASFVPGEPSTQDGNGHGTHVAGTIAALNNSIGVLGVAPSAELFAVKVLGASGSGSVSSIAQGLEWAGNNGMHFANLSLGSPSPSATLEQAVNSATSRGVLVVAASGNSGAGSISYPARYANAMAVGATDQNNNRASFSQYGAGLDIVAPGVNVQSTYPGSTYASLNGTSMATPHVAGAAALVKQKNPSWSNVQIRNHLKNTATSLGSTNLYGSGLVNAEAATR

SEQ ID NO: 62677 - protein, 380 aa, Unidentified
VRSKKLWIVASTALLISVAFSSSIASAAEEAKEKYLIGFNEQEAVSEFVEQVEANDEVAILSEEEEVEIELLHEFETIPVLSVELSPEDVDALELDPAISYIEEDAEVTTMAQSVPWGISRVQAPASHNRGLTGSGVKVAVLDTGISTHPDLNIRGGASFVPGEPSTQDGEGHGTHVAGTIAALNNSIGVLGVAPSAELYAVKVLGASGSGSVSSIAQGLEWAGNNGMHVANLSLGSPSPSATLEQAVNSATSRGVLVVAASGNSGEGSISYPARYANAMAVGATDQNNNRASFSQYGAGLDIVAPGVNVQSTYPGSTYASLNGTSMATPHVAGAAALVKQKNPSWSNVQIRNRLKNTATSLGSTNLYGSGLVNAEAATR

SEQ ID NO: 62678 - protein, 380 aa, Unidentified
VRSKKLWIVASTALLISVAFSSSIASAAEEAKEKYLIGFNEQEAVSEFVEQVEANDEVAILSEEEEVEIELLHEFETIPVLSVELSPEDVDALELDPAISYIEEDAEVTTMAQSVPWGISRVQAPAAHNRGLTGRGVKVAVLDTGISTHPDLRIRGGASFVPGEPSTQDGNGHGTHVAGTIAALNNSIGVLGVAPSAELYAVKVLGASGSGSVSSIAQGLEWAGANGMHVANLSLGSPSPSATLEQAVNSATSRGVLVVAASGNSGAGSISYPARYANAMAVGATDQNNNRASFSQYGAGLDIVAPGVNVQSTYPGSTYASLNGTSMATPHVAGAAALVKQKNPSWSNVQIRNHLKNTATSLGSTNLYGSGLVRAEAATR

SEQ ID NO: 62679 - protein, 380 aa, Unidentified
VRSKKLWIVASTALLISVAFSSSIASAAEEAKEKYLIGFNEQEAVSEFVEQVEANDEVAILSEEEEVEIELLHEFETIPVLSVELSPEDVDALELDPAISYIEEDAEVTTMAQSVPWGISRVQAPAAHNRKLTGSGVKVAVLDTGISTHPDLNIRGGASFVPGEPSTQDGEGHGTHVAGTIAALNNSIGVLGVAPSAELYAVKVLGASGSGSVSSIAQGLEWAGNNGMHVANLSLGSPSPSATLEQAVNSATSRGVLVVAASGNSGAGSISYPARYANAMAVGATDQNNNRADFSQYGAGLDIVAPGVNVQSTYPGSAYASLNGTSMATPHVAGAAALVKQKNPSWSNVQIRNHLKNTATSLGSTNLYGSGLVNAEAATR

SEQ ID NO: 62680 - protein, 380 aa, Unidentified
VRSKKLWIVASTALLISVAFSSSIASAAEEAKEKYLIGFNEQEAVSEFVEQVEANDEVAILSEEEEVEIELLHEFETIPVLSVELSPEDVDALELDPAISYIEEDAEVTTMAQSVPWGISRVQAPAAHNRGLTGRGVKVAVLDTGISTHPDLRIRGGASFVPGEPSTQDGNGHGTHVAGTIAALNNSIGVLGVAPSAELYAVKVLGASGAGSVSSIAQGLEWAGANGMHVANLSLGSPSPSATLEQAVNSATSRGVLVVAASGNSGAGSISYPARYANAMAVGATDQNNNRASFSQYGAGLDIVAPGVNVQSTYPGSTYASLNGTSMATPHVAGAAALVKQKNPSWSNVQIRNHLKNTATSLGSTNLYGSGLVNAEAATR

SEQ ID NO: 62681 - protein, 380 aa, Unidentified
VRSKKLWIVASTALLISVAFSSSIASAAEEAKEKYLIGFNEQEAVSEFVEQVEANDEVAILSEEEEVEIELLHEFETIPVLSVELSPEDVDALELDPAISYIEEDAEVTTMAQSVPWGISRVQAPAAHNRRLTGSGVKVAVLDTGISTHPDLRIRGGASFVPGEPSTQDGNGHGTHVAGTIAALNNSIGVLGVAPSAELYAVKVLGASGSGSVSSIAQGLEWAGNNGMHVANLSLGSPSPSATLEQAVNSATSRGVLVVAASGNSGAGSISYPARYANAMAVGATDQNNNRASFSQYGAGLDIVAPGVNVQSTYPGFTYASLNGTSMATPHVAGAAALVKQKNPSRSNVQIRNHLKNTATSLGSTNLYGSGLVNAEAATR

SEQ ID NO: 62682 - protein, 380 aa, Unidentified
VRSKKLWIVASTALLISVAFSSSIASAAEEAKEKYLIGFNEQEAVSEFVEQVEANDEVAILSEEEEVEIELLHEFETIPVLSVELSPEDVDALELDPAISYIEEDAEVTTMAQSVPWGISRVQAPAAHNRGLTGRGVKVAVLDTGISTHPDLRIRGGASFVPGEPSTQDGNGHGTHVAGTIAALNNSIGVLGVAPSAELYAVKVLGASGAGSVSSIAQGLEWAGNNGMHVANLSLGSPSPSATLEQAVNSATSRGVLVVAASGNSGAGSISYPARYANAMAVGATDQNNNRASFSQYGAGLDIVAPGVNVQSTYPGSAYASLNGTSMATPHVAGAAALVKQKNPSWSNVQIRNHLKNTATSLGSTNLYGSGLVNAEAATR

SEQ ID NO: 62683 - protein, 380 aa, Unidentified
VRSKKLWIVASTALLISVAFSSSIASAAEEAKEKYLIGFNEQEAVSEFVEQVEANDEVAILSEEEEVEIELLHEFETIPVLSVELSPEDVDALELDPAISYIEEDAEVTTMAQSVPWGISRVQAPAAHNRGLTGSGVKVAVLDTGISTHPDLNIRGGASFVPGEPSTQDGNGHGTHVAGTIAALNNSIGVLGVAPSAELYAVKVLGASGAGGLSSIAQGLEWAGNNGMHVANLSLGNPSPSATLEQAVNSATSRGVLVVAASGNSGAGSISYPARYANAMAVGATDQNNNRASFSQYGAGLDIVAPGVNVQSTYPGSTYASLNGTSMATPHVAGAAALVKQKNPSWSNVQIRNHLKNTATSLGSTNLYGSGLVNAEAATR

SEQ ID NO: 62684 - protein, 380 aa, Unidentified
VRSKKLWIVASTALLISVAFSSSIASAAEEAKEKYLIGFNEQEAVSEFVEQVEANDEVAILSEEEEVEIELLHEFETIPVLSVELSPEDVDALELDPAISYIEEDAEVTTMAQSVPWGISRVQAPAAHNRRLRGSGVKVAVLDTGISTHPDLRIRGGASFVPGEPSTQDGNGHGTHVAGTIAALNNSIGVLGVAPSAELYAVKVLGASGSGSVSSIAQGLEWAGNNGMHVANLSLGSPSPSATLEQAVNSATSRGVLVVAASGNSGAGSISYPARYANAMAVGATDQNNNRASFSQYGAGLDIVAPGVNVQSTYPGSTYASLNGTSMATPHVAGAAALVKQKNPSRSNVQIRNHLKNTATSLGSTNLYGSGLVNAEAATR

SEQ ID NO: 62685 - protein, 380 aa, Unidentified
VRSKKLWIVASTALLISVAFSSSIASAAEEAKEKYLIGFNEQEAVSEFVEQVEANDEVAILSEEEEVEIELLHEFETIPVLSVELSPEDVDALELDPAISYIEEDAEVTTMAQSVPWGISRVQAPAAHNRGLTGSGVKVAVLDTGISTHPDLNIRGGASFVPGEPSTQDGEGHGTHVAGTIAALNNSIGVLGVAPSAELYAVKVLGASGSGSVSSIAQGLEWAGNNGMHVANLSLGSPSPSATLEQAVNSATSRGVLVVAASGNSGEGSISYPARYANAMAVGATDQNNNHASFSQYGAGLDIVAPGVNVQSTYPGSTYASLNGTSMATPHVAGAAALVKQKNPSWSNVQIRNRLKNTATSLGSTNLYGSGLVNAEAATR

SEQ ID NO: 62686 - protein, 380 aa, Unidentified
VRSKKLWIVASTALLISVAFSSSIASAAEEAKEKYLIGFNEQEAVSEFVEQVEANDEVAILSEEEEVEIELLHEFETIPVLSVELSPEDVDALELDPAISYIEEDAEVTTMAQSVPWGISRVQAPAAHNRRLTGSGVKVAVLDTGISTHPDLRITGGASFVPGEPSTQDGNGHGTHVAGTIAALNNSIGVLGVAPSAELYAVKVLGASGSGSVSSIAQGLEWAGNNGMHVANLSLGSPSPSATLEQAVNSATSRGVLVVAASGNSGAGSISYPARYANAMAVGATDQNNNRASFSQYGAGLDIVAPGVNVQSTYPGSTYASLNGTSMATPHVAGAAALVKQKNPSWRNVQIRNHLKNTATSLGSTNLYGSGLVNAEAATR

SEQ ID NO: 62687 - protein, 380 aa, Unidentified
VRSKKLWIVASTALLISVAFSSSIASAAEEAKEKYLIGFNEQEAVSEFVEQVEANDEVAILSEEEEVEIELLHEFETIPVLSVELSPEDVDALELDPAISYIEEDAEVTTMAQSVPWGISRVQAPAAHRRGLTGSGVKVAVLDTGISTHPDLNIRGGASFVPGEPSTQDGNGHGTHVAGTIAALNNSIGVLGVAPSAELYAVKVLGASGGGSISSIAQGLEWAGNNGMHVANLSLGSPSPSATLEQAVNSATSRGVLVVAASGNSGAGSISYPARYANAMAVGATDQNNNRASFSQYGAGLDIVAPGVNVQSTYPGSTYASLNGTSMATPHVAGAAALVKQKNPSWSNVQIRNRLKNTATSLGSTNLYGSGLVNAEAATR

SEQ ID NO: 62688 - protein, 380 aa, Unidentified
VRSKKLWIVASTALLISVAFSSSIASAAEEAKEKYLIGFNEQEAVSEFVEQVEANDEVAILSEEEEVEIELLHEFETIPVLSVELSPEDVDALELDPAISYIEEDAEVTTMAQSRPWGIARVQAPAAHNRRLTGSGVKVAVLDTGISTHPDLRIRGGASFVPGEPSTQDGNGHGTHVAGTIAALNNSIGVLGVAPSAELYAVKVLGASGSGSVSSIAQGLEWAGNNGMHVANLSLGSPSPSATLEQAVNSATSRGVLVVAASGNSGAGSISYPARYANAMAVGATDQNNNRASFSQYGAGLDIVAPGVNVQSTYPGSTYASLNGTSMATPHVAGAAALVKQKNPSWSNVQIRNHLKNTATSLGSTNLYGSGLVNAEAATR

SEQ ID NO: 62689 - protein, 380 aa, Unidentified
VRSKKLWIVASTALLISVAFSSSIASAAEEAKEKYLIGFNEQEAVSEFVEQVEANDEVAILSEEEEVEIELLHEFETIPVLSVELSPEDVDALELDPAISYIEEDAEVTTMAQSVPWGISRVQAPAAHNRGLTGSGVKVAVLDTGISTHPDLNIRGGASFVPGEPSTQDGEGHGTHVAGTIAALNNSIGVLGVAPSAELYAVKVLGASGAGSVSSIAQGLEWAGNNGMHVANLSLGSPSPSATLEQAVNSATSRGVLVVAASGNSGAGSISYPARYANAMAVGATDQNNNHASFSQYGAGLDIVAPGVNVQSTYPGSTYASLNGTSMATPHVAGAAALVKQKNPSWSNVQIRNRLKNTATSLGSTNLYGSGLVNAEAATR

SEQ ID NO: 62690 - protein, 380 aa, Unidentified
VRSKKLWIVASTALLISVAFSSSIASAAEEAKEKYLIGFNEQEAVSEFVEQVEANDEVAILSEEEEVEIELLHEFETIPVLSVELSPEDVDALELDPAISYIEEDAEVTTMAQSVPWGISRVQAPAAHNRGLTGFGVKVAVLDTGISTHPDLNIRGGASFVPGEPSTQDGEGHGTHVAGTIAALNNSIGVLGVAPSAELYAVKVLGASGSGSVSSIAQGLEWAGNNRMHVANLSLGSPSPSATLEQAVNSATSRGVLVVAASGNSGAGSISYPARYANAMAVGATDQNNNRASFSQYGAGLDIVAPGVNVQSTYPGSTYASLNGTSMATPHVAGAAALVKQKNGSWSNVQIRNHLKNTATSLGSTNLYGSGLVNAEAATR

SEQ ID NO: 62691 - protein, 380 aa, Unidentified
VRSKKLWIVASTALLISVAFSSSIASAAEEAKEKYLIGFNEQEAVSEFVEQVEANDEVAILSEEEEVEIELLHEFETIPVLSVELSPEDVDALELDPAISYIEEDAEVTTMAQSVPWGISRVQAPAAHNRGLTGRGVKVAVLDTGISTHPDLRIRGGASFVPGEPSTQDGNGHGTHVAGTIAALDNSIGVLGVAPSAELYAVKVLGASGSGSVSSIAQGLEWAGNNGMHVANLSLGSPSPSATLEQAVNSATSRGVLVVAASGNSGAGSISYPARYANAMAVGATDQNNNRASFSQYGAGLDIVAPGVNVQSTYPGSTYASLNGTSMATPHVAGAAALVKQKNPSWSNVQIRNRLKNTATSLGSTNLYGSGLVNAEAATR

SEQ ID NO: 62692 - protein, 380 aa, Unidentified
VRSKKLWIVASTALLISVAFSSSIASAAEEAKEKYLIGFNEQEAVSEFVEQVEANDEVAILSEEEEVEIELLHEFETIPVLSVELSPEDVDALELDPAISYIEEDAEVTTMAQSVPWGISRVQAPAAHNRGLTGRGVKVAVLDSGISTHPDLNIRGGASFVPGEPSTQDGNGHGTHVAGTIAALNNSIGVLGVAPSAELYAVKVLGASGSGSVSSIAQGLEWAGNNGMHVANLSLGSPSPSATLEQAVNSATSRGVLVVAASGNSGAGSISYPARYANAMAVGATDQNNNRASFSQYGAGLDIVAPGVNVQSTAPGSTYASLNGTSMATPHVAGAAALVFQKNPSWSNVQIRNHLKNTATSLGSTNLYGSGLVNAEAATR

SEQ ID NO: 62693 - protein, 380 aa, Unidentified
VRSKKLWIVASTALLISVAFSSSIASAAEEAKEKYLIGFNEQEAVSEFVEQVEANDEVAILSEEEEVEIELLHEFETIPVLSVELSPEDVDALELDPAISYIEEDAEVTTMAQSVPWGISRVQAPAAHNRGLTGSGVKVAVLDTGISTHPDLNIRGGASFVPGEPSTQDGEGHGTHVAGTIAALNNNIGVLGVAPSAELYAVKVLGASGSGSVSSIAQGLEWAGLNGMHVANLSLGSPSPSATLEQAVNSATSRGVLVVAASGNSGAGSISYPARYANAMAVGATDQNNNRASFSQYGAGLDIVAPGVNVQSTYPGSTYASLNGTSMAAPHVAGAAALVKQKNPSWSNVQIRNHLKNTATSLGSTNLYGSGLVNAEAATR

SEQ ID NO: 62694 - protein, 380 aa, Unidentified
VRSKKLWIVASTALLISVAFSSSIASAAEEAKEKYLIGFNEQEAVSEFVEQVEANDEVAILSEEEEVEIELLHEFETIPVLSVELSPEDVDALELDPAISYIEEDAEVTTMAQSVPWGISRVQAPAAHNRGLTGRGVKVAVLDTGISTHPDLNIRGGASFVPGEPSTQDGNGHGTHVAGTIAALNNSIGVLGVAPSAELYAVKVLGASGSGAISSIAQGLEWAGNNGMHVANLSLGSPSPSATLEQAVNSATSRGVLVVAASGNSGAGSISYPARYANAMAVGATDQNNNRASFSQYGAGLDIVAPGVNVQSTYPGSTYASLNGTSMATPHVAGAAALVKQKNPSWSNVRIRNHLKNTATSLGSTNLYGSGLVNAEAATR

SEQ ID NO: 62695 - protein, 380 aa, Unidentified
VRSKKLWIVASTALLISVAFSSSIASAAEEAKEKYLIGFNEQEAVSEFVEQVEANDEVAILSEEEEVEIELLHEFETIPVLSVELSPEDVDALELDPAISYIEEDAEVTTMAQSVPWGISRVQAPAAHNRRLTGSGVKVAVLDTGISTHPDLRITGGASFVPGEPSTQDGNGHGTHVAGTIAALNNSIGVLGVAPSAELYAVKVLGASGSGSVSSIAQGLEWAGNNGMHVANLSLGSPSPSATLEQAVNSATSRGVLVVAASGNSGAGSISYPARYANAMAVGATDQNNNRASFSQYGAGLDIVAPGVNVQSTYPGSTYASLNGTSMATPHVAGEAALVKQKNPSWSNVQIRNHLKNTATSLGSTNLYGSGLVNAEAATR

SEQ ID NO: 62696 - protein, 380 aa, Unidentified
VRSKKLWIVASTALLISVAFSSSIASAAEEAKEKYLIGFNEQEAVSEFVEQVEANDEVAILSEEEEVEIELLHEFETIPVLSVELSPEDVDALELDPAISYIEEDAEVTTMAQSVPWGISRVQAPAAHNRGLTGSGVKVAVLDTGISTHPDLNIRGGASFVPGEPSTQDGEGHGTHVAGTIAALNNSIGVLGVAPSAELYAVKVLGASGSGSVSSIAQGLEWAGNNGMHVANLSLGSPSPSATLEQAVNSATSRGVLVVAASGNSGEGSISYPARYANAMAVGATDQNNNRADFSQYGAGLDIVAPGVNVQSTYPGSTYASLNGTSMATPHVAGAAALVKQKNPSWSNVQIRNRLKNTATSLGSTNLYGSGLVNAEAATR

SEQ ID NO: 62697 - protein, 380 aa, Unidentified
VRSKKLWIVASTALLISVAFSSSIASAAEEAKEKYLIGFNEQEAVSEFVEQVEANDEVAILSEEEEVEIELLHEFETIPVLSVELSPEDVDALELDPAISYIEEDAEVTTMAQSVPWGISRVQAPAAHNRGLAGSGVKVAVLDTGISTHPDLNIRGGASFVPGEPSTQDGNGHGTHVAGTIAALNNSIGVLGVAPSAELYAVKVLGASGSGSVSSIAQGLEWAGNNGMHVANLSLGNPSPSATLEQAVNSATSRGVLVVAASGNSGAGSISYPARYANAMAVGATDQNNNHADFSQYGAGLDIVAPGVNVQSTYPGSTYASLNGTSMATPHVAGAAALVKQKNPSWSNVQIRNHLKNTATSLGSTNLYGSGLVNAEAATR

SEQ ID NO: 62698 - protein, 380 aa, Unidentified
VRSKKLWIVASTALLISVAFSSSIASAAEEAKEKYLIGFNEQEAVSEFVEQVEANDEVAILSEEEEVEIELLHEFETIPVLSVELSPEDVDALELDPAISYIEEDAEVTTMAQSVPWGISRVQAPAAHNRRLTGSGVKVAVLDTGISTHPDLNIRGGASFVPGEPSTQDGNGHGTHVAGTIAALNNSIGVLGVAPSAELYAVKVLGASGSGSISSIAQGLEWAGNNGMHVANLSLGSPSPSATLEQAVNSATSRGVLVVAASGNSGAGSISYPARYANAMAVGATDQNNNRASFSQYGAGLDIVAPGVNVQSTYPGSTYASLNGTSMATPHVAGAAVLVKQKNPSWSNVRIRNHLKNTATSLGSTNLYGSGLVNAEAATR

SEQ ID NO: 62699 - protein, 380 aa, Unidentified
VRSKKLWIVASTALLISVAFSSSIASAAEEAKEKYLIGFNEQEAVSEFVEQVEANDEVAILSEEEEVEIELLHEFETIPVLSVELSPEDVDALELDPAISYIEEDAEVTTMAQSVPWGISRVQAPAAHNRGLTGSGVKVAVLDTGISTHPDLNIRGGASFVPGEPSTQDGEGHGTHVAGTIAALNNSIGVLGVAPSAELYAVKVLGASGSGSVSSIAQGLEWAGNNGMHVANLSLGNPSPSATLEQAVNSATSRGVLVVAASGNSGAESISYPARYANAMAVGATDQNNNRASFSQYGAGLDIVAPGVNVQSTYPGSTYASLNGTSMATPHVAGAAALVKQKNPSWSNVQIRNRLKNTATSLGSTNLYGSGLVNAEAATR

SEQ ID NO: 62700 - protein, 380 aa, Unidentified
VRSKKLWIVASTALLISVAFSSSIASAAEEAKEKYLIGFNEQEAVSEFVEQVEANDEVAILSEEEEVEIELLHEFETIPVLSVELSPEDVDALELDPAISYIEEDAEVTTMAQSVPWGISRVQAPAAHRRGLTGRGVKVAVLDTGISTHPDLNIRGGASFVPGEPSTQDGNGHGTHVAGTIAALDNSIGVLGVAPSAELYAVKVLGASGSGSVSSIAQGLEWAGNNGMHVANLSLGSPSPSATLEQAVNSATSRGVLVVAASGNSGAGSISYPARYANAMAVGATDQNNNRASFSQYGAGLDIVAPGVNVQSTYPGSTYASLNGTSMATPHVAGAAALVKQKNPSWSNVQIRNRLKNTATSLGSTNLYGSGLVNAEAATR

SEQ ID NO: 62701 - protein, 380 aa, Unidentified
VRSKKLWIVASTALLISVAFSSSIASAAEEAKEKYLIGFNEQEAVSEFVEQVEANDEVAILSEEEEVEIELLHEFETIPVLSVELSPEDVDALELDPAISYIEEDAEVTTMAQSVPWGISRVQAPAAHNRRLTGRGVKVAVLDTGISTHPDLDITGGASFVPGEPSTQDGNGHGTHVAGTIAALNNSIGVLGVAPSAELYAVKVLGASGSGSVSSIAQGLEWAGNNGMHVANLSLGSPSPSATLEQAVNSATSRGVLVVAASGNSGAGSISYPARYANAMAVGATDQNNNRASFSQYGAGLDIVAPGVNVQSTYPGSTYASLNGTSMATPHVAGAAALVKQKNPSWSNVQIRNHLKNTATSLGSTNLYGSGLVNAEAATR

SEQ ID NO: 62702 - protein, 380 aa, Unidentified
VRSKKLWIVASTALLISVAFSSSIASAAEEAKEKYLIGFNEQEAVSEFVEQVEANDEVAILSEEEEVEIELLHEFETIPVLSVELSPEDVDALELDPAISYIEEDAEVTTMAQSVPWGISRVQAPAAHNRRLTGSGVKVAVLDTGISTHPDLRIRGGASFVPGEPSTQDGNGHGTHVAGTIAALNNSIGVLGVAPSAELYAVKVLGASGSGSVSSIAQGLEWAGNNGMHVANLSLGSPSPSATLEQAVNSATSRGVLVVAASGNSGAGSISYPARYANAMAVGATDQNNNRASFSQYGAGLDIVAPGVNVQSTYPGSTYASLNGTSMATPHVAGAAALVKQKNPSWRNVQIRNRLKNTATSLGSTNLYGSGLVNAEAATR

SEQ ID NO: 62703 - protein, 380 aa, Unidentified
VRSKKLWIVASTALLISVAFSSSIASAAEEAKEKYLIGFNEQEAVSEFVEQVEANDEVAILSEEEEVEIELLHEFETIPVLSVELSPEDVDALELDPAISYIEEDAEVTTMAQSVPWGISRVQAPAAHNRGLTGSGVKVAVLDTGISTHPDLNIRGGASFVPGEPSTQDGEGHGTHVAGTIAALNNSIGVLGVAPSAELYAVKVLGASGSGSVSSIAQGLEWAGNNGMHVANLSLGSPSPSATLEQAVNSATSRGVLVVAASGNSGAESISYPARYANAMAVGATDQNNNRADFSQYGAGLDIVAPGVNVQSTYPGSTYASLNGTSMATPHVAGAAALVKQKNPSWSNVQIRNRLKNTATSLGSTNLYGSGLVNAEAATR

SEQ ID NO: 62704 - protein, 380 aa, Unidentified
VRSKKLWIVASTALLISVAFSSSIASAAEEAKEKYLIGFNEQEAVSEFVEQVEANDEVAILSEEEEVEIELLHEFETIPVLSVELSPEDVDALELDPAISYIEEDAEVTTMAQSVPWGISRVQAPAAHNRRLRGSGVKVAVLDTGISTHPDLRIRGGASFVPGEPSTQDGNGHGTHVAGTIAALNNSIGVLGVAPSAELYAVKVLGASGSGSVSSIAQGLEWAGNNGMHVANLSLGSPSPSATLEQAVNSATSRGVLVVAASGNSGAGSISYPARYANAMAVGATDQNNNRASFSQYGAGLDIVAPGVNVQSTYPGFTYASLNGTSMATPHVAGAAALVKQKNPSWSNVQIRNHLKNTATSLGSTNLYGSGLVNAEAATR

SEQ ID NO: 62705 - protein, 380 aa, Unidentified
VRSKKLWIVASTALLISVAFSSSIASAAEEAKEKYLIGFNEQEAVSEFVEQVEANDEVAILSEEEEVEIELLHEFETIPVLSVELSPEDVDALELDPAISYIEEDAEVTTMAQSVPWGISRVQAPAAHNRGLTGSGVKVAVLDTGISTHPDLNIRGGASFVPGEPSTQDGQGHGTHVAGTIAALNNSIGVLGVAPSAELYAVKVLGASGSGNVSSIAQGLEWAGNFGMHVANLSLGSPSPSATLEQAVNSATSRGVLVVAASGNSGAGSISYPARYANAMAVGATDQNNNRASFSQYGFGLDIVAPGVNVQSTYPGSTYASLNGTSMATPHVAGAAALVKQKNPSWSNVQIRNHLKNTATSLGSTNLYGSGLVNAEAATR

SEQ ID NO: 62706 - protein, 380 aa, Unidentified
VRSKKLWIVASTALLISVAFSSSIASAAEEAKEKYLIGFNEQEAVSEFVEQVEANDEVAILSEEEEVEIELLHEFETIPVLSVELSPEDVDALELDPAISYIEEDAEVTTMAQSVPWGISRVQAPAAHNRGLTGRGVKVAVLDSGISTHPDLNIRGGASFVPGEPSTQDGNGHGTHVAGTIAALNNRIGVLGVAPSAELYAVKVLGASGSGSVSSIAQGLEWAGNNRMHVANLSLGSPSPSATLEQAVNSATSRGVLVVAASGNSGAGSISYPARYANAMAVGATDQNNNRASFSQYGAGLDIVAPGVNVQSTYPGSTYASLNGTSMATPHVAGAAALVKQKNPSWSNVQIRNHLKNTATSLGSTNLYGSGLVNAEAATR

SEQ ID NO: 62707 - protein, 380 aa, Unidentified
VRSKKLWIVASTALLISVAFSSSIASAAEEAKEKYLIGFNEQEAVSEFVEQVEANDEVAILSEEEEVEIELLHEFETIPVLSVELSPEDVDALELDPAISYIEEDAEVTTMAQSVPWGISRVQAPAAHNRGLTGRGVKVAVLDTGISTHPDLNIRGGASFVPGEPSTQDGNGHGTHVAGTIAALNNSIGVLGVAPSAELYAVKVLGASGSGSVSSIAQGLEWAGNNRMHVANLSLGSPSPSATLEQAVNSATSRGVLVVAASGNSGAGSISYPARYANAMAVGATDQNNNRASFSQYGAGLDIVAPGVNVQSTYPGSTYASLNGTSMATPHVAGAAALVKQKNPSWSFVQIRNHLKNTATSLGSTNLYGSGLVHAEAATR

SEQ ID NO: 62708 - protein, 380 aa, Unidentified
VRSKKLWIVASTALLISVAFSSSIASAAEEAKEKYLIGFNEQEAVSEFVEQVEANDEVAILSEEEEVEIELLHEFETIPVLSVELSPEDVDALELDPAISYIEEDAEVTTMAQSVPWGISRVQAPAAHNRGLTGRGVKVAVLDTGISTHPDLNIRGGASFVPGEPSTQDGNGHGTHVAGTIAALNNSIGVLGVAWSAELYAVKVLGASGSGSVSSIAQGLEWAGNNRMHVANLSLGSPSPSATLEQAVNSATSRGVLVVAASGNSGAGSISYPARYANAMAVGATDQNNNRASFSQYGAGLDIVAPGINVQSTYPGSTYASLNGTSMATPHVAGAAALVKQKNPSWSNVQIRNHLKNTATSLGSTNLYGSGLVNAEAATR

SEQ ID NO: 62709 - protein, 380 aa, Unidentified
VRSKKLWIVASTALLISVAFSSSIASAAEEAKEKYLIGFNEQEAVSEFVEQVEANDEVAILSEEEEVEIELLHEFETIPVLSVELSPEDVDALELDPAISYIEEDAEVTTMAQSVPWGISRVQAPAAHNRGLTGRGVKVAVLDTGISTHPDLRITGGASFVPGEPSTQDGNGHGTHVAGTIAALNNSIGVLGVAPSAELYAVKVLGASGSGSVSSIAQGLEWAGNNGMHVANLSLGSPSPSATLEQAVNSATSRGVLVVAASGNSGAGSISYPARYANAMAVGATDQNNNRASFSQYGAGLDIVAPGVNVQSTYPGSTYASLNGTSMATPHVAGAAALVKQKNPSWRNVQIRNHLKNTATSLGSTNLYGSGLVNAEAATR

SEQ ID NO: 62710 - protein, 380 aa, Unidentified
VRSKKLWIVASTALLISVAFSSSIASAAEEAKEKYLIGFNEQEAVSEFVEQVEANDEVAILSEEEEVEIELLHEFETIPVLSVELSPEDVDALELDPAISYIEEDAEVTTMAQSVPWGISRVQAPAAHNRGLTGSGVKVAVLDTGISTHPDLNIRGGASFVPGEPSTQDGEGHGTHVAGTIAALNNSIGVLGVAPSAELYAVKVLGASGSGSVSSIAQGLEWAGNNGMHVANLSLGSPSPSATLEQAVNSATSRGVLVVAASGNSGEESISYPARYANAMAVGATDQNNNRASFSQYGAGLDIVAPGVNVQSTYPGSTYASLNGTSMATPHVAGAAALVKQKNPSWSNVQIRNRLKNTATSLGSTNLYGSGLVNAEAATR

SEQ ID NO: 62711 - protein, 380 aa, Unidentified
VRSKKLWIVASTALLISVAFSSSIASAAEEAKEKYLIGFNEQEAVSEFVEQVEANDEVAILSEEEEVEIELLHEFETIPVLSVELSPEDVDALELDPAISYIEEDAEVTTMAQSVPWGISRVQAPAAYNRGLTGRGVKVAVLDSGISTHPDLNIRGGASFVPGEPSTQDGNGHGTHVAGTIAALNNSIGVLGVAWSAELYAVKVLGASGSGSVSSIAQGLEWAGNNGMHVANLSLGSPSPSATLEQAVNSATSRGVLVVAASGNSGAGSISYPARYANAMAVGATDQNNNRASFSQYGAGLDIVAPGVNVQSTYPGSTYASLNGTSMATPHVAGAAALVKQKNPSWSNVQIRNHLKNTATSLGSTNLYGSGLVNAEAATR

SEQ ID NO: 62712 - protein, 380 aa, Unidentified
VRSKKLWIVASTALLISVAFSSSIASAAEEAKEKYLIGFNEQEAVSEFVEQVEANDEVAILSEEEEVEIELLHEFETIPVLSVELSPEDVDALELDPAISYIEEDAEVTTMAQSRPWGIARVQAPAAHNRRLTGSGVKVAVLDTGISTHPDLNIRGGASFVPGEPSTQDGNGHGTHVAGTIAALNNSIGVLGVAPSAELYAVKVLGASGSGSVSSIAQGLEWAGNNGMHVANLSLGSPSPSATLEQAVNSATSRGVLVVAASGNSGAGSISYPARYANAMAVGATDQNNNRASFSQYGAGLDIVAPGVNVQSTYPGSTYASLNGTSMATPHVAGAAALVKQKNPSWRNVQIRNHLKNTATSLGSTNLYGSGLVNAEAATR

SEQ ID NO: 62713 - protein, 380 aa, Unidentified
VRSKKLWIVASTALLISVAFSSSIASAAEEAKEKYLIGFNEQEAVSEFVEQVEANDEVAILSEEEEVEIELLHEFETIPVLSVELSPEDVDALELDPAISYIEEDAEVTTMAQSVPWGISRVQAPAAHNRGLTGSGVKVAVLDSGISTHPDLNIRGGASFVPGEPSTQDGNGHGTHVAGTIAALNNSIGVLGVAWSAELYAVKVLGASGSGSVSSIAQGLEWAGNNGMHVANLSLGSPSPSATLEQAVNSATSRGVLVVAASGNLGAGSISYPARYANAMAVGATDQNNNRASFSQYGAGLDIVAPGVNVQSTAPGSTYASLNGTSMATPHVAGAAALVKQKNPSWSNVQIRNHLKNTATSLGSTNLYGSGLVNAEAATR

SEQ ID NO: 62714 - protein, 380 aa, Unidentified
VRSKKLWIVASTALLISVAFSSSIASAAEEAKEKYLIGFNEQEAVSEFVEQVEANDEVAILSEEEEVEIELLHEFETIPVLSVELSPEDVDALELDPAISYIEEDAEVTTMAQSVPWGISRVQAPAAHNRGLTGSGVKVAVLDTGISTHPDLNIRGGASFVPGEPSTQDGEGHGTHVAGTIAALNNSIGVLGVAPSAELYAVKVLGASGAGSVSSIAQGLEWAGNNGMHVANLSLGSPSPSATLEQAVNSATSRGVLVVAASGNSGAESISYPARYANAMAVGATDQNNNRASFSQYGAGLDIVAPGVNVQSTYPGSTYASLNGTSMATPHVAGAAALVKQKNPSWSNVQIRNRLKNTATSLGSTNLYGSGLVNAEAATR

SEQ ID NO: 62715 - protein, 380 aa, Unidentified
VRSKKLWIVASTALLISVAFSSSIASAAEEAKEKYLIGFNEQEAVSEFVEQVEANDEVAILSEEEEVEIELLHEFETIPVLSVELSPEDVDALELDPAISYIEEDAEVTTMAQSVPWGISRVQAPAAHRRRLTGSGVKVAVLDTGISTHPDLRIRGGASFVPGEPSTQDGNGHGTHVAGTIAALDNSIGVLGVAPSAELYAVKVLGASGSGSVSSIAQGLEWAGNNGMHVANLSLGSPSPSATLEQAVNSATSRGVLVVAASGNSGAGSISYPARYANAMAVGATDQNNNRASFSQYGAGLDIVAPGVNVQSTYPGSTYASLNGTSMATPHVAGAAALVKQKNPSWSNVQIRNHLKNTATSLGSTNLYGSGLVNAEAATR

SEQ ID NO: 62716 - protein, 380 aa, Unidentified
VRSKKLWIVASTALLISVAFSSSIASAAEEAKEKYLIGFNEQEAVSEFVEQVEANDEVAILSEEEEVEIELLHEFETIPVLSVELSPEDVDALELDPAISYIEEDAEVTTMAQSVPWGISRVQAPAAHNRGLTGSGFKVAVLDTGISTHPDLNIRGGASFVPGEPSTQDGNGHGTHVAGTIAALNNSIGVLGVAPSAELYAVKVLGASGSGSVSSIAQGLEWAGNNGMHVANLSLGSPSPSATLEQAVNSATSRGVLVVAASGNSGAGSISYPARYANAMAVGATDQNNNRASFSQYGEGLDIVAPGVNVQSTYPGSAYASLNGTSMATPHVAGAAALVKQKNPSWSNVQIRNHLKNTATNLGSTNLYGSGLVNAEAATR

SEQ ID NO: 62717 - protein, 380 aa, Unidentified
VRSKKLWIVASTALLISVAFSSSIASAAEEAKEKYLIGFNEQEAVSEFVEQVEANDEVAILSEEEEVEIELLHEFETIPVLSVELSPEDVDALELDPAISYIEEDAEVTTMAQSVPWGISRVQAPAAHNRGLAGSGVKVAVLDTGISTHPDLNIRGGASFVPGEPSTQDGNGHGTHVAGTIAALNNSIGVLGVAPSAELYAVKVLGASGSGSVSSIAQGLEWAGNNGMHVANLSLGNPSPSATLEQAVNSATSRGVLVVAASGNSGAGSISYPARYANAMAVGATDQNNNRASFSQYGAGLDIVAPGVNVQSTEPGSTYASLNGTSMATPHVAGAAALVKQKNPSWSNVQIRNHLKNTATSLGSTNLYGSGLVNAFAATR

SEQ ID NO: 62718 - protein, 380 aa, Unidentified
VRSKKLWIVASTALLISVAFSSSIASAAEEAKEKYLIGFNEQEAVSEFVEQVEANDEVAILSEEEEVEIELLHEFETIPVLSVELSPEDVDALELDPAISYIEEDAEVTTMAQSVPWGISRVQAPAAHNRGLTAFGVRVAVLDTGISTHPDLNIRGGASFVPGEPSTQDGEGHGTHVAGTIAALNNSIGVLGVAPSAELYAVKVLGASGSGSVSSIAQGLEWAGNNGMHVANLSLGSPSPSATLEQAVNSATSRGVLVVAASGNSGAGSISYPARYANAMAVGATDQNNNRASFSQYGAGLDIVAPGVNVQSTYPGSTYASLNGTSMATPHVAGAAALVKQKNPSWSNVQIRNHLKNTATSLGSTNLYGSGLVNAEAATR

SEQ ID NO: 62719 - protein, 380 aa, Unidentified
VRSKKLWIVASTALLISVAFSSSIASAAEEAKEKYLIGFNEQEAVSEFVEQVEANDEVAILSEEEEVEIELLHEFETIPVLSVELSPEDVDALELDPAISYIEEDAEVTTMAQSVPWGISRVQAPASHNRGLTGSGVKVAVLDTGISTHPDLNIRGGASFVPGEPSTQDGNGHGTHVAGTIAALNNSIGVLGVAPSAELYAVKVLGASGSGSVSSIAQGLEWAGNNGMHVANLSLGNPSPSATLEQAVNSATSRGVLVVAASGNSGEGSISYPARYANAMAVGATDQNNNHASFSQYGAGLDIVAPGVNVQSTYPGSTYASLNGTSMATPHVAGAAALVKQKNPSWSNVQIRNHLKNTATSLGSTNLYGSGLVNAEAATR

SEQ ID NO: 62720 - protein, 380 aa, Unidentified
VRSKKLWIVASTALLISVAFSSSIASAAEEAKEKYLIGFNEQEAVSEFVEQVEANDEVAILSEEEEVEIELLHEFETIPVLSVELSPEDVDALELDPAISYIEEDAEVTTMAQSVPWGISRVQAPAAHRRGLTGRGVKVAVLDTGISTHPDLDIRGGASFVPGEPSTQDGNGHGTHVAGTIAALNNSIGVLGVAPSAELYAVKVLGASGSGSVSSIAQGLEWAGNNGMHVANLSLGSPSPSATLEQAVNSATSRGVLVVAASGNSGAGSISYPARYANAMAVGATDQNNNRASFSQYGAGLDIVAPGVNVQSTYPGSTYASLNGTSMATPHVAGAAALVKQKNPSWSNVQIRNRLKNTATSLGSTNLYGSGLVNAEAATR

SEQ ID NO: 62721 - protein, 380 aa, Unidentified
VRSKKLWIVASTALLISVAFSSSIASAAEEAKEKYLIGFNEQEAVSEFVEQVEANDEVAILSEEEEVEIELLHEFETIPVLSVELSPEDVDALELDPAISYIEEDAEVTTMAQSVPWGISRVQAPAAHNRGLTGSGVKVAVLDTGISTHPDLNIRGGASFVPGEPSTQDGEGHGTHVAGTIAALNNSIGVLGVAPSAELYAVKVLGASGSGSVSSIAQGLEWAGNNGMHVANLSLGSPSPSATLEQAVNSATSRGVLVVAASGNSGAESISYPARYANAMAVGATDQNNNRASFSQYGAGLDIVAPGVNVQSTYPGSTYASLNGTSMATPHVAGAAALVKQKNPSWSNVQIRNRLKNTATSLGSTNLYGSGLVNAFAATR

SEQ ID NO: 62722 - protein, 380 aa, Unidentified
VRSKKLWIVASTALLISVAFSSSIASAAEEAKEKYLIGFNEQEAVSEFVEQVEANDEVAILSEEEEVEIELLHEFETIPVLSVELSPEDVDALELDPAISYIEEDAEVTTMAQSVSWGISRVQAPAAHNRGLTGSGVKVAVLDTGISTHPDLNIRGGASFVPGEPSTQDGNGHGTHVAGTIAALNNRIGVLGVAPSAELYAVKVLGASGSGSVSSIAQGLEWAGNNRMHVANLSLGSPSPSATLEQAVNSATSRGVLVVAASGNSGAGSISYPARYANAMAVGATDQNNNRASFSQYGAGLDIVAPGVNVQSTYPGSTYASLNGTSMATPHVAGAAALVKQKNPSRSNVQIRNHLKNTATSLGSTNLYGSGLVNAEAATR

SEQ ID NO: 62723 - protein, 380 aa, Unidentified
VRSKKLWIVASTALLISVAFSSSIASAAEEAKEKYLIGFNEQEAVSEFVEQVEANDEVAILSEEEEVEIELLHEFETIPVLSVELSPEDVDALELDPAISYIEEDAEVTTMAQSVPWGISRVQAPAAHNRRLTGSGVKVAVLDTGISTHPDLNIRGGASFVPGEPSTQDGNGHGTHVAGTIAALNNSIGVLGVAPSAELYAVKVLGASGSGSVSSIAQGLEWAGANGMHVANLSLGSPSPSATLEQAVNSATSRGVLVVAASGNSGAGSISYPARYANAMAVGATDQNNNRASFSQYGAGLDIVAPGVNVQSTYPGSTYFSLNGTSMATPHVAGAAALVKQKNPSWSNVQIRNHLKNTATSLGSTNLYGSGLVRAEAATR

SEQ ID NO: 62724 - protein, 380 aa, Unidentified
VRSKKLWIVASTALLISVAFSSSIASAAEEAKEKYLIGFNEQEAVSEFVEQVEANDEVAILSEEEEVEIELLHEFETIPVLSVELSPEDVDALELDPAISYIEEDAEVTTMAQSVPWGISRVQAPAAHNRGLTGSGVKVAVLDTGISTHPDLNIRGGASFVPGEPSTQDGNGHGTHVAGTIAALNNSIGVLGVAPSAELYAVKVLGASGSGSVSSIAQGLEWAGNNGMHVANLSLGNPSPSATLEQAVNSATSRGVLVVAASGNSGEGSISYPARYANAMAVGATDQNNNHASFSQYGAGLDIVAPGVNVQSTYPGSTYASLNGTSMATPHVAGAAALVKQKNPSWSNVQIRNRLKNTATSLGSTNLYGSGLVNAEAATR

SEQ ID NO: 62725 - protein, 380 aa, Unidentified
VRSKKLWIVASTALLISVAFSSSIASAAEEAKEKYLIGFNEQEAVSEFVEQVEANDEVAILSEEEEVEIELLHEFETIPVLSVELSPEDVDALELDPAISYIEEDAEVTTMAQSVPWGISRVQAPAAHNRGLTGSGVKVAVLDTGISTHPDLNIRGGASFVPGEPSTQDGNGHGTHVAGTIAALDNSIGVLGVAPSAELYAVKVLGASGGGSVSSIAQGLEWAGNNGMHVANLSLGSPSPSATLEQAVNSATSRGVLVVAASGNSGAGSISYPARYANAMAVGATDQNNNRASFSQYGAGLDIVAPGVNVQSTYPGSTYASLNGTSMATPHVAGAAVLVKQKNPSWSNVRIRNHLKNTATSLGSTNLYGSGLVNAEAATR

SEQ ID NO: 62726 - protein, 380 aa, Unidentified
VRSKKLWIVASTALLISVAFSSSIASAAEEAKEKYLIGFNEQEAVSEFVEQVEANDEVAILSEEEEVEIELLHEFETIPVLSVELSPEDVDALELDPAISYIEEDAEVTTMAQSVPWGIARVQAPAAHNRRLTGRGVKVAVLDTGISTHPDLRIRGGASFVPGEPSTQDGNGHGTHVAGTIAALNNSIGVLGVAPSAELYAVKVLGASGSGSVSSIAQGLEWAGNNGMHVANLSLGSPSPSATLEQAVNSATSRGVLVVAASGNSGAGSISYPARYANAMAVGATDQNNNRASFSQYGAGLDIVAPGVNVQSTYPGSTYASLNGTSMATPHVAGAAALVKQKNPSWSNVQIRNHLKNTATSLGSTNLYGSGLVNAEAATR

SEQ ID NO: 62727 - protein, 380 aa, Unidentified
VRSKKLWIVASTALLISVAFSSSIASAAEEAKEKYLIGFNEQEAVSEFVEQVEANDEVAILSEEEEVEIELLHEFETIPVLSVELSPEDVDALELDPAISYIEEDAEVTTMAQSVPWGISRVQAPAAHNRGLTGSGVKVAVLDTGISTHPDLRIRGGASFVPGEPSTQDGNGHGTHVAGTIAALDNSIGVLGVAPSAELYAVKVLGASGSGSVSSIAQGLEWAGNNGMHVANLSLGSPSPSATLEQAVNSATSRGVLVVAASGNSGAGSISYPARYANAMAVGATDQNNNRASFSQYGAGLDIVAPGVNVQSTYPGSTYASLNGTSMATPHVAGEAALVKQKNPSWSNVQIRNRLKNTATSLGSTNLYGSGLVNAEAATR

SEQ ID NO: 62728 - protein, 380 aa, Unidentified
VRSKKLWIVASTALLISVAFSSSIASAAEEAKEKYLIGFNEQEAVSEFVEQVEANDEVAILSEEEEVEIELLHEFETIPVLSVELSPEDVDALELDPAISYIEEDAEVTTMAQSVPWGISRVQAPAAHNRRLTGSGVKVAVLDTGISTHPDLNITGGASFVPGEPSTQDGNGHGTHVAGTIAALNNSIGVLGVAPSAELYAVKVLGASGSGSVSSIAQGLEWAGANGMHVANLSLGSPSPSATLEQAVNSATSRGVLVVAASGNSGAGSISYPARYANAMAVGATDQNNNRASFSQYGAGLDIVAPGVNVQSTYPGSTYASLNGTSMATPHVAGAAALVKQKNPSWSNVQIRNHLKNTATSLGSTNLYGSGLVRAEAATR

SEQ ID NO: 62729 - protein, 380 aa, Unidentified
VRSKKLWIVASTALLISVAFSSSIASAAEEAKEKYLIGFNEQEAVSEFVEQVEANDEVAILSEEEEVEIELLHEFETIPVLSVELSPEDVDALELDPAISYIEEDAEVTTMAQSVPWGISRVQAPAAHNRGLAGSGVKVAVLDTGISTHPDLNIRGGASFVPGEPSTQDGNGHGTHVAGTIAALNNSIGVLGVAPSAELYAVKVLGASGAGGLSSIAQGLEWAGNNGMHVANLSLGSPSPSATLEQAVNSATSRGVLVVAASGNSGAGSISYPARYANAMAVGATDQNNNRASFSQYGAGLDIVAPGVNVQSTYPGSTYASLNGTSMATPHVAGAAALVKQKNPSWSNVQIRNHLKNTATSLGSTNLYGSGLVNAEAATR

SEQ ID NO: 62730 - protein, 380 aa, Unidentified
VRSKKLWIVASTALLISVAFSSSIASAAEEAKEKYLIGFNEQEAVSEFVEQVEANDEVAILSEEEEVEIELLHEFETIPVLSVELSPEDVDALELDPAISYIEEDAEVTTMAQSVPWGISRVQAPAAHRRGLTGRGVKVAVLDTGISTHPDLNIRGGASFVPGEPSTQDGNGHGTHVAGTIAALDNSIGVLGVAPSAELYAVKVLGASGGGSVSSIAQGLEWAGNNGMHVANLSLGSPSPSATLEQAVNSATSRGVLVVAASGNSGAGSISYPARYANAMAVGATDQNNNRASFSQYGAGLDIVAPGVNVQSTYPGSTYASLNGTSMATPHVAGAAALVKQKNPSWSNVQIRNHLKNTATSLGSTNLYGSGLVNAEAATR

SEQ ID NO: 62731 - protein, 380 aa, Unidentified
VRSKKLWIVASTALLISVAFSSSIASAAEEAKEKYLIGFNEQEAVSEFVEQVEANDEVAILSEEEEVEIELLHEFETIPVLSVELSPEDVDALELDPAISYIEEDAEVTTMAQSRPWGISRVQAPAAHNRRLTGRGVKVAVLDTGISTHPDLRIRGGASFVPGEPSTQDGNGHGTHVAGTIAALNNSIGVLGVAPSAELYAVKVLGASGSGSVSSIAQGLEWAGNNGMHVANLSLGSPSPSATLEQAVNSATSRGVLVVAASGNSGAGSISYPARYANAMAVGATDQNNNRASFSQYGAGLDIVAPGVNVQSTYPGSTYASLNGTSMATPHVAGAAALVKQKNPSWSNVQIRNHLKNTATSLGSTNLYGSGLVNAEAATR

SEQ ID NO: 62732 - protein, 380 aa, Unidentified
VRSKKLWIVASTALLISVAFSSSIASAAEEAKEKYLIGFNEQEAVSEFVEQVEANDEVAILSEEEEVEIELLHEFETIPVLSVELSPEDVDALELDPAISYIEEDAEVTTMAQSVPWGISRVQAPAAHNRRLTGRGVKVAVLDTGISTHPDLRIRGGASFVPGEPSTQDGNGHGTHVAGTIAALDNSIGVLGVAPSAELYAVKVLGASGSGSVSSIAQGLEWAGNNGMHVANLSLGSPSPSATLEQAVNSATSRGVLVVAASGNSGAGSISYPARYANAMAVGATDQNNNRASFSQYGAGLDIVAPGVNVQSTYPGSTYASLNGTSMATPHVAGAAALVKQKNPSWSNVQIRNHLKNTATSLGSTNLYGSGLVNAEAATR

SEQ ID NO: 62733 - protein, 380 aa, Unidentified
VRSKKLWIVASTALLISVAFSSSIASAAEEAKEKYLIGFNEQEAVSEFVEQVEANDEVAILSEEEEVEIELLHEFETIPVLSVELSPEDVDALELDPAISYIEEDAEVTTMAQSVPWGISRVQAPAAHNRGLTGRGVKVAVLDTGISTHPDLNIRGGASFVPGEPSTQDGNGHGTHVAGTIAALDNSIGVLGVAPSAELYAVKVLGASGSGSVSSIAQGLEWAGNNGMHVANLSLGSPSPSATLEQAVNSATSRGVLVVAASGNSGAGSISYPARYANAMAVGATDQNNNRASFSQYGAGLDIVAPGVNVQSTYPGSTYASLNGTSMATPHVAGAAVLVKQKNPSWSNVQIRNRLKNTATSLGSTNLYGSGLVNAEAATR

SEQ ID NO: 62734 - protein, 380 aa, Unidentified
VRSKKLWIVASTALLISVAFSSSIASAAEEAKEKYLIGFNEQEAVSEFVEQVEANDEVAILSEEEEVEIELLHEFETIPVLSVELSPEDVDALELDPAISYIEEDAEVTTMAQSVPWGISRVQAPASHNRGLTGSGVKVAVLDTGISTHPDLNIRGGASFVPGEPSTQDGNGHGTHVAGTIAALNNSIGVLGVAPSAELYAVKVLGASGSGSLSSIAQGLEWAGNNGMHVANLSLGSPSPSATLEQAVNSATSRGVLVVAASGNSGAGSISYPARYANAMAVGATDQNNNRADFSQYGAGLDIVAPGVNVQSTYPGSTYASLNGTSMATPHVAGAAALVKQKNPSWSNVQIRNRLKNTATSLGSTNLYGSGLVNAEAATR

SEQ ID NO: 62735 - protein, 380 aa, Unidentified
VRSKKLWIVASTALLISVAFSSSIASAAEEAKEKYLIGFNEQEAVSEFVEQVEANDEVAILSEEEEVEIELLHEFETIPVLSVELSPEDVDALELDPAISYIEEDAEVTTMAQSVPWGISRVQAPAAHNRGLTGSGVKVAVLDTGISTHPDLNIRGGASFVPGEPSTQDGNGHGTHVAGTIAALNNNIGVLGVAPSAELYAVKVLGASGSGSLSSIAQGLEWAGNNRMHVANLSLGDPSPSATLEQAVNSATSRGVLVVAASGNSGAGSISYPARYANAMAVGATDQNNNRASFSQYGAGLDIVAPGVNVQSTYPGSTYASLNGTSMATPHVAGAAALVKQKNPSWSNVQIRNHLKNTATSLGSTNLYGSGLVNAEAATR

SEQ ID NO: 62736 - protein, 380 aa, Unidentified
VRSKKLWIVASTALLISVAFSSSIASAAEEAKEKYLIGFNEQEAVSEFVEQVEANDEVAILSEEEEVEIELLHEFETIPVLSVELSPEDVDALELDPAISYIEEDAEVTTMAQSVPWGISRVQAPAAHRRGLTGSGVKVAVLDTGISTHPDLNIRGGASFVPGEPSTQDGNGHGTHVAGTIAALDNSIGVLGVAPSAELYAVKVLGASGSGSVSSIAQGLEWAGNNGMHVANLSLGSPSPSATLEQAVNSATSRGVLVVAASGNSGAGSISYPARYANAMAVGATDQNNNRASFSQYGAGLDIVAPGVNVQSTYPGSTYASLNGTSMATPHVAGAAALVKQKNPSWRNVQIRNRLKNTATSLGSTNLYGSGLVNAEAATR

SEQ ID NO: 62737 - protein, 380 aa, Unidentified
VRSKKLWIVASTALLISVAFSSSIASAAEEAKEKYLIGFNEQEAVSEFVEQVEANDEVAILSEEEEVEIELLHEFETIPVLSVELSPEDVDALELDPAISYIEEDAEVTTMAQSVPWGISRVQAPAAHNRGLTASGVKVAVLDTGISTHPDLWIRGGASFVPGEPSTQDGNGHGTHVAGTIAALNNSIGVLGVAPSAELYAVKVLGASGSGSVSSIAQGLEWAGLNGMHVANLSLGSPSPSATLEQAVNSATSRGVLVVAASGNSGAGSISYPARYANAMAVGATDQNNNRASFSQYGAGLDIVAPGVNVQSTYPGSTYASLNGTSMATPHVAGAAALVKQKNGSWSNVQIRNHLKNTATSLGSTNLYGSGLVNAEAATR

SEQ ID NO: 62738 - protein, 380 aa, Unidentified
VRSKKLWIVASTALLISVAFSSSIASAAEEAKEKYLIGFNEQEAVSEFVEQVEANDEVAILSEEEEVEIELLHEFETIPVLSVELSPEDVDALELDPAISYIEEDAEVTTMAQSVPWGISRVQAPAAHNRGLTGRGVKVAVLDTGISTHPDLNIRGGASFVPGEPSTQDGNGHGTHVAGTIAALNNSIGVLGVAPSAELYAVKVLGASGGGSISSIAQGLEWAGNNGMHVANLSLGSPSPSATLEQAVNSATSRGVLVVAASGNSGAGSISYPARYANAMAVGATDQNNNRASFSQYGAGLDIVAPGVNVQSTYPGSTYASLNGTSMATPHVAGAAALVKQKNPSWSNVRIRNHLKNTATSLGSTNLYGSGLVNAEAATR

SEQ ID NO: 62739 - protein, 380 aa, Unidentified
VRSKKLWIVASTALLISVAFSSSIASAAEEAKEKYLIGFNEQEAVSEFVEQVEANDEVAILSEEEEVEIELLHEFETIPVLSVELSPEDVDALELDPAISYIEEDAEVTTMAQSVPWGISRVQAPAAHNRRLTGRGVKVAVLDTGISTHPDLNIRGGASFVPGEPSTQDGNGHGTHVAGTIAALNNSIGVLGVAPSAELYAVKVLGASGSGSVSSIAQGLEWAGNNGMHVANLSLGSPSPSATLEQAVNSATSRGVLVVAASGNSGAGSISYPARYANAMAVGATDQNNNRASFSQYGAGLDIVAPGVNVQSTYPGSAYFSLNGTSMATPHVAGAAALVKQKNPSWSNVQIRNHLKNTATSLGSTNLYGSGLVNAEAATR

SEQ ID NO: 62740 - protein, 380 aa, Unidentified
VRSKKLWIVASTALLISVAFSSSIASAAEEAKEKYLIGFNEQEAVSEFVEQVEANDEVAILSEEEEVEIELLHEFETIPVLSVELSPEDVDALELDPAISYIEEDAEVTTMAQSVPWGIARVQAPAAHNRGLRGSGVKVAVLDTGISTHPDLNIRGGASFVPGEPSTQDGNGHGTHVAGTIAALNNRIGVLGVAPSAELYAVKVLGASGSGSVSSIAQGLEWAGNNGMHVANLSLGSPSPSATLEQAVNSATSRGVLVVAASGNSGAGSISYPARYANAMAVGATDQNNNRASFSQYGAGLDIVAPGVNVQSTYPGFTYASLNGTSMATPHVAGAAALVKQKNPSWSNVQIRNHLKNTATSLGSTNLYGSGLVNAEAATR

SEQ ID NO: 62741 - protein, 380 aa, Unidentified
VRSKKLWIVASTALLISVAFSSSIASAAEEAKEKYLIGFNEQEAVSEFVEQVEANDEVAILSEEEEVEIELLHEFETIPVLSVELSPEDVDALELDPAISYIEEDAEVTTMAQSVPWGISRVQAPAAHNRGLTGSGVKVAVLDTGISTHPDLNIRGGASFVPGEPSTQDGNGHGTHVAGTIAALNNSIGVLGVAPSAELYAVKVLGASGSGSVSSIAQGLEWAGNNGMHVANLSLGSPSPSATLEQAVNSATSRGVLVVAASGNSGEGSISYPARYANAMAVGATDQNNNHASFSQYGAGLDIVAPGVNVQSTYPGSTYASLNGTSMATPHVAGAAALVKQKNPSWSNVQIRNRLKNTATSLGSTNLYGSGLVNAFAATR

SEQ ID NO: 62742 - protein, 380 aa, Unidentified
VRSKKLWIVASTALLISVAFSSSIASAAEEAKEKYLIGFNEQEAVSEFVEQVEANDEVAILSEEEEVEIELLHEFETIPVLSVELSPEDVDALELDPAISYIEEDAEVTTMAQSVPWGISRVQAPAAHNRGLTGRGVKVAVLDTGISTHPDLNIRGGASFVPGEPSTQDGNGHGTHVAGTIAALNNSIGVLGVAWSAELYAVKVLGASGSGSVSSIAQGLEWAGNNGMHVANLSLGSPSPSATLEQAVNSATSRGVLVVAASGNSGAGSISYPARYANAMAVGATDQNNNRASFSQYGAGLDIVAPGVNVQSTAPGSTYASLNGTSMATPHVAGAAALVFQKNPSWSNVQIRNHLKNTATSLGSTNLYGSGLVNAEAATR

SEQ ID NO: 62743 - protein, 380 aa, Unidentified
VRSKKLWIVASTALLISVAFSSSIASAAEEAKEKYLIGFNEQEAVSEFVEQVEANDEVAILSEEEEVEIELLHEFETIPVLSVELSPEDVDALELDPAISYIEEDAEVTTMAQSVPWGISRVQAPAAHRRGLTGRGVKVAVLDTGISTHPDLNIRGGASFVPGEPSTQDGNGHGTHVAGTIAALNNSIGVLGVAPSAELYAVKVLGASGSGSISSIAQGLEWAGNNGMHVANLSLGSPSPSATLEQAVNSATSRGVLVVAASGNSGAGSISYPARYANAMAVGATDQNNNRASFSQYGAGLDIVAPGVNVQSTYPGSTYASLNGTSMATPHVAGAAALVKQKNPSWSNVQIRNRLKNTATSLGSTNLYGSGLVNAEAATR

SEQ ID NO: 62744 - protein, 380 aa, Unidentified
VRSKKLWIVASTALLISVAFSSSIASAAEEAKEKYLIGFNEQEAVSEFVEQVEANDEVAILSEEEEVEIELLHEFETIPVLSVELSPEDVDALELDPAISYIEEDAEVTTMAQSVPWGISRVQAPAAHNRGLAGSGVKVAVLDTGISTHPDLNIRGGASFVPGEPSTQDGNGHGTHVAGTIAALNNSIGVLGVAPSAELYAVKVLGASGSGSLSSIAQGLEWAGNNGMHVANLSLGSPSPSATLEQAVNSATSRGVLVVAASGNSGEGSISYPARYANAMAVGATDQNNNRASFSQYGAGLDIVAPGVNVQSTYPGSTYASLNGTSMATPHVAGAAALVKQKNPSWSNVQIRNRLKNTATSLGSTNLYGSGLVNAEAATR

SEQ ID NO: 62745 - protein, 380 aa, Unidentified
VRSKKLWIVASTALLISVAFSSSIASAAEEAKEKYLIGFNEQEAVSEFVEQVEANDEVAILSEEEEVEIELLHEFETIPVLSVELSPEDVDALELDPAISYIEEDAEVTTMAQSVPWGISRVQAPASHNRGLTGSGVKVAVLDTGISTHPDLNIRGGASFVPGEPSTQDGNGHGTHVAGTIAALNNSIGVLGVAPSAELYAVKVLGASGSGSVSSIAQGLEWAGNNGMHVANLSLGSPSPSATLEQAVNSATSRGVLVVAASGNSGEGSISYPARYANAMAVGATDQNNNHASFSQYGAGLDIVAPGVNVQSTYPGSTYASLNGTSMATPHVAGAAALVKQKNPSWSNVQIRNRLKNTATSLGSTNLYGSGLVNAEAATR

SEQ ID NO: 62746 - protein, 380 aa, Unidentified
VRSKKLWIVASTALLISVAFSSSIASAAEEAKEKYLIGFNEQEAVSEFVEQVEANDEVAILSEEEEVEIELLHEFETIPVLSVELSPEDVDALELDPAISYIEEDAEVTTMAQSVPWGISRVQAPAAHNRGLLGSGVKVAVLDTGISTHPDLNIRGGASFVPGEPSTQDGNGHGTHVAGTIAALNNNIGVLGVAPSAELYAVKVLGASGSGSVSSIAQGLEWAGNNGMHVANLSLGDPSPSATLEQAVNSATSRGVLVVAASGNSGAGSISYPARYANAMAVGATDQNNNRASFSQYGAGLDIVAPGVNVQSTYPGSAYASLNGTSMATPHVAGAAALVKQKNPSWSNVQIRNHLKNTATSLGSTNLYGSGLVNAEAATR

SEQ ID NO: 62747 - protein, 380 aa, Unidentified
VRSKKLWIVASTALLISVAFSSSIASAAEEAKEKYLIGFNEQEAVSEFVEQVEANDEVAILSEEEEVEIELLHEFETIPVLSVELSPEDVDALELDPAISYIEEDAEVTTMAQSRPWGISRVQAPAAHNRRLTGRGVKVAVLDTGISTHPDLNIRGGASFVPGEPSTQDGNGHGTHVAGTIAALNNSIGVLGVAPSAELYAVKVLGASGSGSVSSIAQGLEWAGNNGMHVANLSLGSPSPSATLEQAVNSATSRGVLVVAASGNSGAGSISYPARYANAMAVGATDQNNNRASFSQYGAGLDIVAPGVNVQSTYPGSTYASLNGTSMATPHVAGAAALVKQKNPSWSNVQIRNRLKNTATSLGSTNLYGSGLVNAEAATR

SEQ ID NO: 62748 - protein, 380 aa, Unidentified
VRSKKLWIVASTALLISVAFSSSIASAAEEAKEKYLIGFNEQEAVSEFVEQVEANDEVAILSEEEEVEIELLHEFETIPVLSVELSPEDVDALELDPAISYIEEDAEVTTMAQSVPWGISRVQAPAAHNRGLTGSGVKVAVLDSGISTHPDLNIRGGASFVPGEPSTQDGNGHGTHVAGTIAALNNSIGVLGVAPSAELYAVKVLGASGSGSVTSIAQGLEWAGNNGMHVANLSLGSPSPSATLEQAVNSATSRGVLVVAASGNSGAGSISYPARYANAMAVGATDQNNNRADFSQYGAGLDIVAPGVNVQSTYPGSTYAFLNGTSMATPHVAGAAALVKQKNPSWSNVQIRNHLKNTATSLGSTNLYGSGLVNAEAATR

SEQ ID NO: 62749 - protein, 380 aa, Unidentified
VRSKKLWIVASTALLISVAFSSSIASAAEEAKEKYLIGFNEQEAVSEFVEQVEANDEVAILSEEEEVEIELLHEFETIPVLSVELSPEDVDALELDPAISYIEEDAEVTTMAQSVPWGISRVQAPAAHNRGLTGSRVKVAVLDTGISTHPDLAIRGGASFVPGEPSTQDGNGHGTHVAGTIAALNNSIGVLGVAPSAILYAVKVLGASGSGSVSSIAQGLEWAGNFGMHVANLSLGSPSPSATLEQAVNSATSRGVLVVAASGNSGAGSISYPARYANAMAVGATDQNNNRASFSQYGAGLDIVAPGVNVQSTYPGSTYASLNGTSMATPHVAGAAALVKQKNPSWSNVQIRNHLKNTATSLGSTNLYGSGLVNAEAATR

SEQ ID NO: 62750 - protein, 380 aa, Unidentified
VRSKKLWIVASTALLISVAFSSSIASAAEEAKEKYLIGFNEQEAVSEFVEQVEANDEVAILSEEEEVEIELLHEFETIPVLSVELSPEDVDALELDPAISYIEEDAEVTTMAQSVPWGISRVQAPASHNRGLTGSGVKVAVLDTGISTHPDLNIRGGASFVPGEPSTQDGNGHGTHVAGTIAALNNSIGVLGVAPSAELYAVKVLGASGSGSVSSIAQGLEWAGNNGMHVANLSLGNPSPSATLEQAVNSATSRGVLVVAASGNSGAGSISYPARYANAMAVGATDQNNNHASFSQYGAGLDIVAPGVNVQSTYPGSTYASLNGTSMATPHVAGAAALVKQKNPSWSNVQIRNHLKNTATSLGSTNLYGSGLVNAFAATR

SEQ ID NO: 62751 - protein, 380 aa, Unidentified
VRSKKLWIVASTALLISVAFSSSIASAAEEAKEKYLIGFNEQEAVSEFVEQVEANDEVAILSEEEEVEIELLHEFETIPVLSVELSPEDVDALELDPAISYIEEDAEVTTMAQSVPWGISRVQAPAAHNRGLTGSGVKVAVLDTGISTHPDLNIRGGASFVPGEPSTQDGEGHGTHVAGTIAALNNSIGVLGVAPSAELYAVKVLGASGSGSVSSIAQGLEWAGNNGMHVANLSLGSPSPSATLEQAVNSATSRGVLVVAASGNSGEGSISYPARYANAMAVGATDQNNNRASFSQYGAGLDIVAPGVNVQSTYPGSTYASLNGTSMATPHVAGAAALVKQKNPSWSNVQIRNRLKNTATSLGSTNLYGSGLVNAFAATR

SEQ ID NO: 62752 - protein, 380 aa, Unidentified
VRSKKLWIVASTALLISVAFSSSIASAAEEAKEKYLIGFNEQEAVSEFVEQVEANDEVAILSEEEEVEIELLHEFETIPVLSVELSPEDVDALELDPAISYIEEDAEVTTMAQSVPWGISRVQAPAAHNRKLTASGVKVAVLDTGISTHPDLNIRGGASFVPGEPSTQDGNGHGTHVAGTIAALNNSIGVLGVAPSAELYAVKVLGASGSGSVSSIAQGLEWAGLNGMHVANLSLGSPSPSATLEQAVNSATSRGVLVVAASGNSGAGSISYPARYANAMAVGATDQNNNRADFSQYGAGLDIVAPGVNVQSTYPGSTYASLNGTSMATPHVAGAAALVKQKNPSWSNVQIRNHLKNTATSLGSTNLYGSGLVNAEAATR

SEQ ID NO: 62753 - protein, 380 aa, Unidentified
VRSKKLWIVASTALLISVAFSSSIASAAEEAKEKYLIGFNEQEAVSEFVEQVEANDEVAILSEEEEVEIELLHEFETIPVLSVELSPEDVDALELDPAISYIEEDAEVTTMAQSVPWGISRVQAPAAHRRGLTGSGVKVAVLDTGISTHPDLRIRGGASFVPGEPSTQDGNGHGTHVAGTIAALDNSIGVLGVAPSAELYAVKVLGASGSGSVSSIAQGLEWAGNNGMHVANLSLGSPSPSATLEQAVNSATSRGVLVVAASGNSGAGSISYPARYANAMAVGATDQNNNRASFSQYGAGLDIVAPGVNVQSTYPGSTYASLNGTSMATPHVAGAAALVKQKNPSWRNVQIRNHLKNTATSLGSTNLYGSGLVNAEAATR

SEQ ID NO: 62754 - protein, 380 aa, Unidentified
VRSKKLWIVASTALLISVAFSSSIASAAEEAKEKYLIGFNEQEAVSEFVEQVEANDEVAILSEEEEVEIELLHEFETIPVLSVELSPEDVDALELDPAISYIEEDAEVTTMAQSVPWGISRVQAPAAHNRKLTGSGVKVAVLDTGISTHPDLNIRGGASFVPGEPSTQDGEGHGTHVAGTIAALNNSIGVLGVAPSAELYAVKVLGASGSGSVSSIAQGLEWAGLNGMHVANLSLGSPSPSATLEQAVNSATSRGVLVVAASGNSGAGSISYPARYANAMAVGATDQNNNRADFSQYGAGLDIVAPGVNVQSTYPGSTYASLNGTSMATPHVAGAAALVKQKNPSWSNVQIRNHLKNTATSLGSTNLYGSGLVNAEAATR

SEQ ID NO: 62755 - protein, 380 aa, Unidentified
VRSKKLWIVASTALLISVAFSSSIASAAEEAKEKYLIGFNEQEAVSEFVEQVEANDEVAILSEEEEVEIELLHEFETIPVLSVELSPEDVDALELDPAISYIEEDAEVTTMAQSVPWGISRVQAPASHNRGLTGSGVKVAVLDTGISTHPDLNIRGGASFVPGEPSTQDGNGHGTHVAGTIAALNNSIGVLGVAPSAELYAVKVLGASGAGSVSSIAQGLEWAGNNGMHVANLSLGNPSPSATLEQAVNSATSRGVLVVAASGNSGAGSISYPARYANAMAVGATDQNNNHASFSQYGAGLDIVAPGVNVQSTYPGSTYASLNGTSMATPHVAGAAALVKQKNPSWSNVQIRNHLKNTATSLGSTNLYGSGLVNAEAATR

SEQ ID NO: 62756 - protein, 380 aa, Unidentified
VRSKKLWIVASTALLISVAFSSSIASAAEEAKEKYLIGFNEQEAVSEFVEQVEANDEVAILSEEEEVEIELLHEFETIPVLSVELSPEDVDALELDPAISYIEEDAEVTTMAQSVPWGISRVQAPAAHRRGLTGRGVKVAVLDTGISTHPDLNITGGASFVPGEPSTQDGNGHGTHVAGTIAALNNSIGVLGVAPSAELYAVKVLGASGSGSVSSIAQGLEWAGNNGMHVANLSLGSPSPSATLEQAVNSATSRGVLVVAASGNSGAGSISYPARYANAMAVGATDQNNNRASFSQYGAGLDIVAPGVNVQSTYPGSTYASLNGTSMATPHVAGAAALVKQKNPSWRNVQIRNHLKNTATSLGSTNLYGSGLVNAEAATR

SEQ ID NO: 62757 - protein, 380 aa, Unidentified
VRSKKLWIVASTALLISVAFSSSIASAAEEAKEKYLIGFNEQEAVSEFVEQVEANDEVAILSEEEEVEIELLHEFETIPVLSVELSPEDVDALELDPAISYIEEDAEVTTMAQSVPWGIARVQAPAAHNRGLRGSGVKVAVLDTGISTHPDLNIRGGASFVPGEPSTQDGNGHGTHVAGTIAALNNSIGVLGVAPSAELYAVKVLGASGSGSVSSIAQGLEWAGNNGMHVANLSLGSPSPSATLEQAVNSATSRGVLVVAASGNSGAGSISYPARYANAMAVGATDQNNNRASFSQYGAGLDIVAPGVNVQSTYPGFTYASLNGTSMATPHVAGAAALVKQKNPSRSNVQIRNHLKNTATSLGSTNLYGSGLVNAEAATR

SEQ ID NO: 62758 - protein, 380 aa, Unidentified
VRSKKLWIVASTALLISVAFSSSIASAAEEAKEKYLIGFNEQEAVSEFVEQVEANDEVAILSEEEEVEIELLHEFETIPVLSVELSPEDVDALELDPAISYIEEDAEVTTMAQSVPWGISRVQAPAAHNRGLTGRGVKVAVLDTGISTHPDLNIRGGASFVPGEPSTQDGNGHGTHVAGTIAALDNSIGVLGVAPSAELYAVKVLGASGGGSVSSIAQGLEWAGNNGMHVANLSLGSPSPSATLEQAVNSATSRGVLVVAASGNSGAGSISYPARYANAMAVGATDQNNNRASFSQYGAGLDIVAPGVNVQSTYPGSTYASLNGTSMATPHVAGAAVLVKQKNPSWSNVQIRNHLKNTATSLGSTNLYGSGLVNAEAATR

SEQ ID NO: 62759 - protein, 380 aa, Unidentified
VRSKKLWIVASTALLISVAFSSSIASAAEEAKEKYLIGFNEQEAVSEFVEQVEANDEVAILSEEEEVEIELLHEFETIPVLSVELSPEDVDALELDPAISYIEEDAEVTTMAQSVPWGISRVQAPAAHNRGLTGRGVKVAVLDTGISTHPDLNIRGGASFVPGEPSTQDGNGHGTHVAGTIAALNNSIGVLGVAPSAELYAVKVLGASGSGAVSSIAQGLEWAGNNGMHVANLSLGSPSPSATLEQAVNSATSRGVLVVAASGNSGAGSISYPARYANAMAVGATDQNNNRASFSQYGAGLDIVAPGVNVQSTYPGSTYASLNGTSMATPHVAGAAALVKQKNPSWSNVRIRNRLKNTATSLGSTNLYGSGLVNAEAATR

SEQ ID NO: 62760 - protein, 380 aa, Unidentified
VRSKKLWIVASTALLISVAFSSSIASAAEEAKEKYLIGFNEQEAVSEFVEQVEANDEVAILSEEEEVEIELLHEFETIPVLSVELSPEDVDALELDPAISYIEEDAEVTTMAQSVPWGISRVQAPAAHRRGLTGSGVKVAVLDTGISTHPDLRIRGGASFVPGEPSTQDGNGHGTHVAGTIAALDNSIGVLGVAPSAELYAVKVLGASGSGSVSSIAQGLEWAGNNGMHVANLSLGSPSPSATLEQAVNSATSRGVLVVAASGNSGAGSISYPARYANAMAVGATDQNNNRASFSQYGAGLDIVAPGVNVQSTYPGSTYASLNGTSMATPHVAGEAALVKQKNPSWSNVQIRNHLKNTATSLGSTNLYGSGLVNAEAATR

SEQ ID NO: 62761 - protein, 380 aa, Unidentified
VRSKKLWIVASTALLISVAFSSSIASAAEEAKEKYLIGFNEQEAVSEFVEQVEANDEVAILSEEEEVEIELLHEFETIPVLSVELSPEDVDALELDPAISYIEEDAEVTTMAQSVPWGISRVQAPAAHNRRLRGSGVKVAVLDTGISTHPDLNIRGGASFVPGEPSTQDGNGHGTHVAGTIAALNNRIGVLGVAPSAELYAVKVLGASGSGSVSSIAQGLEWAGNNGMHVANLSLGSPSPSATLEQAVNSATSRGVLVVAASGNSGAGSISYPARYANAMAVGATDQNNNRASFSQYGAGLDIVAPGVNVQSTYPGSTYASLNGTSMATPHVAGAAALVKQKNPSWRNVQIRNHLKNTATSLGSTNLYGSGLVNAEAATR

SEQ ID NO: 62762 - protein, 380 aa, Unidentified
VRSKKLWIVASTALLISVAFSSSIASAAEEAKEKYLIGFNEQEAVSEFVEQVEANDEVAILSEEEEVEIELLHEFETIPVLSVELSPEDVDALELDPAISYIEEDAEVTTMAQSVPWGISRVQAPAAHNRRLTGSGVKVAVLDTGISTHPDLNIRGGASFVPGEPSTQDGNGHGTHVAGTIAALNNSIGVLGVAPSAELYAVKVLGASGSGGVSSIAQGLEWAGNNGMHVANLSLGSPSPSATLEQAVNSATSRGVLVVAASGNSGAGSISYPARYANAMAVGATDQNNNRASFSQYGAGLDIVAPGVNVQSTYPGSTYASLNGTSMATPHVAGAAVLVKQKNPSWSNVRIRNHLKNTATSLGSTNLYGSGLVNAEAATR

SEQ ID NO: 62763 - protein, 380 aa, Unidentified
VRSKKLWIVASTALLISVAFSSSIASAAEEAKEKYLIGFNEQEAVSEFVEQVEANDEVAILSEEEEVEIELLHEFETIPVLSVELSPEDVDALELDPAISYIEEDAEVTTMAQSVPWGISRVQAPAAHNRGLTGSGVKVAVLDTGISTHPDLNIRGGASFVPGEPSTQDGEGHGTHVAGTIAALNNSIGVLGVAPSAELYAVKVLGASGAGSVSSIAQGLEWAGNNGMHVANLSLGSPSPSATLEQAVNSATSRGVLVVAASGNSGAGSISYPARYANAMAVGATDQNNNHASFSQYGAGLDIVAPGVNVQSTYPGSTYASLNGTSMATPHVAGAAALVKQKNPSWSNVQIRNHLKNTATSLGSTNLYGSGLVNAFAATR

SEQ ID NO: 62764 - protein, 380 aa, Unidentified
VRSKKLWIVASTALLISVAFSSSIASAAEEAKEKYLIGFNEQEAVSEFVEQVEANDEVAILSEEEEVEIELLHEFETIPVLSVELSPEDVDALELDPAISYIEEDAEVTTMAQSVPWGISRVQAPAAHNRRLTGSGVKVAVLDTGISTHPDLRIRGGASFVPGEPSTQDGNGHGTHVAGTIAALDNSIGVLGVAPSAELYAVKVLGASGSGSVSSIAQGLEWAGNNGMHVANLSLGSPSPSATLEQAVNSATSRGVLVVAASGNSGAGSISYPARYANAMAVGATDQNNNRASFSQYGAGLDIVAPGVNVQSTYPGSTYASLNGTSMATPHIAGAAALVKQKNPSWSNVQIRNHLKNTATSLGSTNLYGSGLVNAEAATR

SEQ ID NO: 62765 - protein, 376 aa, Bacillus sp.
LGKIVASTALLISGAFSSSIASAAEEAKEKYLIGFNEQEAVSEFVEQIEANDDVAILSEEEEVEIELLHEFETIPVLSVELSPEDVDELELDPTISYIEEDAEVTTMAQSVPWGISRVQAPAAHNRGLTGSGVKVAVLDTGISTHPDLNIRGGASFVPGEPSTQDGNGHGTHVAGTIAALNNSIGVLGVAPSAELYAVKVLGASGSGSVSSIAQGLEWAGNNGMHVANLSLGSPSPSATLEQAVNSATSRGVLVVAASGNSGAGSISYPARYANAMAVGATDQNNNRASFSQYGAGLDIVAPGVNVQSTYPGSTYASLNGTSMATPHVAGVAALVKQKNPSWSNVQIRNHLKNTATGLGNTNLYGSGLVNAEAATR

SEQ ID NO: 62766 - protein, 269 aa, Unidentified
AQSVPWGISRVQAPAAHNRGLAGSGVKVAVLDTGISTHPDLNIRGGASFVPGEPSTQDGNGHGTHVAGTIAALNNSIGVLGVAPSAELYAVKVLGASGQGAISSIAQGLEWAGNNGMHVANVSLGSESPSATLEQAVNSATSRGVLVVAASGNSGADSISYPARYANAMAVGATDQNNNRADFSQYGAGLDIVAPGVNVQSTYPGSTYASLNGTSMATPHVAGAAVLVKQKNPSWSNVRIRDHLKNTATSLGSTNLYGSGLVNAFAATR

SEQ ID NO: 62767 - protein, 269 aa, Unidentified
AQSVPWGISRVQAPAAHNRGLAGSGVKVAVLDTGISTHPDLNIRGGASFVPGEPSTQDGNGHGTHVAGTIAALNNSIGVLGVAPSAELYAVKVLGASGGGAISSIAQGLEWAGNNGMHVANLSLGSPSPSATLEQAVNSATSRGVLVVAASGNSGEESISYPARYANAMAVGATDQNNNRADFSQYGAGLDIVAPGVNVQSTYPGSTYASLNGTSMATPHVAGAAVLVKQKNPEWSNVRIRDHLKNTATSLGSTNLYGSGLVNAFAATR

SEQ ID NO: 62768 - protein, 269 aa, Unidentified
AQSVPWGISRVQAPAAHNRGLRGGGVKVAVLDTGISTHPDLNIRGGASFVPGEPSTQDGNGHGTHVAGTIAALNNNIGVLGVAPSAELYAVKVLAASGGGAISSIAQGLEWAGLNGMHVANLSLGAPSPSATLEQAVNSATSRGVLVVAASGNSGAGSISYPARYANAMAVGATDQNNNRASFSQYGAGLDIVAPGVNVQSTYPGSTYASQNGTSMATPHVAGAAVLVKQKNPSWSNVRIRNHLKNTATSLGSTNLYGSGLVNAEAATR

SEQ ID NO: 62769 - protein, 269 aa, Unidentified
AQSVPWGISRVQAPAAHNRGLAGRGVKVAVLDTGISTHPDLNIRGGASFVPGEPSTQDGNGHGTHVAGTIAALNNSIGVLGVAPSAELYAVKVLGASGGGAISSIAQGLEWAGNNGMHVANLSLGSPSPSATLEQAVNSATSRGVLVVAASGNSGADSISYPARYANAMAVGATDQNNNRADFSQYGAGLDIVAPGVNVQSTYPGSTYASLNGTSMATPHVAGAAVLVKQKNPSWSNVRIRDHLKNTATSLGSTNLYGSGLVNVFAATR

SEQ ID NO: 62770 - protein, 269 aa, Unidentified
AQSVPWGISRVQAPAAHNRGLAGSGVKVAVLDTGISTHPDLNIRGGASFVPGEPSTQDGNGHGTHVAGTIAALNNSIGVLGVAPSAELYAVKVLGASGGGAISSIAQGLEWAGNNGMHVANLSLGLPSPSATLEQAVNSATSRGVLVVAASGNSGADSISYPARYANAMAVGATDQNNNRADFSQYGAGLDIVAPGVNVQSTYPGSAYASLNGTSMATPHVAGAAVLVKQKNPSWSNVRIRDHLKNTATSLGSTNLYGSGLVNAFAATR

SEQ ID NO: 62771 - protein, 269 aa, Unidentified
AQSVPWGISRVQAPAAHNRGLAGSGVKVAVLDTGISTHPDLNIRGGASFVPGEPSTQDGNGHGTHVAGTIAALNNSIGVLGVAPSAELYAVKVLGASGNGAISSIAGGLEWAGNNGMHVANLSLGAPSPSATLEQAVNSATSRGVLVVAASGNSGADSISYPARYANAMAVGATDQNNNRADFSQYGAGLDIVAPGVNVQSTYPGSTYASLNGTSMATPHVAGAAVLVKQKNPSWSNVRIRDHLKNTATSLGSTNLYGSGLVNAFAATR

SEQ ID NO: 62772 - protein, 269 aa, Unidentified
AQSVPWGISRVQAPAAHNRGLAGRGVKVAVLDTGISTHPDLNIRGGASFVPGEPSTQDGNGHGTHVAGTIAALNNSIGVLGVAPSAELYAVKVLGASGGGAISSIAQGLEWAGNNGMHVANLSLGSPSPSATLEQAVNSATSRGVLVVAASGNSGEESISYPARYANAMAVGATDQNNNRADFSQYGAGLDIVAPGVNVQSTYPGSTYASLNGTSMATPHVAGAAVLVKQKRPSWSNVRIRDHLKNTATSLGSTNLYGSGLVNAEAATR

SEQ ID NO: 62773 - protein, 269 aa, Unidentified
AQSVPWGISRVQAPAAHNRGLAGSGVKVAVLDTGISTHPDLRIRGGASFVPGEPSTQDGNGHGTHVAGTIAALDNSIGVLGVAPSAELYAVKVLGASGGGAISSIAQGLEWAGNNGMHVANLSLGSPSPSATLEQAVNSATSRGVLVVAASGNSGEGSISYPARYANAMAVGATDQNNNRADFSQYGAGLDIVAPGVNVQSTYPGSTYASLNGTSMATPHVAGAAVLVKQKNPSWSNVRIRDHLKNTATSLGSTNLYGSGLVNAFAATR

SEQ ID NO: 62774 - protein, 269 aa, Unidentified
AQSVPWGISRVQAPAAHNRGLAGRGVKVAVLDTGISTHPDLNIRGGASFVPGEPSTQDGNGHGTHVAGTIAALNNSIGVLGVAPSAELYAVKVLGASGGGAISSIAQGLEWAGNNGMHVANLSLGSPSPSATLEQAVNSATSRGVLVVAASGNSGAESISYPARYANAMAVGATDQNNNRADFSQYGAGLDIVAPGVNVQSTYPGSTYASLNGTSMATPHVAGAAVLVKQKNPSWSNVRIRDHLKNTATSLGSTNLYGSGLVNAFVATR

SEQ ID NO: 62775 - protein, 269 aa, Unidentified
AQSVPWGISRVQAPAAHNRGLAGSGVKVAVLDTGISTHPDLNIRGGASFVPGEPSTQDGNGHGTHVAGTIAALNNSIGVLGVAPSAELYAVKVLAASGGGAISSIANGLEWAGNNGMHVANLSLGSPSPSATLEQAVNSATSRGVLVVAASGNSGADSISYPARYANAMAVGATDQNNNRADFSQYGAGLDIVAPGVNVQSTYPGSTYASLNGTSMATPHVAGAAVLVKQKNPSWSNVRIRDHLKNTATSLGSTNLYGSGLVNAFAATR

SEQ ID NO: 62776 - protein, 269 aa, Unidentified
AQSVPWGISRVQAPAAHNRGLAGSGVKVAVLDTGISTHPDLRIRGGASFVPGEPSTQDGNGHGTHVAGTIAALNNSIGVLGVAPSAELYAVKVLGASGGGAISSIAQGLEWAGNNGMHVANLSLGSPSPSATLEQAVNSATSRGVLVVAASGNSGEGSISYPARYANAMAVGATDQNNNRADFSQYGAGLDIVAPGVNVQSTYPGSTYASLNGTSMATPHVAGAAVLVKQKNPSWSNVRIRDHLKNTATSLGSTNLYGSGLVNAFVATR

SEQ ID NO: 62777 - protein, 269 aa, Unidentified
AQSVPWGIERVQAPAAHNRGLTGSGVKVAVLDTGISTHPDLRIRGGHSFVPGEPSTQDGNGHGTHVAGTIAALDNSIGVLGVAPSAELYAVKVLGASGSGSVSSIAQGLEWAGNHGMHVANLSLGSPSPSATLEQAVNSATSRGVLVVAASGNSGAGSISYPARYANAMAVGATDQNNNRASFSQYGPGLDIVAPGVNVLSTWPGSTYASLNGTSMATPHVAGAAALVKQKHPSWSNVQIRNHLKNTATSLGDANEYGSGLVNAEAATR

SEQ ID NO: 62778 - protein, 269 aa, Unidentified
AQSVPWGISRVQAPAAHNRGLAGSGVKVAVLDTGISTHPDLNIRGGASFVPGEPSTQDGNGHGTHVAGTIAALNNSIGVLGVAPSAELYAVKVLGASGNGAISSIAQGLEWAGNNGMHVANLSLGSSSPSATLEQAVNSATSRGVLVVAASGNSGADSISYPARYANAMAVGATDQNNNRADFSQYGAGLDIVAPGVNVQSTYPGSTYASQNGTSMATPHVAGAAVLVKQKNPSWSNVRIRDHLKNTATSLGSTNLYGSGLVNAFAATR

SEQ ID NO: 62779 - protein, 269 aa, Unidentified
AQSVPWGISRVQAPAAHNRGLAGSGVKVAVLDTGISTHPDLNIRGGASFVPGEPSTQDGNGHGTHVAGTIAALNNSIGVLGVAPSAELYAVKVLGASGQGAISSIAQGLEWAGNNGMHVANTSLGSSSPSATLEQAVNSATSRGVLVVAASGNSGADSISYPARYANAMAVGATDQNNNRADFSQYGAGLDIVAPGVNVQSTYPGSTYASLNGTSMATPHVAGAAVLVKQKNPSWSNVRIRDHLKNTATSLGSTNLYGSGLVNAFAATR

SEQ ID NO: 62780 - protein, 269 aa, Unidentified
AQSVPWGISRVQAPAAHNRGLTGRGVKVAVLDTGISTHPDLNIRGGASFVPGEPSTQDGNGHGTHVAGTIAALDNSIGVLGVAPSAELYAVKVLGASGGGAISSIAQGLEWAGNNGMHVANLSLGSPSPSATLEQAVNSATSRGVLVVAASGNSGEGSISYPARYANAMAVGATDQNNNRADFSQYGAGLDIVAPGVNVQSTYPGSTYASLNGTSMATPHVAGAAVLVKQKNPSWSNVRIRDRLKNTATSLGSTNLYGSGLVNAFAATR

SEQ ID NO: 62781 - protein, 269 aa, Unidentified
AQSVPWGISRVQAPAAHNRGLAGGGVKVAVLDTGISTHPDLNIRGGASFVPGEPSTQDGNGHGTHVAGTIAALNNSIGVLGVAPSAELYAVKVLGASGQGAISSIAGGLEWAGNNGMHVANLSLGSPSPSATLEQAVNSATSRGVLVVAASGNSGADSISYPARYANAMAVGATDQNNNRADFSQYGAGLDIVAPGVNVQSTYPGSTYASLNGTSMATPHVAGAAVLVKQKNPSWSNVRIRDHLKNTATSLGSTNLYGSGLVNAFAATR

SEQ ID NO: 62782 - protein, 269 aa, Unidentified
AQSVPWGISRVQAPAAHNRGLTGRGVKVAVLDTGISTHPDLNIRGGASFVPGEPSTQDGNGHGTHVAGTIAALDNNIGVLGVAPDAELYAVKVLGASGGGAISSIAQGLEWAGNNRMHVANLSLGSPSPSATLEQAVNSATSRGVLVVAASGNSGAGSISYPARYANAMAVGATDQNNNRASFSQYGAGLDIVAPGVNVQSTWPGSTYASLNGTSQATPHVAGAAVLVKQKNPSWSNVRIRNRLKNTATSLGSTNLYGSGLVNAEAATR

SEQ ID NO: 62783 - protein, 269 aa, Unidentified
AQSVPWGISRVQAPAAHNRGLAGSGVKVAVLDTGISTHPDLNIRGGASFVPGEPSTQDGNGHGTHVAGTIAALDNNIGVLGVAPSAELYAVKVLGASGNGAISSIAQGLEWAGNNGMHVANLSLGSPSPSATLEQAVNSATSRGVLVVAASGNSGADSISYPARYANAMAVGATDQNNNRADFSQYGAGLDIVAPGVNVQSTYPGSTYASLNGTSMATPHVAGAAVLVKQKNPSWSNVRIRDHLKNTATSLGSTNLYGSGLVNAFAATR

SEQ ID NO: 62784 - protein, 269 aa, Unidentified
AQSVPWGISRVQAPAAHRRRLWGRGVKVAVLDTGISTHPDLNIRGGASFVPGEPSTQDGNGHGTHVAGTIAALDNSIGVLGVAPSAELYAVKVLGASGAGSVSSIAQGLEWAGANGMHVANLSLGSPSPSATLEQAVNSATSRGVLVVAASGNSGAGSISYPARYANAMAVGATDQNNNRASFSQYGAGLDLVAPGVNVQSTYPQSAYFSLNGTSMATPHVAGAAALVKQKNPSWSNVQIRNRLKNTATSLGSTNLYGSGLVNAEAATR

SEQ ID NO: 62785 - protein, 269 aa, Unidentified
AQSVPWGISRVQAPAAHNRGLAGSGVKVAVLDTGISTHPDLNIRGGASFVPGEPSTQDGNGHGTHVAGTIAALNNSIGVLGVAPSAELYAVKVLGASGGGAISSIAQGLEWAGLNGMHVANLSLGLPSPSATLEQAVNSATSRGVLVVAASGNSGADSISYPARYANAMAVGATDQNNNRADFSQYGAGLDIVAPGVNVQSTYPGSTYASLNGTSMATPHVAGAAVLVKQKNPSWSNVRIRDHLKNTATSLGSTNLYGSGLVNAFAATR

SEQ ID NO: 62786 - protein, 269 aa, Unidentified
AQSVPWGISRVQAPAAHNRGLAGSGVKVAVLDTGISTHPDLNIRGGASFVPGEPSTQDGNGHGTHVAGTIAALNNSIGVLGVAPSAELYAVKVLAASGNGAISSIANGLEWAGNNGMHVANLSLGSPSPSATLEQAVNSATSRGVLVVAASGNSGADSISYPARYANAMAVGATDQNNNRADFSQYGAGLDIVAPGVNVQSTYPGSTYASLNGTSMATPHVAGAAVLVKQKNPSWSNVRIRDHLKNTATSLGSTNLYGSGLVNAFAATR

SEQ ID NO: 62787 - protein, 269 aa, Unidentified
AQSVPWGISRVQAPAAHNRGLTGSGVKVAVLDTGISTHPDLNIRGGASFVPGEPSTQDGNGHGTHVAGTIAALDNSIGVLGVAPSAELYAVKVLGASGGGAISSIAQGLEWAGNNGMHVANLSLGSPSPSATLEQAVNSATSRGVLVVAASGNSGEGSIDYPARYANAMAVGATDQNNNRADFSQYGAGLDIVAPGVNVQSTYPGSTYASLNGTSMATPHVAGAAVLVKQKNPSWSNVRIRDRLKNTATSLGSTNLYGSGLVNAFAATR

SEQ ID NO: 62788 - protein, 269 aa, Unidentified
AQSVPWGISRVQAPAAHNRGLAGSGVKVAVLDTGISTHPDLNIRGGASFVPGEPSTQDGNGHGTHVAGTIAALNNSIGVLGVAPSAELYAVKVLAASGGGAISSIAQGLEWAGNNGMHVANLSLGSPSPSATLEQAVNSATSRGVLVVAASGNSGADSISYPARYANAMAVGATDQNNNRADFSQYGAGLDIVAPGVNVQSTYPGSTYASQNGTSMATPHVAGAAVLVKQKNPSWSNVRIRDHLKNTATSLGSTNLYGSGLVNAFAATR

SEQ ID NO: 62789 - protein, 269 aa, Unidentified
AQSVPWGISRVQAPAAHNRGLAGSGVKVAVLDTGISTHPDLNIRGGASFVPGEPSTQDGNGHGTHVAGTIAALNNSIGVLGVAPSAELYAVKVLAASGQGAISSIAQGLEWAGNNGMHVANLSLGSPSPSATLEQAVNSATSRGVLVVAASGNSGADSISYPARYANAMAVGATDQNNNRADFSQYGAGLDIVAPGVNVQSTYPGSTYASQNGTSMATPHVAGAAVLVKQKNPSWSNVRIRDHLKNTATSLGSTNLYGSGLVNAFAATR

SEQ ID NO: 62790 - protein, 269 aa, Unidentified
AQTIPWGISRVQAPAAHNRGLTGSGVKVAVLDTGISTHPDLNIRGGASFVPGEPSTQDGNGHGTHVAGTIAALNNSIGVLGVAPSAELYAVKVLGADGEGAISSIAQGLEWAGNNGMHVANLSLGSPSPSATLEQQVNSATSRGVLVVAASGNDGASSISYPARYANAMALGATDQNNNRASFSQYGAGLDIVAPGVNILSTYPGSTYASLNGTSMATPHVAGAAALVKQKNPSWSNVQIRNHLKNTATSLGSTNLYGSGLVNAEAATR

SEQ ID NO: 62791 - protein, 269 aa, Unidentified
AQSVPWGISRVQAPAAHNRGLTGRGVKVAVLDTGISTHPDLNIRGGASFVPGEPSTQDGNGHGTHVAGTIAALNNSIGVLGVAPSAELYAVKVLGASGGGAISSIAQGLEWAGNNGMHVANLSLGSPAPSATLEQAVNSATSRGVLVVAASGNSGEGSISYPARYANAMAVGATDQDNNRADFSQYGAGLDIVAPGVNVQSTYPGSTYASLNGTSMATPHVAGAAVLVKQKNPSWSNVRIRDRLKNTATSLGSTNLYGSGLVNAEAATR

SEQ ID NO: 62792 - protein, 269 aa, Unidentified
AQSVPWGISRVQAPAAHNRGLAGSGVKVAVLDTGISTHPDLNIRGGASFVPGEPSTQDGNGHGTHVAGTIAALNNSIGVLGVAPSAELYAVKVLGASGNGAISSIAQGLEWAGNNGMHVANLSIGSPSPSATLEQAVNSATSRGVLVVAASGNSGADSISYPARYANAMAVGATDQNNNRADFSQYGAGLDIVAPGVNVQSTYPGSTYASQNGTSMATPHVAGAAVLVKQKNPSWSNVRIRDHLKNTATSLGSTNLYGSGLVNAFAATR

SEQ ID NO: 62793 - protein, 269 aa, Unidentified
AQSVPWGISRVQAPAAHNRGLAGGGVKVAVLDTGISTHPDLNIRGGASFVPGEPSTQDGNGHGTHVAGTIAALNNSIGVLGVAPSAELYAVKVLSASGQGAISSIAQGLEWAGNNGMHVANLSLGSPSPSATLEQAVNSATSRGVLVVAASGNSGADSISYPARYANAMAVGATDQNNNRADFSQYGAGLDIVAPGVNVQSTYPGSTYASLNGTSMATPHVAGAAVLVKQKNPSWSNVRIRDHLKNTATSLGSTNLYGSGLVNAFAATR

SEQ ID NO: 62794 - protein, 269 aa, Unidentified
AQSVPWGISRVQAPAAHNRGLAGSGVKVAVLDTGISTHPDLNIRGGASFVPGEPSTQDGNGHGTHVAGTIAALNNSIGVLGVAPSAELYAVKVLAASGNGAISSIAQGLEWAGNNGMHVANVSLGSPSPSATLEQAVNSATSRGVLVVAASGNSGADSISYPARYANAMAVGATDQNNNRADFSQYGAGLDIVAPGVNVQSTYPGSTYASLNGTSMATPHVAGAAVLVKQKNPSWSNVRIRDHLKNTATSLGSTNLYGSGLVNAFAATR

SEQ ID NO: 62795 - protein, 269 aa, Unidentified
AQSVPWGISRVQAPAAHNRGLAGSGVKVAVLDTGISTHPDLNIRGGASFVPGEPSTQDGNGHGTHVAGTIAALNNSIGVLGVAPSAELYAVKVLSASGQGAISSIAQGLEWAGNNGMHVANLSLGSPSPSATLEQAVNSATSRGVLVVAASGNSGADSISYPARYANAMAVGATDQNNNRADFSQYGAGLDIVAPGVNVQSTYPGSTYASQNGTSMATPHVAGAAVLVKQKNPSWSNVRIRDHLKNTATSLGSTNLYGSGLVNAFAATR

SEQ ID NO: 62796 - protein, 269 aa, Unidentified
AQSVPWGISRVQAPAAHNRGLAGGGVKVAVLDTGISTHPDLNIRGGASFVPGEPSTQDGNGHGTHVAGTIAALNNSIGVLGVAPSAELYAVKVLSASGGGAISSIAQGLEWAGNNGMHVANLSLGSPSPSATLEQAVNSATSRGVLVVAASGNSGADSISYPARYANAMAVGATDQNNNRADFSQYGAGLDIVAPGVNVQSTYPGSTYASLNGTSMATPHVAGAAVLVKQKNPSWSNVRIRDHLKNTATSLGSTNLYGSGLVNAFAATR

SEQ ID NO: 62797 - protein, 269 aa, Unidentified
AQSVPWGISRVQAPAAHNRGLAGRGVKVAVLDTGISTHPDLNIRGGASFVPGEPSTQDGNGHGTHVAGTIAALNNSIGVLGVAPSAELYAVKVLGASGGGAISSIAQGLEWAGNNGMHVANLSLGSPSPSATLEQAVNSATSRGVLVVAASGNSGEESISYPARYANAMAVGATDQNNNRADFSQYGAGLDIVAPGVNVQSTYPGSTYASLNGTSMATPHVAGAAVLVKQKNPSWSNVRIRDRLKNTATSLGSTNLYGSGLVNAEAATR

SEQ ID NO: 62798 - protein, 269 aa, Unidentified
AQSVPWGISRVQAPAAHNRGLTGSGVKVAVLDTGISTHPDLRIRGGASFVPGEPSTQDGNGHGTHVAGTIAALDNSIGVLGVAPSAELYAVKVLGASGAGAISSIAQGLEWAGNNGMHVANLSLGSPSPSATLEQAVNSATSRGVLVVAASGNSGEGSISYPARYANAMAVGATDQNNNRADFSQYGAGLDIVAPGVNVQSTYPGSTYASLNGTSMATPHVAGAAVLVKQKNPSWSNVRIRDRLKNTATSLGSTNLYGSGLVNAFAATR

SEQ ID NO: 62799 - protein, 269 aa, Unidentified
AQSVPWGISRVQAPAAHNRGLAGGGVKVAVLDTGISTHPDLNIRGGASFVPGEPSTQDGNGHGTHVAGTIAALNNSIGVLGVAPSAELYAVKVLAASGQGAISSIAQGLEWAGNNGMHVANLSLGSPSPSATLEQAVNSATSRGVLVVAASGNSGADSISYPARYANAMAVGATDQNNNRADFSQYGAGLDIVAPGVNVQSTYPGSTYASLNGTSMATPHVAGAAVLVKQKNPSWSNVRIRDHLKNTATSLGSTNLYGSGLVNAFAATR

SEQ ID NO: 62800 - protein, 269 aa, Unidentified
AQSVPWGISRVQAPAAHNRGLAGSGVKVAVLDTGISTHPDLNIRGGASFVPGEPSTQDGNGHGTHVAGTIAALNNSIGVLGVAPSAELYAVKVLGASGNGAISSIAQGLEWAGNNGMHVANLSIGSESPSATLEQAVNSATSRGVLVVAASGNSGADSISYPARYANAMAVGATDQNNNRADFSQYGAGLDIVAPGVNVQSTYPGSTYASLNGTSMATPHVAGAAVLVKQKNPSWSNVRIRDHLKNTATSLGSTNLYGSGLVNAFAATR

SEQ ID NO: 62801 - protein, 269 aa, Unidentified
AQSVPWGISRVQAPAAHNRGLTGRGVKVAVLDTGISTHPDLNIRGGASFVPGEPSTQDGNGHGTHVAGTIAALNNSIGVLGVAPSAELYAVKVLGASGGGAISSIAQGLEWAGNNGMHVANLSLGLQSPSATLEQAVNSATSRGVLVVAASGNSGEGSISYPARYANAMAVGATDQNNNRADFSQYGAGLDIVAPGVNVQSTYPGSTYASLNGTSMATPHVAGAAVLVKQKNPSWSNVRIRDRLKNTATSLGSTNLYGSGLVNAEAATR

SEQ ID NO: 62802 - protein, 269 aa, Unidentified
AQSVPWGISRVQAPAAHNRGLAGRGVKVAVLDTGISTHPDLNIRGGASFVPGEPSTQDGNGHGTHVAGTIAALNNSIGVLGVAPSAELYAVKVLGASGGGAISSIAQGLEWAGNNGMHVANLSLGSESPSATLEQAVNSATSRGVLVVAASGNSGAESISYPARYANAMAVGATDQNNNRADFSQYGAGLDIVAPGVNVQSTYPGSTYASLNGTSMATPHVAGAAVLVKQKNPSWSNVRIRDRLKNTATSLGSTNLYGSGLVNAEAATR

SEQ ID NO: 62803 - protein, 269 aa, Unidentified
AQSVPWGISRVQAPAAHNRGLAGGGVKVAVLDTGISTHPDLNIRGGASFVPGEPSTQDGNGHGTHVAGTIAALNNNIGVLGVAPSAELYAVKVLSASGNGAISSIAQGLEWAGNNGMHVANLSLGAPSPSATLEQAVNSAISRGVLVVAASGNSGAGSISYPARYANAMAVGATDQNNNRASFSQYGAGLDIVAPGVNVQSTYPGSTYASQNGTSMATPHVAGAAVLVKQKNPSWSNVRIRNHLKNTATSLGSTNLYGSGLVNAEAATR

SEQ ID NO: 62804 - protein, 269 aa, Unidentified
AQSVPWGISRVQAPAAHNRGLAGSGVKVAVLDTGISTHPDLNIRGGASFVPGEPSTQDGNGHGTHVAGTIAALNNSIGVLGVAPSAELYAVKVLGASGQGAISSIAQGLEWAGNNGMHVANLSLGASSPSATLEQAVNSATSRGVLVVAASGNSGADSISYPARYANAMAVGATDQNNNRADFSQYGAGLDIVAPGVNVQSTYPGSTYASLNGTSMATPHVAGAAVLVKQKNPSWSNVRIRDHLKNTATSLGSTNLYGSGLVNAFAATR

SEQ ID NO: 62805 - protein, 269 aa, Unidentified
AQSVPWGISRVQAPAAHNRGLAGSGVKVAVLDTGISTHPDLNIRGGASFVPGEPSTQDGNGHGTHVAGTIAALNNSIGVLGVAPSAELYAVKVLAASGNGAISSIAQGLEWAGNNGMHVANLSLGAPSPSATLEQAVNSATSRGVLVVAASGNSGADSISYPARYANAMAVGATDQNNNRADFSQYGAGLDIVAPGVNVQSTYPGSTYASLNGTSMATPHVAGAAVLVKQKNPSWSNVRIRDHLKNTATSLGSTNLYGSGLVNAFAATR

SEQ ID NO: 62806 - protein, 269 aa, Unidentified
AQSVPWGISRVQAPAAHNRGLAGGGVKVAVLDTGISTHPDLNIRGGASFVPGEPSTQDGNGHGTHVAGTIAALNNSIGVLGVAPSAELYAVKVLAASGNGAISSIAQGLEWAGNNGMHVANLSLGSPSPSATLEQAVNSATSRGVLVVAASGNSGADSISYPARYANAMAVGATDQNNNRADFSQYGAGLDIVAPGVNVQSTYPGSTYASLNGTSMATPHVAGAAVLVKQKNPSWSNVRIRDHLKNTATSLGSTNLYGSGLVNAFAATR

SEQ ID NO: 62807 - protein, 269 aa, Unidentified
AQSVPWGISRVQAPAAHNRGLAGSGVKVAVLDTGISTHPDLNIRGGASFVPGEPSTQDGNGHGTHVAGTIAALDNSIGVLGVAPSAELYAVKVLGASGGGAISSIAQGLEWAGNNGMHVANLSLGAPSPSATLEQAVNSATSRGVLVVAASGNSGADSISYPARYANAMAVGATDQNNNRADFSQYGAGLDIVAPGVNVQSTYPGSTYASLNGTSMATPHVAGAAVLVKQKNPSWSNVRIRDHLKNTATSLGSTNLYGSGLVNAFAATR

SEQ ID NO: 62808 - protein, 269 aa, Unidentified
AQSVPWGISRVQAPAAHNRGLAGSGVKVAVLDTGISTHPDLNIRGGASFVPGEPSTQDGNGHGTHVAGTIAALNNSIGVLGVAPSAELYAVKVLGASGGGAISSVAQGLEWAGNNGMHVANLSLGSPSPSATLEQAVNSATSRGVLVVAASGNSGADSISYPARYANAMAVGATDQNNNRADFSQYGAGLDIVAPGVNVQSTYPGSTYASLNGTSMATPHVAGAAVLVKQKNPSWSNVRIRDHLKNTATSLGSTNLYGSGLVNVFAATR

SEQ ID NO: 62809 - protein, 269 aa, Unidentified
AQSVPWGISRVQAPAAHNRGLAGSGVKVAVLDTGISTHPDLRIRGGASFVPGEPSTQDGNGHGTHVAGTIAALNNSIGVLGVAPSAELYAVKVLGASGSGAISSIAQGLEWAGNNRMHVANLSLGIESPSATLEQAVNSATSRGVLVVAASGNSGADSISYPARYANAMAVGATDQNNNRADFSQYGAGLDIVAPGVNVQSTYPGSTYASLNGTSMATPHVAGAAVLVKQKNPSWSNVQIRDHLKNTATSLGSTNLYGSGLVNAFAATR

SEQ ID NO: 62810 - protein, 269 aa, Unidentified
AQSVPWGISRVQAPAAHNRGLAGSGVKVAVLDTGISTHPDLNIRGGASFVPGEPSTQDGNGHGTHVAGTIAALDNSIGVLGVAPSAELYAVKVLGASGGGAISSIAQGLEWAGNNGMHVANLSLGSPSPSATLEQAVNSATSRGVLVVAASGNSGADSISYPARYANAMAVGATDQNNNRADFSQYGAGLDIVAPGVNVQSTYPGSTYASLNGTSMATPHVAGAAVLVKQKNPSWSNVRIRDHLKNTATSLGSTNLYGSGLVNVFAATR

SEQ ID NO: 62811 - protein, 269 aa, Unidentified
AQSVPWGISRVQAPAAHNRGLAGRGVKVAVLDTGISTHPDLNIRGGASFVPGEPSTQDGNGHGTHVAGTIAALDNSIGVLGVAPSAELYAVKVLGASGGGAISSIAQGLEWAGNNGMHVANLSLGSPSPSATLEQAVNSATSRGVLVVAASGNSGEGSISYPARYANAMAVGATDQNNNRADFSQYGAGLDIVAPGVNVQSTYPGSTYASLNGTSMATPHVAGAAVLVKQKNPSWSNVRIRDHLKNTATSLGSTNLYGSGLVNAFAATR

SEQ ID NO: 62812 - protein, 269 aa, Unidentified
AQSVPWGISRVQAPAAHNRGLTGSGVKVAVLDTGISTHPDLNIRGGASFVPGEPSTQDGNGHGTHVAGTIAALNNSIGVLGVAPSAELYAVKVLGASGGGAISSIAQGLEWAGNNGMHVANLSLGLPAPSATLEQAVNSATSRGVLVVAASGNSGEGSISYPARYANAMAVGATDQNNNRADFSQYGAGLDIVAPGVNVQSTYPGSTYASENGTSMATPHVAGAAVLVKQKNPSWSNVRIRDRLKNTATSLGSTNLYGSGLVNAEAATR

SEQ ID NO: 62813 - protein, 269 aa, Unidentified
AQSVPWGISRVQAPAAHNRGLAGSGVKVAVLDTGISTHPDLNIRGGASFVPGEPSTQDGNGHGTHVAGTIAALNNSIGVLGVAPSAELYAVKVLGASGQGAISSIAQGLEWAGNNGMHVANLSIGSPSPSATLEQAVNSATSRGVLVVAASGNSGADSISYPARYANAMAVGATDQNNNRADFSQYGAGLDIVAPGVNVQSTYPGSTYASQNGTSMATPHVAGAAVLVKQKNPSWSNVRIRDHLKNTATSLGSTNLYGSGLVNAFAATR

SEQ ID NO: 62814 - protein, 269 aa, Unidentified
AQSVPWGISRVQAPAAHNRGLTGSGVKVAVLDTGISTHPDLNIRGGASFVPGEPSTQDGDGHGTHVAGTIAALNNSIGVLGVAPSAELYAVKVLGASGGGAISSIAQGLEWAGNNGMHVANLSLGSPSPSATLEQAVNSATSRGVLVVAASGNSGADSISYPARYANAMAVGATDQNNNRASFSQYGAGLDIVAPGVNVQSTYPGGRYASLNGTSMATPHVAGAAVLVKHKNPSWSNVRIRDHLKKTATSLGSTNLYGSGLVNAEAATR

SEQ ID NO: 62815 - protein, 269 aa, Unidentified
AQSVPWGISRVQAPAAHNRGLRGGGVKVAVLDTGISTHPDLNIRGGASFVPGEPSTQDGNGHGTHVAGTIAALNNNIGVLGVAPSAELYAVKVLGASGQGAISSIANGLEWAGLNGMHVANLSLGAPSPSATLEQAVNSATSRGVLVVAASGNSGAGSISYPARYANAMAVGATDQNNNRASFSQYGAGLDIVAPGVNVQSTYPGSTYASQNGTSMATPHVAGAAVLVKQKNPSWSNVRIRNHLKNTATSLGSTNLYGSGLVNAEAATR

SEQ ID NO: 62816 - protein, 269 aa, Unidentified
AQSVPWGISRVQAPAAHNRGLAGSGVKVAVLDTGISTHPDLNIRGGASFVPGEPSTQDGNGHGTHVAGTIAALDNNIGVLGVAPSAELYAVKVLGASGGGAISSIAQGLEWAGNNGMHVANLSLGSPSPSATLEQAVNSATSRGVLVVAASGNSGADSISYPARYANAMAVGATDQNNNRADFSQYGAGLDIVAPGVNVQSTYPGSTYASLNGTSMATPHVAGAAVLVKQKNPSWSNVRIRDHLKNTATSLGSTNLYGSGLVNAFAATR

SEQ ID NO: 62817 - protein, 269 aa, Unidentified
AQSVPWGISRVQAPAAHNRGLAGSGVKVAVLDTGISTHPDLNIRGGASFVPGEPSTQDGNGHGTHVAGTIAALNNSIGVLGVAPSAELYAVKVLGASGQGAISSIAQGLEWAGNNGMHVANLSIGSSSPSATLEQAVNSATSRGVLVVAASGNSGADSISYPARYANAMAVGATDQNNNRADFSQYGAGLDIVAPGVNVQSTYPGSTYASLNGTSMATPHVAGAAVLVKQKNPSWSNVRIRDHLKNTATSLGSTNLYGSGLVNAFAATR

SEQ ID NO: 62818 - protein, 269 aa, Unidentified
AQSVPWGISRVQAPAAHNRGLAGSGVKVAVLDTGISTHPDLNIRGGASFVPGEPSTQDGNGHGTHVAGTIAALNNSIGVLGVAPSAELYAVKVLGASGGGAISSIAQGLEWAGNNRMHVANLSLGSPSPSATLEQAVNSATSRGVLVVAASGNSGADSISYPARYANAMAVGATDQNNNRADFSQYGAGLDIVAPGVNVQSTYPGSAYASLNGTSMATPHVAGAAVLVKQKNPSWSNVRIRDHLKNTATSLGSTNLYGSGLVNAFAATR

SEQ ID NO: 62819 - protein, 269 aa, Unidentified
AQSVPWGISRVQAPAAHNRGLRGGGVKVAVLDTGISTHPDLNIRGGASFVPGEPSTQDGNGHGTHVAGTIAALNNNIGVLGVAPSAELYAVKVLAASGQGAISSIAQGLEWAGLNGMHVANLSLGAPSPSATLEQAVNSATSRGVLVVAASGNSGAGSISYPARYANAMAVGATDQNNNRASFSQYGAGLDIVAPGVNVQSTYPGSTYASQNGTSMATPHVAGAAVLVKQKNPSWSNVRIRNHLKNTATSLGSTNLYGSGLVNAEAATR

SEQ ID NO: 62820 - protein, 269 aa, Unidentified
AQSVPWGISRVQAPAAHNRGLAGGGVKVAVLDTGISTHPDLNIRGGASFVPGEPSTQDGNGHGTHVAGTIAALNNNIGVLGVAPSAELYAVKVLGASGQGAISSIAQGLEWAGNNGMHVANLSLGSPSPSATLEQAVNSATSRGVLVVAASGNSGADSISYPARYANAMAVGATDQNNNRADFSQYGAGLDIVAPGVNVQSTYPGSTYASLNGTSMATPHVAGAAVLVKQKNPSWSNVRIRDHLKNTATSLGSTNLYGSGLVNAFAATR

SEQ ID NO: 62821 - protein, 269 aa, Unidentified
AQSVPWGISRVQAPAAHNRGLAGSGVKVAVLDTGISTHPDLNIRGGASFVPGEPSTQDGNGHGTHAAGTIAALNNSIGVLGVAPSAELYAVKVLGASGGGAISSIAQGLEWAGNNGMHVANLSLGSPSPSATLEQAVNSATSRGVLVVAASGNSGADSISYPARYANAMAVGATDQNNNRADFSQYGAGLDIVAPGVNVQSTYPGSAYASLNGTSMATPHVAGAAVLVKQKNPSWSNVRIRDHLKNTATSLGSTNLYGSGLVNAFAATR

SEQ ID NO: 62822 - protein, 269 aa, Unidentified
AQSVPWGISRVQAPAAHNRGLAGRGVKVAVLDTGISTHPDLNIRGGASFVPGEPSTQDGNGHGTHVAGTIAALNNSIGVLGVAPSAELYAVKVLGASGGGAISSIAQGLEWAGNNGMHVANLSLGSESPSATLEQAVNSATSRGVLVVAASGNSGASSISYPARYANAMAVGATDQNNNRADFSQYGAGLDIVAPGVNVQSTYPGSTYASLNGTSMATPHVAGAAVLVKQKNPSWSNVRIRDHLKNTATSLGSTNLYGSGLVNAFAATR

SEQ ID NO: 62823 - protein, 269 aa, Unidentified
AQSVPWGISRVQAPAAHNRGLAGSGVKVAVLDTGISTHPDLNIRGGASFVPGEPSTQDGNGHGTHAAGTIAALNNSIGVLGVAPSAELYAVKVLGASGGGAISSIAQGLEWAGLNGMHVANLSLGSPSPSATLEQAVNSATSRGVLVVAASGNSGADSISYPARYANAMAVGATDQNNNRADFSQYGAGLDIVAPGVNVQSTYPGSTYASLNGTSMATPHVAGAAVLVKQKNPSWSNVRIRDHLKNTATSLGSTNLYGSGLVNAFAATR

SEQ ID NO: 62824 - protein, 269 aa, Unidentified
AQSVPWGISRVQAPAAHNRGLAGSGVKVAVLDTGISTHPDLNIRGGASFVPGEPSTQDGNGHGTHVAGTIAALDNSIGVLGVAPSAELYAVKVLGASGGGAISSIAQGLEWAGNNGMHVANLSLGSESPSATLEQAVNSATSRGVLVVAASGNSGEGSISYPARYANAMAVGATDQNNNRADFSQYGAGLDIVAPGVNVQSTYPGSTYASLNGTSMATPHVAGAAVLVKQKNPSWSNVRIRDHLKNTATSLGSTNLYGSGLVNAFAATR

SEQ ID NO: 62825 - protein, 269 aa, Unidentified
AQSVPWGISRVQAPAAHNRGLAGSGVKVAVLDTGISTHPDLNIRGGASFVPGEPSTQDGNGHGTHVAGTIAALNNSIGVLGVAPSAELYAVKVLGASGNGAISSIAQGLEWAGNNGMHVANVSLGSSSPSATLEQAVNSATSRGVLVVAASGNSGADSISYPARYANAMAVGATDQNNNRADFSQYGAGLDIVAPGVNVQSTYPGSTYASLNGTSMATPHVAGAAVLVKQKNPSWSNVRIRDHLKNTATSLGSTNLYGSGLVNAFAATR

SEQ ID NO: 62826 - protein, 269 aa, Unidentified
AQSVPWGISRVQAPAAHNRGLAGRGVKVAVLDTGISTHPDLNIRGGASFVPGEPSTQDGNGHGTHVAGTIAALDNSIGVLGVAPSAELYAVKVLGASGGGAISSIAQGLEWAGNNGMHVANLSLGSESPSATLEQAVNSATSRGVLVVAASGNSGAGSISYPARYANAMAVGATDQNNNRADFSQYGAGLDIVAPGVNVQSTYPGSTYASLNGTSMATPHVAGAAVLVKQKNPSWSNVRIRDHLKNTATSLGSTNLYGSGLVNAFAATR

SEQ ID NO: 62827 - protein, 269 aa, Unidentified
AQSVPWGISRVQAPAAHNRGLAGGGVKVAVLDTGISTHPDLNIRGGASFVPGEPSTQDGNGHGTHVAGTIAALDNSIGVLGVAPSAELYAVKVLGASGGGAISSIAQGLEWAGNNGMHVANLSLGSPSPSATLEQAVNSATSRGVLVVAASGNSGADSISYPARYANAMAVGATDQNNNRADFSQYGAGLDIVAPGVNVQSTYPGSTYASLNGTSMATPHVAGAAVLVKQKNPSWSNVRIRDHLKNTATSLGSTNLYGSGLVNAFAATR

SEQ ID NO: 62828 - protein, 269 aa, Unidentified
AQSVPWGISRVQAPAAHNRGLAGSGVKVAVLDTGISTHPDLNIRGGASFVPGEPSTQDGNGHGTHVAGTIAALNNSIGVLGVAPSAELYAVKVLGASGGGAISSIAQGLEWAGNNGMHVANLSLGSESPSATLEQAVNSATSRGVLVVAASGNSGADSISYPARYANAMAVGATDQNNNRADFSQYGAGLDIVAPGVNVQSTYPGSTYASLNGTSMATPHVAGAAVLVKQKNPSWSNVRIRDHLKNTATSLGSTNLYGSGLVNAFVATR

SEQ ID NO: 62829 - protein, 269 aa, Unidentified
AQSVPWGISRVQAPAAHNRGLAGSGVKVAVLDSGISTHPDLNIRGGASFVPGEPSTQDGNGHGTHVAGTIAALNNSIGVLGVAPSAELYAVKVLGASGGGAISSIAQGLEWAGNNGMHVANLSLGSPSPSATLEQAVNSATSRGVLVVAASGNSGADSISYPARYANAMAVGATDQNNNRADFSQYGAGLDIVAPGVNVQSTYPGSAYASLNGTSMATPHVAGAAVLVKQKNPSWSNVRIRDHLKNTATSLGSTNLYGSGLVNAFAATR

SEQ ID NO: 62830 - protein, 269 aa, Unidentified
AQSVPWGISRVQAPAAHNRGLAGSGVKVAVLDTGISTHPDLNIRGGASFVPGEPSTQDGNGHGTHVAGTIAALNNSIGVLGVAPSAELYAVKVLSASGNGAISSIAQGLEWAGNNGMHVANLSLGSPSPSATLEQAVNSATSRGVLVVAASGNSGADSISYPARYANAMAVGATDQNNNRADFSQYGAGLDIVAPGVNVQSTYPGSTYASQNGTSMATPHVAGAAVLVKQKNPSWSNVRIRDHLKNTATSLGSTNLYGSGLVNAFAATR

SEQ ID NO: 62831 - protein, 269 aa, Unidentified
AQSVPWGISRVQAPAAHNRGLAGSGVKVAVLDTGISTHPDLNIRGGASFVPGEPSTQDGNGHGTHVAGTIAALNNSIGVLGVAPSAELYAVKVLGASGQGAISSIAQGLEWAGNNGMHVANLSIGSESPSATLEQAVNSATSRGVLVVAASGNSGADSISYPARYANAMAVGATDQNNNRADFSQYGAGLDIVAPGVNVQSTYPGSTYASLNGTSMATPHVAGAAVLVKQKNPSWSNVRIRDHLKNTATSLGSTNLYGSGLVNAFAATR

SEQ ID NO: 62832 - protein, 269 aa, Unidentified
AQSVPWGISRVQAPAAHNRGLTGRGVKVAVLDTGISTHPDLNIRGGASFVPGEPSTQDGNGHGTHVAGTIAALNNSIGVLGVAPSAELYAVKVLGASGGGAISSIAQGLEWAGNNGMHVANLSLGLPAPSATLEQAVNSATSRGVLVVAASGNSGEGSISYPARYANAMAVGATDQNNNRADFSQYGAGLDIVAPGVNVQSTYPGSTYASLNGTSMATPHVAGAAVLVKQKNPSWSNVRIRDRLKNTATSLGSTNLYGSGLVNAEAATR

SEQ ID NO: 62833 - protein, 269 aa, Unidentified
AQSVPWGISRVQAPAAHNRGLTGRGVKVAVLDTGISTHPDLNIRGGASFVPGEPSTQDGNGHGTHVAGTIAALNNSIGVLGVAPSAELYAVKVLGASGGGAISSIAQGLEWAGNNGMHVANLSLGSQSPSATLEQAVNSATSRGVLVVAASGNSGEGSISYPARYANAMAVGATDQNNNRADFSQYGAGLDIVAPGVNVQSTYPGSTYASENGTSMATPHVAGAAVLVKQKNPSWSNVRIRDRLKNTATSLGSTNLYGSGLVNAEAATR

SEQ ID NO: 62834 - protein, 269 aa, Unidentified
AQSVPWGISRVQAPAAHNRGLTGRGVKVAVLDTGISTHPDLNIRGGASFVPGEPSTQDGNGHGTHVAGTIAALNNSIGVLGVAPSAELYAVKVLGASGAGAISSIAQGLEWAGNNGMHVANLSLGSPSPSATLEQAVNSATSRGVLVVAASGNSGEGSIDYPARYANAMAVGATDQNNNRADFSQYGAGLDIVAPGVNVQSTYPGSTYASENGTSMATPHVAGAAVLVKQKNPSWSNVRIRDRLKNTATSLGSTNLYGSGLVNAEAATR

SEQ ID NO: 62835 - protein, 269 aa, Unidentified
AQSVPWGISRVQAPAAHNRGLAGSGVKVAVLDTGISTHPDLNIRGGASFVPGEPSTQDGQGHGTHVAGTIAALNNSIGVLGVAPSAELYAVKVLGASGGGAISSIAQGLEWAGNNGMHVANLSLGSESPSATLEQAVNSATSRGVLVVAASGNSGADSISYPARYANAMAVGATDQNNNRADFSQYGAGLDIVAPGVNVQSTYPGSTYASLNGTSMATPHVAGAAVLVKQKNPSWSNVRIRDHLKNTATSLGSTNLYGSGLVNAFAATR

SEQ ID NO: 62836 - protein, 269 aa, Unidentified
AQSVPWGISRVQAPAAHNRGLAGSGVKVAVLDTGISTHPDLNIRGGASFVPGEPSTQDGNGHGTHVAGTIAALNNSIGVLGVAPSAELYAVKVLSASGNGAISSIAQGLEWAGNNGMHVANLSLGAPSPSATLEQAVNSATSRGVLVVAASGNSGADSISYPARYANAMAVGATDQNNNRADFSQYGAGLDIVAPGVNVQSTYPGSTYASQNGTSSATPHVAGAAVLVKQKNPSWSNVRIRDHLKNTATSLGSTNLYGSGLVNAFAATR

SEQ ID NO: 62837 - protein, 269 aa, Unidentified
AQSVPWGISRVQAPAAHNRGLAGRGVKVAVLDTGISTHPDLNIRGGASFVPGEPSTQDGNGHGTHVAGTIAALNNSIGVLGVAPSAELYAVKVLGASGGGAISSIAQGLEWAGNNGMHVANLSLGSESPSATLEQAVNSATSRGVLVVAASGNSGAGSISYPARYANAMAVGATDQNNNRADFSQYGAGLDIVAPGVNVQSTYPGSTYASLNGTSMATPHVAGAAVLVKQKNPSWSNVRIRDHLKNTATSLGSTNLYGSGLVNAFVATR

SEQ ID NO: 62838 - protein, 269 aa, Unidentified
AQSVPWGISRVQAPAAHNRGLAGSGVKVAVLDTGISTHPDLNIRGGASFVPGEPSTQDGNGHGTHVAGTIAALNNSIGVLGVAPSAELYAVKVLGASGNGAISSIAQGLEWAGNNGMHVANISLGSESPSATLEQAVNSATSRGVLVVAASGNSGADSISYPARYANAMAVGATDQNNNRADFSQYGAGLDIVAPGVNVQSTYPGSTYASLNGTSMATPHVAGAAVLVKQKNPSWSNVRIRDHLKNTATSLGSTNLYGSGLVNAFAATR

SEQ ID NO: 62839 - protein, 269 aa, Unidentified
AQSVPWGISRVQAPAAHNRGLAGRGVKVAVLDTGISTHPDLNIRGGASFVPGEPSTQDGNGHGTHVAGTIAALNNSIGVLGVAPSAELYAVKVLGASGGGAISSIAQGLEWAGNNGMHVANLSLGSESPSATLEQAVNSATSRGVLVVAASGNSGEGSISYPARYANAMAVGATDQNNNRADFSQYGAGLDIVAPGVNVQSTYPGSTYASLNGTSMATPHVAGAAVLVKQKNPSWSNVRIRDRLKNTATSLGSTNLYGSGLVNAEAATR

SEQ ID NO: 62840 - protein, 269 aa, Unidentified
AQTIPWGISRVQAPAAHNRGLTGSGVKVAVLDTGISTHPDLNIRGGASFVPGEPSTQDGNGHGTHVAGTIAALDNSIGVLGVAPSAELYAVKVLGADGEGAISSIAQGLEWAGNNGMHVANLSLGSPSPSATLEQAVNSATSRGVLVVAASGNDGASSISYPARYANAMAVGATDQNNNRASFSQYGAGLDIVAPGVNIQSTWPGSTYASLNGTSMATPHVAGAAALVKQKNPSWSNVQIRNHLKNTATSLGSTNEYGSGLVNAEAATR

SEQ ID NO: 62841 - protein, 269 aa, Unidentified
AQSVPWGISRVQAPAAHNRGLAGSGVKVAVLDSGISTHPDLNIRGGASFVPGEPSTQDGNGHGTHVAGTIAALNNSIGVLGVAPSAELYAVKVLGASGGGAISSIAQGLEWAGLNGMHVANLSLGSPSPSATLEQAVNSATSRGVLVVAASGNSGADSISYPARYANAMAVGATDQNNNRADFSQYGAGLDIVAPGVNVQSTYPGSTYASLNGTSMATPHVAGAAVLVKQKNPSWSNVRIRDHLKNTATSLGSTNLYGSGLVNAFAATR

SEQ ID NO: 62842 - protein, 269 aa, Unidentified
AQSVPWGISRVQAPAAHNRGLAGSGVKVAVLDTGISTHPDLNIRGGASFVPGEPSTQDGEGHGTHVAGTIAALNNSIGVLGVAPSAELYAVKVLGASGNGAISSIAQGLEWAGNNGMHVANLSLGAPSPSATLEQAVNSATSRGVLVVAASGNSGADSISYPARYANAMAVGATDQNNNRADFSQYGAGLDIVAPGVNVQSTYPGSTYASLNGTSMATPHVAGAAVLVKQKNPSWSNVRIRDHLKNTATSLGSTNLYGSGLVNAFAATR

SEQ ID NO: 62843 - protein, 269 aa, Unidentified
AQSVPWGISRVQAPAAHNRGLAGSGVKVAVLDTGISTHPDLNIRGGASFVPGEPSTQDGNGHGTHVAGTIAALNNSIGVLGVAPSAELYAVKVLGASGQGAISSIANGLEWAGNNGMHVANLSLGAPSPSATLEQAVNSATSRGVLVVAASGNSGADSISYPARYANAMAVGATDQNNNRADFSQYGAGLDIVAPGVNVQSTYPGSTYASLNGTSMATPHVAGAAVLVKQKNPSWSNVRIRDHLKNTATSLGSTNLYGSGLVNAFAATR

SEQ ID NO: 62844 - protein, 269 aa, Unidentified
AQSVPWGISRVQAPAAHNRRLWGSGVKVAVLDTGISTHPDLNIRGGASFVPGEPSTQDGNGHGTHVAGTIAALNNSIGVLGVAPSAELYAVKVLGASGGGAISSIAQGLEWAGANGMHVANLSLGSPSPSATLEQAVNSATSRGVLVVAASGNSGAGSISYPARYANAMAVGATDQDNNRASFSQYGAGLDIVAPGVNVQSTYPQSAYFSLNGTSMATPHVAGAAVLVKQKNPSWSNVRIRNHLKNTATSLGSTNLYGSGLVNAEAATR

SEQ ID NO: 62845 - protein, 269 aa, Bacillus lentus
AQSVPWGISRVQAPAAHNRGLTGSGVKVAVLDTGISTHEDLNVRGGVSFVPGEPSYQDGNGHGTHVAGTIAALNNSIGVVGVAPSADLYAVKVLGASGRGSVSSIAQGLEWAGQNGMHVANLSLGTEEPSATLEQAVNSATSRGVLVVAASGNSGAGSISYPARYANAMAVGATDQNNNRASFSQYGAGLDIVAPGVNVQSTYPGSTYASLNGTSMATPHVAGAAALVKQKNPSWSNVQIRDHLKNTATSLGSTNLYGSGLVNAEAATR

SEQ ID NO: 62846 - protein, 269 aa, Unidentified
AQSVPWGISRVQAPAAHNRGLTGRGVKVAVLDTGISTHPDLNIRGGASFVPGEPSTQDGNGHGTHVAGTIAALNNSIGVLGVAPSAELYAVKVLGASGGGAISSIAQGLEWAGNNGMHVANLSLGSPAPSATLEQAVNSATSRGVLVVAASGNSGEGSISYPARYANAMAVGATDQNNNRADFSQYGAGLDIVAPGVNVQSTYPGSTYASENGTSMATPHVAGAAVLVKQKNPSWSNVRIRDRLKNTATSLGSTNLYGSGLVNAEAATR

SEQ ID NO: 62847 - protein, 269 aa, Unidentified
AQSVPWGIERVQAPAAHNRGLTGSGVKVAVLDTGISTHPDLRIRGGASFVPGEPSTQDGNGHGTHVAGTIAALDNSIGVLGVAPSAELYAVKVLGASGSGSVSSIAQGLEWAGNNGMHVANLSLGSPSPSATLEQAVNSATSRGVLVVAASGNSGAGSISYPARYANAMAVGATDENNNRASFSQYGPGLDIVAPGVNILSTWPGSTYASLNGTSMATPHVAGAAALVKQKNPSWSNVQIRNHLKNTATDLGDTWEYGSGLVNAEAATR

SEQ ID NO: 62848 - protein, 269 aa, Unidentified
AQSVPWGISRVQAPAAHNRGLAGSGVKVAVLDTGISTHPDLNIRGGASFVPGEPSTQDGNGHGTHVAGTIAALNNNIGVLGVAPSAELYAVKVLGASGNGAISSIAQGLEWAGNNGMHVANLSLGSPSPSATLEQAVNSATSRGVLVVAASGNSGADSISYPARYANAMAVGATDQNNNRADFSQYGAGLDIVAPGVNVQSTYPGSTYASQNGTSMATPHVAGAAVLVKQKNPSWSNVRIRDHLKNTATSLGSTNLYGSGLVNAFAATR

SEQ ID NO: 62849 - protein, 269 aa, Unidentified
AQSVPWGISRVQAPAAHNRGLTGRGVKVAVLDTGISTHPDLNIRGGASFVPGEPSTQDGNGHGTHVAGTIAALNNSIGVLGVAPSAELYAVKVLGASGGGAISSIAQGLEWAGNNGMHVANLSLGSQSPSATLEQAVNSATSRGVLVVAASGNSGEGSISYPARYANAMAVGATDQDNNRADFSQYGAGLDIVAPGVNVQSTYPGSTYASLNGTSMATPHVAGAAVLVKQKNPSWSNVRIRDRLKNTATSLGSTNLYGSGLVNAEAATR

SEQ ID NO: 62850 - protein, 269 aa, Unidentified
AQSVPWGISRVQAPAAHNRGLAGSGVKVAVLDTGISTHPDLNIRGGASFVPGEPSTQDGNGHGTHVAGTIAALNNSIGVLGVAPSAELYAVKVLGASGQGAISSIAQGLEWAGNNGMHVANISLGAPSPSATLEQAVNSATSRGVLVVAASGNSGADSISYPARYANAMAVGATDQNNNRADFSQYGAGLDIVAPGVNVQSTYPGSTYASLNGTSMATPHVAGAAVLVKQKNPSWSNVRIRDHLKNTATSLGSTNLYGSGLVNAFAATR

SEQ ID NO: 62851 - protein, 269 aa, Unidentified
AQSVPWGISRVQAPAAHNRGLAGSGVKVAVLDTGISTHPDLNIRGGASFVPGEPSTQDGNGHGTHVAGTIAALDNSIGVLGVAPSAELYAVKVLGASGGGAISSIAQGLEWAGNNGMHVANLSLGSPSPSATLEQAVNSATSRGVLVVAASGNSGEESISYPARYANAMAVGATDQNNNRADFSQYGAGLDIVAPGVNVQSTYPGSTYASLNGTSMATPHVAGAAVLVKQKNPSWSNVRIRDHLKNTATSLGSTNLYGSGLVNAFAATR

SEQ ID NO: 62852 - protein, 269 aa, Bacillus lentus
AQSVPWGISRVQAPAAHNRGLTGSGVKVAVLDTGISTHEDLNVRGGVSFVPGETSYQDGNGHGTHVAGTIAALNNSIGVVGVAPSADLYAVKVLGASGRGSVSSIAQGLEWAGQNGMHVANLSLGSDEPSATLEQAVNSATSRGVLVVAASGNSGAGSISYPARYANAMAVGATDQNNNRASFSQYGAGLDIVAPGVNVQSTYPGSTYASLNGTSMATPHVAGAAALVKQKNPSWSNVQIRDHLKNTATSLGSTNLYGSGLVNAEAATR

SEQ ID NO: 62853 - protein, 269 aa, Unidentified
AQSVPWGISRVQAPAAHNRGLAGSGVKVAVLDTGISTHPDLNIRGGASFVPGEPSTQDGNGHGTHVAGTIAALNNSIGVLGVAPSAELYAVKVLGASGGGAISSIAQGLEWAGNNGMHVANLSLGSESPSATLEQAVNSATSRGVLVVAASGNSGADSISYPARYANAMAVGATDQNNNRADFSQYGAGLDIVAPGVNVQSTYPGSTYASQNGTSMATPHVAGAAVLVKQKNPSWSNVRIRDHLKNTATSLGSTNLYGSGLVNAFAATR

SEQ ID NO: 62854 - protein, 269 aa, Unidentified
AQSVPWGISRVQAPAAHNRRLTGSGVKVAVLDTGISTHPDLNIRGGASFVPGEPSTQDGNGHGTHVAGTIAALNNSIGVLGVAPSAELYAVKVLGASGAGAISSIAQGLEWAGANGMHVANLSLGSPSPSATLEQAVNSATSRGVLVVAASGNSGAGSISYPARYANAMAVGATDQDNNRASFSQYGAGLDLVAPGVNVQSTYPQSAYFSLNGTSMATPHVAGAAVLVKQKNPSWSNVRIRNHLKNTATSLGSTNLYGSGLVNAEAATR

SEQ ID NO: 62855 - protein, 269 aa, Unidentified
AQSVPWGISRVQAPAARNRGLAGSGVKVAVLDTGISTHPDLNIRGGASFVPGEPSTQDGNGHGTHVAGTIAALDNSIGVLGVAPSAELYAVKVLGASGGGAISSIAQGLEWAGNNGMHVANLSLGSPSPSATLEQAVNSATSRGVLVVAASGNSGADSISYPARYANAMAVGATDQNNNRADFSQYGAGLDIVAPGVNVQSTYPGSTYASLNGTSMATPHVAGAAVLVKQKNPSWSNVRIRDHLKNTATSLGSTNLYGSGLVNAFAATR

SEQ ID NO: 62856 - protein, 269 aa, Unidentified
AQSVPWGISRVQAPAAHNRGLAGRGVKVAVLDTGISTHPDLNIRGGASFVPGEPSTQDGEGHGTHVAGTIAALNNSIGVLGVAPSAELYAVKVLGASGGGAISSIAQGLEWAGNNGMHVANLSLGSESPSATLEQAVNSATSRGVLVVAASGNSGAGSISYPARYANAMAVGATDQNNNRADFSQYGAGLDIVAPGVNVQSTYPGSTYASLNGTSMATPHVAGAAVLVKQKNPSWSNVRIRDHLKNTATSLGSTNLYGSGLVNAFAATR

SEQ ID NO: 62857 - protein, 269 aa, Unidentified
AQSVPWGISRVQAPAAHNRGLTGSGVKVAVLDTGISTHPDLNIRGGASFVPGEPSTQDGNGHGTHVAGTIAALDNNIGVLGVAPRAELYAVKVLGASGSGSVSSIAQGLEWAGNNRMHVANLSLGLQAPSATLEQAVNSATSRGVLVVAASGNSGADSISYPARYANAMAVGATDQNNNRADFSQYGAGLDIVAPGVNVLSTYPGSTYASLNGTSMATPHVAGAAVLVKQKNPSWSNVRIRNHLKNTATSLGSTNLYGSGLVNAEAATR

SEQ ID NO: 62858 - protein, 269 aa, Unidentified
AQSVPWGISRVQAPAAHNRGLAGSGVKVAVLDTGISTHPDLNIRGGASFVPGEPSTQDGNGHGTHVAGTIAALNNSIGVLGVAPSAELYAVKVLAASGNGAISSIAQGLEWAGNNGMHVANLSLGSPSPSATLEQAVNSATSRGVLVVAASGNSGADSISYPARYANAMAVGATDQNNNRADFSQYGAGLDIVAPGVNVQSTYPGSTYASQNGTSMATPHVAGAAVLVKQKNPSWSNVRIRDHLKNTATSLGSTNLYGSGLVNAFAATR

SEQ ID NO: 62859 - protein, 269 aa, Unidentified
AQSVPWGIERVQAPAAHNRGLTGSGVKVAVLDTGISTHPDLRIRGGASFVPGEPSTQDGNGHGTHVAGTIAALDNSIGVLGVAPSAELYAVKVLGASGSGSVSSIAQGLEWAGNNGMHVANLSLGSPSPSATLEQAVNSATSRGVLVVAASGNSGAGSISYPARYANAMAVGATDQNNNRASFSQYGPELDIVAPGVDILSTWPGGTYAVLNGTSMATPHVAGAAALVKQKNPSWSNVQIRNHLKNTATSLGSTNEYGSGLVNAEAATR

SEQ ID NO: 62860 - protein, 269 aa, Unidentified
AQSVPWGISRVQAPAAHNRGLAGSGVKVAVLDTGISTHPDLNIRGGASFVPGEPSTQDGNGHGTHVAGTIAALDNSIGVLGVAPSAELYAVKVLGASGQGAISSIAQGLEWAGNNGMHVANLSLGSPSPSATLEQAVNSATSRGVLVVAASGNSGADSISYPARYANAMAVGATDQNNNRADFSQYGAGLDIVAPGVNVQSTYPGSTYASQNGTSMATPHVAGAAVLVKQKNPSWSNVRIRDHLKNTATSLGSTNLYGSGLVNAFAATR

SEQ ID NO: 62861 - protein, 269 aa, Unidentified
AQSVPWGISRVQAPAAHNRGLAGSGVKVAVLDTGISTHPDLNIRGGASFVPGEPSTQDGNGHGTHVAGTIAALDNSIGVLGVAPSAELYAVKVLSASGNGAISSIAQGLEWAGNNGMHVANLSLGSPSPSATLEQAVNSATSRGVLVVAASGNSGADSISYPARYANAMAVGATDQNNNRADFSQYGAGLDIVAPGVNVQSTYPGSTYASLNGTSMATPHVAGAAVLVKQKNPSWSNVRIRDHLKNTATSLGSTNLYGSGLVNAFAATR

SEQ ID NO: 62862 - protein, 269 aa, Unidentified
AQSVPWGISRVQAPAAHNRGLAGSGVKVAVLDTGISTHPDLNIRGGASFVPGEPSTQDGNGHGTHVAGTIAALNNSIGVLGVAPSAELYAVKVLGASGGGAISSIAQGLEWAGNNGMHVANLSLGSPSPSATLEQAVNSATSRGVLVVAASGNSGADSISYPARYANAMAVGATDQNNNRADFSQYGAGLDIVAPGVNVQSTYPGSTYASLNGTSMATPHVAGAAVLVKQKYPSWSNVRIRDHLKNTATSLGSTNLYGSGLVNAFVATR

SEQ ID NO: 62863 - protein, 269 aa, Unidentified
AQSVPWGISRVQAPAAHRRRLWGRGVKVAVLDTGISTHPDLNIRGGASFVPGEPSTQDGNGHGTHVAGTIAALDNSIGVLGVAPSAELYAVKVLGASGAGSVSSIAQGLEWAGANGMHVANLSLGSPSPSATLEQAVNSATSRGVLVVAASGNSGAGSISYPARYANAMAVGATDQDNNRASFSQYGAGLDIVAPGVNVQSTYPQSAYFSLNGTSMATPHVAGAAALVKQKNPSWSNVQIRNRLKNTATSLGSTNLYGSGLVNAEAATR

SEQ ID NO: 62864 - protein, 269 aa, Bacillus lentus
AQTIPWGISRVQAPAAHNRGLTGSGVKVAVLDTGISTHPDLNIRGGASFVPGEPSTQDGNGHGTHVAGTIAALNNSIGVLGVAPSAELYAVKVLGADGRGAISSIAQGLEWAGNNGMHVANLSLGSPSPSATLEQAVNSATSRGVLVVAASGNEGASSISYPARYANAMAVGATDQNNNRASFSQYGPGLDIMAPGVNIQSTYPGSTYASDNGTSMATPHVAGAAALVKQKNPSWSNVQIRNHLKNTATSLGSTNLYGSGLVNAEAATR

SEQ ID NO: 62865 - protein, 269 aa, Unidentified
AQSVPWGISRVQAPAAHNRGLAGSGVKVAVLDTGISTHPDLNIRGGASFVPGEPSTQDGNGHGTHVAGTIAALNNSIGVLGVAPSAELYAVKVLGASGGGAISSIAQGLEWAGNNGMHVANLSIGSESPSATLEQAVNSATSRGVLVVAASGNSGADSISYPARYANAMAVGATDQNNNRADFSQYGAGLDIVAPGVNVQSTYPGSTYASLNGTSMATPHVAGAAVLVKQKNPSWSNVRIRDHLKNTATSLGSTNLYGSGLVNAFAATR

SEQ ID NO: 62866 - protein, 269 aa, Unidentified
AQSVPWGISRVQAPASHNRGLAGFGVKVAVLDTGISTHPDLNIRGGASFVPGEPSTQDGNGHGTHVAGTIAALNNSIGVLGVAPSAELYAVKVLGASGGGAISSIAQGLEWAGLNGMHVANLSLGNPSPSATLEQAVNSATSRGVLVVAASGNSGAGSISYPARYANAMAVGATDQNNNRASFSQYGAGLDIVAPGVNVQSTVPGSAYASSNGTSMATPHVAGAAVLVKQKNPSWSNVQIRNHLKNTATSLGSTNLYGSGLVNAEAATR

SEQ ID NO: 62867 - protein, 269 aa, Unidentified
AQSVPWGISRVQAPAAHNRGLAGSGVKVAVLDTGISTHPDLNIRGGASFVPGEPSTQDGNGHGTHVAGTIAALNNSIGVLGVAPSAELYAVKVLAASGQGAISSIAGGLEWAGNNGMHVANLSLGSPSPSATLEQAVNSATSRGVLVVAASGNSGADSISYPARYANAMAVGATDQNNNRADFSQYGAGLDIVAPGVNVQSTYPGSTYASLNGTSMATPHVAGAAVLVKQKNPSWSNVRIRDHLKNTATSLGSTNLYGSGLVNAFAATR

SEQ ID NO: 62868 - protein, 269 aa, Unidentified
AQSVPWGISRVQAPAAHNRGLAGSGVKVAVLDTGISTHPDLNIRGGASFVPGEPSTQDGNGHGTHVAGTIAALDNSIGVLGVAPSAELYAVKVLGASGGGAISSIAQGLEWAGNNGMHVANLSLGSESPSATLEQAVNSATSRGVLVVAASGNSGADSISYPARYANAMAVGATDQNNNRADFSQYGAGLDIVAPGVNVQSTYPGSTYASLNGTSMATPHVAGAAVLVKQKNPSWSNVRIRDHLKNTATSLGSTNLYGSGLVNAFAATR

SEQ ID NO: 62869 - protein, 269 aa, Unidentified
AQSVPWGISRVQAPAAHNRGLAGSGVKVAVLDTGISTHPDLNIRGGASFVPGEPSTQDGNGHGTHVAGTIAALNNSIGVLGVAPSAELYAVKVLGASGNGAISSIAQGLEWAGNNGMHVANLSLGAPSPSATLEQAVNSATSRGVLVVAASGNSGADSISYPARYANAMAVGATDQNNNRADFSQYGAGLDIVAPGVNVQSTYPGSTYASQNGTSMATPHVAGAAVLVKQKNPSWSNVRIRDHLKNTATSLGSTNLYGSGLVNAFAATR

SEQ ID NO: 62870 - protein, 269 aa, Unidentified
AQSVPWGISRVQAPAAHNRGLAGSGVKVAVLDTGISTHPDLNIRGGASFVPGEPSTQDGNGHGTHVAGTIAALNNNIGVLGVAPSAELYAVKVLGASGGGAISSIANGLEWAGNNGMHVANLSLGSPSPSATLEQAVNSATSRGVLVVAASGNSGADSISYPARYANAMAVGATDQNNNRADFSQYGAGLDIVAPGVNVQSTYPGSTYASLNGTSMATPHVAGAAVLVKQKNPSWSNVRIRDHLKNTATSLGSTNLYGSGLVNAFAATR

SEQ ID NO: 62871 - protein, 269 aa, Unidentified
AQSVPWGISRVQAPAAHNRGLAGGGVKVAVLDTGISTHPDLNIRGGASFVPGEPSTQDGNGHGTHVAGTIAALNNSIGVLGVAPSAELYAVKVLGASGGGAISSIAQGLEWAGNNGMHVANLSLGAPSPSATLEQAVNSATSRGVLVVAASGNSGADSISYPARYANAMAVGATDQNNNRADFSQYGAGLDIVAPGVNVQSTYPGSTYASLNGTSMATPHVAGAAVLVKQKNPSWSNVRIRDHLKNTATSLGSTNLYGSGLVNAFAATR

SEQ ID NO: 62872 - protein, 269 aa, Unidentified
AQSVPWGISRVQAPAAHNRRLTGSGVKVAVLDTGISTHPDLNIRGGASFVPGEPSTQDGNGHGTHVAGTIAALNNRIGVLGVAPSAELYAVKVLGASGAGAISSIAQGLEWAGANGMHVANLSLGSPSPSATLEQAVNSATSRGVLVVAASGNSGAGSISYPARYANAMAVGATDQDNNRASFSQYGAGLDIVAPGVNVQSTYPQSAYFSLNGTSMATPHVAGAAVLVKQKNPSWSNVRIRNHLKNTATSLGSTNLYGSGLVNAEAATR

SEQ ID NO: 62873 - protein, 269 aa, Unidentified
AQSVPWGISRVQAPAAHNRGLRGGGVKVAVLDTGISTHPDLNIRGGASFVPGEPSTQDGNGHGTHVAGTIAALNNNIGVLGVAPSAELYAVKVLSASGGGAISSIANGLEWAGLNGMHVANLSLGSPSPSATLEQAVNSATSRGVLVVAASGNSGAGSISYPARYANAMAVGATDQNNNRASFSQYGAGLDIVAPGVNVQSTYPGSTYASQNGTSMATPHVAGAAVLVKQKNPSWSNVRIRNHLKNTATSLGSTNLYGSGLVNAEAATR

SEQ ID NO: 62874 - protein, 269 aa, Unidentified
AQSVPWGISRVQAPAAHNRGLAGGGVKVAVLDTGISTHPDLNIRGGASFVPGEPSTQDGNGHGTHVAGTIAALDNSIGVLGVAPSAELYAVKVLGASGQGAISSIAQGLEWAGNNGMHVANLSLGSPSPSATLEQAVNSATSRGVLVVAASGNSGADSISYPARYANAMAVGATDQNNNRADFSQYGAGLDIVAPGVNVQSTYPGSTYASLNGTSMATPHVAGAAVLVKQKNPSWSNVRIRDHLKNTATSLGSTNLYGSGLVNAFAATR

SEQ ID NO: 62875 - protein, 269 aa, Unidentified
AQSVPWGISRVQAPAAHNRGLAGRGVKVAVLDTGISTHPDLRIRGGASFVPGEPSTQDGNGHGTHVAGTIAALNNSIGVLGVAPSAELYAVKVLGASGGGAISSIAQGLEWAGNNGMHVANLSLGSPSPSATLEQAVNSATSRGVLVVAASGNSGEGSISYPARYANAMAVGATDQNNNRADFSQYGAGLDIVAPGVNVQSTYPGSTYASLNGTSMATPHVAGAAVLVKQKNPSWSNVRIRDHLKNTATSLGSTNLYGSGLVNAFAATR

SEQ ID NO: 62876 - protein, 269 aa, Unidentified
AQSVPWGISRVQAPAAHNRGLAGSGVKVAVLDTGISTHPDLNIRGGASFVPGEPSTQDGNGHGTHVAGTIAALNNSIGVLGVAPSAELYAVKVLGASGQGAISSIAQGLEWAGNNGMHVANVSLGSSSPSATLEQAVNSATSRGVLVVAASGNSGADSISYPARYANAMAVGATDQNNNRADFSQYGAGLDIVAPGVNVQSTYPGSTYASLNGTSMATPHVAGAAVLVKQKNPSWSNVRIRDHLKNTATSLGSTNLYGSGLVNAFAATR

SEQ ID NO: 62877 - protein, 269 aa, Unidentified
AQSVPWGISRVQAPAAHNRGLAGSGVKVAVLDTGISTHPDLNIRGGASFVPGEPSTQDGNGHGTHVAGTIAALNNSIGVLGVAPSAELYAVKVLGASGGGAISSIAQGLEWAGNNGMHVANLSLGAESPSATLEQAVNSATSRGVLVVAASGNSGADSISYPARYANAMAVGATDQNNNRADFSQYGAGLDIVAPGVNVQSTYPGSTYASLNGTSMATPHVAGAAVLVKQKNPSWSNVRIRDHLKNTATSLGSTNLYGSGLVNAFAATR

SEQ ID NO: 62878 - protein, 269 aa, Unidentified
AQSVPWGISRVQAPAAHNRGLAGSGVKVAVLDSGISTHPDLNIRGGASFVPGEPSTQDGNGHGTHVAGTIAALNNSIGVLGVAPSAELYAVKVLGASGGGAISSIAQGLEWAGNNGMHVANLSLGLPSPSATLEQAVNSATSRGVLVVAASGNSGADSISYPARYANAMAVGATDQNNNRADFSQYGAGLDIVAPGVNVQSTYPGSTYASLNGTSMATPHVAGAAVLVKQKNPSWSNVRIRDHLKNTATSLGSTNLYGSGLVNAFAATR

SEQ ID NO: 62879 - protein, 269 aa, Unidentified
AQSVPWGISRVQAPAAHNRGLAGSGVKVAVLDTGISTHPDLNIRGGASFVPGEPSTQDGNGHGTHVAGTIAALNNSIGVLGVAPSAELYAVKVLGASGGGAISSIAQGLEWAGNNRMHVANLSLGLPSPSATLEQAVNSATSRGVLVVAASGNSGADSISYPARYANAMAVGATDQNNNRADFSQYGAGLDIVAPGVNVQSTYPGSTYASLNGTSMATPHVAGAAVLVKQKNPSWSNVRIRDHLKNTATSLGSTNLYGSGLVNAFAATR

SEQ ID NO: 62880 - protein, 269 aa, Unidentified
AQSVPWGISRVQAPAAHRRGLWGRGVKVAVLDTGISTHPDLNIRGGASFVPGEPSTQDGNGHGTHVAGTIAALDNSIGVLGVAPSAELYAVKVLGASGAGSVSSIAQGLEWAGANGMHVANLSLGSPSPSATLEQAVNSATSRGVLVVAASGNSGAGSISYPARYANAMAVGATDQDNNRASFSQYGAGLDLVAPGVNVQSTYPQSAYFSLNGTSMATPHVAGAAALVKQKNPSWSNVQIRNRLKNTATSLGSTNLYGSGLVNAEAATR

SEQ ID NO: 62881 - protein, 275 aa, Unidentified
AQTIPWGISRVQAPAAHNRGLTGSGVKVAVLDTGIXSTHPDLNIRGGASFVPGEPXSTQDGNGHGTHVAGTIAALNNSIGVLGVAPSAELYAVKVLGADGEGAISSIAQGLEWAGNNGMHVANLSLGSPSPSATLEQAVNSATSRGVLVVAASGNSGAXSSISXXXYPARYANAMAVGATDQNNNRASFSQYGPGLDIVAPGVNILSTWPGSTYASLSGTSMATPHVAGAAALVKQKNPSWSNVQIRNHLKNTATSLGSTNLYGSGLVNAEAATR

SEQ ID NO: 62882 - protein, 269 aa, Unidentified
AQSVPWGISRVQAPAAHNRGLAGSGVKVAVLDTGISTHPDLRIRGGASFVPGEPSTQDGNGHGTHVAGTIAALDNSIGVLGVAPSAELYAVKVLGASGGGAISSIAQGLEWAGNNGMHVANLSLGSESPSATLEQAVNSATSRGVLVVAASGNSGAGSISYPARYANAMAVGATDQNNNRADFSQYGAGLDIVAPGVNVQSTYPGSTYASLNGTSMATPHVAGAAVLVKQKNPSWSNVRIRDHLKNTATSLGSTNLYGSGLVNAFAATR

SEQ ID NO: 62883 - protein, 269 aa, Unidentified
AQSVPWGISRVQAPAAHNRGLAGSGVKVAVLDTGISTHPDLNIRGGASFVPGEPSTQDGNGHGTHVAGTIAALNNSIGVLGVAPSAELYAVKVLAASGNGAISSIAGGLEWAGNNGMHVANLSLGSPSPSATLEQAVNSATSRGVLVVAASGNSGADSISYPARYANAMAVGATDQNNNRADFSQYGAGLDIVAPGVNVQSTYPGSTYASLNGTSMATPHVAGAAVLVKQKNPSWSNVRIRDHLKNTATSLGSTNLYGSGLVNAFAATR

SEQ ID NO: 62884 - protein, 269 aa, Unidentified
AQSVPWGISRVQAPAAHNRGLAGSGVKVAVLDTGISTHPDLNIRGGASFVPGEPSTQDGNGHGTHVAGTIAALNNSIGVLGVAPSAELYAVKVLGASGNGAISSIAQGLEWAGNNGMHVANTSLGSSSPSATLEQAVNSATSRGVLVVAASGNSGADSISYPARYANAMAVGATDQNNNRADFSQYGAGLDIVAPGVNVQSTYPGSTYASLNGTSMATPHVAGAAVLVKQKNPSWSNVRIRDHLKNTATSLGSTNLYGSGLVNAFAATR

SEQ ID NO: 62885 - protein, 269 aa, Unidentified
AQSVPWGISRVQAPAAHNRGLAGGGVKVAVLDTGISTHPDLNIRGGASFVPGEPSTQDGNGHGTHVAGTIAALNNSIGVLGVAPSAELYAVKVLGASGQGAISSIAQGLEWAGNNGMHVANLSLGAPSPSATLEQAVNSATSRGVLVVAASGNSGADSISYPARYANAMAVGATDQNNNRADFSQYGAGLDIVAPGVNVQSTYPGSTYASLNGTSMATPHVAGAAVLVKQKNPSWSNVRIRDHLKNTATSLGSTNLYGSGLVNAFAATR

SEQ ID NO: 62886 - protein, 269 aa, Unidentified
AQSVPWGISRVQAPAAHNRGLRGSGVKVAVLDTGISTHPDLNIRGGASFVPGEPSTQDGNGHGTHVAGTIAALNNNIGVLGVAPSAELYAVKVLAASGQGAISSIANGLEWAGLNGMHVANLSLGAPSPSATLEQAVNSATSRGVLVVAASGNSGAGSISYPARYANAMAVGATDQNNNRASFSQYGAGLDIVAPGVNVQSTYPGSTYASQNGTSMATPHVAGAAVLVKQKNPSWSNVRIRNHLKNTATSLGSTNLYGSGLVNAEAATR

SEQ ID NO: 62887 - protein, 269 aa, Unidentified
AQTVPWGISRVQAPAAHNRGLTGSGVKVAVLDTGISTHEDLNIRGGASFVPGEPSTQDGNGHGTHVAGTIAALDNSIGVLGVAPSAELYAVKVLGADGEGAISSIAQGLEWAGNNGMHVANLSLGSPSPSATLEQAVNSATSRGVLVVAASGNSGASSIGYPARYANAMAVGATDQNNNRASFSRYGAGLDIVAPGVNIQSTYPGSTYASLNGTSMATPHVAGAAALVKQKNPSWSNVQIRNHLKNTATSLGDTNLYGSGLVNAEAATR

SEQ ID NO: 62888 - protein, 269 aa, Unidentified
AQSVPWGISRVQAPAAHNRGLAGSGVKVAVLDTGISTHPDLNIRGGASFVPGEPSTQDGNGHGTHVAGTIAALNNSIGVLGVAPSAELYAVKVLSASGGGAISSIANGLEWAGNNGMHVANLSLGSPSPSATLEQAVNSATSRGVLVVAASGNSGADSISYPARYANAMAVGATDQNNNRADFSQYGAGLDIVAPGVNVQSTYPGSTYASLNGTSMATPHVAGAAVLVKQKNPSWSNVRIRDHLKNTATSLGSTNLYGSGLVNAFAATR

SEQ ID NO: 62889 - protein, 269 aa, Unidentified
AQSVPWGISRVQAPAAHNRGLAGSGVKVAVLDTGISTHPDLNIRGGASFVPGEPSTQDGNGHGTHVAGTIAALNNSIGVLGVAPSAELYAVKVLGASGDGAISSIAQGLEWAGNNRMHVANLSLGSPSPSATLEQAVNSATSRGVLVVAASGNSGADSISYPARYANAMAVGATDQNNNRADFSQYGAGLDIVAPGVNVQSTYPGSTYASDNGTSMATPHVAGAAVLVKQKNPSWSNVRIRDHLKNTATSLGSTNLYGSGLVNAFAATR

SEQ ID NO: 62890 - protein, 269 aa, Unidentified
AQVVPWGISRVQAPAAHNRGLTGSGVKVAVLDTGISTHPDLNIRGGASFVPGEPSTQDGNGHGTHVAGTIAALDNGIGVLGVAPDAELYAVKVLGASGQGSVSSIAQGLEWAGNNAMHVANLSLGSPSPSATLEQAVNSATSRGVLVVAASGNSGAGSISYPARYANAMAVGATDQNNNRASFSQYGAGLDIVAPGVNVMSTYIGSTYASKSGTSQATPHVAGAAALVKQKNPSWSNVQIRDHLKNTATPLGSTNLYGSGLVNAEAATR

SEQ ID NO: 62891 - protein, 269 aa, Unidentified
AQSVPWGISRVQAPAAHNRGLAGSGVKVAVLDTGISTHPDLNIRGGASFVPGEPSTQDGNGHGTHVAGTIAALNNSIGVLGVAPSAELYAVKVLAASGNGAISSIAQGLEWAGNNGMHVANLSLGSESPSATLEQAVNSATSRGVLVVAASGNSGADSISYPARYANAMAVGATDQNNNRADFSQYGAGLDIVAPGVNVQSTYPGSTYASLNGTSMATPHVAGAAVLVKQKNPSWSNVRIRDHLKNTATSLGSTNLYGSGLVNAFAATR

SEQ ID NO: 62892 - protein, 269 aa, Unidentified
AQSVPWGISRVQAPAAHNRGLAGSGVKVAVLDTGISTHPDLNIRGGASFVPGEPSTQDGNGHGTHVAGTIAALNNSIGVLGVAPSAELYAVKVLGASGGGAISSIAQGLEWAGNNGMHVANLSLGSESPSATLEQAVNSATSRGVLVVAASGNSGADSISYPARYANAMAVGATDQNNNRADFSQYGAGLDIVAPGVNVQSTYPGSTYASLNGTSMATPHVAGAAVLVKQKNPSWSNVRIRDHLKNTATSLGSTNLYGSGLVNVFAATR

SEQ ID NO: 62893 - protein, 269 aa, Unidentified
AQSVPWGISRVQAPAAHNRGLAGSGVKVAVLDTGISTHPDLRIRGGASFVPGEPSTQDGNGHGTHVAGTIAALNNSIGVLGVAPSAELYAVKVLGASGGGAISSIAQGLEWAGNNGMHVANLSLGSESPSATLEQAVNSATSRGVLVVAASGNSGEGSISYPARYANAMAVGATDQNNNRADFSQYGAGLDIVAPGVNVQSTYPGSTYASLNGTSMATPHVAGAAVLVKQKNPSWSNVRIRDHLKNTATSLGSTNLYGSGLVNAFAATR

SEQ ID NO: 62894 - protein, 269 aa, Unidentified
AQSVPWGISRVQAPAAHNRGLAGSGVKVAVLDTGISTHPDLNIRGGASFVPGEPSTQDGNGHGTHVAGTIAALNNSIGVLGVAPSAELYAVKVLGASGNGAISSIANGLEWAGNNGMHVANLSLGSPSPSATLEQAVNSATSRGVLVVAASGNSGADSISYPARYANAMAVGATDQNNNRADFSQYGAGLDIVAPGVNVQSTYPGSTYASQNGTSMATPHVAGAAVLVKQKNPSWSNVRIRDHLKNTATSLGSTNLYGSGLVNAFAATR

SEQ ID NO: 62895 - protein, 269 aa, Unidentified
AQSVPWGISRVQAPAAHNRGLAGSGVKVAVLDTGISTHPDLNIRGGASFVPGEPSTQDGNGHGTHVAGTIAALNNSIGVLGVAPSAELYAVKVLAASGNGAISSIAQGLEWAGNNGMHVANLSIGSPSPSATLEQAVNSATSRGVLVVAASGNSGADSISYPARYANAMAVGATDQNNNRADFSQYGAGLDIVAPGVNVQSTYPGSTYASLNGTSMATPHVAGAAVLVKQKNPSWSNVRIRDHLKNTATSLGSTNLYGSGLVNAFAATR

SEQ ID NO: 62896 - protein, 269 aa, Unidentified
AQSVPWGISRVQAPAAHNRGLAGSGVKVAVLDTGISTHPDLNIRGGASFVPGEPSTQDGNGHGTHVAGTIAALNNNIGVLGVAPSDELYAVKVLAASGNGAISSIAQGLEWAGNNGMHVANLSLGSPSPSATLEQAVNSATSRGVLVVAASGNSGADSISYPARYANAMAVGATDQNNNRASFSQYGAGLDIVAPGVNVQSTYPGSTYASLNGTSMATPHVAGAAVLVKQKNPSWSNVRIRDHLKNTATSLGSTNLYGSGLVNAFAATR

SEQ ID NO: 62897 - protein, 269 aa, Unidentified
AQSVPWGISRVQAPAAHNRGLAGSGVKVAVLDTGISTHPDLNIRGGASFVPGEPSTQDGQGHGTHVAGTIAALNNSIGVLGVAPSAELYAVKVLGASGQGAISSIAQGLEWAGNNGMHVANLSLGSESPSATLEQAVNSATSRGVLVVAASGNSGADSISYPARYANAMAVGATDQNNNRADFSQYGAGLDIVAPGVNVQSTYPGSTYASLNGTSMATPHVAGAAVLVKQKNPSWSNVRIRDHLKNTATSLGSTNLYGSGLVNAFAATR

SEQ ID NO: 62898 - protein, 269 aa, Unidentified
AQSVPWGISRVQAPAAHRRRLWGRGVKVAVLDTGISTHPDLNIRGGASFVPGEPSTQDGNGHGTHVAGTIAALDNSIGVLGVAPSAELYAVKVLGASGAGSVSSIAQGLEWAGANGMHVANLSLGSPSPSATLEQAVNSATSRGVLVVAASGNSGAGSISYPARYANAMAVGATDQDNNRASFSQYGAGLDLVAPGVNVQSTYPQSTYFSLNGTSMATPHVAGAAALVKQKNPSWSNVQIRNRLKNTATSLGSTNLYGSGLVNAEAATR

SEQ ID NO: 62899 - protein, 269 aa, Unidentified
AQSVPWGISRVQAPAAHNRGLAGSGVKVAVLDTGISTHPDLNIRGGASFVPGEPSTQDGNGHGTHVAGTIAALDNSIGVLGVAPSAELYAVKVLGASGGGAISSIAQGLEWAGNNGMHVANLSLGSPSPSATLEQAVNSATSRGVLVVAASGNSGEGSISYPARYANAMAVGATDQNNNRADFSQYGAGLDIVAPGVNVQSTYPGSTYASLNGTSMATPHVAGAAVLVKQKNPSWSNVRIRDHLKNTATSLGSTNLYGSGLVNAFVATR

SEQ ID NO: 62900 - protein, 269 aa, Unidentified
AQSVPWGISRVQAPAAHNRGLAGSGVKVAVLDTGISTHPDLNIRGGASFVPGEPSTQDGNGHGTHVAGTIAALNNSIGVLGVAPSAELYAVKVLGASGNGAISSIANGLEWAGNNGMHVANLSLGAPSPSATLEQAVNSATSRGVLVVAASGNSGADSISYPARYANAMAVGATDQNNNRADFSQYGAGLDIVAPGVNVQSTYPGSTYASLNGTSMATPHVAGAAVLVKQKNPSWSNVRIRDHLKNTATSLGSTNLYGSGLVNAFAATR

SEQ ID NO: 62901 - protein, 269 aa, Unidentified
AQSVPWGISRVQAPAAHNRGLAGSGVKVAVLDTGISTHPDLNIRGGASFVPGEPSTQDGNGHGTHVAGTIAALNNSIGVLGVAPSAELYAVKVLGASGQGAISSIAQGLEWAGNNGMHVANLSLGAESPSATLEQAVNSATSRGVLVVAASGNSGADSISYPARYANAMAVGATDQNNNRADFSQYGAGLDIVAPGVNVQSTYPGSTYASLNGTSMATPHVAGAAVLVKQKNPSWSNVRIRDHLKNTATSLGSTNLYGSGLVNAFAATR

SEQ ID NO: 62902 - protein, 269 aa, Unidentified
AQTIPWGISRVQAPAAHNRGLTGSGVKVAVLDTGISTHPDLNIRGGASFVPGEPSTQDGNGHGTHVAGTIAALNNSIGVLGVAPSAELYAVKVLGADGRGAISSIAQGLEWAGNNGMHVANLSLGSPSPSATLEQAVNSATSRGVLVVAASGNXGASSISYPARYANAMAVGATDQNNNRASFSQYGPGLDIMAPGVNIQSTYPGSTYASXNGTSMATPHVAGAAALVKQKNPSWSNVQIRNHLKNTATSLGSTNLYGSGLVNAEAATR

SEQ ID NO: 62903 - protein, 269 aa, Unidentified
AQSVPWGISRVQAPAAHNRGLAGSGVKVAVLDTGISTHPDLNIRGGASFVPGEPSTQDGNGHGTHVAGTIAALNNSIGVLGVAPSAELYAVKVLGASGNGAISSIAQGLEWAGNNGMHVANTSLGAPSPSATLEQAVNSATSRGVLVVAASGNSGADSISYPARYANAMAVGATDQNNNRADFSQYGAGLDIVAPGVNVQSTYPGSTYASLNGTSMATPHVAGAAVLVKQKNPSWSNVRIRDHLKNTATSLGSTNLYGSGLVNAFAATR

SEQ ID NO: 62904 - protein, 269 aa, Unidentified
AQSVPWGISRVQAPAAHNRGLAGSGVKVAVLDTGISTHPDLNIRGGASFVPGEPSTQDGNGHGTHVAGTIAALDNSIGVLGVAPSAELYAVKVLGASGGGAISSIAQGLEWAGNNGMHVANLSLGSESPSATLEQAVNSATSRGVLVVAASGNSGAESISYPARYANAMAVGATDQNNNRADFSQYGAGLDIVAPGVNVQSTYPGSTYASLNGTSMATPHVAGAAVLVKQKNPSWSNVRIRDHLKNTATSLGSTNLYGSGLVNAFAATR

SEQ ID NO: 62905 - protein, 269 aa, Unidentified
AQSVPWGISRVQAPAAHNRGLAGSGVKVAVLDTGISTHPDLNIRGGASFVPGEPSTQDGNGHGTHVAGTIAALDNSIGVLGVAPSAELYAVKVLSASGGGAISSIAQGLEWAGNNGMHVANLSLGSPSPSATLEQAVNSATSRGVLVVAASGNSGADSISYPARYANAMAVGATDQNNNRADFSQYGAGLDIVAPGVNVQSTYPGSTYASLNGTSMATPHVAGAAVLVKQKNPSWSNVRIRDHLKNTATSLGSTNLYGSGLVNAFAATR

SEQ ID NO: 62906 - protein, 269 aa, Unidentified
AQSVPWGISRVQAPAAHNRGLAGSGVKVAVLDTGISTHPDLRIRGGASFVPGEPSTQDGNGHGTHVAGTIAALNNSIGVLGVAPSAELYAVKVLGASGGGAISSIAQGLEWAGNNGMHVANLSLGSPSPSATLEQAVNSATSRGVLVVAASGNSGEESISYPARYANAMAVGATDQNNNRADFSQYGAGLDIVAPGVNVQSTYPGSTYASLNGTSMATPHVAGAAVLVKQKNPSWSNVRIRDHLKNTATSLGSTNLYGSGLVNAFAATR

SEQ ID NO: 62907 - protein, 269 aa, Unidentified
AQTIPWGISRVQAPAAHNRGLTGSGVKVAVLDTGISTHEDLNIRGGASFVPGEPSTQDGNGHGTHVAGTIAALDNSIGVLGVAPSAELYAVKVLGADGEGAISSIAQGLEWAGNNGMHVANLSLGSPSPSATLEQAVNSATSRGVLVVAASGNSGASSIGYPARYANAMAVGATDQNNNRASFSRYGAGLDIVAPGVNVQSTYPGSTYASLNGTSMATPHVAGAAALVKQKNPSWSNVQIRNHLKNTATSLGDTNLYGSGLVNAEAATR

SEQ ID NO: 62908 - protein, 269 aa, Unidentified
AQSVPWGISRVQAPAAHNRGLTGRGVKVAVLDTGISTHPDLNIRGGASFVPGEPSTQDGNGHGTHVAGTIAALNNSIGVLGVAPSAELYAVKVLGASGGGAISSIAQGLEWAGNNGMHVANLSLGSESPSATLEQAVNSATSRGVLVVAASGNSGEESISYPARYANAMAVGATDQNNNRADFSQYGAGLDIVAPGVNVQSTYPGSTYASLNGTSMATPHVAGAAVLVKQKNPSWSNVRIRDRLKNTATSLGSTNLYGSGLVNAEAATR

SEQ ID NO: 62909 - protein, 269 aa, Unidentified
AQSVPWGISRVQAPAAHNRGLAGSGVKVAVLDTGISTHPDLNIRGGASFVPGEPSTQDGNGHGTHVAGTIAALDNSIGVLGVAPSAELYAVKVLSASGSGAISSIANGLEWAGNNGMHVANLSLGSPSPSATLEQAVNSATSRGVLVVAASGNSGADSISYPARYANAMAVGATDQNNNRADFSQYGAGLDIVAPGVNVQSTYPGSTYASLNGTSMATPHVAGAAVLVKQKNPSWSNVRIRDHLKNTATSLGSTNLYGSGLVNAFAATR

SEQ ID NO: 62910 - protein, 269 aa, Unidentified
AQSVPWGISRVQAPAAHNRGLAGSGVKVAVLDTGISTHPDLRIRGGASFVPGEPSTQDGNGHGTFVAGTIAALNNSIGVLGVAPSAELYAVKVLGASGGGAISSIAQGLEWAGNNGMHVANLSLGSPSPSATLEQAVNSATSRGVLVVAASGNSGADSISYPARYANAMAVGATDQNNNRADFSQYGAGLDIVAPGVNVQSTYPGSTYASENGTSMATPHVAGAAVLVKQKNPSWSNVRIRDHLKNTATSLGSTNLYGSGLVNAEAATR

SEQ ID NO: 62911 - protein, 269 aa, Unidentified
AQSIPWGISRVQAPAAHNRGLTGSGVKVAVLDTGISTHEDLNIRGGASFVPGEPSTQDGNGHGTHVAGTIAALDNSIGVLGVAPSAELYAVKVLGADGEGAISSIAQGLEWAGNNGMHVANLSLGSPSPSATLEQAVNSATSRGVLVVAASGNSGASSIGYPARYANAMAVGATDQNNNRASFSRYGAGLDIVAPGVNIQSTYPGSTYASLNGTSMATPHVAGAAALVKQKNPSWSNVQIRNHLKNTATSLGDTNLYGSGLVNAEAATR

SEQ ID NO: 62912 - protein, 269 aa, Unidentified
AQSVPWGISRVQAPAAHNRGLAGSGVKVAVLDTGISTHPDLNIRGGASFVPGEPSTQDGEGHGTHVAGTIAALNNSIGVLGVAPSAELYAVKVLGASGNGAISSIAQGLEWAGNNGMHVANLSLGSESPSATLEQAVNSATSRGVLVVAASGNSGADSISYPARYANAMAVGATDQNNNRADFSQYGAGLDIVAPGVNVQSTYPGSTYASLNGTSMATPHVAGAAVLVKQKNPSWSNVRIRDHLKNTATSLGSTNLYGSGLVNAFAATR

SEQ ID NO: 62913 - protein, 269 aa, Unidentified
AQSVPWGISRVQAPAAHNRGLAGSGVKVAVLDTGISTHPDLNIRGGASFVPGEPSTQDGNGHGTHVAGTIAALNNSIGVLGVAPSAELYAVKVLGASGNGAISSIAQGLEWAGNNGMHVANLSIGSSSPSATLEQAVNSATSRGVLVVAASGNSGADSISYPARYANAMAVGATDQNNNRADFSQYGAGLDIVAPGVNVQSTYPGSTYASLNGTSMATPHVAGAAVLVKQKNPSWSNVRIRDHLKNTATSLGSTNLYGSGLVNAFAATR

SEQ ID NO: 62914 - protein, 269 aa, Unidentified
AQSVPWGISRVQAPAAHNRGLAGSGVKVAVLDTGISTHPDLNIRGGASFVPGEPSTQDGNGHGTHVAGTIAALDNSIGVLGVAPSAELYAVKVLGASGGGAISSIAQGLEWAGNNGMHVANLSLGSPSPSATLEQAVNSATSRGVLVVAASGNSGADSISYPARYANAMAVGATDQNNNRADFSQYGAGLDIVAPGVNVQSTYPGSTYASLNGTSMATPHVAGAAVLVKQKYPSWSNVRIRDHLKNTATSLGSTNLYGSGLVNAFAATR

SEQ ID NO: 62915 - protein, 269 aa, Unidentified
AQSVPWGISRVQAPASHNRGLAGSGVKVAVLDSGISTHPDLNIRGGASFVPGEPSTQDGNGHGTHVAGTIAALNNSIGVLGVAPSAELYAVKVLGASGGGAISSIAQGLEWAGLNGMHVANLSLGNPSPSATLEQAVNSATSRGVLVVAASGNSGAGSISYPARYANAMAVGATDQNNNRASFSQYGAGLDIVAPGVNVQSTAPQSAYASLNGTSMATPHVAGAAVLVKQKNPSWSNVQIRNHLKNTATSLGSTNLYGSGLVNAEAATR

SEQ ID NO: 62916 - protein, 269 aa, Unidentified
AQSVPWGISRVQAPAAHNRGLAGSGVKVAVLDTGISTHPDLNIRGGASFVPGEPSTQDGNGHGTHVAGTIAALDNSIGVLGVTPSAELYAVKVLGASGGGAISSIAQGLEWAGNNGMHVANLSLGSPSPSATLEQAVNSATSRGVLVVAASGNSGEGSISYPARYANAMAVGATDQNNNRADFSQYGAGLDIVAPGVNVQSTYPGSTYASLNGTSMATPHVAGAAVLVKQKNPSWSNVRIRDHLKNTATSLGSTNLYGSGLVNAFAATR

SEQ ID NO: 62917 - protein, 269 aa, Unidentified
AQSVPWGIERVQAPAAHNRGLTGSGVKVAVLDTGISTHPDLRIRGGASFVPGEPSTQDGNGHGTHVAGTIAALDNSIGVLGVAPSAELYAVKVLGASGSGSVSSIAQGLEWAGNNGMVVANLSLGSPSPSATLEQAVNSATSRGVLVVAASGNSGAGSISYPARYANAMAVGATDENNNRASFSQYGPGLDIVAPGVNILSTWPGSTYASLNGTSMATPHVAGAAALVKQKNPSWSNVQIRNHLKNTATDLGSTWEYGSGLVNAEAATR

SEQ ID NO: 62918 - protein, 269 aa, Unidentified
AQSVPWGISRVQAPAAHNRGLAGSGVKVAVLDTGISTHPDLRIRGGASFVPGEPSTQDGNGHGTFVAGTIAALDNSIGVLGVAPSAELYAVKVLGASGGGAISSIAQGLEWAGNNGMHVANLSLGSPSPSATLEQAVNSATSRGVLVVAASGNSGADSISYPARYANAMAVGATDQNNNRADFSQYGAGLDIVAPGVNVQSTYPGSTYASLNGTSMATPHVAGAAVLVKQKNPSWSNVRIRDHLKNTATSLGSTNLYGSGLVNAEAATR

SEQ ID NO: 62919 - protein, 269 aa, Bacillus lentus
AQTIPWGISRVQAPAAHNRGLTGSGVKVAVLDTGISTHPDLNVRGGASFVPGEPSTQDGNGHGTHVAGTIAALNNSIGVLGVAPSAELYAVKVLGADGRGAISSIAQGLEWAGNNGMHVANLSLGSPSPSATLEQAVNSATSRGVLVVAASGNSGASSISYPARYANAMAVGATDQNNNRASFSQYGAGLDIVAPGVNVQSTYPGSTYASDNGTSMATPHVAGVAALVKQKNPSWSNVQIRNHLKNTATGLGNTNLYGSGLVNAEAATR

SEQ ID NO: 62920 - protein, 269 aa, Unidentified
AQSVPWGISRVQAPAAHNRGLTGSGVKVAVLDTGISTHPDLNIRGGASFVPGEPSTQDGNGHGTHVAGTIAALDNSIGVLGVAPSAELYAVKVLGASGAGAISSIAQGLEWAGNNGMHVANLSLGSPSPSATLEQAVNSATSRGVLVVAASGNSGEGSISYPARYANAMAVGATDQNNNRADFSQYGAGLDIVAPGVNVQSTYPGSTYASENGTSMATPHVAGAAVLVKQKNPSWSNVRIRDRLKNTATSLGSTNLYGSGLVNAFAATR

SEQ ID NO: 62921 - protein, 269 aa, Unidentified
AQSVPWGISRVQAPAAHNRRLTGSGVKVAVLDTGISTHPDLNIRGGASFVPGEPSTQDGNGHGTHVAGTIAALNNRIGVLGVAPSAELYAVKVLGASGGGAISSIAQGLEWAGANGMHVANLSLGSPSPSATLEQAVNSATSRGVLVVAASGNSGAGSISYPARYANAMAVGATDQDNNRASFSQYGAGLDIVAPGVNVQSTYPQSAYFSLNGTSMATPHVAGAAVLVKQKNPSWSNVRIRNHLKNTATSLGSTNLYGSGLVNAEAATR

SEQ ID NO: 62922 - protein, 269 aa, Unidentified
AQSVPWGISRVQAPAAHNRGLAGSGVKVAVLDTGISTHPDLNIRGGASFVPGEPSTQDGQGHGTHVAGTIAALNNSIGVLGVAPSAELYAVKVLGASGNGAISSIAQGLEWAGNNGMHVANLSLGSPSPSATLEQAVNSATSRGVLVVAASGNSGADSISYPARYANAMAVGATDQNNNRADFSQYGAGLDIVAPGVNVQSTYPGSTYASQNGTSMATPHVAGAAVLVKQKNPSWSNVRIRDHLKNTATSLGSTNLYGSGLVNAFAATR

SEQ ID NO: 62923 - protein, 269 aa, Unidentified
AQSVPWGISRVQAPAAHNRGLAGSGVKVAVLDTGISTHPDLRIRGGASFVPGEPSTQDGNGHGTHVAGTIAALNNSIGVLGVAPSAELYAVKVLGASGGGAISSIAQGLEWAGNNGMHVANLSLGSPSPSATLEQAVNSATSRGVLVVAASGNSGADSISYPARYANAMAVGATDQNNNRADFSQYGAGLDIVAPGVNVQSTYPGSTYASENGTSMATPHVAGAAVLVKQKNPSWSNVRIRDHLKNTATSLGSTNLYGSGLVNAFAATR

SEQ ID NO: 62924 - protein, 269 aa, Unidentified
AQSVPWGISRVQAPASHNRGLAGFGVKVAVLDSGISTHPDLNIRGGASFVPGEPSTQDGNGHGTHVAGTIAALNNSIGVLGVAPSAELYAVKVLGASGGGAISSIAQGLEWAGLNGMHVANLSLGSPSPSATLEQAVNSATSRGVLVVAASGNSGAGSISYPARYANAMAVGATDQNNNRASFSQYGAGLDIVAPGVNVQSTAPQSAYASLNGTSMATPHVAGAAVLVKQKNPSWSNVQIRNHLKNTATSLGSTNLYGSGLVNAEAATR

SEQ ID NO: 62925 - protein, 269 aa, Unidentified
AQSVPWGISRVQAPAAHNRGLAGGGVKVAVLDTGISTHPDLNIRGGASFVPGEPSTQDGNGHGTHVAGTIAALNNSIGVLGVAPSAELYAVKVLGASGGGAISSIAQGLEWAGNNGMHVANLSLGSESPSATLEQAVNSATSRGVLVVAASGNSGADSISYPARYANAMAVGATDQNNNRADFSQYGAGLDIVAPGVNVQSTYPGSTYASLNGTSMATPHVAGAAVLVKQKNPSWSNVRIRDHLKNTATSLGSTNLYGSGLVNAFAATR

SEQ ID NO: 62926 - protein, 269 aa, Unidentified
AQSVPWGISRVQAPAAHNRGLAGSGVKVAVLDTGISTHPDLNIRGGASFVPGEPSTQDGNGHGTHVAGTIAALDNSIGVLGVAPSVELYAVKVLGASGQGAISSIAQGLEWAGNNGMHVANLSLGSPSPSATLEQAVNSATSRGVLVVAASGNSGADSISYPARYANAMAVGATDQNNNRADFSQYGAGLDIVAPGVNVQSTYPGSTYASLNGTSMATPHVAGAAVLVKQKNPSWSNVRIRDHLKNTATSLGSTNLYGSGLVNAFAATR

SEQ ID NO: 62927 - protein, 269 aa, Unidentified
AQSVPWGISRVQAPAAHNRGLAGSGVKVAVLDTGISTHPDLNIRGGASFVPGEPSTQDGNGHGTHVAGTIAALNNSIGVLGVAPSAELYAVKVLGASGGGAISSIAGGLEWAGNNGMHVANLSLGAPSPSATLEQAVNSATSRGVLVVAASGNSGADSISYPARYANAMAVGATDQNNNRADFSQYGAGLDIVAPGVNVQSTYPGSTYASLNGTSMATPHVAGAAVLVKQKNPSWSNVRIRDHLKNTATSLGSTNLYGSGLVNAFAATR

SEQ ID NO: 62928 - protein, 269 aa, Unidentified
AQSVPWGISRVQAPAAHNRGLWGSGVKVAVLDTGISTHPDLNIRGGASFVPGEPSTQDGNGHGTHVAGTIAALDNNIGVLGVAPRAELYAVKVLGASGSGSVSSIAQGLEWAGNNRMHVANLSLGRQAPSATLEQAVNSATSRGILVVAASGNSGAGSISYPARYANAMAVGATDQNNNRASFSQYGPGLDIVAPGVNVQSTYPGSTYVSLNGTSMATPHVAGAAALVKQKNPSWSNVQIRNHLKNTATSLGSTNLYGSGLVNADAATR

SEQ ID NO: 62929 - protein, 269 aa, Unidentified
AQSVPWGISRVQAPAAHNRGLAGSGVKVAVLDTGISTHPDLNIRGGASFVPGEPSTQDGNGHGTHVAGTIAALNNSIGVLGVAPSAELYAVKVLGASGGGAISSIAQGLEWAGNNGMHVANLSLGSESPSATLEQAVNSATSRGVLVVAASGNSGADSISYPARYANAMAVGATDQNNNRADFSQYGAGLDIVAPGVNVQSTYPGSTYASLNGTSMATPHVAGAAVLVKQKYPSWSNVRIRDHLKNTATSLGSTNLYGSGLVNAFAATR

SEQ ID NO: 62930 - protein, 269 aa, Unidentified
AQSVPWGISRVQAPAAHNRGLAGGGVKVAVLDTGISTHPDLNIRGGASFVPGEPSTQDGNGHGTHVAGTIAALNNNIGVLGVAPSAELYAVKVLSASGNGAISSIAQGLEWAGNNGMHVANLSLGAPSPSATLEQAVNSATSRGVLVVAASGNSGAGSISYPARYANAMAVGATDQNNNRASFSQYGAGLDIVAPGVNVQSTYPGPTYASQNGTSMATPHVAGAAVLVKQKNPSWSNVRIRNHLKNTATSLGSTNLYGSGLVNAEAATR

SEQ ID NO: 62931 - protein, 269 aa, Unidentified
AQSVPWGISRVQAPAAHNRGLAGGGVKVAVLDTGISTHPDLNIRGGASFVPGEPSTQDGNGHGTHVAGTIAALNNSIGVLGVAPSAELYAVKVLGASGNGAISSIAGGLEWAGNNGMHVANLSLGSPSPSATLEQAVNSATSRGVLVVAASGNSGADSISYPARYANAMAVGATDQNNNRADFSQYGAGLDIVAPGVNVQSTYPGSTYASLNGTSMATPHVAGAAVLVKQKNPSWSNVRIRDHLKNTATSLGSTNLYGSGLVNAFAATR

SEQ ID NO: 62932 - protein, 269 aa, Unidentified
AQSVPWGISRVQAPAAHNRGLAGSGVKVAVLDTGISTHPDLNIRGGASFVPGEPSTQDGNGHGTHVAGTIAALNNNIGVLGVAPSAELYAVKVLGASGQGAISSIANGLEWAGNNGMHVANLSLGSPSPSATLEQAVNSATSRGVLVVAASGNSGADSISYPARYANAMAVGATDQNNNRADFSQYGAGLDIVAPGVNVQSTYPGSTYASLNGTSMATPHVAGAAVLVKQKNPSWSNVRIRDHLKNTATSLGSTNLYGSGLVNAFAATR

SEQ ID NO: 62933 - protein, 269 aa, Unidentified
AQSVPWGISRVQAPAAHNRGLAGSGVKVAVLDTGISTHPDLNIRGGASFVPGEPSTQDGNGHGTHVAGTIAALNNSIGVLGVAPSAELYAVKVLGASGGGAISSIAQGLEWAGNNGMHVANLSIGSSSPSATLEQAVNSATSRGVLVVAASGNSGADSISYPARYANAMAVGATDQNNNRADFSQYGAGLDIVAPGVNVQSTYPGSTYASLNGTSMATPHVAGAAVLVKQKNPSWSNVRIRDHLKNTATSLGSTNLYGSGLVNAFAATR

SEQ ID NO: 62934 - protein, 269 aa, Unidentified
AQSVPWGISRVQAPAAHNRGLAGSGVKVAVLDTGISTHPDLNIRGGASFVPGEPSTQDGNGHGTHVAGTIAALDNSIGVLGVAPSAELYAVKVLAASGNGAISSIAQGLEWAGNNGMHVANLSLGSPSPSATLEQAVNSATSRGVLVVAASGNSGADSISYPARYANAMAVGATDQNNNRADFSQYGAGLDIVAPGVNVQSTYPGSTYASLNGTSMATPHVAGAAVLVKQKNPSWSNVRIRDHLKNTATSLGSTNLYGSGLVNAFAATR

SEQ ID NO: 62935 - protein, 269 aa, Unidentified
AQVVPWGISRVQAPAAHNRGLTGSGVKVAVLDTGISTHEDLNIRGGASFVPGEPSTQDGNGHGTHVAGTIAALDNGIGVLGVAPSAELYAVKVLGASGSGSVSSIAQGLEWAGNNRMHVANLSLGLQAPSATLEQAVNSATSRGVLVVAASGNSGAGSISYPARYANAMAVGATDQNNNRASFSQYGAGLDIVAPGVNVYSTYIGSTYVSKNGTSMATPHVAGAAALVKQKNPSWSNVQIRNHLKNTATSLGSTNLYGSGLVNAEAATR

SEQ ID NO: 62936 - protein, 269 aa, Unidentified
AQSVPWGISRVQAPAAHNRGLAGSGVKVAVLDTGISTHPDLNIRGGASFVPGEPSTQDGNGHGTHVAGTIAALNNSIGVLGVAPSAELYAVKVLAASGGGAISSIAQGLEWAGNNGMHVANLSLGSESPSATLEQAVNSATSRGVLVVAASGNSGADSISYPARYANAMAVGATDQNNNRADFSQYGAGLDIVAPGVNVQSTYPGSTYASLNGTSMATPHVAGAAVLVKQKNPSWSNVRIRDHLKNTATSLGSTNLYGSGLVNAFAATR

SEQ ID NO: 62937 - protein, 269 aa, Unidentified
AQSVPWGISRVQAPAAHNRGLAGSGVKVAVLDTGISTHPDLNIRGGASFVPGEPSTQDGNGHGTHVAGTIAALNNSIGVLGVAPSAELYAVKVLGASGNGAISSIAQGLEWAGNNGMHVANLSIGAPSPSATLEQAVNSATSRGVLVVAASGNSGADSISYPARYANAMAVGATDQNNNRADFSQYGAGLDIVAPGVNVQSTYPGSTYASLNGTSMATPHVAGAAVLVKQKNPSWSNVRIRDHLKNTATSLGSTNLYGSGLVNAFAATR

SEQ ID NO: 62938 - protein, 269 aa, Unidentified
AQSVPWGISRVQAPAAHNRGLAGRGVKVAVLDTGISTHPDLNIRGGASFVPGEPSTQDGNGHGTHVAGTIAALNNSIGVLGVAPSAELYAVKVLGASGGGAISSIAQGLEWAGNNGMHVANLSLGSESPSATLEQAVNSATSRGVIVVAASGNSGEGSISYPARYANAMAVGATDQNNNRADFSQYGAGLDIVAPGVNVQSTYPGSTYASLNGTSMATPHVAGAAVLVKQKNPSWSNVRIRDHLKNTATSLGSTNLYGSGLVNAEAATR

SEQ ID NO: 62939 - protein, 269 aa, Unidentified
AQSVPWGISRVQAPAAHNRGLAGSGVKVAVLDTGISTHPDLNIRGGASFVPGEPSTQDGNGHGTHVAGTIAALNNSIGVLGVAPSAELYAVKVLSASGNGAISSIAQGLEWAGNNGMHVANLSLGAPSPSATLEQAVNSATSRGVLVVAASGNSGADSISYPARYANAMAVGATDQNNNRADFSQYGAGLDIVAPGVNVQSTYPGSTYASLNGTSMATPHVAGAAVLVKQKNPSWSNVRIRDHLKNTATSLGSTNLYGSGLVNAFAATR

SEQ ID NO: 62940 - protein, 269 aa, Unidentified
AQSVPWGISRVQAPAAHNRGLAGSGVKVAVLDSGISTHPDLNIRGGASFVPGEPSTQDGNGHGTHVAGTIAALNNSIGVLGVAPSAELYAVKVLGASGGGAISSIAQGLEWAGNNRMHVANLSLGSPSPSATLEQAVNSATSRGVLVVAASGNSGADSISYPARYANAMAVGATDQNNNRADFSQYGAGLDIVAPGVNVQSTYPGSTYASLNGTSMATPHVAGAAVLVKQKNPSWSNVRIRDHLKNTATSLGSTNLYGSGLVNAFAATR

SEQ ID NO: 62941 - protein, 269 aa, Unidentified
AQSVPWGISRVQAPAAHNRGLAGRGVKVAVLDTGISTHPDLRIRGGASFVPGEPSTQDGNGHGTHVAGTIAALDNSIGVLGVAPSAELYAVKVLGASGGGAISSIAQGLEWAGNNGMHVANLSLGSPSPSATLEQAVNSATSRGVLVVAASGNSGAGSISYPARYANAMAVGATDQNNNRADFSQYGAGLDIVAPGVNVQSTYPGSTYASLNGTSMATPHVAGAAVLVKQKNPSWSNVRIRDHLKNTATSLGSTNLYGSGLVNAFAATR

SEQ ID NO: 62942 - protein, 269 aa, Unidentified
AQSVPWGISRVQAPAAHNRGLAGSGVKVAVLDTGISTHPDLNIRGGASFVPGEPSTQDGNGHGTHVAGTIAALNNSIGVLGVAPSAELYAVKVLGASGGGAISSVAQGLEWAGNNGMHVANLSLGSPSPSATLEQAVNSATSRGVLVVAASGNSGADSISYPARYANAMAVGATDQNNNRADFSQYGAGLDIVAPGVNVQSTYPGSTYASLNGTSMATPHVAGAAVLVKQKYPSWSNVRIRDHLKNTATSLGSTNLYGSGLVNAFAATR

SEQ ID NO: 62943 - protein, 269 aa, Unidentified
AQSVPWGISRVQAPAAHNRGLAGSGVKVAVLDTGISTHPDLRIRGGASFVPGEPSTQDGNGHGTHVAGTIAALDNSIGVLGVAPSAELYAVKVLGASGGGAISSIAQGLEWAGNNGMHVANLSLGSPSPSATLEQAVNSATSRGVLVVAASGNSGADSISYPARYANAMAVGATDQNNNRADFSQYGAGLDIVAPGVNVQSTYPGSTYASLNGTSMATPHVAGAAVLVKQKNPSWSNVRIRDHLKNTATSLGSTNLYGSGLVNAFAATR

SEQ ID NO: 62944 - protein, 269 aa, Unidentified
AQSVPWGISRVQAPAAHNRGLAGRGVKVAVLDTGISTHPDLNIRGGASFVPGEPSTQDGNGHGTHVAGTIAALNNSIGVLGVAPSAELYAVKVLGASGGGAISSIAQGLEWAGNNGMHVANLSLGSPSPSATLEQAVNSATSRGVLVVAASGNSGEGSISYPARYANAMAVGATDQNNNRADFSQYGAGLDIVAPGVNVQSTYPGSTYASLNGTSMATPHVAGAAVLVKQKNPSWSNVRIRDHLKNTATSLGSTNLYGSGLVNAFVATR

SEQ ID NO: 62945 - protein, 269 aa, Unidentified
AQSVPWGIERVQAPAAHNRGLTGSGVKVAVLDTGISTHPDLRIRGGASFVPGEPSTQDGNGHGTHVAGTIAALDNSIGVLGVAPSAELYAVKVLGASGSGSVSSIAQGLEWAGNNGMDVANLSLGSPSPSATLEQAVNSATSRGVLVVAASGNSGEPEISYPARYANAMAVGATDQNNNRASFSQYGPGLDIVAPGVNVLSTWPGSTYASLNGTSMATPHVAGAAALVKQKNPSWSNVQIRNHLKNTATSLGDTNEYGSGLVNAEAATR

SEQ ID NO: 62946 - protein, 269 aa, Unidentified
AQSVPWGISRVQAPAAHNRGLAGSGVKVAVLDTGISTHPDLNIRGGASFVPGEPSTQDGNGHGTHVAGTIAALNNSIGVLGVAPSAELYAVKVLGASGGGAISSIAQGLEWAGNNGMHVANLSLGSPSPSATLEQAVNSATSRGVLVVAASGNSGADSISYPARYANAMAVGATDQNNNRADFSQYGAGLDIVAPGVNVQSTYPGSTYASLNGTSMATPHVAGAAVLVKQKYPSWSNVRIRDHLKNTATSLGSTNLYGSGLVNVFAATR

SEQ ID NO: 62947 - protein, 269 aa, Unidentified
AQSVPWGISRVQAPAAHNRGLAGSGVKVAVLDTGISTHPDLNIRGGASFVPGEPSTQDGNGHGTHVAGTIAALNNSIGVLGVAPSAELYAVKVLGASGGGAISSIANGLEWAGNNGMHVANLSLGSPSPSATLEQAVNSATSRGVLVVAASGNSGADSISYPARYANAMAVGATDQNNNRADFSQYGAGLDIVAPGVNVQSTYPGSTYASQNGTSMATPHVAGAAVLVKQKNPSWSNVRIRDHLKNTATSLGSTNLYGSGLVNAFAATR

SEQ ID NO: 62948 - protein, 269 aa, Unidentified
AQSVPWGISRVQAPAAHNRGLAGRGVKVAVLDTGISTHPDLNIRGGASFVPGEPSTQDGNGHGTHVAGTIAALNNSIGVLGVAPSAELYAVKVLGASGGGAISSIAQGLEWAGNNGMHVANLSLGSESPSATLEQAVNSATSRGVLVVAASGNSGADSISYPARYANAMAVGATDQNNNRADFSQYGAGLDIVAPGVNVQSTYPGSTYASLNGTSMATPHVAGAAVLVKQKNPSWSNVRIRDHLKNTATSLGSTNLYGSGLVNAFAATR

SEQ ID NO: 62949 - protein, 269 aa, Unidentified
AQSVPWGISRVQAPAAHNRGLTGSGVKVAVLDTGISTHPDLNIRGGASFVPGEPSTQDGNGHGTHAAGTIAALDNSIGVLGVAPSAELYAVKVLGASGTGAISSIAQGLEWAGNNGMHVANLSLGSPSPSATLEQAVNSATSRGVLVVAASGNSGADSISYPARYANAMAVGATDQNNNRASFSQYGAGLDIVAPGVNVQSTYPGSRYASLSGTSMATPHVAGAAVLVKHKNPSWSNVRIRNHLKNTATSLGSANLYGSGLVNAEAATR

SEQ ID NO: 62950 - protein, 269 aa, Unidentified
AQSVPWGISRVQAPAAHNRGLAGSGVKVAVLDTGISTHPDLNIRGGASFVPGEPSTQDGNGHGTHVAGTIAALNNSIGVLGVAPSAELYAVKVLGASGQGAISSIAQGLEWAGNNGMHVANLSLGAPSPSATLEQAVNSATSRGVLVVAASGNSGADSISYPARYANAMAVGATDQNNNRADFSQYGAGLDIVAPGVNVQSTYPGSTYASQNGTSMATPHVAGAAVLVKQKNPSWSNVRIRDHLKNTATSLGSTNLYGSGLVNAFAATR

SEQ ID NO: 62951 - protein, 269 aa, Unidentified
AQSVPWGISRVQAPAAHNRGLAGSGVKVAVLDTGISTHPDLNIRGGASFVPGEPSTQDGNGHGTHAAGTIAALNNSIGVLGVAPSAELYAVKVLGASGGGAISSIAQGLEWAGNNRMHVANLSLGSPSPSATLEQAVNSATSRGVLVVAASGNSGADSISYPARYANAMAVGATDQNNNRADFSQYGAGLDIVAPGVNVQSTYPGSTYASLNGTSMATPHVAGAAVLVKQKNPSWSNVRIRDHLKNTATSLGSTNLYGSGLVNAFAATR

SEQ ID NO: 62952 - protein, 269 aa, Unidentified
AQSVPWGISRVQAPAAHNRGLAGFGVKVAVLDSGISTHPDLNIRGGASFVPGEPSTQDGNGHGTHVAGTIAALNNSIGVLGVAPSAELYAVKVLGASGGGAISSIAQGLEWAGLNGMHVANLSLGNPSPSATLEQAVNSATSRGVLVVAASGNSGAGSISYPARYANAMAVGATDQNNNRASFSQYGAGLDIVAPGVNVQSTAPQSAYASLNGTSMATPHVAGAAVLVKQKNPSWSNVQIRNHLKNTATSLGSTNLYGSGLVNAEAATR

SEQ ID NO: 62953 - protein, 269 aa, Unidentified
AQSVPWGISRVQAPAAHNRGLTGSGVKVAVLDTGISTHPDLNIRGGASFVPGEPSTQDGNGHGTFVAGTIAALDNSIGVLGVAPSAELYAVKVLGASGAGAISSIAQGLEWAGNNGMHVANLSLGSPSPSATLEQAVNSATSRGVLVVAASGNSGEGSISYPARYANAMAVGATDQNNNRADFSQYGAGLDIVAPGVNVQSTYPGSTYASENGTSMATPHVAGAAVLVKQKNPSWSNVRIRDRLKNTATSLGSTNLYGSGLVNAEAATR

SEQ ID NO: 62954 - protein, 269 aa, Unidentified
AQSVPWGISRVQAPAAHNRGLAGSGVKVAVLDTGISTHPDLNIRGGASFVPGEPSTQDGNGHGTHVAGTIAALNNSIGVLGVAPSAELYAVKVLAASGNGAISSIAQGLEWAGNNGMHVANLSLGSSSPSATLEQAVNSATSRGVLVVAASGNSGADSISYPARYANAMAVGATDQNNNRADFSQYGAGLDIVAPGVNVQSTYPGSTYASLNGTSMATPHVAGAAVLVKQKNPSWSNVRIRDHLKNTATSLGSTNLYGSGLVNAFAATR

SEQ ID NO: 62955 - protein, 269 aa, Unidentified
AQSVPWGISRVQAPAAHNRGLAGSGVKVAVLDTGISTHPDLNIRGGASFVPGEPSTQDGNGHGTHVAGTIAALDNSIGVLGVAPSAELYAVKVLAASGQGAISSIAQGLEWAGNNGMHVANLSLGSPSPSATLEQAVNSATSRGVLVVAASGNSGADSISYPARYANAMAVGATDQNNNRADFSQYGAGLDIVAPGVNVQSTYPGSTYASLNGTSMATPHVAGAAVLVKQKNPSWSNVRIRDHLKNTATSLGSTNLYGSGLVNAFAATR

SEQ ID NO: 62956 - protein, 269 aa, Unidentified
AQSVPWGISRVQAPAAHNRGLAGSGVKVAVLDTGISTHPDLNIRGGASFVPGEPSTQDGNGHGTHVAGTIAALDNSIGVLGVAPSAELYAVKVLGASGGGAISSIANGLEWAGNNGMHVANLSLGSPSPSATLEQAVNSATSRGVLVVAASGNSGADSISYPARYANAMAVGATDQNNNRADFSQYGAGLDIVAPGVNVQSTYPGSTYASLNGTSMATPHVAGAAVLVKQKNPSWSNVRIRDHLKNTATSLGSTNLYGSGLVNAFAATR

SEQ ID NO: 62957 - protein, 269 aa, Unidentified
AQSVPWGISRVQAPAAHNRGLAGRGVKVAVLDTGISTHPDLNIRGGASFVPGEPSTQDGNGHGTHVAGTIAALNNSIGVLGVAPSAELYAVKVLGASGDGAISSIAQGLEWAGNNRMHVANLSLGSESPSATLEQAVNSATSRGVLVVAASGNSGADSISYPARYANAMAVGATDQNNNRADFSQYGAGLDIVAPGVNVQSTYPGSTYASLNGTSMATPHVAGAAVLVKQKNPSWSNVRIRDHLKNTATSLGSTNLYGSGLVNAEAATR

SEQ ID NO: 62958 - protein, 269 aa, Unidentified
AQSVPWGISRVQAPAAHNRGLAGSGVKVAVLDTGISTHPDLNIRGGASFVPGEPSTQDGNGHGTHVAGTIAALNNNIGVLGVAPSAELYAVKVLGASGQGAISSIAQGLEWAGNNGMHVANLSLGAPSPSATLEQAVNSATSRGVLVVAASGNSGADSISYPARYANAMAVGATDQNNNRADFSQYGAGLDIVAPGVNVQSTYPGSTYASLNGTSMATPHVAGAAVLVKQKNPSWSNVRIRDHLKNTATSLGSTNLYGSGLVNAFAATR

SEQ ID NO: 62959 - protein, 269 aa, Unidentified
AQSVPWGISRVQAPAAHNRGLAGGGVKVAVLDTGISTHPDLNIRGGASFVPGEPSTQDGNGHGTHVAGTIAALNNNIGVLGVAPSAELYAVKVLGASGNGAISSIAQGLEWAGNNGMHVANLSLGSPSPSATLEQAVNSATSRGVLVVAASGNSGADSISYPARYANAMAVGATDQNNNRADFSQYGAGLDIVAPGVNVQSTYPGSTYASLNGTSMATPHVAGAAVLVKQKNPSWSNVRIRDHLKNTATSLGSTNLYGSGLVNAFAATR

SEQ ID NO: 62960 - protein, 269 aa, Unidentified
AQSVPWGISRVQAPAAHNRGLAGSGVKVAVLDTGISTHPDLNIRGGASFVPGEPSTQDGNGHGTHVAGTIAALDNSIGVLGVAPSAELYAVKVLGASGGGAISSIAQGLEWAGNNGMHVANLSLGSPSPSATLEQAVNSATSRGVLVVAASGNSGADSISYPARYANAMAVGATDQNNNRADFSQYGAGLDIVAPGVNVQSTYPGSTYASLNGTSMATPHVAGAAVLVKQKNPSWSNVRIRDHLKNTATSLGSTNLYGSGLVNAFVATR

SEQ ID NO: 62961 - protein, 269 aa, Unidentified
AQSVPWGISRVQAPAAHNRGLTGSGVKVAVLDTGISTHPDLNIRGGASFVPGEPSTQDGNGHGTHVAGTIAALNNSIGVLGVAPSAELYAVKVLGASGGGAISSIAQGLEWAGNNGMHVANLSLGSPAPSATLEQAVNSATSRGVLVVAASGNSGEGSISYPARYANAMAVGATDQDNNRADFSQYGAGLDIVAPGVNVQSTYPGSTYASENGTSMATPHVAGAAVLVKQKNPSWSNVRIRDRLKNTATSLGSTNLYGSGLVNAEAATR

SEQ ID NO: 62962 - protein, 269 aa, Unidentified
AQSVPWGISRVQAPAAHNRGLAGSGVKVAVLDTGISTHPDLNIRGGASFVPGEPSTQDGNGHGTHVAGTIAALDNSIGVLGVAPSAELYAVKVLGASGQGAISSIAQGLEWAGNNGMHVANLSLGAPSPSATLEQAVNSATSRGVLVVAASGNSGADSISYPARYANAMAVGATDQNNNRADFSQYGAGLDIVAPGVNVQSTYPGSTYASLNGTSMATPHVAGAAVLVKQKNPSWSNVRIRDHLKNTATSLGSTNLYGSGLVNAFAATR

SEQ ID NO: 62963 - protein, 269 aa, Unidentified
AQSVPWGISRVQAPAAHRRRLWGRGVKVAVLDTGISTHPDLNIRGGASFVPGEPSTQDGNGHGTHVAGTIAALDNSIGVLGVAPSAELYAVKVLGASGAGSVSSIAQGLEWAGANGMHVANLSLGSPSPSATLEQAVNSATSRGVLVVAASGNSGAGSISYPARYANAMAVGATDQDNNRASFSQYGAGLDLVAPGVNVQSTYPQSAYASLNGTSMATPHVAGAAALVKQKNPSWSNVQIRNRLKNTATSLGSTNLYGSGLVNAEAATR

SEQ ID NO: 62964 - protein, 269 aa, Unidentified
AQSVPWGISRVQAPAAHNRGLAGSGVKVAVLDTGISTHPDLNIRGGASFVPGEPSTQDGNGHGTHVAGTIAALNNSIGVLGVAPSAELYAVKVLGASGNGAISSIAGGLEWAGNNGMHVANLSLGSPSPSATLEQAVNSATSRGVLVVAASGNSGADSISYPARYANAMAVGATDQNNNRADFSQYGAGLDIVAPGVNVQSTYPGSTYASQNGTSMATPHVAGAAVLVKQKNPSWSNVRIRDHLKNTATSLGSTNLYGSGLVNAFAATR

SEQ ID NO: 62965 - protein, 269 aa, Unidentified
AQSVPWGISRVQAPAAHNRGLAGSGVKVAVLDTGISTHPDLRIRGGASFVPGEPSTQDGNGHGTHVAGTIAALDNSIGVLGVAPSAELYAVKVLGASGGGAISSIAQGLEWAGNNGMHVANLSLGSPSPSATLEQAVNSATSRGVLVVAASGNSGAGSISYPARYANAMAVGATDQNNNRADFSQYGAGLDIVAPGVNVQSTYPGSTYASLNGTSMATPHVAGAAVLVKQKNPSWSNVRIRDHLKNTATSLGSTNLYGSGLVNAFVATR

SEQ ID NO: 62966 - protein, 269 aa, Unidentified
AQSVPWGISRVQAPAAHNRGLAGSGVKVAVLDTGISTHPDLNIRGGASFVPGEPSTQDGNGHGTHVAGTIAALDNSIGVLGVAPSAELYAVKVLGASGNGAISSIAQGLEWAGNNGMHVANLSLGSPSPSATLEQAVNSATSRGVLVVAASGNSGADSISYPARYANAMAVGATDQNNNRADFSQYGAGLDIVAPGVNVQSTYPGSTYASQNGTSMATPHVAGAAVLVKQKNPSWSNVRIRDHLKNTATSLGSTNLYGSGLVNAFAATR

SEQ ID NO: 62967 - protein, 269 aa, Unidentified
AQSVPWGISRVQAPAAHNRGLAGSGVKVAVLDTGISTHPDLNIRGGASFVPGEPSTQDGNGHGTHVAGTIAALNNNIGVLGVAPSAELYAVKVLGASGGGAVSSIAQGLEWAGNNGMHVANLSLGAPSPSATLEQAVNSATSRGVLVVAASGNSGADSISYPARYANAMAVGATDQNNNRADFSQYGAGLDIVAPGVNVQSTYPGSTYASQNGTSMATPHVAGAAVLVKQKNPSWSNVRIRDHLKNTATSLGSTNLYGSGLVNAFAATR

SEQ ID NO: 62968 - protein, 269 aa, Unidentified
AQSVPWGISRVQAPAAHNRGLAGSGVKVAVLDTGISTHPDLNIRGGASFVPGEPSTQDGNGHGTHVAGTIAALNNSIGVLGVAPSAELYAVKVLGASGGGAISSIAQGLEWAGNNGMHVANLSLGASSPSATLEQAVNSATSRGVLVVAASGNSGADSISYPARYANAMAVGATDQNNNRADFSQYGAGLDIVAPGVNVQSTYPGSTYASLNGTSMATPHVAGAAVLVKQKNPSWSNVRIRDHLKNTATSLGSTNLYGSGLVNAFAATR

SEQ ID NO: 62969 - protein, 269 aa, Unidentified
AQSVPWGISRVQAPAAHNRRLWGSGVKVAVLDTGISTHPDLNIRGGASFVPGEPSTQDGNGHGTHVAGTIAALNNRIGVLGVAPSAELYAVKVLGASGAGAISSIAQGLEWAGANGMHVANLSLGSPSPSATLEQAVNSATSRGVLVVAASGNSGAGSISYPARYANAMAVGATDQDNNRASFSQYGAGLDIVAPGVNVQSTYPGSAYFSLNGTSMATPHVAGAAVLVKQKNPSWSNVRIRNHLKNTATSLGSTNLYGSGLVNAEAATR

SEQ ID NO: 62970 - protein, 269 aa, Unidentified
AQSVPWGISRVQAPAAHNRRLWGSGVKVAVLDTGISTHPDLNIRGGASFVPGEPSTQDGNGHGTHVAGTIAALNNRIGVLGVAPSAELYAVKVLGASGAGAISSIAQGLEWAGNNGMHVANLSLGSPSPSATLEQAVNSATSRGVLVVAASGNSGAGSISYPARYANAMAVGATDQDNNRASFSQYGAGLDLVAPGVNVQSTYPGSAYFSLNGTSMATPHVAGAAVLVKQKNPSWSNVRIRNHLKNTATSLGSTNLYGSGLVNAEAATR

SEQ ID NO: 62971 - protein, 269 aa, Unidentified
AQSVPWGISRVQAPAAHNRGLAGSGVKVAVLDTGISTHPDLNIRGGASFVPGEPSTQDGNGHGTHVAGTIAALNNSIGVLGVAPSAELYAVKVLGASGGGAISSIAQGLEWAGLNGMHVANLSLGSPSPSATLEQAVNSATSRGVLVVAASGNSGADSISYPARYANAMAVGATDQNNNRADFSQYGAGLDIVAPGVNVQSTYPGSAYASLNGTSMATPHVAGAAVLVKQKNPSWSNVRIRDHLKNTATSLGSTNLYGSGLVNAFAATR

SEQ ID NO: 62972 - protein, 269 aa, Unidentified
AQSVPWGISRVQAPAAHNRGLTGSGVKVAVLDTGISTHPDLNIRGGASFVPGEPSTQDGNGHGTFVAGTIAALDNSIGVLGVAPSAELYAVKVLGASGGGAISSIAQGLEWAGNNGMHVANLSLGSPSPSATLEQAVNSATSRGVLVVAASGNSGEGSIDYPARYANAMAVGATDQNNNRADFSQYGAGLDIVAPGVNVQSTYPGSTYASLNGTSMATPHVAGAAVLVKQKNPSWSNVRIRDRLKNTATSLGSTNLYGSGLVNAEAATR

SEQ ID NO: 62973 - protein, 269 aa, Unidentified
AQSVPWGISRVQAPAAHNRGLAGSGVKVAVLDTGISTHPDLNIRGGASFVPGEPSTQDGNGHGTHVAGTIAALNNNIGVLGVAPSAELYAVKVLSASGNGAISSIAQGLEWAGNNGMHVANLSLGSPSPSATLEQAVNSATSRGVLVVAASGNSGADSISYPARYANAMAVGATDQNNNRADFSQYGAGLDIVAPGVNVQSTYPGSTYASLNGTSMATPHVAGAAVLVKQKNPSWSNVRIRDHLKNTATSLGSTNLYGSGLVNAFAATR

SEQ ID NO: 62974 - protein, 269 aa, Unidentified
AQSVPWGISRVQAPAAHNRGLAGSGVKVAVLDTGISTHPDLNIRGGASFVPGEPSTQDGNGHGTHVAGTIAALDNSIGVLGVAPSAELYAVKVLGASGGGAISSVAQGLEWAGNNGMHVANLSLGSPSPSATLEQAVNSATSRGVLVVAASGNSGADSISYPARYANAMAVGATDQNNNRADFSQYGAGLDIVAPGVNVQSTYPGSTYASLNGTSMATPHVAGAAVLVKQKNPSWSNVRIRDHLKNTATSLGSTNLYGSGLVNAFAATR

SEQ ID NO: 62975 - protein, 269 aa, Unidentified
AQSVPWGISRVQAPAAHNRGLAGRGVKVAVLDTGISTHPDLNIRGGASFVPGEPSTQDGNGHGTHVAGTIAALNNSIGVLGVAPSAELYAVKVLGASGGGAISSIAQGLEWAGNNGMHVANLSLGSESPSATLEQAVNSATSRGVLVVAASGNSGEESISYPARYANAMAVGATDQNNNRASFSQYGAGLDIVAPGVNVQSTYPGSTYASLNGTSMATPHVAGAAVLVKQKNPSWSNVRIRDRLKNTATSLGSTNLYGSGLVNAEAATR

SEQ ID NO: 62976 - protein, 269 aa, Unidentified
AQSVPWGISRVQAPAAHNRGLAGRGVKVAVLDTGISTHPDLNIRGGASFVPGEPSTQDGNGHGTHVAGTIAALNNSIGVLGVAPSAELYAVKVLGASGGGAISSVAQGLEWAGNNGMHVANLSLGSPSPSATLEQAVNSATSRGVLVVAASGNSGADSISYPARYANAMAVGATDQNNNRADFSQYGAGLDIVAPGVNVQSTYPGSTYASLNGTSMATPHVAGAAVLVKQKNPSWSNVRIRDHLKNTATSLGSTNLYGSGLVNAFAATR

SEQ ID NO: 62977 - protein, 269 aa, Unidentified
AQSVPWGISRVQAPASHNRGLAGFGVKVAVLDSGISTHPDLNIRGGASFVPGEPSTQDGNGHGTHVAGTIAALNNSIGVLGVAPSAELYAVKVLGASGGGAISSIAQGLEWAGLNGMHVANLSLGNPSPSATLEQAVNSATSRGVLVVAASGNSGAGSISYPARYANAMAVGATDQNNNRASFSQYGAGLDIVAPGVNVQSTAPGSAYASLNGTSMATPHVAGAAVLVKQKNPSWSNVQIRNHLKNTATSLGSTNLYGSGLVNAEAATR

SEQ ID NO: 62978 - protein, 269 aa, Unidentified
AQSVPWGISRVQAPAAHNRGLTGRGVKVAVLDTGISTHPDLNIRGGASFVPGEPSTQDGNGHGTHVAGTIAALNNSIGVLGVAPSAELYAVKVLGASGGGAISSIAQGLEWAGNNGMHVANLSLGSQAPSATLEQAVNSATSRGVLVVAASGNSGEGSISYPARYANAMAVGATDQNNNRADFSQYGAGLDIVAPGVNVQSTYPGSTYASLNGTSMATPHVAGAAVLVKQKNPSWSNVRIRDRLKNTATSLGSTNLYGSGLVNAEAATR

SEQ ID NO: 62979 - protein, 269 aa, Unidentified
AQSVPWGISRVQAPAAHNRGLAGSGVKVAVLDTGISTHPDLNIRGGASFVPGEPSTQDGNGHGTHVAGTIAALNNSIGVLGVAPSAELYAVKVLAASGNGAISSIAQGLEWAGNNGMHVANTSLGSPSPSATLEQAVNSATSRGVLVVAASGNSGADSISYPARYANAMAVGATDQNNNRADFSQYGAGLDIVAPGVNVQSTYPGSTYASLNGTSMATPHVAGAAVLVKQKNPSWSNVRIRDHLKNTATSLGSTNLYGSGLVNAFAATR

SEQ ID NO: 62980 - protein, 269 aa, Unidentified
AQSVPWGISRVQAPAAHNRGLAGGGVKVAVLDTGISTHPDLNIRGGASFVPGEPSTQDGNGHGTHVAGTIAALNNSIGVLGVAPSAELYAVKVLGASGGGAISSIAQGLEWAGNNGMHVANLSLGSPSPSATLEQAVNSATSRGVLVVAASGNSGADSISYPARYANAMAVGATDQNNNRADFSQYGAGLDIVAPGVNVQSTYPGSTYASQNGTSMATPHVAGAAVLVKQKNPSWSNVRIRDHLKNTATSLGSTNLYGSGLVNAFAATR

SEQ ID NO: 62981 - protein, 269 aa, Unidentified
AQSVPWGISRVQAPAAHNRGLAGRGVKVAVLDTGISTHPDLNIRGGASFVPGEPSTQDGNGHGTHVAGTIAALNNSIGVLGVAPSAELYAVKVLGASGGGAISSIAQGLEWAGNNGMHVANLSLGSPSPSATLEQAVNSATSRGVLVVAASGNSGADSISYPARYANAMAVGATDQNNNRADFSQYGAGLDIVAPGVNVQSTYPGSTYASLNGTSMATPHVAGAAVLVKQKYPSWSNVRIRDHLKNTATSLGSTNLYGSGLVNAFAATR

SEQ ID NO: 62982 - protein, 269 aa, Unidentified
AQSVPWGISRVQAPAAHNRGLAGRGVKVAVLDTGISTHPDLNIRGGASFVPGEPSTQDGNGHGTHVAGTIAALNNSIGVLGVAPSAELYAVKVLGASGGGAISSIAQGLEWAGNNGMHVANLSLGSPSPSATLEQAVNSATSRGVLVVAASGNSGEESISYPARYANAMAVGATDQNNNRADFSQYGAGLDIVAPGVNVQSTYPGSTYASLNGTSMATPHVAGAAVLVKQKNPSWSNVRIRDHLKNTATSLGSTNLYGSGLVNAFAATR

SEQ ID NO: 62983 - protein, 269 aa, Unidentified
AQSVPWGISRVQAPAAHNRGLAGGGVKVAVLDTGISTHPDLNISGGASFVPGEPSTQDGNGHGTHVAGTIAALNNSIGVLGVAPSAELYAVKVLGASGGGAISSIAQGLEWAGNNGMHVANLSLGSPSPSATLEQAVNSATSRGVLVVAASGNSGADSISYPARYANAMAVGATDQNNNRADFSQYGAGLDIVAPGVNVQSTYPGSTYASLNGTSMATPHVAGAAVLVKQKNPSWSNVRIRDHLKNTATSLGSTNLYGSGLVNAFAATR

SEQ ID NO: 62984 - protein, 269 aa, Unidentified
AQVVPWGISRVQAPAAHNRGLTGSGVKVAVLDTGISTHPDLNIRGGASFVPGEPSTQDGNGHGTHVAGTIAALDNNIGVLGVAPRAELYAVKVLGASGGGAISSIAQGLEWAGNNRMHVANLSLGLQAPSATLEQAVNSATSRGVLVVAASGNSGAGSISYPARYANAMAVGATDQNNNRASFSQYGAGLDIVAPGVNVLSTYPGSTYASLNGTSMATPHVAGAAALVKQKNPSWSNVQIRNHLKNTATSLGSTNLYGSGLVNAEAATR

SEQ ID NO: 62985 - protein, 269 aa, Unidentified
AQSVPWGISRVQAPAAHNRGLTGSGVKVAVLDTGISTHPDLNIRGGASFVPGEPSTQDGNGHGTHVAGTIAALDNSIGVLGVAPSAELYAVKVLGASGGGAISSIAQGLEWAGNNGMHVANLSLGLPSPSATLEQAVNSATSRGVLVVAASGNSGEGSISYPARYANAMAVGATDQNNNRADFSQYGAGLDIVAPGVNVQSTYPGSTYASLNGTSMATPHVAGAAVLVKQKNPSWSNVRIRDRLKNTATSLGSTNLYGSGLVNAFAATR

SEQ ID NO: 62986 - protein, 269 aa, Unidentified
AQSVPWGISRVQAPAAHNRGLAGSGVKVAVLDTGISTHPDLNIRGGASFVPGEPSTQDGNGHGTHVAGTIAALNNSIGVLGVAPSAELYAVKVLGASGGGAISSIAQGLEWAGNNGMHVANLSLGSESPSATLEQAVNSATSRGVLVVAASGNSGEESISYPARYANAMAVGATDQNNNRADFSQYGAGLDIVAPGVNVQSTYPGSTYASLNGTSMATPHVAGAAVLVKQKNPSWSNVRIRDHLKNTATSLGSTNLYGSGLVNAFAATR

SEQ ID NO: 62987 - protein, 269 aa, Unidentified
AQSVPWGISRVQAPAAHNRGLTGRGVKTAVLDTGISTHPDLNIRGGASFVPGEPSTQDGNGHGTHVAGTIAALDNNIGVLGVAPRAELYAVKVLGASGSGSVSSIAQGLEWAGNNVMHVANLSLGLQAPSATLEQAVNSATSRGVLVVAASGNSGAGSISYPARYANAMAVGATDQNNNRASFSQYGAGLDIVAPGVNVLSTYPGSAYASKNGTSMATPHVAGAAALVKQKNPSWSNVQIRNHLKNTATSLGSTNLYGSGLVNAEAATR

SEQ ID NO: 62988 - protein, 269 aa, Unidentified
AQSVPWGISRVQAPAAHNRGLTGSGVKVAVLDTGISTHPDLNIRGGASFVPGEPSTQDGNGHGTHVAGTIAALDNSIGVLGVAPSAELYAVKVLGASGAGAISSIAQGLEWAGNNGMHVANLSLGSPSPSATLEQAVNSATSRGVLVVAASGNSGEGSIDYPARYANAMAVGATDQNNNRADFSQYGAGLDIVAPGVNVQSTYPGSTYASLNGTSMATPHVAGAAVLVKQKNPSWSNVRIRDRLKNTATSLGSTNLYGSGLVNAFAATR

SEQ ID NO: 62989 - protein, 269 aa, Unidentified
AQSVPWGISRVQAPAAHNRGLAGSGVKVAVLDTGISTHPDLNIRGGASFVPGEPSTQDGNGHGTHVAGTIAALNNSIGVLGVAPSAELYAVKVLGASGGGAISSIAQGLEWAGNNGMHVANLSLGSSSPSATLEQAVNSATSRGVLVVAASGNSGADSISYPARYANAMAVGATDQNNNRADFSQYGAGLDIVAPGVNVQSTYPGSTYASQNGTSMATPHVAGAAVLVKQKNPSWSNVRIRDHLKNTATSLGSTNLYGSGLVNAFAATR

SEQ ID NO: 62990 - protein, 269 aa, Unidentified
AQSVPWGISRVQAPAAHNRGLTGRGVKVAVLDTGISTHPDLRIRGGASFVPGEPSTQDGNGHGTHVAGTIAALNNSIGVLGVAPSAELYAVKVLGASGAGAISSIAQGLEWAGNNGMHVANLSLGSPSPSATLEQAVNSATSRGVLVVAASGNSGEGSISYPARYANAMAVGATDQNNNRADFSQYGAGLDIVAPGVNVQSTYPGSTYASENGTSMATPHVAGAAVLVKQKNPSWSNVRIRDRLKNTATSLGSTNLYGSGLVNAEAATR

SEQ ID NO: 62991 - protein, 269 aa, Unidentified
AQSVPWGISRVQAPAAHNRGLAGSGVKVAVLDTGISTHPDLNIRGGASFVPGEPSTQDGNGHGTHVAGTIAALDNSIGVLGVAPSAELYAVKVLGASGGGAISSIAQGLEWAGNNGMHVANLSLGSPSPSATLEQAVNSATSRGVLVVAASGNSGADSISYPARYANAMAVGATDQNNNRADFSQYGAGLDIVAPGVNVQSTYPGSTYASQNGTSMATPHVAGAAVLVKQKNPSWSNVRIRDHLKNTATSLGSTNLYGSGLVNAFAATR

SEQ ID NO: 62992 - protein, 269 aa, Unidentified
AQSVPWGISRVQAPAAHNRGLAGSGVKVAVLDTGISTHPDLNIRGGASFVPGEPSTQDGNGHGTHVAGTIAALNNSIGVLGVAPSAELYAVKVLGASGGGAISSIAQGLEWAGNNGMHVANLSIGSPSPSATLEQAVNSATSRGVLVVAASGNSGADSISYPARYANAMAVGATDQNNNRADFSQYGAGLDIVAPGVNVQSTYPGSTYASQNGTSMATPHVAGAAVLVKQKNPSWSNVRIRDHLKNTATSLGSTNLYGSGLVNAFAATR

SEQ ID NO: 62993 - protein, 269 aa, Unidentified
AQSVPWGISRVQAPAAHNRGLAGSGVKVAVLDTGISTHPDLNIRGGASFVPGEPSTQDGNGHGTHVAGTIAALDNSIGVLGVTPSAELYAVKVLGASGGGAISSIAQGLEWAGNNGMHVANLSLGSESPSATLEQAVNSATSRGVLVVAASGNSGAGSISYPARYANAMAVGATDQNNNRADFSQYGAGLDIVAPGVNVQSTYPGSTYASLNGTSMATPHVAGAAVLVKQKNPSWSNVRIRDHLKNTATSLGSTNLYGSGLVNAFAATR

SEQ ID NO: 62994 - protein, 269 aa, Unidentified
AQSVPWGISRVQAPAAHNRGLAGSGVKVAVLDTGISTHPDLNIRGGASFVPGEPSTQDGNGHGTHVAGTIAALNNNIGVLGVAPSAELYAVKVLGASGQGAISSIAQGLEWAGNNGMHVANLSLGSPSPSATLEQAVNSATSRGVLVVAASGNSGADSISYPARYANAMAVGATDQNNNRADFSQYGAGLDIVAPGVNVQSTYPGSTYASQNGTSMATPHVAGAAVLVKQKNPSWSNVRIRDHLKNTATSLGSTNLYGSGLVNAFAATR

SEQ ID NO: 62995 - protein, 269 aa, Unidentified
AQSVPWGISRVQAPAAHNRRLTGSGVKVAVLDTGISTHPDLNIRGGASFVPGEPSTQDGNGHGTHVAGTIAALNNRIGVLGVAPSAELYAVKVLGASGAGAISSIAQGLEWAEANGMHVANLSLGSPSPSATLEQAVNSATSRGVLVVAASGNSGAGSISYPARYANAMAVGATDQDNNRASFSQYGAGLDIVAPGVNVQSTYPQSAYASLNGTSMATPHVAGAAVLVKQKNPSWSNVRIRNHLKNTATSLGSTNLYGSGLVNAEAATR

SEQ ID NO: 62996 - protein, 269 aa, Unidentified
AQSVPWGISRVQAPAAHNRGLRGGGVKVAVLDTGISTHPDLNIRGGASFVPGEPSTQDGNGHGTHVAGTIAALNNNIGVLGVAPSAELYAVKVLSASGQGAISSIAGGLEWAGLNGMHVANLSLGAPSPSATLEQAVNSATSRGVLVVAASGNSGAGSISYPARYANAMAVGATDQNNNRASFSQYGAGLDIVAPGVNVQSTYPGSTYASLNGTSMATPHVAGAAVLVKQKNPSWSNVRIRNHLKNTATSLGSTNLYGSGLVNAEAATR

SEQ ID NO: 62997 - protein, 269 aa, Unidentified
AQSVPWGISRVQAPAAHNRGLAGSGVKVAVLDTGISTHPDLNIRGGASFVPGEPSTQDGNGHGTHVAGTIAALNNSIGVLGVAPSAELYAVKVLGASGQGAISSIAGGLEWAGNNGMHVANLSLGAPSPSATLEQAVNSATSRGVLVVAASGNSGADSISYPARYANAMAVGATDQNNNRADFSQYGAGLDIVAPGVNVQSTYPGSTYASLNGTSMATPHVAGAAVLVKQKNPSWSNVRIRDHLKNTATSLGSTNLYGSGLVNAFAATR

SEQ ID NO: 62998 - protein, 269 aa, Unidentified
AQSVPWGISRVQAPAAHNRGLAGRGVKVAVLDTGISTHPDLNIRGGASFVPGEPSTQDGNGHGTHVAGTIAALDNSIGVLGVAPSAELYAVKVLGASGGGAISSIAQGLEWAGNNGMHVANLSLGSPSPSATLEQAVNSATSRGVLVVAASGNSGADSISYPARYANAMAVGATDQNNNRADFSQYGAGLDIVAPGVNVQSTYPGSTYASLNGTSMATPHVAGAAVLVKQKNPSWSNVRIRDHLKNTATSLGSTNLYGSGLVNAFAATR

SEQ ID NO: 62999 - protein, 269 aa, Unidentified
AQSVPWGISRVQAPAAHNRGLAGSGVKVAVLDTGISTHPDLRIRGGASFVPGEPSTQDGNGHGTHVAGTIAALDNSIGVLGVAPSAELYAVKVLGASGGGAISSIAQGLEWAGNNGMHVANLSLGSPSPSATLEQAVNSATSRGVLVVAASGNSGADSISYPARYANAMAVGATDQNNNRASFSQYGAGLDIVAPGVNVQSTYPGSTYASLNGTSMATPHVAGAAVLVKQKNPSWSNVRIRDRLKNTATSLGSTNLYGSGLVNAFAATR

SEQ ID NO: 63000 - protein, 269 aa, Unidentified
AQSVPWGISRVQAPAAHNRGLAGRGVKVAVLDTGISTHPDLNIRGGASFVPGEPSTQDGNGHGTHVAGTIAALNNSIGVLGVAPSAELYAVKVLGASGGGAISSIAQGLEWAGNNGMHVANLSLGSESPSATLEQAVNSATSRGVLVVAASGNSGEGSISYPARYANAMAVGATDQNNNRADFSQYGAGLDIVAPGVNVQSTYPGSTYASLNGTSMATPHVAGAAVLVKQKRPSWSNVRIRDHLKNTATSLGSTNLYGSGLVNAEAATR

SEQ ID NO: 63001 - protein, 269 aa, Unidentified
AQSVPWGISRVQAPAAHNRGLAGSGVKVAVLDTGISTHPDLNIRGGASFVPGEPSTQDGNGHGTHVAGTIAALNNSIGVLGVAPSAELYAVKVLAASGQGAISSIAQGLEWAGNNGMHVANLSLGAPSPSATLEQAVNSATSRGVLVVAASGNSGADSISYPARYANAMAVGATDQNNNRADFSQYGAGLDIVAPGVNVQSTYPGSTYASLNGTSMATPHVAGAAVLVKQKNPSWSNVRIRDHLKNTATSLGSTNLYGSGLVNAFAATR

SEQ ID NO: 63002 - protein, 269 aa, Unidentified
AQSVPWGISRVQAPAAHNRGLAGSGVKVAVLDTGISTHPDLNIRGGASFVPGEPSTQDGNGHGTHVAGTIAALNNSIGVLGVAPSAELYAVKVLGASGNGAISSIAQGLEWAGNNGMHVANVSLGAPSPSATLEQAVNSATSRGVLVVAASGNSGADSISYPARYANAMAVGATDQNNNRADFSQYGAGLDIVAPGVNVQSTYPGSTYASLNGTSMATPHVAGAAVLVKQKNPSWSNVRIRDHLKNTATSLGSTNLYGSGLVNAFAATR

SEQ ID NO: 63003 - protein, 269 aa, Unidentified
AQSVPWGISRVQAPAAHNRGLAGSGVKVAVLDTGISTHPDLNIRGGASFVPGEPSTQDGNGHGTHVAGTIAALNNSIGVLGVAPSAELYAVKVLSASGSGAISSIANGLEWAGNNGMHVANLSLGAPSPSATLEQAVNSATSRGVLVVAASGNSGADSISYPARYANAMAVGATDQNNNRADFSQYGAGLDIVAPGVNVQSTYPGSTYASLNGTSMATPHVAGAAVLVKQKNPSWSNVRIRDHLKNTATSLGSTNLYGSGLVNAFAATR

SEQ ID NO: 63004 - protein, 269 aa, Unidentified
AQSVPWGISRVQAPAAHNRGLTGRGVKVAVLDTGISTHPDLNIRGGASFVPGEPSTQDGNGHGTHVAGTIAALDNNIGVLGVAPDAELYAVKVLGASGGGAISSIAQGLEWAGNNRMHVANLSLTSPSPSATLEQAVNSATSRGVLVVAASGNSGAGSISYPARYANAMAVGATDQNNNRASFSQYGAGLDIVAPGVNVQSTWPGSAYASLNGTSQATPHVAGAAALVKQKNPSWSNVQIRNRLKNTATSLGSTNLYGSGLVNAEAATR

SEQ ID NO: 63005 - protein, 269 aa, Unidentified
AQSVPWGISRVQAPAAHNRGLAGSGVKVAVLDTGISTHPDLNIRGGASFVPGEPSTQDGNGHGTHVAGTIAALNNSIGVLGVAPSAELYAVKVLGASGGGAISSIAQGLEWAGNNGMHVANLSLGSPSPSATLEQAVNSATSRGVLVVAASGNSGADSISYPARYANAMAVGATDQNNNRADFSQYGAGLDIVAPGVNVQSTYPGSTYASLNGTSMATPHVAGAAVLVKQKNPSWSNVRIRDHLKNTATSLGSTNLYGSGLVNVFVATR

SEQ ID NO: 63006 - protein, 269 aa, Unidentified
AQSVPWGISRVQAPAAHNRGLTGRGVKVAVLDTGISTHPDLNIRGGASFVPGEPSTQDGNGHGTHVAGTIAALNNSIGVLGVAPSAELYAVKVLGASGGGAISSIAQGLEWAGNNGMHVANLSLGLPSPSATLEQAVNSATSRGVLVVAASGNSGEGSISYPARYANAMAVGATDQDNNRADFSQYGAGLDIVAPGVNVQSTYPGSTYASLNGTSMATPHVAGAAVLVKQKNPSWSNVRIRDRLKNTATSLGSTNLYGSGLVNAEAATR

SEQ ID NO: 63007 - protein, 269 aa, Unidentified
AQSVPWGISRVQAPAAHNRGLTGSGVKVAVLDTGISTHPDLNIRGGASFVPGEPSTQDENGHGTHAAGTIAALNNSIGVLGVAPSAELYAVKVLGASGSGAISSIAQGLEWAGNNGMHVANLSLGSPSPSSTLERAVNSATSRGVLVVAASGNSGADSISYPARYANAMAVGATDQNNNRASFSQYGAGLDIVAPGVNVQSTYPGSTYASLNGTSMATPHVAGAAVLVKHKNPSWSNVRIRDHLKKTATSLGSTNLYGSGLVNAEAATR

SEQ ID NO: 63008 - protein, 269 aa, Unidentified
AQSVPWGISRVQAPAAHNRGLAGSGVKVAVLDTGISTHPDLNIRGGASFVPGEPSTQDGNGHGTHVAGTIAALNNSIGVLGVAPSAELYAVKVLGASGQGAISSIAQGLEWAGNNGMHVANLSLGSESPSATLEQAVNSATSRGVLVVAASGNSGADSISYPARYANAMAVGATDQNNNRADFSQYGAGLDIVAPGVNVQSTYPGSTYASQNGTSMATPHVAGAAVLVKQKNPSWSNVRIRDHLKNTATSLGSTNLYGSGLVNAFAATR

SEQ ID NO: 63009 - protein, 269 aa, Unidentified
AQSVPWGISRVQAPAAHNRGLAGSGVKVAVLDTGISTHPDLNIRGGASFVPGEPSTQDGNGHGTHVAGTIAALNNNIGVLGVAPSAELYAVKVLGASGGGAISSIAQGLEWAGNNGMHVANLSLGAPSPSATLEQAVNSATSRGVLVVAASGNSGADSISYPARYANAMAVGATDQNNNRADFSQYGAGLDIVAPGVNVQSTYPGSTYASLNGTSMATPHVAGAAVLVKQKNPSWSNVRIRDHLKNTATSLGSTNLYGSGLVNAFAATR

SEQ ID NO: 63010 - protein, 269 aa, Unidentified
AQSVPWGISRVQAPAAHNRGLAGSGVKVAVLDTGISTHPDLNIRGGASFVPGEPSTQDGNGHGTHVAGTIAALDNSIGVLGVAPSAELYAVKVLGASGNGAISSIAQGLEWAGNNGMHVANLSLGAPSPSATLEQAVNSATSRGVLVVAASGNSGADSISYPARYANAMAVGATDQNNNRADFSQYGAGLDIVAPGVNVQSTYPGSTYASLNGTSMATPHVAGAAVLVKQKNPSWSNVRIRDHLKNTATSLGSTNLYGSGLVNAFAATR

SEQ ID NO: 63011 - protein, 269 aa, Unidentified
AQSVPWGIERVQAPAAHNRGLTGSGVKVAVLDTGISTHPDLNIRGGASFVPGEPSTQDGNGHGTHVAGTIAALDNSIGVLGVAPSAELYAVKVLGASGSGSVSSIAQGLEWAWNNGMHVANLSLGSPSPSATLEQAVNSATSRGVLVVAASGNSGAPSISYPARYANAMAVGATDENNNRASFSQYGAGLDIVAPGVNILSTWPGSTYASLNGTSMATPHVAGAAALVKQKNPSWSNVQIRNHLKNTATDLGSEWEYGSGLVNAEAATR

SEQ ID NO: 63012 - protein, 269 aa, Unidentified
AQSVPWGISRVQAPAAHNRGLAGSGVKVAVLDTGISTHPDLNIRGGASFVPGEPSTQDGNGHGTHVAGTIAALDNNIGVLGVAPSAELYAVKVLGASGQGAISSIAQGLEWAGNNGMHVANLSLGSPSPSATLEQAVNSATSRGVLVVAASGNSGADSISYPARYANAMAVGATDQNNNRADFSQYGAGLDIVAPGVNVQSTYPGSTYASLNGTSMATPHVAGAAVLVKQKNPSWSNVRIRDHLKNTATSLGSTNLYGSGLVNAFAATR

SEQ ID NO: 63013 - protein, 269 aa, Unidentified
AQSVPWGISRVQAPAAHNRGLAGRGVKVAVLDTGISTHPDLNIRGGASFVPGEPSTQDGNGHGTHVAGTIAALNNSIGVLGVAPSAELYAVKVLGASGDGAISSIAQGLEWAGNNRMHVANLSLGIPSPSATLEQAVNSATSRGVLVVAASGNSGADSISYPARYANAMAVGATDQNNNRADFSQYGAGLDIVAPGVNVQSTYPGSTYASLNGTSMATPHVAGAAVLVKQKNPSWSNVRIRDHLKNTATSLGSTNLYGSGLVNAEAATR

SEQ ID NO: 63014 - protein, 269 aa, Unidentified
AQSVPWGISRVQAPAAHNRGLAGSGVKVAVLDTGISTHPDLNIRGGASFVPGEPSTQDGNGHGTHVAGTIAALNNSIGVLGVAPSAELYAVKVLSASGQGAISSIAQGLEWAGNNGMHVANLSLGAPSPSATLEQAVNSATSRGVLVVAASGNSGADSISYPARYANAMAVGATDQNNNRADFSQYGAGLDIVAPGVNVQSTYPGSTYASLNGTSMATPHVAGAAVLVKQKNPSWSNVRIRDHLKNTATSLGSTNLYGSGLVNAFAATR

SEQ ID NO: 63015 - protein, 269 aa, Unidentified
AQSVPWGISRVQAPAAHNRGLAGSGVKVAVLDTGISTHPDLNIRGGASFVPGEPSTQDGNGHGTHVAGTIAALDNSIGVLGVAPSAELYAVKVLGASGGGAISSIAQGLEWAGNNGMHVANLSLGSESPSATLEQAVNSATSRGVLVVAASGNSGAGSISYPARYANAMAVGATDQNNNRADFSQYGAGLDIVAPGVNVQSTYPGSTYASLNGTSMATPHVAGAAVLVKQKNPSWSNVRIRDHLKNTATSLGSTNLYGSGLVNAFVATR

SEQ ID NO: 63016 - protein, 269 aa, Unidentified
AQSVPWGISRVQAPAAHNRGLAGSGVKVAVLDTGISTHPDLNIRGGASFVPGEPSTQDGNGHGTHVAGTIAALNNSIGVLGVAPSAELYAVKVLSASGQGAISSIAGGLEWAGNNGMHVANLSLGSPSPSATLEQAVNSATSRGVLVVAASGNSGADSISYPARYANAMAVGATDQNNNRADFSQYGAGLDIVAPGVNVQSTYPGSTYASLNGTSMATPHVAGAAVLVKQKNPSWSNVRIRDHLKNTATSLGSTNLYGSGLVNAFAATR

SEQ ID NO: 63017 - protein, 269 aa, Unidentified
AQSVPWGISRVQAPAAHNRGLTGSGVKVAVLDTGITTHPDLNIRGGASFVPGEPSTQDGNGHGTHVAGTIAALNNSIGVLGVAPSAELYAVKVLGADGRGAISSIAQGLEWAGNNGMHVANLSLGSPSPSATLEQAVNYATSRGVLVVAASGNSGASSISYPARYANAMAVGATDQNNNRASFSQYGPGLDIMAPGVNIQSTYPGSTYPSLNGTSMPTPHVAGAAALVKQKNPSWSNVQIRNHLKNTATSLGSTNLYGSGLVNAEAATR

SEQ ID NO: 63018 - protein, 269 aa, Lederbergia lentus
AQTIPWGISRVQAPAAHNRGLTGSGVKVAVLDTGISTHPDLNIRGGASFVPGEPSTQDGNGHGTHVAGTIAALNNSIGVLGVAPSAELYAVKVLGADGEGAISSIAQGLEWAGNNGMHVANLSLGSPSPSATLEQAVNSATSRGVLVVAASGNDGASSISYPARYANAMAVGATDQNNNRASFSQYGAGLDIVAPGVNILSTWPGSTYASLNGTSMATPHVAGAAALVKQKNPSWSNVQIRNHLKNTATSLGSTNEYGSGLVNAEAATR

SEQ ID NO: 63019 - protein, 269 aa, Unidentified
AQSVPWGISRVQAPAAHNRGLAGSGVKVAVLDTGISTHPDLNIRGGASFVPGEPSTQDGNGHGTHVAGTIAALNNSIGVLGVAPSAELYAVKVLGASGGGAISSIAQGLEWAGNNGMHVANLSLGAPSPSATLEQAVNSATSRGVLVVAASGNSGADSISYPARYANAMAVGATDQNNNRADFSQYGAGLDIVAPGVNVQSTYPGSTYASQNGTSMATPHVAGAAVLVKQKNPSWSNVRIRDHLKNTATSLGSTNLYGSGLVNAFAATR

SEQ ID NO: 63020 - protein, 269 aa, Unidentified
AQSVPWGISRVQAPAAHNRGLAGGGVKVAVLDTGISTHPDLNIRGGASFVPGEPSTQDGNGHGTHVAGTIAALNNSIGVLGVAPSAELYAVKVLSASGNGAISSIAQGLEWAGNNGMHVANLSLGSPSPSATLEQAVNSATSRGVLVVAASGNSGADSISYPARYANAMAVGATDQNNNRADFSQYGAGLDIVAPGVNVQSTYPGSTYASLNGTSMATPHVAGAAVLVKQKNPSWSNVRIRDHLKNTATSLGSTNLYGSGLVNAFAATR

SEQ ID NO: 63021 - protein, 269 aa, Lederbergia lentus
AQTIPWGISRVQAPAAHNRGLTGSGVKVAVLDTGISTHPDLNIRGGASFVPGEPSTQDGNGHGTHVAGTIAALDNSIGVLGVAPSAELYAVKVLGADGEGAISSIAQGLEWAGNNGMHVANLSLGSPSPSATLEQAVNSATSRGVLVVAASGNDGASSISYPARYANAMAVGATDQNNNRASFSQYGAGLDIVAPGVNILSTYPGSTYASLNGTSMATPHVAGAAALVKQKNPSWSNVQIRNHLKNTATSLGSTNEYGSGLVNAEAATR

SEQ ID NO: 63022 - protein, 269 aa, Unidentified
AQSVPWGISRVQAPAAHNRGLAGRGVKVAVLDTGISTHPDLNIRGGASFVPGEPSTQDGNGHGTHVAGTIAALNNSIGVLGVAPSAELYAVKVLGASGGGAISSIAQGLEWAGNNGMHVANLSLGSESPSATLEQAVNSATSRGVLVVAASGNSGEGSISYPARYANAMAVGATDQNNNRADFSQYGAGLDIVAPGVNVQSTYPGSTYASLNGTSMATPHVAGAAVLVKQKNPSWSNVRIRDHLKNTATSLGSTNLYGSGLVNAFAATR

SEQ ID NO: 63023 - protein, 269 aa, Unidentified
AQSVPWGISRVQAPAAHNRGLTGRGVKTAVLDTGISTHPDLSIRGGASFVPGEPSTQDGNGHGTHVAGTIAALDNNIGVLGVAPRAELYAVKVLGASGSGSVSSIAQGLEWAGNNRMHVANLSLGLQAPSATLEQAVNSATSRGVLVVAASGNSGEGSISYPARYANAMAVGATDQNNNRASFSQYGAGLDIVAPGVNVLSTYPGSTYASLNGTSMATPHVAGAAALVKQKNPSWSNVQIRNHLKNTATSLGSTNLYGSGLVNAEAATR

SEQ ID NO: 63024 - protein, 269 aa, Unidentified
AQSVPWGISRVQAPAAHNRGLAGSGVKVAVLDTGISTHPDLNIRGGASFVPGEPSTQDGEGHGTHVAGTIAALNNSIGVLGVAPSAELYAVKVLGASGGGAISSIAQGLEWAGNNGMHVANLSLGSPSPSATLEQAVNSATSRGVLVVAASGNSGEESISYPARYANAMAVGATDQNNNRADFSQYGAGLDIVAPGVNVQSTYPGSTYASLNGTSMATPHVAGAAVLVKQKNPSWSNVRIRDHLKNTATSLGSTNLYGSGLVNAFAATR

SEQ ID NO: 63025 - protein, 269 aa, Unidentified
AQSVPWGISRVQAPAAHNRGLTGSGVKVAVLDTGISTHPDLRIRGGASFVPGEPSTQDGNGHGTHVAGTIAALDNSIGVLGVAPSAELYAVKVLGASGAGAISSIAQGLEWAGNNGMHVANLSLGSPSPSATLEQAVNSATSRGVLVVAASGNSGEGSIDYPARYANAMAVGATDQNNNRADFSQYGAGLDIVAPGVNVQSTYPGSTYASLNGTSMATPHVAGAAVLVKQKNPSWSNVRIRDRLKNTATSLGSTNLYGSGLVNAEAATR

SEQ ID NO: 63026 - protein, 269 aa, Unidentified
AQSVPWGISRVQAPAAHNRGLTGRGVKVAVLDTGISTHPDLNIRGGASFVPGEPSTQDGNGHGTHVAGTIAALNNSIGVLGVAPSAELYAVKVLGASGGGAISSIAQGLEWAGNNGMHVANLSLESQSPSATLEQAVNSATSRGVLVVAASGNSGEGSISYPARYANAMAVGATDQNNNRADFSQYGAGLDIVAPGVNVQSTYPGSTYASLNGTSMATPHVAGAAVLVKQKNPSWSNVRIRDRLKNTATSLGSTNLYGSGLVNAEAATR

SEQ ID NO: 63027 - protein, 269 aa, Unidentified
AQSVPWGISRVQAPASHNRGLAGFGVKVAVLDTGISTHPDLNIRGGASFVPGEPSTQDGNGHGTHVAGTIAALNNSIGVLGVAPSAELYAVKVLGASGGGAISSIAQGLEWAGLNGMHVANLSLGNPSPSATLEQAVNSATSRGVLVVAASGNSGAGSISYPARYANAMAVGATDQNNNRASFSQYGAGLDIVAPGVNVQSTAPQSAYASLNGTSMATPHVAGAAVLVKQKNPSWSNVQIRNHLKNTATSLGSTNLYGSGLVNAEAATR

SEQ ID NO: 63028 - protein, 269 aa, Unidentified
AQSVPWGISRVQAPAAHNRGLTGSGVKVAVLDTGISTHPDLNIRGGASFVPGEPSTQDGNGHGTFVAGTIAALDNSIGVLGVAPSAELYAVKVLGASGAGAISSIAQGLEWAGNNGMHVANLSLGSPSPSATLEQAVNSATSRGVLVVAASGNSGEGSIDYPARYANAMAVGATDQNNNRADFSQYGAGLDIVAPGVNVQSTYPGSTYASLNGTSMATPHVAGAAVLVKQKNPSWSNVRIRDRLKNTATSLGSTNLYGSGLVNAEAATR

SEQ ID NO: 63029 - protein, 269 aa, Unidentified
AQSVPWGISRVQAPAAHNRRLWGSGVKVAVLDTGISTHPDLNIRGGASFVPGEPSTQDGNGHGTHVAGTIAALNNSIGVLGVAPSAELYAVKVLGASGAGAISSIAQGLEWAGANGMHVANLSLGSPSPSATLEQAVNSATSRGVLVVAASGNSGAGSISYPARYANAMAVGATDQDNNRASFSQYGAGLDIVAPGVNVQSTYPQSAYFSLNGTSMATPHVAGAAVLVKQKNPSWSNVRIRNHLKNTATSLGSTNLYGSGLVNAEAATR

SEQ ID NO: 63030 - protein, 269 aa, Bacillus lentus
AQTIPWGISRVQAPAAHNRGLTGSGVKVAVLDTGISTHPDLNIRGGASFVPGEPSTQDGNGHGTHVAGTIAALNNSIGVLGVAPSAELYAVKVLGADGGGAISSIAQGLEWAGNNGMHVANLSLGSPSPSATLEQAVNSATSRGVLVVAASGNSGASSISYPARYANAMAVGATDQNNNRASFSQYGPGLDIMAPGVNIQSTYPGSTYASDNGTSMATPHVAGAAALVKQKNPSWSNVQIRNHLKNTATSLRSTNLYGSGLVNAEAATR

SEQ ID NO: 63031 - protein, 269 aa, Unidentified
AQSVPWGISRVQAPAAHNRGLTGRGVKVAVLDTGISTHPDLNIRGGASFVPGEPSTQDGNGHGTHVAGTIAALDNNIGVLGVAPDAELYAVKVLGASGGGAISSIAQGLEWAGNNRMHVANLSLTSPSPSATLEQAVNSATSRGVLVVAASGNSGAGSISYPARYANAMAVGATDQNNNRASFSQYGAGLDIVAPGVNVQSTWPGSAYASLNGTSMATPHVAGAAALVKQKNPSWSNVQIRNRLKNTATSLGSTNLYGSGLVNAEAATR

SEQ ID NO: 63032 - protein, 269 aa, Lederbergia lentus
AQTIPWGISRVQAPAAHNRGLTGSGVKVAVLDTGISTHPDLNIRGGASFVPGEPSTQDGNGHGTHVAGTIAALNNSIGVLGVAPSAELYAVKVLGADGEGAISSIAQGLEWAGNNGMHVANLSLGSPSPSATLEQQVNSATSWGVLVVAASGNSGASSISTPARYANAMAVGATDQNNNRASFSQYGAGLDIVAPGVNILSTYPGSTYASLNGTSMATPHVAGAAALVKQKNPSWSNVQIRNHLKNTATSLGSTNLYGSGLVNAEAATR

SEQ ID NO: 63033 - protein, 269 aa, Unidentified
AQSVPWGISRVQAPAAHNRGLTGSGVKVAVLDTGISTHPDLNIRGGASFVPGEPSTQDGNGHGTHVAGTIAALDNSIGVLGVAPSAELYAVKVLGASGGGAISSIAQGLEWVGNNGMHVANLSLGSPSPSATLEQAVNSATSRGVLVVAASGNSGEGSISYPARYANAMAVGATDQNNNRADFSQYGAGLDIVAPGVNVQSTYPGSTYASLNGTSMATPHVAGAAVLVKQKNPSWSNVRIRDRLKNTATSLGSTNLYGSGLVNAFAATR

SEQ ID NO: 63034 - protein, 269 aa, Unidentified
AQSVPWGISRVQAPAAHNRGLAGSGVKVAVLDTGISTHPDLNIRGGASFVPGEPSTQDGNGHGTHVAGTIAALNNSIGVLGVAPSAELYAVKVLGASGGGAISSIAQGLEWAGNNGMHVANLSIGAPSPSATLEQAVNSATSRGVLVVAASGNSGADSISYPARYANAMAVGATDQNNNRADFSQYGAGLDIVAPGVNVQSTYPGSTYASLNGTSMATPHVAGAAVLVKQKNPSWSNVRIRDHLKNTATSLGSTNLYGSGLVNAFAATR

SEQ ID NO: 63035 - protein, 269 aa, Unidentified
AQSVPWGISRVQAPAAHNRGLAGRGVKVAVLDTGISTHPDLRIRGGASFVPGEPSTQDGNGHGTHVAGTIAALNNSIGVLGVAPSAELYAVKVLGASGGGAISSIAQGLEWAGNNGMHVANLSLGSESPSATLEQAVNSATSRGVLVVAASGNSGAGSISYPARYANAMAVGATDQNNNRADFSQYGAGLDIVAPGVNVQSTYPGSTYASLNGTSMATPHVAGAAVLVKQKNPSWSNVRIRDHLKNTATSLGSTNLYGSGLVNAFAATR

SEQ ID NO: 63036 - protein, 269 aa, Unidentified
AQSVPWGISRVQAPAAHNRGLTGSGVKVAVLDTGISTHPDLRRRGGASFVPGEPSTQDGNGHGTHVAGTIAALDNSIGVLGVAPSAELYAVKVLGASGAGAISSIAQGLEWAGNNGMHVANLSLGSPSPSATLEQAVNSATSRGVLVVAASGNSGEGSIDYPARYANAMAVGATDQNNNRADFSQYGAGLDIVAPGVNVQSTYPGSTYASLNGTSMATPHVAGAAVLVKQKNPSWSNVRIRDHLKNTATSLGSTNLYGSGLVNAEAATR

SEQ ID NO: 63037 - protein, 269 aa, Unidentified
AQSVPWGISRVQAPAAHNRGLAGSGVKVAVLDTGISTHPDLNIRGGASFVPGEPSTQDGNGHGTHVAGTIAALDNSIGVLGVAPSAELYAVKVLSASGQGAISSIAQGLEWAGNNGMHVANLSLGSPSPSATLEQAVNSATSRGVLVVAASGNSGADSISYPARYANAMAVGATDQNNNRADFSQYGAGLDIVAPGVNVQSTYPGSTYASLNGTSMATPHVAGAAVLVKQKNPSWSNVRIRDHLKNTATSLGSTNLYGSGLVNAFAATR

SEQ ID NO: 63038 - protein, 269 aa, Unidentified
AQSVPWGISRVQAPAAHNRGLTGSGVKVAVLDTGISTHPDLNIRGGASFVPGEPSTQDGNGHGTHAAGTIAALDNSIGVLGVAPSADLYAVKVLGASGSGAISSIAQGLEWAGNNGMHVANLSLGSPSPSATLEQAVNSATSRGVLVVAASGNSGADSISYPARYANAMAVGATDQNNNRASFSQYGAGLDIVAPGVNVQSTYLGSRYASLNGTSMATPHVAGAAVLVKHKNPSWSNVRIRNHLKNTATSLGSANLYGSGLVNAEAATR

SEQ ID NO: 63039 - protein, 269 aa, Unidentified
AQSVPWGISRVQAPAAHNRGLAGGGVKVAVLDTGISTHPDLNIRGGASFVPGEPSTQDGNGHGTHVAGTIAALNNSIGVLGVAPSAELYAVKVLGASGNGAISSIAQGLEWAGNNGMHVANLSLGAPSPSATLEQAVNSATSRGVLVVAASGNSGADSISYPARYANAMAVGATDQNNNRADFSQYGAGLDIVAPGVNVQSTYPGSTYASLNGTSMATPHVAGAAVLVKQKNPSWSNVRIRDHLKNTATSLGSTNLYGSGLVNAFAATR

SEQ ID NO: 63040 - protein, 269 aa, Unidentified
AQSVPWGISRVQAPAAHNRGLAGSGVKVAVLDTGISTHPDLNIRGGASFVPGEPSTQDGNGHGTHVAGTIAALNNSIGVLGVAPSAELYAVKVLGASGQGAISSIAQGLEWAGNNGMHVANVSLGAPSPSATLEQAVNSATSRGVLVVAASGNSGADSISYPARYANAMAVGATDQNNNRADFSQYGAGLDIVAPGVNVQSTYPGSTYASLNGTSMATPHVAGAAVLVKQKNPSWSNVRIRDHLKNTATSLGSTNLYGSGLVNAFAATR

SEQ ID NO: 63041 - protein, 275 aa, Unidentified
AQTIPWGISRVQAPAAHNRGLTGSGVKVAVLDTGIXSTHPDLNIRGGASFVPGEPXSTQDGNGHGTHVAGTIAALNNSIGVLGVAPSAELYAVKVLGADGEGAISSIAQGLEWAGNNSMHVANLSLGSPSPSATLEQAVNSATSRGVLVVAASGNSGAXSSISXXXYPARYANAMAVGATDQNNNRASFSQYGPGLDIVAPGVNILSTWPGSTYASLNGTSMATPHVAGAAALVKQKNPSWSNVQIRNHLKNTATSLGSTNLYGSGLVNAEAATR

SEQ ID NO: 63042 - protein, 269 aa, Unidentified
AQSVPWGISRVQAPAARNRGLAGVGVKVAVLDTGISTHPDLNIRGGASFVPGEPSTQDGNGHGTHVAGTIAALDNSIGVLGVAPSAELYAVKVLSASGNGAISSIANGLEWAGNNGMHVANLSLGAPSPSATLEQAVNSATSRGVLVVAASGNSGAGSISYPARYANAMAVGATDQNNNRASFSQYGAGLDIVAPGVNVQSTYPGSTYASLNGTSMATPHVAGAAVLVKQKNPSWSNVRIRNHLKNTATSLGSTNLYGSGLVNAEAATR

SEQ ID NO: 63043 - protein, 269 aa, Unidentified
AQSVPWGISRVQAPAAHNRGLRGGGVKVAVLDTGISTHPDLNIRGGASFVPGEPSTQDGNGHGTHVAGAIAALNNNIGVLGVAPSAELYAVKVLGASGNGAISSIANGLEWAGLNGMHVANLSLGAPSPSATLEQAVNSATSRGVLVVAASGNSGAGSISYPARYANAMAVGATDQNNNRASFSQYGAGLDIVAPGVNVQSTYPGSTYASLNGTSMATPHVAGAAVLVKQKNPSWSNVRIRNHLKNTATSLGSTNLYGSGLVNAEAATR

SEQ ID NO: 63044 - protein, 269 aa, Unidentified
AQSVPWGISRVQAPAAHNRGLAGSGVKVAVLDTGISTHPDLNIRGGASFVPGEPSTQDGNGHGTHVAGTIAALNNSIGVLGVAPSAELYAVKVLGASGGGAISSVAQGLEWAGNNGMHVANLSLGSPSPSATLEQAVNSATSRGVLVVAASGNSGADSISYPARYANAMAVGATDQNNNRADFSQYGAGLDIVAPGVNVQSTYPGSTYASLNGTSMATPHVAGAAVLVKQKNPSWSNVRIRDHLKNTATSLGSTNLYGSGLVNAFVATR

SEQ ID NO: 63045 - protein, 269 aa, Unidentified
AQSVPWGISRVQAPAAHNRGLAGGGVKVAVLDTGISTHPDLNIRGGASFVPGEPSTQDGNGHGTHVAGTIAALNNNIGVLGVAPSAELYAVKVLGASGGGAISSIAQGLEWAGNNGMHVANLSLGSPSPSATLEQAVNSATSRGVLVVAASGNSGADSISYPARYANAMAVGATDQNNNRADFSQYGAGLDIVAPGVNVQSTYPGSTYASLNGTSMATPHVAGAAVLVKQKNPSWSNVRIRDHLKNTATSLGSTNLYGSGLVNAFAATR

SEQ ID NO: 63046 - protein, 269 aa, Unidentified
AQSVPWGISRVQAPAAHNRGLAGSGVKVAVLDTGISTHPDLNIRGGASFVPGEPSTQDGNGHGTHVAGTIAALNNSIGVLGVAPSAELYAVKVLGASGGGAISSIAQGLEWAGNNGMHVANLSLGSPSPSATLEQAVNSATSRGVLVVAASGNSGEESISYPARYANAMAVGATDQNNNRADFSQYGAGLDIVAPGVNVQSTYPGSTYASLNGTSMATPHVAGAAVLVKQKNPSWSNVRIRDHLKNTATSLGSTNLYGSGLVNAFVATR

SEQ ID NO: 63047 - protein, 269 aa, Unidentified
AQSVPWGISRVQAPAAHNRGLAGGGVKVAVLDTGISTHPDLNIRGGASFVPGEPSTQDGNGHGTHVAGTIAALNNSIGVLGVAPSAELYAVKVLGASGQGAISSIAQGLEWAGNNGMHVANLSLGSPSPSATLEQAVNSATSRGVLVVAASGNSGADSISYPARYANAMAVGATDQNNNRADFSQYGAGLDIVAPGVNVQSTYPGSTYASQNGTSMATPHVAGAAVLVKQKNPSWSNVRIRDHLKNTATSLGSTNLYGSGLVNAFAATR

SEQ ID NO: 63048 - protein, 269 aa, Unidentified
AQSVPWGISRVQAPAAHNRGLAGSGVKVAVLDTGISTHPDLNIRGGASFVPGEPSTQDGNGHGTHVAGTIAALNNSIGVLGVAPSAELYAVKVLAASGQGAISSIANGLEWAGNNGMHVANLSLGSPSPSATLEQAVNSATSRGVLVVAASGNSGADSISYPARYANAMAVGATDQNNNRADFSQYGAGLDIVAPGVNVQSTYPGSTYASLNGTSMATPHVAGAAVLVKQKNPSWSNVRIRDHLKNTATSLGSTNLYGSGLVNAFAATR

SEQ ID NO: 63049 - protein, 269 aa, Unidentified
AQSVPWGISRVQAPAAHNRGLAGGGVKVAVLDTGISTHPDLNIRGGASFVPGEPSTQDGNGHGTHVAGTIAALNNSIGVLGVAPSAELYAVKVLGASGNGAISSIAQGLEWAGNNGMHVANLSLGSPSPSATLEQAVNSATSRGVLVVAASGNSGADSISYPARYANAMAVGATDQNNNRADFSQYGAGLDIVAPGVNVQSTYPGSTYASQNGTSMATPHVAGAAVLVKQKNPSWSNVRIRDHLKNTATSLGSTNLYGSGLVNAFAATR

SEQ ID NO: 63050 - protein, 269 aa, Unidentified
AQSVPWGISRVQAPAAHNRGLAGSGVKVAVLDTGISTHPDLRIRGGASFVPGEPSTQDGNGHGTHVAGTIAALNNSIGVLGVAPSAELYAVKVLGASGDGAISSIAQGLEWAGNNRMHVANLSLGSESPSATLEQAVNSATSRGVLVVAASGNSGADSISYPARYANAMAVGATDQNNNRADFSQYGAGLDIVAPGVNVQSTYPGSTYASLNGTSMATPHVAGAAVLVKQKNPSWSNVQIRDHLKNTATSLGSTNLYGSGLVNAFAATR

SEQ ID NO: 63051 - protein, 269 aa, Unidentified
AQSVPWGISRVQAPAAHNRGLAGSGVKVAVLDTGISTHPDLNIRGGASFVPGEPSTQDGNGHGTHVAGTIAALNNSIGVLGVAPSAELYAVKVLAASGQGAISSIAQGLEWAGNNGMHVANLSLGSESPSATLEQAVNSATSRGVLVVAASGNSGADSISYPARYANAMAVGATDQNNNRADFSQYGAGLDIVAPGVNVQSTYPGSTYASLNGTSMATPHVAGAAVLVKQKNPSWSNVRIRDHLKNTATSLGSTNLYGSGLVNAFAATR

SEQ ID NO: 63052 - protein, 269 aa, Unidentified
AQSVPWGISRVQAPAAHNRGLAGSGVKVAVLDTGISTHPDLNIRGGASFVPGEPSTQDGNGHGTHVAGTIAALNNSIGVLGVAPSAELYAVKVLGASGGGAISSIAQGLEWAGNNGMHVANLSLGLPSPSATLEQAVNSATSRGVLVVAASGNSGADSISYPARYANAMAVGATDQNNNRADFSQYGAGLDIVAPGVNVQSTYPGSTYASLNGTSMATPHVAGAAVLVKQKNPSWSNVRIRDHLKNTATSLGSTNLYGSGLVNAFDATR

SEQ ID NO: 63053 - protein, 269 aa, Unidentified
AQSVPWGISRVQAPAAHNRGLTGRGVKVAVLDTGISTHPDLNIRGGASFVPGEPSTQDGNGHGTHVAGTIAALNNSIGVLGVAPSAELYAVKVLGASGGGAISSIAQGLEWAGNNGMHVANLSLGQPSPSATLEQAVNSATSRGVLVVAASGNSGEGSISYPARYANAMAVGATDQNNNRADFSQYGAGLDIVAPGVNVQSTYPGSTYASLNGTSMATPHVAGAAVLVKQKNPSWSNVRIRDRLKNTATSLGSTNLYGSGLVNAGAATR

SEQ ID NO: 63054 - protein, 269 aa, Unidentified
AQSVPWGISRVQAPAAHNRGLTGRGVKTAVLDTGISTHPDLNIRGGASFVPGEPSTQDGNGHGTHVAGTIAALDNNIGVLGVAPDAELYAVKVLGASGVGSVSSISQGLEWAGNNRMHVANLSLGLQAPSATLEQAVNSATSRGVLVVAASGNSGAGSISYPARYANAMAVGATDQNNNRASFSQYGAGLDIVAPGVNVLSTYPGSTYASLNGTSMATPHVAGAAALVKQKNPSWSNVQIRNHLKNTATSLGSTNLYGSGLVNAEAATR

SEQ ID NO: 63055 - protein, 269 aa, Unidentified
AQSVPWGISRVQAPAAHNRGLAGSGVKVAVLDTGISTHPDLNIRGGASFVPGEPSTQDGNGHGTHVAGTIAALNNSIGVLGVAPSAELYAVKVLAASGQGAISSIAQGLEWAGNNGMHVANVSLGSPSPSATLEQAVNSATSRGVLVVAASGNSGADSISYPARYANAMAVGATDQNNNRADFSQYGAGLDIVAPGVNVQSTYPGSTYASLNGTSMATPHVAGAAVLVKQKNPSWSNVRIRDHLKNTATSLGSTNLYGSGLVNAFAATR

SEQ ID NO: 63056 - protein, 275 aa, Unidentified
AQTIPWGISRVQAPAAHNRGLTGSGVKVAVLDTGIXSTHPDLNIRGGASFVPGEPXSTQDGNGHGTHVAGTIAALNNSIGVLGVAPSAELYAVKVLGADGEGAISSIAQGLEWAGNNNMHVANLSLGSPSPSATLEQAVNSATSRGVLVVAASGNSGAXSSISXXXYPARYANAMAVGATDQNNNRASFSQYGPGLDIVAPGVNILSTWPGSTYASLNGTSMATPHVAGAAALVKQKNPSWSNVQIRNHLKNTATSLGSTNLYGSGLVNAEAATR

SEQ ID NO: 63057 - protein, 269 aa, Unidentified
AQSVPWGISRVQAPAAHNRGLAGGGVKVAVLDTGISTHPDLNIRGGASFVPGEPSTQDGNGHGTHVAGTIAALNNSIGVLGVAPSAELYAVKVLGASGNGAISSIANGLEWAGNNGMHVANLSLGSPSPSATLEQAVNSATSRGVLVVAASGNSGADSISYPARYANAMAVGATDQNNNRADFSQYGAGLDIVAPGVNVQSTYPGSTYASLNGTSMATPHVAGAAVLVKQKNPSWSNVRIRDHLKNTATSLGSTNLYGSGLVNAFAATR

SEQ ID NO: 63058 - protein, 268 aa, Unidentified
AQSVPWGISRVQAPAAHNRGLAGSGVKVAVLDTGISTHPDLNIRGGASFVPGEPSTQDGNGHGTHVAGTIAALNNSIGVLGVAPSAELYAVKVLGASGQGAISSIAQGLEWAGNNGMHVANVSGAPSPSATLEQAVNSATSRGVLVVAASGNSGADSISYPARYANAMAVGATDQNNNRADFSQYGAGLDIVAPGVNVQSTYPGSTYASLNGTSMATPHVAGAAVLVKQKNPSWSNVRIRDHLKNTATSLGSTNLYGSGLVNAFAATR

SEQ ID NO: 63059 - protein, 268 aa, Unidentified
AQSVPWGISRVQAPAAHNRGLAGSGVKVAVLDTGISTHPDLNIRGGASFVPGEPSTQDGNGHGTHVAGTIAALNNSIGVLGVAPSAELYAVKVLAASGGGAISSIAQGLEWAGNNGMHVANLSGAPSPSATLEQAVNSATSRGVLVVAASGNSGADSISYPARYANAMAVGATDQNNNRADFSQYGAGLDIVAPGVNVQSTYPGSTYASLNGTSMATPHVAGAAVLVKQKNPSWSNVRIRDHLKNTATSLGSTNLYGSGLVNAFAATR

SEQ ID NO: 63060 - protein, 268 aa, Unidentified
AQSVPWGISRVQAPAAHNRGLAGSGVKVAVLDTGISTHPDLNIRGGASFVPGEPSTQDGNGHGTHVAGTIAALDNNIGVLGVAPSAELYAVKVLGASGNGASSIAQGLEWAGNNGMHVANLSLGAPSPSATLEQAVNSATSRGVLVVAASGNSGADSISYPARYANAMAVGATDQNNNRADFSQYGAGLDIVAPGVNVQSTYPGSTYASLNGTSMATPHVAGAAVLVKQKNPSWSNVRIRDHLKNTATSLGSTNLYGSGLVNAFAATR

SEQ ID NO: 63061 - protein, 268 aa, Unidentified
AQSVPWGISRVQAPAAHNRGLAGSGVKVAVLDTGISTHPDLNIRGGASFVPGEPSTQDGNGHGTHVAGTIAALNNSIGVLGVAPSAELYAVKVLGASGGGAISSIAQGLEWAGNNGMHVANLSGAPSPSATLEQAVNSATSRGVLVVAASGNSGADSISYPARYANAMAVGATDQNNNRADFSQYGAGLDIVAPGVNVQSTYPGSTYASQNGTSMATPHVAGAAVLVKQKNPSWSNVRIRDHLKNTATSLGSTNLYGSGLVNAFAATR

SEQ ID NO: 63062 - protein, 268 aa, Unidentified
AQSVPWGISRVQAPAAHNRGLAGSGVKVAVLDTGISTHPDLNIRGGASFVPGEPSTQDGNGHGTHVAGTIAALNNSIGVLGVAPSAELYAVKVLGASGNGAISSIAQGLEWAGNNGMHVANLSGSESPSATLEQAVNSATSRGVLVVAASGNSGADSISYPARYANAMAVGATDQNNNRADFSQYGAGLDIVAPGVNVQSTYPGSTYASQNGTSMATPHVAGAAVLVKQKNPSWSNVRIRDHLKNTATSLGSTNLYGSGLVNAFAATR

SEQ ID NO: 63063 - protein, 268 aa, Unidentified
AQSVPWGISRVQAPAAHNRGLAGSGVKVAVLDTGISTHPDLNIRGGASFVPGEPSTQDGNGHGTHVAGTIAALNNSIGVLGVAPSAELYAVKVLGASGQGAISSIAQGLEWAGNNGMHVANVSLGSESPSATLEQAVNSATSRGVLVVAASGNSGADSISYPARYANAMAVGATDQNNNRADFSQYGAGLDIVAPGVNVQSTYPGSTYASLNGTSMATPHVAGAAVLVKQKNPSWSNVRIRDHLKNTATSLGSTNLYGSGLVNAFAAT

SEQ ID NO: 63064 - protein, 267 aa, Unidentified
LGKIVASTALLISVAFSSSIASAAEEAKEKYLIGFNEQEAVSEFVEQVEANDEVAILSEEEEVEIELLHEFETIPVLSVELSPEDVDALELDPAISYIEEDAEVTTMAQSVPWGISRVQAPAAHNRGLTGSGVKVAVLDTGISTHPDLNIRGGASFVPGEPSTQDGNGHGTHVAGTIAALNNSIGVLGVAPSAELYAVKVLGASGSGSVSSIAQGLEWAGNNGMHVANLSLGSPSPSATLEQAVNSATSRGVLVVAASGNSGAGCLA

SEQ ID NO: 63065 - protein, 265 aa, Unidentified
VERYQNYLAGENGMVFVHNSGVKVAVLDTGISTHPDLNIRGGASFVPGEPSTQDGNGHGTHVAGTIAALNNSIGVLGVAPSAELYAVKVLGASGSGSVSSIAQGLEWAGNNGMHVANLSLGSPSPSATLEQAVNSATSRGVLVVAASGNSGAGSISYPARYANAMAVGATDQNNNRASFSQYGAGLDIVAPGVNVQSTYPGSTYASLNGTSMATPHVAGAAALVKQKNPSWSNVQIRNHLKNTATSLGSTNLYGSGLVNAEAATR

SEQ ID NO: 63066 - protein, 382 aa, Unidentified
VRSKKLWISLLFALTLIFTMAFSNMSAQAAEEAKEKYLIGFNEQEAVSEFVEQVEANDEVAILSEEEEVEIELLHEFETIPVLSVELSPEDVDALELDPAISYIEEDAEVTTMAQSVPWGISRVQAPAAHNRGLTGSGVKVAVLDTGISTHPDLNIRGGASFVPGEPSTQDGNGHGTHVAGTIAALNNSIGVLGVAPNAELYAVKVLGASGSGSVSSIAQGLEWAGNNVMHVANLSLGLQAPSATLEQAVNSATSRGVLVVAASGNSGAGSISYPARYANAMAVGATDQNNNRASFSQYGAGLDIVAPGVNVQSTYPGSTYASLNGTSMATPHVAGAAALVKQKNPSWSNVQIRNHLKNTATSLGSTNLYGSGLVNAEAATR

SEQ ID NO: 63067 - protein, 380 aa, Unidentified
VRSKKLWIVASTALLISVAFSSSIASAAEEAKEKYLIGFNEQEAVSEFVEQVEANDEVAILSEEEEVEIELLHEFETIPVLSVELSPEDVDALELDPAISYIEEDAEVTTMAQSVPWGISRVQAPAAHNRGLTASGVKVAVLDTGISTHPDLNIRGGASFVPGEPSTQDGNGHGTHVAGTIAALNNRIGVLGVAPSAELYAVKVLGASGSGSVSSIAQGLEWAGNNGMHVANLSLGSPSPSATLEQAVNSATSRGVLVVAASGNSGAGSISYPARYANAMAVGATDQNNNRASFSQYGAGLDIVAPGVNVQSTYPGSTYAFLNGTSMATPHVAGAAALVKNKNPSWSNVQIRNRLKNTATSLGSTNLYGSGLVNAEAATR

SEQ ID NO: 63068 - protein, 380 aa, Unidentified
VRSKKLWIVASTALLISVAFSSSIASAAEEAKEKYLIGFNEQEAVSEFVEQVEANDEVAILSEEEEVEIELLHEFETIPVLSVELSPEDVDALELDPAISYIEEDAEVTTMAQSVPWGISRVQAPAAHNRGLTGRGVKVAVLDTGISTHPDLRITGGASFVPGEPSTQDGNGHGTHVAGTIAALNNSIGVLGVAPSAELYAVKVLGASGSGSVSSIAQGLEWAGNNGMHVANLSLGSPSPSATLEQAVNSATSRGVLVVAASGNSGAGSISYPARYANAMAVGATDQNNNRASFSQYGAGLDIVAPGVNVQSTYPGSTYASLNGTSMATPHVAGAAALVKQKNPSWRNVQIRNRLKNTATSLGSTNLYGSGLVNAEAATR

SEQ ID NO: 63069 - protein, 380 aa, Unidentified
VRSKKLWIVASTALLISVAFSSSIASAAEEAKEKYLIGFNEQEAVSEFVEQVEANDEVAILSEEEEVEIELLHEFETIPVLSVELSPEDVDALELDPAISYIEEDAEVTTMAQSVPWGISRVQAPAAHNRKLTGFGVKVAVLDSGISTHPDLNIRGGASFVPGEPSTQDGNGHGTHVAGTIAALNNSIGVLGVAPSAELYAVKVLGASGSGSVSSIAQGLEWAGNNGMHVANLSLGSESPSATLEQAVNSATSRGVLVVAASGNSGAGSISYPARYANAMAVGATDQNNNRASFSQYGEGLDIVAPGVNVQSTYPGSTYASLNGTSMATPHVAGAAALVKQKNPSWSNVQIRNHLKNTATSLGSTNLYGSGLVNAEAATR

SEQ ID NO: 63070 - protein, 380 aa, Unidentified
VRSKKLWIVASTALLISVAFSSSIASAAEEAKEKYLIGFNEQEAVSEFVEQVEANDEVAILSEEEEVEIELLHEFETIPVLSVELSPEDVDALELDPAISYIEEDAEVTTMAQSVPWGISRVQAPAAHNRGLTGRGVKVAVLDTGISTHPDLAIRGGASFVPGEPSTQDGNGHGTHVAGTIAALNNSIGVLGVAPSAELYAVKVLGASGSGSVTGIAQGLEWAGNNGMHVANLSLGSPSPSATLEQAVNSATSRGVLVVAASGNSGAGSISYPARYANAMAVGATDQNNNRASFSQYGAGLDLVAPGVNVQSTYPGSTYASLNGTSMATPHVAGAAALVKQKNPSWSNVQIRNHLKNTATSLGSTNLYGSGLVNAEAATR

SEQ ID NO: 63071 - protein, 380 aa, Unidentified
VRSKKLWIVASTALLISVAFSSSIASAAEEAKEKYLIGFNEQEAVSEFVEQVEANDEVAILSEEEEVEIELLHEFETIPVLSVELSPEDVDALELDPAISYIEEDAEVTTMAQSVPWGISRVQAPAAHNRGLTGSGVKVAVLDTGISTHPDLNIRGGASFVPGEPSTQDGNGHGTHVAGTIAALNNSIGVLGVAPSAELYAVKVLGASGAGSVSSIAQGLEWAGNNGMHVANLSLGNPSPSATLEQAVNSATSRGVLVVAASGNSGEGSISYPARYANAMAVGATDQNNNRASFSQYGAGLDIVAPGVNVQSTEPGSTYASLNGTSMATPHVAGAAALVKQKNPSWSNVQIRNRLKNTATSLGSTNLYGSGLVNAEAATR

SEQ ID NO: 63072 - protein, 380 aa, Unidentified
VRSKKLWIVASTALLISVAFSSSIASAAEEAKEKYLIGFNEQEAVSEFVEQVEANDEVAILSEEEEVEIELLHEFETIPVLSVELSPEDVDALELDPAISYIEEDAEVTTMAQSVPWGISRVQAPAAHNRGLTGSGVKVAVLDSGISTHPDLNIRGGASFVPGEPSTQDGNGHGTHVAGTIAALNNRIGVLGVAWSAELYAVKVLGASGSGSVSSIAQGLEWAGNNRMHVANLSLGSPSPSATLEQAVNSATSRGVLVVAASGNSGAGSISYPARYANAMAVGATDQNNNRASFSQYGAGLDIVAPGVNVQSTAPGSTYASLNGTSMATPHVAGAAALVKQKNPSWSNVQIRNHLKNTATSLGSTNLYGSGLVNAEAATR

SEQ ID NO: 63073 - protein, 380 aa, Unidentified
VRSKKLWIVASTALLISVAFSSSIASAAEEAKEKYLIGFNEQEAVSEFVEQVEANDEVAILSEEEEVEIELLHEFETIPVLSVELSPEDVDALELDPAISYIEEDAEVTTMAQSVPWGISRVQAPAAHRRGLTGSGVKVAVLDTGISTHPDLNIRGGASFVPGEPSTQDGNGHGTHVAGTIAALNNSIGVLGVAPSAELYAVKVLGASGGGSISSIAQGLEWAGNNGMHVANLSLGSPSPSATLEQAVNSATSRGVLVVAASGNSGAGSISYPARYANAMAVGATDQNNNRASFSQYGAGLDIVAPGVNVQSTYPGSTYASLNGTSMATPHVAGAAVLVKQKNPSWSNVRIRNHLKNTATSLGSTNLYGSGLVNAEAATR

SEQ ID NO: 63074 - protein, 380 aa, Unidentified
VRSKKLWIVASTALLISVAFSSSIASAAEEAKEKYLIGFNEQEAVSEFVEQVEANDEVAILSEEEEVEIELLHEFETIPVLSVELSPEDVDALELDPAISYIEEDAEVTTMAQSVPWGISRVQAPAAHNRGLTGRGVKVAVLDTGISTHPDLNIRGGASFVPGEPSTQDGQGHGTHVAGTIAALNNSIGVLGVAPSAELYAVKVLGASGSGSLSGIAQGLEWAGNNGMHVANLSLGSPSPSATLEQAVNSATSRGVLVVAASGNSGAGSISYPARYANAMAVGATDQNNNRASFSQYGAGLDIVAPGVNVQSTYPGSTYASLNGTSMATPHVAGAAALVKQKNPSWSNVQIRNRLKNTATSLGSTNLYGSGLVNAEAATR

SEQ ID NO: 63075 - protein, 380 aa, Unidentified
VRSKKLWIVASTALLISVAFSSSIASAAEEAKEKYLIGFNEQEAVSEFVEQVEANDEVAILSEEEEVEIELLHEFETIPVLSVELSPEDVDALELDPAISYIEEDAEVTTMAQSVPWGISRVQAPAAHNRRLTGSGVKVAVLDTGISTHPDLNIRGGASFVPGEPSTQDGNGHGTHVAGTIAALNNSIGVLGVAPSAELYAVKVLGASGSGNVSSIAQGLEWAGNNGMHVANLSLGSPSPSATLEQAVNSATSRGVLVVAASGNSGAGSISYPARYANAMAVGATDQNNNRASFSQYGAGLDIVAPGVNVQSTYPGSTYAFLNGTSMATPHVAGAAALVKNKNPSWSNVQIRNHLKRTATSLGSTNLYGSGLVNAEAATR

SEQ ID NO: 63076 - protein, 380 aa, Unidentified
VRSKKLWIVASTALLISVAFSSSIASAAEEAKEKYLIGFNEQEAVSEFVEQVEANDEVAILSEEEEVEIELLHEFETIPVLSVELSPEDVDALELDPAISYIEEDAEVTTMAQSVPWGISRVQAPASHNRGLTGSGVFVAVLDTGISTHPDLNIRGGASFVPGEPSTQDGEGHGTHVAGTIAALNNSIGVLGVAPSAELYAVKVLGASGSGSVSSIAQGLEWAGNNGMHVANLSLGSPSPSATLEQAVNSATSRGVLVVAASGNSGEGSISYPARYANAMAVGATDQNNNRASFSQYGAGLDIVAPGVNVQSTYPGSTYASLNGTSMATPHVAGAAALVKQKNPSWSNVQIRNRLKNTATSLGSTNLYGSGLVNAEAATR

SEQ ID NO: 63077 - protein, 380 aa, Unidentified
VRSKKLWIVASTALLISVAFSSSIASAAEEAKEKYLIGFNEQEAVSEFVEQVEANDEVAILSEEEEVEIELLHEFETIPVLSVELSPEDVDALELDPAISYIEEDAEVTTMAQSVPWGISRVQAPAAHNRRLTGSGVKVAVLDTGISTHPDLNIRGGASFVPGEPSTQDGNGHGTHVAGTIAALNNSIGVLGVAPSAELYAVKVLGASGSGAISSIAQGLEWAGNNGMHVANLSLGSPSPSATLEQAVNSATSRGVLVVAASGNSGAGSISYPARYANAMAVGATDQNNNRASFSQYGAGLDIVAPGVNVQSTYPGSTYASLNGTSMATPHVAGAAVLVKQKNPSWSNVRIRNHLKNTATSLGSTNLYGSGLVNAEAATR

SEQ ID NO: 63078 - protein, 380 aa, Unidentified
VRSKKLWIVASTALLISVAFSSSIASAAEEAKEKYLIGFNEQEAVSEFVEQVEANDEVAILSEEEEVEIELLHEFETIPVLSVELSPEDVDALELDPAISYIEEDAEVTTMAQSVPWGISRVQAPAAHNRRLTGSGVKVAVLDTGISTHPDLNIRGGASFVPGEPSTQDGNGHGTHVAGTIAALNNSIGVLGVAPSAELYAVKVLGASGAGAVSSIAQGLEWAGNNGMHVANLSLGSPSPSATLEQAVNSATSRGVLVVAASGNSGAGSISYPARYANAMAVGATDQNNNRASFSQYGAGLDIVAPGVNVQSTYPGSTYASLNGTSMATPHVAGAAVLVKQKNPSWSNVRIRNHLKNTATSLGSTNLYGSGLVNAEAATR

SEQ ID NO: 63079 - protein, 380 aa, Unidentified
VRSKKLWIVASTALLISVAFSSSIASAAEEAKEKYLIGFNEQEAVSEFVEQVEANDEVAILSEEEEVEIELLHEFETIPVLSVELSPEDVDALELDPAISYIEEDAEVTTMAQSVPWGISRVQAPAAHNRGLTGSGVKVAVLDTGISTHPDLNIRGGASFVPGEPSTQDGNGHGTHVAGTIAALNNSIGVLGVAPSAELYAVKVLGASGSGNVSSIAQGLEWAGNNGMEVANLSLGSPSPSATLEQAVNSATSRGVLVVAASGNSGAGSISWPARYANAMAVGATDQNNNRASFSQYGAGLDLVAPGVNVQSTYPGSTYASLNGTSMATPHVAGAAACVKQKNPSWSNVQIRNHLKNTATSLGSTNLYGSGLVNAEAATR

SEQ ID NO: 63080 - protein, 380 aa, Unidentified
VRSKKLWIVASTALLISVAFSSSIASAAEEAKEKYLIGFNEQEAVSEFVEQVEANDEVAILSEEEEVEIELLHEFETIPVLSVELSPEDVDALELDPAISYIEEDAEVTTMAQSVPWGISRVQAPAAHNRGLTGSGVKVAVLDTGISTHPDLNIRGGASFVPGEPSTQDGNGHGTHVAGTIAALNNSIGVLGVAPSAELYAVKVLGASGGGAISSIAQGLEWAGNNGMHVANLSLGSPSPSATLEQAVNSATSRGVLVVAASGNSGAGSISYPARYANAMAVGATDQNNNRASFSQYGAGLDIVAPGVNVQSTYPGSTYASLNGTSQATPHVAGAAVLVKQKNPSWSNVRIRNHLKNTATSLGSTNLYGSGLVNAEAATR

SEQ ID NO: 63081 - protein, 380 aa, Unidentified
VRSKKLWIVASTALLISVAFSSSIASAAEEAKEKYLIGFNEQEAVSEFVEQVEANDEVAILSEEEEVEIELLHEFETIPVLSVELSPEDVDALELDPAISYIEEDAEVTTMAQSVPWGISRVQAPAAHRRGLTGSGVKVAVLDTGISTHPDLNIRGGASFVPGEPSTQDGNGHGTHVAGTIAALDNSIGVLGVAPSAELYAVKVLGASGSGAISSIAQGLEWAGNNGMHVANLSLGSPSPSATLEQAVNSATSRGVLVVAASGNSGAGSISYPARYANAMAVGATDQNNNRASFSQYGAGLDIVAPGVNVQSTYPGSTYASLNGTSMATPHVAGAAALVKQKNPSWSNVQIRNRLKNTATSLGSTNLYGSGLVNAEAATR

SEQ ID NO: 63082 - protein, 380 aa, Unidentified
VRSKKLWIVASTALLISVAFSSSIASAAEEAKEKYLIGFNEQEAVSEFVEQVEANDEVAILSEEEEVEIELLHEFETIPVLSVELSPEDVDALELDPAISYIEEDAEVTTMAQSVPWGISRVQAPASHNRGLTGSGVKVAVLDTGISTHPDLNIRGGASFVPGEPSTQDGEGHGTHVAGTIAALNNSIGVLGVAPSAELYAVKVLGASGSGSVSSIAQGLEWAGNNGMHVANLSLGNPSPSATLEQAVNSATSRGVLVVAASGNSGAGSISYPARYANAMAVGATDQNNNHASFSQYGAGLDIVAPGVNVQSTYPGSTYASLNGTSMATPHVAGAAALVKQKNPSWSNVQIRNHLKNTATSLGSTNLYGSGLVNAFAATR

SEQ ID NO: 63083 - protein, 380 aa, Unidentified
VRSKKLWIVASTALLISVAFSSSIASAAEEAKEKYLIGFNEQEAVSEFVEQVEANDEVAILSEEEEVEIELLHEFETIPVLSVELSPEDVDALELDPAISYIEEDAEVTTMAQSVPWGISRVQAPAAHNRGLTARGVKVAVLDTGISTHPDLNIRGGASFVPGEPSTQDGNGHGTHVAGTIAALNNSIGVLGVAPSAELYAVKVLGASGSGSVSSIAQGLEWAGNFGMHVANLSLGSPSPSATLEQAVNSATSRGVLVVAASGNSGAGSISYPARYANAMAVGATDQNNNRASFSQYGAGLDIVAPGVNVQSTYPGMTYAFLNGTSMATPHVAGAAALVKQKNPSWSNVQIRNHLKNTATSLGSTNLYGSGLVNAEAATR

SEQ ID NO: 63084 - protein, 380 aa, Unidentified
VRSKKLWIVASTALLISVAFSSSIASAAEEAKEKYLIGFNEQEAVSEFVEQVEANDEVAILSEEEEVEIELLHEFETIPVLSVELSPEDVDALELDPAISYIEEDAEVTTMAQSVPWGISRVQAPAAHNRGLTGSGVKVAVLDTGISTHPDLNIRGGASFVPGEPSTQDGNGHGTHVAGTIAALNNSIGVLGVAPSAELYAVKVLGASGSGSLSSIAQGLEWAGNNGMHVANLSLGSPSPSATLEQAVNSATSRGVLVVAASGNSGEGSISYPARYANAMAVGATDQNNNHASFSQYGAGLDIVAPGVNVQSTYPGSTYASLNGTSMATPHVAGAAALVKQKNPSWSNVQIRNRLKNTATSLGSTNLYGSGLVNAFAATR

SEQ ID NO: 63085 - protein, 380 aa, Unidentified
VRSKKLWIVASTALLISVAFSSSIASAAEEAKEKYLIGFNEQEAVSEFVEQVEANDEVAILSEEEEVEIELLHEFETIPVLSVELSPEDVDALELDPAISYIEEDAEVTTMAQSVPWGISRVQAPAAHNRKLTGFGVKVAVLDTGISTHPDLNIRGGASFVPGEPSTQDGEGHGTHVAGTIAALNNSIGVLGVAPSAELYAVKVLGASGSGSVSSIAQGLEWAGNNGMHVANLSLGSPSPSATLEQAVNSATSRGVLVVAASGNSGAGSISYPARYANAMAVGATDQNNNRADFSQYGAGLDIVAPGVNVQSTYPGSAYASLNGTSMATPHVAGAAALVKQKNPSWSNVQIRNHLKNTATSLGSTNLYGSGLVNAEAATR

SEQ ID NO: 63086 - protein, 380 aa, Unidentified
VRSKKLWIVASTALLISVAFSSSIASAAEEAKEKYLIGFNEQEAVSEFVEQVEANDEVAILSEEEEVEIELLHEFETIPVLSVELSPEDVDALELDPAISYIEEDAEVTTMAQSVPWGISRVQAPAAHNRGLTGRGVKVAVLDSGISTHPDLNIRGGASFVPGEPSTQDGNGHGTHVAGTIAALNNSIGVLGVAPSAELYAVKVLGASGSGSVSSIAQGLEWAGNNGMHVANLSLGSHSPSATLEQAVNSATSRGVLVVAASGNSGAGSISYPARYANAMAVGATDQNDNRASFSQYGAGLDIVAPGVNVQSTYPGSTYASLNGTSMATPHVAGAAALVKQKNPSWSNVQIRNHLKNMATSLGSTNLYGSGLVNAEAATR

SEQ ID NO: 63087 - protein, 380 aa, Unidentified
VRSKKLWIVASTALLISVAFSSSIASAAEEAKEKYLIGFNEQEAVSEFVEQVEANDEVAILSEEEEVEIELLHEFETIPVLSVELSPEDVDALELDPAISYIEEDAEVTTMAQSVPWGISRVQAPAAHRRGLTGRGVKVAVLDTGISTHPDLNIRGGASFVPGEPSTQDGNGHGTHVAGTIAALDNSIGVLGVAPSAELYAVKVLGASGSGAVSSIAQGLEWAGNNGMHVANLSLGSPSPSATLEQAVNSATSRGVLVVAASGNSGAGSISYPARYANAMAVGATDQNNNRASFSQYGAGLDIVAPGVNVQSTYPGSTYASLNGTSMATPHVAGAAALVKQKNPSWSNVQIRNRLKNTATSLGSTNLYGSGLVNAEAATR

SEQ ID NO: 63088 - protein, 380 aa, Unidentified
VRSKKLWIVASTALLISVAFSSSIASAAEEAKEKYLIGFNEQEAVSEFVEQVEANDEVAILSEEEEVEIELLHEFETIPVLSVELSPEDVDALELDPAISYIEEDAEVTTMAQSVPWGISRVQAPAAHRRGLTGRGVKVAVLDTGISTHPDLNIRGGASFVPGEPSTQDGNGHGTHVAGTIAALNNSIGVLGVAPSAELYAVKVLGASGGGSISSIAQGLEWAGNNGMHVANLSLGSPSPSATLEQAVNSATSRGVLVVAASGNSGAGSISYPARYANAMAVGATDQNNNRASFSQYGAGLDIVAPGVNVQSTYPGSTYASLNGTSMATPHVAGAAVLVKQKNPSWSNVQIRNHLKNTATSLGSTNLYGSGLVNAEAATR

SEQ ID NO: 63089 - protein, 380 aa, Unidentified
VRSKKLWIVASTALLISVAFSSSIASAAEEAKEKYLIGFNEQEAVSEFVEQVEANDEVAILSEEEEVEIELLHEFETIPVLSVELSPEDVDALELDPAISYIEEDAEVTTMAQSVPWGISRVQAPAAHRRGLTGSGVKVAVLDTGISTHPDLNIRGGASFVPGEPSTQDGNGHGTHVAGTIAALDNSIGVLGVAPSAELYAVKVLGASGGGSISSIAQGLEWAGNNGMHVANLSLGSPSPSATLEQAVNSATSRGVLVVAASGNSGAGSISYPARYANAMAVGATDQNNNRASFSQYGAGLDIVAPGVNVQSTYPGSTYASLNGTSMATPHVAGAAALVKQKNPSWSNVQIRNRLKNTATSLGSTNLYGSGLVNAEAATR

SEQ ID NO: 63090 - protein, 380 aa, Unidentified
VRSKKLWIVASTALLISVAFSSSIASAAEEAKEKYLIGFNEQEAVSEFVEQVEANDEVAILSEEEEVEIELLHEFETIPVLSVELSPEDVDALELDPAISYIEEDAEVTTMAQSVPWGISRVQAPAAHRRGLTGRGVKVAVLDTGISTHPDLNIRGGASFVPGEPSTQDGNGHGTHVAGTIAALDNSIGVLGVAPSAELYAVKVLGASGGGSVSSIAQGLEWAGNNGMHVANLSLGSPSPSATLEQAVNSATSRGVLVVAASGNSGAGSISYPARYANAMAVGATDQNNNRASFSQYGAGLDIVAPGVNVQSTYPGSTYASLNGTSMATPHVAGAAALVKQKNPSWSNVRIRNHLKNTATSLGSTNLYGSGLVNAEAATR

SEQ ID NO: 63091 - protein, 380 aa, Unidentified
VRSKKLWIVASTALLISVAFSSSIASAAEEAKEKYLIGFNEQEAVSEFVEQVEANDEVAILSEEEEVEIELLHEFETIPVLSVELSPEDVDALELDPAISYIEEDAEVTTMAQSVPWGISRVQAPAAHNRGLTGSGVKVAVLDTGISTHPDLNIRRGASFVPGEPSTADGNGHGTHVAGTIAALNNSIGVLGVAPSAELYAVKVLGASGSGNVSSIAQGLEWAGNNGMHVANLSLGSPSPSATLEQAVNSATSRGVLVVAASGNSGAGSISYPARYANAMAVGATDQNNNRASFSQYGAGLDIVAPGVNVQSTYPQMTYASLNGTSMATPHVAGAAALVKQKNPSWSNVQIRNHLKNTATSLGSTNLYGSGLVNAEAATR

SEQ ID NO: 63092 - protein, 380 aa, Unidentified
VRSKKLWIVASTALLISVAFSSSIASAAEEAKEKYLIGFNEQEAVSEFVEQVEANDEVAILSEEEEVEIELLHEFETIPVLSVELSPEDVDALELDPAISYIEEDAEVTTMAQSVPWGISRVQAPAAHNRGLTGFGVKVAVLDTGISTHPDLWIRGGASFVPGEPSTQDGNGHGTHVAGTIAALNNSIGVLGVAPSAELYAVKVLGASGSGSLSSIAQGLEWAGNNGMHFANLSLGSESPSATLEQAVNSATSRGVLVVAASGNSGAGSISYPARYANAMAVGATDQNNNRASFSQYGAGLDIVAPGVNVQSTYPGSTYASLNGTSMATPHVAGAAALVKQKNPSWSNVQIRNHLKNTATSLGSTNLYGSGLVNAEAATR

SEQ ID NO: 63093 - protein, 380 aa, Unidentified
VRSKKLWIVASTALLISVAFSSSIASAAEEAKEKYLIGFNEQEAVSEFVEQVEANDEVAILSEEEEVEIELLHEFETIPVLSVELSPEDVDALELDPAISYIEEDAEVTTMAQSVPWGISRVQAPAAHRRGLTGRGVKVAVLDTGISTHPDLNIRGGASFVPGEPSTQDGNGHGTHVAGTIAALDNSIGVLGVAPSAELYAVKVLGASGSGSVSSIAQGLEWAGNNGMHVANLSLGSPSPSATLEQAVNSATSRGVLVVAASGNSGAGSISYPARYANAMAVGATDQNNNRASFSQYGAGLDIVAPGVNVQSTYPGSTYFSLNGTSMATPHVAGAAALVKQKNPSWSNVQIRNRLKNTATSLGSTNLYGSGLVNAEAATR

SEQ ID NO: 63094 - protein, 380 aa, Unidentified
VRSKKLWIVASTALLISVAFSSSIASAAEEAKEKYLIGFNEQEAVSEFVEQVEANDEVAILSEEEEVEIELLHEFETIPVLSVELSPEDVDALELDPAISYIEEDAEVTTMAQSVPWGISRVQAPAAHRRRLTGSGVKVAVLDTGISTHPDLRITGGASFVPGEPSTQDGNGHGTHVAGTIAALNNSIGVLGVAPSAELYAVKVLGASGSGSVSSIAQGLEWAGNNGMHVANLSLGSPSPSATLEQAVNSATSRGVLVVAASGNSGAGSISYPARYANAMAVGATDQNNNRASFSQYGAGLDIVAPGVNVQSTYPGSTYASLNGTSMATPHVAGAAALVKQKNPSWRNVQIRNHLKNTATSLGSTNLYGSGLVNAEAATR

SEQ ID NO: 63095 - protein, 380 aa, Unidentified
VRSKKLWIVASTALLISVAFSSSIASAAEEAKEKYLIGFNEQEAVSEFVEQVEANDEVAILSEEEEVEIELLHEFETIPVLSVELSPEDVDALELDPAISYIEEDAEVTTMAQSVPWGISRVQAPASHNRGLTGSGVKVAVLDTGISTHPDLNIRGGASFVPGEPSTQDGEGHGTHVAGTIAALNNSIGVLGVAPSAELYAVKVLGASGSGSVSSIAQGLEWAGNNGMHVANLSLGSPSPSATLEQAVNSATSRGVLVVAASGNSGEGSISYPARYANAMAVGATDQNNNHASFSQYGAGLDIVAPGVNVQSTYPGSTYASLNGTSMATPHVAGAAALVKQKNPSWSNVQIRNHLKNTATSLGSTNLYGSGLVNAFAATR

SEQ ID NO: 63096 - protein, 380 aa, Unidentified
VRSKKLWIVASTALLISVAFSSSIASAAEEAKEKYLIGFNEQEAVSEFVEQVEANDEVAILSEEEEVEIELLHEFETIPVLSVELSPEDVDALELDPAISYIEEDAEVTTMAQSVPWGISRVQAPAAHNRGLTGRGVKVAVLDTGISTHPDLNIRGGASFVPGEPSTQDGNGHGTHVAGTIAALNNSIGVLGVAPSAELYAVKVLGASGSGAISSIAQGLEWAGNNGMHVANLSLGSPSPSATLEQAVNSATSRGVLVVAASGNSGAGSISYPARYANAMAVGATDQNNNRASFSQYGAGLDIVAPGVNVQSTYPGSTYASLNGTSMATPHVAGAAVLVKQKNPSWSNVQIRNRLKNTATSLGSTNLYGSGLVNAEAATR

SEQ ID NO: 63097 - protein, 380 aa, Unidentified
VRSKKLWIVASTALLISVAFSSSIASAAEEAKEKYLIGFNEQEAVSEFVEQVEANDEVAILSEEEEVEIELLHEFETIPVLSVELSPEDVDALELDPAISYIEEDAEVTTMAQSVPWGISRVQAPAAHRRGLTGSGVKVAVLDTGISTHPDLRITGGASFVPGEPSTQDGNGHGTHVAGTIAALNNSIGVLGVAPSAELYAVKVLGASGSGSVSSIAQGLEWAGNNGMHVANLSLGSPSPSATLEQAVNSATSRGVLVVAASGNSGAGSISYPARYANAMAVGATDQNNNRASFSQYGAGLDIVAPGVNVQSTYPGSTYASLNGTSMATPHVAGAAALVKQKNPSWRNVQIRNRLKNTATSLGSTNLYGSGLVNAEAATR

SEQ ID NO: 63098 - protein, 380 aa, Unidentified
VRSKKLWIVASTALLISVAFSSSIASAAEEAKEKYLIGFNEQEAVSEFVEQVEANDEVAILSEEEEVEIELLHEFETIPVLSVELSPEDVDALELDPAISYIEEDAEVTTMAQSVPWGISRVQAPAAHNRGLTGSGFKVAVFDTGISTHPDLNIRGGASFVPGEPSTQDGNGHGTHVAGTIAALNNNIGVLGVAPSAELYAVKVLGASGSASVSSIAQGLEWAGNNGMHVANLSLGSPSPSATLEQAVNSATSRGVLVVAASGNSGAGDISYPARYANAMAVGATDQNNNRASFSQYGAGLDIVAPGVNVQSTYPGSTYASLNGTSMATPHVAGAAALVKQKNPSWSNVQIRNHLKNTATSLGSTNLYGSGLVNAEAATR

SEQ ID NO: 63099 - protein, 380 aa, Unidentified
VRSKKLWIVASTALLISVAFSSSIASAAEEAKEKYLIGFNEQEAVSEFVEQVEANDEVAILSEEEEVEIELLHEFETIPVLSVELSPEDVDALELDPAISYIEEDAEVTTMAQSVPWGISRVQAPAAHRRGLTGRGVKVAVLDTGISTHPDLNITGGASFVPGEPSTQDGNGHGTHVAGTIAALNNSIGVLGVAPSAELYAVKVLGASGSGSVSSIAQGLEWAGNNGMHVANLSLGSPSPSATLEQAVNSATSRGVLVVAASGNSGAGSISYPARYANAMAVGATDQNNNRASFSQYGAGLDIVAPGVNVQSTYPGSTYASLNGTSMATPHVAGEAALVKQKNPSWSNVQIRNRLKNTATSLGSTNLYGSGLVNAEAATR

SEQ ID NO: 63100 - protein, 380 aa, Unidentified
VRSKKLWIVASTALLISVAFSSSIASAAEEAKEKYLIGFNEQEAVSEFVEQVEANDEVAILSEEEEVEIELLHEFETIPVLSVELSPEDVDALELDPAISYIEEDAEVTTMAQSVPWGISRVQAPAAHNRGLTGSGVKVAVLDSGISTHPDLWIRGGASFVPGEPSTQDGNGHGTHVAGTIAALNNSIGVLGVAPSAELYAVKVLGASGSGSVSSIAQGLEWAGNNGMHVANLSLGSPSPSATLEQAVNSATSRGVLVVAASGNSGAGSISYPARYANAMAVGATDQNNNRASFSQYGAGLDIVAPGVNVQSTYPGSTYASLDGTSMATPHVAGAAALVKQKNGSWSFVQIRNHLKNTATSLGSTNLYGSGLVNAEAATR

SEQ ID NO: 63101 - protein, 380 aa, Unidentified
VRSKKLWIVASTALLISVAFSSSIASAAEEAKEKYLIGFNEQEAVSEFVEQVEANDEVAILSEEEEVEIELLHEFETIPVLSVELSPEDVDALELDPAISYIEEDAEVTTMAQSVPWGISRVQAPAAHNRGLTGSGVKVAVLDTGISTHPDLNIRRGASFVPGEPSTADGNGHGTHVAGTIAALNNSIGVLGVAPSAELYAVKVLGASGSGSVSGIAQGLEWAGNNGMHVANLSLGSPSPSATLEQAVNSATSRGVLVVAASGNSGAGSISYPARYANAMAVGATDQNNNRASFSQYGAGLDIVAPGVNVQSTYPGSTYASENGTSMATPHVAGAAALVKQKNPSWSNVQIRNRLKNTATSLGSTNLYGSGLVNAEAATR

SEQ ID NO: 63102 - protein, 380 aa, Unidentified
VRSKKLWIVASTALLISVAFSSSIASAAEEAKEKYLIGFNEQEAVSEFVEQVEANDEVAILSEEEEVEIELLHEFETIPVLSVELSPEDVDALELDPAISYIEEDAEVTTMAQSVPWGISRVQAPAAHRRRLTGSGVKVAVLDTGISTHPDLDITGGASFVPGEPSTQDGNGHGTHVAGTIAALNNSIGVLGVAPSAELYAVKVLGASGSGSVSSIAQGLEWAGNNGMHVANLSLGSPSPSATLEQAVNSATSRGVLVVAASGNSGAGSISYPARYANAMAVGATDQNNNRASFSQYGAGLDIVAPGVNVQSTYPGSTYASLNGTSMATPHVAGEAALVKQKNPSWSNVQIRNHLKNTATSLGSTNLYGSGLVNAEAATR

SEQ ID NO: 63103 - protein, 380 aa, Unidentified
VRSKKLWIVASTALLISVAFSSSIASAAEEAKEKYLIGFNEQEAVSEFVEQVEANDEVAILSEEEEVEIELLHEFETIPVLSVELSPEDVDALELDPAISYIEEDAEVTTMAQSVPWGISRVQAPAAHNRGLTGRGVKVAVLDTGISTHPDLNIRGGASFVPGEPSTQDGNGHGTHVAGTIAALNNRIGVLGVAWSAELYAVKVLGASGSGSVSSIAQGLEWAGNNRMHVANLSLGSPSPSATLEQAVNSATSRGVLVVAASGNSGAGSISYPARYANAMAVGATDQNNNRASFSQYGAGLDIVAPGVNVQSTYPGSTYASLNGTSMATPHVAGAAALVKQKNPSWSNVQIRNHLKNTATSLGSTNLYGSGLVNTEAATR

SEQ ID NO: 63104 - protein, 380 aa, Unidentified
VRSKKLWIVASTALLISVAFSSSIASAAEEAKEKYLIGFNEQEAVSEFVEQVEANDEVAILSEEEEVEIELLHEFETIPVLSVELSPEDVDALELDPAISYIEEDAEVTTMAQSRPWGIARVQAPAAHNRGLTGRGVKVAVLDTGISTHPDLRIRGGASFVPGEPSTQDGNGHGTHVAGTIAALNNSIGVLGVAPSAELYAVKVLGASGSGSVSSIAQGLEWAGNNGMHVANLSLGSPSPSATLEQAVNSATSRGVLVVAASGNSGAGSISYPARYANAMAVGATDQNNNRASFSQYGAGLDIVAPGVNVQSTYPGSTYASLNGTSMATPHVAGAAALVKQKNPSRSNVQIRNHLKNTATSLGSTNLYGSGLVNAEAATR

SEQ ID NO: 63105 - protein, 380 aa, Unidentified
VRSKKLWIVASTALLISVAFSSSIASAAEEAKEKYLIGFNEQEAVSEFVEQVEANDEVAILSEEEEVEIELLHEFETIPVLSVELSPEDVDALELDPAISYIEEDAEVTTMAQSVPWGISRVQAPAAHNRGLTGSGVKVAVLDTGISTHPDLNIRGGASFVPGEPSTQDGNGHGTHVAGTIAALNNSIGVLGVAPSAELYAVKVLGASGSGSLSSIAQGLEWAGNNGMHVANLSLGNPSPSATLEQAVNSATSRGVLVVAASGNSGAGSISYPARYANAMAVGATDQNNNHADFSQYGAGLDIVAPGVNVQSTYPGSTYASLNGTSMATPHVAGAAALVKQKNPSWSNVQIRNRLKNTATSLGSTNLYGSGLVNAEAATR

SEQ ID NO: 63106 - protein, 380 aa, Unidentified
VRSKKLWIVASTALLISVAFSSSIASAAEEAKEKYLIGFNEQEAVSEFVEQVEANDEVAILSEEEEVEIELLHEFETIPVLSVELSPEDVDALELDPAISYIEEDAEVTTMAQSVPWGISRVQAPAAHNRRLTGSGVKVAVLDTGISTHPDLNIRGGASFVPGEPSTQDGNGHGTHVAGTIAALNNSIGVLGVAPSAELYAVKVLGASGGGSLSSIAQGLEWAGNNGMHVANLSLGSPSPSATLEQAVNSATSRGVLVVAASGNSGAGSISYPARYANAMAVGATDQNNNRASFSQYGAGLDIVAPGVNVQSTYPGSTYASLNGTSMATPHVAGAAVLVKQKNPSWSNVRIRNHLKNTATSLGSTNLYGSGLVNAEAATR

SEQ ID NO: 63107 - protein, 380 aa, Unidentified
VRSKKLWIVASTALLISVAFSSSIASAAEEAKEKYLIGFNEQEAVSEFVEQVEANDEVAILSEEEEVEIELLHEFETIPVLSVELSPEDVDALELDPAISYIEEDAEVTTMAQSVPWGISRVQAPAAHNRGLTGSGVKVAVLDTGISTHPDLNIRGGASFVPGEPSTQDGEGHGTHVAGTIAALNNSIGVLGVAPSAELYAVKVLGASGAGSVSSIAQGLEWAGNNGMHVANLSLGSPSPSATLEQAVNSATSRGVLVVAASGNSGAGSISYPARYANAMAVGATDQNNNRADFSQYGAGLDIVAPGVNVQSTYPGSTYASLNGTSMATPHVAGAAALVKQKNPSWSNVQIRNRLKNTATSLGSTNLYGSGLVNAFAATR

SEQ ID NO: 63108 - protein, 380 aa, Unidentified
VRSKKLWIVASTALLISVAFSSSIASAAEEAKEKYLIGFNEQEAVSEFVEQVEANDEVAILSEEEEVEIELLHEFETIPVLSVELSPEDVDALELDPAISYIEEDAEVTTMAQSVPWGISRVQAPAAHNRKLTGSGVKVAVLDTGISTHPDLWIRGGASFVPGEPSTQDGEGHGTHVAGTIAALNNSIGVLGVAPSAELYAVKVLGASGSGSVSSIAQGLEWAGLNGMHVANLSLGSPSPSATLEQAVNSATSRGVLVVAASGNSGAGSISYPARYANAMAVGATDQNNNRASFSQYGAGLDIVAPGVNVQSTYPGSTYASLNGTSMATPHVAGAAALVKQKNGSWSNVQIRNHLKNTATSLGSTNLYGSGLVNAEAATR

SEQ ID NO: 63109 - protein, 380 aa, Unidentified
VRSKKLWIVASTALLISVAFSSSIASAAEEAKEKYLIGFNEQEAVSEFVEQVEANDEVAILSEEEEVEIELLHEFETIPVLSVELSPEDVDALELDPAISYIEEDAEVTTMAQSVPWGISRVQAPAAHNRGLTGSGVKVAVLDTGISTHPDLNIRGGASFVPGEPSTQDGNGHGTHVAGTIAALNNRIGVLGVAPSAELYAVKVLGAFGSGSVSSIAQGLEWAGANGMHVANLSLGSPSPSATLEQAVNSATSRGVLVVAASGNSGAGSISYPARYANAMAVGATDQNNNKASFSQYGAGLDIVAPGVNVQSTYPGSTYASLNGTSMAAPHVAGAAALVKQKNPSWSNVQIRNHLKNTATSLGSTNLYGSGLVNAEAATR

SEQ ID NO: 63110 - protein, 380 aa, Unidentified
VRSKKLWIVASTALLISVAFSSSIASAAEEAKEKYLIGFNEQEAVSEFVEQVEANDEVAILSEEEEVEIELLHEFETIPVLSVELSPEDVDALELDPAISYIEEDAEVTTMAQSVPWGISRVQAPAAHNRGLTGSRVKVAVLDTGISTHPDLNIRGGASFVPGEPSTQDGNGHGTHVAGTIAALNNSIGVLGVAPSAILYAVKVLGASGSGSVSSIAQGLEWAGANGMHVANLSLGSPSPSATLEQAVNSATSRGVLVVAASGNSGAGSISYPARYANAMAVGATDQNNNRASFSQYGAGLDIVAPGVNVQSTYPGSTYASLNGTSMATPHVAGAAALVKQKNSSWSNVQIRNHLKNTATSLGSTNLYGSGLVNCEAATR

SEQ ID NO: 63111 - protein, 380 aa, Unidentified
VRSKKLWIVASTALLISVAFSSSIASAAEEAKEKYLIGFNEQEAVSEFVEQVEANDEVAILSEEEEVEIELLHEFETIPVLSVELSPEDVDALELDPAISYIEEDAEVTTMAQSVPWGISRVQAPAAHNRGLTGSGVKVAVLDTGISTHPDLNIRGGASFVPGEPSTQDGEGHGTHVAGTIAALNNSIGVLGVAPSAELYAVKVLGASGAGSVSSIAQGLEWAGNNGMHVANLSLGSPSPSATLEQAVNSATSRGVLVVAASGNSGEGSISYPARYANAMAVGATDQNNNRADFSQYGAGLDIVAPGVNVQSTYPGSTYASLNGTSMATPHVAGAAALVKQKNPSWSNVQIRNRLKNTATSLGSTNLYGSGLVNAEAATR

SEQ ID NO: 63112 - protein, 380 aa, Unidentified
VRSKKLWIVASTALLISVAFSSSIASAAEEAKEKYLIGFNEQEAVSEFVEQVEANDEVAILSEEEEVEIELLHEFETIPVLSVELSPEDVDALELDPAISYIEEDAEVTTMAQSVPWGISRVQAPAAHNRGLTGRGVKVAVLDTGISTHPDLRIRGGASFVPGEPSTQDGNGHGTHVAGTIAALNNSIGVLGVAPSAELYAVKVLGASGSGSVSSIAQGLEWAGANGMHVANLSLGSPSPSATLEQAVNSATSRGVLVVAASGNSGAGSISYPARYANAMAVGATDQNNNRASFSQYGAGLDIVAPGVNVQSTYPGSAYASLNGTSMATPHVAGAAALVKQKNPSWSNVQIRNHLKNTATSLGSTNLYGSGLVRAEAATR

SEQ ID NO: 63113 - protein, 380 aa, Unidentified
VRSKKLWIVASTALLISVAFSSSIASAAEEAKEKYLIGFNEQEAVSEFVEQVEANDEVAILSEEEEVEIELLHEFETIPVLSVELSPEDVDALELDPAISYIEEDAEVTTMAQSVPWGISRVQAPAAHNRGLTGSGVKVAVLDTGISTHPDLNIRGGASFVPGEPSTQDGNGHGTHVAGTIAALDNSIGVLGVAPSAELYAVKVLGASGSGAISSIARGLEWAGNNGMHVANLSLGSPSPSATLEQAVNSATSRGVLVVAASGNSGAGSISYPARYANAMAVGATDQNNNRASFSQYGAGLDIVAPGVNVQSTYPGSTYASLNGTSMATPHVAGAAALVKQKNPSWSNVRIRNHLKNTATSLGSTNLYGSGLVNAEAATR

SEQ ID NO: 63114 - protein, 380 aa, Unidentified
VRSKKLWIVASTALLISVAFSSSIASAAEEAKEKYLIGFNEQEAVSEFVEQVEANDEVAILSEEEEVEIELLHEFETIPVLSVELSPEDVDALELDPAISYIEEDAEVTTMAQSVPWGISRVQAPAAHNRGLTGRGVKVAVLDTGISTHPDLNIRGGASFVPGEPSTQDGNGHGTHVAGTIAALNNSIGVLGVAPSAELFAVKVLGASGSGSVSSIAQGLEWAGNNGMHVANLSLGSPSPSATLEQAVNSATSRGVLVVAASGNSGAGSISYPARYANAMAVGATDQNNNRASFSQYGAGLDLVAPGVNVQSTYPGSTYFSLNGTSMATPHVAGAAALVKQKNSSWSNVQIRNHLKNTATSLGSTNLYGSGLVNAEAATR

SEQ ID NO: 63115 - protein, 380 aa, Unidentified
VRSKKLWIVASTALLISVAFSSSIASAAEEAKEKYLIGFNEQEAVSEFVEQVEANDEVAILSEEEEVEIELLHEFETIPVLSVELSPEDVDALELDPAISYIEEDAEVTTMAQSVPWGISRVQAPAAHNRGLTGSRVKVAVLDTGISTHPDLNIRGGASFVPGEPSTQDGQGHGTHVAGTIAALNNSIGVLGVAPSAELYAVKVLGASGSGSVSSIAQGLEWAGNNGMHVANLSLGNPSPSATLEQAVNSATRRGVLVVAASGNSGAGSISYPARYANAMAVGATDQNNIRASFSQYGAGLDIVAPGVNVQSTYPGSTYASLNGTSMATPHVAGAAALVKQKNPSWSNVQIRNHLKNTATSLGSTNLYGSGLVNAEAATR

SEQ ID NO: 63116 - protein, 380 aa, Unidentified
VRSKKLWIVASTALLISVAFSSSIASAAEEAKEKYLIGFNEQEAVSEFVEQVEANDEVAILSEEEEVEIELLHEFETIPVLSVELSPEDVDALELDPAISYIEEDAEVTTMAQSVPWGISRVQAPAAHNRKLTGFGVKVAVLDTGISTHPDLNIRGGASFVPGEPSTQDGEGHGTHVAGTIAALNNSIGVLGVAPSAELYAVKVLGASGSGSVSSIAQGLEWAGLNGMHVANLSLGSPSPSATLEQAVNSATSRGVLVVAASGNSGAGSISYPARYANAMAVGATDQNNNRADFSQYGAGLDIVAPGVNVQSTYPGSTYASLNGTSMATPHVAGAAALVKQKNPSWSNVQIRNHLKNTATSLGSTNLYGSGLVNAEAATR

SEQ ID NO: 63117 - protein, 380 aa, Unidentified
VRSKKLWIVASTALLISVAFSSSIASAAEEAKEKYLIGFNEQEAVSEFVEQVEANDEVAILSEEEEVEIELLHEFETIPVLSVELSPEDVDALELDPAISYIEEDAEVTTMAQSVPWGISRVQAPAAHRRGLTGSGVKVAVLDTGISTHPDLNIRGGASFVPGEPSTQDGNGHGTHVAGTIAALDNSIGVLGVAPSAELYAVKVLGASGGGSVSSIAQGLEWAGNNGMHVANLSLGSPSPSATLEQAVNSATSRGVLVVAASGNSGAGSISYPARYANAMAVGATDQNNNRASFSQYGAGLDIVAPGVNVQSTYPGSTYASLNGTSMATPHVAGAAVLVKQKNPSWSNVRIRNHLKNTATSLGSTNLYGSGLVNAEAATR

SEQ ID NO: 63118 - protein, 380 aa, Unidentified
VRSKKLWIVASTALLISVAFSSSIASAAEEAKEKYLIGFNEQEAVSEFVEQVEANDEVAILSEEEEVEIELLHEFETIPVLSVELSPEDVDALELDPAISYIEEDAEVTTMAQSVPWGISRVQAPAAHRRGLRGRGVKVAVLDTGISTHPDLNIRGGASFVPGEPSTQDGNGHGTHVAGTIAALDNSIGVLGVAPSAELYAVKVLGASGSGSVSSIAQGLEWAGNNGMHVANLSLGSPSPSATLEQAVNSATSRGVLVVAASGNSGAGSISYPARYANAMAVGATDQNNNRASFSQYGAGLDIVAPGVNVQSTYPGSTYASLNGTSMATPHVAGAAALVKQKNPSWSNVQIRNRLKNTATSLGSTNLYGSGLVNAEAATR

SEQ ID NO: 63119 - protein, 380 aa, Unidentified
VRSKKLWIVASTALLISVAFSSSIASAAEEAKEKYLIGFNEQEAVSEFVEQVEANDEVAILSEEEEVEIELLHEFETIPVLSVELSPEDVDALELDPAISYIEEDAEVTTMAQSVPWGISRVQAPAAHNRGLTGSGVKVAVLDTGISTHPDLNIRGGASFVPGEPSTQDGQGHGTHVAGTIAALNNSIGVLGVAPSAELYAVKVLGASGSGNVSSIAQGLEWAGNNGMHFANLSLGSPSPSATLEQAVNSATRRGVLVVAASGNSGAGSISYPARYANAMAVGATDQNNNRASFSQYGAGLDIVAPGVNVQSTYPGSTYASLNGTSMATPHVAGAAALVKQKNPSWSNVQIRNRLKNTATSLGSTNLYGSGLVNAEAATR

SEQ ID NO: 63120 - protein, 380 aa, Unidentified
MRSKKLWIVASTALLISVAFSSSIASAAEEAKEKYLIGFNEQEAVSEFVEQVXANDEVAILSEEEEVEIELLHEFETIPVLSVELSPEDVDALELDPAISYIEEDAEVTTMAQSVPWGISRVQAPAAHNRGLTGSGVKVAVLDTGISTHPDLNIRGGASFVPGEPSTQDGNGHGTHVAGTIAALNNSIGVLGVAPNAELYAVKVLGASGSGSVSSIAQGLEWAGNNVMHVANLSLGLQAPSATLEQAVNSATSRGVLVVAASGNSGAGSISYPARYANAMAVGATDQNNNRASFSQYGAGLDIVAPGVNVQSTYPGSTYASLNGTSMATPHVAGAAALVKQKNPSWSNVQIRNHLKNTATSLGSTNLYGSGLVNAEAATR

SEQ ID NO: 63121 - protein, 380 aa, Unidentified
VRSKKLWIVASTALLISVAFSSSIASAAEEAKEKYLIGFNEQEAVSEFVEQVEANDEVAILSEEEEVEIELLHEFETIPVLSVELSPEDVDALELDPAISYIEEDAEVTTMAQSVPWGISRVQAPAAHNRGLTGRGVKVAVLDTGISTHPDLNIRGGASFVPGEPSTQDGNGHGTHVAGTIAALNNSIGVLGVAPSAELYAVKVLGASGSGSVSSIAQGLEWAGANGMHVANLSLGSPSPSATLEQAVNSATSRGVLVVAASGNSGAGSISYPARYANAMAVGATDQNNNKASFSQYGAGLDIVAPGVNVQSTYPGSTYASLNGTSMATPHVAGAAACVKNKNPSWSNVQIRNHLKNTATSLGSTNLYGSGLVNAEAATR

SEQ ID NO: 63122 - protein, 380 aa, Unidentified
VRSKKLWIVASTALLISVAFSSSIASAAEEAKEKYLIGFNEQEAVSEFVEQVEANDEVAILSEEEEVEIELLHEFETIPVLSVELSPEDVDALELDPAISYIEEDAEVTTMAQSVPWGISRVQAPAAHNRGLTGRGVKVAVLDTGISTHPDLNIRGGASFVPGEPSTQDGNGHGTHVAGTIAALNNSIGVLGVAPSAELYAVKVLGASGSGAVSSIAQGLEWAGNNGMHVANLSLGSPSPSATLEQAVNSATSRGVLVVAASGNSGAGSISYPARYANALAVGATDQNNNRASFSQYGAGLDIVAPGVNVQSTYPGSTYASLNGTSMATPHVAGAAVLVKQKNPSWSNVQIRNRLKNTATSLGSTNLYGSGLVNAEAATR

SEQ ID NO: 63123 - protein, 380 aa, Unidentified
VRSKKLWIVASTALLISVAFSSSIASAAEEAKEKYLIGFNEQEAVSEFVEQVEANDEVAILSEEEEVEIELLHEFETIPVLSVELSPEDVDALELDPAISYIEEDAEVTTMAQSVPWGISRVQAPAAHRRGLTGSGVKVAVLDTGISTHPDLRITGGASFVPGEPSTQDGNGHGTHVAGTIAALNNSIGVLGVAPSAELYAVKVLGASGSGSVSSIAQGLEWAGNNGMHVANLSLGSPSPSATLEQAVNSATSRGVLVVAASGNSGAGSISYPARYANAMAVGATDQNNNRASFSQYGAGLDIVAPGVNVQSTYPGSTYASLNGTSMATPHVAGEAALVKQKNPSWRNVQIRNHLKNTATSLGSTNLYGSGLVNAEAATR

SEQ ID NO: 63124 - protein, 380 aa, Unidentified
VRSKKLWIVASTALLISVAFSSSIASAAEEAKEKYLIGFNEQEAVSEFVEQVEANDEVAILSEEEEVEIELLHEFETIPVLSVELSPEDVDALELDPAISYIEEDAEVTTMAQSVPWGISRVQAPAAHNRGLTGRGVKVAVLDTGISTHPDLDIRGGASFVPGEPSTQDGNGHGTHVAGTIAALDNSIGVLGVAPSAELYAVKVLGASGSGSVSSIAQGLEWAGNNGMHVANLSLGSPSPSATLEQAVNSATSRGVLVVAASGNSGAGSISYPARYANAMAVGATDQNNNRASFSQYGAGLDIVAPGVNVQSTYPGSTYASLNGTSMATPHVAGAAALVKQKNPSWRNVQIRNRLKNTATSLGSTNLYGSGLVNAEAATR

SEQ ID NO: 63125 - protein, 380 aa, Unidentified
VRSKKLWIVASTALLISVAFSSSIASAAEEAKEKYLIGFNEQEAVSEFVEQVEANDEVAILSEEEEVEIELLHEFETIPVLSVELSPEDVDALELDPAISYIEEDAEVTTMAQSVPWGISRVQAPAAHRRGLTGRGVKVAVLDTGISTHPDLNIRGGASFVPGEPSTQDGNGHGTHVAGTIAALDNSIGVLGVAPSAELYAVKVLGASGSGSVSSIAQGLEWAGNNGMHVANLSLGSPSPSATLEQAVNSATSRGVLVVAASGNSGAGSISYPARYANAMAVGATDQNNNRASFSQYGAGLDIVAPGVNVQSTYPGSTYASLNGTSMATPHVAGAAALVKQKNPSWRNVQIRNRLKNTATSLGSTNLYGSGLVNAEAATR

SEQ ID NO: 63126 - protein, 380 aa, Unidentified
VRSKKLWIVASTALLISVAFSSSIASAAEEAKEKYLIGFNEQEAVSEFVEQVEANDEVAILSEEEEVEIELLHEFETIPVLSVELSPEDVDALELDPAISYIEEDAEVTTMAQSVPWGISRVQAPAAHNRGLTGSGVKVAVLDTGISTHPDLNIRGGASFVPGEPSTQDGNGHGTHVAGTIAALNNSIGVLGVAPSAELYAVKVLGASGSGSVSSIAQGLEWAGNNGMHVANLSLGSPSPSATLEQAVNSATRRGVLVVAASGNSGAGSISYPARYANAMAVGATDQNNNRASFSQYGAGLDIVAPGVNVQSTYPQSTYASLNGTSMATPHVAGAAALVKQKLSSWSNVQIRNRLKNTATSLGSTNLYGSGLVNAEAATR

SEQ ID NO: 63127 - protein, 380 aa, Unidentified
VRSKKLWIVASTALLISVAFSSSIASAAEEAKEKYLIGFNEQEAVSEFVEQVEANDEVAILSEEEEVEIELLHEFETIPVLSVELSPEDVDALELDPAISYIEEDAEVTTMAQSVPWGISRVQAPAAHNRRLTGSGVKVAVLDTGISTHPDLNIRGGASFVNGEPSTQDGQGHGTHVAGTIAALNNSIGVLGVAPSAELFAVKVLGASGSGSVSSIAQGLEWAGNNGMHVANLSLGSPSPSATLEQAVNSATSRGVLVVAASGNSGAGSISYPARYANAMAVGATDQNNNRASFSQWGAGLDIVAPGVNVQSTYPGSTYASLNGTSMATPHVAGAAALVKQKNPSWSNVQIRNHLKNTATSLGSTNLYGSGLVNAEAATR

SEQ ID NO: 63128 - protein, 380 aa, Unidentified
VRSKKLWIVASTALLISVAFSSSIASAAEEAKEKYLIGFNEQEAVSEFVEQVEANDEVAILSEEEEVEIELLHEFETIPVLSVELSPEDVDALELDPAISYIEEDAEVTTMAQSVPWGISRVQAPAAHNRRLTGSGVKVAVLDTGISTHPDLDIRGGASFVPGEPSTQDGNGHGTHVAGTIAALDNSIGVLGVAPSAELYAVKVLGASGSGSVSSIAQGLEWAGNNGMHVANLSLGSPSPSATLEQAVNSATSRGVLVVAASGNSGAGSISYPARYANAMAVGATDQNNNRASFSQYGAGLDIVAPGVNVQSTYPGSTYASLNGTSMATPHVAGEAALVKQKNPSWSNVQIRNRLKNTATSLGSTNLYGSGLVNAEAATR

SEQ ID NO: 63129 - protein, 380 aa, Unidentified
VRSKKLWIVASTALLISVAFSSSIASAAEEAKEKYLIGFNEQEAVSEFVEQVEANDEVAILSEEEEVEIELLHEFETIPVLSVELSPEDVDALELDPAISYIEEDAEVTTMAQSVPWGISRVQAPAAHRRGLTGRGVKVAVLDTGISTHPDLNIRGGASFVPGEPSTQDGNGHGTHVAGTIAALDNSIGVLGVAPSAELYAVKVLGASGSGSVSSIAQGLEWAGNNGMHVANLSLGSPSPSATLEQAVNSATSRGVLVVAASGNSGAGSISYPARYANAMAVGATDQNNNRASFSQYGAGLDIVAPGVNVQSTYPGSTYASLNGTSMATPHVAGAAALVKQKNPSWSNVQIRNRLKNTATSLGSTNLYGSGLVRAEAATR

SEQ ID NO: 63130 - protein, 380 aa, Unidentified
VRSKKLWIVASTALLISVAFSSSIASAAEEAKEKYLIGFNEQEAVSEFVEQVEANDEVAILSEEEEVEIELLHEFETIPVLSVELSPEDVDALELDPAISYIEEDAEVTTMAQSVPWGISRVQAPAAHNRGLTGRGVKVAVLDTGISTHPDLRIRGGASFVPGEPSTQDGNGHGTHVAGTIAALNNSIGVLGVAPSAELYAVKVLGASGSGSVSSIAQGLEWAGANGMHVANLSLGSPSPSATLEQAVNSATSRGVLVVAASGNSGAGSISYPARYANAMAVGATDQNNNRASFSQYGAGLDIVAPGVNVQSTYPGSTYFSLNGTSMATPHVAGAAALVKQKNPSWSNVQIRNHLKNTATSLGSTNLYGSGLVRAEAATR

SEQ ID NO: 63131 - protein, 380 aa, Unidentified
VRSKKLWIVASTALLISVAFSSSIASAAEEAKEKYLIGFNEQEAVSEFVEQVEANDEVAILSEEEEVEIELLHEFETIPVLSVELSPEDVDALELDPAISYIEEDAEVTTMAQSVPWGISRVQAPAAHNRRLTGSGVKVAVLDTGISTHPDLNIRGGASFVPGEPSTQDGNGHGTHVAGTIAALNNRIGVLGVAPSAELYAVKVLGASGGGSVSSIAQGLEWAGNNGMHVANLSLGSPSPSATLEQAVNSATSRGVLVVAASGNSGAGSISYPARYANAMAVGATDQNNNRASFSQYGAGLDIVAPGVNVQSTYPGSTYASLNGTSMATPHVAGAAVLVKQKNPSWSNVRIRNHLKNTATSLGSTNLYGSGLVNAEAATR

SEQ ID NO: 63132 - protein, 380 aa, Unidentified
VRSKKLWIVASTALLISVAFSSSIASAAEEAKEKYLIGFNEQEAVSEFVEQVEANDEVAILSEEEEVEIELLHEFETIPVLSVELSPEDVDALELDPAISYIEEDAEVTTMAQSVPWGISRVQAPAAHNRGLTGSGVKVAVLDTGISTHPDLNIRGGASFVPGEPSTQDGEGHGTHVAGTIAALNNSIGVLGVAPSAELYAVKVLGASGAGSVSSIAQGLEWAGNNGMHVANLSLGSPSPSATLEQAVNSATSRGVLVVAASGNSGAGSISYPARYANAMAVGATDQNNNHADFSQYGAGLDIVAPGVNVQSTYPGSTYASLNGTSMATPHVAGAAALVKQKNPSWSNVQIRNHLKNTATSLGSTNLYGSGLVNAFAATR

SEQ ID NO: 63133 - protein, 380 aa, Unidentified
VRSKKLWIVASTALLISVAFSSSIASAAEEAKEKYLIGFNEQEAVSEFVEQVEANDEVAILSEEEEVEIELLHEFETIPVLSVELSPEDVDALELDPAISYIEEDAEVTTMAQSVPWGISRVQAPAAHNRGLTGSGVKVAVLDTGISTHPDLNIRGGASFVPGEPSTQDGNGHGTHVAGTIAALNNRIGVLGVAPSAELYAVKVLGASGSGNVSGIAQGLEWAGNNGMHVANLSLGSPSPSATLEQAVNSATSRGVLVVAASGNSGAGSISWPARYANAMAVGATDQNNNRASFSQYGAGLDIVAPGVNVQSTYPGSTYASLNGTSMATPHVAGAAALVKNKNPSWSNVQIRNHLKNTATSLGSTNLYGSGLVNAEAATR

SEQ ID NO: 63134 - protein, 380 aa, Unidentified
VRSKKLWIVASTALLISVAFSSSIASAAEEAKEKYLIGFNEQEAVSEFVEQVEANDEVAILSEEEEVEIELLHEFETIPVLSVELSPEDVDALELDPAISYIEEDAEVTTMAQSVPWGISRVQAPAAHNRGLTGSGVKVAVLDSGISTHPDLNIRGGASFVPGEPSTQDGNGHGTHVAGTIAALNNSIGVLGVAPSAELYAVKVLGASGSGSVSSIAQGLEWAGNNRMHVANLSLGSESPSATLEQAVNSATSRGVLVVAASGNSGAGSISYPARYANAMAVGATDQNNNRASFSQYGEGLDIVAPGVNVQSTYPGSTYASLNGTSMATPHVAGAAALVKQKNGSWSNVQIRNHLKNTATSLGSTNLYGSGLVNAEAATR

SEQ ID NO: 63135 - protein, 380 aa, Unidentified
VRSKKLWIVASTALLISVAFSSSIASAAEEAKEKYLIGFNEQEAVSEFVEQVEANDEVAILSEEEEVEIELLHEFETIPVLSVELSPEDVDALELDPAISYIEEDAEVTTMAQSVPWGISRVQAPAAHNRGLTGSGVKVAVLDTGISTHPDLNIRGGASFVPGEPSTQDGEGHGTHVAGTIAALNNSIGVLGVAPSAELYAVKVLGASGSGSVSSIAQGLEWAGNNGMHVANLSLGNPSPSATLEQAVNSATSRGVLVVAASGNSGEESISYPARYANAMAVGATDQNNNRASFSQYGAGLDIVAPGVNVQSTYPGSTYASLNGTSMATPHVAGAAALVKQKNPSWSNVQIRNHLKNTATSLGSTNLYGSGLVNAFAATR

SEQ ID NO: 63136 - protein, 380 aa, Unidentified
VRSKKLWIVASTALLISVAFSSSIASAAEEAKEKYLIGFNEQEAVSEFVEQVEANDEVAILSEEEEVEIELLHEFETIPVLSVELSPEDVDALELDPAISYIEEDAEVTTMAQSVPWGISRVQAPAAHNRGLTGSGVKVAVLDTGISTHPDLNIRRGASFVPGEPSTQDGNGHGTHVAGTIAALNNSIGVLGVAPSAILYAVKVLGASGSGSVSSIAQGLEWAGNNGMHVANLSLGSPSPSATLEQAVNSATSRGVLVVAASGNSGAGSISYPARYANAMAVGATDQNNNRASFSQWGAGLDIVAPGVNVQSTYPGSTYASLNGTSMATPHVAGAAACVKQKNPSWSNVQIRNHLKNTATSLGSTNLYGSGLVNCEAATR

SEQ ID NO: 63137 - protein, 380 aa, Unidentified
VRSKKLWIVASTALLISVAFSSSIASAAEEAKEKYLIGFNEQEAVSEFVEQVEANDEVAILSEEEEVEIELLHEFETIPVLSVELSPEDVDALELDPAISYIEEDAEVTTMAQSVPWGISRVQAPAAHNRGLTGRGVKVAVLDTGISTHPDLNIRGGASFVPGEPSTQDGNGHGTHVAGTIAALDNSIGVLGVAPSAELYAVKVLGASGSGAISSIAQGLEWAGNNGMHVANLSLGSPSPSATLEQAVNSATSRGVLVVAASGNSGAGSISYPARYANAMAVGATDQNNNRASFSQYGAGLDIVAPGVNVQSTYPGSTYASLNGTSMATPHVAGAAALVKQKNPSWSNVQIRNRLKNTATSLGSTNLYGSGLVNAEAATR

SEQ ID NO: 63138 - protein, 380 aa, Unidentified
VRSKKLWIVASTALLISVAFSSSIASAAEEAKEKYLIGFNEQEAVSEFVEQVEANDEVAILSEEEEVEIELLHEFETIPVLSVELSPEDVDALELDPAISYIEEDAEVTTMAQSVPWGISRVQAPAAHRRGLTGSGVKVAVLDTGISTHPDLRITGGASFVPGEPSTQDGNGHGTHVAGTIAALDNSIGVLGVAPSAELYAVKVLGASGSGSVSSIAQGLEWAGNNGMHVANLSLGSPSPSATLEQAVNSATSRGVLVVAASGNSGAGSISYPARYANAMAVGATDQNNNRASFSQYGAGLDIVAPGVNVQSTYPGSTYASLNGTSMATPHVAGAAALVKQKNPSWRNVQIRNHLKNTATSLGSTNLYGSGLVNAEAATR

SEQ ID NO: 63139 - protein, 380 aa, Unidentified
VRSKKLWIVASTALLISVAFSSSIASAAEEAKEKYLIGFNEQEAVSEFVEQVEANDEVAILSEEEEVEIELLHEFETIPVLSVELSPEDVDALELDPAISYIEEDAEVTTMAQSVPWGISRVQAPAAHNRGLTAFGVKVAVLDTGISTHPDLNIRGGASFVPGEPSTQDGNGHGTHVAGTIAALNNSIGVLGVAPSAELYAVKVLGASGSGSVSSIAQGLEWAGLNGMHVANLSLGSPSPSATLEQAVNSATSRGVLVVAASGNSGAGSISYPARYANAMAVGATDQNNNRADFSQYGAGLDIVAPGVNVQSTYPGSTYASLNGTSMATPHVAGAAALVKQKNGSWSNVQIRNHLKNTATSLGSTNLYGSGLVNAEAATR

SEQ ID NO: 63140 - protein, 380 aa, Unidentified
VRSKKLWIVASTALLISVAFSSSIASAAEEAKEKYLIGFNEQEAVSEFVEQVEANDEVAILSEEEEVEIELLHEFETIPVLSVELSPEDVDALELDPAISYIEEDAEVTTMAQSVPWGISRVQAPAAHNRGLTGSGVKVAVLDTGISTHPDLNIRGGASFVPGEPSTQDGNGHGTHVAGTIAALNNSIGVLGVAPSAELYAVKVLGASGSGSVSSIAQGLEWAGNNGMHVANLSLGNPSPSATLEQAVNSATSRGVLVVAASGNSGEGSISYPARYANAMAVGATDQNNNRADFSQYGAGLDIVAPGVNVQSTEPGSTYASLNGTSMATPHVAGAAALVKQKNPSWSNVQIRNHLKNTATSLGSTNLYGSGLVNAFAATR

SEQ ID NO: 63141 - protein, 380 aa, Unidentified
VRSKKLWIVASTALLISVAFSSSIASAAEEAKEKYLIGFNEQEAVSEFVEQVEANDEVAILSEEEEVEIELLHEFETIPVLSVELSPEDVDALELDPAISYIEEDAEVTTMAQSVPWGISRVQAPAAHRRGLTGRGVKVAVLDTGISTHPDLNIRGGASFVPGEPSTQDGNGHGTHVAGTIAALDNSIGVLGVAPSAELYAVKVLGASGSGSVSSIAQGLEWAGANGMHVANLSLGSPSPSATLEQAVNSATSRGVLVVAASGNSGAGSISYPARYANAMAVGATDQNNNRASFSQYGAGLDIVAPGVNVQSTYPGSTYASLNGTSMATPHVAGAAALVKQKNPSWSNVQIRNRLKNTATSLGSTNLYGSGLVNAEAATR

SEQ ID NO: 63142 - protein, 380 aa, Unidentified
VRSKKLWIVASTALLISVAFSSSIASAAEEAKEKYLIGFNEQEAVSEFVEQVEANDEVAILSEEEEVEIELLHEFETIPVLSVELSPEDVDALELDPAISYIEEDAEVTTMAQSVPWGISRVQAPAAHNRGLTGSGVKVAVLDTGISTHPDLNIRGGASFVPGEPSTQDGEGHGTHVAGTIAALNNSIGVLGVAPSAELYAVKVLGASGAGSVSSIAQGLEWAGNNGMHVANLSLGSPSPSATLEQAVNSATSRGVLVVAASGNSGEGSISYPARYANAMAVGATDQNNNHASFSQYGAGLDIVAPGVNVQSTYPGSTYASLNGTSMATPHVAGAAALVKQKNPSWSNVQIRNHLKNTATSLGSTNLYGSGLVNAFAATR

SEQ ID NO: 63143 - protein, 380 aa, Unidentified
VRSKKLWIVASTALLISVAFSSSIASAAEEAKEKYLIGFNEQEAVSEFVEQVEANDEVAILSEEEEVEIELLHEFETIPVLSVELSPEDVDALELDPAISYIEEDAEVTTMAQSVPWGISRVQAPAAHNRRLRGSGVKVAVLDTGISTHPDLNIRGGASFVPGEPSTQDGNGHGTHVAGTIAALNNRIGVLGVAPSAELYAVKVLGASGSGSVSSIAQGLEWAGNNGMHVANLSLGSPSPSATLEQAVNSATSRGVLVVAASGNSGAGSISYPARYANAMAVGATDQNNNRASFSQYGAGLDIVAPGVNVQSTYPGFTYASLNGTSMATPHVAGAAALVKQKNPSRSNVQIRNHLKNTATSLGSTNLYGSGLVNAEAATR

SEQ ID NO: 63144 - protein, 380 aa, Unidentified
VRSKKLWIVASTALLISVAFSSSIASAAEEAKEKYLIGFNEQEAVSEFVEQVEANDEVAILSEEEEVEIELLHEFETIPVLSVELSPEDVDALELDPAISYIEEDAEVTTMAQSVPWGISRVQAPAAHNRGLTGSGVKVAVLDTGISTHPDLNIRGGASFVPGEPSTQDGNGHGTHVAGTIAALNNRIGVLGVAPSAELYAVKVLGASGSGSLSSIAQGLEWAGNNGMHVANLSLGSPSPSATLEQAVNSATSRGVLVVAASGNSGAGSISYPARYANAMAVGATDQNNNRASFSQYGAGLDIVAPGVNVQSTYPGSAYFSLNGTSMAAPHVAGAAALVKQKNPSWSNVQIRNHLKNTATSLGSTNLYGSGLVNAEAATR

SEQ ID NO: 63145 - protein, 380 aa, Unidentified
VRSKKLWIVASTALLISVAFSSSIASAAEEAKEKYLIGFNEQEAVSEFVEQVEANDEVAILSEEEEVEIELLHEFETIPVLSVELSPEDVDALELDPAISYIEEDAEVTTMAQSVPWGISRVQAPAAHNRGLTGRGVKVAVLDTGISTHPDLNIRGGASFVPGEPSTQDGNGHGTHVAGTIAALDNSIGVLGVAPSAELYAVKVLGASGSGAISSIAQGLEWAGNNGMHVANLSLGSPSPSATLEQAVNSATSRGVLVVAASGNSGAGSISYPARYANAMAVGATDQNNNRASFSQYGAGLDIVAPGVNVQSTYPGSTYASLNGTSMATPHVAGAAVLVKQKNPSWSNVQIRNHLKNTATSLGSTNLYGSGLVNAEAATR

SEQ ID NO: 63146 - protein, 380 aa, Unidentified
VRSKKLWIVASTALLISVAFSSSIASAAEEAKEKYLIGFNEQEAVSEFVEQVEANDEVAILSEEEEVEIELLHEFETIPVLSVELSPEDVDALELDPAISYIEEDAEVTTMAQSVPWGISRVQAPAAHNRGLTAFGVKVAVLDTGISTHPDLNIRGGASFVPGEPSTQDGEGHGTHVAGTIAALNNSIGVLGVAPSAELYAVKVLGASGSGSVSSIAQGLEWAGLNGMHVANLSLGSPSPSATLEQAVNSATSRGVLVVAASGNSGAGSISYPARYANAMAVGATDQNNNRASFSQYGAGLDIVAPGVNVQSTYPGSAYASLNGTSMATPHVAGAAALVKQKNPSWSNVQIRNHLKNTATSLGSTNLYGSGLVNAEAATR

SEQ ID NO: 63147 - protein, 380 aa, Unidentified
VRSKKLWIVASTALLISVAFSSSIASAAEEAKEKYLIGFNEQEAVSEFVEQVEANDEVAILSEEEEVEIELLHEFETIPVLSVELSPEDVDALELDPAISYIEEDAEVTTMAQSVPWGISRVQAPAAHNRGLTGSGVKVAVLDTGISTHPDLNIRGGASFVPGEPSTQDGNGHGTHVAGTIAALNNSIGVLGVAPSAELYAVKVLGASGSGSLSSIAQGLEWAGNNGMHVANLSLGNPSPSATLEQAVNSATSRGVLVVAASGNSGEGSISYPARYANAMAVGATDQNNNRADFSQYGAGLDIVAPGVNVQSTYPGSTYASLNGTSMATPHVAGAAALVKQKNPSWSNVQIRNRLKNTATSLGSTNLYGSGLVNAEAATR

SEQ ID NO: 63148 - protein, 380 aa, Unidentified
VRSKKLWIVASTALLISVAFSSSIASAAEEAKEKYLIGFNEQEAVSEFVEQVEANDEVAILSEEEEVEIELLHEFETIPVLSVELSPEDVDALELDPAISYIEEDAEVTTMAQSVPWGISRVQAPAAHNRGLTGFGVKVAVLDTGISTHPDLNIRGGASFVPGEPSTQDGNGHGTHVAGTIAALNNSIGVLGVAPSAELYAVKVLGASGSGSVSSIAQGLEWAGNNRMHVANLSLGIESPSATLEQAVNSATSRGVLVVAASGNSGADSISYPARYANAMAVGATDQNNNRASFSQYGAGLDIVAPGVNVQSTYPGSTYASLNGTSMATPHVAGAAALVKQKNPSWSNVQIRNHLKNTATSLGSTNLYGSGLVNAEAATR

SEQ ID NO: 63149 - protein, 380 aa, Unidentified
VRSKKLWIVASTALLISVAFSSSIASAAEEAKEKYLIGFNEQEAVSEFVEQVEANDEVAILSEEEEVEIELLHEFETIPVLSVELSPEDVDALELDPAISYIEEDAEVTTMAQSVPWGISRVQAPAAHNRGLTGSGVKVAVLDTGISTHPDLNIRGGASFVPGEPSRQDGNGHGTHVAGTIAALNNSIGVLGVAPSAELYAVKVLGAFGSGSVSSIAQGLEWAGNNGMHFANLSLGSPSPSATLEQAVNSATSRGVLVVAASGNSGAGSISYPARYANAMAVGATDQNNIRASFSQWGAGLDIVAPGVNVQSTYPGSTYASLNGTSMATPHVAGAAALVKQKNPSWSNVQIRNHLKNTATSLGSTNLYGSGLVNAEAATR

SEQ ID NO: 63150 - protein, 380 aa, Unidentified
VRSKKLWIVASTALLISVAFSSSIASAAEEAKEKYLIGFNEQEAVSEFVEQVEANDEVAILSEEEEVEIELLHEFETIPVLSVELSPEDVDALELDPAISYIEEDAEVTTMAQSVPWGISRVQAPAAHNRGLTGSGVKVAVLDTGISTHPDLNIRGGASFVPGEPSTQDGNGHGTHVAGTIAALDNSIGVLGVAPSAELYAVKVLGASGSGAISSIAQGLEWAGNNGMHVANLSLGSPSPSATLEQAVNSATSRGVLVVAASGNSGAGSISYPARYANAMAVGATDQNNNRASFSQYGAGLDIVAPGVNVQSTYPGPTYASLNGTSMATPHVAGAAALVKQKNPSWSNVQIRNHLKNTATSLGSTNLYGSGLVNAVAATR

SEQ ID NO: 63151 - protein, 380 aa, Unidentified
VRSKKLWIVASTALLISVAFSSSIASAAEEAKEKYLIGFNEQEAVSEFVEQVEANDEVAILSEEEEVEIELLHEFETIPVLSVELSPEDVDALELDPAISYIEEDAEVTTMAQSVPWGISRVQAPAAHNRGLTASGVKVAVLDTGISTHPDLWIRGGASFVPGEPSTQDGNGHGTHVAGTIAALNNSIGVLGVAPSAELYAVKVLGASGSGSVSSIAQGLEWAGLNRMHVANLSLGSPSPSATLEQAVNSATSRGVLVVAASGNSGAGSISYPARYANAMAVGATDQNNNRADFSQYGAGLDIVAPGVNVQSTYPGSTYASLNGTSMATPHVAGAAALVKQKNPSWSNVQIRNHLKNTATSLGSTNLYGSGLVNAEAATR

SEQ ID NO: 63152 - protein, 380 aa, Unidentified
VRSKKLWIVASTALLISVAFSSSIASAAEEAKEKYLIGFNEQEAVSEFVEQVEANDEVAILSEEEEVEIELLHEFETIPVLSVELSPEDVDALELDPAISYIEEDAEVTTMAQSVPWGISRVQAPAAHNRGLTGSGVKVAVLDTGISTHPDLNIRGGASFVPGEPSTQDGNGHGTHVAGTIAALNNSIGVLGVAPSAELYAVKVLGASGSGSLSSIAQGLEWAGNNGMHVANLSLGSPSPSATLEQAVNSATSRGVLVVAASGNSGAGSISYPARYANAMAVGATDQNNNRASFSQYGAGLDIVAPGVNVQSTYPGSTYASENGTSMAAPHVAGAAALVKQKNPSWSNVQIRNRLKRTATSLGSTNLYGSGLVNAEAATR

SEQ ID NO: 63153 - protein, 380 aa, Unidentified
VRSKKLWIVASTALLISVAFSSSIASAAEEAKEKYLIGFNEQEAVSEFVEQVEANDEVAILSEEEEVEIELLHEFETIPVLSVELSPEDVDALELDPAISYIEEDAEVTTMAQSRPWGIARVQAPAAHNRRLTGSGVKVAVLDTGISTHPDLRIRGGASFVPGEPSTQDGNGHGTHVAGTIAALNNSIGVLGVAPSAELYAVKVLGASGSGSVSSIAQGLEWAGNNGMHVANLSLGSPSPSATLEQAVNSATSRGVLVVAASGNSGAGSISYPARYANAMAVGATDQNNNRASFSQYGAGLDIVAPGVNVQSTYPGSTYASLNGTSMATPHVAGAAALVKQKNPSWRNVQIRNHLKNTATSLGSTNLYGSGLVNAEAATR

SEQ ID NO: 63154 - protein, 380 aa, Unidentified
VRSKKLWIVASTALLISVAFSSSIASAAEEAKEKYLIGFNEQEAVSEFVEQVEANDEVAILSEEEEVEIELLHEFETIPVLSVELSPEDVDALELDPAISYIEEDAEVTTMAQSVPWGISRVQAPAAHNRGLTGSGVKVAVLDTGISTHPDLRIRGGASFVPGEPSTQDGNGHGTHVAGTIAALNNSIGVLGVAPSAELYAVKVLGASGAGSVSSIAQGLEWAGANGMHVANLSLGSPSPSATLEQAVNSATSRGVLVVAASGNSGAGSISYPARYANAMAVGATDQNNNRASFSQYGAGLDIVAPGVNVQSTYPGSTYFSLNGTSMATPHVAGAAALVKQKNPSWSNVQIRNHLKNTATSLGSTNLYGSGLVRAEAATR

SEQ ID NO: 63155 - protein, 380 aa, Unidentified
VRSKKLWIVASTALLISVAFSSSIASAAEEAKEKYLIGFNEQEAVSEFVEQVEANDEVAILSEEEEVEIELLHEFETIPVLSVELSPEDVDALELDPAISYIEEDAEVTTMAQSVPWGISRVQAPAAHNRGLTASGVKVAVLDTGISTHPDLNIRGGASFVNGEPSTQDGNGHGTHVAGTIAALNNSIGVLGVAPSAELYAVKVLGASGSGSVSSIAQGLEWAGNNGMHVANLSLGSPSPSATLEQAVNSATSRGVLVVAASGNSGAGSISYPARYANAMAVGATDQNNNRASFSQWGAGLDLVAPGVNVQSTYPGSTYASLNGTSMATPHVAGAAALVKQKNPSWSNVQIRNHLKRTATSLGSTNLYGSGLVNAEAATR

SEQ ID NO: 63156 - protein, 380 aa, Unidentified
VRSKKLWIVASTALLISVAFSSSIASAAEEAKEKYLIGFNEQEAVSEFVEQVEANDEVAILSEEEEVEIELLHEFETIPVLSVELSPEDVDALELDPAISYIEEDAEVTTMAQSVPWGISRVQAPAAHRRGLTGRGVKVAVLDTGISTHPDLDIRGGASFVPGEPSTQDGNGHGTHVAGTIAALNNSIGVLGVAPSAELYAVKVLGASGSGSVSSIAQGLEWAGNNGMHVANLSLGSPSPSATLEQAVNSATSRGVLVVAASGNSGAGSISYPARYANAMAVGATDQNNNRASFSQYGAGLDIVAPGVNVQSTYPGSTYASLNGTSMATPHVAGEAALVKQKNPSWSNVQIRNRLKNTATSLGSTNLYGSGLVNAEAATR

SEQ ID NO: 63157 - protein, 380 aa, Unidentified
VRSKKLWIVASTALLISVAFSSSIASAAEEAKEKYLIGFNEQEAVSEFVEQVEANDEVAILSEEEEVEIELLHEFETIPVLSVELSPEDVDALELDPAISYIEEDAEVTTMAQSVPWGISRVQAPAAHNRRLTGSGVKVAVLDTGISTHPDLRIRGGASFVPGEPSTQDGNGHGTHVAGTIAALDNSIGVLGVAPSAELYAVKVLGASGSGSVSSIAQGLEWAGNNGMHVANLSLGSPSPSATLEQAVNSATSRGVLVVAASGNSGAGSISYPARYANAMAVGATDQNNNRASFSQYGAGLDIVAPGVNVQSTYPGSTYASLNGTSMATPHVAGEAALVKQKNPSWSNVQIRNRLKNTATSLGSTNLYGSGLVNAEAATR

SEQ ID NO: 63158 - protein, 380 aa, Unidentified
VRSKKLWIVASTALLISVAFSSSIASAAEEAKEKYLIGFNEQEAVSEFVEQVEANDEVAILSEEEEVEIELLHEFETIPVLSVELSPEDVDALELDPAISYIEEDAEVTTMAQSVPWGISRVQAPAAHNRGLTGSGVKVAVLDTGISTHPDLNIRGGASFVPGEPSTQDGNGHGTHVAGTIAALNNSIGVLGVAPSAELYAVKVLGAFGSGSVTGIAQGLEWAGNNGMHVANLSLGSPSPSATLEQAVNSATSRGVLVVAASGNSGAGSISYPARYANAMAVGATDQNNNRASFSQYGFGLDIVAPGVNVQSTYPGMTYASLNGTSMATPHVAGAAALVKQKNPSWSNVQIRNHLKNTATSLGSTNLYGSGLVNAEAATR

SEQ ID NO: 63159 - protein, 380 aa, Unidentified
VRSKKLWIVASTALLISVAFSSSIASAAEEAKEKYLIGFNEQEAVSEFVEQVEANDEVAILSEEEEVEIELLHEFETIPVLSVELSPEDVDALELDPAISYIEEDAEVTTMAQSRPWGIARVQAPAAHNRRLTGRGVKVAVLDTGISTHPDLNIRGGASFVPGEPSTQDGNGHGTHVAGTIAALNNSIGVLGVAPSAELYAVKVLGASGSGSVSSIAQGLEWAGNNGMHVANLSLGSPSPSATLEQAVNSATSRGVLVVAASGNSGAGSISYPARYANAMAVGATDQNNNRASFSQYGAGLDIVAPGVNVQSTYPGSTYASLNGTSMATPHVAGAAALVKQKNPSWRNVQIRNHLKNTATSLGSTNLYGSGLVNAEAATR

SEQ ID NO: 63160 - protein, 380 aa, Unidentified
VRSKKLWIVASTALLISVAFSSSIASAAEEAKEKYLIGFNEQEAVSEFVEQVEANDEVAILSEEEEVEIELLHEFETIPVLSVELSPEDVDALELDPAISYIEEDAEVTTMAQSVPWGISRVQAPAAHNRKLTGFGVKVAVLDTGISTHPDLNIRGGASFVPGEPSTQDGEGHGTHVAGTIAALNNSIGVLGVAPSAELYAVKVLGASGSGSVSSIAQGLEWAGNNGMHVANLSLGSPSPSATLEQAVNSATSRGVLVVAASGNSGAGSISYPARYANAMAVGATDQNNNRADFSQYGAGLDIVAPGVNVQSTYPGSTYASLNGTSMATPHVAGAAALVKQKNGSWSNVQIRNHLKNTATSLGSTNLYGSGLVNAEAATR

SEQ ID NO: 63161 - protein, 380 aa, Unidentified
VRSKKLWIVASTALLISVAFSSSIASAAEEAKEKYLIGFNEQEAVSEFVEQVEANDEVAILSEEEEVEIELLHEFETIPVLSVELSPEDVDALELDPAISYIEEDAEVTTMAQSVPWGISRVQAPAAHNRRLTGRGVKVAVLDTGISTHPDLNIRGGASFVNGEPSTADGNGHGTHVAGTIAALNNSIGVLGVAPSAELYAVKVLGASGSGSVSSIAQGLEWAGNNGMHVANLSLGSPSPSATLEQAVNSATSRGVLVVAASGNSGAGSISYPARYANAMAVGATDQNNNRASFSQYGAGLDIVAPGVNVQSTYPGSTYAFLNGTSMATPHVAGAAALVKQKNPSWSNVQIRNHLKNTATSLGSTNLYGSGLVNAEAATR

SEQ ID NO: 63162 - protein, 380 aa, Unidentified
VRSKKLWIVASTALLISVAFSSSIASAAEEAKEKYLIGFNEQEAVSEFVEQVEANDEVAILSEEEEVEIELLHEFETIPVLSVELSPEDVDALELDPAISYIEEDAEVTTMAQSVPWGISRVQAPAAHRRGLTGRGVKVAVLDTGISTHPDLRIRGGASFVPGEPSTQDGNGHGTHVAGTIAALDNSIGVLGVAPSAELYAVKVLGASGSGSVSSIAQGLEWAGNNGMHVANLSLGSPSPSATLEQAVNSATSRGVLVVAASGNSGAGSISYPARYANAMAVGATDQNNNRASFSQYGAGLDIVAPGVNVQSTYPGSTYASLNGTSMATPHVAGAAALVKQKNPSWSNVQIRNRLKNTATSLGSTNLYGSGLVNAEAATR

SEQ ID NO: 63163 - protein, 380 aa, Unidentified
VRSKKLWIVASTALLISVAFSSSIASAAEEAKEKYLIGFNEQEAVSEFVEQVEANDEVAILSEEEEVEIELLHEFETIPVLSVELSPEDVDALELDPAISYIEEDAEVTTMAQSVPWGISRVQAPAAHNRGLTGRGVKVAVLDTGISTHPDLDITGGASFVPGEPSTQDGNGHGTHVAGTIAALNNSIGVLGVAPSAELYAVKVLGASGSGSVSSIAQGLEWAGNNGMHVANLSLGSPSPSATLEQAVNSATSRGVLVVAASGNSGAGSISYPARYANAMAVGATDQNNNRASFSQYGAGLDIVAPGVNVQSTYPGSTYASLNGTSMATPHVAGAAALVKQKNPSWRNVQIRNRLKNTATSLGSTNLYGSGLVNAEAATR

SEQ ID NO: 63164 - protein, 380 aa, Unidentified
VRSKKLWIVASTALLISVAFSSSIASAAEEAKEKYLIGFNEQEAVSEFVEQVEANDEVAILSEEEEVEIELLHEFETIPVLSVELSPEDVDALELDPAISYIEEDAEVTTMAQSVPWGISRVQAPAAHNRGLTGFGVKVAVLDTGISTHPDLNIRGGASFVPGEPSTQDGEGHGTHVAGTIAALNNSIGVLGVAPSAELYAVKVLGASGSGSVSSIAQGLEWAGLNGMHVANLSLGSPSPSATLEQAVNSATSRGVLVVAASGNSGAGSISYPARYANAMAVGATDQNNNRASFSQYGAGLDIVAPGVNVQSTYPGSAYASLNGTSMATPHVAGAAALVKQKNGSWSNVQIRNHLKNTATSLGSTNLYGSGLVNAEAATR

SEQ ID NO: 63165 - protein, 380 aa, Unidentified
VRSKKLWIVASTALLISVAFSSSIASAAEEAKEKYLIGFNEQEAVSEFVEQVEANDEVAILSEEEEVEIELLHEFETIPVLSVELSPEDVDALELDPAISYIEEDAEVTTMAQSVPWGISRVQAPAAHNRGLTGFGVKVAVLDTGISTHPDLNIRGGASFVPGEPSTQDGNGHGTHVAGTIAALNNSIGVLGVAPSAELYAVKVLGASGSGSVSSIAQGLEWAGLNRMHVANLSLGSPSPSATLEQAVNSATSRGVLVVAASGNSGAGSISYPARYANAMAVGATDQNNNRADFSQYGAGLDIVAPGVNVQSTYPGSTYASLNGTSMATPHVAGAAALVKQKNGSWSNVQIRNHLKNTATSLGSTNLYGSGLVNAEAATR

SEQ ID NO: 63166 - protein, 380 aa, Unidentified
VRSKKLWIVASTALLISVAFSSSIASAAEEAKEKYLIGFNEQEAVSEFVEQVEANDEVAILSEEEEVEIELLHEFETIPVLSVELSPEDVDALELDPAISYIEEDAEVTTMAQSVPWGISRVQAPAAHNRGLTGFGVKVAVLDTGISTHPDLNIRGGRSFVPGEPSTQDGNGHGTHVAGTIAALNNSIGVLGVAPSAELYAVKVLGASGSGSVSSIAQGLEWAGNNRMHVANLSLGSPSPSATLEQAVNSATSRGVLVVAASGNSGAGSIDYPARYANAMAVGATDQNNNRASFSQYGAGLDIVAPGVNVQSTYPGSTYASENGTSMATPHVAGAAALVKQKNPSWSNVQIRNHLKNTATSLGSTNLYGSGLVNAEAATR

SEQ ID NO: 63167 - protein, 380 aa, Unidentified
VRSKKLWIVASTALLISVAFSSSIASAAEEAKEKYLIGFNEQEAVSEFVEQVEANDEVAILSEEEEVEIELLHEFETIPVLSVELSPEDVDALELDPAISYIEEDAEVTTMAQSVPWGISRVQAPAAHNRGLTGSGVKVAVLDTGISTHPDLNIRRGASFVPGEPSTQDGNGHGTHVAGTIAALNNSIGVLGVAPSAILFAVKVLGASGAGSVSSIAQGLEWAGANGMHVANLSLGSPSPSATLEQAVNSATSRGVLVVAASGNSGAGSISYPARYANAMAVGATDQNNNRASFSQYGAGLDIVAPGVNVQSTYPGSTYASLNGTSMATPHVAGAAALVKQKNPSWSNVQIRNHLKNTATSLGSTNLYGSGLVNAEAATR

SEQ ID NO: 63168 - protein, 380 aa, Unidentified
VRSKKLWIVASTALLISVAFSSSIASAAEEAKEKYLIGFNEQEAVSEFVEQVEANDEVAILSEEEEVEIELLHEFETIPVLSVELSPEDVDALELDPAISYIEEDAEVTTMAQSVPWGISRVQAPAAHNRRLTGSGVKVAVLDTGISTHPDLNIRGGASFVPGEPSTADGNGHGTHVAGTIAALNNSIGVLGVAPSAELYAVKVLGASGSGSVSSIAQGLEWAGNNGMHVANLSLGSPSPSATLEQAVNSATRRGVLVVAASGNSGAGSISYPARYANAMAVGATDQNNNRASFSQWGAGLDIVAPGVNVQSTYPGSTYASLNGTSMAAPHVAGAAALVKQKNPSWSNVQIRNHLKNTATSLGSTNLYGSGLVNAEAATR

SEQ ID NO: 63169 - protein, 380 aa, Unidentified
VRSKKLWIVASTALLISVAFSSSIASAAEEAKEKYLIGFNEQEAVSEFVEQVEANDEVAILSEEEEVEIELLHEFETIPVLSVELSPEDVDALELDPAISYIEEDAEVTTMAQSVPWGISRVQAPAAHNRGLWGSGVKVAVLDTGISTHPDLNIRGGASFVPGEPSTQDGNGHGTHVAGTIAALNNSIGVLGVAPSAELYAVKVLGASGSGSVSSIAQGLEWAGNNGMHVANLSLGSPSPSATLEQAVNSATSRGVLVVAASGNSGAGSISYPARYANAMAVGATDQNNNRASFSQYGFGLDIVAPGVNVQSTYPGSAYASLNGTSMATPHVAGAAACVKQKLPSWSNVQIRNHLKNTATSLGSTNLYGSGLVNAEAATR

SEQ ID NO: 63170 - protein, 380 aa, Unidentified
VRSKKLWIVASTALLISVAFSSSIASAAEEAKEKYLIGFNEQEAVSEFVEQVEANDEVAILSEEEEVEIELLHEFETIPVLSVELSPEDVDALELDPAISYIEEDAEVTTMAQSVPWGISRVQAPAAHNRGLTGSGVKVAVLDTGISTHPDLNIRGGASFVPGEPSTQDGNGHGTHVAGTIAALNNRIGVLGVAPSAELFAVKVLGASGSGSVSSIAQGLEWAGNNGMHFANLSLGSPSPSATLEQAVNSATSRGVLVVAASGNSGAGSISYPARYANAMAVGATDQNNNRASFSQYGAGLDIVAPGVNVQSTYPGSTYASLNGTSMATPHVAGAAACVKQKNPSWSNVQIRNHLKRTATSLGSTNLYGSGLVNAEAATR

SEQ ID NO: 63171 - protein, 380 aa, Unidentified
VRSKKLWIVASTALLISVAFSSSIASAAEEAKEKYLIGFNEQEAVSEFVEQVEANDEVAILSEEEEVEIELLHEFETIPVLSVELSPEDVDALELDPAISYIEEDAEVTTMAQSVPWGISRVQAPAAHNRKLTGSGVKVAVLDTGISTHPDLWIRGGASFVPGEPSTQDGNGHGTHVAGTIAALNNSIGVLGVAPSAELYAVKVLGASGSGSVSSIAQGLEWAGLNGMHVANLSLGSPSPSATLEQAVNSATSRGVLVVAASGNSGAGSISYPARYANAMAVGATDQNNNRADFSQYGAGLDIVAPGVNVQSTYPGSAYASLNGTSMATPHVAGAAALVKQKNPSWSNVQIRNHLKNTATSLGSTNLYGSGLVNAEAATR

SEQ ID NO: 63172 - protein, 380 aa, Unidentified
VRSKKLWIVASTALLISVAFSSSIASAAEEAKEKYLIGFNEQEAVSEFVEQVEANDEVAILSEEEEVEIELLHEFETIPVLSVELSPEDVDALELDPAISYIEEDAEVTTMAQSVPWGISRVQAPASHNRGLTGSGVKVAVLDTGISTHPDLNIRGGASFVPGEPSTQDGEGHGTHVAGTIAALNNSIGVLGVAPSAELYAVKVLGASGSGSVSSIAQGLEWAGNNGMHVANLSLGSPSPSATLEQAVNSATSRGVLVVAASGNSGEGSISYPARYANAMAVGATDQNNNHASFSQYGAGLDIVAPGVNVQSTYPGSTYASLNGTSMATPHVAGAAALVKQKNPSWSNVQIRNRLKNTATSLGSTNLYGSGLVNAEAATR

SEQ ID NO: 63173 - protein, 380 aa, Unidentified
VRSKKLWIVASTALLISVAFSSSIASAAEEAKEKYLIGFNEQEAVSEFVEQVEANDEVAILSEEEEVEIELLHEFETIPVLSVELSPEDVDALELDPAISYIEEDAEVTTMAQSVPWGISRVQAPAAHNRGLTGSGVKVAVLDTGISTHPDLNIRGGASFVPGEPSTQDGNGHGTHVAGTIAALNNSIGVLGVAPSAELYAVKVLGASGAGSVSSIAQGLEWAGNNGMHVANLSLGSPSPSATLEQAVNSATSRGVLVVAASGNSGEGSISYPARYANAMAVGATDQNNNHADFSQYGAGLDIVAPGVNVQSTYPGSTYASLNGTSMATPHVAGAAALVKQKNPSWSNVQIRNRLKNTATSLGSTNLYGSGLVNAEAATR

SEQ ID NO: 63174 - protein, 380 aa, Unidentified
VRSKKLWIVASTALLISVAFSSSIASAAEEAKEKYLIGFNEQEAVSEFVEQVEANDEVAILSEEEEVEIELLHEFETIPVLSVELSPEDVDALELDPAISYIEEDAEVTTMAQSVPWGISRVQAPAAHNRGLTGRGVKVAVLDSGISTHPDLNIRGGASFVPGEPSTQDGNGHGTHVAGTIAALNNSIGVLGVNSSAELYAVKVLGASGSGSVSSIAQGLEWAGNNGMHVANLSLGSPSPSATLEQAVNSATSRGVLVVAASGNSGAGSISYPARYANAMAVGATDQNNNRASFSQYGAGLDIVAPGVNVQSTYPGSTYASLNGTSMATPHVAGAAALVFQKNPSWSNVQIRNHLKNTATSLGSTNLYGSGLVNAEAATR

SEQ ID NO: 63175 - protein, 380 aa, Unidentified
VRSKKLWIVASTALLISVAFSSSIASAAEEAKEKYLIGFNEQEAVSEFVEQVEANDEVAILSEEEEVEIELLHEFETIPVLSVELSPEDVDALELDPAISYIEEDAEVTTMAQSVPWGISRVQAPAAHNRRLTGRGVKVAVLDTGISTHPDLRITGGASFVPGEPSTQDGNGHGTHVAGTIAALNNSIGVLGVAPSAELYAVKVLGASGSGSVSSIAQGLEWAGNNGMHVANLSLGSPSPSATLEQAVNSATSRGVLVVAASGNSGAGSISYPARYANAMAVGATDQNNNRASFSQYGAGLDIVAPGVNVQSTYPGSTYFSLNGTSMATPHVAGAAALVKQKNPSWSNVQIRNHLKNTATSLGSTNLYGSGLVNAEAATR

SEQ ID NO: 63176 - protein, 380 aa, Unidentified
VRSKKLWIVASTALLISVAFSSSIASAAEEAKEKYLIGFNEQEAVSEFVEQVEANDEVAILSEEEEVEIELLHEFETIPVLSVELSPEDVDALELDPAISYIEEDAEVTTMAQSVPWGISRVQAPAAHNRGLTGSGVKVAVLDTGISTHPDLNIRGGASFVPGEPSTQDGNGHGTHVAGTIAALNNSIGVLGVAPSAELYAVKVLGASGDGNVSSIAQGLEWAGLNGMHVANLSLGSPSPSATLEQAVNSATRRGVLVVAASGNSGAGSISYPARYANAMAVGATDQNNNRASFSQYGAGLDIVAPGVNVQSTYPGSTYDSLNGTSMATPHVAGAAALVKQKNPSWSNVQIRNHLKNTATSLGSTNLYGSGLVNAEAATR

SEQ ID NO: 63177 - protein, 380 aa, Unidentified
VRSKKLWIVASTALLISVAFSSSIASAAEEAKEKYLIGFNEQEAVSEFVEQVEANDEVAILSEEEEVEIELLHEFETIPVLSVELSPEDVDALELDPAISYIEEDAEVTTMAQSVPWGISRVQAPAAHNRGLTGSGFKVAVLDTGISTHPDLNIRGGASFVPGEPSTQDGNGHGTHVAGTIAALNNNIGVLGVAPSAELYAVKVLGASGSGSVSSIAQGLEWAGNNGMHVANLSLGSPSPSATLEQAVNSATSRGVLVVAASGNSGACSISYPARYANAMAVGATDQNNNKASFSQYGAGLDIVAPGVNVQSTYPGSTYASLNGTSMATPHVAGAAALVKQKNPSWSFVQIRNHLKNTATSLGSTNLYGSGLVNAEAATR

SEQ ID NO: 63178 - protein, 380 aa, Unidentified
VRSKKLWIVASTALLISVAFSSSIASAAEEAKEKYLIGFNEQEAVSEFVEQVEANDEVAILSEEEEVEIELLHEFETIPVLSVELSPEDVDALELDPAISYIEEDAEVTTMAQSVPWGISRVQAPAAHNRGLTGSGVKVAVLDTGISTHPDLNIRGGASFVPGEPSTQDGNGHGTHVAGTIAALDNSIGVLGVAPSAELYAVKVLGASGGGAISSIAQGLEWAGNNGMHVANLSLGSPSPSATLEQAVNSATSRGVLVVAASGNSGAGSISYPARYANAMAVGATDQNNNRASFSQYGAGLDIVAPGVNVQSTYPGSTYASLNGTSMATPHVAGAAALVKQKNPSWSNVQIRNRLKNTATSLGSTNLYGSGLVNAEAATR

SEQ ID NO: 63179 - protein, 380 aa, Unidentified
VRSKKLWIVASTALLISVAFSSSIASAAEEAKEKYLIGFNEQEAVSEFVEQVEANDEVAILSEEEEVEIELLHEFETIPVLSVELSPEDVDALELDPAISYIEEDAEVTTMAQSVPWGISRVQAPAAHNRGLTGRGVKVAVLDTGISTHPDLRIRGGASFVPGEPSTQDGNGHGTHVAGTIAALNNSIGVLGVAPSAELYAVKVLGASGAGSVSSIAQGLEWAGNNGMHVANLSLGSPSPSATLEQAVNSATSRGVLVVAASGNSGAGSISYPARYANAMAVGATDQNNNRASFSQYGAGLDIVAPGVNVQSTYPGSTYFSLNGTSMATPHVAGAAALVKQKNPSWSNVQIRNHLKNTATSLGSTNLYGSGLVRAEAATR

SEQ ID NO: 63180 - protein, 380 aa, Unidentified
VRSKKLWIVASTALLISVAFSSSIASAAEEAKEKYLIGFNEQEAVSEFVEQVEANDEVAILSEEEEVEIELLHEFETIPVLSVELSPEDVDALELDPAISYIEEDAEVTTMAQSVPWGISRVQAPAAHNRGLTGSGVKVAVLDTGISTHPDLNIRGGASFVPGEPSTQDGNGHGTHVAGTIAALNNSIGVLGVAPSAELFAVKVLGAFGAGSVTSIAQGLEWAGNNGMHVANLSLGSPSPSATLEQAVNSATSRGVLVVAASGNSGAGSISWPARYANAMAVGATDQNNNRASFSQYGAGLDIVAPGVNVQSTYPGSTYASLNGTSMATPHVAGAAALVKQKNPSWSNVQIRNHLKNTATSLGSTNLYGSGLVNAEAATR

SEQ ID NO: 63181 - protein, 380 aa, Unidentified
VRSKKLWIVASTALLISVAFSSSIASAAEEAKEKYLIGFNEQEAVSEFVEQVEANDEVAILSEEEEVEIELLHEFETIPVLSVELSPEDVDALELDPAISYIEEDAEVTTMAQSVPWGISRVQAPAAHNRGLTGRGVKVAVLDTGISTHPDLRIRGGASFVPGEPSTQDGNGHGTHVAGTIAALDNSIGVLGVAPSAELYAVKVLGASGSGSVSSIAQGLEWAGNNGMHVANLSLGSPSPSATLEQAVNSATSRGVLVVAASGNSGAGSISYPARYANAMAVGATDQNNNRASFSQYGAGLDIVAPGVNVQSTYPGSTYASLNGTSMATPHVAGEAALVKQKNPSWRNVQIRNHLKNTATSLGSTNLYGSGLVNAEAATR

SEQ ID NO: 63182 - protein, 380 aa, Unidentified
VRSKKLWIVASTALLISVAFSSSIASAAEEAKEKYLIGFNEQEAVSEFVEQVEANDEVAILSEEEEVEIELLHEFETIPVLSVELSPEDVDALELDPAISYIEEDAEVTTMAQSVPWGISRVQAPAAHRRGLTGSGVKVAVLDTGISTHPDLRIRGGASFVPGEPSTQDGNGHGTHVAGTIAALDNSIGVLGVAPSAELYAVKVLGASGSGSVSSIAQGLEWAGNNGMHVANLSLGSPSPSATLEQAVNSATSRGVLVVAASGNSGAGSISYPARYANAMAVGATDQNNNRASFSQYGAGLDIVAPGVNVQSTYPGSTYASLNGTSMATPHVAGEAALVKQKNPSWSNVQIRNRLKNTATSLGSTNLYGSGLVNAEAATR

SEQ ID NO: 63183 - protein, 380 aa, Unidentified
VRSKKLWIVASTALLISVAFSSSIASAAEEAKEKYLIGFNEQEAVSEFVEQVEANDEVAILSEEEEVEIELLHEFETIPVLSVELSPEDVDALELDPAISYIEEDAEVTTMAQSVPWGISRVQAPAAHNRGLTGSGVKVAVLDTGISTHPDLNIRGGASFVPGEPSTQDGNGHGTHVAGTIAALNNSIGVLGVAPSAELYAVKVLGASGSGSVSSIAQGLEWAGNNGMHVANLSLGNPSPSATLEQAVNSATSRGVLVVAASGNSGEGSISYPARYANAMAVGATDQNNNHADFSQYGAGLDIVAPGVNVQSTYPGSTYASLNGTSMATPHVAGAAALVKQKNPSWSNVQIRNHLKNTATSLGSTNLYGSGLVNAFAATR

SEQ ID NO: 63184 - protein, 380 aa, Unidentified
VRSKKLWIVASTALLISVAFSSSIASAAEEAKEKYLIGFNEQEAVSEFVEQVEANDEVAILSEEEEVEIELLHEFETIPVLSVELSPEDVDALELDPAISYIEEDAEVTTMAQSVPWGISRVQAPAAHNRGLTGRGVKVAVLDTGISTHPDLNIRGGASFVPGEPSTQDGNGHGTHVAGTIAALDNSIGVLGVAPSAELYAVKVLGASGGGSVSSIAQGLEWAGNNGMHVANLSLGSPSPSATLEQAVNSATSRGVLVVAASGNSGAGSISYPARYANAMAVGATDQNNNRASFSQYGAGLDIVAPGVNVQSTYPGSTYASLNGTSMATPHVAGAAVLVKQKNPSWSNVRIRNHLKNTATSLGSTNLYGSGLVNAEAATR

SEQ ID NO: 63185 - protein, 380 aa, Unidentified
VRSKKLWIVASTALLISVAFSSSIASAAEEAKEKYLIGFNEQEAVSEFVEQVEANDEVAILSEEEEVEIELLHEFETIPVLSVELSPEDVDALELDPAISYIEEDAEVTTMAQSVPWGISRVQAPAAHNRGLTGSGVKVAVLDTGISTHPDLNIRGGASFVPGEPSTQDGNGHGTHVAGTIAALNNSIGVLGVAPSAELYAVKVLGASGSGSVTSIAQGLEWAGNNGMHVANLSLGNPSPSATLEQAVNSATRRGVIVVAASGNSGAGSISYPARYANAMAVGATDQNNNRASFSQYGAGLDIVAPGVNVQSTYPGMTYASLNGTSMATPHVAGAAALVKQKNPSWSNVQIRNHLKNTATSLGSTNLYGSGLVNAEAATR

SEQ ID NO: 63186 - protein, 380 aa, Unidentified
VRSKKLWIVASTALLISVAFSSSIASAAEEAKEKYLIGFNEQEAVSEFVEQVEANDEVAILSEEEEVEIELLHEFETIPVLSVELSPEDVDALELDPAISYIEEDAEVTTMAQSVPWGISRVQAPAAHNRRLTASGVKVAVLDTGISTHPDLNIRGGASFVPGEPSTQDGNGHGTHVAGTIAALNNSIGVLGVAPSAELYAVKVLGASGSGSLSSIAQGLEWAGNNGMHVANLSLGSPSPSATLEQAVNSATSRGVLVVAASGNSGAGSISYPARYANAMAVGATDQNNNRASFSQWGAGLDIVAPGVNVQSTYPGSTYASLNGTSMATPHVAGAAACVKQKNPSWSNVQIRNHLKNTATSLGSTNLYGSGLVNAEAATR

SEQ ID NO: 63187 - protein, 380 aa, Unidentified
VRSKKLWIVASTALLISVAFSSSIASAAEEAKEKYLIGFNEQEAVSEFVEQVEANDEVAILSEEEEVEIELLHEFETIPVLSVELSPEDVDALELDPAISYIEEDAEVTTMAQSVPWGISRVQAPAAHRRGLTGRGVKVAVLDTGISTHPDLDIRGGASFVPGEPSTQDGNGHGTHVAGTIAALNNSIGVLGVAPSAELYAVKVLGASGSGSVSSIAQGLEWAGNNGMHVANLSLGSPSPSATLEQAVNSATSRGVLVVAASGNSGAGSISYPARYANAMAVGATDQNNNRASFSQYGAGLDIVAPGVNVQSTYPGSTYASLNGTSMATPHVAGEAALVKQKNPSWRNVQIRNHLKNTATSLGSTNLYGSGLVNAEAATR

SEQ ID NO: 63188 - protein, 380 aa, Unidentified
VRSKKLWIVASTALLISVAFSSSIASAAEEAKEKYLIGFNEQEAVSEFVEQVEANDEVAILSEEEEVEIELLHEFETIPVLSVELSPEDVDALELDPAISYIEEDAEVTTMAQSVPWGISRVQAPAAHNRGLTGSRVKVAVLDTGISTHPDLNIRGGASFVPGEPSTQDGNGHGTHVAGTIAALNNSIGVLGVAPSAELYAVKVLGASGSGNVSSIAQGLEWAGNNGMHVANLSLGSPSPSATLEQAVNSATSRGVLVVAASGNSGAGSISYPARYANAMAVGATDQNNNKASFSQYGFGLDIVAPGVNVQSTYPGSTYASLNGTSMAAPHVAGAAALVKQKNPSWSNVQIRNHLKNTATSLGSTNLYGSGLVNAEAATR

SEQ ID NO: 63189 - protein, 380 aa, Unidentified
VRSKKLWIVASTALLISVAFSSSIASAAEEAKEKYLIGFNEQEAVSEFVEQVEANDEVAILSEEEEVEIELLHEFETIPVLSVELSPEDVDALELDPAISYIEEDAEVTTMAQSVPWGISRVQAPAAHRRGLTGRGVKVAVLDTGISTHPDLNIRGGASFVPGEPSTQDGNGHGTHVAGTIAALDNSIGVLGVAPSAELYAVKVLGASGSGSVSSIAQGLEWAGNNGMHVANLSLGSPSPSATLEQAVNSATSRGVLVLAASGNSGAGSISYPARYANAMAVGATDQNNNRASFSQYGAGLDIVAPGVNVQSTYPGSTYASLNGTSMATPHVAGAAALVKQKNPSWSNVQIRNRLKNTATSLGSTNLYGSGLVNAEAATR

SEQ ID NO: 63190 - protein, 380 aa, Unidentified
VRSKKLWIVASTALLISVAFSSSIASAAEEAKEKYLIGFNEQEAVSEFVEQVEANDEVAILSEEEEVEIELLHEFETIPVLSVELSPEDVDALELDPAISYIEEDAEVTTMAQSVPWGISRVQAPAAHNRGLTGSGVKVAVLDTGISTHPDLNIRGGASFVPGEPSTQDGNGHGTHVAGTIAALNNSIGVLGVAPSAELYAVKVLGASGGGAISSIAQGLEWAGNNGMHVANLSLGSPSPSATLEQAVNSATSRGVLVVAASGNSGAGSISYPARYANAMAVGATDQNNNRASFSQYGAGLDIVAPGVNVQSTYPGSTYASLNGTSMATPHVAGAAVLVKQKNPSWSNVQIRNRLKNTATSLGSTNLYGSGLVNAEAATR

SEQ ID NO: 63191 - protein, 380 aa, Unidentified
VRSKKLWIVASTALLISVAFSSSIASAAEEAKEKYLIGFNEQEAVSEFVEQVEANDEVAILSEEEEVEIELLHEFETIPVLSVELSPEDVDALELDPAISYIEEDAEVTTMAQSVPWGIARVQAPAAHNRGLRGSGVKVAVLDTGISTHPDLNIRGGASFVPGEPSTQDGNGHGTHVAGTIAALNNRIGVLGVAPSAELYAVKVLGASGSGSVSSIAQGLEWAGNNGMHVANLSLGSPSPSATLEQAVNSATSRGVLVVAASGNSGAGSISYPARYANAMAVGATDQNNNRASFSQYGAGLDIVAPGVNVQSTYPGFTYASLNGTSMATPHVAGAAALVKQKNPSRSNVQIRNHLKNTATSLGSTNLYGSGLVNAEAATR

SEQ ID NO: 63192 - protein, 380 aa, Unidentified
VRSKKLWIVASTALLISVAFSSSIASAAEEAKEKYLIGFNEQEAVSEFVEQVEANDEVAILSEEEEVEIELLHEFETIPVLSVELSPEDVDALELDPAISYIEEDAEVTTMAQSVPWGISRVQAPAAHNRGLTASGVKVAVLDTGISTHPDLNIRGGASFVPGEPSTQDGNGHGTHVAGTIAALNNSIGVLGVAPSAELFAVKVLGASGAGSVSSIAQGLEWAGNNGMHVANLSLGSPSPSATLEQAVNSATSRGVLVVAASGNSGAGSISYPARYANAMAVGATDQNNNRASFSQYGAGLDLVAPGVNVQSTYPGSTYASLNGTSMATPHVAGAAALVKQKNPSWSNVQIRNHLKRTATSLGSTNLYGSGLVNAEAATR

SEQ ID NO: 63193 - protein, 380 aa, Unidentified
VRSKKLWIVASTALLISVAFSSSIASAAEEAKEKYLIGFNEQEAVSEFVEQVEANDEVAILSEEEEVEIELLHEFETIPVLSVELSPEDVDALELDPAISYIEEDAEVTTMAQSVPWGISRVQAPAAHNRGLTGSGVKVAVLDTGISTHPDLNIRGGASFVNGEPSTQDGNGHGTHVAGTIAALNNSIGVLGVAPSAELYAVKVLGASGSGNVSSIAQGLEWAGANGMHVANLSLGSPSPSATLEQAVNSATSRGVIVVAASGNSGAGSISYPARYANAMAVGATDQNNNRASFSQWGAGLDIVAPGVNVQSTYPGSTYASLNGTSMATPHVAGAAALVKQKNPSWSNVQIRNHLKNTATSLGSTNLYGSGLVNAEAATR

SEQ ID NO: 63194 - protein, 380 aa, Unidentified
VRSKKLWIVASTALLISVAFSSSIASAAEEAKEKYLIGFNEQEAVSEFVEQVEANDEVAILSEEEEVEIELLHEFETIPVLSVELSPEDVDALELDPAISYIEEDAEVTTMAQSVPWGISRVQAPAAHNRGLTASGVKVAVLDTGISTHPDLNIRGGASFVNGEPSTQDGNGHGTHVAGTIAALNNSIGVLGVAPSAELYAVKVLGASGSGSVSSIAQGLEWAGNNGMHVANLSLGSPSPSATLEQAVNSATRRGVLVVAASGNSGAGSISYPARYANAMAVGATDQNNNRASFSQWGAGLDIVAPGVNVQSTYPGSTYAFLNGTSMATPHVAGAAALVKQKNPSWSNVQIRNHLKNTATSLGSTNLYGSGLVNAEAATR

SEQ ID NO: 63195 - protein, 380 aa, Unidentified
VRSKKLWIVASTALLISVAFSSSIASAAEEAKEKYLIGFNEQEAVSEFVEQVEANDEVAILSEEEEVEIELLHEFETIPVLSVELSPEDVDALELDPAISYIEEDAEVTTMAQSVPWGISRVQAPAAHNRGLTGRGVKVAVLDTGISTHPDLNIRGGASFVPGEPSTQDGNGHGTHVAGTIAALNNRIGVLGVAPSAELYAVKVLGASGSGSLSSIAQGLEWAGANGMHVANLSLGSPSPSATLEQAVNSATSRGVLVVAASGNSGAGSISYPARYANAMAVGATDQDNNRASFSQYGAGLDIVAPGVNVQSTYPGSTYASLNGTSMATPHVAGAAALVKQKNPSWSNVQIRNHLKNTATSLGSTNLYGSGLVNAEAATR

SEQ ID NO: 63196 - protein, 380 aa, Unidentified
VRSKKLWIVASTALLISVAFSSSIASAAEEAKEKYLIGFNEQEAVSEFVEQVEANDEVAILSEEEEVEIELLHEFETIPVLSVELSPEDVDALELDPAISYIEEDAEVTTMAQSVPWGISRVQAPAAHNRGLTGSGVKVAVLDTGISTHPDLWIRGGASFVPGEPSTQDGNGHGTHVAGTIAALNNSIGVLGVAPSAELYAVKVLGASGSGSVTSIAQGLEWAGNNGMHVANLSLGSPSPSATLEQAVNSATSRGVLVVAASGNSGAGSISYPARYANAMAVGATDQNNNRASFSQYGAGLDIVAPGVNVQSTYPGSAYDFLNGTSMATPHVAGAAALVKQKNPSWSNVQIRNHLKNTATSLGSTNLYGSGLVNAEAATR

SEQ ID NO: 63197 - protein, 380 aa, Unidentified
VRSKKLWIVASTALLISVAFSSSIASAAEEAKEKYLIGFNEQEAVSEFVEQVEANDEVAILSEEEEVEIELLHEFETIPVLSVELSPEDVDALELDPAISYIEEDAEVTTMAQSVPWGISRVQAPAAHNRGLTGRGVKVAVLDTGISTHPDLNIRGGASFVPGEPSTQDGNGHGTHVAGTIAALDNSIGVLGVAPSAELYAVKVLGASGGGAVSSIAQGLEWAGNNGMHVANLSLGSPSPSATLEQAVNSATSRGVLVVAASGNSGAGSISYPARYANAMAVGATDQNNNRASFSQYGAGLDIVAPGVNVQSTYPGSTYASLNGTSMATPHVAGAAVLVKQKNPSWSNVQIRNHLKNTATSLGSTNLYGSGLVNAEAATR

SEQ ID NO: 63198 - protein, 380 aa, Unidentified
VRSKKLWIVASTALLISVAFSSSIASAAEEAKEKYLIGFNEQEAVSEFVEQVEANDEVAILSEEEEVEIELLHEFETIPVLSVELSPEDVDALELDPAISYIEEDAEVTTMAQSVPWGISRVQAPAAHNRRLTGSGVKVAVLDTGISTHPDLNIRGGASFVPGEPSTQDGNGHGTHVAGTIAALNNSIGVLGVAPSAELYAVKVLGASGAGSISSIAQGLEWAGNNGMHVANLSLGSPSPSATLEQAVNSATSRGVLVVAASGNSGAGSISYPARYANAMAVGATDQNNNRASFSQYGAGLDIVAPGVNVQSTYPGSTYASLNGTSMATPHVAGAAVLVKQKNPSWSNVRIRNHLKNTATSLGSTNLYGSGLVNAEAATR

SEQ ID NO: 63199 - protein, 380 aa, Unidentified
VRSKKLWIVASTALLISVAFSSSIASAAEEAKEKYLIGFNEQEAVSEFVEQVEANDEVAILSEEEEVEIELLHEFETIPVLSVELSPEDVDALELDPAISYIEEDAEVTTMAQSVPWGISRVQAPAAHNRGLAGSGVKVAVLDTGISTHPDLNIRGGASFVPGEPSTQDGNGHGTHVAGTIAALNNSIGVLGVAPSAELYAVKVLGASGAGSVSSIAQGLEWAGNNGMHVANLSLGSPSPSATLEQAVNSATSRGVLVVAASGNSGEGSISYPARYANAMAVGATDQNNNHASFSQYGAGLDIVAPGVNVQSTYPGSTYASLNGTSMATPHVAGAAALVKQKNPSWSNVQIRNRLKNTATSLGSTNLYGSGLVNAEAATR

SEQ ID NO: 63200 - protein, 380 aa, Unidentified
VRSKKLWIVASTALLISVAFSSSIASAAEEAKEKYLIGFNEQEAVSEFVEQVEANDEVAILSEEEEVEIELLHEFETIPVLSVELSPEDVDALELDPAISYIEEDAEVTTMAQSVPWGISRVQAPAAHRRGLTGRGVKVAVLDTGISTHPDLDIRGGASFVPGEPSTQDGNGHGTHVAGTIAALDNSIGVLGVAPSAELYAVKVLGASGSGSVSSIAQGLEWAGNNGMHVANLSLGSPSPSATLEQAVNSATSRGVLVVAASGNSGAGSISYPARYANAMAVGATDQNNNRASFSQYGAGLDIVAPGVNVQSTYPGSTYASLNGTSMATPHVAGAAALVKQKNPSWSNVQIRNRLKNTATSLGSTNLYGSGLVNAEAATR

SEQ ID NO: 63201 - protein, 380 aa, Unidentified
VRSKKLWIVASTALLISVAFSSSIASAAEEAKEKYLIGFNEQEAVSEFVEQVEANDEVAILSEEEEVEIELLHEFETIPVLSVELSPEDVDALELDPAISYIEEDAEVTTMAQSVPWGISRVQAPAAHNRRLTGSGVKVAVLDTGISTHPDLNIRGGASFVPGEPSTQDGNGHGTHVAGTIAALNNSIGVLGVAPSAELYAVKVLGASGGGSISSIAQGLEWAGNNGMHVANLSLGSPSPSATLEQAVNSATSRGVLVVAASGNSGAGSISYPARYANAMAVGATDQNNNRASFSQYGAGLDIVAPGVNVQSTYPGSTYASLNGTSMATPHVAGAAVLVKQKNPSWSNVRIRNHLKNTATSLGSTNLYGSGLVNAEAATR

SEQ ID NO: 63202 - protein, 380 aa, Unidentified
VRSKKLWIVASTALLISVAFSSSIASAAEEAKEKYLIGFNEQEAVSEFVEQVEANDEVAILSEEEEVEIELLHEFETIPVLSVELSPEDVDALELDPAISYIEEDAEVTTMAQSVPWGISRVQAPAAHNRGLTAFGVKVAVLDTGISTHPDLNIRGGASFVPGEPSTQDGEGHGTHVAGTIAALNNSIGVLGVAPSAELYAVKVLGASGSGSVSSIAQGLEWAGLNRMHVANLSLGSPSPSATLEQAVNSATSRGVLVVAASGNSGAGSISYPARYANAMAVGATDQNNNRASFSQYGAGLDIVAPGVNVQSTYPGSTYASLNGTSMATPHVAGAAALVKQKNPSWSNVQIRNHLKNTATSLGSTNLYGSGLVNAEAATR

SEQ ID NO: 63203 - protein, 380 aa, Unidentified
VRSKKLWIVASTALLISVAFSSSIASAAEEAKEKYLIGFNEQEAVSEFVEQVEANDEVAILSEEEEVEIELLHEFETIPVLSVELSPEDVDALELDPAISYIEEDAEVTTMAQSVPWGISRVQAPAAHNRGLTGSGVKVAVLDTGISTHPDLNIRRGASFVPGEPSTQDGNGHGTHVAGTIAALNNSIGVLGVAPSAILYAVKVLGAFGSGSVSSIAQGLEWAGNNGMHVANLSLGSPSPSATLEQAVNSATSRGVLVVAASGNSGAGSISYPARYANAMAVGATDQNNNKASFSQYGAGLDIVAPGVNVQSTYPGMTYASLNGTSMATPHVAGAAALVKQKNPSWSNVQIRNHLKNTATSLGSTNLYGSGLVNAEAATR

SEQ ID NO: 63204 - protein, 380 aa, Unidentified
VRSKKLWIVASTALLISVAFSSSIASAAEEAKEKYLIGFNEQEAVSEFVEQVEANDEVAILSEEEEVEIELLHEFETIPVLSVELSPEDVDALELDPAISYIEEDAEVTTMAQSRPWGISRVQAPAAHNRRLTGRGVKVAVLDTGISTHPDLRIRGGASFVPGEPSTQDGNGHGTHVAGTIAALNNSIGVLGVAPSAELYAVKVLGASGSGSVSSIAQGLEWAGNNGMHVANLSLGSPSPSATLEQAVNSATSRGVLVVAASGNSGAGSISYPARYANAMAVGATDQNNNRASFSQYGAGLDIVAPGVNVQSTYPGSTYASLNGTSMATPHVAGAAALVKQKNPSWRNVQIRNHLKNTATSLGSTNLYGSGLVNAEAATR

SEQ ID NO: 63205 - protein, 380 aa, Unidentified
VRSKKLWIVASTALLISVAFSSSIASAAEEAKEKYLIGFNEQEAVSEFVEQVEANDEVAILSEEEEVEIELLHEFETIPVLSVELSPEDVDALELDPAISYIEEDAEVTTMAQSVPWGISRVQAPAAHNRRLTGRGVKVAVLDTGISTHPDLRITGGASFVPGEPSTQDGNGHGTHVAGTIAALNNSIGVLGVAPSAELYAVKVLGASGSGSVSSIAQGLEWAGNNGMHVANLSLGSPSPSATLEQAVNSATSRGVLVVAASGNSGAGSISYPARYANAMAVGATDQNNNRASFSQYGAGLDIVAPGVNVQSTYPGSTYASLNGTSMATPHVAGAAALVKQKNPSWSNVQIRNRLKNTATSLGSTNLYGSGLVNAEAATR

SEQ ID NO: 63206 - protein, 380 aa, Unidentified
VRSKKLWIVASTALLISVAFSSSIASAAEEAKEKYLIGFNEQEAVSEFVEQVEANDEVAILSEEEEVEIELLHEFETIPVLSVELSPEDVDALELDPAISYIEEDAEVTTMAQSVPWGISRVQAPAAHNRRLTGRGVKVAVLDTGISTHPDLNIRGGASFVPGEPSTQDGNGHGTHVAGTIAALNNSIGVLGVAPSAELYAVKVLGASGSGSVSSIAQGLEWAGANGMHVANLSLGSPSPSATLEQAVNSATSRGVLVVAASGNSGAGSISYPARYANAMAVGATDQNNNRASFSQYGAGLDIVAPGVNVQSTYPGSAYFSLNGTSMATPHVAGAAALVKQKNPSWSNVQIRNHLKNTATSLGSTNLYGSGLVNAEAATR

SEQ ID NO: 63207 - protein, 380 aa, Unidentified
VRSKKLWIVASTALLISVAFSSSIASAAEEAKEKYLIGFNEQEAVSEFVEQVEANDEVAILSEEEEVEIELLHEFETIPVLSVELSPEDVDALELDPAISYIEEDAEVTTMAQSVPWGISRVQAPAAHRRGLTGRGVKVAVLDTGISTHPDLNITGGASFVPGEPSTQDGNGHGTHVAGTIAALNNSIGVLGVAPSAELYAVKVLGASGSGSVSSIAQGLEWAGNNGMHVANLSLGSPSPSATLEQAVNSATSRGVLVVAASGNSGAGSISYPARYANAMAVGATDQNNNRASFSQYGAGLDIVAPGVNVQSTYPGSTYASLNGTSMATPHVAGEAALVKQKNPSWRNVQIRNHLKNTATSLGSTNLYGSGLVNAEAATR

SEQ ID NO: 63208 - protein, 380 aa, Unidentified
VRSKKLWIVASTALLISVAFSSSIASAAEEAKEKYLIGFNEQEAVSEFVEQVEANDEVAILSEEEEVEIELLHEFETIPVLSVELSPEDVDALELDPAISYIEEDAEVTTMAQSVPWGISRVQAPAAHNRGLTGSGVKVAVLDTGISTHPDLNIRGGASFVPGEPSTQDGNGHGTHVAGTIAALNNSIGVLGVAPSAELYAVKVLGASGAGSVSSIAQGLEWAGNNGMHVANLSLGNPSPSATLEQAVNSATSRGVLVVAASGNSGEGSISYPARYANAMAVGATDQNNNHASFSQYGAGLDIVAPGVNVQSTYPGSTYASLNGTSMATPHVAGAAALVKQKNPSWSNVQIRNHLKNTATSLGSTNLYGSGLVNAFAATR

SEQ ID NO: 63209 - protein, 380 aa, Unidentified
VRSKKLWIVASTALLISVAFSSSIASAAEEAKEKYLIGFNEQEAVSEFVEQVEANDEVAILSEEEEVEIELLHEFETIPVLSVELSPEDVDALELDPAISYIEEDAEVTTMAQSVPWGISRVQAPAAHRRGLTGRGVKVAVLDTGISTHPDLNIRGGASFVPGEPSTQDGNGHGTHVAGTIAALDNSIGVLGVAPDAELYAVKVLGASGSGSVSSIAQGLEWAGNNGMHVANLSLGSPSPSATLEQAVNSATSRGVLVVAASGNSGAGSISYPARYANAMAVGATDQNNNRASFSQYGAGLDIVAPGVNVQSTYPGSTYASLNGTSMATPHVAGAAALVKQKNPSWSNVQIRNRLKNTATSLGSTNLYGSGLVNAEAATR

SEQ ID NO: 63210 - protein, 380 aa, Unidentified
VRSKKLWIVASTALLISVAFSSSIASAAEEAKEKYLIGFNEQEAVSEFVEQVEANDEVAILSEEEEVEIELLHEFETIPVLSVELSPEDVDALELDPAISYIEEDAEVTTMAQSVPWGISRVQAPAAHRRGLTGSGVKVAVLDTGISTHPDLNIRGGASFVPGEPSTQDGNGHGTHVAGTIAALNNSIGVLGVAPSAELYAVKVLGASGGGSISSIAQGLEWAGNNGMHVANLSLGSPSPSATLEQAVNSATSRGVLVVAASGNSGAGSISYPARYANAMAVGATDQNNNRASFSQYGAGLDIVAPGVNVQSTYPGSTYASLNGTSMATPHVAGAAVLVKQKNPSWSNVQIRNRLKNTATSLGSTNLYGSGLVNAEAATR

SEQ ID NO: 63211 - protein, 380 aa, Unidentified
VRSKKLWIVASTALLISVAFSSSIASAAEEAKEKYLIGFNEQEAVSEFVEQVEANDEVAILSEEEEVEIELLHEFETIPVLSVELSPEDVDALELDPAISYIEEDAEVTTMAQSVPWGISRVQAPAAHNRGLTGSGVKVAVLDTGISTHPDLNIRGGASFVPGEPSRQDGNGHGTHVAGTIAALNNSIGVLGVAPSAELYAVKVLGAFGSGSVTSIAQGLEWAGNNGMHVANLSLGSPSPSATLEQAVNSATSRGVLVVAASGNSGAGSISYPARYANAMAVGATDQNNNRASFSQYGAGLDLVAPGVNVQSTYPGSAYASLNGTSMATPHVAGAAALVKQKNPSWSNVQIRNHLKNTATSLGSTNLYGSGLVNAEAATR

SEQ ID NO: 63212 - protein, 380 aa, Unidentified
VRSKKLWIVASTALLISVAFSSSIASAAEEAKEKYLIGFNEQEAVSEFVEQVEANDEVAILSEEEEVEIELLHEFETIPVLSVELSPEDVDALELDPAISYIEEDAEVTTMAQSVPWGISRVQAPAAHNRGLTGSGVKVAVLDTGISTHPDLNIRGGASFVNGEPSTQDGNGHGTHVAGTIAALNNSIGVLGVAPSAELYAVKVLGASGSGSLSSIAQGLEWAGNNGMHVANLSLGSPSPSATLEQAVNSATSRGVLVVAASGNSGAGSISYPARYANAMAVGATDQDNNRASFSQYGAGLDIVAPGVNVQSTYPGSTYAFLNGTSMATPHVAGAAALVKQKNPSWSNVQIRNRLKNTATSLGSTNLYGSGLVNAEAATR

SEQ ID NO: 63213 - protein, 380 aa, Unidentified
VRSKKLWIVASTALLISVAFSSSIASAAEEAKEKYLIGFNEQEAVSEFVEQVEANDEVAILSEEEEVEIELLHEFETIPVLSVELSPEDVDALELDPAISYIEEDAEVTTMAQSVPWGISRVQAPAAHNRGLTGSGVKVAVLDTGISTHPDLNIRGGASFVPGEPSTQDGNGHGTHVAGTIAALNNSIGVLGVAPSAELYAVKVLGASGAGSVSSIAQGLEWAGNNGMHVANLSLGNESPSATLEQAVNSATSRGVLVVAASGNSGAGSISYPARYANAMAVGATDQNNNHASFSQYGAGLDIVAPGVNVQSTYPGSTYASLNGTSMATPHVAGAAALVKQKNPSWSNVQIRNRLKNTATSLGSTNLYGSGLVNAEAATR

SEQ ID NO: 63214 - protein, 380 aa, Unidentified
VRSKKLWIVASTALLISVAFSSSIASAAEEAKEKYLIGFNEQEAVSEFVEQVEANDEVAILSEEEEVEIELLHEFETIPVLSVELSPEDVDALELDPAISYIEEDAEVTTMAQSVPWGISRVQAPAAHNRGLTGSGVKVAVLDTGISTHPDLNIRGGASFVNGEPSTQDGNGHGTHVAGTIAALNNRIGVLGVAPSAELYAVKVLGASGSGNVSSIAQGLEWAGNNGMHVANLSLGSPSPSATLEQAVNSATSRGVIVVAASGNSGAGSISYPARYANAMAVGATDQNNNRASFSQYGAGLDIVAPGVNVQSTYPGSAYASLNGTSMATPHVAGAAALVKQKNPSWSNVQIRNHLKNTATSLGSTNLYGSGLVNAEAATR

SEQ ID NO: 63215 - protein, 380 aa, Unidentified
VRSKKLWIVASTALLISVAFSSSIASAAEEAKEKYLIGFNEQEAVSEFVEQVEANDEVAILSEEEEVEIELLHEFETIPVLSVELSPEDVDALELDPAISYIEEDAEVTTMAQSVPWGISRVQAPASHNRGLAGSGVKVAVLDTGISTHPDLNIRGGASFVPGEPSTQDGNGHGTHVAGTIAALNNSIGVLGVAPSAELYAVKVLGASGSGSVSSIAQGLEWAGNNGMHVANLSLGSPSPSATLEQAVNSATSRGVLVVAASGNSGEGSISYPARYANAMAVGATDQNNNHASFSQYGAGLDIVAPGVNVQSTYPGSTYASLNGTSMATPHVAGAAALVKQKNPSWSNVQIRNHLKNTATSLGSTNLYGSGLVNAFAATR

SEQ ID NO: 63216 - protein, 380 aa, Unidentified
VRSKKLWIVASTALLISVAFSSSIASAAEEAKEKYLIGFNEQEAVSEFVEQVEANDEVAILSEEEEVEIELLHEFETIPVLSVELSPEDVDALELDPAISYIEEDAEVTTMAQSVPWGISRVQAPAAHRRGLTGRGVKVAVLDTGISTHPDLNIRGGASFVPGEPSTQDGNGHGTHVAGTIAALDNSIGVLGVAPSAELYAVKVLGASGSGSISSIAQGLEWAGNNGMHVANLSLGSPSPSATLEQAVNSATSRGVLVVAASGNSGAGSISYPARYANAMAVGATDQNNNRASFSQYGAGLDIVAPGVNVQSTYPGSTYASLNGTSMATPHVAGAAALVKQKNPSWSNVQIRNRLKNTATSLGSTNLYGSGLVNAEAATR

SEQ ID NO: 63217 - protein, 380 aa, Unidentified
VRSKKLWIVASTALLISVAFSSSIASAAEEAKEKYLIGFNEQEAVSEFVEQVEANDEVAILSEEEEVEIELLHEFETIPVLSVELSPEDVDALELDPAISYIEEDAEVTTMAQSVPWGISRVQAPAAHNRGLTGSGVKVAVLDTGISTHPDLNIRGGASFVPGEPSTQDGNGHGTHVAGTIAALNNSIGVLGVAPSAELYAVKVLGASGSGSLSSIAQGLEWAGNNGMHVANLSLGNPSPSATLEQAVNSATSRGVLVVAASGNSGEGSISYPARYANAMAVGATDQNNNHASFSQYGAGLDIVAPGVNVQSTYPGSTYASLNGTSMATPHVAGAAALVKQKNPSWSNVQIRNHLKNTATSLGSTNLYGSGLVNAFAATR

SEQ ID NO: 63218 - protein, 380 aa, Unidentified
VRSKKLWIVASTALLISVAFSSSIASAAEEAKEKYLIGFNEQEAVSEFVEQVEANDEVAILSEEEEVEIELLHEFETIPVLSVELSPEDVDALELDPAISYIEEDAEVTTMAQSVPWGISRVQAPAAHNRGLTGSGVKVAVLDTGISTHPDLNIRGGASFVPGEPSTQDGNGHGTHVAGTIAALNNSIGVLGVAPSAELYAVKVLGASGSGSLSSIAQGLEWAGNNGMHVANLSLGNPSPSATLEQAVNSATSRGVLVVAASGNSGEGSISYPARYANAMAVGATDQNNNHASFSQYGAGLDIVAPGVNVQSTYPGSTYASLNGTSMATPHVAGAAALVKQKNPSWSNVQIRNRLKNTATSLGSTNLYGSGLVNAEAATR

SEQ ID NO: 63219 - protein, 380 aa, Unidentified
VRSKKLWIVASTALLISVAFSSSIASAAEEAKEKYLIGFNEQEAVSEFVEQVEANDEVAILSEEEEVEIELLHEFETIPVLSVELSPEDVDALELDPAISYIEEDAEVTTMAQSVPWGISRVQAPAAHNRGLLGSGVKVAVLDTGISFHPDLNIRGGASFVPGEPSTQDGNGHGTHVAGTIAALNNSIGVLGVAPSAELYAVKVLGASGSGSVSSIAQGLEWAGNNGMHFANLSLGSPSPSATLEQAVNSATSRGVLVVAASGNSGAGDISYPARYANAMAVGATDQNNNRASFSQYGAGLDIVAPGVNVQSTYPGSTYASLNGTSMATPHVAGAAALVKQKNPSWSNVQIRNHLKNTATSLGSTNLYGSGLVNAEFATR

SEQ ID NO: 63220 - protein, 380 aa, Unidentified
VRSKKLWIVASTALLISVAFSSSIASAAEEAKEKYLIGFNEQEAVSEFVEQVEANDEVAILSEEEEVEIELLHEFETIPVLSVELSPEDVDALELDPAISYIEEDAEVTTMAQSVPWGISRVQAPAAHNRRLTGSGVKVAVLDTGISTHPDLNIRGGASFVPGEPSTQDGQGHGTHVAGTIAALNNSIGVLGVAPSAILYAVKVLGASGSGSVSSIAQGLEWAGNNGMHVANLSLGSPSPSATLEQAVNSATSRGVLVVAASGNSGAGSISYPARYANAMAVGATDQNNNKASFSQYGAGLDIVAPGVNVQSTYPGMTYASLNGTSMATPHVAGAAALVKQKNPSWSNVQIRNHLKNTATSLGSTNLYGSGLVNAEAATR

SEQ ID NO: 63221 - protein, 380 aa, Unidentified
VRSKKLWIVASTALLISVAFSSSIASAAEEAKEKYLIGFNEQEAVSEFVEQVEANDEVAILSEEEEVEIELLHEFETIPVLSVELSPEDVDALELDPAISYIEEDAEVTTMAQSVPWGISRVQAPAAHRRRLTGRGVKVAVLDTGISTHPDLRIRGGASFVPGEPSTQDGNGHGTHVAGTIAALDNSIGVLGVAPSAELYAVKVLGASGSGSVSSIAQGLEWAGNNGMHVANLSLGSPSPSATLEQAVNSATSRGVLVVAASGNSGAGSISYPARYANAMAVGATDQNNNRASFSQYGAGLDIVAPGVNVQSTYPGSTYASLNGTSMATPHVAGAAALVKQKNPSWSNVQIRNHLKNTATSLGSTNLYGSGLVNAEAATR

SEQ ID NO: 63222 - protein, 380 aa, Unidentified
VRSKKLWIVASTALLISVAFSSSIASAAEEAKEKYLIGFNEQEAVSEFVEQVEANDEVAILSEEEEVEIELLHEFETIPVLSVELSPEDVDALELDPAISYIEEDAEVTTMAQSVPWGISRVQAPAAHNRGLTGSGVKVAVLDTGISTHPDLNIRGGASFVPGEPSTQDGEGHGTHVAGTIAALNNSIGVLGVAPSAELYAVKVLGASGAGSVSSIAQGLEWAGNNGMHVANLSLGSPSPSATLEQAVNSATSRGVLVVAASGNSGAGSISYPARYANAMAVGATDQNNNHASFSQYGAGLDIVAPGVNVQSTYPGSTYASLNGTSMATPHVAGAAALVKQKNPSWSNVQIRNRLKNTATSLGSTNLYGSGLVNAFAATR

SEQ ID NO: 63223 - protein, 380 aa, Unidentified
VRSKKLWIVASTALLISVAFSSSIASAAEEAKEKYLIGFNEQEAVSEFVEQVEANDEVAILSEEEEVEIELLHEFETIPVLSVELSPEDVDALELDPAISYIEEDAEVTTMAQSVPWGISRVQAPAAHNRGLTGSGVKVAVLDTGISTHPDLNIRGGASFVPGEPSTQDGEGHGTHVAGTIAALNNSIGVLGVAPSAELYAVKVLGASGAGSVSSIAQGLEWAGNNGMHVANLSLGSPSPSATLEQAVNSATSRGVLVVAASGNSGAGSISYPARYANAMAVGATDQNNNHADFSQYGAGLDIVAPGVNVQSTYPGSTYASLNGTSMATPHVAGAAALVKQKNPSWSNVQIRNRLKNTATSLGSTNLYGSGLVNAEAATR

SEQ ID NO: 63224 - protein, 380 aa, Unidentified
VRSKKLWIVASTALLISVAFSSSIASAAEEAKEKYLIGFNEQEAVSEFVEQVEANDEVAILSEEEEVEIELLHEFETIPVLSVELSPEDVDALELDPAISYIEEDAEVTTMAQSVPWGISRVQAPAAHNRGLTASGVKVAVLDTGISTHPDLNIRGGASFVPGEPSTQDGNGHGTHVAGTIAALNNSIGVLGVAPSAELFAVKVLGASGSGSVSSIAQGLEWAGNNGMHFANLSLGSPSPSATLEQAVNSATSRGVLVVAASGNSGAGSISYPARYANAMAVGATDQNNNRASFSQWGAGLDIVAPGVNVQSTYPGSTYASLNGTSMATPHVAGAAALVKNKNPSWSNVQIRNHLKNTATSLGSTNLYGSGLVNAEAATR

SEQ ID NO: 63225 - protein, 380 aa, Unidentified
VRSKKLWIVASTALLISVAFSSSIASAAEEAKEKYLIGFNEQEAVSEFVEQVEANDEVAILSEEEEVEIELLHEFETIPVLSVELSPEDVDALELDPAISYIEEDAEVTTMAQSVPWGISRVQAPAAHNRGLTGFGVKVAVLDTGISTHPDLNIRGGASFVPGEPSTQDGNGHGTHVAGTIAALNNSIGVLGVAPSAELYAVKVLGASGSGSVSSIAQGLEWAGNNRMHVANLSLGSESPSATLEQAVNSATSRGVLVVAASGNSGAGSISYPARYANAMAVGATDQNNNKASFSQYGAGLDIVAPGVNVQSTYPGSAYASLNGTSMATPHVAGAAALVKQKNPSWSNVQIRNHLKNTATSLGSTNLYGSGLVNAEAATR

SEQ ID NO: 63226 - protein, 380 aa, Unidentified
VRSKKLWIVASTALLISVAFSSSIASAAEEAKEKYLIGFNEQEAVSEFVEQVEANDEVAILSEEEEVEIELLHEFETIPVLSVELSPEDVDALELDPAISYIEEDAEVTTMAQSVPWGISRVQAPAAHNRGLTGSGVRVAVLDTGISTHPDLNIRGGASFVPGEPSTQDGNGHGTHVAGTIAALNNSIGVLGVAPSAELYAVKVLGASGDGNVTSIAQGLEWAGNNGMHVANLSLGSPSPSATLEQAVNSATSRGVLVVAASGNSGAGSISYPARYANAMAVGATDQNNNRASFSQYGAGLDIVAPGVNVQSTYPGSTYASLNGTSMATPHVAGAAALVKQKNPSWSNVQIRNHLKNTATSLGSTNLYGSGLVNAEFATR

SEQ ID NO: 63227 - protein, 380 aa, Unidentified
VRSKKLWIVASTALLISVAFSSSIASAAEEAKEKYLIGFNEQEAVSEFVEQVEANDEVAILSEEEEVEIELLHEFETIPVLSVELSPEDVDALELDPAISYIEEDAEVTTMAQSVPWGISRVQAPAAHRRGLTGRGVKVAVLDTGISTHPDLNIRGGASFVPGEPSTQDGNGHGTHVAGTIAALDNSIGVLGVAPSAELYAVKVLGASGSGSVSSIAQGLEWAGNNGMHVANLSLGSPSPSATLEQAVNSATSRGVLVVAASGNSGAGSISYPARYANAMAVGATDQNNNRASFSQYGAGLDIVAPGVNVQSTYPGSAYASLNGTSMATPHVAGAAALVKQKNPSWSNVQIRNRLKNTATSLGSTNLYGSGLVNAEAATR

SEQ ID NO: 63228 - protein, 380 aa, Unidentified
VRSKKLWIVASTALLISVAFSSSIASAAEEAKEKYLIGFNEQEAVSEFVEQVEANDEVAILSEEEEVEIELLHEFETIPVLSVELSPEDVDALELDPAISYIEEDAEVTTMAQSVPWGISRVQAPAAHNRGLTGSGVKVAVLDTGISTHPDLNIRGGASFVPGEPSTQDGNGHGTHVAGTIAALNNSIGVLGVAPSAELYAVKVLGASGAGSLSSIAQGLEWAGNNGMHVANLSLGSPSPSATLEQAVNSATSRGVLVVAASGNSGEGSISYPARYANAMAVGATDQNNNHASFSQYGAGLDIVAPGVNVQSTYPGSTYASLNGTSMATPHVAGAAALVKQKNPSWSNVQIRNRLKNTATSLGSTNLYGSGLVNAEAATR

SEQ ID NO: 63229 - protein, 380 aa, Unidentified
VRSKKLWIVASTALLISVAFSSSIASAAEEAKEKYLIGFNEQEAVSEFVEQVEANDEVAILSEEEEVEIELLHEFETIPVLSVELSPEDVDALELDPAISYIEEDAEVTTMAQSVPWGISRVQAPAAHNRGLTGSGVKVAVLDTGISTHPDLNIRGGASFVPGEPSTQDGNGHGTHVAGTIAALNNSIGVLGVAPSAELYAVKVLGASGAGSVSSIAQGLEWAGNNGMEVANLSLGSPSPSATLEQAVNSATSRGVLVVAASGNSGAGSISYPARYANAMAVGATDQNNNRASFSQWGAGLDIVAPGVNVQSTYPGSTYFSLNGTSMAAPHVAGAAALVKQKNPSWSNVQIRNHLKNTATSLGSTNLYGSGLVNAEAATR

SEQ ID NO: 63230 - protein, 380 aa, Unidentified
VRSKKLWIVASTALLISVAFSSSIASAAEEAKEKYLIGFNEQEAVSEFVEQVEANDEVAILSEEEEVEIELLHEFETIPVLSVELSPEDVDALELDPAISYIEEDAEVTTMAQSVPWGISRVQAPAAHNRRLTGRGVKVAVLDTGISTHPDLRITGGASFVPGEPSTQDGNGHGTHVAGTIAALNNSIGVLGVAPSAELYAVKVLGASGSGSVSSIAQGLEWAGANGMHVANLSLGSPSPSATLEQAVNSATSRGVLVVAASGNSGAGSISYPARYANAMAVGATDQNNNRASFSQYGAGLDIVAPGVNVQSTYPGSTYASLNGTSMATPHVAGAAALVKQKNPSWSNVQIRNHLKNTATSLGSTNLYGSGLVNAEAATR

SEQ ID NO: 63231 - protein, 380 aa, Unidentified
VRSKKLWIVASTALLISVAFSSSIASAAEEAKEKYLIGFNEQEAVSEFVEQVEANDEVAILSEEEEVEIELLHEFETIPVLSVELSPEDVDALELDPAISYIEEDAEVTTMAQSVPWGISRVQAPAAHRRGLTGSGVKVAVLDTGISTHPDLDIRGGASFVPGEPSTQDGNGHGTHVAGTIAALDNSIGVLGVAPSAELYAVKVLGASGSGSVSSIAQGLEWAGNNGMHVANLSLGSPSPSATLEQAVNSATSRGVLVVAASGNSGAGSISYPARYANAMAVGATDQNNNRASFSQYGAGLDIVAPGVNVQSTYPGSTYASLNGTSMATPHVAGAAALVKQKNPSWRNVQIRNRLKNTATSLGSTNLYGSGLVNAEAATR

SEQ ID NO: 63232 - protein, 380 aa, Unidentified
VRSKKLWIVASTALLISVAFSSSIASAAEEAKEKYLIGFNEQEAVSEFVEQVEANDEVAILSEEEEVEIELLHEFETIPVLSVELSPEDVDALELDPAISYIEEDAEVTTMAQSVPWGISRVQAPAAHNRGLTGSGVKVAVLDTGISTHPDLNIRGGASFVPGEPSTQDGNGHGTHVAGTIAALNNSIGVLGVAPSAILYAVKVLGASGSGSVTSIAQGLEWAGANGMHVANLSLGSPSPSATLEQAVNSATSRGVLVVAASGNSGAGSISYPARYANAMAVGATDQNNNRASFSQYGAGLDIVAPGVNVQSTYPGSTYFFLNGTSMATPHVAGAAALVKQKNPSWSNVQIRNHLKNTATSLGSTNLYGSGLVNAEAATR

SEQ ID NO: 63233 - protein, 380 aa, Unidentified
MRSKKLWIVASTALLISVAFSSSIASAAEEAKXKYLIGFNEQEAVSEFVEQVEANDEVAILSEEEEVEIELLHEFETIPVLSVELSPEDVDALELDPAISYIEEDAEVTTMAQSVPWGISRVQAPAAHNRGLTGSGVKVAVLDTGISTHPDLNIRGGASFVPGEPSTQDGNGHGTHVAGTIAALNNSIGVLGVAPNAELYAVKVLGASGSGSVSSIAQGLEWAGNNVMHVANLSLGLQAPSATLEQAVNSATSRGVLVVAASGNSGAGSISYPARYANAMAVGATDQNNNRASFSQYGAGLDIVAPGVNVQSTYPGSTYASLNGTSMATPHVAGAAALVKQKNPSWSNVQIRNHLKNTATSLGSTNLYGSGLVNAEAATR

SEQ ID NO: 63234 - protein, 380 aa, Unidentified
VRSKKLWIVASTALLISVAFSSSIASAAEEAKEKYLIGFNEQEAVSEFVEQVEANDEVAILSEEEEVEIELLHEFETIPVLSVELSPEDVDALELDPAISYIEEDAEVTTMAQSVPWGISRVQAPAAHRRGLTGRGVKVAVLDTGISTHPDLNIRGGASFVPGEPSTQDGNGHGTHVAGTIAALDNRIGVLGVAPSAELYAVKVLGASGSGSVSSIAQGLEWAGNNGMHVANLSLGSPSPSATLEQAVNSATSRGVLVVAASGNSGAGSISYPARYANAMAVGATDQNNNRASFSQYGAGLDIVAPGVNVQSTYPGSTYASLNGTSMATPHVAGAAALVKQKNPSWSNVQIRNRLKNTATSLGSTNLYGSGLVNAEAATR

SEQ ID NO: 63235 - protein, 380 aa, Unidentified
VRSKKLWIVASTALLISVAFSSSIASAAEEAKEKYLIGFNEQEAVSEFVEQVEANDEVAILSEEEEVEIELLHEFETIPVLSVELSPEDVDALELDPAISYIEEDAEVTTMAQSVPWGISRVQAPAAHNRGLTGSGVKVAVLDTGISTHPDLNIRGGASFVPGEPSTQDGEGHGTHVAGTIAALNNSIGVLGVAPSAELYAVKVLGASGSGSVSSIAQGLEWAGNNGMHVANLSLGSPSPSATLEQAVNSATSRGVLVVAASGNSGAGSISYPARYANAMAVGATDQNNNHADFSQYGAGLDIVAPGVNVQSTYPGSTYASLNGTSMATPHVAGAAALVKQKNPSWSNVQIRNRLKNTATSLGSTNLYGSGLVNAFAATR

SEQ ID NO: 63236 - protein, 380 aa, Unidentified
VRSKKLWIVASTALLISVAFSSSIASAAEEAKEKYLIGFNEQEAVSEFVEQVEANDEVAILSEEEEVEIELLHEFETIPVLSVELSPEDVDALELDPAISYIEEDAEVTTMAQSVPWGISRVQAPAAHNRGLTGSGVKVAVLDTGISTHPDLNIRGGASFVPGEPSTQDGNGHGTHVAGTIAALNNSIGVLGVAPSAELYAVKVLGASGGGAISSIAQGLEWAGNNGMHVANLSLGSPSPSATLEQAVNSATSRGVLVVAASGNSGAGSISYPARYANAMAVGATDQNNNRASFSQYGAGLDIVAPGVNVQSTYPGSTYASLNGTSMATPHVAGAAVLVKQKNPSWSNVRIRNHLKNTATSLGSTNLYGSGLVNAEAATR

SEQ ID NO: 63237 - protein, 380 aa, Unidentified
VRSKKLWIVASTALLISVAFSSSIASAAEEAKEKYLIGFNEQEAVSEFVEQVEANDEVAILSEEEEVEIELLHEFETIPVLSVELSPEDVDALELDPAISYIEEDAEVTTMAQSVPWGISRVQAPAAHNRRLTGSGVKVAVLDTGISTHPDLNIRGGASFVPGEPSTQDGNGHGTHVAGTIAALNNSIGVLGVAPSAELYAVKVLGASGSGSVSSIAQGLEWAGNNGMHVANLSLGSPSPSATLEQAVNSATRRGVLVVAASGNSGAGSISYPARYANAMAVGATDQNNIRASFSQYGAGLDIVAPGVNVQSTYPGSTYASLNGTSMATPHVAGAAACVKNKNPSWSNVQIRNHLKNTATSLGSTNLYGSGLVNAEAATR

SEQ ID NO: 63238 - protein, 380 aa, Unidentified
VRSKKLWIVASTALLISVAFSSSIASAAEEAKEKYLIGFNEQEAVSEFVEQVEANDEVAILSEEEEVEIELLHEFETIPVLSVELSPEDVDALELDPAISYIEEDAEVTTMAQSVPWGISRVQAPAAHRRGLTGSGVKVAVLDTGISTHPDLRIRGGASFVPGEPSTQDGNGHGTHVAGTIAALDNSIGVLGVAPSAELYAVKVLGASGSGSVSSIAQGLEWAGNNGMHVANLSLGSPSPSATLEQAVNSATSRGVLVVAASGNSGAGSISYPARYANAMAVGATDQNNNRASFSQYGAGLDIVAPGVNVQSTYPGSTYASLNGTSMATPHVAGAAALVKQKNPSWRNVQIRNRLKNTATSLGSTNLYGSGLVNAEAATR

SEQ ID NO: 63239 - protein, 380 aa, Unidentified
VRSKKLWIVASTALLISVAFSSSIASAAEEAKEKYLIGFNEQEAVSEFVEQVEANDEVAILSEEEEVEIELLHEFETIPVLSVELSPEDVDALELDPAISYIEEDAEVTTMAQSVPWGISRVQAPAAHNRRLTGRGVKVAVLDTGISTHPDLDIRGGASFVPGEPSTQDGNGHGTHVAGTIAALDNSIGVLGVAPSAELYAVKVLGASGSGSVSSIAQGLEWAGNNGMHVANLSLGSPSPSATLEQAVNSATSRGVLVVAASGNSGAGSISYPARYANAMAVGATDQNNNRASFSQYGAGLDIVAPGVNVQSTYPGSTYASLNGTSMATPHVAGAAALVKQKNPSWSNVQIRNRLKNTATSLGSTNLYGSGLVNAEAATR

SEQ ID NO: 63240 - protein, 380 aa, Unidentified
VRSKKLWIVASTALLISVAFSSSIASAAEEAKEKYLIGFNEQEAVSEFVEQVEANDEVAILSEEEEVEIELLHEFETIPVLSVELSPEDVDALELDPAISYIEEDAEVTTMAQSVPWGISRVQAPAAHNRGLTGSGVKVAVLDTGISTHPDLNIRGGASFVPGEPSTQDGNGHGTHVAGTIAALNNSIGVLGVAPSAELYAVKVLGASGSGSLSSIAQGLEWAGNNGMHVANLSLGSPSPSATLEQAVNSATSRGVLVVAASGNSGEGSISYPARYANAMAVGATDQNNNRADFSQYGAGLDIVAPGVNVQSTYPGSTYASLNGTSMATPHVAGAAALVKQKNPSWSNVQIRNRLKNTATSLGSTNLYGSGLVNAFAATR

SEQ ID NO: 63241 - protein, 380 aa, Unidentified
VRSKKLWIVASTALLISVAFSSSIASAAEEAKEKYLIGFNEQEAVSEFVEQVEANDEVAILSEEEEVEIELLHEFETIPVLSVELSPEDVDALELDPAISYIEEDAEVTTMAQSVPWGISRVQAPAAHNRGLTASGVKVAVLDTGISTHPDLNIRGGASFVPGEPSTQDGNGHGTHVAGTIAALNNSIGVLGVAPSAELYAVKVLGASGSGNVSGIAQGLEWAGNNGMHVANLSLGSPSPSATLEQAVNSATSRGVLVVAASGNSGAGSISYPARYANAMAVGATDQNNNRASFSQYGAGLDIVAPGVNVQSTYPGMTYFSLNGTSMATPHVAGAAALVKQKNPSWSNVQIRNHLKNTATSLGSTNLYGSGLVNAEAATR

SEQ ID NO: 63242 - protein, 380 aa, Unidentified
VRSKKLWIVASTALLISVAFSSSIASAAEEAKEKYLIGFNEQEAVSEFVEQVEANDEVAILSEEEEVEIELLHEFETIPVLSVELSPEDVDALELDPAISYIEEDAEVTTMAQSVPWGISRVQAPAAHNRGLTGSGVKVAVLDTGISTHPDLNIRGGASFVPGEPSTQDGNGHGTHVAGTIAALNNSIGVLGVAPSAELYAVKVLGASGSGSLTSIAQGLEWAGNNGMHVANLSLGSPSPSATLEQAVNSATSRGVLVVAASGNSGAGSISYPARYANAMAVGATDQNNNRASFSQYGAGLDIVAPGVNVQSTYPGSAYASENGTSMATPHVAGAAALVKQKNPSWSNVQIRNHLKNTATNLGSTNLYGSGLVNAEAATR

SEQ ID NO: 63243 - protein, 380 aa, Unidentified
VRSKKLWIVASTALLISVAFSSSIASAAEEAKEKYLIGFNEQEAVSEFVEQVEANDEVAILSEEEEVEIELLHEFETIPVLSVELSPEDVDALELDPAISYIEEDAEVTTMAQSVPWGISRVQAPAAHNRGLTGSRVKVAVLDTGISTHPDLNIRGGASFVPGEPSTQDGNGHGTHVAGTIAALNNSIGVLGVAPSAELYAVKVLGASGSGSVSSIAQGLEWAGANGMEVANLSLGSPSPSATLEQAVNSATSRGVLVVAASGNSGAGSISYPARYANAMAVGATDQNNNRASFSQYGAGLDIVAPGVNVQSTYPGSTYASLNGTSMAAPHVAGAAALVKQKNPSWSNVQIRNHLKNTATSLGSTNLYGSGLVNCEAATR

SEQ ID NO: 63244 - protein, 380 aa, Unidentified
VRSKKLWIVASTALLISVAFSSSIASAAEEAKEKYLIGFNEQEAVSEFVEQVEANDEVAILSEEEEVEIELLHEFETIPVLSVELSPEDVDALELDPAISYIEEDAEVTTMAQSVPWGISRVQAPAAHNRKLTASGVKVAVLDTGISTHPDLNIRGGASFVPGEPSTQDGEGHGTHVAGTIAALNNSIGVLGVAPSAELYAVKVLGASGSGSVSSIAQGLEWAGLNGMHVANLSLGSPSPSATLEQAVNSATSRGVLVVAASGNSGAGSISYPARYANAMAVGATDQNNNRADFSQYGAGLDIVAPGVNVQSTYPGSTYASLNGTSMATPHVAGAAALVKQKNPSWSNVQIRNHLKNTATSLGSTNLYGSGLVNAEAATR

SEQ ID NO: 63245 - protein, 380 aa, Unidentified
VRSKKLWIVASTALLISVAFSSSIASAAEEAKEKYLIGFNEQEAVSEFVEQVEANDEVAILSEEEEVEIELLHEFETIPVLSVELSPEDVDALELDPAISYIEEDAEVTTMAQSVPWGISRVQAPAAHNRGLTGRGVKVAVLDSGISTHPDLNIRGGASFVPGEPSTQDGNGHGTHVAGTIAALNNRIGVLGVAWSAELYAVKVLGASGSGSVSSIAQGLEWAGNNRMHVANLSLGSPSPSATLEQAVNSATSRGVLVVAASGNSGAGSISYPARYANAMAVGATDQNNNRASFSQYGAGLDIVAPGVNVQSTYPGSTYASLNGTSMATPHVAGAAALVKQKNPSWSNVQIRNHLKNTATSLGSTNLYGSGLVNAEAATR

SEQ ID NO: 63246 - protein, 380 aa, Unidentified
VRSKKLWIVASTALLISVAFSSSIASAAEEAKEKYLIGFNEQEAVSEFVEQVEANDEVAILSEEEEVEIELLHEFETIPVLSVELSPEDVDALELDPAISYIEEDAEVTTMAQSVPWGISRVQAPAAHNRRLTGSGVKVAVLDTGISTHPDLRITGGASFVPGEPSTQDGNGHGTHVAGTIAALNNSIGVLGVAPSAELYAVKVLGASGAGSVSSIAQGLEWAGNNGMHVANLSLGSPSPSATLEQAVNSATSRGVLVVAASGNSGAGSISYPARYANAMAVGATDQNNNRASFSQYGAGLDIVAPGVNVQSTYPGSTYASLNGTSMATPHVAGAAALVKQKNPSWSNVQIRNHLKNTATSLGSTNLYGSGLVRAEAATR

SEQ ID NO: 63247 - protein, 380 aa, Unidentified
VRSKKLWIVASTALLISVAFSSSIASAAEEAKEKYLIGFNEQEAVSEFVEQVEANDEVAILSEEEEVEIELLHEFETIPVLSVELSPEDVDALELDPAISYIEEDAEVTTMAQSVPWGISRVQAPAAHNRGLTGSGVKVAVLDTGISTHPDLNIRGGASFVPGEPSTQDGEGHGTHVAGTIAALNNSIGVLGVAPSAELYAVKVLGASGSGSVSSIAQGLEWAGNNGMHVANLSLGSPSPSATLEQAVNSATSRGVLVVAASGNSGEGSISYPARYANAMAVGATDQNNNHASFSQYGAGLDIVAPGVNVQSTYPGSTYASLNGTSMATPHVAGAAALVKQKNPSWSNVQIRNRLKNTATSLGSTNLYGSGLVNAFAATR

SEQ ID NO: 63248 - protein, 380 aa, Unidentified
VRSKKLWIVASTALLISVAFSSSIASAAEEAKEKYLIGFNEQEAVSEFVEQVEANDEVAILSEEEEVEIELLHEFETIPVLSVELSPEDVDALELDPAISYIEEDAEVTTMAQSVPWGISRVQAPAAHNRGLTGSGVKVAVLDTGISTHPDLNIRGGASFVPGEPSTQDGNGHGTHVAGTIAALNNSIGVLGVAPSAILYAVKVLGASGSGSVSSIAQGLEWAGNFGMHVANLSLGSPSPSATLEQAVNSATSRGVLVVAASGNSGAGSISYPARYANAMAVGATDQNNIRASFSQYGAGLDIVAPGVNVQSTYPGSTYFSLNGTSMATPHVAGAAACVKQKNPSWSNVQIRNHLKNTATSLGSTNLYGSGLVNAEAATR

SEQ ID NO: 63249 - protein, 380 aa, Unidentified
VRSKKLWIVASTALLISVAFSSSIASAAEEAKEKYLIGFNEQEAVSEFVEQVEANDEVAILSEEEEVEIELLHEFETIPVLSVELSPEDVDALELDPAISYIEEDAEVTTMAQSVPWGISRVQAPAAHRRGLTGRGVKVAVLDTGISTHPDLDIRGGASFVPGEPSTQDGNGHGTHVAGTIAALDNSIGVLGVAPSAELYAVKVLGASGSGSVSSIAQGLEWAGNNGMHVANLSLGSPSPSATLEQAVNSATSRGVLVVAASGNSGAGSISYPARYANAMAVGATDQNNNRASFSQYGAGLDIVAPGVNVQSTYPGSTYASLNGTSMATPHVAGAAALVKQKNPSWRNVQIRNHLKNTATSLGSTNLYGSGLVNAEAATR

SEQ ID NO: 63250 - protein, 380 aa, Unidentified
VRSKKLWIVASTALLISVAFSSSIASAAEEAKEKYLIGFNEQEAVSEFVEQVEANDEVAILSEEEEVEIELLHEFETIPVLSVELSPEDVDALELDPAISYIEEDAEVTTMAQSVPWGISRVQAPAAHNRKLTGSGVRVAVLDTGISTHPDLNIRGGASFVPGEPSTQDGNGHGTHVAGTIAALNNSIGVLGVAPSAELYAVKVLGASGSGSVSSIAQGLEWAGNNGMHVANLSLGSESPSATLEQAVNSATSRGVLVVAASGNSGAGSIDYPARYANAMAVGATDQNNNRASFSQYGAGLDIVAPGVNVQSTYPGSTYASLNGTSMATPHVAGAAALVKQKNGSWSNVQIRNHLKNTATSLGSTNLYGSGLVNAEAATR

SEQ ID NO: 63251 - protein, 380 aa, Unidentified
VRSKKLWIVASTALLISVAFSSSIASAAEEAKEKYLIGFNEQEAVSEFVEQVEANDEVAILSEEEEVEIELLHEFETIPVLSVELSPEDVDALELDPAISYIEEDAEVTTMAQSVPWGISRVQAPAAHNRGLTGSGVKVAVLDTGISTHPDLNIRGGASFVPGEPSTQDGNGHGTHVAGTIAALNNSIGVLGVAPNAELYAVKVLGASGSGSVSSIAQGLEWAGNNVMHVANLSLGLQAPSATLEQAVNSATSRGVLVVAASGNSGAGSISYPARYANAMAVGATDQNNNRASFSQYGAGLDIVAPGVNVQSTYPGSTYASLNGTSMATPHVAGAAALVKQKNPSWSNVQIRNHLKNTATSLGSTNLYGSGLVNAEAATR

SEQ ID NO: 63252 - protein, 380 aa, Unidentified
VRSKKLWIVASTALLISVAFSSSIASAAEEAKEKYLIGFNEQEAVSEFVEQVEANDEVAILSEEEEVEIELLHEFETIPVLSVELSPEDVDALELDPAISYIEEDAEVTTMAQSVPWGISRVQAPAAHNRGLTGSGVKVAVLDTGISTHPDLNIRGGASFVPGEPSTQDGNGHGTHVAGTIAALNNSIGVLGVAPSAELYAVKVLGASGAGGVSSIAQGLEWAGNNGMHVANLSLGSPSPSATLEQAVNSATSRGVLVVAASGNSGEGSISYPARYANAMAVGATDQNNNHASFSQYGAGLDIVAPGVNVQSTYPGSTYASLNGTSMATPHVAGAAALVKQKNPSWSNVQIRNRLKNTATSLGSTNLYGSGLVNAEAATR

SEQ ID NO: 63253 - protein, 380 aa, Unidentified
VRSKKLWIVASTALLISVAFSSSIASAAEEAKEKYLIGFNEQEAVSEFVEQVEANDEVAILSEEEEVEIELLHEFETIPVLSVELSPEDVDALELDPAISYIEEDAEVTTMAQSVPWGISRVQAPAAHRRGLTGRGVKVAVLDTGISTHPDLDITGGASFVPGEPSTQDGNGHGTHVAGTIAALNNSIGVLGVAPSAELYAVKVLGASGSGSVSSIAQGLEWAGNNGMHVANLSLGSPSPSATLEQAVNSATSRGVLVVAASGNSGAGSISYPARYANAMAVGATDQNNNRASFSQYGAGLDIVAPGVNVQSTYPGSTYASLNGTSMATPHVAGAAALVKQKNPSWSNVQIRNRLKNTATSLGSTNLYGSGLVNAEAATR

SEQ ID NO: 63254 - protein, 380 aa, Unidentified
VRSKKLWIVASTALLISVAFSSSIASAAEEAKEKYLIGFNEQEAVSEFVEQVEANDEVAILSEEEEVEIELLHEFETIPVLSVELSPEDVDALELDPAISYIEEDAEVTTMAQSVPWGISRVQAPAAHRRGLTGRGVKVAVLDTGISTHPDLNIRGGASFVPGEPSTQDGNGHGTHVAGTIAALDNSIGVLGVAPSAELYAVKVLGASGGGSVSSIAQGLEWAGNNGMHVANLSLGSPSPSATLEQAVNSATSRGVLVVAASGNSGAGSISYPARYANAMAVGATDQNNNRASFSQYGAGLDIVAPGVNVQSTYPGSTYASLNGTSMATPHVAGAAVLVKQKNPSWSNVQIRNHLKNTATSLGSTNLYGSGLVNAEAATR

SEQ ID NO: 63255 - protein, 380 aa, Unidentified
VRSKKLWIVASTALLISVAFSSSIASAAEEAKEKYLIGFNEQEAVSEFVEQVEANDEVAILSEEEEVEIELLHEFETIPVLSVELSPEDVDALELDPAISYIEEDAEVTTMAQSVPWGISRVQAPAAHNRGLLGSGVKVAVLDTGISTHPDLNIRGGASFVPGEPSTQDGNGHGTHVAGTIAALNNNIGVLGVAPSAELYAVKVLGASGSGSVSSIAQGLEWAGLNGMHVANLSLGSESPSATLEQAVNSATSRGVLVVAASGNSGAGSISYPARYANAMAVGATDQNNNRASFSQYGAGLDIVAPGVNVQSTYPGSTYASLNGTSMATPHVAGAAALVKQKNPSWSNVQIRNHLKNTATNLGSTNLYGSGLVNAEAATR

SEQ ID NO: 63256 - protein, 380 aa, Unidentified
VRSKKLWIVASTALLISVAFSSSIASAAEEAKEKYLIGFNEQEAVSEFVEQVEANDEVAILSEEEEVEIELLHEFETIPVLSVELSPEDVDALELDPAISYIEEDAEVTTMAQSVPWGISRVQAPAAHNRGLTAFGVKVAVLDTGISTHPDLNIRGGASFVPGEPSTQDGNGHGTHVAGTIAALNNSIGVLGVAPSAELYAVKVLGASGSGSVSSIAQGLEWAGNNRMHVANLSLGSPSPSATLEQAVNSATSRGVLVVAASGNSGAGSISYPARYANAMAVGATDQNNNRADFSQYGAGLDIVAPGVNVQSTYPGSTYASLNGTSMATPHVAGAAALVKQKNGSWSNVQIRNHLKNTATSLGSTNLYGSGLVNAEAATR

SEQ ID NO: 63257 - protein, 380 aa, Unidentified
VRSKKLWIVASTALLISVAFSSSIASAAEEAKEKYLIGFNEQEAVSEFVEQVEANDEVAILSEEEEVEIELLHEFETIPVLSVELSPEDVDALELDPAISYIEEDAEVTTMAQSVPWGISRVQAPAAHRRRLTGSGVKVAVLDTGISTHPDLRITGGASFVPGEPSTQDGNGHGTHVAGTIAALNNSIGVLGVAPSAELYAVKVLGASGSGSVSSIAQGLEWAGNNGMHVANLSLGSPSPSATLEQAVNSATSRGVLVVAASGNSGAGSISYPARYANAMAVGATDQNNNRASFSQYGAGLDIVAPGVNVQSTYPGSTYASLNGTSMATPHVAGAAALVKQKNPSWSNVQIRNRLKNTATSLGSTNLYGSGLVNAEAATR

SEQ ID NO: 63258 - protein, 380 aa, Unidentified
VRSKKLWIVASTALLISVAFSSSIASAAEEAKEKYLIGFNEQEAVSEFVEQVEANDEVAILSEEEEVEIELLHEFETIPVLSVELSPEDVDALELDPAISYIEEDAEVTTMAQSVPWGISRVQAPAAHNRGLTGFGVKVAVLDTGISTHPDLNIRGGASFVPGEPSTQDGNGHGTHVAGTIAALNNSIGVLGVAPSAELYAVKVLGASGSGNLSSIAQGLEWAGNNRMHVANLSLGSPSPSATLEQAVNSATSRGVLVVAASGNSGAGSISYPARYANAMAVGATDQNNNRADFSQYGAGLDIVAPGVNVQSTYPGSTYASLNGTSMATPHVAGAAALVKQKNPSWSNVQIRNHLKNTATSLGSTNLYGSGLVNAEAATR

SEQ ID NO: 63259 - protein, 380 aa, Unidentified
VRSKKLWIVASTALLISVAFSSSIASAAEEAKEKYLIGFNEQEAVSEFVEQVEANDEVAILSEEEEVEIELLHEFETIPVLSVELSPEDVDALELDPAISYIEEDAEVTTMAQSVPWGISRVQAPAAHNRGLTGRGVKVAVLDTGISTHPDLNIRGGASFVPGEPSTQDGNGHGTHVAGTIAALDNSIGVLGVAPSAELYAVKVLGASGSGAISSIAQGLEWAGNNGMHVANLSLGSPSPSATLEQAVNSATSRGVLVVAASGNSGAGSISYPARYANAMAVGATDQNNNRASFSQYGAGLDIVAPGVNVQSTYPGSTYASLNGTSMATPHVAGAAALVKQKNPSWSNVRIRNHLKNTATSLGSTNLYGSGLVNAEAATR

SEQ ID NO: 63260 - protein, 380 aa, Unidentified
VRSKKLWIVASTALLISVAFSSSIASAAEEAKEKYLIGFNEQEAVSEFVEQVEANDEVAILSEEEEVEIELLHEFETIPVLSVELSPEDVDALELDPAISYIEEDAEVTTMAQSVPWGISRVQAPAAHRRGLTGRGVKVAVLDTGISTHPDLNIRGGASFVPGEPSTQDGNGHGTHVAGTIAALDNSIGVLGVAPSAELYAVKVLGASGSGSVSSIAQGLEWAGNNGMHVANLSLGSPSPSATLEQAVNSATSRGVLVVAASGNSGAGSISYPARYANAMAVGATDQNNNRASFSQYGAGLDLVAPGVNVQSTYPGSTYASLNGTSMATPHVAGAAALVKQKNPSWSNVQIRNRLKNTATSLGSTNLYGSGLVNAEAATR

SEQ ID NO: 63261 - protein, 380 aa, Unidentified
VRSKKLWIVASTALLISVAFSSSIASAAEEAKEKYLIGFNEQEAVSEFVEQVEANDEVAILSEEEEVEIELLHEFETIPVLSVELSPEDVDALELDPAISYIEEDAEVTTMAQSVPWGISRVQAPAAHNRGLTGSGVKVAVLDTGISTHPDLAIRGGASFVPGEPSTADGNGHGTHVAGTIAALNNSIGVLGVAPSAELYAVKVLGASGAGSVSSIAQGLEWAGNNGMHVANLSLGSPSPSATLEQAVNSATSRGVLVVAASGNSGAGSISYPARYANAMAVGATDQNNNRASFSQYGAGLDIVAPGVNVQSTYPGSTYAFLNGTSMAAPHVAGAAALVKQKNPSWSNVQIRNHLKNTATSLGSTNLYGSGLVNAEAATR

SEQ ID NO: 63262 - protein, 380 aa, Unidentified
VRSKKLWIVASTALLISVAFSSSIASAAEEAKEKYLIGFNEQEAVSEFVEQVEANDEVAILSEEEEVEIELLHEFETIPVLSVELSPEDVDALELDPAISYIEEDAEVTTMAQSVPWGISRVQAPAAHNRGLTGRGVKVAVLDTGISTHPDLNIRGGASFVPGEPSTQDGNGHGTHVAGTIAALDNSIGVLGVAPSAELYAVKVLGASGSGSISSIAQGLEWAGNNGMHVANLSLGSPSPSATLEQAVNSATSRGVLVVAASGNSGAGSISYPARYANAMAVGATDQNNNRASFSQYGAGLDIVAPGVNVQSTYPGSTYASLNGTSMATPHVAGAAVLVKQKNPSWSNVRIRNHLKNTATSLGSTNLYGSGLVNAEAATR

SEQ ID NO: 63263 - protein, 380 aa, Unidentified
VRSKKLWIVASTALLISVAFSSSIASAAEEAKEKYLIGFNEQEAVSEFVEQVEANDEVAILSEEEEVEIELLHEFETIPVLSVELSPEDVDALELDPAISYIEEDAEVTTMAQSVPWGISRVQAPAAHNRGLTGRGVKVAVLDSGISTHPDLNIRGGASFVPGEPSTQDGNGHGTHVAGTIAALNNSIGVLGVASNAELYAVKVLGASGSGSVSSIAQGLEWAGNNGMHVANLSLGSPSPSATLEQAVNSATSRGVLVVAASGNSGAGSISYPARYANAMAVGATDQNNNRASFSQYGAGLDIVAPGVNVQSTAPGSTYASLNGTSMATPHVAGAAALVKQKNPSWSNVQIRNHLKNTATSLGSTNLYGSGLVNAEAATR

SEQ ID NO: 63264 - protein, 380 aa, Unidentified
VRSKKLWIVASTALLISVAFSSSIASAAEEAKEKYLIGFNEQEAVSEFVEQVEANDEVAILSEEEEVEIELLHEFETIPVLSVELSPEDVDALELDPAISYIEEDAEVTTMAQSVPWGISRVQAPAAHNRRLTGRGVKVAVLDTGISTHPDLNITGGASFVPGEPSTQDGNGHGTHVAGTIAALNNSIGVLGVAPSAELYAVKVLGASGSGSVSSIAQGLEWAGANGMHVANLSLGSPSPSATLEQAVNSATSRGVLVVAASGNSGAGSISYPARYANAMAVGATDQNNNRASFSQYGAGLDIVAPGVNVQSTYPGSTYASLNGTSMATPHVAGAAALVKQKNPSWSNVQIRNHLKNTATSLGSTNLYGSGLVRAEAATR

SEQ ID NO: 63265 - protein, 380 aa, Unidentified
VRSKKLWIVASTALLISVAFSSSIASAAEEAKEKYLIGFNEQEAVSEFVEQVEANDEVAILSEEEEVEIELLHEFETIPVLSVELSPEDVDALELDPAISYIEEDAEVTTMAQSVPWGISRVQAPAAHNRGLTGSGVKVAVLDTGISTHPDLNIRGGASFVPGEPSTQDGNGHGTHVAGTIAALNNSIGVLGVAPSAELYAVKVLGASGSGSVSSIAQGLEWAGNNGMHVANLSLGSPSPSATLEQAVNSATSRGVLVVAASGNSGEGSISYPARYANAMAVGATDQNNNHADFSQYGAGLDIVAPGVNVQSTYPGSTYASLNGTSMATPHVAGAAALVKQKNPSWSNVQIRNRLKNTATSLGSTNLYGSGLVNAFAATR

SEQ ID NO: 63266 - protein, 380 aa, Unidentified
VRSKKLWIVASTALLISVAFSSSIASAAEEAKEKYLIGFNEQEAVSEFVEQVEANDEVAILSEEEEVEIELLHEFETIPVLSVELSPEDVDALELDPAISYIEEDAEVTTMAQSVPWGISRVQAPAAHNRGLTGSGVKVAVLDTGISTHPDLNIRGGASFVPGEPSTQDGEGHGTHVAGTIAALNNSIGVLGVAPSAELYAVKVLGASGSGSVSSIAQGLEWAGNNGMHVANLSLGSPSPSATLEQAVNSATSRGVLVVAASGNSGEGSISYPARYANAMAVGATDQNNNRADFSQYGAGLDIVAPGVNVQSTYPGSTYASLNGTSMATPHVAGAAALVKQKNPSWSNVQIRNRLKNTATSLGSTNLYGSGLVNAFAATR

SEQ ID NO: 63267 - protein, 380 aa, Unidentified
VRSKKLWIVASTALLISVAFSSSIASAAEEAKEKYLIGFNEQEAVSEFVEQVEANDEVAILSEEEEVEIELLHEFETIPVLSVELSPEDVDALELDPAISYIEEDAEVTTMAQSVPWGISRVQAPAAHNRGLTGRGVKVAVLDTGISTHPDLAIRGGASFVPGEPSTQDGNGHGTHVAGTIAALNNSIGVLGVAPSAELYAVKVLGASGSGSVSSIAQGLEWAGNFGMHVANLSLGSPSPSATLEQAVNSATSRGVLVVAASGNSGAGSISYPARYANAMAVGATDQNNNRASFSQYGFGLDIVAPGVNVQSTYPQSTYASLNGTSMATPHVAGAAALVKQKNPSWSNVQIRNHLKNTATSLGSTNLYGSGLVNAEAATR

SEQ ID NO: 63268 - protein, 380 aa, Unidentified
VRSKKLWIVASTALLISVAFSSSIASAAEEAKEKYLIGFNEQEAVSEFVEQVEANDEVAILSEEEEVEIELLHEFETIPVLSVELSPEDVDALELDPAISYIEEDAEVTTMAQSVPWGISRVQAPAAHNRGLTGSGVKVAVLDTGISTHPDLNIRGGASFVPGEPSTQDGNGHGTHVAGTIAALNNSIGVLGVAPSAELYAVKVLGASGSGSLSSIAQGLEWAGNNGMEVANLSLGSPSPSATLEQAVNSATSRGVLVVAASGNSGAGSISYPARYANAMAVGATDQNNNKASFSQYGAGLDIVAPGVNVQSTYPGSTYAFLNGTSMATPHVAGAAALVKQKNPSWSNVQIRNHLKRTATSLGSTNLYGSGLVNAEAATR

SEQ ID NO: 63269 - protein, 380 aa, Unidentified
VRSKKLWIVASTALLISVAFSSSIASAAEEAKEKYLIGFNEQEAVSEFVEQVEANDEVAILSEEEEVEIELLHEFETIPVLSVELSPEDVDALELDPAISYIEEDAEVTTMAQSVPWGISRVQAPAAHRRRLTGSGVKVAVLDTGISTHPDLDITGGASFVPGEPSTQDGNGHGTHVAGTIAALNNSIGVLGVAPSAELYAVKVLGASGSGSVSSIAQGLEWAGNNGMHVANLSLGSPSPSATLEQAVNSATSRGVLVVAASGNSGAGSISYPARYANAMAVGATDQNNNRASFSQYGAGLDIVAPGVNVQSTYPGSTYASLNGTSMATPHVAGAAALVKQKNPPWSNVQIRNHLKNTATSLGSTNLYGSGLVNAEAATR

SEQ ID NO: 63270 - protein, 380 aa, Unidentified
VRSKKLWIVASTALLISVAFSSSIASAAEEAKEKYLIGFNEQEAVSEFVEQVEANDEVAILSEEEEVEIELLHEFETIPVLSVELSPEDVDALELDPAISYIEEDAEVTTMAQSVPWGISRVQAPAAHNRRLTGSGVKVAVLDTGISTHPDLNIRGGASFVPGEPSTQDGNGHGTHVAGTIAALNNSIGVLGVAPSAELYAVKVLGASGGGAVSSIAQGLEWAGNNGMHVANLSLGSPSPSATLEQAVNSATSRGVLVVAASGNSGAGSISYPARYANAMAVGATDQNNNRASFSQYGAGLDIVAPGVNVQSTYPGSTYASLNGTSMATPHVAGAAVLVKQKNPSWSNVRIRNHLKNTATSLGSTNLYGSGLVNAEAATR

SEQ ID NO: 63271 - protein, 380 aa, Unidentified
VRSKKLWIVASTALLISVAFSSSIASAAEEAKEKYLIGFNEQEAVSEFVEQVEANDEVAILSEEEEVEIELLHEFETIPVLSVELSPEDVDALELDPAISYIEEDAEVTTMAQSVPWGISRVQAPAAHNRGLTGSGVKVAVLDTGISTHPDLNIRGGASFVPGEPSTQDGNGHGTHVAGTIAALNNSIGVLGVAPSAELYAVKVLGASGAGSLSSIAQGLEWAGNNGMHVANLSLGNPSPSATLEQAVNSATSRGVLVVAASGNSGEGSISYPARYANAMAVGATDQNNNHASFSQYGAGLDIVAPGVNVQSTYPGSTYASLNGTSMATPHVAGAAALVKQKNPSWSNVQIRNHLKNTATSLGSTNLYGSGLVNAEAATR

SEQ ID NO: 63272 - protein, 380 aa, Unidentified
VRSKKLWIVASTALLISVAFSSSIASAAEEAKEKYLIGFNEQEAVSEFVEQVEANDEVAILSEEEEVEIELLHEFETIPVLSVELSPEDVDALELDPAISYIEEDAEVTTMAQSVPWGISRVQAPAAHNRKLTGSGVKVAVLDTGISTHPDLWIRGGASFVPGEPSTQDGEGHGTHVAGTIAALNNSIGVLGVAPSAELYAVKVLGASGSGSVSSIAQGLEWAGLNGMHVANLSLGSPSPSATLEQAVNSATSRGVLVVAASGNSGAGSISYPARYANAMAVGATDQNNNRADFSQYGAGLDIVAPGVNVQSTYPGSTYASLNGTSMATPHVAGAAALVKQKNPSWSNVQIRNHLKNTATSLGSTNLYGSGLVNAEAATR

SEQ ID NO: 63273 - protein, 380 aa, Unidentified
VRSKKLWIVASTALLISVAFSSSIASAAEEAKEKYLIGFNEQEAVSEFVEQVEANDEVAILSEEEEVEIELLHEFETIPVLSVELSPEDVDALELDPAISYIEEDAEVTTMAQSVPWGISRVQAPAAHNRRLTGSGVKVAVLDTGISTHPDLNIRGGASFVPGEPSTQDGNGHGTHVAGTIAALNNSIGVLGVAPSAELYAVKVLGASGAGGVSSIAQGLEWAGNNGMHVANLSLGSPSPSATLEQAVNSATSRGVLVVAASGNSGAGSISYPARYANAMAVGATDQNNNRASFSQYGAGLDIVAPGVNVQSTYPGSTYASLNGTSMATPHVAGAAVLVKQKNPSWSNVRIRNHLKNTATSLGSTNLYGSGLVNAEAATR

SEQ ID NO: 63274 - protein, 380 aa, Unidentified
VRSKKLWIVASTALLISVAFSSSIASAAEEAKEKYLIGFNEQEAVSEFVEQVEANDEVAILSEEEEVEIELLHEFETIPVLSVELSPEDVDALELDPAISYIEEDAEVTTMAQSVPWGISRVQAPAAHNRGLTGSGVKVAVLDTGISTHPDLNIRGGASFVPGEPSTQDGQGHGTHVAGTIAALNNSIGVLGVAPSAELYAVKVLGASGAGSVSSIAQGLEWAGNNGMHVANLSLGSPSPSATLEQAVNSATSRGVLVVAASGNSGAGSISYPARYANAMAVGATDQNNNRASFSQYGAGLDIVAPGVNVQSTYPGSTYASLNGTSMATPHVAGAAALVKNKNPSWSNVQIRNHLKRTATSLGSTNLYGSGLVNCEAATR

SEQ ID NO: 63275 - protein, 380 aa, Unidentified
VRSKKLWIVASTALLISVAFSSSIASAAEEAKEKYLIGFNEQEAVSEFVEQVEANDEVAILSEEEEVEIELLHEFETIPVLSVELSPEDVDALELDPAISYIEEDAEVTTMAQSVPWGISRVQAPAAHRRGLTGRGVKVAVLDTGISTHPDLNIRGGASFVPGEPSTQDGNGHGTHVAGTIAALDNSIGVLGVAPSAELYAVKVLGASGSGSVSSIAQGLEWAGNNGMHVANLSLGSPSPSATLEQAVNSATSRGVLVVAASGNSGAGSISYPARYANAMAVGATDQNNNRASFSQYGAGLDIVAPGVNVQSTYPQSTYASLNGTSMATPHVAGAAALVKQKNPSWSNVQIRNRLKNTATSLGSTNLYGSGLVNAEAATR

SEQ ID NO: 63276 - protein, 380 aa, Unidentified
VRSKKLWIVASTALLISVAFSSSIASAAEEAKEKYLIGFNEQEAVSEFVEQVEANDEVAILSEEEEVEIELLHEFETIPVLSVELSPEDVDALELDPAISYIEEDAEVTTMAQSVPWGISRVQAPAAHNRGLTGSGVKVAVLDTGISTHPDLNIRGGASFVPGEPSTQDGEGHGTHVAGTIAALNNSIGVLGVAPSAELYAVKVLGASGAGSVSSIAQGLEWAGNNGMHVANLSLGSPSPSATLEQAVNSATSRGVLVVAASGNSGEGSISYPARYANAMAVGATDQNNNHASFSQYGAGLDIVAPGVNVQSTYPGSTYASLNGTSMATPHVAGAAALVKQKNPSWSNVQIRNRLKNTATSLGSTNLYGSGLVNAEAATR

SEQ ID NO: 63277 - protein, 380 aa, Unidentified
VRSKKLWIVASTALLISVAFSSSIASAAEEAKEKYLIGFNEQEAVSEFVEQVEANDEVAILSEEEEVEIELLHEFETIPVLSVELSPEDVDALELDPAISYIEEDAEVTTMAQSVPWGISRVQAPAAHNRRLTGSGVKVAVLDTGISTHPDLNIRGGASFVNGEPSTQDGNGHGTHVAGTIAALNNSIGVLGVAPSAELYAVKVLGASGAGSVSSIAQGLEWAGNNGMHVANLSLGSPSPSATLEQAVNSATSRGVLVVAASGNSGAGSISYPARYANAMAVGATDQNNNRASFSQYGAGLDLVAPGVNVQSTYPGSTYASLNGTSMATPHVAGAAACVKQKNPSWSNVQIRNHLKNTATSLGSTNLYGSGLVNAEAATR

SEQ ID NO: 63278 - protein, 380 aa, Unidentified
VRSKKLWIVASTALLISVAFSSSIASAAEEAKEKYLIGFNEQEAVSEFVEQVEANDEVAILSEEEEVEIELLHEFETIPVLSVELSPEDVDALELDPAISYIEEDAEVTTMAQSVPWGISRVQAPAAHNRGLAGSGVKVAVLDTGISTHPDLNIRGGASFVPGEPSTQDGNGHGTHVAGTIAALNNSIGVLGVAPSAELYAVKVLGASGSGSLSSIAQGLEWAGNNGMHVANLSLGSPSPSATLEQAVNSATSRGVLVVAASGNSGAGSISYPARYANAMAVGATDQNNNHADFSQYGAGLDIVAPGVNVQSTYPGSTYASLNGTSMATPHVAGAAALVKQKNPSWSNVQIRNRLKNTATSLGSTNLYGSGLVNAEAATR

SEQ ID NO: 63279 - protein, 380 aa, Unidentified
VRSKKLWIVASTALLISVAFSSSIASAAEEAKEKYLIGFNEQEAVSEFVEQVEANDEVAILSEEEEVEIELLHEFETIPVLSVELSPEDVDALELDPAISYIEEDAEVTTMAQSVPWGISRVQAPAAHRRRLTGSGVKVAVLDTGISTHPDLRIRGGASFVPGEPSTQDGNGHGTHVAGTIAALDNSIGVLGVAPSAELYAVKVLGASGSGSVSSIAQGLEWAGNNGMHVANLSLGSPSPSATLEQAVNSATSRGVLVVAASGNSGAGSISYPARYANAMAVGATDQNNNRASFSQYGAGLDIVAPGVNVQSTYPGSTYASLNGTSMATPHVAGAAALVKQKNPSWSNVQIRNRLKNTATSLGSTNLYGSGLVNAEAATR

SEQ ID NO: 63280 - protein, 380 aa, Unidentified
VRSKKLWIVASTALLISVAFSSSIASAAEEAKEKYLIGFNEQEAVSEFVEQVEANDEVAILSEEEEVEIELLHEFETIPVLSVELSPEDVDALELDPAISYIEEDAEVTTMAQSVPWGISRVQAPAAHNRGLTGSGVKVAVLDTGISTHPDLNIRGGASFVPGEPSTQDGNGHGTHVAGTIAALDNSIGVLGVAPSAELYAVKVLGASGSGAISSIAQGLEWAGNNGMHVANLSLGSPSPSATLEQAVNSATSRGVLVVAASGNSGAGSISYPARYANAMAVGATDQNNNRASFSQYGAGLDIVAPGVNVQSTYPGSTYASLNGTSMATPHVAGAAVLVKQKNPSWSNVRIRNHLKNTATSLGSTNLYGSGLVNAEAATR

SEQ ID NO: 63281 - protein, 380 aa, Unidentified
VRSKKLWIVASTALLISVAFSSSIASAAEEAKEKYLIGFNEQEAVSEFVEQVEANDEVAILSEEEEVEIELLHEFETIPVLSVELSPEDVDALELDPAISYIEEDAEVTTMAQSVPWGISRVQAPAAHNRGLTGRGVKVAVLDTGISTHPDLNIRGGASFVPGEPSTQDGNGHGTHVAGTIAALNNSIGVLGVVWSAELYAVKVLGASGSGSVSSIAQGLEWAGNNRMHVANLSLGSPSPSATLEQAVNSATSRGVLVVAASGNSGAGSISYPARYANAMAVGATDQNNNRASFSQYGAGLDIVAPGVNVQSTYPGSTYASLNGTSMATPHVAGAAALVFQKNPSWSNVQIRNHLKNTATSLGSTNLYGSGLVNAEAATR

SEQ ID NO: 63282 - protein, 380 aa, Unidentified
VRSKKLWIVASTALLISVAFSSSIASAAEEAKEKYLIGFNEQEAVSEFVEQVEANDEVAILSEEEEVEIELLHEFETIPVLSVELSPEDVDALELDPAISYIEEDAEVTTMAQSVPWGISRVQAPAAHNRGLTGRGVKVAVLDTGISTHPDLNIRGGASFVPGEPSTQDGNGHGTHVAGTIAALNNSIGVLGVAPSAELYAVKVLGASGSGSVSGIAQGLEWAGANGMHVANLSLGSPSPSATLEQAVNSATSRGVLVVAASGNSGAGSISYPARYANAMAVGATDQNNNRASFSQYGAGLDIVAPGVNVQSTYPGMTYASLNGTSMAAPHVAGAAALVKQKNPSWSNVQIRNHLKNTATSLGSTNLYGSGLVNAEAATR

SEQ ID NO: 63283 - protein, 380 aa, Unidentified
VRSKKLWIVASTALLISVAFSSSIASAAEEAKEKYLIGFNEQEAVSEFVEQVEANDEVAILSEEEEVEIELLHEFETIPVLSVELSPEDVDALELDPAISYIEEDAEVTTMAQSVPWGISRVQAPAAHNRGLTGSGVKVAVLDTGISTHPDLNIRGGASFVPGEPSTQDGNGHGTHVAGTIAALNNSIGVLGVAPSAILFAVKVLGASGSGSVSSIAQGLEWAGNNGMHVANLSLGSPSPSATLEQAVNSATSRGVLVVAASGNSGAGSISYPARYANAMAVGATDQNNIRASFSQYGAGLDIVAPGVNVQSTYPQSTYASLNGTSMATPHVAGAAALVKQKNPSWSNVQIRNHLKNTATSLGSTNLYGSGLVNCEAATR

SEQ ID NO: 63284 - protein, 380 aa, Unidentified
VRSKKLWIVASTALLISVAFSSSIASAAEEAKEKYLIGFNEQEAVSEFVEQVEANDEVAILSEEEEVEIELLHEFETIPVLSVELSPEDVDALELDPAISYIEEDAEVTTMAQSVPWGISRVQAPAAHNRGLTGSRVKVAVLDTGISTHPDLAIRGGASFVPGEPSTQDGNGHGTHVAGTIAALNNSIGVLGVAPSAELFAVKVLGASGSGSVSSIAQGLEWAGNNGMHVANLSLGSPSPSATLEQAVNSATSRGVLVVAASGNSGAGSISYPARYANAMAVGATDQNNNRASFSQYGAGLDLVAPGVNVQSTYPGSTYASLNGTSMATPHVAGAAALVKQKNPSWSNVQIRNHLKNTATSLGSTNLYGSGLVNCEAATR

SEQ ID NO: 63285 - protein, 380 aa, Unidentified
VRSKKLWIVASTALLISVAFSSSIASAAEEAKEKYLIGFNEQEAVSEFVEQVEANDEVAILSEEEEVEIELLHEFETIPVLSVELSPEDVDALELDPAISYIEEDAEVTTMAQSVPWGISRVQAPAAHNRGLAGSGVKVAVLDTGISTHPDLNIRGGASFVPGEPSTQDGNGHGTHVAGTIAALNNSIGVLGVAPSAELYAVKVLGASGSGSVSSIAQGLEWAGNNGMHVANLSLGSPSPSATLEQAVNSATSRGVLVVAASGNSGEGSISYPARYANAMAVGATDQNNNHASFSQYGAGLDIVAPGVNVQSTYPGSTYASLNGTSMATPHVAGAAALVKQKNPSWSNVQIRNRLKNTATSLGSTNLYGSGLVNAFAATR

SEQ ID NO: 63286 - protein, 380 aa, Unidentified
VRSKKLWIVASTALLISVAFSSSIASAAEEAKEKYLIGFNEQEAVSEFVEQVEANDEVAILSEEEEVEIELLHEFETIPVLSVELSPEDVDALELDPAISYIEEDAEVTTMAQSVPWGISRVQAPAAHRRGLTGRGVKVAVLDTGISTHPDLNIRGGASFVPGEPSTQDGNGHGTHVAGTIAALDNSIGVLGVAPSAELYAVKVLGASGSGSVSSIAQGLEWAGNNGMHVANLSLGSPSPSATLEQAVNSATSRGVLVVAASGNSGAGSISYPARYANAMAVGATDQNNNRASFSQYGAGLDIVAPGVNVQSTYPGSTYASLNGTSMATPHVAGAAVLVKQKNPSWSNVQIRNRLKNTATSLGSTNLYGSGLVNAEAATR

SEQ ID NO: 63287 - protein, 380 aa, Unidentified
VRSKKLWIVASTALLISVAFSSSIASAAEEAKEKYLIGFNEQEAVSEFVEQVEANDEVAILSEEEEVEIELLHEFETIPVLSVELSPEDVDALELDPAISYIEEDAEVTTMAQSVPWGISRVQAPAAHNRGLTGSGVKVAVLDTGISTHPDLNIRGGASFVPGEPSTQDGEGHGTHVAGTIAALNNSIGVLGVAPSAELYAVKVLGASGSGSVSSIAQGLEWAGNNGMHVANLSLGSPSPSATLEQAVNSATSRGVLVVAASGNSGEGSISYPARYANAMAVGATDQNNNHADFSQYGAGLDIVAPGVNVQSTYPGSTYASLNGTSMATPHVAGAAALVKQKNPSWSNVQIRNRLKNTATSLGSTNLYGSGLVNAEAATR

SEQ ID NO: 63288 - protein, 380 aa, Unidentified
VRSKKLWIVASTALLISVAFSSSIASAAEEAKEKYLIGFNEQEAVSEFVEQVEANDEVAILSEEEEVEIELLHEFETIPVLSVELSPEDVDALELDPAISYIEEDAEVTTMAQSRPWGIARVQAPAAHNRGLRGSGVKVAVLDTGISTHPDLNIRGGASFVPGEPSTQDGNGHGTHVAGTIAALNNRIGVLGVAPSAELYAVKVLGASGSGSVSSIAQGLEWAGNNGMHVANLSLGSPSPSATLEQAVNSATSRGVLVVAASGNSGAGSISYPARYANAMAVGATDQNNNRASFSQYGAGLDIVAPGVNVQSTYPGFTYASLNGTSMATPHVAGAAALVKQKNPSWSNVQIRNHLKNTATSLGSTNLYGSGLVNAEAATR

SEQ ID NO: 63289 - protein, 380 aa, Unidentified
VRSKKLWIVASTALLISVAFSSSIASAAEEAKEKYLIGFNEQEAVSEFVEQVEANDEVAILSEEEEVEIELLHEFETIPVLSVELSPEDVDALELDPAISYIEEDAEVTTMAQSVPWGISRVQAPAAHNRGLTGSRVKVAVLDTGISTHPDLNIRGGASFVPGEPSTQDGNGHGTHVAGTIAALNNSIGVLGVAPSAELYAVKVLGASGSGSVTSIAQGLEWAGNNGMHVANLSLGNPSPSATLEQAVNSATRRGVLVVAASGNSGAGSISYPARYANAMAVGATDQNNNRASFSQYGAGLDIVAPGVNVQSTYPGSTYASLNGTSMATPHVAGAAALVKQKNPSWSNVQIRNHLKNTATSLGSTNLYGSGLVNCEAATR

SEQ ID NO: 63290 - protein, 380 aa, Unidentified
VRSKKLWIVASTALLISVAFSSSIASAAEEAKEKYLIGFNEQEAVSEFVEQVEANDEVAILSEEEEVEIELLHEFETIPVLSVELSPEDVDALELDPAISYIEEDAEVTTMAQSVPWGISRVQAPAAHNRGLTGRGVKVAVLDTGISTHPDLNIRGGASFVPGEPSTQDGNGHGTHVAGTIAALDNSIGVLGVAPSAELYAVKVLGASGGGSVSSIAQGLEWAGNNGMHVANLSLGSPSPSATLEQAVNSATSRGVLVVAASGNSGAGSISYPARYANAMAVGATDQNNNRASFSQYGAGLDIVAPGVNVQSTYPGSTYASLNGTSMATPHVAGAAVLVKQKNPSWSNVQIRNRLKNTATSLGSTNLYGSGLVNAEAATR

SEQ ID NO: 63291 - protein, 380 aa, Unidentified
VRSKKLWIVASTALLISVAFSSSIASAAEEAKEKYLIGFNEQEAVSEFVEQVEANDEVAILSEEEEVEIELLHEFETIPVLSVELSPEDVDALELDPAISYIEEDAEVTTMAQSVPWGISRVQAPAAHNRRLTGSGVKVAVLDTGISTHPDLNIRGGASFVPGEPSTQDGNGHGTHVAGTIAALNNSIGVLGVAPSAELYAVKVLGASGSGGISSIAQGLEWAGNNGMHVANLSLGSPSPSATLEQAVNSATSRGVLVVAASGNSGAGSISYPARYANAMAVGATDQNNNRASFSQYGAGLDIVAPGVNVQSTYPGSTYASLNGTSMATPHVAGAAVLVKQKNPSWSNVRIRNHLKNTATSLGSTNLYGSGLVNAEAATR

SEQ ID NO: 63292 - protein, 380 aa, Unidentified
VRSKKLWIVASTALLISVAFSSSIASAAEEAKEKYLIGFNEQEAVSEFVEQVEANDEVAILSEEEEVEIELLHEFETIPVLSVELSPEDVDALELDPAISYIEEDAEVTTMAQSVPWGISRVQAPASHNRGLTGSGVKVAVLDTGISTHPDLNIRGGASFVPGEPSTQDGNGHGTHVAGTIAALNNSIGVLGVAPSAELYAVKVLGASGSGSLSSIAQGLEWAGNNGMHVANLSLGSPSPSATLEQAVNSATSRGVLVVAASGNSGEGSISYPARYANAMAVGATDQNNNHASFSQYGAGLDIVAPGVNVQSTYPGSTYASLNGTSMATPHVAGAAALVKQKNPSWSNVQIRNHLKNTATSLGSTNLYGSGLVNAFAATR

SEQ ID NO: 63293 - protein, 380 aa, Unidentified
VRSKKLWIVASTALLISVAFSSSIASAAEEAKEKYLIGFNEQEAVSEFVEQVEANDEVAILSEEEEVEIELLHEFETIPVLSVELSPEDVDALELDPAISYIEEDAEVTTMAQSVPWGISRVQAPAAHRRGLTGSGVKVAVLDTGISTHPDLNIRGGASFVPGEPSTQDGNGHGTHVAGTIAALDNSIGVLGVAPSAELYAVKVLGASGSGSISSIAQGLEWAGNNGMHVANLSLGSPSPSATLEQAVNSATSRGVLVVAASGNSGAGSISYPARYANAMAVGATDQNNNRASFSQYGAGLDIVAPGVNVQSTYPGSTYASLNGTSMATPHVAGAAALVKQKNPSWSNVRIRNRLKNTATSLGSTNLYGSGLVNAEAATR

SEQ ID NO: 63294 - protein, 380 aa, Unidentified
VRSKKLWIVASTALLISVAFSSSIASAAEEAKEKYLIGFNEQEAVSEFVEQVEANDEVAILSEEEEVEIELLHEFETIPVLSVELSPEDVDALELDPAISYIEEDAEVTTMAQSVPWGISRVQAPAAHRRGLTGRGVKVAVLDTGISTHPDLNIRGGASFVPGEPSTQDGNGHGTHVAGTIAALDNSIGVLGVAPSAELYAVKVLGASGAGSVSSIAQGLEWAGNNGMHVANLSLGSPSPSATLEQAVNSATSRGVLVVAASGNSGAGSISYPARYANAMAVGATDQNNNRASFSQYGAGLDIVAPGVNVQSTYPGSTYASLNGTSMATPHVAGAAALVKQKNPSWSNVQIRNRLKNTATSLGSTNLYGSGLVNAEAATR

SEQ ID NO: 63295 - protein, 380 aa, Unidentified
VRSKKLWIVASTALLISVAFSSSIASAAEEAKEKYLIGFNEQEAVSEFVEQVEANDEVAILSEEEEVEIELLHEFETIPVLSVELSPEDVDALELDPAISYIEEDAEVTTMAQSVPWGISRVQAPAAHRRGLTGSGVKVAVLDTGISTHPDLNIRGGASFVPGEPSTQDGNGHGTHVAGTIAALDNSIGVLGVAPSAELYAVKVLGASGGGSVSSIAQGLEWAGNNGMHVANLSLGSPSPSATLEQAVNSATSRGVLVVAASGNSGAGSISYPARYANAMAVGATDQNNNRASFSQYGAGLDTVAPGVNVQSTYPGSTYASLNGTSMATPHVAGAAVLVKQKNPSWSNVQIRNHLKNTATSLGSTNLYGSGLVNAEAATR

SEQ ID NO: 63296 - protein, 380 aa, Unidentified
VRSKKLWIVASTALLISVAFSSSIASAAEEAKEKYLIGFNEQEAVSEFVEQVEANDEVAILSEEEEVEIELLHEFETIPVLSVELSPEDVDALELDPAISYIEEDAEVTTMAQSVPWGISRVQAPAAHNRGLTGSGVKVAVLDTGISTHPDLAIRGGASFVPGEPSRQDGNGHGTHVAGTIAALNNSIGVLGVAPSAELYAVKVLGASGSGSVSSIAQGLEWAGNFGMHVANLSLGSPSPSATLEQAVNSATRRGVLVVAASGNSGAGSISYPARYANAMAVGATDQDNNRASFSQYGAGLDIVAPGVNVQSTYPGSTYASLNGTSMATPHVAGAAALVKQKNPSWSNVQIRNHLKNTATSLGSTNLYGSGLVNAEAATR

SEQ ID NO: 63297 - protein, 380 aa, Unidentified
VRSKKLWIVASTALLISVAFSSSIASAAEEAKEKYLIGFNEQEAVSEFVEQVEANDEVAILSEEEEVEIELLHEFETIPVLSVELSPEDVDALELDPAISYIEEDAEVTTMAQSVPWGISRVQAPAAHNRGLTGSGVKVAVLDSGISTHPDLNIRGGASFVPGEPSTQDGNGHGTHVAGTIAALNNSIGVLGVAWSAELYAVKVLGASGSGSVSSIAQGLEWAGNNRMHVANLSLGSPSPSATLEQAVNSATSRGVLVVAASGNSGAGSISYPARYANAMAVGATDQNNNRASFSQYGAGLDIVAPGVNVQSTAPGSTYASLNGTSMATPHVAGAAALVKQKNPSWSFVQIRNHLKNTATSLGSTNLYGSGLVNAEAATR

SEQ ID NO: 63298 - protein, 380 aa, Unidentified
VRSKKLWIVASTALLISVAFSSSIASAAEEAKEKYLIGFNEQEAVSEFVEQVEANDEVAILSEEEEVEIELLHEFETIPVLSVELSPEDVDALELDPAISYIEEDAEVTTMAQSVPWGISRVQAPAAHRRRLTGSGVKVAVLDTGISTHPDLDIRGGASFVPGEPSTQDGNGHGTHVAGTIAALNNSIGVLGVAPSAELYAVKVLGASGSGSVSSIAQGLEWAGNNGMHVANLSLGSPSPSATLEQAVNSATSRGVLVVAASGNSGAGSISYPARYANAMAVGATDQNNNRASFSQYGAGLDIVAPGVNVQSTYPGSTYASLNGTSMATPHVAGEAALVKQKNPSWRNVQIRNHLKNTATSLGSTNLYGSGLVNAEAATR

SEQ ID NO: 63299 - protein, 380 aa, Unidentified
VRSKKLWIVASTALLISVAFSSSIASAAEEAKEKYLIGFNEQEAVSEFVEQVEANDEVAILSEEEEVEIELLHEFETIPVLSVELSPEDVDALELDPAISYIEEDAEVTTMAQSVPWGISRVQAPAAHRRGLTGRGVKVAVLDTGISTHPDLDIRGGASFVPGEPSTQDGNGHGTHVAGTIAALNNSIGVLGVAPSAELYAVKVLGASGSGSVSSIAQGLEWAGNNGMHVANLSLGSPSPSATLEQAVNSATSRGVLVVAASGNSGAGSISYPARYANAMAVGATDQNNNRASFSQYGAGLDIVAPGVNVQSTYPGSTYASLNGTSMATPHVAGAAALVKQKNPSWRNVQIRNRLKNTATSLGSTNLYGSGLVNAEAATR

SEQ ID NO: 63300 - protein, 380 aa, Unidentified
VRSKKLWIVASTALLISVAFSSSIASAAEEAKEKYLIGFNEQEAVSEFVEQVEANDEVAILSEEEEVEIELLHEFETIPVLSVELSPEDVDALELDPAISYIEEDAEVTTMAQSVPWGISRVQAPAAHNRGLTGSGVKVAVLDTGISTHPDLNIRGGASFVPGEPSTQDGNGHGTHVAGTIAALDNSIGVLGVAPSAELYAVKVLGASGGGAISSIAQGLEWAGNNGMHVANLSLGSPSPSATLEQAVNSATSRGVLVVAASGNSGAGSISYPARYANAMAVGATDQNNNRASFSQYGAGLDIVAPGVNVQSTYPGSTYASLNGTSSATPHVAGAAVLVKQKNPSWSNVRIRNHLKNTATSLGSTNLYGSGLVNAEAATR

SEQ ID NO: 63301 - protein, 380 aa, Unidentified
VRSKKLWIVASTALLISVAFSSSIASAAEEAKEKYLIGFNEQEAVSEFVEQVEANDEVAILSEEEEVEIELLHEFETIPVLSVELSPEDVDALELDPAISYIEEDAEVTTMAQSVPWGISRVQAPAAHNRGLTGSGVKVAVLDTGISTHPDLNIRGGASFVPGEPSTQDGNGHGTHVAGTIAALNNSIGVLGVAPSAELYAVKVLGASGSGSLSSIAQGLEWAGNNGMHVANLSLGSPSPSATLEQAVNSATSRGVLVVAASGNSGEGSISYPARYANAMAVGATDQNNNHADFSQYGAGLDIVAPGVNVQSTYPGSTYASLNGTSMATPHVAGAAALVKQKNPSWSNVQIRNRLKNTATSLGSTNLYGSGLVNAEAATR

SEQ ID NO: 63302 - protein, 380 aa, Unidentified
VRSKKLWIVASTALLISVAFSSSIASAAEEAKEKYLIGFNEQEAVSEFVEQVEANDEVAILSEEEEVEIELLHEFETIPVLSVELSPEDVDALELDPAISYIEEDAEVTTMAQSVPWGISRVQAPAAHNRGLTGRGVKVAVLDTGISTHPDLNIRGGASFVPGEPSTQDGNGHGTHVAGTIAALNNSIGVLGVAPSAELYAVKVLGASGAGSVSSIAQGLEWAGNNGMEVANLSLGSPSPSATLEQAVNSATSRGVLVVAASGNSGAGSISYPARYANAMAVGATDQNNNRASFSQYGFGLDIVAPGVNVQSTYPGSTYASLNGTSMATPHVAGAAALVKQKNPSWSNVQIRNRLKNTATSLGSTNLYGSGLVNAEAATR

SEQ ID NO: 63303 - protein, 380 aa, Unidentified
VRSKKLWIVASTALLISVAFSSSIASAAEEAKEKYLIGFNEQEAVSEFVEQVEANDEVAILSEEEEVEIELLHEFETIPVLSVELSPEDVDALELDPAISYIEEDAEVTTMAQSVPWGISRVQAPAAHNRGLWGSGVKVAVLDTGISTHPDLNIRGGASFVPGEPSTQDGNGHGTHVAGTIAALNNRIGVLGVAPSAELYAVKVLGASGSGSVSSIAQGLEWAGNNGMHVANLSLGSPSPSATLEQAVNSATSRGVLVVAASGNSGAGSISWPARYANAMAVGATDQNNNRASFSQYGAGLDIVAPGVNVQSTYPGMTYASLNGTSMATPHVAGAAALVKQKNPSWSNVQIRNHLKNTATSLGSTNLYGSGLVNCEAATR

SEQ ID NO: 63304 - protein, 380 aa, Unidentified
VRSKKLWIVASTALLISVAFSSSIASAAEEAKEKYLIGFNEQEAVSEFVEQVEANDEVAILSEEEEVEIELLHEFETIPVLSVELSPEDVDALELDPAISYIEEDAEVTTMAQSVPWGISRVQAPAAHNRGLTGRRVKVAVLDTGISTHPDLNIRGGASFVPGEPSTQDGNGHGTHVAGTIAALNNSIGVLGVAPSAELYAVKVLGASGSGSVSSIAQGLEWAGNNGMHVANLSLGSPSPSATLEQAVNSATSRGVLVVAASGNSGAGSISYPARYANAMAVGATDQDNNRASFSQWGAGLDIVAPGVNVQSTYPGSTYASLNGTSMATPHVAGAAALVKQKNSSWSNVQIRNHLKNTATSLGSTNLYGSGLVNAEAATR

SEQ ID NO: 63305 - protein, 380 aa, Unidentified
VRSKKLWIVASTALLISVAFSSSIASAAEEAKEKYLIGFNEQEAVSEFVEQVEANDEVAILSEEEEVEIELLHEFETIPVLSVELSPEDVDALELDPAISYIEEDAEVTTMAQSVPWGISRVQAPAAHRRGLTGRGVKVAVLDTGISTHPDLNIRGGASFVPGEPSTQDGNGHGTHVAGTIAALDNSIGVLGVAPSAELYAVKVLGASGSGSVSSIAQGLEWAGNNGMHVANLSLGSPSPSATLEQAVNSATSRGVLVVAASGNSGAGSISYPARYANAMAVGATDQDNNRASFSQYGAGLDIVAPGVNVQSTYPGSTYASLNGTSMATPHVAGAAALVKQKNPSWSNVQIRNRLKNTATSLGSTNLYGSGLVNAEAATR

SEQ ID NO: 63306 - protein, 380 aa, Unidentified
VRSKKLWIVASTALLISVAFSSSIASAAEEAKEKYLIGFNEQEAVSEFVEQVEANDEVAILSEEEEVEIELLHEFETIPVLSVELSPEDVDALELDPAISYIEEDAEVTTMAQSVPWGISRVQAPAAHNRRLTGRGVKVAVLDTGISTHPDLNITGGASFVPGEPSTQDGNGHGTHVAGTIAALNNSIGVLGVAPSAELYAVKVLGASGSGSVSSIAQGLEWAGNNGMHVANLSLGSPSPSATLEQAVNSATSRGVLVVAASGNSGAGSISYPARYANAMAVGATDQNNNRASFSQYGAGLDIVAPGVNVQSTYPGSTYASLNGTSMATPHVAGEAALVKQKNPSWRNVQIRNHLKNTATSLGSTNLYGSGLVNAEAATR

SEQ ID NO: 63307 - protein, 219 aa, Unidentified
AQSVPWGISRVQAPAAHNRGLTGSGVKVAVLDTGISTHPDLNIRGGASFVPGEPSTQDGNGHGTHVAGTIAALNNSIGVLGVAPSAELYAVKVLGASGSGSVSSIAQGLEWAGNNGMHVANLSLGSPSPSATLEQAVNSATSRGVLVVAASGNSGAGSISYPARYANAMAVGATDQNNNRASFSQYGAGLDIVAPGVNVQSTYPGCVTADTWVTTAEGP

SEQ ID NO: 63308 - protein, 219 aa, Unidentified
AQSVPWGISRVQAPAAHNRGLTGSGVKVAVLDTGISTHPDLNIRGGASFVPGEPSTQDGNGHGTHVAGTIAALNNSIGVLGVAPSAELYAVKVLGASGSGSVSSIAQGLEWAGNNGMHVANLSLGSPSPSATLEQAVNSATSRGVLVVAASGNSGAGSISYPARYANAMAVGATDQNNNRASFSQYGAGLDIVAPGVNVQSTYPGCVTADTWVMTTAGP

SEQ ID NO: 63309 - protein, 217 aa, Unidentified
AQSVPWGISRVQAPAAHNRGLTGSGVKVAVLDTGISTHPDLNIRGGASFVPGEPSTQDGNGHGTHVAGTIAALNNSIGVLGVAPSAELYAVKVLGASGSGSVSSIAQGLEWAGNNGMHVANLSLGSPSPSATLEQAVNSATSRGVLVVAASGNSGAGSISYPARYANAMAVGATDQNNNRASFSQYGAGLDIVAPGVNVQSTYPGCLAPGSKVLTEH

SEQ ID NO: 63310 - protein, 274 aa, Bacillus clausii
AQTVPYGIPLIKADKVQAQGFKGANVKVAVLDTGIQASHPDLNVVGGASFVAGEAYNTDGNGHGTHVSGTVAALDNNIGVLGVAPSVSLYAVKVLNSFGLGSYSGIVSGIEWATTNGMDVINMSLGSPSGSTAMKQAVDNAYARGVVVVAAAGNEGSSGNTNTIRYPAKYDSVIAVGAVDSNSQRASFSSVGAELEVMAPGVGVYSTYPTNTYKTLSGTSMASPHVAGAAALILSKHPNLSASQVRNRLSSTATYLGPSFYYGKGLINVEAAAQ

SEQ ID NO: 63311 - protein, 274 aa, Bacillus licheniformis
AQVVPYGIPLIKADKVQAQGFKGANVKVAVLDTGIQASHPDLNVVGGASFVAGEAYNTDGNGHGTHVSGTVAALDNNIGVLGVAPSVSLYAVKVLNSSGSGSYSGIVSGIEWATTNGMDVINISLGSPSGSTAMKQAVDNAYARGVVVVAAAGNSGSSGNTNTIQYPAKYDSVIAVGAVDSNSQRASFSSVGAELEVMAPGVGVYSTYPPNTYATLSGTSMASPHVAGAAALILSKHPNLSGSQVRNRLSSTATYLGPSFYYGKGLINVEAAAQ

SEQ ID NO: 63312 - protein, 274 aa, Bacillus licheniformis
AQVVPYGIEMIKADKVQAQGFKGANVKVAVLDTGIQASHPDLNVVGGASFVAGEAYNTDGNGHGTHVSGTVAALDNNTGVLGVAPSVSLYAVKVLNSSGSASYSGIVSGIEWATTNGMDVINISLGSPSGSTAMKQAVDNAYARGVVVVAAAGNSGSSGNTNTIQYPAKYDSVIAVGAVDSNSQRASFSSVGAELEVMAPGVGVYSTYPTNTYATLSGTSMASPHVAGAAALILSKHPNLSASQVRNRLSSTATYLGPSFYYGKGLINVEAAAQ

SEQ ID NO: 63313 - protein, 274 aa, Bacillus licheniformis
AQVVPYGIEMIKADKVQAQGFKGANVKVAVLDTGIQASHPDLNVVGGASFVAGEAYNTDGNGHGTHVSGTVAALDNNTGVLGVAPSVSLYAVKVLNSSGSGSYSGIVSGIEWATTNGMDVINISLGSPSGSTAMKQAVDNAYARGVVVVAAAGNSGSSGNTNTIEYPAKYDSVIAVGAVDSNSQRASFSSVGAELEVMAPGVGVYSTYPPNTYATLSGTSMASPHVAGAAALILSKHPNLSASQVRNRLSSTATYLGPSFYYGKGLINVEAAAQ

SEQ ID NO: 63314 - protein, 274 aa, Bacillus licheniformis
AQVVPYGIPLIKADKVQAQGFKGANVKVAVLDTGIQASHPDLNVVGGASFVAGEAYNTDGNGHGTHVSGTVAALDNNIGVLGVAPSSSLYAVKVLNSSGSGSYSGIVSGIEWATTNGMDVINISLGSPSGSTAMKQAVDNAYARGVVVVAAAGNSGSSGNTNTIQYPAKYDSVIAVGAVDSNSQRASFSSVGAELEVMAPGVGVYSTYPPNTYATLSGTSMASPHVAGAAALILSKHPNLSASQVRNRLSSTATYLGPSFYYGKGLINVEAAAQ

SEQ ID NO: 63315 - protein, 274 aa, Bacillus licheniformis
AQVVPYGIPLIKADKVQAQGFKGANVKVAVLDTGIQASHPDLNVVGGASFVAGEAYNTDGNGHGTHVAGTVAALDNNTGVLGVAPSVSLYAVKVLNSSGNGSYSNIVSGIEWATTNGMQVINMSLGGPSGSTAMKQAVDNAYARGVVVVAAAGNSGSNGDQNTIAYPAKYDSVIAVGAVDSNSQRASFSSVGAELEVMAPGAGVYSTYPTNTYATLSGTSMASPHVAGAAALILSKHPNLSASQVRNRLSSTATYLGPSFYYGSGLINVEAAAQ

SEQ ID NO: 63316 - protein, 274 aa, Bacillus clausii
AQTVPYGIPLIKADKVQAQGFKGANVKVAVLDTGIQASHPDLNVVGGASFVAGEAYNTDGNGHGTHVSGTVAALDNNIGVLGVAPSVSLYAVKVLNSFGLGTISGIVSGIEWATTNGMDVINMSLGSPSGSTAMKQAVDNAYARGVVVVAAAGNSGSSGNTNTIRYPAKYDSVIAVGAVDSNSQRASFSSVGAELEVMAPGVGVYSTYPTNTYATLSGTSMASPHVAGAAALILSKHPNLSASQVRNRLSSTATYLGPSFYYGKGLINVEAAAQ

SEQ ID NO: 63317 - protein, 274 aa, Bacillus clausii
AQTVPYGIPLIKADKVQAQGFKGANVKVAVLDTGIQASHPDLNVVGGASFVAGEAYNTDGNGHGTHVSGTVAALDNNIGVLGVAPSVSLYAVKVLNSFGLGSYSGIVSGIEWATTNGMDVINMSLGSPSGSTAMKQAVDNAYARGVVVVAAAGNSGSSGNTNTIQYPAKYDSVIAVGAVDSNSQRASFSSVGPELEVMAPGVGVYSTYPTNTYKTLSGTSMASPHVAGAAALILSKHPNLSASQVRNRLSSTATYLGPSFYYGKGLINVEAAAQ

SEQ ID NO: 63318 - protein, 274 aa, Bacillus licheniformis
AQVVPYGIEMIKADKVQAQGFKGANVKVAVLDTGIQASHPDLNVVGGASFVAGEAYNTDGNGHGTHVSGTVAALDNNTGVLGVAPSVSLYAVKVLNSSGSGSYSGIVSGIEWATTNGMDVINISLGSPSGSTAMKQAVDNAYARGVVVVAAAGNSGSSGNTNTIQYPAKYDSVIAVGAVDSNSQRASFSSVGAELEVMAPGVGVYSTYPPNTYATLSGTSMASPHVAGAAALILSKHPNLSASQVRNRLSSTATYLGPSFYYGKGLINVEAAAQ

SEQ ID NO: 63319 - protein, 274 aa, Bacillus licheniformis
AQVVPYGIPMIKADKVQAQGFKGANVKVAVLDTGIQASHPDLNVVGGASFVAGEAYNTDGNGHGTHVSGTVAALDNNTGVLGVAPSVSLYAVKVLNSSGSASYSGIVSGIEWATTNGMDVINISLGSPSGSTAMKQAVDNAYARGVVVVAAAGNSGSSGNTNTIQYPAKYDSVIAVGAVDSNSQRASFSSVGAELEVMAPGVGVYSTYPPNTYATLSGTSMASPHVAGAAALILSKHPNLSASQVRNRLSSTATYLGPSFYYGKGLINVEAAAQ

SEQ ID NO: 63320 - protein, 274 aa, Bacillus clausii
AQTVPYGIPLIKADKVQAQGFKGANVKVAVLDTGIQASHPDLNVVGGASFVAGEAYNTDGNGHGTHVSGTVAALDNNIGVLGVAPSVSLYAVKVLNSFGLGSYSGIVSGIEWATTNGMDVINMSLGSPSGSTAMKQAVDNAYARGVVVVAAAGNEGSSGNTNTIRYPAKYDSVIAVGAVDSNSQRASFSSVGPELEVMAPGVGVYSTYPTNTYATLSGTSMASPHVAGAAALILSKHPNLSASQVRNRLSSTATYLGPSFYYGKGLINVEAAAQ

SEQ ID NO: 63321 - protein, 269 aa, Unidentified
AQSVPWGISRVQAPAAHNRGLAGSGVKVAVLDTGISTHPDLNIRGGASFVPGEPSTQDGNGHGTHAAGTIAALNNSIGVLGVAPSAELYAVKVLGASGGGAISSIAQGLEWAGLNGMHVANLSLGSPSPSATLEQAVNSATSRGVLVVAASGNSGADSISYPARYANAMAVGATDQNNNRADFSQYGAGLDIVAPGVNVQSTYPGSAYASLNGTSMATPHVAGAAVLVKQKNPSWSNVRIRDHLKNTATSLGSTNLYGSGLVNAFAATR

SEQ ID NO: 63322 - protein, 269 aa, Unidentified
AQSVPWGISRVQAPAAHNRGLAGGGVKVAVLDTGISTHPDLNIRGGASFVPGEPSTQDGNGHGTHVAGTIAALDNSIGVLGVAPSAELYAVKVLGASGGGAISSIAQGLEWAGNNGMHVANLSLGSPSPSATLEQAVNSATSRGVLVVAASGNSGADSISYPARYANAMAVGATDQNNNRADFSQYGAGLDIVAPGVNVQSTYPGSTYASQNGTSMATPHVAGAAVLVKQKNPSWSNVRIRDHLKNTATSLGSTNLYGSGLVNAFAATR

SEQ ID NO: 63323 - protein, 269 aa, Unidentified
AQSVPWGISRVQAPAAHNRGLAGSGVKVAVLDTGISTHPDLNIRGGASFVPGEPSTQDGNGHGTHVAGTIAALNNSIGVLGVAPSAELYAVKVLSASGNGAISSIAGGLEWAGNNGMHVANLSLGSPSPSATLEQAVNSATSRGVLVVAASGNSGADSISYPARYANAMAVGATDQNNNRADFSQYGAGLDIVAPGVNVQSTYPGSTYASQNGTSMATPHVAGAAVLVKQKNPSWSNVRIRDHLKNTATSLGSTNLYGSGLVNAFAATR

SEQ ID NO: 63324 - protein, 269 aa, Unidentified
AQSVPWGISRVQAPAAHNRGLAGSGVKVAVLDTGISTHPDLNIRGGASFVPGEPSTQDGNGHGTHVAGTIAALDNSIGVLGVAPSAELYAVKVLGASGGGAISSIAQGLEWAGNNGMHVANLSLGSESPSATLEQAVNSATSRGVLVVAASGNSGEGSISYPARYANAMAVGATDQNNNRADFSQYGAGLDIVAPGVNVQSTYPGSTYASLNGTSMATPHVAGAAVLVKQKNPSWSNVRIRDHLKNTATSLGSTNLYGSGLVNAFVATR

SEQ ID NO: 63325 - protein, 269 aa, Unidentified
AQSVPWGISRVQAPAAHNRGLAGRGVKVAVLDTGISTHPDLNIRGGASFVPGEPSTQDGNGHGTHVAGTIAALNNSIGVLGVAPSAELYAVKVLGASGGGAISSIAQGLEWAGNNGMHVANLSLGSESPSATLEQAVNSATSRGVLVVAASGNSGADSISYPARYANAMAVGATDQNNNRADFSQYGAGLDIVAPGVNVQSTYPGSTYASLNGTSMATPHVAGAAVLVKQKNPSWSNVRIRDHLKNTATSLGSTNLYGSGLVNVFAATR

SEQ ID NO: 63326 - protein, 269 aa, Unidentified
AQSVPWGISRVQAPAAHNRGLAGGGVKVAVLDTGISTHPDLNIRGGASFVPGEPSTQDGNGHGTHVAGTIAALNNNIGVLGVAPSAELYAVKVLSASGQGAISSIAQGLEWAGNNGMHVANLSLGSPSPSATLEQAVNSATSRGVLVVAASGNSGADSISYPARYANAMAVGATDQNNNRADFSQYGAGLDIVAPGVNVQSTYPGSTYASLNGTSMATPHVAGAAVLVKQKNPSWSNVRIRDHLKNTATSLGSTNLYGSGLVNAFAATR

SEQ ID NO: 63327 - protein, 269 aa, Unidentified
AQSVPWGIERVQAPAAHNRGLTGSGVKVAVLDTGISTHPDLRIRGGASFVPGEPSTQDGNGHGTHVAGTIAALDNSIGVLGVAPSAELYAVKVLGASGSGSVSSIAQGLEWAGNNGMVVANLSLGSPSPSATLEQAVNSATSRGVLVVAASGNSGAGSISYPARYANAMAVGATDENNERASFSQYGPGLDIVAPGVNILSTWPGSTYASLNGTSMATPHVAGAAALVKQKNPSWSNVQIRNHLKNTATDLGSTWEYGSGLVNAEAATR

SEQ ID NO: 63328 - protein, 269 aa, Unidentified
AQSVPWGISRVQAPAAHNRGLAGRGVKVAVLDTGISTHPDLNIRGGASFVPGEPSTQDGNGHGTHVAGTIAALDNSIGVLGVAPSAELYAVKVLGASGGGAISSIAQGLEWAGNNGMHVANLSLGSPSPSATLEQAVNSATSRGVLVVAASGNSGEESISYPARYANAMAVGATDQNNNRADFSQYGAGLDIVAPGVNVQSTYPGSTYASLNGTSMATPHVAGAAVLVKQKNPSWSNVRIRDHLKNTATSLGSTNLYGSGLVNAFAATR

SEQ ID NO: 63329 - protein, 269 aa, Unidentified
AQSVPWGISRVQAPAAHNRGLAGSGVKVAVLDTGISTHPDLNIRGGASFVPGEPSTQDGNGHGTHVAGTIAALNNSIGVLGVAPSAELYAVKVLGASGNGAISSIAQGLEWAGNNGMHVANTSLGSSSPSATLEQAVNSATSRGVLVVAASGNSGADSISYPARYANAMAVGATDQNNNRADFSQYGAGLDIVAPGVNVQSTYPGSTYASQNGTSMATPHVAGAAVLVKQKNPSWSNVRIRDHLKNTATSLGSTNLYGSGLVNAFAATR

SEQ ID NO: 63330 - protein, 269 aa, Unidentified
AQSVPWGISRVQAPAAHNRGLAGSGVKVAVLDTGISTHPDLNIRGGASFVPGEPSTQDGNGHGTHVAGTIAALDNNIGVLGVAPSAELYAVKVLSASGNGAISSIAQGLEWAGNNGMHVANLSLGSPSPSATLEQAVNSATSRGVLVVAASGNSGADSISYPARYANAMAVGATDQNNNRADFSQYGAGLDIVAPGVNVQSTYPGSTYASLNGTSMATPHVAGAAVLVKQKNPSWSNVRIRDHLKNTATSLGSTNLYGSGLVNAFAATR

SEQ ID NO: 63331 - protein, 269 aa, Unidentified
AQSVPWGISRVQAPAAHNRGLAGSGVKVAVLDTGISTHPDLNIRGGASFVPGEPSTQDGNGHGTHVAGTIAALNNSIGVLGVAPSAELYAVKVLGASGGGAISSVAQGLEWAGNNGMHVANLSLGSPSPSATLEQAVNSATSRGVLVVAASGNSGADSISYPARYANAMAVGATDQNNNRADFSQYGAGLDIVAPGVNVQSTYPGSTYASLNGTSMATPHVAGAAVLVKQKYPSWSNVRIRDHLKNTATSLGSTNLYGSGLVNAFVATR

SEQ ID NO: 63332 - protein, 269 aa, Unidentified
AQSVPWGISRVQAPAAHNRGLAGSGVKVAVLDTGISTHPDLNIRGGASFVPGEPSTQDGNGHGTHVAGTIAALNNSIGVLGVAPSAELYAVKVLAASGQGAISSIAQGLEWAGNNGMHVANISLGSESPSATLEQAVNSATSRGVLVVAASGNSGADSISYPARYANAMAVGATDQNNNRADFSQYGAGLDIVAPGVNVQSTYPGSTYASLNGTSMATPHVAGAAVLVKQKNPSWSNVRIRDHLKNTATSLGSTNLYGSGLVNAFAATR

SEQ ID NO: 63333 - protein, 269 aa, Unidentified
AQSVPWGISRVQAPAAHNRGLAGGGVKVAVLDTGISTHPDLNIRGGASFVPGEPSTQDGNGHGTHVAGTIAALNNNIGVLGVAPSAELYAVKVLGASGQGAISSIAQGLEWAGNNGMHVANLSLGAPSPSATLEQAVNSATSRGVLVVAASGNSGADSISYPARYANAMAVGATDQNNNRADFSQYGAGLDIVAPGVNVQSTYPGSTYASLNGTSMATPHVAGAAVLVKQKNPSWSNVRIRDHLKNTATSLGSTNLYGSGLVNAFAATR

SEQ ID NO: 63334 - protein, 269 aa, Unidentified
AQSVPWGISRVQAPAAHNRGLAGSGVKVAVLDTGISTHPDLNIRGGASFVPGEPSTQDGNGHGTHVAGTIAALNNSIGVLGVAPSAELYAVKVLAASGNGAISSIAQGLEWAGNNGMHVANLSLGAPSPSATLEQAVNSATSRGVLVVAASGNSGADSISYPARYANAMAVGATDQNNNRADFSQYGAGLDIVAPGVNVQSTYPGSTYASQNGTSMATPHVAGAAVLVKQKNPSWSNVRIRDHLKNTATSLGSTNLYGSGLVNAFAATR

SEQ ID NO: 63335 - protein, 269 aa, Unidentified
AQSVPWGISRVQAPAAHNRGLAGSGVKVAVLDTGISTHPDLNIRGGASFVPGEPSTQDGNGHGTHVAGTIAALDNSIGVLGVAPSAELYAVKVLGASGGGAISSIAQGLEWAGNNGMHVANLSLGSESPSATLEQAVNSATSRGVLVVAASGNSGAESISYPARYANAMAVGATDQNNNRADFSQYGAGLDIVAPGVNVQSTYPGSTYASLNGTSMATPHVAGAAVLVKQKNPSWSNVRIRDHLKNTATSLGSTNLYGSGLVNAFVATR

SEQ ID NO: 63336 - protein, 269 aa, Unidentified
AQSVPWGISRVQAPAAHNRGLAGSGVKVAVLDTGISTHPDLNIRGGASFVPGEPSTQDGNGHGTHVAGTIAALNNSIGVLGVAPSAELYAVKVLAASGQGAISSIAQGLEWAGNNGMHVANLSLGSSSPSATLEQAVNSATSRGVLVVAASGNSGADSISYPARYANAMAVGATDQNNNRADFSQYGAGLDIVAPGVNVQSTYPGSTYASQNGTSMATPHVAGAAVLVKQKNPSWSNVRIRDHLKNTATSLGSTNLYGSGLVNAFAATR

SEQ ID NO: 63337 - protein, 269 aa, Unidentified
AQSVPWGISRVQAPAAHNRGLAGSGVKVAVLDTGISTHPDLNIRGGASFVPGEPSTQDGNGHGTHVAGTIAALDNSIGVLGVAPSAELYAVKVLAASGGGAISSIAQGLEWAGNNGMHVANLSLGAPSPSATLEQAVNSATSRGVLVVAASGNSGADSISYPARYANAMAVGATDQNNNRADFSQYGAGLDIVAPGVNVQSTYPGSTYASLNGTSMATPHVAGAAVLVKQKNPSWSNVRIRDHLKNTATSLGSTNLYGSGLVNAFAATR

SEQ ID NO: 63338 - protein, 269 aa, Unidentified
AQSVPWGISRVQAPAAHNRGLAGSGVKVAVLDTGISTHPDLNIRGGASFVPGEPSTQDGNGHGTHVAGTIAALNNSIGVLGVAPSAELYAVKVLAASGNGAISSIAQGLEWAGNNGMHVANLSLGAPSPSATLEQAVNSATSRGVLVVAASGNSGADSISYPARYANAMAVGATDQNNNHADFSQYGAGLDIVAPGVNVQSTYPGSTYASLNGTSMATPHVAGAAVLVKQKNPSWSNVRIRDHLKNTATSLGSTNLYGSGLVNAFAATR

SEQ ID NO: 63339 - protein, 269 aa, Unidentified
AQSVPWGISRVQAPAAHNRGLAGSGVKVAVLDSGISTHPDLNIRGGASFVPGEPSTQDGNGHGTHVAGTIAALNNSIGVLGVAPSAELYAVKVLGASGGGAISSIAQGLEWAGNNRMHVANLSLGSPSPSATLEQAVNSATSRGVLVVAASGNSGADSISYPARYANAMAVGATDQNNNRADFSQYGAGLDIVAPGVNVQSTYPGSAYASLNGTSMATPHVAGAAVLVKQKNPSWSNVRIRDHLKNTATSLGSTNLYGSGLVNAFAATR

SEQ ID NO: 63340 - protein, 269 aa, Unidentified
AQSVPWGISRVQAPAAHNRGLAGSGVKVAVLDTGISTHPDLNIRGGASFVPGEPSTQDGNGHGTHVAGTIAALNNNIGVLGVAPSAELYAVKVLGASGGGAISSIAQGLEWAGNNGMHVANLSLGAPSPSATLEQAVNSATSRGVLVVAASGNSGADSISYPARYANAMAVGATDQNNNRADFSQYGAGLDIVAPGVNVQSTYPGSTYASQNGTSMATPHVAGAAVLVKQKNPSWSNVRIRDHLKNTATSLGSTNLYGSGLVNAFAATR

SEQ ID NO: 63341 - protein, 269 aa, Unidentified
AQSVPWGISRVQAPAAHNRGLAGSGVKVAVLDTGISTHPDLNIRGGASFVPGEPSTQDGNGHGTHVAGTIAALNNSIGVLGVAPSAELYAVKVLGASGQGAISSIAQGLEWAGNNGMHVANISLGAESPSATLEQAVNSATSRGVLVVAASGNSGADSISYPARYANAMAVGATDQNNNRADFSQYGAGLDIVAPGVNVQSTYPGSTYASLNGTSMATPHVAGAAVLVKQKNPSWSNVRIRDHLKNTATSLGSTNLYGSGLVNAFAATR

SEQ ID NO: 63342 - protein, 269 aa, Unidentified
AQSVPWGISRVQAPAAHNRGLAGSGVKVAVLDTGISTHPDLNIRGGASFVPGEPSTQDGNGHGTHVAGTIAALNNNIGVLGVAPSAELYAVKVLAASGGGAISSIAQGLEWAGNNGMHVANLSLGAPSPSATLEQAVNSATSRGVLVVAASGNSGADSISYPARYANAMAVGATDQNNNRADFSQYGAGLDIVAPGVNVQSTYPGSTYASLNGTSMATPHVAGAAVLVKQKNPSWSNVRIRDHLKNTATSLGSTNLYGSGLVNAFAATR

SEQ ID NO: 63343 - protein, 269 aa, Unidentified
AQSVPWGISRVQAPAAHNRGLAGRGVKVAVLDTGISTHPDLNIRGGASFVPGEPSTQDGNGHGTHVAGTIAALNNSIGVLGVAPSAELYAVKVLGASGGGAISSIAQGLEWAGNNGMHVANLSLGSESPSATLEQAVNSATSRGVLVVAASGNSGEESISYPARYANAMAVGATDQNNNRADFSQYGAGLDIVAPGVNVQSTYPGSTYASLNGTSMATPHVAGAAVLVKQKRPSWSNVRIRDHLKNTATSLGSTNLYGSGLVNAEAATR

SEQ ID NO: 63344 - protein, 269 aa, Unidentified
AQSVPWGISRVQAPAAHNRGLAGSGVKVAVLDTGISTHPDLNIRGGASFVPGEPSTQDGNGHGTHVAGTIAALNNSIGVLGVAPSAELYAVKVLGASGNGAISSIAQGLEWAGNNGMHVANLSLGASSPSATLEQAVNSATSRGVLVVAASGNSGADSISYPARYANAMAVGATDQNNNRADFSQYGAGLDIVAPGVNVQSTYPGSTYASQNGTSMATPHVAGAAVLVKQKNPSWSNVRIRDHLKNTATSLGSTNLYGSGLVNAFAATR

SEQ ID NO: 63345 - protein, 269 aa, Unidentified
AQSVPWGISRVQAPAAHNRGLAGGGVKVAVLDTGISTHPDLNIRGGASFVPGEPSTQDGNGHGTHVAGTIAALNNSIGVLGVAPSAELYAVKVLSASGGGAISSIAQGLEWAGNNGMHVANLSLGAPSPSATLEQAVNSATSRGVLVVAASGNSGADSISYPARYANAMAVGATDQNNNRADFSQYGAGLDIVAPGVNVQSTYPGSTYASLNGTSMATPHVAGAAVLVKQKNPSWSNVRIRDHLKNTATSLGSTNLYGSGLVNAFAATR

SEQ ID NO: 63346 - protein, 269 aa, Unidentified
AQSVPWGISRVQAPAAHNRGLAGRGVKVAVLDTGISTHPDLNIRGGASFVPGEPSTQDGNGHGTHVAGTIAALDNSIGVLGVAPSAELYAVKVLGASGGGAISSIAQGLEWAGNNGMHVANLSLGSESPSATLEQAVNSATSRGVLVVAASGNSGAESISYPARYANAMAVGATDQNNNRADFSQYGAGLDIVAPGVNVQSTYPGSTYASLNGTSMATPHVAGAAVLVKQKNPSWSNVRIRDHLKNTATSLGSTNLYGSGLVNAFAATR

SEQ ID NO: 63347 - protein, 269 aa, Unidentified
AQSVPWGISRVQAPAAHNRGLAGSGVKVAVLDTGISTHPDLNIRGGASFVPGEPSTQDGNGHGTHVAGTIAALNNSIGVLGVAPSAELYAVKVLGASGGGAISSIAQGLEWAGNNGMHVANLSLGSESPSATLEQAVNSATSRGVLVVAASGNSGADSISYPARYANAMAVGATDQNNNRADFSQYGAGLDIVAPGVNVQSTYPGSTYASLNGTSMATPHVAGAAVLVKQKYPSWSNVRIRDHLKNTATSLGSTNLYGSGLVNVFAATR

SEQ ID NO: 63348 - protein, 269 aa, Unidentified
AQSVPWGISRVQAPAAHNRGLTGRGVKVAVLDTGISTHPDLRIRGGASFVPGEPSTQDGNGHGTHVAGTIAALDNSIGVLGVAPSAELYAVKVLGASGAGAISSIAQGLEWAGNNGMHVANLSLGSPSPSATLEQAVNSATSRGVLVVAASGNSGEGSISYPARYANAMAVGATDQNNNRADFSQYGAGLDIVAPGVNVQSTYPGSTYASENGTSMATPHVAGAAVLVKQKNPSWSNVRIRDRLKNTATSLGSTNLYGSGLVNAEAATR

SEQ ID NO: 63349 - protein, 269 aa, Unidentified
AQSVPWGISRVQAPAAHNRGLAGGGVKVAVLDTGISTHPDLNIRGGASFVPGEPSTQDGNGHGTHVAGTIAALDNSIGVLGVAPSAELYAVKVLGASGQGAISSIAQGLEWAGNNGMHVANLSLGAPSPSATLEQAVNSATSRGVLVVAASGNSGADSISYPARYANAMAVGATDQNNNRADFSQYGAGLDIVAPGVNVQSTYPGSTYASLNGTSMATPHVAGAAVLVKQKNPSWSNVRIRDHLKNTATSLGSTNLYGSGLVNAFAATR

SEQ ID NO: 63350 - protein, 269 aa, Unidentified
AQSVPWGISRVQAPAAHNRGLAGSGVKVAVLDSGISTHPDLNIRGGASFVPGEPSTQDGNGHGTHVAGTIAALNNSIGVLGVAPSAELYAVKVLGASGGGAISSIAQGLEWAGNNRMHVANLSLGLPSPSATLEQAVNSATSRGVLVVAASGNSGADSISYPARYANAMAVGATDQNNNRADFSQYGAGLDIVAPGVNVQSTYPGSTYASLNGTSMATPHVAGAAVLVKQKNPSWSNVRIRDHLKNTATSLGSTNLYGSGLVNAFAATR

SEQ ID NO: 63351 - protein, 269 aa, Unidentified
AQSVPWGISRVQAPAAHNRGLAGSGVKVAVLDTGISTHPDLRIRGGASFVPGEPSTQDGNGHGTHVAGTIAALDNSIGVLGVAPSAELYAVKVLGASGGGAISSIAQGLEWAGNNGMHVANLSLGSESPSATLEQAVNSATSRGVLVVAASGNSGEGSISYPARYANAMAVGATDQNNNRADFSQYGAGLDIVAPGVNVQSTYPGSTYASLNGTSMATPHVAGAAVLVKQKNPSWSNVRIRDHLKNTATSLGSTNLYGSGLVNAFAATR

SEQ ID NO: 63352 - protein, 269 aa, Unidentified
AQSVPWGISRVQAPAAHNRGLAGSGVKVAVLDTGISTHPDLNIRGGASFVPGEPSTQDGNGHGTHVAGTIAALDNSIGVLGVAPSAELYAVKVLSASGNGAISSIAQGLEWAGNNGMHVANLSLGSPSPSATLEQAVNSATSRGVLVVAASGNSGADSISYPARYANAMAVGATDQNNNRADFSQYGAGLDIVAPGVNVQSTYPGSTYASQNGTSMATPHVAGAAVLVKQKNPSWSNVRIRDHLKNTATSLGSTNLYGSGLVNAFAATR

SEQ ID NO: 63353 - protein, 269 aa, Unidentified
AQSVPWGISRVQAPAAHNRGLAGSGVKVAVLDTGISTHPDLNIRGGASFVPGEPSTQDGEGHGTHVAGTIAALNNSIGVLGVAPSAELYAVKVLGASGQGAISSIAQGLEWAGNNGMHVANLSLGAPSPSATLEQAVNSATSRGVLVVAASGNSGADSISYPARYANAMAVGATDQNNNRADFSQYGAGLDIVAPGVNVQSTYPGSTYASQNGTSMATPHVAGAAVLVKQKNPSWSNVRIRDHLKNTATSLGSTNLYGSGLVNAFAATR

SEQ ID NO: 63354 - protein, 269 aa, Unidentified
AQVVPWGISRVQAPAAHNRGLTGSGVKVAVLDTGISTHPDLNIRGGASFVPGEPSTQDGNGHGTHVAGTIAALDNSIGVLGVAPSAELYAVKVLGASGSGSVSSIAQGLEWAGNNGMVVANLSLGSPSPSATLEQAVNSATSRGVLVVAASGNSGAGSISYPARYANAMAVGATDENNERAEFSQYGAGLDIVAPGVNILSTWPGSTYAVLNGTSMATPHVAGAAALVKQKNPSWSNVQIRNHLKNTATDLGSTWEYGSGLVNAEAATR

SEQ ID NO: 63355 - protein, 269 aa, Unidentified
AQSVPWGISRVQAPAAHNRGLAGSGVKVAVLDTGISTHPDLNIRGGASFVPGEPSTQDGNGHGTHVAGTIAALNNSIGVLGVAPSAELYAVKVLGASGGGAISSIAQGLEWAGNNRMHVANLSLGLPSPSATLEQAVNSATSRGVLVVAASGNSGADSISYPARYANAMAVGATDQNNNRADFSQYGAGLDIVAPGVNVQSTYPGSAYASLNGTSMATPHVAGAAVLVKQKNPSWSNVRIRDHLKNTATSLGSTNLYGSGLVNAFAATR

SEQ ID NO: 63356 - protein, 269 aa, Unidentified
AQSVPWGISRVQAPAAHNRGLAGSGVKVAVLDTGISTHPDLNIRGGASFVPGEPSTQDGNGHGTHVAGTIAALNNSIGVLGVAPSAELYAVKVLGASGNGAISSIAQGLEWAGNNGMHVANVSLGASSPSATLEQAVNSATSRGVLVVAASGNSGADSISYPARYANAMAVGATDQNNNRADFSQYGAGLDIVAPGVNVQSTYPGSTYASLNGTSMATPHVAGAAVLVKQKNPSWSNVRIRDHLKNTATSLGSTNLYGSGLVNAFAATR

SEQ ID NO: 63357 - protein, 269 aa, Unidentified
AQSVPWGISRVQAPAAHNRGLAGSGVKVAVLDTGISTHPDLNIRGGASFVPGEPSTQDGNGHGTHVAGTIAALNNSIGVLGVAPSAELYAVKVLGASGGGAISSIAQGLEWAGNNGMHVANLSIGSSSPSATLEQAVNSATSRGVLVVAASGNSGADSISYPARYANAMAVGATDQNNNRADFSQYGAGLDIVAPGVNVQSTYPGSTYASQNGTSMATPHVAGAAVLVKQKNPSWSNVRIRDHLKNTATSLGSTNLYGSGLVNAFAATR

SEQ ID NO: 63358 - protein, 269 aa, Unidentified
AQSVPWGISRVQAPAAHNRGLAGFGVKVAVLDSGISTHPDLNIRGGASFVPGEPSTQDGNGHGTHVAGTIAALNNSIGVLGVAPSAELYAVKVLGASGGGAISSVAQGLEWAGLNGMHVANLSLGNPSPSATLEQAVNSATSRGVLVVAASGNSGAGSISYPARYANAMAVGATDQNNNRASFSQYGAGLDIVAPGVNVQSTAPQSAYASLNGTSMATPHVAGAAVLVKQKNPSWSNVQIRNHLKNTATSLGSTNLYGSGLVNAEAATR

SEQ ID NO: 63359 - protein, 269 aa, Unidentified
AQSVPWGISRVQAPAAHNRGLAGSGVKVAVLDTGISTHPDLNIRGGASFVPGEPSTQDGNGHGTHVAGTIAALNNSIGVLGVAPSAELYAVKVLAASGNGAISSIAQGLEWAGNNGMHVANTSLGSSSPSATLEQAVNSATSRGVLVVAASGNSGADSISYPARYANAMAVGATDQNNNRADFSQYGAGLDIVAPGVNVQSTYPGSTYASLNGTSMATPHVAGAAVLVKQKNPSWSNVRIRDHLKNTATSLGSTNLYGSGLVNAFAATR

SEQ ID NO: 63360 - protein, 269 aa, Unidentified
AQSVPWGISRVQAPAAHNRGLAGSGVKVAVLDTGISTHPDLNIRGGASFVPGEPSTQDGNGHGTHVAGTIAALDNSIGVLGVAPSAELYAVKVLGASGGGAISSIAQGLEWAGNNGMHVANLSLGSPSPSATLEQAVNSATSRGVLVVAASGNSGADSISYPARYANAMAVGATDQNNNRADFSQYGAGLDIVAPGVNVQSTYPGSTYASLNGTSMATPHVAGAAVLVKQKNPSWSNVRIRDHLKNTATSLGSTNLYGSGLVNVFVATR

SEQ ID NO: 63361 - protein, 269 aa, Unidentified
AQSVPWGISRVQAPAAHNRGLAGSGVKVAVLDTGISTHPDLNIRGGASFVPGEPSTQDGNGHGTHVAGTIAALNNSIGVLGVAPSAELYAVKVLAASGNGAISSIAQGLEWAGNNGMHVANISLGSESPSATLEQAVNSATSRGVLVVAASGNSGADSISYPARYANAMAVGATDQNNNRADFSQYGAGLDIVAPGVNVQSTYPGSTYASLNGTSMATPHVAGAAVLVKQKNPSWSNVRIRDHLKNTATSLGSTNLYGSGLVNAFAATR

SEQ ID NO: 63362 - protein, 269 aa, Unidentified
AQSVPWGISRVQAPAAHNRGLAGGGVKVAVLDTGISTHPDLNIRGGASFVPGEPSTQDGNGHGTHVAGTIAALDNSIGVLGVAPSAELYAVKVLSASGGGAISSIAQGLEWAGNNGMHVANLSLGSPSPSATLEQAVNSATSRGVLVVAASGNSGADSISYPARYANAMAVGATDQNNNRADFSQYGAGLDIVAPGVNVQSTYPGSTYASLNGTSMATPHVAGAAVLVKQKNPSWSNVRIRDHLKNTATSLGSTNLYGSGLVNAFAATR

SEQ ID NO: 63363 - protein, 269 aa, Unidentified
AQSVPWGISRVQAPAAHNRGLAGSGVKVAVLDTGISTHPDLNIRGGASFVPGEPSTQDGNGHGTHVAGTIAALDNNIGVLGVAPSAELYAVKVLGARGQGAISSIAQGLEWAGNNGMHVANLSLGSPSPSATLEQAVNSATSRGVLVVAASGNSGADSISYPARYANAMAVGATDQNNNRADFSQYGAGLDIVAPGVNVQSTYPGSTYASLNGTSMATPHVAGAAVLVKQKNPSWSNVRIRDHLKNTATSLGSTNLYGSGLVNAFAATR

SEQ ID NO: 63364 - protein, 269 aa, Unidentified
AQSVPWGIERVQAPAAHNRGLTGSGVKVAVLDTGISTHPDLRIRGGASFVPGEPSTQDGNGHGTHVAGTIAALDNSIGVLGVAPSAELYAVKVLGASGSGSVSSIAQGLEWAGNNGMVVANLSLGSPSPSATLEQAVNSATSRGVLVVAASGNSGAGSISYPARYANAMAVGATDENNNRASFSQYGPGLDIVAPGVNILSTWPGSTYASLNGTSMATPHVAGAAALVKQKNPSWSNVQIRNHLKNTATDLGDTWEYGSGLVNAEAATR

SEQ ID NO: 63365 - protein, 269 aa, Unidentified
AQSVPWGISRVQAPAAHNRGLAGSGVKVAVLDTGISTHPDLNIRGGASFVPGEPSTQDGNGHGTHVAGTIAALDNSIGVLGVAPSAELYAVKVLGASGNGAISSIANGLEWAGNNGMHVANLSLGAPSPSATLEQAVNSATSRGVLVVAASGNSGADSISYPARYANAMAVGATDQNNNRADFSQYGAGLDIVAPGVNVQSTYPGSTYASLNGTSMATPHVAGAAVLVKQKNPSWSNVRIRDHLKNTATSLGSTNLYGSGLVNAFAATR

SEQ ID NO: 63366 - protein, 269 aa, Unidentified
AQSVPWGISRVQAPAAHNRGLAGSGVKVAVLDTGISTHPDLNIRGGASFVPGEPSTQDGNGHGTHVAGTIAALDNNIGVLGVAPSAELYAVKVLGASGNGAISSIAQGLEWAGNNGMHVANLSLGSPSPSATLEQAVNSATSRGVLVVAASGNSGADSISYPARYANAMAVGATDQNNNRADFSQYGAGLDIVAPGVNVQSTYPGSTYASQNGTSMATPHVAGAAVLVKQKNPSWSNVRIRDHLKNTATSLGSTNLYGSGLVNAFAATR

SEQ ID NO: 63367 - protein, 269 aa, Unidentified
AQSVPWGISRVQAPAAHNRGLAGSGVKVAVLDTGISTHPDLNIRGGASFVPGEPSTQDGNGHGTHVAGTIAALNNSIGVLGVAPSAELYAVKVLAASGQGAISSIAQGLEWAGNNGMHVANLSIGAPSPSATLEQAVNSATSRGVLVVAASGNSGADSISYPARYANAMAVGATDQNNNRADFSQYGAGLDIVAPGVNVQSTYPGSTYASLNGTSMATPHVAGAAVLVKQKNPSWSNVRIRDHLKNTATSLGSTNLYGSGLVNAFAATR

SEQ ID NO: 63368 - protein, 269 aa, Unidentified
AQSVPWGISRVQAPAAHNRGLAGGGVKVAVLDTGISTHPDLNIRGGASFVPGEPSTQDGNGHGTHVAGTIAALNNSIGVLGVAPSAELYAVKVLGASGQGAISSIANGLEWAGNNGMHVANLSLGAPSPSATLEQAVNSATSRGVLVVAASGNSGADSISYPARYANAMAVGATDQNNNRADFSQYGAGLDIVAPGVNVQSTYPGSTYASLNGTSMATPHVAGAAVLVKQKNPSWSNVRIRDHLKNTATSLGSTNLYGSGLVNAFAATR

SEQ ID NO: 63369 - protein, 269 aa, Unidentified
AQSVPWGISRVQAPAAHNRGLAGGGVKVAVLDTGISTHPDLNIRGGASFVPGEPSTQDGNGHGTHVAGTIAALNNSIGVLGVAPSAELYAVKVLAASGNGAISSIANGLEWAGNNGMHVANLSLGSPSPSATLEQAVNSATSRGVLVVAASGNSGADSISYPARYANAMAVGATDQNNNRADFSQYGAGLDIVAPGVNVQSTYPGSTYASLNGTSMATPHVAGAAVLVKQKNPSWSNVRIRDHLKNTATSLGSTNLYGSGLVNAFAATR

SEQ ID NO: 63370 - protein, 269 aa, Unidentified
AQSVPWGISRVQAPAAHNRGLAGSGVKVAVLDTGISTHPDLNIRGGASFVPGEPSTQDGNGHGTHVAGTIAALNNSIGVLGVAPSAELYAVKVLGASGGGAISSIAQGLEWAGNNGMHVANLSIGASSPSATLEQAVNSATSRGVLVVAASGNSGADSISYPARYANAMAVGATDQNNNRADFSQYGAGLDIVAPGVNVQSTYPGSTYASLNGTSMATPHVAGAAVLVKQKNPSWSNVRIRDHLKNTATSLGSTNLYGSGLVNAFAATR

SEQ ID NO: 63371 - protein, 269 aa, Unidentified
AQSVPWGISRVQAPAAHNRGLAGRGVKVAVLDTGISTHPDLNIRGGASFVPGEPSTQDGNGHGTHVAGTIAALNNSIGVLGVAPSAELYAVKVLGASGGGAISSIAQGLEWAGNNGMHVANLSLGSPSPSATLEQAVNSATSRGVLVVAASGNSGEESISYPARYANAMAVGATDQNNNRADFSQYGAGLDIVAPGVNVQSTYPGSTYASLNGTSMATPHVAGAAVLVKQKNPSWSNVRIRDHLKNTATSLGSTNLYGSGLVNAFVATR

SEQ ID NO: 63372 - protein, 269 aa, Unidentified
AQSVPWGISRVQAPAAHNRGLAGSGVKVAVLDTGISTHPDLNIRGGASFVPGEPSTQDGNGHGTHVAGTIAALNNSIGVLGVAPSAELYAVKVLGASGGGAISSVAQGLEWAGNNGMHVANLSLGSPSPSATLEQAVNSATSRGVLVVAASGNSGADSISYPARYANAMAVGATDQNNNRADFSQYGAGLDIVAPGVNVQSTYPGSTYASLNGTSMATPHVAGAAVLVKQKNPSWSNVRIRDHLKNTATSLGSTNLYGSGLVNVFVATR

SEQ ID NO: 63373 - protein, 269 aa, Unidentified
AQSVPWGISRVQAPAAHNRGLAGGGVKVAVLDTGISTHPDLNIRGGASFVPGEPSTQDGNGHGTHVAGTIAALNNNIGVLGVAPSAELYAVKVLGASGQGAISSIANGLEWAGNNGMHVANLSLGSPSPSATLEQAVNSATSRGVLVVAASGNSGADSISYPARYANAMAVGATDQNNNRADFSQYGAGLDIVAPGVNVQSTYPGSTYASLNGTSMATPHVAGAAVLVKQKNPSWSNVRIRDHLKNTATSLGSTNLYGSGLVNAFAATR

SEQ ID NO: 63374 - protein, 269 aa, Unidentified
AQSVPWGISRVQAPAAHNRGLAGSGVKVAVLDTGISTHPDLNIRGGASFVPGEPSTQDGNGHGTHVAGTIAALNNSIGVLGVAPSAELYAVKVLAASGNGAISSIANGLEWAGNNGMHVANLSLGSPSPSATLEQAVNSATSRGVLVVAASGNSGADSISYPARYANAMAVGATDQNNNRADFSQYGAGLDIVAPGVNVQSTYPGSTYASQNGTSMATPHVAGAAVLVKQKNPSWSNVRIRDHLKNTATSLGSTNLYGSGLVNAFAATR

SEQ ID NO: 63375 - protein, 269 aa, Unidentified
AQSVPWGISRVQAPAAHNRGLAGRGVKVAVLDTGISTHPDLNIRGGASFVPGEPSTQDGNGHGTHVAGTIAALNNSIGVLGVAPSAELYAVKVLGASGGGAISSIAQGLEWAGNNGMHVANLSLGSPSPSATLEQAVNSATSRGVLVVAASGNSGADSISYPARYANAMAVGATDQNNNRADFSQYGAGLDIVAPGVNVQSTYPGSTYASLNGTSMATPHVAGAAVLVKQKYPSWSNVRIRDHLKNTATSLGSTNLYGSGLVNAFVATR

SEQ ID NO: 63376 - protein, 269 aa, Unidentified
AQSVPWGISRVQAPAAHNRGLAGSGVKVAVLDTGISTHPDLNIRGGASFVPGEPSTQDGNGHGTHVAGTIAALDNSIGVLGVAPSAELYAVKVLGASGGGAISSVAQGLEWAGNNGMHVANLSLGSESPSATLEQAVNSATSRGVLVVAASGNSGADSISYPARYANAMAVGATDQNNNRADFSQYGAGLDIVAPGVNVQSTYPGSTYASLNGTSMATPHVAGAAVLVKQKNPSWSNVRIRDHLKNTATSLGSTNLYGSGLVNAFAATR

SEQ ID NO: 63377 - protein, 269 aa, Unidentified
AQSVPWGISRVQAPAAHNRGLAGSGVKVAVLDTGISTHPDLNIRGGASFVPGEPSTQDGNGHGTHVAGTIAALDNNIGVLGVAPSAELYAVKVLGASGQGAISSIAQGLEWAGNNGMHVANLSLGSPSPSATLEQAVNSATSRGVLVVAASGNSGADSISYPARYANAMAVGATDQNNNRADFSQYGAGLDIVAPGVNVQSTYPGSTYASQNGTSMATPHVAGAAVLVKQKNPSWSNVRIRDHLKNTATSLGSTNLYGSGLVNAFAATR

SEQ ID NO: 63378 - protein, 269 aa, Unidentified
AQSVPWGISRVQAPAAHNRGLAGGGVKVAVLDTGISTHPDLNIRGGASFVPGEPSTDDGNGHGTHVAGTIAALNNNIGVLGVAPSAELYAVKVLGASGQGAISSIAQGLEWAGNNGMHVANLSLGSPSPSATLEQAVNSATSRGVLVVAASGNSGAGSISYPARYANAMAVGATDQNNNRADFSQYGAGLDIVAPGVNVQSTYPGSTYASQNGTSMATPHVAGAAVLVKQKNPSWSNVRIRDHLKNTATSLGSTNLYGSGLVNAFAATR

SEQ ID NO: 63379 - protein, 269 aa, Unidentified
AQSVPWGISRVQAPAAHNRGLAGSGVKVAVLDTGISTHPDLNIRGGASFVPGEPSTQDGNGHGTHVAGTIAALNNSIGVLGVAPSAELYAVKVLGASGGGAISSIAQGLEWAGNNGMHVANVSLGASSPSATLEQAVNSATSRGVLVVAASGNSGADSISYPARYANAMAVGATDQNNNRADFSQYGAGLDIVAPGVNVQSTYPGSTYASLNGTSMATPHVAGAAVLVKQKNPSWSNVRIRDHLKNTATSLGSTNLYGSGLVNAFAATR

SEQ ID NO: 63380 - protein, 269 aa, Unidentified
AQSVPWGISRVQAPAAHNRGLAGRGVKVAVLDTGISTHPDLNIRGGASFVPGEPSTQDGNGHGTHVAGTIAALNNSIGVLGVAPSAELYAVKVLGASGGGAISSIAQGLEWAGNNGMHVANLSLGSESPSATLEQAVNSATSRGVLVVAASGNSGEESISYPARYANAMAVGATDQNNNRADFSQYGAGLDIVAPGVNVQSTYPGSTYASLNGTSMATPHVAGAAVLVKQKNPSWSNVRIRDRLKNTATSLGSTNLYGSGLVNAEAATR

SEQ ID NO: 63381 - protein, 269 aa, Unidentified
AQSVPWGISRVQAPAAHNRGLAGSGVKVAVLDTGISTHPDLNIRGGASFVPGEPSTQDGNGHGTHVAGTIAALNNSIGVLGVAPSAELYAVKVLAASGGGAISSIAQGLEWAGNNGMHVANLSLGSESPSATLEQAVNSATSRGVLVVAASGNSGADSISYPARYANAMAVGATDQNNNRADFSQYGAGLDIVAPGVNVQSTYPGSTYASQNGTSMATPHVAGAAVLVKQKNPSWSNVRIRDHLKNTATSLGSTNLYGSGLVNAFAATR

SEQ ID NO: 63382 - protein, 269 aa, Unidentified
AQSVPWGISRVQAPAAHNRRLWGSGVKVAVLDTGISTHPDLNIRGGASFVPGEPSTQDGNGHGTHVAGTIAALNNRIGVLGVAPSAELYAVKVLGASGAGAISSIAQGLEWAGANGMHVANLSLGSPSPSATLEQAVNSATSRGVLVVAASGNSGAGSISYPARYANAMAVGATDQDNNRASFSQYGAGLDIVAPGVNVQSTYPQSAYFSLNGTSMATPHVAGAAVLVKQKNPSWSNVRIRNHLKNTATSLGSTNLYGSGLVNAEAATR

SEQ ID NO: 63383 - protein, 269 aa, Unidentified
AQVVPWGISRVQAPAAHNRGLTGSGVKVAVLDTGISTHPDLNIRGGASFVPGEPSTQDGNGHGTHVAGTIAALDNGIGVLGVAPDAELYAVKVLGASGSGSVSSIAQGLEWAGNNAMHVANLSLGSPSPSATLEQAVNSATSRGVLVVAASGNSGAGSINYPARYANAMAVGATDQNNNRASFSQYGPGLDIVAPGVNVMSTYIGSTYASLSGTSMATPHVAGAAALVKQKNPSWSNVQIRDHLKNTATSLGSTIQYGSGLVNAEAATR

SEQ ID NO: 63384 - protein, 269 aa, Unidentified
AQSVPWGISRVQAPAAHNRGLAGSGVKVAVLDTGISTHPDLNIRGGASFVPGEPSTQDGNGHGTHVAGTIAALNNSIGVLGVAPSAELYAVKVLGASGGGAISSIAQGLEWAGNNGVHVANLSLGSESPSATLEQAVNSATSRGVLVVAASGNSGADSISYPARYANAMAVGATDQNNNRADFSQYGAGLDIVAPGVNVQSTYPGSTYASQNGTSMATPHVAGAAVLVKQKNPSWSNVRIRDHLKNTATSLGSTNLYGSGLVNAFAATR

SEQ ID NO: 63385 - protein, 269 aa, Unidentified
AQSVPWGIERVQAPAAHNRGLTGSGVKVAVLDTGISTHPDLRIRGGASFVPGEPSTQDGNGHGTHVAGTIAALDNSIGVLGVAPSAELYAVKVLGASGSGSVSSIAQGLEWAGNNGMHVANLSLGSPSPSATLEQAVNSATSRGVLVVAASGNSGAGSISYPARYANAMAVGATDQNNNRASFSQYGPGLDIVAPGVDILSTWPGGTYAVLNGTSMATPHVAGAAALVKQKNPSWSNVQIRNHLKNTATDLGSANEYGSGLVNAEAATR

SEQ ID NO: 63386 - protein, 269 aa, Unidentified
AQSVPWGISRVQAPAAHNRGLAGGGVKVAVLDTGISTHPDLNIRGGASFVPGEPSTQDGNGHGTHVAGTIAALDNSIGVLGVAPSAELYAVKVLAASGQGAISSIAQGLEWAGNNGMHVANLSLGSPSPSATLEQAVNSATSRGVLVVAASGNSGADSISYPARYANAMAVGATDQNNNRADFSQYGAGLDIVAPGVNVQSTYPGSTYASLNGTSMATPHVAGAAVLVKQKNPSWSNVRIRDHLKNTATSLGSTNLYGSGLVNAFAATR

SEQ ID NO: 63387 - protein, 269 aa, Unidentified
AQSVPWGISRVQAPAAHNRGLAGGGVKVAVLDTGISTHPDLNIRGGASFVPGEPSTQDGNGHGTHVAGTIAALNNSIGVLGVAPSAELYAVKVLGASGNGAISSIAQGLEWAGNNGMHVANLSLGAPSPSATLEQAVNSATSRGVLVVAASGNSGADSISYPARYANAMAVGATDQNNNRADFSQYGAGLDIVAPGVNVQSTYPGSTYASQNGTSMATPHVAGAAVLVKQKNPSWSNVRIRDHLKNTATSLGSTNLYGSGLVNAFAATR

SEQ ID NO: 63388 - protein, 269 aa, Unidentified
AQSVPWGISRVQAPAAHNRGLAGSGVKVAVLDTGISTHPDLNIRGGASFVPGEPSTQDGNGHGTHVAGTIAALNNSIGVLGVAPSAELYAVKVLAASGQGAISSIAQGLEWAGNNGMHVANLSLGAPSPSATLEQAVNSATSRGVLVVAASGNSGADSISYPARYANAMAVGATDQNNNRADFSQYGAGLDIVAPGVNVQSTYPGSTYASQNGTSMATPHVAGAAVLVKQKNPSWSNVRIRDHLKNTATSLGSTNLYGSGLVNAFAATR

SEQ ID NO: 63389 - protein, 269 aa, Unidentified
AQSVPWGISRVQAPAAHNRGLAGSGVKVAVLDTGISTHPDLNIRGGASFVPGEPSTQDGNGHGTHVAGTIAALNNSIGVLGVAPSAELYAVKVLGASGGGAISSIAQGLEWAGNNGMHVANVSLGAESPSATLEQAVNSATSRGVLVVAASGNSGADSISYPARYANAMAVGATDQNNNRADFSQYGAGLDIVAPGVNVQSTYPGSTYASLNGTSMATPHVAGAAVLVKQKNPSWSNVRIRDHLKNTATSLGSTNLYGSGLVNAFAATR

SEQ ID NO: 63390 - protein, 269 aa, Unidentified
AQSVPWGISRVQAPAAHNRGLAGSGVKVAVLDTGISTHPDLNIRGGASFVPGEPSTQDGNGHGTHVAGTIAALNNSIGVLGVAPSAELYAVKVLGASGGGAISSIAGGLEWAGNNGMHVANLSLGAPSPSATLEQAVNSATSRGVLVVAASGNSGADSISYPARYANAMAVGATDQNNNRADFSQYGAGLDIVAPGVNVQSTYPGSTYASQNGTSMATPHVAGAAVLVKQKNPSWSNVRIRDHLKNTATSLGSTNLYGSGLVNAFAATR

SEQ ID NO: 63391 - protein, 269 aa, Unidentified
AQSVPWGISRVQAPAAHNRGLAGGGVKVAVLDTGISTHPDLNIRGGASFVPGEPSTQDGNGHGTHVAGTIAALNNSIGVLGVAPSAELYAVKVLGASGNGAISSIANGLEWAGNNGMHVANLSLGSPSPSATLEQAVNSATSRGVLVVAASGNSGADSISYPARYANAMAVGATDQNNNRADFSQYGAGLDIVAPGVNVQSTYPGSTYASQNGTSMATPHVAGAAVLVKQKNPSWSNVRIRDHLKNTATSLGSTNLYGSGLVNAFAATR

SEQ ID NO: 63392 - protein, 269 aa, Unidentified
AQSVPWGISRVQAPAAHNRGLAGRGVKVAVLDTGISTHPDLNIRGGASFVPGEPSTQDGNGHGTHVAGTIAALNNSIGVLGVAPSAELYAVKVLGASGGGAISSIAQGLEWAGNNGMHVANLSLGSESPSATLEQAVNSATSRGVLVVAASGNSGEGSISYPARYANAMAVGATDQNNNRADFSQYGAGLDIVAPGVNVQSTYPGSTYASLNGTSMATPHVAGAAVLVKQKNPSWSNVRIRDHLKNTATSLGSTNLYGSGLVNAFVATR

SEQ ID NO: 63393 - protein, 269 aa, Unidentified
AQSVPWGISRVQAPAAHNRGLAGSGVKVAVLDTGISTHPDLNIRGGASFVPGEPSTQDGNGHGTHVAGTIAALDNSIGVLGVAPSAELYAVKVLSASGQGAISSIAQGLEWAGNNGMHVANLSLGSPSPSATLEQAVNSATSRGVLVVAASGNSGADSISYPARYANAMAVGATDQNNNRADFSQYGAGLDIVAPGVNVQSTYPGSTYASQNGTSMATPHVAGAAVLVKQKNPSWSNVRIRDHLKNTATSLGSTNLYGSGLVNAFAATR

SEQ ID NO: 63394 - protein, 269 aa, Unidentified
AQSVPWGISRVQAPAAHNRGLAGGGVKVAVLDTGISTHPDLNIRGGASFVPGEPSTQDGNGHGTHVAGTIAALNNSIGVLGVAPSAELYAVKVLAASGGGAISSIAQGLEWAGNNGMHVANLSLGSPSPSATLEQAVNSATSRGVLVVAASGNSGADSISYPARYANAMAVGATDQNNNRADFSQYGAGLDIVAPGVNVQSTYPGSTYASQNGTSMATPHVAGAAVLVKQKNPSWSNVRIRDHLKNTATSLGSTNLYGSGLVNAFAATR

SEQ ID NO: 63395 - protein, 269 aa, Unidentified
AQSVPWGISRVQAPAAHNRGLAGGGVKVAVLDTGISTHPDLNIRGGASFVPGEPSTQDGNGHGTHVAGTIAALNNSIGVLGVAPSAELYAVKVLSASGQGAISSIAQGLEWAGNNGMHVANLSLGAPSPSATLEQAVNSATSRGVLVVAASGNSGADSISYPARYANAMAVGATDQNNNRADFSQYGAGLDIVAPGVNVQSTYPGSTYASLNGTSMATPHVAGAAVLVKQKNPSWSNVRIRDHLKNTATSLGSTNLYGSGLVNAFAATR

SEQ ID NO: 63396 - protein, 269 aa, Unidentified
AQSVPWGISRVQAPAAHNRGLAGSGVKVAVLDTGISTHPDLNIRGGASFVPGEPSTQDGNGHGTHAAGTIAALNNSIGVLGVAPSAELYAVKVLGASGGGAISSIAQGLEWAGNNRMHVANLSLGSPSPSATLEQAVNSATSRGVLVVAASGNSGADSISYPARYANAMAVGATDQNNNRADFSQYGAGLDIVAPGVNVQSTYPGSAYASLNGTSMATPHVAGAAVLVKQKNPSWSNVRIRDHLKNTATSLGSTNLYGSGLVNAFAATR

SEQ ID NO: 63397 - protein, 269 aa, Unidentified
AQSVPWGISRVQAPAAHNRGLAGGGIKVAVLDTGISTHPDLNIRGGASFVPGEPSTQDGNGHGTHVAGTIAALNNSIGVLGVAPSAELYAVKVLGASGNGAISSIAQGLEWAGNNGMHVANLSLGSPSPSATLEQAVNSATSRGVLVVAASGNSGADSISYPARYANAMAVGATDQNNNRADFSQYGAGLDIVAPGVNVQSTYPGSTYASQNGTSMATPHVAGAAVLVKQKNPSWSNVRIRDHLKNTATSLGSTNLYGSGLVNAFAATR

SEQ ID NO: 63398 - protein, 269 aa, Unidentified
AQSVPWGISRVQAPAAHNRGLAGSGVKVAVLDTGISTHPDLNIRGGASFVPGEPSTQDGNGHGTHVAGTIAALNNNIGVLGVAPSDELYAVKVLGASGNGAISSIAGGLEWAGNNGMHVANLSLGSPSPSATLEQAVNSATSRGVLVVAASGNSGADSISYPARYANAMAVGATDQNNNRASFSQYGAGLDIVAPGVNVQSTYPGSTYASQNGTSMATPHVAGAAVLVKQKNPSWSNVRIRDHLKNTATSLGSTNLYGSGLVNAFAATR

SEQ ID NO: 63399 - protein, 269 aa, Unidentified
AQSVPWGISRVQAPAAHNRGLAGSGVKVAVLDTGISTHPDLNIRGGASFVPGEPSTQDGNGHGTHVAGTIAALDNNIGVLGVAPSAELYAVKVLSASGGGAISSIAQGLEWAGNNGMHVANLSLGSPSPSATLEQAVNSATSRGVLVVAASGNSGADSISYPARYANAMAVGATDQNNNRADFSQYGAGLDIVAPGVNVQSTYPGSTYASLNGTSMATPHVAGAAVLVKQKNPSWSNVRIRDHLKNTATSLGSTNLYGSGLVNAFAATR

SEQ ID NO: 63400 - protein, 269 aa, Unidentified
AQSVPWGISRVQAPAAHNRGLAGSGVKVAVLDTGISTHPDLNIRGGASFVPGEPSTQDGNGHGTHVAGTIAALNNSIGVLGVAPSAELYAVKVLAASGQGAISSIAQGLEWAGNNGMHVANLSLGAESPSATLEQAVNSATSRGVLVVAASGNSGADSISYPARYANAMAVGATDQNNNRADFSQYGAGLDIVAPGVNVQSTYPGSTYASLNGTSMATPHVAGAAVLVKQKNPSWSNVRIRDHLKNTATSLGSTNLYGSGLVNAFAATR

SEQ ID NO: 63401 - protein, 269 aa, Unidentified
AQSVPWGISRVQAPAAHNRGLAGSGVKVAVLDTGISTHPDLNIRGGASFVPGEPSTQDGNGHGTHVAGTIAALNNSIGVLGVAPSAELYAVKVLGASGQGAISSIAQGLEWAGNNGMHVANLSLGASSPSATLEQAVNSATSRGVLVVAASGNSGADSISYPARYANAMAVGATDQNNNRADFSQYGAGLDIVAPGVNVQSTYPGSTYASQNGTSMATPHVAGAAVLVKQKNPSWSNVRIRDHLKNTATSLGSTNLYGSGLVNAFAATR

SEQ ID NO: 63402 - protein, 269 aa, Unidentified
AQSVPWGISRVQAPAAHNRGLAGSGVKVAVLDTGISTHPDLRIRGGASFVPGEPSTQDGNGHGTHVAGTIAALNNSIGVLGVAPSAELYAVKVLGASGGGAISSIAQGLEWAGNNGMHVANLSLGSESPSATLEQAVNSATSRGVLVVAASGNSGAESISYPARYANAMAVGATDQNNNRADFSQYGAGLDIVAPGVNVQSTYPGSTYASLNGTSMATPHVAGAAVLVKQKNPSWSNVRIRDHLKNTATSLGSTNLYGSGLVNAFVATR

SEQ ID NO: 63403 - protein, 269 aa, Unidentified
AQSVPWGISRVQAPAAHNRGLAGSGVKVAVLDTGISTHPDLNIRGGASFVPGEPSTQDGNGHGTHVAGTIAALDNSIGVLGVAPSAELYAVKVLGASGGGAISSIAQGLEWAGNNGMHVANLSLGSESPSATLEQAVNSATSRGVLVVAASGNSGEGSISYPARYANAMAVGATDQNNNRADFSQYGAGLDIVAPGVNVQSTYPGSTYASLNGTSMATPHVAGAAVLVKQKNPSWSNVRIRDHLKNTATSLGSTNLYGSGLVSAFAATR

SEQ ID NO: 63404 - protein, 269 aa, Unidentified
AQSVPWGISRVQAPAAHNRGLAGGGVKVAVLDTGISTHPDLNIRGGASFVPGEPSTQDGNGHGTHVAGAIAALNNNIGVLGVAPSAELYAVKVLGASGNGAISSIAQGLEWAGNNGMHVANLSLGSPSPSATLEQAVNSATSRGVLVVAASGNSGADSISYPARYANAMAVGATDQNNNRADFSQYGAGLDIVAPGVNVQSTYPGSTYASLNGTSMATPHVAGAAVLVKQKNPSWSNVRIRDHLKNTATSLGSTNLYGSGLVNAFAATR

SEQ ID NO: 63405 - protein, 269 aa, Unidentified
AQSVPWGISRVQAPAAHNRGLAGGGVKVAVLDTGISTHPDLNIRGGASFVPGEPSTQDGNGHGTHVAGTIAALDNSIGVLGVAPSAELYAVKVLAASGNGAISSIAQGLEWAGNNGMHVANLSLGSPSPSATLEQAVNSATSRGVLVVAASGNSGADSISYPARYANAMAVGATDQNNNRADFSQYGAGLDIVAPGVNVQSTYPGSTYASLNGTSMATPHVAGAAVLVKQKNPSWSNVRIRDHLKNTATSLGSTNLYGSGLVNAFAATR

SEQ ID NO: 63406 - protein, 269 aa, Unidentified
AQSVPWGISRVQAPAAHNRGLAGGGVKVAVLDTGISTHPDLNIRGGASFVPGEPSTQDGNGHGTHVAGTIAALNNNIGVLGVAPSAELYAVKVLGASGGGAISSIAQGLEWAGNNGMHVANLSLGSPSPSATLEQAVNSATSRGVLVVAASGNSGADSISYPARYANAMAVGATDQNNNRADFSQYGAGLDIVAPGVNVQSTYPGSTYASQNGTSMATPHVAGAAVLVKQKNPSWSNVRIRDHLKNTATSLGSTNLYGSGLVNAFAATR

SEQ ID NO: 63407 - protein, 269 aa, Unidentified
AQSVPWGISRVQAPAAHNRGLAGSGVKVAVLDTGISTHPDLNIRGGASFVPGEPSTQDGNGHGTHVAGTIAALNNSIGVLGVAPSAELYAVKVLGASGNGAISSIAQGLEWAGNNGMHVANLSIGSSSPSATLEQAVNSATSRGVLVVAASGNSGADSISYPARYANAMAVGATDQNNNRADFSQYGAGLDIVAPGVNVQSTYPGSTYASQNGTSMATPHVAGAAVLVKQKNPSWSNVRIRDHLKNTATSLGSTNLYGSGLVNAFAATR

SEQ ID NO: 63408 - protein, 269 aa, Unidentified
AQSVPWGISRVQAPAAHNRGLTGRGVKVAVLDTGISTHPDLNIRGGASFVPGEPSTQDGNGHGTHVAGTIAALNNSIGVLGVAPSAELYAVKVLGASGGGAISSIAQGLEWAGNNGMHVANLSLGLQSPSATLEQAVNSATSRGVLVVAASGNSGEGSISYPARYANAMAVGATDQDNNRADFSQYGAGLDIVAPGVNVQSTYPGSTYASLNGTSMATPHVAGAAVLVKQKNPSWSNVRIRDRLKNTATSLGSTNLYGSGLVNAEAATR

SEQ ID NO: 63409 - protein, 269 aa, Unidentified
AQSVPWGISRVQAPAAHNRGLAGGGVKVAVLDTGISTHPDLNIRGGASFVPGEPSTQDGNGHGTHVAGTIAALNNSIGVLGVAPSAELYAVKVLSASGNGAISSIAGGLEWAGNNGMHVANLSLGSPSPSATLEQAVNSATSRGVLVVAASGNSGADSISYPARYANAMAVGATDQNNNRADFSQYGAGLDIVAPGVNVQSTYPGSTYASLNGTSMATPHVAGAAVLVKQKNPSWSNVRIRDHLKNTATSLGSTNLYGSGLVNAFAATR

SEQ ID NO: 63410 - protein, 269 aa, Unidentified
AQSVPWGISRVQAPAAHNRGLAGSGVKVAVLDTGISTHPDLNIRGGASFVPGEPSTQDGNGHGTHVAGTIAALDNSIGVLGVAPSAELYAVKVLGASGNGAISSIAGGLEWAGNNGMHVANLSLGAPSPSATLEQAVNSATSRGVLVVAASGNSGADSISYPARYANAMAVGATDQNNNRADFSQYGAGLDIVAPGVNVQSTYPGSTYASLNGTSMATPHVAGAAVLVKQKNPSWSNVRIRDHLKNTATSLGSTNLYGSGLVNAFAATR

SEQ ID NO: 63411 - protein, 269 aa, Unidentified
AQSVPWGISRVQAPAAHNRGLAGSGVKVAVLDTGISTHPDLNIRGGASFVPGEPSTQDGNGHGTHVAGTIAALDNSIGVLGVAPSAELYAVKVLGASGNGAISSIAGGLEWAGNNGMHVANLSLGSPSPSATLEQAVNSATSRGVLVVAASGNSGADSISYPARYANAMAVGATDQNNNRADFSQYGAGLDIVAPGVNVQSTYPGSTYASQNGTSMATPHVAGAAVLVKQKNPSWSNVRIRDHLKNTATSLGSTNLYGSGLVNAFAATR

SEQ ID NO: 63412 - protein, 269 aa, Unidentified
AQSVPWGISRVQAPAAHNRGLAGGGVKVAVLDTGISTHPDLNIRGGASFVPGEPSTQDGNGHGTHVAGTIAALDNSIGVLGVAPSAELYAVKVLGASGNGAISSIAQGLEWAGNNGMHVANLSLGAPSPSATLEQAVNSATSRGVLVVAASGNSGADSISYPARYANAMAVGATDQNNNRADFSQYGAGLDIVAPGVNVQSTYPGSTYASLNGTSMATPHVAGAAVLVKQKNPSWSNVRIRDHLKNTATSLGSTNLYGSGLVNAFAATR

SEQ ID NO: 63413 - protein, 269 aa, Unidentified
AQSVPWGISRVQAPAAHNRGLAGSGVKVAVLDTGISTHPDLNIRGGASFVPGEPSTQDGNGHGTHVAGTIAALDNSIGVLGVAPSAELYAVKVLGASGGGAISSIAQGLEWAGNNGMHVANLSLGSESPSATLEQAVNSATSRGVLVVAASGNSGEESISYPARYANAMAVGATDQNNNRADFSQYGAGLDIVAPGVNVQSTYPGSTYASLNGTSMATPHVAGAAVLVKQKNPSWSNVRIRDHLKNTATSLGSTNLYGSGLVNAFAATR

SEQ ID NO: 63414 - protein, 269 aa, Unidentified
AQSVPWGISRVQAPAAHNRGLAGSGVKVAVLDTGISTHPDLNIRGGASFVPGEPSTQDGNGHGTHVAGTIAALDNSIGVLGVAPSAELYAVKVLGASGGGAISSVAQGLEWAGNNGMHVANLSLGSPSPSATLEQAVNSATSRGVLVVAASGNSGADSISYPARYANAMAVGATDQNNNRADFSQYGAGLDIVAPGVNVQSTYPGSTYASLNGTSMATPHVAGAAVLVKQKYPSWSNVRIRDHLKNTATSLGSTNLYGSGLVNAFAATR

SEQ ID NO: 63415 - protein, 269 aa, Unidentified
AQSVPWGISRVQAPAAHNRRLWGSGVKVAVLDTGISTHPDLNIRGGASFVPGEPSTQDGNGHGTHVAGTIAALNNSIGVLGVAPSAELYAVKVLGASGGGAISSIAQGLEWAGANGMHVANLSLGSPSPSATLEQAVNSATSRGVLVVAASGNSGAGSISYPARYANAMAVGATDQDNNRASFSQYGAGLDLVAPGVNVQSTYPQSAYFSLNGTSMATPHVAGAAVLVKQKNPSWSNVRIRNHLKNTATSLGSTNLYGSGLVNAEAATR

SEQ ID NO: 63416 - protein, 269 aa, Unidentified
AQSVPWGISRVQAPAAHNRGLAGSGVKVAVLDTGISTHPDLNIRGGASFVPGEPSTQDGNGHGTHVAGTIAALNNSIGVLGVAPSAELYAVKVLGASGQGAISSIAQGLEWAGNNGMHVANLSIGSESPSATLEQAVNSATSRGVLVVAASGNSGADSISYPARYANAMAVGATDQNNNRADFSQYGAGLDIVAPGVNVQSTYPGSTYASQNGTSMATPHVAGAAVLVKQKNPSWSNVRIRDHLKNTATSLGSTNLYGSGLVNAFAATR

SEQ ID NO: 63417 - protein, 269 aa, Unidentified
AQSVPWGISRVQAPAAHNRGLAGSGVKVAVLDSGISTHPDLNIRGGASFVPGEPSTQDGNGHGTHVAGTIAALNNSIGVLGVAPSAELYAVKVLGASGGGAISSIAQGLEWAGLNGMHVANLSLGSPSPSATLEQAVNSATSRGVLVVAASGNSGADSISYPARYANAMAVGATDQNNNRADFSQYGAGLDIVAPGVNVQSTYPGSAYASLNGTSMATPHVAGAAVLVKQKNPSWSNVRIRDHLKNTATSLGSTNLYGSGLVNAFAATR

SEQ ID NO: 63418 - protein, 269 aa, Unidentified
AQSVPWGISRVQAPAAHNRGLAGSGVKVAVLDTGISTHPDLNIRGGASFVPGEPSTQDGNGHGTHVAGTIAALDNSIGVLGVAPSAELYAVKVLAASGQGAISSIAQGLEWAGNNGMHVANLSLGAPSPSATLEQAVNSATSRGVLVVAASGNSGADSISYPARYANAMAVGATDQNNNRADFSQYGAGLDIVAPGVNVQSTYPGSTYASLNGTSMATPHVAGAAVLVKQKNPSWSNVRIRDHLKNTATSLGSTNLYGSGLVNAFAATR

SEQ ID NO: 63419 - protein, 269 aa, Unidentified
AQSVPWGISRVQAPAAHNRGLTGRGVKVAVLDTGISTHPDLNIRGGASFVPGEPSTQDGNGHGTHVAGTIAALDNSIGVLGVAPSAELYAVKVLGASGAGAISSIAQGLEWAGNNGMHVANLSLGSPSPSATLEQAVNSATSRGVLVVAASGNSGEGSIDYPARYANAMAVGATDQNNNRADFSQYGAGLDIVAPGVNVQSTYPGSTYASLNGTSMATPHVAGAAVLVKQKNPSWSNVRIRDRLKNTATSLGSTNLYGSGLVNAFAATR

SEQ ID NO: 63420 - protein, 269 aa, Unidentified
AQSVPWGISRVQAPAAHNRGLAGGGVKVAVLDTGISTHPDLNIRGGASFVPGEPSTQDGNGHGTHVAGTIAALNNNIGVLGVAPSAELYAVKVLGASGNGAISSIAGGLEWAGNNGMHVANLSLGSPSPSATLEQAVNSATSRGVLVVAASGNSGADSISYPARYANAMAVGATDQNNNRADFSQYGAGLDIVAPGVNVQSTYPGSTYASLNGTSMATPHVAGAAVLVKQKNPSWSNVRIRDHLKNTATSLGSTNLYGSGLVNAFAATR

SEQ ID NO: 63421 - protein, 269 aa, Unidentified
AQSVPWGISRVQAPAAHNRGLAGSGVKVAVLDTGISTHPDLNIRGGASFVPGEPSTQDGNGHGTHVAGTIAALDNSIGVLGVAPSAELYAVKVLAASGNGAISSIAQGLEWAGNNGMHVANLSLGSPSPSATLEQAVNSATSRGVLVVAASGNSGADSISYPARYANAMAVGATDQNNNRADFSQYGAGLDIVAPGVNVQSTYPGSTYASQNGTSMATPHVAGAAVLVKQKNPSWSNVRIRDHLKNTATSLGSTNLYGSGLVNAFAATR

SEQ ID NO: 63422 - protein, 269 aa, Unidentified
AQSVPWGISRVQAPAAHNRGLAGSGVKVAVLDTGISTHPDLNIRGGASFVPGEPSTQDGNGHGTHVAGTIAALNNSIGVLGVAPSAELYAVKVLGASGQGAISSIAQGLEWAGNNGMHVANTSLGASSPSATLEQAVNSATSRGVLVVAASGNSGADSISYPARYANAMAVGATDQNNNRADFSQYGAGLDIVAPGVNVQSTYPGSTYASLNGTSMATPHVAGAAVLVKQKNPSWSNVRIRDHLKNTATSLGSTNLYGSGLVNAFAATR

SEQ ID NO: 63423 - protein, 269 aa, Unidentified
AQSVPWGISRVQAPAAHNRGLAGGGVKVAVLDTGISTHPDLNIRGGASFVPGEPSTQDGNGHGTHVAGTIAALNNSIGVLGVAPSAELYAVKVLSASGNGAISSIANGLEWAGNNGMHVANLSLGSPSPSATLEQAVNSATSRGVLVVAASGNSGADSISYPARYANAMAVGATDQNNNRADFSQYGAGLDIVAPGVNVQSTYPGSTYASLNGTSMATPHVAGAAVLVKQKNPSWSNVRIRDHLKNTATSLGSTNLYGSGLVNAFAATR

SEQ ID NO: 63424 - protein, 269 aa, Unidentified
AQSVPWGISRVQAPAAHNRGLAGSGVKVAVLDTGISTHPDLNIRGGASFVPGEPSTQDGNGHGTHVAGTIAALDNSIGVLGVAPSAELYAVKVLSASGQGAISSIANGLEWAGNNGMHVANLSLGSPSPSATLEQAVNSATSRGVLVVAASGNSGADSISYPARYANAMAVGATDQNNNRADFSQYGAGLDIVAPGVNVQSTYPGSTYASLNGTSMATPHVAGAAVLVKQKNPSWSNVRIRDHLKNTATSLGSTNLYGSGLVNAFAATR

SEQ ID NO: 63425 - protein, 269 aa, Unidentified
AQSVPWGISRVQAPAAHNRGLAGGGVKVAVLDTGISTHPDLNIRGGASFVPGEPSTQDGNGHGTHVAGTIAALNNSIGVLGVAPSAELYAVKVLGASGNGAISSIAQGLEWAGNNGMHVANLSLGAPSPSATLEQAVNSATSRGVLVVAASGNSGADSISYPARYANAMAVGATDQNNNRADFSQYGAGLDIVAPGVNVQSTYPGSTYASLNGTSMATPHVAGAAVLVKQKNPSWSNVRIRDHLKNTATSLGSTNLYGSGLVNAFAAIR

SEQ ID NO: 63426 - protein, 269 aa, Bacillus subtilis
AQSVPWGISRVQAPAAHNRGLTGSGVKVAVLDTGISTHPDLNIRGGASFVPGEPSTEDGNGHGTHVAGTIAALDNSIGVLGVAPSAELYAVKVLGRDGSGSVSSIAQGLEWAGNNGMDVANLSLGSPSPSATLEQAVDRATSRGVLVVAASGNSGAGSISYPARYANAMAVGATDQNNNRASFSQYGAGLDIVAPGVNVQSTYPGSTYASLNGTSMATPHVAGAAALVLQKDPSWSNVQIRNHLKNTAEKLGDTNLYGSGLVNAERATR

SEQ ID NO: 63427 - protein, 269 aa, Unidentified
AQSVPWGISRVQAPAAHNRGLAGSGVKVAVLDTGISTHPDLNIRGGASFVPGEPSTQDGNGHGTHVAGTIAALNNSIGVLGVAPSAELYAVKVLAASGQGAISSIAQGLEWAGNNGMHVANVSLGSSSPSATLEQAVNSATSRGVLVVAASGNSGADSISYPARYANAMAVGATDQNNNRADFSQYGAGLDIVAPGVNVQSTYPGSTYASLNGTSMATPHVAGAAVLVKQKNPSWSNVRIRDHLKNTATSLGSTNLYGSGLVNAFAATR

SEQ ID NO: 63428 - protein, 269 aa, Unidentified
AQSVPWGISRVQAPAAHNRGLAGSGVKVAVLDTGISTHPDLNIRGGASFVPGEPSTQDGNGHGTHVAGTIAALNNSIGVLGVAPSAELYAVKVLGASGNGAISSIAQGLEWAGNNGMHVANTSLGASSPSATLEQAVNSATSRGVLVVAASGNSGADSISYPARYANAMAVGATDQNNNRADFSQYGAGLDIVAPGVNVQSTYPGSTYASLNGTSMATPHVAGAAVLVKQKNPSWSNVRIRDHLKNTATSLGSTNLYGSGLVNAFAATR

SEQ ID NO: 63429 - protein, 269 aa, Unidentified
AQSVPWGISRVQAPAAHNRGLAGSGVKVAVLDTGISTHPDLNIRGGASFVPGEPSTQDGNGHGTHVAGTIAALSNSIGVLGVAPSAELYAVKVLGASGGGAISSIAQGLEWAGNNGMHVANLSLGSPSPSATLEQAVNSATSRGVLVVAASGNSGADSISYPARYANAMAVGATDQNNNRADFSQYGAGLDIVAPGVNVQSTYPGSTYASLNGTSMATPHVAGAAVLVKQKYPSWSNVRIRDHLKNTATSLGSTNLYGSGLVNAFVATR

SEQ ID NO: 63430 - protein, 269 aa, Unidentified
AQSVPWGISRVQAPAAHNRGLAGSGVKVAVLDTGISTHPDLNIRGGASFVPGEPSTQDGNGHGTHVAGTIAALNNSIGVLGVAPSAELYAVKVLSASGNGAISSIAQGLEWAGNNGMHVANLSLGAPSPSATLEQAVNSATSRGVLVVAASGNSGADSISYPARYANAMAVGATDQNNNRADFSQYGAGLDIVAPGVNVQSTYPGSTYASQNGTSMATPHVAGAAVLVKQKNPSWSNVRIRDHLKNTATSLGSTNLYGSGLVNAFAATR

SEQ ID NO: 63431 - protein, 269 aa, Unidentified
AQSVPWGISRVQAPAAHNRGLAGSGVKVAVLDTGISTHPDLNIRGGASFVPGEPSTQDGNGHGTHVAGTIAALNNNIGVLGVAPSAELYAVKVLAASGQGAISSIAGGLEWAGNNGMHVANLSLGSPSPSATLEQAVNSATSRGVLVVAASGNSGADSISYPARYANAMAVGATDQNNNRADFSQYGAGLDIVAPGVNVQSTYPGSTYASLNGTSMATPHVAGAAVLVKQKNPSWSNVRIRDHLKNTATSLGSTNLYGSGLVNAFAATR

SEQ ID NO: 63432 - protein, 269 aa, Unidentified
AQSVPWGISRVQAPAAHNRGLAGSGVKVAVLDTGISTHPDLNIRGGASFVPGEPSTQDGNGHGTHVAGTIAALNNSIGVLGVAPSAELYAVKVLGASGGGAISSIAQGLEWAGNNGMHVANLSIGSESPSATLEQAVNSATSRGVLVVAASGNSGADSISYPARYANAMAVGATDQNNNRADFSQYGAGLDIVAPGVNVQSTYPGSTYASQNGTSMATPHVAGAAVLVKQKNPSWSNVRIRDHLKNTATSLGSTNLYGSGLVNAFAATR

SEQ ID NO: 63433 - protein, 269 aa, Unidentified
AQSVPWGISRVQAPAAHNRGLAGSGVKVAVLDTGISTHPDLNIRGGASFVPGEPSTQDGDGHGTHVAGTIAALNNSIGVLGVAPSAELYAVKVLGASGGGAISSIAQGLEWAGLNGMHVANLSLGSPSPSATLEQAVNSATSRGVLVVAASGNSGADSISYPARYANAMAVGATDQNNNRADFSQYGAGLDIVAPGVNVQSTYPGSAYASLNGTSMATPHVAGAAVLVKQKNPSWSNVRIRDHLKNTATSLGSTNLYGSGLVNAFAATR

SEQ ID NO: 63434 - protein, 269 aa, Unidentified
AQSVPWGISRVQAPAAHNRGLAGSGVKVAVLDTGISTHPDLNIRGGASFVPGEPSTQDGQGHGTHVAGTIAALNNSIGVLGVAPSAELYAVKVLGASGQGAISSIAQGLEWAGNNGMHVANLSLGAPSPSATLEQAVNSATSRGVLVVAASGNSGADSISYPARYANAMAVGATDQNNNRADFSQYGAGLDIVAPGVNVQSTYPGSTYASQNGTSMATPHVAGAAVLVKQKNPSWSNVRIRDHLKNTATSLGSTNLYGSGLVNAFAATR

SEQ ID NO: 63435 - protein, 269 aa, Unidentified
AQSVPWGISRVQAPAAHNRGLAGSGVKVAVLDTGISTHPDLNIRGGASFVPGEPSTQDGNGHGTHVAGTIAALDNSIGVLGVAPSAELYAVKVLGASGNGAISSIAQGLEWAGNNGMHVANLSLGAPSPSATLEQAVNSATSRGVLVVAASGNSGADSISYPARYANAMAVGATDQNNNRADFSQYGAGLDIVAPGVNVQSTYPGSTYASQNGTSMATPHVAGAAVLVKQKNPSWSNVRIRDHLKNTATSLGSTNLYGSGLVNAFAATR

SEQ ID NO: 63436 - protein, 269 aa, Unidentified
AQSVPWGISRVQAPAAHNRGLAGRGVKVAVLDTGISTHPDLNIRGGASFVPGEPSTQDGNGHGTHVAGTIAALDNSIGVLGVAPSAELYAVKVLGASGGGAISSVAQGLEWAGNNGMHVANLSLGSPSPSATLEQAVNSATSRGVLVVAASGNSGADSISYPARYANAMAVGATDQNNNRADFSQYGAGLDIVAPGVNVQSTYPGSTYASLNGTSMATPHVAGAAVLVKQKNPSWSNVRIRDHLKNTATSLGSTNLYGSGLVNAFAATR

SEQ ID NO: 63437 - protein, 269 aa, Unidentified
AQSVPWGISRVQAPAAHNRGLAGSGVKVAVLDTGISTHPDLNIRGGASFVPGEPSTQDGNGHGTHVAGTIAALDNSIGVLGVAPSAELYAVKVLGASGGGAISSIAQGLEWAGNNGMHVANLSLGSPSPSATLEQAVNSATSRGVLVVAASGNSGADSISYPARYANAMAVGATDQNNNRADFSQYGAGLDIVAPGVNVQSTYPGSTYASLNGTSMATPHVAGAAVLVKQKYPSWSNVRIRDHLKNTATSLGSTNLYGSGLVNVFAATR

SEQ ID NO: 63438 - protein, 269 aa, Unidentified
AQSVPWGISRVQAPAAHNRGLAGSGVKVAVLDTGISTHPDLNIRGGASFVPGEPSTQDGNGHGTHVAGTIAALDNSIGVLGVAPSAELYAVKVLGASGGGAISSIAQGLEWAGNNGMHVANLSLGSPSPSATLEQAVNSATSRGVLVVAASGNSGADSISYPARYANAMAVGATDQNNNRADFSQYGAGLDIVAPGVNVQSTYPGSTYASQSGTSMATPHVAGAAVLVKQKNPSWSNVRIRDHLKNTATSLGSTNLYGSGLVNAFAATR

SEQ ID NO: 63439 - protein, 269 aa, Unidentified
AQSVPWGISRVQAPAAHNRGLAGSGVKVAVLDTGISTHPDLRIRGGASFVPGEPSTQDGNGHGTHVAGTIAALNNSIGVLGVAPSAELYAVKVLGASGGGAISSIAQGLEWAGNNGMHVANLSLGSPSPSATLEQAVNSATSRGVLVVAASGNSGEESISYPARYANAMAVGATDQNNNRADFSQYGAGLDIVAPGVNVQSTYPGSTYASLNGTSMATPHVAGAAVLVKQKNPSWSNVRIRDHLKNTATSLGSTNLYGSGLVNAFVATR

SEQ ID NO: 63440 - protein, 269 aa, Bacillus subtilis
AQSVPWGISRVQAPAAHNRGLTGSGVRVAVLDTGISTHPDLNIRGGASFVPGDPSTQDGNGHGTHVAGTIAALNNSIGVLGVAPSAELFAVRVLGASGSGSVSSIAQGLEWAGNNGMHVANLSLGSPSPSATLEQAVNSATSRGVLVVAASGNSGAGSISFPARVANAMAVGATDQNNNRASFSQFGAGLDIVAPGVNVQSTFPGSTTASLNGTSMATPHVAGAAALVRQRNPSWSNVQIRNHLENTATSLGSTNLFGSGLVNAEAATR

SEQ ID NO: 63441 - protein, 269 aa, Bacillus lentus
AQSVPWGISRVQAPAAHNRGLTGSGVKVAVLDTGISTHEDLNVRGGVSFVPGETSYQDGNGHGTHVAGTIAALNNSIGVVGVAPSADLYAVKVLGASGRGSVSSIAQGLEWAGQNGMHVANLSLGTDEPSATLEQAVNSATSRGVLVVAASGNSGAGSISYPARYANAMAVGATDQNNNRASFSQYGAGLDIVAPGVNVQSTYPGSTYASLNGTSMATPHVAGAAALVKQKNPSWSNVQIRDHLKNTATSLGSTNLYGSGLVNAEAATR

SEQ ID NO: 63442 - protein, 269 aa, Unidentified
AQSVPWGISRVQAPAAHNRGLTGRGVKVAVLDTGISTHPDLNIRGGASFVPGEPSTQDGNGHGTHVAGTIAALNNSIGVLGVAPSAELYAVKVLGASGGGAISSIAQGLEWAGNNGMHVANLSLGLQAPSATLEQAVNSATSRGVLVVAASGNSGEGSISYPARYANAMAVGATDQNNNRASFSQDGAGLDIVAPGVNVQSTYPGSTYASLNGTSMATPHVAGAAVLVKQKNPSWSNVRIRDRLKNTATSLGSTNLYGSGLVNAEAATR

SEQ ID NO: 63443 - protein, 269 aa, Unidentified
AQSVPWGISRVQAPAAHNRGLAGGGVKVAVLDTGISTHPDLNIRGGASFVPGEPSTQDGNGHGTHVAGTIAALDNSIGVLGVAPSAELYAVKVLGASGNGAISSIAQGLEWAGNNGMHVANLSLGSPSPSATLEQAVNSATSRGVLVVAASGNSGADSISYPARYANAMAVGATDQNNNRADFSQYGAGLDIVAPGVNVQSTYPGSTYASQNGTSMATPHVAGAAVLVKQKNPSWSNVRIRDHLKNTATSLGSTNLYGSGLVNAFAATR

SEQ ID NO: 63444 - protein, 269 aa, Unidentified
AQSVPWGISRVQAPAAHNRGLAGSGVKVAVLDTGISTHPDLNIRGGASFVPGEPSTQDGNGHGTHVAGTIAALNNSIGVLGVAPSAELYAVKVLGASGGGAISSIAQGLEWAGNNGMHVANLSLGSPSPSATLEQAVNSATSRGVLVVAASGNSGADSISYPARYANAMAVGATDQNNNRADFSQYGAGLDIVAPGVNVQSTYPGSTYASLNGTSMATPHVAGAAVLVKQKNPSWSNARIRDHLKNTATSLGSTNLYGSGLVNVFVATR

SEQ ID NO: 63445 - protein, 269 aa, Unidentified
AQSVPWGISRVQAPAAHNRGLAGSGVKVAVLDTGISTHPDLNIRGGASFVPGEPSTQDGNGHGTHVAGTIAALNNSIGVLGVAPSAELYAVKVLAASGGGAISSIAQGLEWAGNNGMHVANLSLGSSSPSATLEQAVNSATSRGVLVVAASGNSGADSISYPARYANAMAVGATDQNNNRADFSQYGAGLDIVAPGVNVQSTYPGSTYASQNGTSMATPHVAGAAVLVKQKNPSWSNVRIRDHLKNTATSLGSTNLYGSGLVNAFAATR

SEQ ID NO: 63446 - protein, 269 aa, Unidentified
AQSVPWGISRVQAPAAHNRGLAGSGVKVAVLDTGISTHPDLNIRGGASFVPGEPSTQDGNGHGTHVAGTIAALNNSIGVLGVAPSAEIYAVKVLGASGGGAISSIAQGLEWAGNNGMHVANLSLGAPSPSATLEQAVNSATSRGVLVVAASGNSGADSISYPARYANAMAVGATDQNNNRADFSQYGAGLDIVAPGVNVQSTYPGSTYASQNGTSMATPHVAGAAVLVKQKNPSWSNVRIRDHLKNTATSLGSTNLYGSGLVNAFAATR

SEQ ID NO: 63447 - protein, 269 aa, Unidentified
AQSVPWGISRVQAPAAHNRGLAGRGVKVAVLDTGISTHPDLRIRGGASFVPGEPSTQDGNGHGTHVAGTIAALDNSIGVLGVAPSAELYAVKVLGASGGGAISSIAQGLEWAGNNGMHVANLSLGSPSPSATLEQAVNSATSRGVLVVAASGNSGEGSISYPARYANAMAVGATDQNNNRADFSQYGAGLDIVAPGVNVQSTYPGSTYASLNGTSMATPHVAGAAVLVKQKNPSWSNVRIRDHLKNTATSLGSTNLYGSGLVNAFAATR

SEQ ID NO: 63448 - protein, 269 aa, Unidentified
AQSVPWGISRVQAPAAHNRGLAGSGVKVAVLDTGISTHPDLNIRGGASFVPGEPSTQDGNGHGTHVAGTIAALNNSIGVLGVAPSAELYAVKVLAASGNGAISSIAQGLEWAGNNGMHVANLSLGSSSPSATLEQAVNSATSRGVLVVAASGNSGADSISYPARYANAMAVGATDQNNNRADFSQYGAGLDIVAPGVNVQSTYPGSTYASQNGTSMATPHVAGAAVLVKQKNPSWSNVRIRDHLKNTATSLGSTNLYGSGLVNAFAATR

SEQ ID NO: 63449 - protein, 269 aa, Unidentified
AQSVPWGISRVQAPAAHNRGLAGSGVKVAVLDTGISTHPDLNIRGGASFVPGEPSTQDGNGHGTHVAGTIAALNNSIGVLGVAPSAELYAVKVLAASGGGAISSIAQGLEWAGNNGMHVANVSLGSSSPSATLEQAVNSATSRGVLVVAASGNSGADSISYPARYANAMAVGATDQNNNRADFSQYGAGLDIVAPGVNVQSTYPGSTYASLNGTSMATPHVAGAAVLVKQKNPSWSNVRIRDHLKNTATSLGSTNLYGSGLVNAFAATR

SEQ ID NO: 63450 - protein, 269 aa, Unidentified
AQSVPWGISRVQAPAAHNRGLAGRGVKVAVLDTGISTHPDLNIRGGASFVPGEPSTQDGNGHGTHVAGTIAALDNSIGVLGVAPSAELYAVKVLGASGGGAISSIAQGLEWAGNNGMHVANLSLGSPSPSATLEQAVNSATSRGVLVVAASGNSGADSISYPARYANAMAVGATDQNNNRADFSQYGAGLDIVAPGVNVQSTYPGSTYASLNGTSMATPHVAGAAVLVKQKYPSWSNVRIRDHLKNTATSLGSTNLYGSGLVNAFAATR

SEQ ID NO: 63451 - protein, 269 aa, Unidentified
AQSVPWGISRVQAPAAHNRGLAGSGVKVAVLDTGISTHPDLNIRGGASFVPGEPSTQDGNGHGTHVAGTIAALNNSIGVLGVAPSAELYAVKVLGASGGGAISSIAQGLEWAGNNGMHVANLSLGSESPSATLEQAVNSATSRGVLVVAASGNSGADSISYPARYANAMAVGATDQNNNRADFSQYGAGLDIVAPGVNVQSTYPGSTYASLNGTSMATPHVAGAAVLVKQKYPSWSNVRIRDHLKNTATSLGSTNLYGSGLVNAFVATR

SEQ ID NO: 63452 - protein, 269 aa, Unidentified
AQSVPWGISRVQAPAAHNRGLAGSGVKVAVLDTGISTHPDLNIRGGASFVPGEPSTQDGNGHGTHVAGTIAALNNSIGVLGVAPSAELYAVKVLGASGGGAISSIAQGLEWAGNNGMHVANVSLGAPSPSATLEQAVNSATSRGVLVVAASGNSGADSISYPARYANAMAVGATDQNNNRADFSQYGAGLDIVAPGVNVQSTYPGSTYASQNGTSMATPHVAGAAVLVKQKNPSWSNVRIRDHLKNTATSLGSTNLYGSGLVNAFAATR

SEQ ID NO: 63453 - protein, 269 aa, Unidentified
AQSVPWGISRVQAPAAHNRGLAGRGVKVAVLDTGISTHPDLNIRGGASFVPGEPSTQDGNGHGTHVAGTIAALNNSIGVLGVAPSAELYAVKVLGASGGGAISSVAQGLEWAGNNGMHVANLSLGSPSPSATLEQAVNSATSRGVLVVAASGNSGADSISYPARYANAMAVGATDQNNNRADFSQYGAGLDIVAPGVNVQSTYPGSTYASLNGTSMATPHVAGAAVLVKQKNPSWSNVRIRDHLKNTATSLGSTNLYGSGLVNVFAATR

SEQ ID NO: 63454 - protein, 269 aa, Unidentified
AQSVPWGISRVQAPAAHNRGLTGSGVKVAVLDTGISTHPDLRRRGGASFVPGEPSTQDGNGHGTHVAGTIAALDNSIGVLGVAPSAELYAVKVLGASGAGAISSIAQGLEWAGNNGMHVANLSLGSPSPSATLEQAVNSATSRGVLVVAASGNSGEGSIDYPARYANAMAVGATDQNNNRADFSQYGAGLDIVAPGVNVQSTYPGSTYASLNGTSMATPHVAGAAVLVKQKNPSWSNVRIRDHLKNTATSLGSTNLYGSGLVNAFAATR

SEQ ID NO: 63455 - protein, 269 aa, Unidentified
AQSVPWGISRVQAPAAHNRGLAGSGVKVAVLDTGISTHPDLNIRGGASFVPGEPSTQDGNGHGTHVAGTIAALNNSIGVLGVAPSAELYAVKVLGASGQGAISSIAGGLEWAGNNGMHVANLSLGAPSPSATLEQAVNSATSRGVLVVAASGNSGADSISYPARYANAMAVGATDQNNNRADFSQYGAGLDIVAPGVNVQSTYPGSTYASQNGTSMATPHVAGAAVLVKQKNPSWSNVRIRDHLKNTATSLGSTNLYGSGLVNAFAATR

SEQ ID NO: 63456 - protein, 269 aa, Unidentified
AQSVPWGISRVQAPAAHNRGLTGSGVKVAVLDTGISTHPDLRITGGASFVPGEPSTQDGNGHGTHVAGTIAALDNRIGVLGVAPSAELYAVKVLGASGGGAISSIAQGLEWAGNNGMHVANLSLGSPSPSATLEQAVNSATSRGVLVVAASGNSGAGSIFYPARYANAMPVGVTDQNTNRPSFSQYGPGLDIVAPGVNVQSTYPGSTYASLNGTSMATPHVAGAAALVKQKNPSWSNVQIRNHLKNTATSLGSTNLYGSGLVNAEAATR

SEQ ID NO: 63457 - protein, 269 aa, Unidentified
AQSVPWGISRVQAPAAHNRGLAGSGVKVAVLDTGISTHPDLRIRGGASFVPGEPSTQDGNGHGTHVAGTIAALNNSIGVLGVAPSAELYAVKVLGASGGGAISSIAQGLEWAGNNGMHVANLSLGSESPSATLEQAVNSATSRGVLVVAASGNSGEESISYPARYANAMAVGATDQNNNRADFSQYGAGLDIVAPGVNVQSTYPGSTYASLNGTSMATPHVAGAAVLVKQKNPSWSNVRIRDHLKNTATSLGSTNLYGSGLVNAFAATR

SEQ ID NO: 63458 - protein, 269 aa, Unidentified
AQSVPWGISRVQAPAAHNRGLAGGGVKVAVLDTGISTHPDLNIRGGASFVPGEPSTQDGNGHGTHVAGTIAALDNSIGVLGVAPSAELYAVKVLGASGQGAISSIAQGLEWAGNNGMHVANLSLGSPSPSATLEQAVNSATSRGVLVVAASGNSGADSISYPARYANAMAVGATDQNNNRADFSQYGAGLDIVAPGVNVQSTYPGSTYASQNGTSMATPHVAGAAVLVKQKNPSWSNVRIRDHLKNTATSLGSTNLYGSGLVNAFAATR

SEQ ID NO: 63459 - protein, 269 aa, Unidentified
AQSVPWGISRVQAPAAHNRGLAGSGVKVAVLDTGISTHPDLNIRGGASFVPGEPSTQDGNGHGTHVAGTIAALDNSIGVLGVAPSAELYAVKVLGASGQGAISSIAQGLEWAGNNGMHVANLSLGAPSPSATLEQAVNSATSRGVLVVAASGNSGADSISYPARYANAMAVGATDQNNNRADFSQYGAGLDIVAPGVNVQSTYPGSTYASQNGTSMATPHVAGAAVLVKQKNPSWSNVRIRDHLKNTATSLGSTNLYGSGLVNAFAATR

SEQ ID NO: 63460 - protein, 269 aa, Unidentified
AQSVPWGISRVQAPAAHNRGLAGRGVKVAVLDTGISTHPDLNIRGGASFVPGEPSTQDGNGHGTHVAGTIAALDNSIGVLGVAPSAELYAVKVLGASGGGAISSIAQGLEWAGNNGMHVANLSLGSPSPSATLEQAVNSATSRGVLVVAASGNSGADSISYPARYANAMAVGATDQNNNRADFSQYGAGLDIVAPGVNVQSTYPGSTYASLNGTSMATPHVAGAAALVKQKNPSWSNVRIRDHLKNTATSLGSTNLYGSGLVNVFVATR

SEQ ID NO: 63461 - protein, 269 aa, Bacillus clausii
AQSVPWGIERVQAPAAHNRGLTGSGVKVAVLDTGISTHPDLRIRGGASFVPGEPSTQDGNGHGTHVAGTIAALDNSIGVLGVAPSAELYAVKVLGAFGLGSVSSIAQGLEWAGNNGMHVANLSLGSPSPSATLEQAVNSATSRGVLVVAASGNEGAGSIRYPARYANAMAVGATDQNNNRASFSQYGAGLDIVAPGVNILSTWPGSTYASLNGTSMATPHVAGAAALVKQKNPSWSNVQIRNHLKNTATSLGDTWEYGSGLVNAEAATR

SEQ ID NO: 63462 - protein, 269 aa, Unidentified
AQSVPWGISRVQAPAAHNRGLTGSGVKVAVLDTGISTHPDLNIRGGASFVPGEPSTQDGDGHGTHVAGTIAALNNSIGVLGVAPSAELYAVKVLGASGSGAISSIAQGLEWAGNNGMHVANLSLGSPSPSATLEQAVNSATSRGVLVVAASGNSGADSISYPARYANAMAVGATDQNNDRASFSQYGAGLDIVAPGVNVESTYPGSRYASLNGTSMATPHVAGAAVLVKHKNPSWSNVRIRDHLKKTATSLGSTNLYGSGLVNAIAATR

SEQ ID NO: 63463 - protein, 269 aa, Unidentified
AQSVPWGISRVQAPAAHNRGLAGSGVKVAVLDTGISTHPDLNIRGGASFVPGEPSTQDGNGHGTHVAGTIAALNNNIGVLGVAPSAELYAVKVLSASGQGAISSIAQGLEWAGNNGMHVANLSLGSPSPSATLEQAVNSATSRGVLVVAASGNSGADSISYPARYANAMAVGATDQNNNRADFSQYGAGLDIVAPGVNVQSTYPGSTYASQNGTSMATPHVAGAAVLVKQKNPSWSNVRIRDHLKNTATSLGSTNLYGSGLVNAFAATR

SEQ ID NO: 63464 - protein, 269 aa, Unidentified
AQSVPWGISRVQAPAAHNRGLAGSGVKVAVLDTGISTHPDLNIRGGASFVPGEPSTQDGNGHGTHVAGTIAALDNSIGVLGVAPSAELYAVKVLAASGNGAISSIAQGLEWAGNNGMHVANLSLGAPSPSATLEQAVNSATSRGVLVVAASGNSGADSISYPARYANAMAVGATDQNNNRADFSQYGAGLDIVAPGVNVQSTYPGSTYASLNGTSMATPHVAGAAVLVKQKNPSWSNVRIRDHLKNTATSLGSTNLYGSGLVNAFAATR

SEQ ID NO: 63465 - protein, 269 aa, Unidentified
AQSVPWGISRVQAPAAHNRGLAGSGVKVAVLDTGISTHPDLNIRGGASFVPGEPSTQDGNGHGTHVAGTIAALDNSIGVLGVAPSAELYAVKVLSASGGGAISSIAQGLEWAGNNGMHVANLSLGAPSPSATLEQAVNSATSRGVLVVAASGNSGADSISYPARYANAMAVGATDQNNNRADFSQYGAGLDIVAPGVNVQSTYPGSTYASLNGTSMATPHVAGAAVLVKQKNPSWSNVRIRDHLKNTATSLGSTNLYGSGLVNAFAATR

SEQ ID NO: 63466 - protein, 269 aa, Unidentified
AQSVPWGISRVQAPAAHNRGLAGGGVKVAVLDTGISTHPDLNIRGGASFVPGEPSTQDGNGHGTHVAGTIAALNNNIGVLGVAPSAELYAVKVLGASGNGAISSIAQGLEWAGNNGMHVANLSLGAPSPSATLEQAVNSATSRGVLVVAASGNSGADSISYPARYANAMAVGATDQNNNRADFSQYGAGLDIVAPGVNVQSTYPGSTYASLNGTSMATPHVAGAAVLVKQKNPSWSNVRIRDHLKNTATSLGSTNLYGSGLVNAFAATR

SEQ ID NO: 63467 - protein, 269 aa, Unidentified
AQSVPWGISRVQAPAAHNRGLAGRGVKVAVLDTGISTHPDLNIRGGASFVPGEPSTQDGNGHGTHVAGTIAALNNSIGVLGVAPSAELYAVKVLGASGGGAISSIAQGLEWAGNNGMHVANLSLGSESPSATLEQAVNSATSRGVLVVAASGNSGADSISYPARYANAMAVGATDQNNNRADFSQYGAGLDIVAPGVNVQSTYPGSTYASLNGTSMATPHVAGAAVLVKQKNPSWSNVRIRDHLKNTATSLGSTNLYGSGLVNAFVATR

SEQ ID NO: 63468 - protein, 269 aa, Unidentified
AQSVPWGISRVQAPAAHNRGLAGSGVKVAVLDTGISTHPDLNIRGGASFVPGEPSTQDGNGHGTHVAGTIAALDNSIGVLGVAPSAELYAVKVLAASGGGAISSIAQGLEWAGNNGMHVANLSLGSPSPSATLEQAVNSATSRGVLVVAASGNSGADSISYPARYANAMAVGATDQNNNRADFSQYGAGLDIVAPGVNVQSTYPGSTYASQNGTSMATPHVAGAAVLVKQKNPSWSNVRIRDHLKNTATSLGSTNLYGSGLVNAFAATR

SEQ ID NO: 63469 - protein, 269 aa, Unidentified
AQSVPWGISRVQAPAAHNRGLAGSGVKVAVLDTGISTHPDLNIRGGASFVPGEPSTQDGNGHGTHVAGTIAALNNSIGVLGVAPSAELYAVKVLSASGQGAISSIANGLEWAGNNGMHVANLSLGSPSPSATLEQAVNSATSRGVLVVAASGNSGADSISYPARYANAMAVGATDQNNNRADFSQYGAGLDIVAPGVNVQSTYPGSTYASQNGTSMATPHVAGAAVLVKQKNPSWSNVRIRDHLKNTATSLGSTNLYGSGLVNAFAATR

SEQ ID NO: 63470 - protein, 269 aa, Unidentified
AQSVPWGISRVQAPAAHNRGLAGRGVKVAVLDTGISTHPDLNIRGGASFVPGEPSTQDGNGHGTHVAGTIAALDNSIGVLGVAPSAELYAVKVLGASGGGAISSIAQGLEWAGNNGMHVANLSLGSPSPSATLEQAVNSATSRGVLVVAASGNSGADSISYPARYANAMAVGATDQNNNRADFSQYGAGLDIVAPGVNVQSTYPGSTYASLNGTSMATPHVAGAAVLVKQKNPSWSNVRIRDHLKNTATSLGSTNLYGSGLVNAFVATR

SEQ ID NO: 63471 - protein, 269 aa, Unidentified
AQSVPWGISRVQAPAAHNRGLAGSGVKVAVLDTGISTHPDLNIRGGASFVPGEPSTQDGNGHGTHVAGTIAALNNNIGVLGVAPSAELYAVKVLGASGQGAISSIAQGLEWAGNNGMHVANLSLGSPSPSATLEQAVNSATSKGVLVVAASGNSGADSISYPARYANAMAVGATDQNNNRADFSQYGAGLDIVAPGVNVQSTYPGSTYASQNGTSMATPHVAGAAVLVKQKNPSWSNVRIRDHLKNTATSLGSTNLYGSGLVNAFAATR

SEQ ID NO: 63472 - protein, 269 aa, Unidentified
AQSVPWGISRVQAPAAHNRGLTGRGVKVAVLDTGISTHPDLNIRGGASFVPGEPSTQDGNGHGTHVAGTIAALNNSIGVLGVAPSAELYAVKVLGASGGGAISSIAQGLEWAGNNGMHVANLSLGSQAPSATLEQAVNSATSRGVLVVAASGNSGEGSISYPARYANAMAVGATDQDNNRADFSQYGAGLDIVAPGVNVQSTYPGSTYASLNGTSMATPHVAGAAVLVKQKNPSWSNVRIRDRLKNTATSLGSTNLYGSGLVNAEAATR

SEQ ID NO: 63473 - protein, 269 aa, Unidentified
AQSVPWGISRVQAPAAHNRGLAGSGVKVAVLDTGISTHPDLNIRGGASFVPGEPSTQDGNGHGTHVAGTIAALNNSIGVLGVAPSAELYAVKVLGASGGGAISSIAQGLEWAGLNGMHVANLSLGLPSPSATLEQAVNSATSRGVLVVAASGNSGADSISYPARYANAMAVGATDQNNNRADFSQYGAGLDIVAPGVNVQSTYPGSAYASLNGTSMATPHVAGAAVLVKQKNPSWSNVRIRDHLKNTATSLGSTNLYGSGLVNAFAATR

SEQ ID NO: 63474 - protein, 269 aa, Unidentified
AQSVPWGISRVQAPAAHNRGLAGGGVKVAVLDTGISTHPDLNIRGGASFVPGEPSTQDGNGHGTHVAGTIAALNNNIGVLGVAPSAELYAVKVLGASGNGAISSIAQGLEWAGNNGMHVANLSLGSPSPSATLEQAVNSATSRGVLVVAASGNSGADSISYPARYANAMAVGATDQNNNRADFSQYGAGLDIVAPGVNVQSTYPGSTYASQNGTSMATPHVAGAAVLVKQKNPSWSNVRIRDHLKNTATSLGSTNLYGSGLVNAFAATR

SEQ ID NO: 63475 - protein, 269 aa, Unidentified
AQSVPWGISRVQAPAAHNRGLTGSGVKVAVLDTGISTHPDLRRRGGASFVPGEPSTQDGNGHGTHVAGTIAALDNSIGVLGVAPSAELYAVKVLGASGAGAISSIAQGLEWAGNNGMHVANLSLGSPSPSATLEQAVNSATSRGVLVVAASGNSGEGSISYPARYANAMAVGATDQNNNRADFSQYGAGLDIVAPGVNVQSTYPGSTYASENGTSMATPHVAGAAVLVKQKNPSWSNVRIRDHLKNTATSLGSTNLYGSGLVNAFAATR

SEQ ID NO: 63476 - protein, 269 aa, Unidentified
AQSVPWGISRVQAPAAHNRGLAGSGVKVAVLDTGISTHPDLNIRGGASFVPGEPSTQDGNGHGTHVAGTIAALNNNIGVLGVAPSAELYAVKVLGASGQGAISSIAQGLEWAGNNGMHVANLSLGAPSPSATLEQAVNSATSRGVLVVAASGNSGADSISYPARYANAMAVGATDQNNNRADFSQYGAGLDIVAPGVNVQSTYPGSTYASQNGTSMATPHVAGAAVLVKQKNPSWSNVRIRDHLKNTATSLGSTNLYGSGLVNAFAATR

SEQ ID NO: 63477 - protein, 269 aa, Unidentified
AQSVPWGISRVQAPAAHNRGLAGGGVKVAVLDTGISTHPDLNIRGGASFVPGEPSTQDGNGHGTHVAGTIAALDNSIGVLGVAPSAELYAVKVLAASGGGAISSIAQGLEWAGNNGMHVANLSLGSPSPSATLEQAVNSATSRGVLVVAASGNSGADSISYPARYANAMAVGATDQNNNRADFSQYGAGLDIVAPGVNVQSTYPGSTYASLNGTSMATPHVAGAAVLVKQKNPSWSNVRIRDHLKNTATSLGSTNLYGSGLVNAFAATR

SEQ ID NO: 63478 - protein, 269 aa, Unidentified
AQSVPWGISRVQAPAAHNRGLAGSGVKVAVLDTGISTHPDLNIRGGASFVPGEPSTQDGNGHGTHVAGTIAALDNSIGVLGVAPSAELYAVKVLSASGQGAISSIAQGLEWAGNNGMHVANLSLGAPSPSATLEQAVNSATSRGVLVVAASGNSGADSISYPARYANAMAVGATDQNNNRADFSQYGAGLDIVAPGVNVQSTYPGSTYASLNGTSMATPHVAGAAVLVKQKNPSWSNVRIRDHLKNTATSLGSTNLYGSGLVNAFAATR

SEQ ID NO: 63479 - protein, 269 aa, Unidentified
AQSVPWGISRVQAPAAHNRGLAGSGVKVAVLDTGISTHPDLNIRGGASFVPGEPSTQDGNGHGTHVAGTIAALNNSIGVLGVAPSAELYAVKVLAASGQGAISSIAQGLEWAGNNGMHVANLSLGASSPSATLEQAVNSATSRGVLVVAASGNSGADSISYPARYANAMAVGATDQNNNRADFSQYGAGLDIVAPGVNVQSTYPGSTYASLNGTSMATPHVAGAAVLVKQKNPSWSNVRIRDHLKNTATSLGSTNLYGSGLVNAFAATR

SEQ ID NO: 63480 - protein, 269 aa, Unidentified
AQSVPWGISRVQAPAAHNRGLAGSGVKVAVLDTGISTHPDLNIRGGASFVPGEPSTQDGNGHGTHVAGTIAALNNSIGVLGVAPSAELYAVKVLAASGGGAISSIAQGLEWAGNNGMHVANLSLGAPSPSATLEQAVNSATSRGVLVVAASGNSGADSISYPARYANAMAVGATDQNNNRADFSQYGAGLDIVAPGVNVQSTYPGSTYASQNGTSMATPHVAGAAVLVKQKNPSWSNVRIRDHLKNTATSLGSTNLYGSGLVNAFAATR

SEQ ID NO: 63481 - protein, 269 aa, Unidentified
AQSVPWGISRVQAPAAHNRGLAGRGVKVAVLDTGISTHPDLNIRGGASFVPGEPSTQDGNGHGTHVAGTIAALDNSIGVLGVAPSAELYAVKVLGASGGGAISSIAQGLEWAGNNGMHVANLSLGSESPSATLEQAVNSATSRGVLVVAASGNSGEGSISYPARYANAMAVGATDQNNNRADFSQYGAGLDIVAPGVNVQSTYPGSTYASLNGTSMATPHVAGAAVLVKQKNPSWSNVRIRDHLKNTATSLGSTNLYGSGLVNAFAATR

SEQ ID NO: 63482 - protein, 269 aa, Unidentified
AQSVPWGISRVQAPAAHNRGLAGSGVKVAVLDTGISTHPDLNIRGGASFVPGEPSTQDGNGHGTHVAGTIAALNNSIGVLGVAPSAELYAVKVLGASGNGAISSIAQGLEWAGNNGMHVANLSLGAESPSATLEQAVNSATSRGVLVVAASGNSGADSISYPARYANAMAVGATDQNNNRADFSQYGAGLDIVAPGVNVQSTYPGSTYASQNGTSMATPHVAGAAVLVKQKNPSWSNVRIRDHLKNTATSLGSTNLYGSGLVNAFAATR

SEQ ID NO: 63483 - protein, 269 aa, Unidentified
AQSVPWGISRVQAPAAHNRGLAGSGVKVAVLDTGISTHPDLNIRGGASFVPGEPSTQDGNGHGTHVAGTIAALNNNIGVLGVAPSAELYAVKVLSASGNGAISSIAQGLEWAGNNGMHVANLSLGSPSPSATLEQAVNSATSRGVLVVAASGNSGADSISYPARYANAMAVGATDQNNNRADFSQYGAGLDIVAPGVNVQSTYPGSTYASQNGTSMATPHVAGAAVLVKQKNPSWSNVRIRDHLKNTATSLGSTNLYGSGLVNAFAATR

SEQ ID NO: 63484 - protein, 269 aa, Unidentified
AQSVPWGISRVQAPAAHNRGLAGRGVKVAVLDTGISTHPDLNIRGGASFVPGEPSTQDGNGHGTHVAGTIAALDNSIGVLGVAPSAELYAVKVLGASGGGAISSIAQGLEWAGNNGMHVANLSLGSESPSATLEQAVNSATSRGVLVVAASGNSGADSISYPARYANAMAVGATDQNNNRADFSQYGAGLDIVAPGVNVQSTYPGSTYASLNGTSMATPHVAGAAVLVKQKNPSWSNVRIRDHLKNTATSLGSTNLYGSGLVNAFAATR

SEQ ID NO: 63485 - protein, 269 aa, Unidentified
AQSVPWGISRVQAPAAHNRGLAGRGVKVAVLDTGISTHPDLNIRGGASFVPGEPSTQDGNGHGTHVAGTIAALDNSIGVLGVAPSAELYAVKVLGASGGGAISSIAQGLEWAGNNGMHVANLSLGSPSPSATLEQAVNSATSRGVLVVAASGNSGEGSISYPARYANAMAVGATDQNNNRADFSQYGAGLDIVAPGVNVQSTYPGSTYASLNGTSMATPHVAGAAVLVKQKNPSWSNVRIRDHLKNTATSLGSTNLYGSGLVNAFVATR

SEQ ID NO: 63486 - protein, 269 aa, Unidentified
AQSVPWGISRVQAPAAHNRGLAGSGVKVAVLDTGISTHPDLNIRGGASFVPGEPSTQDGNGHGTHVAGTIAALNNSIGVLGVAPSAELYAVKVLAASGNGAISSIAQGLEWAGNNGMHVANLSIGSESPSATLEQAVNSATSRGVLVVAASGNSGADSISYPARYANAMAVGATDQNNNRADFSQYGAGLDIVAPGVNVQSTYPGSTYASLNGTSMATPHVAGAAVLVKQKNPSWSNVRIRDHLKNTATSLGSTNLYGSGLVNAFAATR

SEQ ID NO: 63487 - protein, 269 aa, Unidentified
AQSVPWGISRVQAPAAHNRGLAGSGVKVAVLDTGISTHPDLNIRGGASFVPGEPSTQDGNGHGTHVAGTIAALNNSIGVLGVAPSAELYAVKVLAASGNGAISSIAQGLEWAGNNGMHVANVSLGAPSPSATLEQAVNSATSRGVLVVAASGNSGADSISYPARYANAMAVGATDQNNNRADFSQYGAGLDIVAPGVNVQSTYPGSTYASLNGTSMATPHVAGAAVLVKQKNPSWSNVRIRDHLKNTATSLGSTNLYGSGLVNAFAATR

SEQ ID NO: 63488 - protein, 269 aa, Unidentified
AQSVPWGISRVQAPAAHNRGLTGRGVKVAVLDTGISTHPDLNIRGGASFVPGEPSTQDGNGHGTHVAGTIAALNNSIGVLGVAPSAELYAVKVLGASGGGAISSIAQGLEWAGNNGMHVANLSLGLQAPSATLEQAVNSATSRGVLVVAASGNSGEGSISYPARYANAMAVGATDQNNNRADFSQYGAGLDIVAPGVNVQSTYPGSTYASLNGTSMATPHVAGAAVLVKQKNPSWSNVRIRDRLKNTATSLGSTNLYGSGLVNAEAATR

SEQ ID NO: 63489 - protein, 269 aa, Unidentified
AQSVPWGISRVQAPAAHNRGLAGSGVKVAVLDTGISTHPDLNIRGGASFVPGEPSTQDGQGHGTHVAGTIAALNNSIGVLGVAPSAELYAVKVLAASGNGAISSIAQGLEWAGNNGMHVANLSLGSPSPSATLEQAVNSATSRGVLVVAASGNSGADSISYPARYANAMAVGATDQNNNRADFSQYGAGLDIVAPGVNVQSTYPGSTYASQNGTSMATPHVAGAAVLVKQKNPSWSNVRIRDHLKNTATSLGSTNLYGSGLVNAFAATR

SEQ ID NO: 63490 - protein, 269 aa, Unidentified
AQSVPWGISRVQAPAAHNRGLAGSGVKVAVLDTGISTHPDLNIRGGASFVPGEPSTQDGNGHGTHVAGTIAALNNSIGVLGVAPSAELYAVKVLGASGGGAISSIAQGLEWAGNNGMHVANLSLGSESPSATLEQAVNSATSRGVLVVAASGNSGADSISYPARYANAMAVGATDQNNNRADFSQYGAGLDIVAPGVNVQSTYPGSTYASLNGTSMATPHVAGAAVLVKQKNPSWSNVRIRDHLKNTATSLGSTNLYGSGLVNVFVATR

SEQ ID NO: 63491 - protein, 269 aa, Unidentified
AQSVPWGISRVQAPAAHNRGLTGRGVKVAVLDTGISTHPDLNRRGGASFVPGEPSTQDGNGHGTHVAGTIAALDNSIGVLGVAPSAELYAVKVLGASGAGAISSIAQGLEWAGNNGMHVANLSLGSPSPSATLEQAVNSATSRGVLVVAASGNSGEGSIDYPARYANAMAVGATDQNNNRADFSQYGAGLDIVAPGVNVQSTYPGSTYASLNGTSMATPHVAGAAVLVKQKNPSWSNVRIRDHLKNTATSLGSTNLYGSGLVNAFAATR

SEQ ID NO: 63492 - protein, 269 aa, Unidentified
AQSVPWGISRVQAPAAHNRGLAGRGVKVAVLDTGISTHPDLRIRGGASFVPGEPSTQDGNGHGTHVAGTIAALNNSIGVLGVAPSAELYAVKVLGASGGGAISSIAQGLEWAGNNGMHVANLSLGSPSPSATLEQAVNSATSRGVLVVAASGNSGEESISYPARYANAMAVGATDQNNNRADFSQYGAGLDIVAPGVNVQSTYPGSTYASLNGTSMATPHVAGAAVLVKQKNPSWSNVRIRDHLKNTATSLGSTNLYGSGLVNAFAATR

SEQ ID NO: 63493 - protein, 269 aa, Unidentified
AQSVPWGISRVQAPAAHNRGLTGSGVKVAVLDTGISTHPDLRIRGGASFVPGEPSTQDGNGHGTHVAGTIAALDNSIGVLGVAPSAELYAVKVLGASGAGAISSIAQGLEWAGNNGMHVANLSLGSPSPSATLEQAVNSATSRGVLVVAASGNSGEGSISYPARYANAMAVGATDQNNNRADFSQYGAGLDIVAPGVNVQSTYPGSTYASENGTSMATPHVAGAAVLVKQKNPSWSNVRIRDRLKNTATSLGSTNLYGSGLVNAFAATR

SEQ ID NO: 63494 - protein, 269 aa, Unidentified
AQSVPWGISRVQAPAAHNRGLAGSGVKVAVLDTGISTHPDLNIRGGASFVPGEPSTQDGNGHGTHVAGTIAALDNNIGVLGVAPSAELYAVKVLGASGGGAISSIAQGLEWAGNNGMHVANLSLGAPSPSATLEQAVNSATSRGVLVVAASGNSGADSISYPARYANAMAVGATDQNNNRADFSQYGAGLDIVAPGVNVQSTYPGSTYASLNGTSMATPHVAGAAVLVKQKNPSWSNVRIRDHLKNTATSLGSTNLYGSGLVNAFAATR

SEQ ID NO: 63495 - protein, 269 aa, Unidentified
AQSVPWGISRVQAPAAHRRRLWGRGVKVAVLDTGISTHPDLNIRGGASFVPGEPSTQDGNGHGTHVAGTIAALDNSIGVLGVAPSAELYAVKVLGASGAGSVSSIAQGLEWAGANGMHVANLSLGSPSPSATLEQAVNSATSRGVLVVAASGNSGAGSISYPARYANAMAVGATDQDNNRASFSQYGAGLDLVAPGVNVQSTYPQSAYFSLNGTSMATPHVAGAAALVKQKNPSWSNVQIRNRLKNTATSLGSTNLYGSGLVNAEAATR

SEQ ID NO: 63496 - protein, 269 aa, Unidentified
AQSVPWGISRVQAPAAHNRGLAGSGVKVAVLDTGISTHPDLNIRGGASFVPGEPSTQDGNGHGTHVAGTIAALNNSIGVLGVAPSAELYAVKVLGASGGGAISSVAQGLEWAGNNGMHVANLSLGSESPSATLEQAVNSATSRGVLVVAASGNSGADSISYPARYANAMAVGATDQNNNRADFSQYGAGLDIVAPGVNVQSTYPGSTYASLNGTSMATPHVAGAAVLVKQKYPSWSNVRIRDHLKNTATSLGSTNLYGSGLVNAFAATR

SEQ ID NO: 63497 - protein, 269 aa, Unidentified
AQTIPWGISRVQAPAAHNRGLTGSGVKVAVLDTGISTHEDLNIRGGASFVPGEPSTQDGNGHGTHVAGTIAALDNSIGVLGVAPSAELYAVKVLGADGEGAISSIAQGLEWAGNNGMHVANLSLGSPSPSATLEQAVNSATSRGVLVVAASGNSGASSIGYPARYANAMAVGATDQNNNRASFSRYGAGLDIVAPGVNIQSTYPGSTYASLNGTSMATPHVAGAAALVKQKNPSWSNVQIRNHLKNTATSLGDTNLYGSGLVNAEAATR

SEQ ID NO: 63498 - protein, 269 aa, Unidentified
AQSVPWGISRVQAPAAHNRGLAGSGVKVAVLDTGISTHPDLNIRGGASFVPGEPSTQDGNGHGTHVAGTIAALDNNIGVLGVAPSAELYAVKVLGASGQGAISSIAQGLEWAGNNGMHVANLSLGAPSPSATLEQAVNSATSRGVLVVAASGNSGADSISYPARYANAMAVGATDQNNNRADFSQYGAGLDIVAPGVNVQSTYPGSTYASLNGTSMATPHVAGAAVLVKQKNPSWSNVRIRDHLKNTATSLGSTNLYGSGLVNAFAATR

SEQ ID NO: 63499 - protein, 269 aa, Unidentified
AQSVPWGISRVQAPAAHNRGLAGGGVKVAVLDTGISTHPDLNIRGGASFVPGEPSTQDGNGHGTHVAGTIAALNNSIGVLGVAPSAELYAVKVLSASGQGAISSIANGLEWAGNNGMHVANLSLGSPSPSATLEQAVNSATSRGVLVVAASGNSGADSISYPARYANAMAVGATDQNNNRADFSQYGAGLDIVAPGVNVQSTYPGSTYASLNGTSMATPHVAGAAVLVKQKNPSWSNVRIRDHLKNTATSLGSTNLYGSGLVNAFAATR

SEQ ID NO: 63500 - protein, 269 aa, Unidentified
AQSVPWGISRVQAPAAHSRGLAGGGVKVAVLDTGISTHPDLNIRGGASFVPGEPSTQDGNGHGTHVAGTIAALNNSIGVLGVAPSAELYAVKVLGASGNGAISSIAQGLEWAGNNGMHVANLSLGSPSPSATLEQAVNSATSRGVLVVAASGNSGADSISYPARYANAMAVGATDQNNNRADFSQYGAGLDIVAPGVNVQSTYPGSTYASQNGTSMATPHVAGAAVLVKQKNPSWSNVRIRDHLKNTATSLGSTNLYGSGLVNAFAATR

SEQ ID NO: 63501 - protein, 269 aa, Unidentified
AQSVPWGISRVQAPAAHNRGLAGSGVKVAVLDTGISTHPDLNIRGGASFVPGEPSTQDGNGHGTHVAGTIAALNNNIGVLGVAPSAELYAVKVLGASGGGAISSIANGLEWAGNNGMHVANLSLGSPSPSATLEQAVNSATSRGVLVVAASGNSGADSISYPARYANAMAVGATDQNNNRADFSQYGAGLDIVAPGVNVQSTYPGSTYASQNGTSMATPHVAGAAVLVKQKNPSWSNVRIRDHLKNTATSLGSTNLYGSGLVNAFAATR

SEQ ID NO: 63502 - protein, 269 aa, Unidentified
AQSVPWGISRVQAPAAHNRGLAGSGVKVAVLDTGISTHPDLNIRGGASFVPGEPSTQDGNGHGTHVAGTIAALNNSIGVLGVAPSAELYAVKVLGASGNGAISSIAGGLEWAGNNGMHVANLSLGAPSPSATLEQAVNSATSRGVLVVAASGNSGADSISYPARYANAMAVGATDQNNNRADFSQYGAGLDIVAPGVNVQSTYPGSTYASQNGTSMATPHVAGAAVLVKQKNPSWSNVRIRDHLKNTATSLGSTNLYGSGLVNAFAATR

SEQ ID NO: 63503 - protein, 269 aa, Unidentified
AQSVPWGISRVQAPAAHNRGLAGGGVKVAVLDTGISTHPDLNIRGGASFVPGEPSTQDGNGHGTHVAGTIAALNNSIGVLGVAPSAELYAVKVLAASGNGAISSIAQGLEWAGNNGMHVANLSLGSPSPSATLEQAVNSATSRGVLVVAASGNSGADSISYPARYANAMAVGATDQNNNRADFSQYGAGLDIVAPGVNVQSTYPGSTYASQNGTSMATPHVAGAAVLVKQKNPSWSNVRIRDHLKNTATSLGSTNLYGSGLVNAFAATR

SEQ ID NO: 63504 - protein, 269 aa, Unidentified
AQSVPWGISRVQAPAAHNRGLAGSGVKVAVLDTGISTHPDLNIRGGASFVPGEPSTQDGNGHGTHVAGTIAALDNNIGVLGVAPSAELYAVKVLAASGQGAISSIAQGLEWAGNNGMHVANLSLGSPSPSATLEQAVNSATSRGVLVVAASGNSGADSISYPARYANAMAVGATDQNNNRADFSQYGAGLDIVAPGVNVQSTYPGSTYASLNGTSMATPHVAGAAVLVKQKNPSWSNVRIRDHLKNTATSLGSTNLYGSGLVNAFAATR

SEQ ID NO: 63505 - protein, 269 aa, Unidentified
AQSVPWGISRVQAPAAHNRGLAGSGVKVAVLDTGISTHPDLNIRGGASFVPGEPSTQDGNGHGTHVAGTIAALNNNIGVLGVAPSAELYAVKVLSASGQGAISSIAQGLEWAGNNGMHVANLSLGAPSPSATLEQAVNSATSRGVLVVAASGNSGADSISYPARYANAMAVGATDQNNNRADFSQYGAGLDIVAPGVNVQSTYPGSTYASLNGTSMATPHVAGAAVLVKQKNPSWSNVRIRDHLKNTATSLGSTNLYGSGLVNAFAATR

SEQ ID NO: 63506 - protein, 269 aa, Unidentified
AQSVPWGISRVQAPAAHNRGLAGSGVKVAVLDTGISTHPDLNIRGGASFVPGEPSTQDGNGHGTHVAGTIAALNNSIGVLGVAPSAELYAVKVLAASGQGAISSIAQGLEWAGNNGMHVANVSLGAPSPSATLEQAVNSATSRGVLVVAASGNSGADSISYPARYANAMAVGATDQNNNRADFSQYGAGLDIVAPGVNVQSTYPGSTYASLNGTSMATPHVAGAAVLVKQKNPSWSNVRIRDHLKNTATSLGSTNLYGSGLVNAFAATR

SEQ ID NO: 63507 - protein, 269 aa, Unidentified
AQSVPWGISRVQAPAAHNRGLAGRGVKVAVLDTGISTHPDLNIRGGASFVPGEPSTQDGNGHGTHVAGTIAALNNSIGVLGVAPSAELYAVKVLGASGGGAISSVAQGLEWAGNNGMHVANLSLGSPSPSATLEQAVNSATSRGVLVVAASGNSGADSISYPARYANAMAVGATDQNNNRADFSQYGAGLDIVAPGVNVQSTYPGSTYASLNGTSMATPHVAGAAVLVKQKYPSWSNVRIRDHLKNTATSLGSTNLYGSGLVNAFAATR

SEQ ID NO: 63508 - protein, 269 aa, Unidentified
AQSVPWGISRVQAPAAHNRGLAGSGVKVAVLDTGISTHPDLNIRGGASFVPGEPSTQDGNGHGTHVAGTIAALDNSIGVLGVAPSAELYAVKVLGASGGGAISSIAQGLEWAGNNGMHVANLSLGSPSPSATLEQAVNSATSRGVLVVAASGNSGADSISYPARYANAMAVGATDQNNNRADFSQYGAGLDIVAPGVNVQSTYPGSTYASLNGTSMATPHVAGAAVLVKQKYPSWSNVRIRDHLKNTATSLGSTNLYGSGLVNAFVATR

SEQ ID NO: 63509 - protein, 269 aa, Unidentified
AQSVPWGISRVQAPAAHNRGLAGSGVKVAVLDTGISTHPDLNIRGGASFVPGEPSTQDGNGHGTHVAGTIAALDNNIGVLGVAPSAELYAVKVLGASGGGAISSIAQGLEWAGNNGMHVANLSLGSPSPSATLEQAVNSATSRGVLVVAASGNSGADSISYPARYANAMAVGATDQNNNRADFSQYGAGLDIVAPGVNVQSTYPGSTYASQNGTSMATPHVAGAAVLVKQKNPSWSNVRIRDHLKNTATSLGSTNLYGSGLVNAFAATR

SEQ ID NO: 63510 - protein, 269 aa, Unidentified
AQSVPWGISRVQAPAAHNRGLAGGGVKVAVLDTGISTHPDLNIRGGASFVPGEPSTQDGNGHGTHVAGTIAALNNSIGVLGVAPSAELYAVKVLAASGGGAISSIAQGLEWAGNNGMHVANLSLGAPSPSATLEQAVNSATSRGVLVVAASGNSGADSISYPARYANAMAVGATDQNNNRADFSQYGAGLDIVAPGVNVQSTYPGSTYASLNGTSMATPHVAGAAVLVKQKNPSWSNVRIRDHLKNTATSLGSTNLYGSGLVNAFAATR

SEQ ID NO: 63511 - protein, 269 aa, Unidentified
AQSVPWGISRVQAPAAHNRGLAGRGVKVAVLDTGISTHPDLNIRGGASFVPGEPSTQDWNGHGTHVAGTIAALDNSIGVLGVAPSAELYAVKVLGASGGGAISSIAQGLEWAGNNGMHVANLSLGSESPSATLEQAVNSATSRGVLVVAASGNSGAGSISYPARYANAMAVGATDQNNNRADFSQYGAGLDIVAPGVNVQSTYPGSTYASLNGTSMATPHVAGAAVLVKQKNPSWSNVRIRDHLKNTATSLGSTNLYGSGLVNAFAATR

SEQ ID NO: 63512 - protein, 269 aa, Unidentified
AQSVPWGISRVQAPAAHNRGLAGSGVKVAVLDTGISTHPDLRIRGGASFVPGEPSTQDGNGHGTHVAGTIAALDNSIGVLGVAPSAELYAVKVLGASGGGAISSIAQGLEWAGNNGMHVANLSLGSPSPSATLEQAVNSATSRGVLVVAASGNSGEGSISYPARYANAMAVGATDQNNNRADFSQYGAGLDIVAPGVNVQSTYPGSTYASLNGTSMATPHVAGAAVLVKQKNPSWSNVRIRDHLKNTATSLGSTNLYGSGLVNAFVATR

SEQ ID NO: 63513 - protein, 269 aa, Unidentified
AQSVPWGISRVQAPAAHNRGLTGRGVKTAVLDTGISTHPDLNIRGGASFVPGEPSTQDGNGHGTHVAGTIAALDNNIGVLGVAPDAELYAVKVLGASGVGSVSSIAQGLEWAGMNRMHVANLSLGLQAPSATLEQAVNSATSRGVLVVAASGNSGEGSISYPARYANAMAVGATDQNNNRASFSQYGAGLDIVAPGVNVLSTYPGSTYASLNGTSMATPHVAGAAALVKQKNPSWSNVQIRNHLKNTATSLGSTNLYGSGLVNAEAATR

SEQ ID NO: 63514 - protein, 269 aa, Unidentified
AQSVPWGISRVQAPAAHNRGLAGSGVKVAVLDTGISTHPDLNIRGGASFVPGEPSTQDGNGHGTHVAGTIAALDNSIGVLGVAPSAELYAVKVLGASGGGAISSIAQGLEWAGNNGMHVANLSLGSESPSATLEQAVNSATSRGVLVVAASGNSGADSISYPARYANAMAVGATDQNNNRADFSQYGAGLDIVAPGVNVQSTYPGSTYASLNGTSMATPHVAGAAVLVKQKNPSWSNVRIRDHLKNTATSLGSTNLYGSGLVNVFAATR

SEQ ID NO: 63515 - protein, 269 aa, Unidentified
AQSVPWGISRVQAPAAHNRGLAGGGVKVAVLDTGISTHPDLNIRGGASFVPGEPSTQDGNGHGTHVAGTIAALDNSIGVLGVAPSAELYAVKVLSASGQGAISSIAQGLEWAGNNGMHVANLSLGSPSPSATLEQAVNSATSRGVLVVAASGNSGADSISYPARYANAMAVGATDQNNNRADFSQYGAGLDIVAPGVNVQSTYPGSTYASLNGTSMATPHVAGAAVLVKQKNPSWSNVRIRDHLKNTATSLGSTNLYGSGLVNAFAATR

SEQ ID NO: 63516 - protein, 269 aa, Unidentified
AQSVPWGISRVQAPAAHNRGLAGSGVKVAVLDTGISTHPDLNIRGGASFVPGEPSTQDGNGHGTHVAGTIAALNNSIGVLGVAPSAELYAVKVLAASGNGAISSIAGGLEWAGNNGMHVANLSLGSPSPSATLEQAVNSATSRGVLVVAASGNSGADSISYPARYANAMAVGATDQNNNRADFSQYGAGLDIVAPGVNVQSTYPGSTYASQNGTSMATPHVAGAAVLVKQKNPSWSNVRIRDHLKNTATSLGSTNLYGSGLVNAFAATR

SEQ ID NO: 63517 - protein, 269 aa, Unidentified
AQSVPWGISRVQAPAAHNRGLAGSGVKVAVLDTGISTHPDLNIRGGASFVPGEPSTQDGQGHGTHVAGTIAALNNSIGVLGVAPSAELYAVKVLGASGQGAISSIAQGLEWAGNNGMHVANVSLGSSSPSATLEQAVNSATSRGVLVVAASGNSGADSISYPARYANAMAVGATDQNNNRADFSQYGAGLDIVAPGVNVQSTYPGSTYASLNGTSMATPHVAGAAVLVKQKNPSWSNVRIRDHLKNTATSLGSTNLYGSGLVNAFAATR

SEQ ID NO: 63518 - protein, 269 aa, Unidentified
AQSVPWGISRVQAPAAHNRGLAGRGVKVAVLDTGISTHPDLNIRGGASFVPGEPSTQDGNGHGTHVAGTIAALDNSIGVLGVAPSAELYAVKVLGASGGGAISSIAQGLEWAGNNGMHVANLSLGSESPSATLEQAVNSATSRGVLVVAASGNSGAGSISYPARYANAMAVGATDQNNNRADFSQYGAGLDIVAPGVNVQSTYPGSTYASLNGTSMATPHVAGAAVLVKQKNPSWSNVRIRDHLKNTATSLGSTNLYGSGLVNAFVATR

SEQ ID NO: 63519 - protein, 269 aa, Synthetic construct
AQSVPWGISRVQAPAAHNRGLTGSGVRVAVLDTGISTHPDLNIRGGASFVPGDPSTQDGNGHGTHVAGTIAALNNSIGVLGVAPSAELFAVRVLGASGSGSVSSIAQGLEWAGNNGMHVANLSLGSPSPSATLEQAVNSATSRGVLVVAASGNSGAGSISFPARVANAMAVGATDQNNNRASFSQFGAGLDIVAPGVNVQSTFPGSTTASLNGTSMATPHVAGAAALVLQRNPSWSNVQIRNHLENTATSLGSTNLFGSGLVNAEAATR

SEQ ID NO: 63520 - protein, 269 aa, Unidentified
AQSVPWGISRVQAPAAHNRGLAGSGVKVAVLDTGISTHPDLNIRGGASFVPGEPSTQDGNGHGTHVAGTIAALNNNIGVLGVAPSAELYAVKVLSASGGGAISSIAQGLEWAGNNGMHVANLSLGSPSPSATLEQAVNSATSRGVLVVAASGNSGADSISYPARYANAMAVGATDQNNNRADFSQYGAGLDIVAPGVNVQSTYPGSTYASQNGTSMATPHVAGAAVLVKQKNPSWSNVRIRDHLKNTATSLGSTNLYGSGLVNAFAATR

SEQ ID NO: 63521 - protein, 269 aa, Unidentified
AQSVPWGISRVQAPAAHNRGLAGSGVKVAVLDTGISTHPDLNIRGGASFVPGEPSTQDGNGHGTHVAGTIAALNNSIGVLGVAPSAELYAVKVLSASGQGAISSIAQGLEWAGNNGMHVANLSLGAPSPSATLEQAVNSATSRGVLVVAASGNSGADSISYPARYANAMAVGATDQNNNRADFSQYGAGLDIVAPGVNVQSTYPGSTYASQNGTSMATPHVAGAAVLVKQKNPSWSNVRIRDHLKNTATSLGSTNLYGSGLVNAFAATR

SEQ ID NO: 63522 - protein, 269 aa, Unidentified
AQSVPWGISRVQAPAAHNRGLAGSGVKVAVLDTGISTHPDLNIRGGASFVPGEPSTQDGNGHGTHVAGTIAALNNNIGVLGVAPSAELYAVKVLAASGQGAISSIAQGLEWAGNNGMHVANLSLGSPSPSATLEQAVNSATSRGVLVVAASGNSGADSISYPARYANAMAVGATDQNNNRADFSQYGAGLDIVAPGVNVQSTYPGSTYASQNGTSMATPHVAGAAVLVKQKNPSWSNVRIRDHLKNTATSLGSTNLYGSGLVNAFAATR

SEQ ID NO: 63523 - protein, 269 aa, Unidentified
AQSVPWGISRVQAPAAHNRGLAGGGVKVAVLDTGISTHPDLNIRGGASFVPGEPSTQDGNGHGTHVAGTIAALNNSIGVLGVAPSAELYAVKVLAASGNGAISSIAQGLEWAGNNGMHVANLSLGAPSPSATLEQAVNSATSRGVLVVAASGNSGADSISYPARYANAMAVGATDQNNNRADFSQYGAGLDIVAPGVNVQSTYPGSTYASLNGTSMATPHVAGAAVLVKQKNPSWSNVRIRDHLKNTATSLGSTNLYGSGLVNAFAATR

SEQ ID NO: 63524 - protein, 269 aa, Unidentified
AQSVPWGISRVQAPAAHNRGLAGSGVKVAVLDTGISTHPDLNIRGGASFVPGEPSTQDGNGHGTHVAGTIAALNNSIGVLGVAPSAELYAVKVLGASGQGAISSIAQGLEWAGNNGMHVANLSLGAESPSATLEQAVNSATSRGVLVVAASGNSGADSISYPARYANAMAVGATDQNNNRADFSQYGAGLDIVAPGVNVQSTYPGSTYASQNGTSMATPHVAGAAVLVKQKNPSWSNVRIRDHLKNTATSLGSTNLYGSGLVNAFAATR

SEQ ID NO: 63525 - protein, 269 aa, Unidentified
AQTIPWGISRVQAPAAHNRGLTGSGVKVAVLDTGISTHPDLNIRGGASFVPGEPSTQDGNGHGTHVAGTIAALDNSIGVLGVAPSAELYAVKVLGADGEGAISSIAQGLEWAGNNGMHVANLSLGSPSPSATLEQAVNSATSRGVLVVAASGNDGASSISYPARYANAMAVGATDQNNNRASFSQYGAGLDIVAPGVNILSTWPGSTYASLNGTSMATPHVAGAAALVKQKNPSWSNVQIRNHLKNTATSLGSTNEYGSGLVNAEAATR

SEQ ID NO: 63526 - protein, 269 aa, Unidentified
AQSVPWGISRVQAPAAHNRGLAGRGVKVAVLDTGISTHPDLNIRGGASFVPGEPSTQDGNGHGTHVAGTIAALDNSIGVLGVAPSAELYAVKVLGASGGGAISSVAQGLEWAGNNGMHVANLSLGSESPSATLEQAVNSATSRGVLVVAASGNSGAGSISYPARYANAMAVGATDQNNNRASFSQYGAGLDIVAPGVNVQSTYPGSTYASLNGTSMATPHVAGAAVLVKQKYPSWSNVRIRNHLKNTATSLGSTNLYGSGLVNVEVATR

SEQ ID NO: 63527 - protein, 269 aa, Unidentified
AQSVPWGISRVQAPAAHNRGLAGRGVKVAVLDTGISTHPDLNIRGGASFVPGEPSTQDGNGHGTHVAGTIAALSNSIGVLGVAPSAELYAVKVLGASGGGAISSIAQGLEWAGNNGMHVANLSLGSPSPSATLEQAVNSATSRGVLVVAASGNSGADSISYPARYANAMAVGATDQNNNRADFSQYGAGLDIVAPGVNVQSTYPGSTYASLNGTSMATPHVAGAAVLVKQKNPSWSNVRIRDHLKNTATSLGSTNLYGSGLVNAFVATR

SEQ ID NO: 63528 - protein, 269 aa, Unidentified
AQSVPWGISRVQAPAAHNRGLAGSGVKVAVLDSGISTHPDLNIRGGASFVPGEPSTQDGNGHGTHVAGTIAALNNSIGVLGVAPSAELYAVKVLGASGGGAISSIAQGLEWAGNNGMHVANLSLGLPSPSATLEQAVNSATSRGVLVVAASGNSGADSISYPARYANAMAVGATDQNNNRADFSQYGAGLDIVAPGVNVQSTYPGSAYASLNGTSMATPHVAGAAVLVKQKNPSWSNVRIRDHLKNTATSLGSTNLYGSGLVNAFAATR

SEQ ID NO: 63529 - protein, 269 aa, Unidentified
AQSVPWGISRVQAPAAHNRGLAGRGVKVAVLDTGISTHPDLNIRGGASFVPGEPSTQDGNGHGTHVAGTIAALDNSIGVLGVAPSAELYAVKVLGASGGGAISSIAQGLEWAGNNGMHVANLSLGSPSPSATLEQAVNSATSRGVLVVAASGNSGADSISYPARYANAMAVGATDQNNNRADFSQYGAGLDIVAPGVNVQSTYPGSTYASLNGTSMATPHVAGAAVLVKQKNPSWSNVRIRDHLKNTATSLGSTNLYGSGLVNVFAATR

SEQ ID NO: 63530 - protein, 269 aa, Unidentified
AQSVPWGISRVQAPAAHNRGLAGSGVKVAVLDTGISTHPDLNIRGGASFVPGEPSTQDGNGHGTHVAGTIAALNNSIGVLGVAPSAELYAVKVLGASGGGAISSIAQGLEWAGNNGMHVANLSLGSPSPSATLEQAVNSATSRGVLVVAASGNSGADSISYPARYANAMAVGATDQNNNRADFSQYGAGLDIVAPGVNVQSTYPGSTYASLNGTSMATPHVAGAAVLVKQKYPSWSNVRIRDHLKNTATSLGSTNLYGSGLVNVFVATR

SEQ ID NO: 63531 - protein, 269 aa, Unidentified
AQSVPWGISRVQAPAAHNRGLAGSGVKVAVLDTGISTHPDLNIRGGASFVPGEPSTQDGNGHGTHVAGTIAALNNSIGVLGVAPSAELYAVKVLAASGNGAISSIAQGLEWAGNNGMHVANVSLGSSSPSATLEQAVNSATSRGVLVVAASGNSGADSISYPARYANAMAVGATDQNNNRADFSQYGAGLDIVAPGVNVQSTYPGSTYASLNGTSMATPHVAGAAVLVKQKNPSWSNVRIRDHLKNTATSLGSTNLYGSGLVNAFAATR

SEQ ID NO: 63532 - protein, 269 aa, Unidentified
AQSVPWGISRVQAPAAHNRGLAGSGVKVAVLDTGISTHPDLNIRGGASFVPGEPSTQDGNGHGTHVAGTIAALNNSIGVLGVAPSAELYAVKVLGASGQGAISSIAQGLEWAGNNGMHVANVSLGAPSPSATLEQAVNSATSRGVLVVAASGNSGADSISYPARYANAMAVGATDQNNNRADFSQYGAGLDIVAPGVNVQSTYPGSTYASQNGTSMATPHVAGAAVLVKQKNPSWSNVRIRDHLKNTATSLGSTNLYGSGLVNAFAATR

SEQ ID NO: 63533 - protein, 269 aa, Bacillus clausii
AQSVPWGIERVQAPAAHNRGLTGSGVKVAVLDTGISTHPDLRIRGGASFVPGEPSTQDGNGHGTHVAGTIAALDNSIGVLGVAPSAELYAVKVLGAFGLGTISSIAQGLEWAGNNGMHVANLSLGSPSPSATLEQAVNSATSRGVLVVAASGNSGAGSISYPARYANAMAVGATDQNNNRASFSQYGAGLDIVAPGVNILSTWPGSTYASLNGTSMATPHVAGAAALVKQKNPSWSNVQIRNHLKNTATSLGDTWEYGSGLVNAEAATR

SEQ ID NO: 63534 - protein, 269 aa, Unidentified
AQSVPWGIERVQAPAAHNRGLTGSGVKVAVLDTGISTHPDLRIRGGASFVPGEPSTQDGNGHGTHVAGTIAALDNSIGVLGVAPSAELYAVKVLGASGSGSVSSIAQGLEWAGNNGMHVANLSLGSPSPSATLEQAVNSATSRGVLVVAASGNSGADEISYPARYANAMAVGATDQNNNRASFSQYGPGLDIVAPGVDILSTWPGGTYAVLNGTSMATPHVAGAAALVKQKNPSWSNVQIRNHLKNTATSLGSTNEYGSGLVNAEAATR

SEQ ID NO: 63535 - protein, 269 aa, Unidentified
AQSVPWGISRVQAPAAHNRGLAGSGVKVAVLDTGISTHPDLNIRGGASFVPGEPSTQDGNGHGTHVAGTIAALDNNIGVLGVAPSAELYAVKVLAASGGGAISSIAQGLEWAGNNGMHVANLSLGSPSPSATLEQAVNSATSRGVLVVAASGNSGADSISYPARYANAMAVGATDQNNNRADFSQYGAGLDIVAPGVNVQSTYPGSTYASLNGTSMATPHVAGAAVLVKQKNPSWSNVRIRDHLKNTATSLGSTNLYGSGLVNAFAATR

SEQ ID NO: 63536 - protein, 269 aa, Unidentified
AQSVPWGISRVQAPAAHNRGLAGSGVKVAVLDTGISTHPDLNIRGGASFVPGEPSTQDGNGHGTHVAGTIAALNNSIGVLGVAPSAELYAVKVLGASGNGAISSIAQGLEWAGNNGMHVANVSLGSESPSATLEQAVNSATSRGVLVVAASGNSGADSISYPARYANAMAVGATDQNNNRADFSQYGAGLDIVAPGVNVQSTYPGSTYASQNGTSMATPHVAGAAVLVKQKNPSWSNVRIRDHLKNTATSLGSTNLYGSGLVNAFAATR

SEQ ID NO: 63537 - protein, 269 aa, Unidentified
AQSVPWGISRVQAPAAHNRGLAGSGVKVAVLDTGISTHPDLNIRGGASFVPGEPSTQDGNGHGTHVAGTIAALNNSIGVLGVAPSAELYAVKVLGASGQGAISSIANGLEWAGNNGMHVANLSLGAPSPSATLEQAVNSATSRGVLVVAASGNSGADSISYPARYANAMAVGATDQNNNRADFSQYGAGLDIVAPGVNVQSTYPGSTYASQNGTSMATPHVAGAAVLVKQKNPSWSNVRIRDHLKNTATSLGSTNLYGSGLVNAFAATR

SEQ ID NO: 63538 - protein, 269 aa, Unidentified
AQSVPWGISRVQAPAAHNRGLAGSGVKVAVLDTGISTHPDLNIRGGASFVPGEPSTQDGNGHGTHVAGTIAALNNSIGVLGVAPSAELYAVKVLAASGQGAISSIAQGLEWAGNNGMHVANLSIGSSSPSATLEQAVNSATSRGVLVVAASGNSGADSISYPARYANAMAVGATDQNNNRADFSQYGAGLDIVAPGVNVQSTYPGSTYASLNGTSMATPHVAGAAVLVKQKNPSWSNVRIRDHLKNTATSLGSTNLYGSGLVNAFAATR

SEQ ID NO: 63539 - protein, 269 aa, Unidentified
AQSVPWGISRVQAPAAHNRGLAGSGVKVAVLDTGISTHPDLNIRGGASFVPGEPSTQDGNGHGTHVAGTIAALNNNIGVLGVAPSAELYAVKVLSASGNGAISSIAQGLEWAGNNGMHVANLSLGAPSPSATLEQAVNSATSRGVLVVAASGNSGADSISYPARYANAMAVGATDQNNNRADFSQYGAGLDIVAPGVNVQSTYPGSTYASLNGTSMATPHVAGAAVLVKQKNPSWSNVRIRDHLKNTATSLGSTNLYGSGLVNAFAATR

SEQ ID NO: 63540 - protein, 269 aa, Unidentified
AQSVPWGISRVQAPAAHNRGLAGSGVKVAVLDTGISTHPDLRIRGGASFVPGEPSTQDGNGHGTHVAGTIAALDNSIGVLGVAPSAELYAVKVLGASGGGAISSIAQGLEWAGNNGMHVANLSLGSESPSATLEQAVNSATSRGVLVVAASGNSGAESISYPARYANAMAVGATDQNNNRADFSQYGAGLDIVAPGVNVQSTYPGSTYASLNGTSMATPHVAGAAVLVKQKNPSWSNVRIRDHLKNTATSLGSTNLYGSGLVNAFAATR

SEQ ID NO: 63541 - protein, 269 aa, Unidentified
AQSVPWGISRVQAPAAHNRGLAGSGVKVAVLDTGISTHPDLNIRGGASFVPGEPSTQDGNGHGTHVAGTIAALNNSIGVLGVAPSAELYAVKVLGASGQGAISSIAQGLEWAGNNGMHVANLSIGSSSPSATLEQAVNSATSRGVLVVAASGNSGADSISYPARYANAMAVGATDQNNNRADFSQYGAGLDIVAPGVNVQSTYPGSTYASQNGTSMATPHVAGAAVLVKQKNPSWSNVRIRDHLKNTATSLGSTNLYGSGLVNAFAATR

SEQ ID NO: 63542 - protein, 269 aa, Unidentified
AQSVPWGISRVQAPAAHNRGLAGSGVKVAVLDTGISTHPDLNIRGGASFVPGEPSTQDGNGHGTHVAGTIAALDNSIGVLGVAPSAELYAVKVLSASGNGAISSIAQGLEWAGNNGMHVANLSLGAPSPSATLEQAVNSATSRGVLVVAASGNSGADSISYPARYANAMAVGATDQNNNRADFSQYGAGLDIVAPGVNVQSTYPGSTYASLNGTSMATPHVAGAAVLVKQKNPSWSNVRIRDHLKNTATSLGSTNLYGSGLVNAFAATR

SEQ ID NO: 63543 - protein, 269 aa, Unidentified
AQSVPWGISRVQAPAAHNRGLAGSGVKVAVLDTGISTHPDLNIRGGASFVPGEPSTQDGNGHGTHVAGTIAALNNSIGVLGVAPSAELYAVKVLSASGQGAISSIAGGLEWAGNNGMHVANLSLGAPSPSATLEQAVNSATSRGVLVVAASGNSGADSISYPARYANAMAVGATDQNNNRADFSQYGAGLDIVAPGVNVQSTYPGSTYASLNGTSMATPHVAGAAVLVKQKNPSWSNVRIRDHLKNTATSLGSTNLYGSGLVNAFAATR

SEQ ID NO: 63544 - protein, 269 aa, Unidentified
AQSVPWGISRVQAPAAHNRGLAGGGVKVAVLDTGISTHPDLNIRGGASFVPGEPSTQDGNGHGTHVAGTIAALNNSIGVLGVAPSAELYAVKVLGASGQGAISSIAQGLEWAGNNGMHVANLSLGAPSPSATLEQAVNSATSRGVLVVAASGNSGADSISYPARYANAMAVGATDQNNNRADFSQYGAGLDIVAPGVNVQSTYPGSTYASQNGTSMATPHVAGAAVLVKQKNPSWSNVRIRDHLKNTATSLGSTNLYGSGLVNAFAATR

SEQ ID NO: 63545 - protein, 269 aa, Unidentified
AQSVPWGISRVQAPAAHNRGLTGRGVKVAVLDTGISTHPDLNIRGGASFVPGEPSTQDGNGHGTHVAGTIAALNNSIGVLGVAPSAELYAVKVLGASGGGAISSIAQGLEWAGNNGMHVANLSLGSQAPSATLEQAVNSATSRGVLVVAASGNSGEGSISYPARYANAMAVGATDQDNNRASFSQDGAGLDIVAPGVNVQSTYPGSTYASLNGTSMATPHVAGAAVLVKQKNPSWSNVRIRDRLKNTATSLGSTNLYGSGLVNAEAATR

SEQ ID NO: 63546 - protein, 269 aa, Bacillus lentus
AQSVPWGISRVQAPAAHNRGLTGSGVKVAVLDTGISTHEDLNVRGGVSFVPGETSYQDGNGHGTHVAGTIAALNNSIGVVGVAPSADLYAVKVLGASGRGSVSSIAQGLEWAGQNGMHVANLSLGGEDPSATLEQAVNSATSRGVLVVAASGNSGAGSISYPARYANAMAVGATDQNNNRASFSQYGAGLDIVAPGVNVQSTYPGSTYASLNGTSMATPHVAGAAALVKQKNPSWSNVQIRDHLKNTATSLGSTNLYGSGLVNAEAATR

SEQ ID NO: 63547 - protein, 269 aa, Unidentified
AQSVPWGIERVQAPAAHNRGLTGSGVKVAVLDTGISTHPDLRIRGGHSFVPGEPSTQDGNGHGTHVAGTIAALDNSIGVLGVAPSAELYAVKVLGASGSGSVSSIAQGLEWAGNHGMHVANLSLGSPSPSATLEQAVNSATSRGVLVVAASGNSGADEISYPARYANAMAVGATDQNNNRASFSQYGPGLDIVAPGVNVLSTWPGSTYASLNGTSMATPHVAGAAALVKQKHPSWSNVQIRNHLKNTATSLGDTNEYGSGLVNAEAATR

SEQ ID NO: 63548 - protein, 269 aa, Unidentified
AQSVPWGISRVQAPAAHNRGLAGGGVKVAVLDTGISTHPDLNIRGGASFVPGEPSTQDGNGHGTHVAGTIAALNNSIGVLGVAPSAELYAVKVLAASGGGAISSIAQGLEWAGNNGMHVANLSLGSESPSATLEQAVNSATSRGVLVVAASGNSGADSISYPARYANAMAVGATDQNNNRADFSQYGAGLDIVAPGVNVQSTYPGSTYASLNGTSMATPHVAGAAVLVKQKNPSWSNVRIRDHLKNTATSLGSTNLYGSGLVNAFAATR

SEQ ID NO: 63549 - protein, 269 aa, Unidentified
AQSVPWGISRVQAPAAHNRGLAGGGVKVAVLDTGISTHPDLNIRGGASFVPGEPSTQDGNGHGTHVAGTIAALNNSIGVLGVAPSAELYAVKVLSASGQGAISSIAGGLEWAGNNGMHVANLSLGSPSPSATLEQAVNSATSRGVLVVAASGNSGADSISYPARYANAMAVGATDQNNNRADFSQYGAGLDIVAPGVNVQSTYPGSTYASLNGTSMATPHVAGAAVLVKQKNPSWSNVRIRDHLKNTATSLGSTNLYGSGLVNAFAATR

SEQ ID NO: 63550 - protein, 269 aa, Unidentified
AQSVPWGISRVQAPAAHNRGLAGRGVKVAVLDTGISTHPDLRIRGGASFVPGEPSTQDGNGHGTHVAGTIAALDNSIGVLGVAPSAELYAVKVLGASGGGAISSIAQGLEWAGNNGMHVANLSLGSESPSATLEQAVNSATSRGVLVVAASGNSGAGSISYPARYANAMAVGATDQNNNRADFSQYGAGLDIVAPGVNVQSTYPGSTYASLNGTSMATPHVAGAAVLVKQKNPSWSNVRIRDHLKNTATSLGSTNLYGSGLVNAFAATR

SEQ ID NO: 63551 - protein, 269 aa, Unidentified
AQSVPWGISRVQAPAAHNRGLAGSGVKVAVLDTGISTHPDLNIRGGASFVPGEPSTQDGNGHGTHVAGTIAALNNSIGVLGVAPSAELYAVKVLGASGQGAISSIAQGLEWAGNNGMHVANLSIGAESPSATLEQAVNSATSRGVLVVAASGNSGADSISYPARYANAMAVGATDQNNNRADFSQYGAGLDIVAPGVNVQSTYPGSTYASLNGTSMATPHVAGAAVLVKQKNPSWSNVRIRDHLKNTATSLGSTNLYGSGLVNAFAATR

SEQ ID NO: 63552 - protein, 269 aa, Unidentified
AQSVPWGISRVQAPAAHNRGLAGGGVKVAVLDTGISTHPDLNIRGGASFVPGEPSTQDGNGHGTHVAGTIAALDNSIGVLGVAPSAELYAVKVLSASGNGAISSIAQGLEWAGNNGMHVANLSLGSPSPSATLEQAVNSATSRGVLVVAASGNSGADSISYPARYANAMAVGATDQNNNRADFSQYGAGLDIVAPGVNVQSTYPGSTYASLNGTSMATPHVAGAAVLVKQKNPSWSNVRIRDHLKNTATSLGSTNLYGSGLVNAFAATR

SEQ ID NO: 63553 - protein, 269 aa, Unidentified
AQSVPWGISRVQAPAAHNRGLTGSGVKVAVLDTGISTHPDLNIRGGASFVPGEPSTQDGNGHGTHVAGTIAALDNSIGVLGVAPSAELYAVKVLGASGSGAISSIAQGLEWAGNNGMHVANLSLGSPSPSATLEQAVNSATSRGVLVVAASGNSGADSISYPARYANAMAVGATDQNNNRASFSQYGADLDIVAPGVNVESTYPGSRYASLNGTSMATPHVAGAAVLVKHKNPSWSNVRIRDHLKKTATSLGSTNLYGSGLVNAQAATR

SEQ ID NO: 63554 - protein, 269 aa, Unidentified
AQSVPWGISRVQAPAAHNRGLAGSGVKVAVLDTGISTHPDLNIRGGASFVPGEPSTQDGNGHGTHVAGTIAALDNSIGVLGVAPSAELYAVKVLGASGGGAISSIAQGLEWAGNNGMHVANLSLGSESPSATLEQAVNSATSRGVLVVAASGNSGADSISYPARYANAMAVGATDQNNNRADFSQYGAGLDIVAPGVNVQSTYPGSTYASLNGTSMATPHVAGAAVLVKQKYPSWSNVRIRDHLKNTATSLGSTNLYGSGLVNAFAATR

SEQ ID NO: 63555 - protein, 269 aa, Unidentified
AQSVPWGISRVQAPAAHNRGLAGSGVKVAVLDTGISTHPDLNIRGGASFVPGEPSTQDGNGHGTHVAGTIAALNNSIGVLGVAPSAELYAVKVLAASGNGAISSIAQGLEWAGNNGMHVANVSLGSESPSATLEQAVNSATSRGVLVVAASGNSGADSISYPARYANAMAVGATDQNNNRADFSQYGAGLDIVAPGVNVQSTYPGSTYASLNGTSMATPHVAGAAVLVKQKNPSWSNVRIRDHLKNTATSLGSTNLYGSGLVNAFAATR

SEQ ID NO: 63556 - protein, 269 aa, Unidentified
AQSVPWGISRVQAPAAHNRGLAGSGVKVAVLDTGISTHPDLNIRGGASFVPGEPSTQDGNGHGTHVAGTIAALNNSIGVLGVAPSAELYAVKVLSASGGGAISSIAQGLEWAGNNGMHVANLSLGAPSPSATLEQAVNSATSRGVLVVAASGNSGADSISYPARYANAMAVGATDQNNNRADFSQYGAGLDIVAPGVNVQSTYPGSTYASQNGTSMATPHVAGAAVLVKQKNPSWSNVRIRDHLKNTATSLGSTNLYGSGLVNAFAATR

SEQ ID NO: 63557 - protein, 269 aa, Unidentified
AQSVPWGISRVQAPAAHNRGLAGRGVKVAVLDTGISTHPDLNIRGGASFVPGEPSTQDGNGHGTHVAGTIAALNNSIGVLGVAPSAELYAVKVLGASGGGAISSIAQGLEWAGNNGMHVANLSLGSESPSATLEQAVNSATSRGVLVVAASGNSGEESISYPARYANAMAVGATDQNNNRADFSQYGAGLDIVAPGVNVQSTYPGSTYASLNGTSMATPHVAGAAVLVKQKNPSWSNVRIRDHLKNTATSLGSTNLYGSGLVNAFAATR

SEQ ID NO: 63558 - protein, 269 aa, Unidentified
AQSVPWGISRVQAPAAHNRGLAGSGVKVAVLDTGISTHPDLNIRGGASFVPGEPSTQDGNGHGTHVAGTIAALNNNIGVLGVAPSAELYAVKVLAASGNGAISSIAQGLEWAGNNGMHVANLSLGSPSPSATLEQAVNSATSRGVLVVAASGNSGADSISYPARYANAMAVGATDQNNNRADFSQYGAGLDIVAPGVNVQSTYPGSTYASQNGTSMATPHVAGAAVLVKQKNPSWSNVRIRDHLKNTATSLGSTNLYGSGLVNAFAATR

SEQ ID NO: 63559 - protein, 269 aa, Unidentified
AQSVPWGISRVQAPAAHNRGLAGGGVKVAVLDTGISTHPDLNIRGGASFVPGEPSTQDGNGHGTHVAGTIAALNNNIGVLGVAPSAELYAVKVLAASGNGAISSIAQGLEWAGNNGMHVANLSLGSPSPSATLEQAVNSATSRGVLVVAASGNSGADSISYPARYANAMAVGATDQNNNRADFSQYGAGLDIVAPGVNVQSTYPGSTYASLNGTSMATPHVAGAAVLVKQKNPSWSNVRIRDHLKNTATSLGSTNLYGSGLVNAFAATR

SEQ ID NO: 63560 - protein, 269 aa, Unidentified
AQSVPWGISRVQAPAAHNRGLAGRGVKVAVLDTGISTHPDLNIRGGASFVPGEPSTQDGEGHGTHVAGTIAALDNSIGVLGVAPSAELYAVKVLGASGGGAISSIAQGLEWAGNNGMHVANLSLGSESPSATLEQAVNSATSRGVLVVAASGNSGAGSISYPARYANAMAVGATDQNNNRADFSQYGAGLDIVAPGVNVQSTYPGSTYASLNGTSMATPHVAGAAVLVKQKNPSWSNVRIRDHLKNTATSLGSTNLYGSGLVNAFAATR

SEQ ID NO: 63561 - protein, 269 aa, Unidentified
AQSVPWGISRVQAPAAHNRGLTGSGVKVAVLDTGISTHPDLRIRGGASFVPGEPSTQDGNGHGTHVAGTIAALDNSIGVLGVAPSAELYAVKVLGASGAGAISSIAQGLEWAGNNGMHVANLSLGSPSPSATLEQAVNSATSRGVLVVAASGNSGEGSIDYPARYANAMAVGATDQNNNRADFSQYGAGLDIVAPGVNVQSTYPGSTYASLNGTSMATPHVAGAAVLVKQKNPSWSNVRIRDRLKNTATSLGSTNLYGSGLVNAFAATR

SEQ ID NO: 63562 - protein, 269 aa, Unidentified
AQSVPWGISRVQAPAAHNRGLAGGGVKVAVLDTGISTHPDLNIRGGASFVPGEPSTQDGNGHGTHVAGTIAALNNSIGVLGVAPSAELYAVKVLSASGNGAISSIAQGLEWAGNNGMHVANLSLGSPSPSATLEQAVNSATSRGVLVVAASGNSGADSISYPARYANAMAVGATDQNNNRADFSQYGAGLDIVAPGVNVQSTYPGSTYASQNGTSMATPHVAGAAVLVKQKNPSWSNVRIRDHLKNTATSLGSTNLYGSGLVNAFAATR

SEQ ID NO: 63563 - protein, 269 aa, Unidentified
AQSVPWGISRVQAPAAHNRGLAGSGVKVAVLDTGISTHPDLNIRGGASFVPGEPSTQDGNGHGTHVAGTIAALNNSIGVLGVAPSAELYAVKVLGASGQGAISSIAQGLEWAGNNGMHVANVSLGAESPSATLEQAVNSATSRGVLVVAASGNSGADSISYPARYANAMAVGATDQNNNRADFSQYGAGLDIVAPGVNVQSTYPGSTYASLNGTSMATPHVAGAAVLVKQKNPSWSNVRIRDHLKNTATSLGSTNLYGSGLVNAFAATR

SEQ ID NO: 63564 - protein, 269 aa, Unidentified
AQSVPWGISRVQAPAAHNRRLWGSGVKVAVLDTGISTHPDLNIRGGASFVPGEPSTQDGNGHGTHVAGTIAALNNSIGVLGVAPSAELYAVKVLGASGAGAISSIAQGLEWAGANGMHVANLSLGSPSPSATLEQAVNSATSRGVLVVAASGNSGAGSISYPARYANAMAVGATDQDNNRASFSQYGAGLDLVAPGVNVQSTYPQSAYFSLNGTSMATPHVAGAAVLVKQKNPSWSNVRIRNHLKNTATSLGSTNLYGSGLVNAEAATR

SEQ ID NO: 63565 - protein, 269 aa, Unidentified
AQSVPWGISRVQAPAAHNRGLTGRGVKVAVLDTGISTHPDLNIRGGASFVPGEPSTQDGNGHGTHVAGTIAALNNSIGVLGVAPSAELYAVKVLGASGGGAISSIAQGLEWAGNNGMHVANLSLGLQSPSATLEQAVNSATSRGVLVVAASGNSGEGSISYPARYANAMAVGATDQNNNRADFSQYGAGLDIVAPGVNVQSTYPGSTYASLNGTSMATPHVAGAAVLVKQKNPSWSNVRIRDRLKNTATSLGSTNLYGSGLVNAGAATR

SEQ ID NO: 63566 - protein, 269 aa, Unidentified
AQSVPWGISRVQAPAAHNRGLAGSGVKVAVLDTGISTHPDLNIRGGASFVPGEPSTQDGNGHGTHVAGTIAALDNSIGVLGVAPSAELYAVKVLGASGGGAISSIAGGLEWAGNNGMHVANLSLGSPSPSATLEQAVNSATSRGVLVVAASGNSGADSISYPARYANAMAVGATDQNNNRADFSQYGAGLDIVAPGVNVQSTYPGSTYASQNGTSMATPHVAGAAVLVKQKNPSWSNVRIRDHLKNTATSLGSTNLYGSGLVNAFAATR

SEQ ID NO: 63567 - protein, 269 aa, Unidentified
AQSVPWGISRVQAPAAHNRGLAGSGVKVAVLDTGISTHPDLNIRGGASFVPGEPSTQDGNGHGTHVAGTIAALDNSIGVLGVAPSAELYAVKVLGASGGGAISSIAQGLEWAGNNGMHVANLSLGSPSPSATLEQAVNSATSRGVLVVAASGNSGEESISYPARYANAMAVGATDQNNNRADFSQYGAGLDIVAPGVNVQSTYPGSTYASLNGTSMATPHVAGAAVLVKQKNPSWSNVRIRDHLKNTATSLGSTNLYGSGLVNAFVATR

SEQ ID NO: 63568 - protein, 269 aa, Unidentified
AQSVPWGISRVQAPAAHNRGLAGSGVKVAVLDTGISTHPDLNIRGGASFVPGEPSTQDGNGHGTHVAGTIAALNNNIGVLGVAPSAELYAVKVLGASGNGAISSIAQGLEWAGNNGMHVANLSLGSESPSATLEQAVNSATSRGVLVVAASGNSGADSISYPARYANAMAVGATDQNNNRADFSQYGAGLDIVAPGVNVQSTYPGSTYASQNGTSMATPHVAGAAVLVKQKNPSWSNVRIRDHLKNTATSLGSTNLYGSGLVNAFAATR

SEQ ID NO: 63569 - protein, 269 aa, Unidentified
AQSVPWGISRVQAPAAHNRGLAGSGVKVAVLDTGISTHPDLNIRGGASFVPGEPSTQDGEGHGTHVAGTIAALNNSIGVLGVAPSAELYAVKVLGASGQGAISSIAQGLEWAGNNGMHVANLSLGSESPSATLEQAVNSATSRGVLVVAASGNSGADSISYPARYANAMAVGATDQNNNRADFSQYGAGLDIVAPGVNVQSTYPGSTYASQNGTSMATPHVAGAAVLVKQKNPSWSNVRIRDHLKNTATSLGSTNLYGSGLVNAFAATR

SEQ ID NO: 63570 - protein, 269 aa, Unidentified
AQSVPWGISRVQAPAAHNRGLAGSGVKVAVLDTGISTHPDLNIRGGASFVPGEPSTQDGNGHGTHVAGTIAALNNSIGVLGVAPSAELYAVKVLGASGNGAISSIAQGLEWAGNNGMHVANVSLGAPSPSATLEQAVNSATSRGVLVVAASGNSGADSISYPARYANAMAVGATDQNNNRADFSQYGAGLDIVAPGVNVQSTYPGSTYASQNGTSMATPHVAGAAVLVKQKNPSWSNVRIRDHLKNTATSLGSTNLYGSGLVNAFAATR

SEQ ID NO: 63571 - protein, 269 aa, Unidentified
AQSVPWGISRVQAPAAHNRGLAGGGVKVAVLDTGISTHPDLNIRGGASFVPGEPSTQDGNGHGTHVAGTIAALDNNIGVLGVAPSAELYAVKVLGASGNGAISSIAQGLEWAGNNGMHVANLSLGSPSPSATLEQAVNSATSRGVLVVAASGNSGADSISYPARYANAMAVGATDQNNNRADFSQYGAGLDIVAPGVNVQSTYPGSTYASLNGTSMATPHVAGAAVLVKQKNPSWSNVRIRDHLKNTATSLGSTNLYGSGLVNAFAATR

SEQ ID NO: 63572 - protein, 269 aa, Unidentified
AQSVPWGISRVQAPAAHNRGLAGRGVKVAVLDTGISTHPDLNIRGGASFVPGEPSTQDGNGHGTHVAGTIAALNNSIGVLGVAPSAELYAVKVLGASGGGAISSIAQGLEWAGNNGMHVANLSLGSPSPSATLEQAVNSATSRGVLVVAASGNSGADSISYPARYANAMAVGATDQNNNRADFSQYGAGLDIVAPGVNVQSTYPGSTYASLNGTSMATPHVAGAAVLVKQKNPSWSNVRIRDHLKNTATSLGSTNLYGSGLVNVFVATR

SEQ ID NO: 63573 - protein, 269 aa, Unidentified
AQSVPWGISRVQAPAAHNRGLAGGGVKVAVLDTGISTHPDLNIRGGASFVPGEPSTQDGNGHGTHVAGTIAALNNSIGVLGVAPSAELYAVKVLGASGQGAISSIANGLEWAGNNGMHVANLSLGSPSPSATLEQAVNSATSRGVLVVAASGNSGADSISYPARYANAMAVGATDQNNNRADFSQYGAGLDIVAPGVNVQSTYPGSTYASQNGTSMATPHVAGAAVLVKQKNPSWSNVRIRDHLKNTATSLGSTNLYGSGLVNAFAATR

SEQ ID NO: 63574 - protein, 269 aa, Unidentified
AQSVPWGISRVQAPAAHNRGLAGSGVKVAVLDTGISTHPDLNIRGGASFVPGEPSTQDGNGHGTHVAGTIAALNNNVGVLGVAPSAELYAVKVLGASGNGAISSIAQGLEWAGNNGMHVANLSLGSPSPSATLEQAVNSATSRGVLVVAASGNSGADSISYPARYANAMAVGATDQNNNRADFSQYGAGLDIVAPGVNVQSTYPGSTYASQNGTSMATPHVAGAAVLVKQKNPSWSNVRIRDHLKNTATSLGSTNLYGSGLVNAFAATR

SEQ ID NO: 63575 - protein, 269 aa, Unidentified
AQSVPWGISRVQAPAAHNRGLAGSGVKVAVLDTGISTHPDLNIRGGASFVPGEPSTQDGNGHGTHVAGTIAALNNNIGVLGVAPSAELYAVKVLGASGQGAISSIANGLEWAGNNGMHVANLSLGSPSPSATLEQAVNSATSRGVLVVAASGNSGADSISYPARYANAMAVGATDQNNNRADFSQYGAGLDIVAPGVNVQSTYPGSTYASQNGTSMATPHVAGAAVLVKQKNPSWSNVRIRDHLKNTATSLGSTNLYGSGLVNAFAATR

SEQ ID NO: 63576 - protein, 269 aa, Unidentified
AQSVPWGISRVQAPAAHNRGLAGSGVKVAVLDTGISTHPDLNIRGGASFVPGEPSTQDGNGHGTHVAGTIAALDNSIGVLGVAPSAELYAVKVLAASGQGAISSIAQGLEWAGNNGMHVANLSLGSPSPSATLEQAVNSATSRGVLVVAASGNSGADSISYPARYANAMAVGATDQNNNRADFSQYGAGLDIVAPGVNVQSTYPGSTYASQNGTSMATPHVAGAAVLVKQKNPSWSNVRIRDHLKNTATSLGSTNLYGSGLVNAFAATR

SEQ ID NO: 63577 - protein, 269 aa, Unidentified
AQSVPWGISRVQAPAAHNRGLAGSGVKVAVLDTGISTHPDLNIRGGASFVPGEPSTQDGNGHGTHVAGTIAALNNSIGVLGVAPSAELYAVKVLAASGQGAISSIAQGLEWAGNNGMHVANLSIGSESPSATLEQAVNSATSRGVLVVAASGNSGADSISYPARYANAMAVGATDQNNNRADFSQYGAGLDIVAPGVNVQSTYPGSTYASLNGTSMATPHVAGAAVLVKQKNPSWSNVRIRDHLKNTATSLGSTNLYGSGLVNAFAATR

SEQ ID NO: 63578 - protein, 269 aa, Unidentified
AQSVPWGISRVQAPAAHNRGLAGSGVKVAVLDTGISTHPDLRIRGGASFVPGEPSTQDGNGHGTHVAGTIAALDNSIGVLGVAPSAELYAVKVLGASGGGAISSIAQGLEWAGNNGMHVANLSLGSESPSATLEQAVNSATSRGVLVVAASGNSGAGSISYPARYANAMAVGATDQNNNRADFSQYGAGLDIVAPGVNVQSTYPGSTYASLNGTSMATPHVAGAAVLVKQKNPSWSNVRIRDHLKNTATSLGSTNLYGSGLVNAFVATR

SEQ ID NO: 63579 - protein, 269 aa, Unidentified
AQSVPWGISRVQAPAAHNRGLAGSGVKVAVLDTGISTHPDLNIRGGASFVPGEPSTQDGNGHGTHVAGTIAALNNSIGVLGVAPSAELYAVKVLAASGNGAISSIANGLEWAGNNGMHVANLSLGAPSPSATLEQAVNSATSRGVLVVAASGNSGADSISYPARYANAMAVGATDQNNNRADFSQYGAGLDIVAPGVNVQSTYPGSTYASLNGTSMATPHVAGAAVLVKQKNPSWSNVRIRDHLKNTATSLGSTNLYGSGLVNAFAATR

SEQ ID NO: 63580 - protein, 269 aa, Unidentified
AQSVPWGISRVQAPAAHNRGLAGSGVKVAVLDTGISTHPDLNIRGGASFVPGEPSTQDGEGHGTHVAGTIAALNNSIGVLGVAPSAELYAVKVLAASGNGAISSIAQGLEWAGNNGMHVANLSLGSSSPSATLEQAVNSATSRGVLVVAASGNSGADSISYPARYANAMAVGATDQNNNRADFSQYGAGLDIVAPGVNVQSTYPGSTYASLNGTSMATPHVAGAAVLVKQKNPSWSNVRIRDHLKNTATSLGSTNLYGSGLVNAFAATR

SEQ ID NO: 63581 - protein, 269 aa, Unidentified
AQSVPWGISRVQAPAAHNRGLAGSGVKVAVLDTGISTHPDLNIRGGASFVPGEPSTQDGNGHGTHVAGTIAALNNSIGVLGVAPSAELYAVKVLSASGNGAISSIAQGLEWAGNNGMHVANLSLGAPSPSATLEQAVNSATSRGVLVVAASGNSGADSISYPARYANAMAVGATDQNNNHADFSQYGAGLDIVAPGVNVQSTYPGSTYASLNGTSMATPHVAGAAVLVKQKNPSWSNVRIRDHLKNTATSLGSTNLYGSGLVNAFAATR

SEQ ID NO: 63582 - protein, 269 aa, Unidentified
AQSVPWGISRVQAPAAHNRGLAGGGVKVAVLDTGISTHPDLNIRGGASFVPGEPSTQDGNGHGTHVAGTIAALNNSIGVLGVAPSAELYAVKVLAASGQGAISSIAQGLEWAGNNGMHVANLSLGSPSPSATLEQAVNSATSRGVLVVAASGNSGADSISYPARYANAMAVGATDQNNNRADFSQYGAGLDIVAPGVNVQSTYPGSTYASQNGTSMATPHVAGAAVLVKQKNPSWSNVRIRDHLKNTATSLGSTNLYGSGLVNAFAATR

SEQ ID NO: 63583 - protein, 269 aa, Unidentified
AQSVPWGISRVQAPAAHNRGLAGRGVKVAVLDTGISTHPDLNIRGGASFVPGEPSTQDGNGHGTHVAGTIAALNNSIGVLGVAPSAELYAVKVLGASGGGAISSIAQGLEWAGNNGMHVANLSLGSPSPSATLEQAVNSATSRGVLVVAASGNSGADSISYPARYANAMAVGATDQNNNRADFSQYGAGLDIVAPGVNVQSTYPGSTYASLNGTSMATPHVAGAAVLVKQKYPSWSNVRIRDHLKNTATSLGSTNLYGSGLVNVFAATR

SEQ ID NO: 63584 - protein, 269 aa, Unidentified
AQSVPWGISRVQAPAAHNRGLAGSGVKVAVLDTGISTHPDLNIRGGASFVPGEPSTQDGNGHGTHVAGTIAALDNSIGVLGVAPSAELYAVKVLGASGGGAISSIAQGLEWAGNNGMHVANLSLGAPSPSATLEQAVNSATSRGVLVVAASGNSGADSISYPARYANAMAVGATDQNNNRADFSQYGAGLDIVAPGVNVQSTYPGSTYASQNGTSMATPHVAGAAVLVKQKNPSWSNVRIRDHLKNTATSLGSTNLYGSGLVNAFAATR

SEQ ID NO: 63585 - protein, 269 aa, Unidentified
AQSVPWGISRVQAPAAHNRGLAGSGVKVAVLDTGISTHPDLNIRGGASFVPGEPSTQDGNGHGTHVAGTIAALNNSIGVLGVAPSAELYAVKVLAASGNGAISSIAQGLEWAGNNGMHVANLSIGAPSPSATLEQAVNSATSRGVLVVAASGNSGADSISYPARYANAMAVGATDQNNNRADFSQYGAGLDIVAPGVNVQSTYPGSTYASLNGTSMATPHVAGAAVLVKQKNPSWSNVRIRDHLKNTATSLGSTNLYGSGLVNAFAATR

SEQ ID NO: 63586 - protein, 275 aa, Unidentified
AQTIPWGISRVQAPAAHNRGLTGSGVKVAVLDTGIXSTHPDLNIRGGASFVPGEPXSTQDGNGHGTHVAGTIAALNNSIGVLGVAPSAELYAVKVLGADGEGAISSIAQGLEWAGNNGMHVANLSLGSPSPSATLEQAVNSATSRGVLVVAASGNSGAXSSISXXXYPARYANAMAVGATDQNNNRASFSQYGPGLDIVAPGVNILSTWPGGTYASLNGTSMATPHVAGAAALVKQKNPSWSNVQIRNHLKNTATSLGSTWLYGSGLVNAEAATR

SEQ ID NO: 63587 - protein, 269 aa, Unidentified
AQSVPWGISRVQAPAAHNRGLAGSGVKVAVLDTGISTHPDLNIRGGASFVPGEPSTQDGNGHGTHVAGTIAALNNSIGVLGVAPSAELYAVKVLAASGNGAISSIAQGLEWAGNNGMHVANLSLGSESPSATLEQAVNSATSRGVLVVAASGNSGADSISYPARYANAMAVGATDQNNNRADFSQYGAGLDIVAPGVNVQSTYPGSTYASQNGTSMATPHVAGAAVLVKQKNPSWSNVRIRDHLKNTATSLGSTNLYGSGLVNAFAATR

SEQ ID NO: 63588 - protein, 269 aa, Unidentified
AQSVPWGISRVQAPAAHNRGLAGSGVKVAVLDTGISTHPDLNIRGGASFVPGEPSTQDGNGHGTHVAGTIAALNNSIGVLGVAPSAELYAVKVLGASGGGAISSIAQGLEWAGNNGMHVANLSLGSPSPSATLEQAVNSATSRGVLVVAASGNSGADSISYPARYANAMAVGATDQNNNRADFSQYGAGLDIVAPGVNVQSTYPGSTYASLNGTSMATPHVAGAAVLVKQKNPSWSNVRIRDHLKNTATSLGSTNLYGSGLVNVFVAAR

SEQ ID NO: 63589 - protein, 269 aa, Unidentified
AQSVPWGISRVQAPAAHNRGLAGSGVKVAVLDTGISTHPDLNIRGGASFVPGEPSTQDGNGHGTHVAGTIAALNNNIGVLGVAPSAELYAVKVLGASGGGAISSIAGGLEWAGNNGMHVANLSLGAPSPSATLEQAVNSATSRGVLVVAASGNSGADSISYPARYANAMAVGATDQNNNRADFSQYGAGLDIVAPGVNVQSTYPGSTYASLNGTSMATPHVAGAAVLVKQKNPSWSNVRIRDHLKNTATSLGSTNLYGSGLVNAFAATR

SEQ ID NO: 63590 - protein, 269 aa, Unidentified
AQSVPWGISRVQAPAAHNRGLAGSGVKVAVLDTGISTHPDLNIRGGASFVPGEPSTQDGNGHGTHVAGTIAALNNNIGVLGVAPSAELYAVKVLGASGNGAISSIAQGLEWAGNNGMHVANLSLGAPSPSATLEQAVNSATSRGVLVVAASGNSGADSISYPARYANAMAVGATDQNNNRADFSQYGAGLDIVAPGVNVQSTYPGSTYASQNGTSMATPHVAGAAVLVKQKNPSWSNVRIRDHLKNTATSLGSTNLYGSGLVNAFAATR

SEQ ID NO: 63591 - protein, 269 aa, Unidentified
AQTIPWGISRVQAPAAHNRGLTGSGVKVAVLDTGISTHPDLNIRGGASFVPGEPSTQDGNGHGTHVAGTIAALDNSIGVLGVAPSAELYAVKVLGADGEGAISSIAQGLEWAGNNGMHVANLSLGSPSPSATLEQAVNSATSYGVLVVAASGNSGASSISYPARYANAMAVGATDQNNNRASFSQYGAGLDIVAPGVNIQSTYPGSTYWSLSGTSMATPHVAGAAALVKQKNPSWSNVQIRNHLKNTATSLGSTNEYGSGLVNAEAATR

SEQ ID NO: 63592 - protein, 269 aa, Unidentified
AQSVPWGISRVQAPAAHNRGLAGGGVKVAVLDTGISTHPDLNIRGGASFVPGEPSTQDGNGHGTHVAGTIAALNNSIGVLGVAPSAELYAVKVLSASGNGAISSIAQGLEWAGNNGMHVANLSLGAPSPSATLEQAVNSATSRGVLVVAASGNSGADSISYPARYANAMAVGATDQNNNRADFSQYGAGLDIVAPGVNVQSTYPGSTYASLNGTSMATPHVAGAAVLVKQKNPSWSNVRIRDHLKNTATSLGSTNLYGSGLVNAFAATR

SEQ ID NO: 63593 - protein, 269 aa, Unidentified
AQSVPWGISRVQAPAAHNRGLAGGGVKVAVLDTGISTHPDLNIRGGASFVPGEPSTQDGNGHGTHVAGTIAALNNSIGVLGVAPSAELYAVKVLAASGQGAISSIAQGLEWAGNNGMHVANLSLGAPSPSATLEQAVNSATSRGVLVVAASGNSGADSISYPARYANAMAVGATDQNNNRADFSQYGAGLDIVAPGVNVQSTYPGSTYASLNGTSMATPHVAGAAVLVKQKNPSWSNVRIRDHLKNTATSLGSTNLYGSGLVNAFAATR

SEQ ID NO: 63594 - protein, 269 aa, Unidentified
AQSVPWGISRVQAPAAHNRGLAGRGVKVAVLDTGISTHPDLNIRGGASFVPGEPSTQDGNGHGTHVAGTIAALNNSIGVLGVAPSAELYAVKVLGASGGGAISSIAQGLEWAGNNGMHVANLSLGSESPSATLEQAVNSATSRGVLVVAASGNSGADSISYPARYANAMAVGATDQNNNRADFSQYGAGLDIVAPGVNVQSTYPGSTYASLNGTSMATPHVAGAAVLVKQKYPSWSNVRIRDHLKNTATSLGSTNLYGSGLVNAFAATR

SEQ ID NO: 63595 - protein, 269 aa, Unidentified
AQSVPWGISRVQAPAAHNRGLAGSGVKVAVLDTGISTHPDLNIRGGASFVPGEPSTQDGNGHGTHVAGTIAALDNNIGVLGVAPSAELYAVKVLSASGQGAISSIAQGLEWAGNNGMHVANLSLGSPSPSATLEQAVNSATSRGVLVVAASGNSGADSISYPARYANAMAVGATDQNNNRADFSQYGAGLDIVAPGVNVQSTYPGSTYASLNGTSMATPHVAGAAVLVKQKNPSWSNVRIRDHLKNTATSLGSTNLYGSGLVNAFAATR

SEQ ID NO: 63596 - protein, 269 aa, Unidentified
AQSVPWGISRVQAPAAHNRGLAGRGVKVAVLDTGISTHPDLNIRGGASFVPGEPSTQDGNGHGTHVAGTIAALNNSIGVLGVAPSAELYAVKVLGASGGGAISSIAQGLEWAGNNGMHVANLSLGNESPSATLEQAVNSATSRGVLVVAASGNSGEGSISYPARYANAMAVGATDQNNNRADFSQYGAGLDIVAPGVNVQSTYPGSTYASLNGTSMATPHVAGAAVLVKQKNPSWSNVRIRDRLKNTATSLGSTNLYGSGLVNAEAATR

SEQ ID NO: 63597 - protein, 269 aa, Unidentified
AQSVPWGISRVQAPAAHNRGLAGSGVKVAVLDTGISTHPDLNIRGGASFVPGEPSTQDGNGHGTHVAGTIAALNNNIGVLGVAPSAELYAVKVLSASGGGAISSIAQGLEWAGNNGMHVANLSLGAPSPSATLEQAVNSATSRGVLVVAASGNSGADSISYPARYANAMAVGATDQNNNRADFSQYGAGLDIVAPGVNVQSTYPGSTYASLNGTSMATPHVAGAAVLVKQKNPSWSNVRIRDHLKNTATSLGSTNLYGSGLVNAFAATR

SEQ ID NO: 63598 - protein, 269 aa, Unidentified
AQSVPWGISRVQAPAAHNRGLAGSGVKVAVLDTGISTHPDLRIRGGASFVPGEPSTQDGNGHGTHVAGTIAALDNSIGVLGVAPSAELYAVKVLGASGGGAISSIAQGLEWAGNNGMHVANLSLGSPSPSATLEQAVNSATSRGVLVVAASGNSGEESISYPARYANAMAVGATDQNNNRADFSQYGAGLDIVAPGVNVQSTYPGSTYASLNGTSMATPHVAGAAVLVKQKNPSWSNVRIRDHLKNTATSLGSTNLYGSGLVNAFAATR

SEQ ID NO: 63599 - protein, 269 aa, Unidentified
AQSVPWGISRVQAPAAHNRGLAGSGVKVAVLDSGISTHPDLNIRGGASFVPGEPSTQDGNGHGTHVAGTIAALNNSIGVLGVAPSAELYAVKVLGASGGGAISSIAQGLEWAGLNGMHVANLSLGLPSPSATLEQAVNSATSRGVLVVAASGNSGADSISYPARYANAMAVGATDQNNNRADFSQYGAGLDIVAPGVNVQSTYPGSTYASLNGTSMATPHVAGAAVLVKQKNPSWSNVRIRDHLKNTATSLGSTNLYGSGLVNAFAATR

SEQ ID NO: 63600 - protein, 269 aa, Unidentified
AQSVPWGISRVQAPAAHNRGLAGSGVKVAVLDTGISTHPDLNIRGGASFVPGEPSTQDGNGHGTHVAGTIAALNNSIGVLGVAPSAELYAVKVLGASGGGAISSVAQGLEWAGNNGMHVANLSLGSPSPSATLEQAVNSATSRGVLVVAAAGNSGADSISYPARYANAMAVGATDQNNNRADFSQYGAGLDIVAPGVNVQSTYPGSTYASLNGTSMATPHVAGAAVLVKQKNPSWSNVRIRDHLKNTATSLGSTNLYGSGLVNVFAATR

SEQ ID NO: 63601 - protein, 269 aa, Unidentified
AQSVPWGISRVQAPAAHNRGLTGSGVKVAVLDTGISTHPDLRIRGGASFVPGEPSTQDGNGHGTHVAGTIAALDNSIGVLGVAPSAELYAVKVLGASGGGAISSIAQGLEWAGNNGMHVANLSLGSPSPSATLEQAVNSATSRGVLVVAASGNSGEGSIDYPARYANAMAVGATDQNNNRADFSQYGAGLDIVAPGVNVQSTYPGSTYASLNGTSMATPHVAGAAVLVKQKNPSWSNVRIRDRLKNTATSLGSTNLYGSGLVNAFAATR

SEQ ID NO: 63602 - protein, 268 aa, Unidentified
AQSVPWGISRVQAPAAHNRGLAGGGVKVAVLDTGISTHPDLNIRGGASFVPGEPSTQDGNGHGTHVAGTIAALDNNIGVLGVAPSAELYAVKVLGASGGAISSIAQGLEWAGNNGMHVANLSLGSPSPSATLEQAVNSATSRGVLVVAASGNSGADSISYPARYANAMAVGATDQNNNRADFSQYGAGLDIVAPGVNVQSTYPGSTYASQNGTSMATPHVAGAAVLVKQKNPSWSNVRIRDHLKNTATSLGSTNLYGSGLVNAFAATR

SEQ ID NO: 63603 - protein, 268 aa, Unidentified
AQSVPWGISRVQAPAAHNRGLAGGVKVAVLDTGISTHPDLNIRGGASFVPGEPSTQDGNGHGTHVAGTIAALNNSIGVLGVAPSAELYAVKVLSASGNGAISSIAQGLEWAGNNGMHVANLSLGAPSPSATLEQAVNSATSRGVLVVAASGNSGADSISYPARYANAMAVGATDQNNNRADFSQYGAGLDIVAPGVNVQSTYPGSTYASQNGTSMATPHVAGAAVLVKQKNPSWSNVRIRDHLKNTATSLGSTNLYGSGLVNAFAATR

SEQ ID NO: 63604 - protein, 268 aa, Unidentified
AQSVPWGISRVQAPAAHNRGLAGGVKVAVLDTGISTHPDLNIRGGASFVPGEPSTQDGNGHGTHVAGTIAALDNSIGVLGVAPSAELYAVKVLGASGGGAISSIAGGLEWAGNNGMHVANLSLGAPSPSATLEQAVNSATSRGVLVVAASGNSGADSISYPARYANAMAVGATDQNNNRADFSQYGAGLDIVAPGVNVQSTYPGSTYASLNGTSMATPHVAGAAVLVKQKNPSWSNVRIRDHLKNTATSLGSTNLYGSGLVNAFAATR

SEQ ID NO: 63605 - protein, 268 aa, Unidentified
AQSVPWGISRVQAPAAHNRGLAGSGVKVAVLDTGISTHPDLNIRGGASFVPGEPSTQDGNGHGTHVAGTIAALNNSIGVLGVAPSAELYAVKVLGASGGGAISSIAQGLEWAGNNGMHVANLSLGSPSPSATLEQAVNSATSRGVLVVAASGNSGADSISYPARYANAMAVGATDQNNNRADFSQYGAGLDIVAPGVNVQSTYPGSTYASLNGTSMATPHVAGAAVLVKQKYPSWSNVRIRDHLKNTATSLGSTNLYGSGLVNVFVAT

SEQ ID NO: 63606 - protein, 155 aa, Unidentified
AQSVPWGISRVQAPAAHNRGLTGSGVKVAVLDTGISTHPDLNIRGGASFVPGEPSTQDGNGHGTHVAGTIAALNNSIGVLGVAPSAELYAVKVLGASGSGSVSSIAQGLEWAGNNGMHVANLSLGSPSPSATLEQAVNSATCFAKGTNVLMADGS

SEQ ID NO: 63607 - protein, 382 aa, Unidentified
VRSKKLWISLLFALTLIFTMAFSNMSAQAAEEAKEKYLIGFNEQEAVSEFVEQVEANDEVAILSEEEEVEIELLHEFETIPVLSVELSPEDVDALELDPAISYIEEDAEVTTMAQSVPWGISRVQAPAAHNRGLTGSGVKVAVLDTGISTHPDLNIRGGASFVPGEPSTQDGNGHGTHVAGTIAALNNSIGVLGVAPNAELYAVKVLGASGMGSVSSIAQGLEWAGNNVMHVANLSLGLQAPSATLEQAVNSATSRGVLVVAASGNSGAGSISYPARYANAMAVGATDQNNNRASFSQYGAGLDIVAPGVNVQSTYPGSTYASLNGTSMATPHVAGAAALVKQKNPSWSNVQIRNHLKNTATSLGSTNLYGSGLVNAEAATR

SEQ ID NO: 63608 - protein, 382 aa, Unidentified
VRSKKLWISLLFALTLIFTMAFSNMSAQAAEEAKEKYLIGFNEQEAVSEFVEQVEANDEVAILSEEEEVEIELLHEFETIPVLSVELSPEDVDALELDPAISYIEEDAEVTTMAQSVPWGISRVQAPAAHNRGLTGSGVKVAVLDTGISTHPDLNIRGGASFVPGEPSTQDGNGHGTHVAGTIAALDNSIGVLGVAPRAELYAVKVLGASGSGSVSSIAQGLEWAGNNRMHVANLSLGLQAPSATLEQAVNSATSRGVLVVAASGNSGAGSISYPARYANAMAVGATDQNNNRASFSQYGAGLDIVAPGVNVQSTYPGSTYASLNGTSMATPHVAGAAALVKQKNPSWSNVQIRNHLKNTATSLGSTNLYGSGLVNAEAATR

SEQ ID NO: 63609 - protein, 380 aa, Unidentified
VRSKKLWIVASTALLISVAFSSSIASAAEEAKEKYLIGFNEQEAVSEFVEQVEANDEVAILSEEEEVEIELLHEFETIPVLSVELSPEDVDALELDPAISYIEEDAEVTTMAQSVPWGISRVQAPAAHNRGLTGRGVKVAVLDTGISTHPDLNIRGGASFVPGEPSTQDGNGHGTHVAGTIAALDNSIGVLGVAPSAELYAVKVLGASGGGSVSSIAQGLEWAGNNGMHVANLSLGSPSPSATLEQAVNSATSRGVLVVAASGNSGAGSISYPARYANALAVGATDQNNNRASFSQYGAGLDIVAPGVNVQSTYPGSTYASLNGTSMATPHVAGAAVLVKQKNPSWSNVRIRNHLKNTATSLGSTNLYGSGLVNAEAATR

SEQ ID NO: 63610 - protein, 380 aa, Unidentified
VRSKKLWIVASTALLISVAFSSSIASAAEEAKEKYLIGFNEQEAVSEFVEQVEANDEVAILSEEEEVEIELLHEFETIPVLSVELSPEDVDALELDPAISYIEEDAEVTTMAQSVPWGISRVQAPAAHRRGLTGRGVKVAVLDTGISTHPDLDIRGGASFVPGEPSTQDGNGHGTHVAGTIAALDNSIGVLGVAPSAELYAVKVLGASGSGSVSSIAQGLEWAGNNGMHVANLSLGSPSPSATLEQAVNSATSRGVLVLAASGNSGAGSISYPARYANAMAVGATDQNNNRASFSQYGAGLDIVAPGVNVQSTYPGSTYASLNGTSMATPHVAGAAALVKQKNPSWSNVQIRNRLKNTATSLGSTNLYGSGLVNAEAATR

SEQ ID NO: 63611 - protein, 380 aa, Unidentified
VRSKKLWIVASTALLISVAFSSSIASAAEEAKEKYLIGFNEQEAVSEFVEQVEANDEVAILSEEEEVEIELLHEFETIPVLSVELSPEDVDALELDPAISYIEEDAEVTTMAQSVPWGISRVQAPAAHNRRLTGSGVKVAVLDTGISTHPDLNIRGGASFVPGEPSTQDGNGHGTHVAGTIAALNNSIGVLGVAPSAELYAVKVLGASGGGSVSSIAQGLEWAGNNGMHVANLSLGSPSPSATLEQAVNSATSRGVLVVAASGNSGAGSISYPARYANAMAVGATDQNNNRASFSQYGAGLDLVAPGVNVQSTYPGSTYFSLNGTSMATPHVAGAAVLVKQKNPSWSNVRIRNHLKNTATSLGSTNLYGSGLVNAEAATR

SEQ ID NO: 63612 - protein, 380 aa, Unidentified
VRSKKLWIVASTALLISVAFSSSIASAAEEAKEKYLIGFNEQEAVSEFVEQVEANDEVAILSEEEEVEIELLHEFETIPVLSVELSPEDVDALELDPAISYIEEDAEVTTMAQSVPWGISRVQAPAAHRRRLTGRGVKVAVLDTGISTHPDLRIRGGASFVPGEPSTQDGNGHGTHVAGTIAALDNSIGVLGVAPSAELYAVKVLGASGSGSVSSIAQGLEWAGNNGMHVANLSLGSPSPSATLEQAVNSATSRGVLVVAASGNSGAGSISYPARYANAMAVGATDQNNNRASFSQYGAGLDIVAPGVNVQSTYPGSTYASLNGTSMATPHVAGAAALVKQKNPSWSNVQIRNRLKNTATSLGSTNLYGSGLVNAEAATR

SEQ ID NO: 63613 - protein, 380 aa, Unidentified
VRSKKLWIVASTALLISVAFSSSIASAAEEAKEKYLIGFNEQEAVSEFVEQVEANDEVAILSEEEEVEIELLHEFETIPVLSVELSPEDVDALELDPAISYIEEDAEVTTMAQSVPWGISRVQAPAAHRRRLTGSGVKVAVLDTGISTHPDLDITGGASFVPGEPSTQDGNGHGTHVAGTIAALNNSIGVLGVAPSAELYAVKVLGASGSGSVSSIAQGLEWAGNNGMHVANLSLGSPSPSATLEQAVNSATSRGVLVVAASGNSGAGSISYPARYANAMAVGATDQNNNRASFSQYGAGLDIVAPGVNVQSTYPGSTYASLNGTSMATPHVAGEAALVKQKNPSWRNVQIRNHLKNTATSLGSTNLYGSGLVNAEAATR

SEQ ID NO: 63614 - protein, 380 aa, Unidentified
VRSKKLWIVASTALLISVAFSSSIASAAEEAKEKYLIGFNEQEAVSEFVEQVEANDEVAILSEEEEVEIELLHEFETIPVLSVELSPEDVDALELDPAISYIEEDAEVTTMAQSVPWGISRVQAPAAHRRRLTGRGVKVAVLDTGISTHPDLNIRGGASFVPGEPSTQDGNGHGTHVAGTIAALDNSIGVLGVAPSAELYAVKVLGASGSGSVSSIAQGLEWAGNNGMHVANLSLGSPSPSATLEQAVNSATSRGVLVVAASGNSGAGSISYPARYANAMAVGATDQNNNRASFSQYGAGLDIVAPGVNVQSTYPGSAYASLNGTSMATPHVAGAAALVKQKNPSWSNVQIRNRLKNTATSLGSTNLYGSGLVNAEAATR

SEQ ID NO: 63615 - protein, 380 aa, Unidentified
VRSKKLWIVASTALLISVAFSSSIASAAEEAKEKYLIGFNEQEAVSEFVEQVEANDEVAILSEEEEVEIELLHEFETIPVLSVELSPEDVDALELDPAISYIEEDAEVTTMAQSVPWGISRVQAPAAHRRGLTGRGVKVAVLDTGISTHPDLNIRGGASFVPGEPSTQDGNGHGTHVAGTIAALDNSIGVLGVAPSAELYAVKVLGASGSGSVSSIAQGLEWAGNNGMHVANLSLGSPSPSATLEQAVNSATSRGVLVVAASGNSGAGSISYPARYANAMAVGATDQNNNRASFSQYGAGLDIVAPGVNVQSTYPGSTYASENGTSMATPHVAGAAALVKQKNPSWSNVQIRNRLKNTATSLGSTNLYGSGLVRAEAATR

SEQ ID NO: 63616 - protein, 380 aa, Unidentified
VRSKKLWIVASTALLISVAFSSSIASAAEEAKEKYLIGFNEQEAVSEFVEQVEANDEVAILSEEEEVEIELLHEFETIPVLSVELSPEDVDALELDPAISYIEEDAEVTTMAQSVPWGISRVQAPAAHNRRLTGRGVKVAVLDTGISTHPDLDIRGGASFVPGEPSTQDGNGHGTHVAGTIAALDNSIGVLGVAPSAELYAVKVLGASGSGSVSSIAQGLEWAGNNGMHVANLSLGSPSPSATLEQAVNSATSRGVLVVAASGNSGAGSISYPARYANAMAVGATDQNNNRASFSQYGAGLDIVAPGVNVQSTYPGSTYASLNGTSMATPHVAGAAALVKQKNPSWRNVQIRNRLKNTATSLGSTNLYGSGLVNAEAATR

SEQ ID NO: 63617 - protein, 380 aa, Unidentified
VRSKKLWIVASTALLISVAFSSSIASAAEEAKRKYLIGFNEQEAVSEFVEQVEANDEVAILSEEEEVEIELLHEFETIPVLSVELSPEDVDALELDPAISYIEEDAEVTTMAQSVPWGISRVQAPAAHNRGLTGSGVKVAVLDTGISTHPDLNIRGGASFVPGEPSTQDGNGHGTHVAGTIAALNNSIGVLGVAPNAELYAVKVLGASGSGSVSSIAQGLEWAGNNVMHVANLSLGLQAPSATLEQAVNSATSRGVLVVAASGNSGAGSISYPARYANAMAVGATDQNNNRASFSQYGAGLDIVAPGVNVQSTYPGSTYASLNGTSMATPHVAGAAALVKQKNPSWSNVQIRNHLKNTATSLGSTNLYGSGLVNAEAATR

SEQ ID NO: 63618 - protein, 380 aa, Unidentified
VRSKKLWIVASTALLISVAFSSSIASAAEEAKEKYLIGFNEQEAVSEFVEQVEANDEVAILSEEEEVEIELLHEFETIPVLSVELSPEDVDALELDPAISYIEEDAEVTTMAQSVPWGISRVQAPAAHNRGLLGSGVKVAVLDSGISTHPDLNIRGGASFVPGEPSTQDGNGHGTHVAGTIAALNNSIGVLGVAPSAELYAVKVLGASGSGSLSSIAQGLEWAGLNGMHVANLSLGSPSPSATLEQAVNSATSRGVLVVAASGNSGAGDISYPARYANAMAVGATDQNNNKASFSQYGAGLDIVAPGVNVQSTYPGSTYASLNGTSMATPHVAGAAALVKQKNPSWSNVQIRNHLKNTATSLGSTNLYGSGLVNAEAATR

SEQ ID NO: 63619 - protein, 380 aa, Unidentified
VRSKKLWIVASTALLISVAFSSSIASAAEEAKEKYLIGFNEQEAVSEFVEQVEANDEVAILSEEEEVEIELLHEFETIPVLSVELSPEDVDALELDPAISYIEEDAEVTTMAQSVPWGISRVQAPAAHNRGLTGSGVKVAVLDTGISTHPDLRIRGGASFVPGEPSTQDGNGHGTHVAGTIAALNNSIGVLGVAPSAELYAVKVLGASGGGAISSIAQGLEWAGNNGMHVANLSLGSPSPSATLEQAVNSATSRGVLVVAASGNSGAGSISYPARYANAMAVGATDQNNNRASFSQYGAGLDIVAPGVNVQSTYPGSTYASLNGTSMATPHVAGAAVLVKQKNPSWSNVRIRNHLKNTATSLGSTNLYGSGLVNAEAATR

SEQ ID NO: 63620 - protein, 380 aa, Unidentified
VRSKKLWIVASTALLISVAFSSSIASAAEEAKEKYLIGFNEQEAVSEFVEQVEANDEVAILSEEEEVEIELLHEFETIPVLSVELSPEDVDALELDPAISYIEEDAEVTTMAQSVPWGISRVQAPAAHNRGLRGSGVKVAVLDTGISTHPDLNIRGGASFVPGEPSTQDGNGHGTHVAGTIAALNNSIGVLGVAPSAELYAVKVLGASGGGAISSIAQGLEWAGNNGMHVANLSLGSPSPSATLEQAVNSATSRGVLVVAASGNSGAGSISYPARYANAMAVGATDQNNNRASFSQYGAGLDIVAPGVNVQSTYPGSTYASLNGTSMATPHVAGAAVLVKQKNPSWSNVRIRNHLKNTATSLGSTNLYGSGLVNAEAATR

SEQ ID NO: 63621 - protein, 380 aa, Unidentified
VRSKKLWIVASTALLISVAFSSSIASAAEEAKEKYLIGFNEQEAVSEFVEQVEANDEVAILSEEEEVEIELLHEFETIPVLSVELSPEDVDALELDPAISYIEEDAEVTTMAQSVPWGISRVQAPAAHNRGLTGFGVKVAVLDTGISTHPDLNIRGGASFVPGEPSTQDGNGHGTHVAGTIAALNNSIGVLGVAPSAELYAVKVLGASGDGSVSSIAQGLEWAGNNRMHVANLSLGSPSPSATLEQAVNSATSRGVLVVAASGNSGAGSISYPARYANAMAVGATDQNNNRASFSQYGAGLDIVAPGVNVQSTYPGSTYDSLNGTSMATPHVAGAAALVKQKNPSWSNVQIRNHIKNTATSLGSTNLYGSGLVNAEFATR

SEQ ID NO: 63622 - protein, 380 aa, Unidentified
VRSKKLWIVASTALLISVAFSSSIASAAEEAKEKYLIGFNEQEAVSEFVEQVEANDEVAILSEEEEVEIELLHEFETIPVLSVELSPEDVDALELDPAISYIEEDAEVTTMAQSVPWGISRVQAPAAHRRGLTGRGVKVAVLDTGISTHPDLNIRGGASFVPGEPSTQDGNGHGTHVAGTIAALDNSIGVLGVAPSAELYAVKVLGASGSGSVSSIAQGLEWAGANGMHVANLSLGSPSPSATLEQAVNSATSRGVLVVAASGNSGAGSISYPARYANAMAVGATDQNNNRASFSQYGAGLDLVAPGVNVQSTYPGSTYASLNGTSMATPHVAGAAALVKQKNPSWSNVQIRNRLKNTATSLGSTNLYGSGLVNAEAATR

SEQ ID NO: 63623 - protein, 380 aa, Unidentified
VRSKKLWIVASTALLISVAFSSSIASAAEEAKEKYLIGFNEQEAVSEFVEQVEANDEVAILSEEEEVEIELLHEFETIPVLSVELSPEDVDALELDPAISYIEEDAEVTTMAQSVPWGISRVQAPAAHRRGLTGRGVKVAVLDTGISTHPDLNIRGGASFVPGEPSTQDGNGHGTHVAGTIAALDNRIGVLGVAPSAELYAVKVLGASGSGSVSSIAQGLEWAGNNGMHVANLSLGSPSPSATLEQAVNSATSRGVLVLAASGNSGAGSISYPARYANAMAVGATDQNNNRASFSQYGAGLDIVAPGVNVQSTYPGSTYASLNGTSMATPHVAGAAALVKQKNPSWSNVQIRNRLKNTATSLGSTNLYGSGLVNAEAATR

SEQ ID NO: 63624 - protein, 380 aa, Unidentified
VRSKKLWIVASTALLISVAFSSSIASAAEEAKEKYLIGFNEQEAVSEFVEQVXANDEVAILSEEEEVEIELLHEFETIPVLSVELSPEDVDALELDPAISYIEEDAEVTTMAQSVPWGISRVQAPAAHNRGLTGSGVKVAVLDTGISTHPDLNIRGGASFVPGEPSTQDGNGHGTHVAGTIAALNNSIGVLGVAPNAELYAVKVLGASGSGSVSSIAQGLEWAGNNVMHVANLSLGLQAPSATLEQAVNSATSRGVLVVAASGNSGAGSISYPARYANAMAVGATDQNNNRASFSQYGAGLDIVAPGVNVQSTYPGSTYASLNGTSMATPHVAGAAALVKQKNPSWSNVQIRNHLKNTATSLGSTNLYGSGLVNAEAATR

SEQ ID NO: 63625 - protein, 380 aa, Unidentified
VRSKKLWIVASTALLISVAFSSSIASAAEEAKEKYLIGFNEQEAVSEFVEQVEANDEVAILSEEEEVEIELLHEFETIPVLSVELSPEDVDALELDPAISYIEEDAEVTTMAQSVPWGISRVQAPAAHRRRLTGSGVKVAVLDTGISTHPDLDITGGASFVPGEPSTQDGNGHGTHVAGTIAALDNSIGVLGVAPSAELYAVKVLGASGSGSVSSIAQGLEWAGNNGMHVANLSLGSPSPSATLEQAVNSATSRGVLVVAASGNSGAGSISYPARYANAMAVGATDQNNNRASFSQYGAGLDIVAPGVNVQSTYPGSTYASLNGTSMATPHVAGAAALVKQKNPSWRNVQIRNHLKNTATSLGSTNLYGSGLVNAEAATR

SEQ ID NO: 63626 - protein, 380 aa, Unidentified
VRSKKLWIVASTALLISVAFSSSIASAAEEAKEKYLIGFNEQEAVSEFVEQVEANDEVAILSEEEEVEIELLHEFETIPVLSVELSPEDVDALELDPAISYIEEDAEVTTMAQSVPWGISRVQAPAAHRRGLTGRGVKVAVLDTGISTHPDLNIRGGASFVPGEPSTQDGNGHGTHVAGTIAALDNSIGVLGVAPSAELYAVKVLGASGSGSVSSIAQGLEWAGNNGMHVANLSLGSPSPSATLEQAVNSATSRGVLVVAASGNSGAGSISYPARYANAMAVGATDQNNNRASFSQYGAGLDIVAPGVNVQSTYPQSTYFSLNGTSMATPHVAGAAALVKQKNPSWSNVQIRNRLKNTATSLGSTNLYGSGLVNAEAATR

SEQ ID NO: 63627 - protein, 380 aa, Unidentified
VRSKKLWIVASTALLISVAFSSSIASAAEEAKEKYLIGFNEQEAVSEFVEQVEANDEVAILSEEEEVEIELLHEFETIPVLSVELSPEDVDALELDPAISYIEEDAEVTTMAQSVPWGISRVQAPAAHRRGLTGRGVKVAVLDTGISTHPDLNIRGGASFVPGEPSTQDGNGHGTHVAGTIAALDNSIGVLGVAPSAELYAVKVLGASGSGSVSSIAQGLEWAGNNGMHVANLSLGSPSPSATLEQAVNSATSRGVLVVAASGNSGAGSISYPARYANAMAVGATDQNNNRASFSQYGAGLDLVAPGVNVQSTYPQSTYASLNGTSMATPHVAGAAALVKQKNPSWSNVQIRNRLKNTATSLGSTNLYGSGLVNAEAATR

SEQ ID NO: 63628 - protein, 380 aa, Unidentified
VRSKKLWIVASTALLISVAFSSSIASAAEEAKEKYLIGFNEQEAVSEFVEQVEANDEVAILSEEEEVEIELLHEFETIPVLSVELSPEDVDALELDPAISYIEEDAEVTTMAQSVPWGISRVQAPAAHNRGLLASGVRVAVLDTGISTHPDLNIRGGASFVPGEPSTQDGNGHGTHVAGTIAALNNSIGVLGVAPSAELYAVKVLGASGDGSLSSIAQGLEWAGNNGMHVANLSLGSPSPSATLEQAVNSATSRGVLVVAASGNSGAGSISYPARYANAMAVGATDQNNNRASFSQYGAGLDIVAPGVNVQSTYPGSTYAFLNGTSMATPHVAGAAALVKQKNPSWSNVQIRNHLKNTATSLGSTNLYGSGLVNAEAATR

SEQ ID NO: 63629 - protein, 380 aa, Unidentified
VRSKKLWIVASTALLISVAFSSSIASAAEEAKEKYLIGFNEQEAVSEFVEQVEANDEVAILSEEEEVEIELLHEFETIPVLSVELSPEDVDALELDPAISYIEEDAEVTTMAQSVPWGISRVQAPAAHRRGLTGSGVKVAVLDTGISTHPDLNIRGGASFVPGEPSTQDGNGHGTHVAGTIAALDNSIGVLGVAPSAELYAVKVLGASGGGSISSIAQGLEWAGNNGMHVANLSLGSPSPSATLEQAVNSATSRGVLVVAASGNSGAGSISYPARYANAMAVGATDQNNNRASFSQYGAGLDIVAPGVNVQSTYPGSTYASLNGTSMATPHVAGAAVLVKQKNPSWSNVRIRNHLKNTATSLGSTNLYGSGLVNAEAATR

SEQ ID NO: 63630 - protein, 380 aa, Unidentified
VRSKKLWIVASTALLISVAFSSSIASAAEEAKQKYLIGFNEQEAVSEFVEQVEANDEVAILSEEEEVEIELLHEFETIPVLSVELSPEDVDALELDPAISYIEEDAEVTTMAQSVPWGISRVQAPAAHNRGLTGSGVKVAVLDTGISTHPDLNIRGGASFVPGEPSTQDGNGHGTHVAGTIAALNNSIGVLGVAPNAELYAVKVLGASGSGSVSSIAQGLEWAGNNVMHVANLSLGLQAPSATLEQAVNSATSRGVLVVAASGNSGAGSISYPARYANAMAVGATDQNNNRASFSQYGAGLDIVAPGVNVQSTYPGSTYASLNGTSMATPHVAGAAALVKQKNPSWSNVQIRNHLKNTATSLGSTNLYGSGLVNAEAATR

SEQ ID NO: 63631 - protein, 380 aa, Unidentified
VRSKKLWIVASTALLISVAFSSSIASAAEEAKEKYLIGFNEQEAVSEFVEQVEANDEVAILSEEEEVEIELLHEFETIPVLSVELSPEDVDALELDPAISYIEEDAEVTTMAQSVPWGISRVQAPAAHRRGLTGRGVKVAVLDTGISTHPDLNIRGGASFVPGEPSTQDGNGHGTHVAGTIAALDNSIGVLGVAPSAELYAVKVLGASGSGAVSSIAQGLEWAGNNGMHVANLSLGSPSPSATLEQAVNSATSRGVLVVAASGNSGAGSISYPARYANAMAVGATDQNNNRASFSQYGAGLDIVAPGVNVQSTYPGSTYASLNGTSMATPHVAGAAVLVKQKNPSWSNVRIRNHLKNTATSLGSTNLYGSGLVNAEAATR

SEQ ID NO: 63632 - protein, 380 aa, Unidentified
VRSKKLWIVASTALLISVAFSSSIASAAEEAKEKYLIGFNEQEAVSEFVEQVEANDEVAILSEEEEVEIELLHEFETIPVLSVELSPEDVDALELDPAISYIEEDAEVTTMAQSVPWGISRVQAPAAHRRRLTGRGVKVAVLDTGISTHPDLNIRGGASFVPGEPSTQDGNGHGTHVAGTIAALDNSIGVLGVAPSAELYAVKVLGASGSGSVSSIAQGLEWAGANGMHVANLSLGSPSPSATLEQAVNSATSRGVLVVAASGNSGAGSISYPARYANAMAVGATDQNNNRASFSQYGAGLDIVAPGVNVQSTYPGSTYASLNGTSMATPHVAGAAALVKQKNPSWSNVQIRNRLKNTATSLGSTNLYGSGLVNAEAATR

SEQ ID NO: 63633 - protein, 380 aa, Unidentified
VRSKKLWIVASTALLISVAFSSSIASAAEEAKEKYLIGFNEQEAVSEFVEQVEANDEVAILSEEEEVEIELLHEFETIPVLSVELSPEDVDALELDPAISYIEEDAEVTTMAQSVPWGISRVQAPAAHRRGLTGRGVKVAVLDTGISTHPDLDIRGGASFVPGEPSTQDGNGHGTHVAGTIAALDNSIGVLGVAPDAELYAVKVLGASGSGSVSSIAQGLEWAGNNGMHVANLSLGSPSPSATLEQAVNSATSRGVLVVAASGNSGAGSISYPARYANAMAVGATDQNNNRASFSQYGAGLDIVAPGVNVQSTYPGSTYASLNGTSMATPHVAGAAALVKQKNPSWSNVQIRNRLKNTATSLGSTNLYGSGLVNAEAATR

SEQ ID NO: 63634 - protein, 380 aa, Unidentified
VRSKKLWIVASTALLISVAFSSSIASAAEEAKEKYLIGFNEQEAVSEFVEQVEANDEVAILSEEEEVEIELLHEFETIPVLSVELSPEDVDALELDPAISYIEEDAEVTTMAQSVPWGISRVQAPAAHNRGLTGSGVRVAVLDTGISTHPDLNIRGGASFVPGEPSTQDGNGHGTHVAGTIAALNNSIGVLGVAPSAELYAVKVLGASSSGSVSSIAQGLEWAGNNRMHVANLSLGSPSPSATLEQAVNSATSRGVLVVAASGNSGAGDISYPARYANAMAVGATDQNNNRADFSQYGAGLDIVAPGVNVQSTYPGSTYASLNGTSMATPHVAGAAALVKQKNPSWSFVQIRNHLKNTATSLGSTNLYGSGLVNAEAATR

SEQ ID NO: 63635 - protein, 380 aa, Unidentified
VRSKKLWIVASTALLISVAFSSSIASAAEEAKEKYLIGFNEQEAVSEFVEQVEANDEVAILSEEEEVEIELLHEFETIPVLSVELSPEDVDALELDPAISYIEEDAEVTTMAQSVPWGISRVQAPAAHNRGLTGSGVKVAVLDTGISTHPDLNITGGASFVPGEPSTQDGNGHGTHVAGTIAALNNSIGVLGVAPSAELYAVKVLGASGGGAISSIAQGLEWAGNNGMHVANLSLGSPSPSATLEQAVNSATSRGVLVVAASGNSGAGSISYPARYANAMAVGATDQNNNRASFSQYGAGLDIVAPGVNVQSTYPGSTYASLNGTSMATPHVAGAAVLVKQKNPSWSNVRIRNHLKNTATSLGSTNLYGSGLVNAEAATR

SEQ ID NO: 63636 - protein, 380 aa, Unidentified
VRSKKLWIVASTALLISVAFSSSIASAAEEAKEKYLIGFNEQEAVSEFVEQVEANDEVAILSEEEEVEIELLHEFETIPVLSVELSPEDVDALELDPAISYIEEDAEVTTMAQSVPWGISRVQAPAAHRRGLWGRGVKVAVLDTGISTHPDLNIRGGASFVPGEPSTQDGNGHGTHVAGTIAALDNSIGVLGVAPSAELYAVKVLGASGSGSVSSIAQGLEWAGNNGMHVANLSLGSPSPSATLEQAVNSATSRGVLVVAASGNSGAGSISYPARYANAMAVGATDQDNNRASFSQYGAGLDIVAPGVNVQSTYPGSTYASLNGTSMATPHVAGAAALVKQKNPSWSNVQIRNRLKNTATSLGSTNLYGSGLVNAEAATR

SEQ ID NO: 63637 - protein, 380 aa, Unidentified
VRSKKLWIVASTALLISVAFSSSIASAAEEAKEKYLIGFNEQEAVSEFVEQVEANDEVAILSEEEEVEIELLHEFETIPVLSVELSPEDVDALELDPAISYIEEDAEVTTMAQSVPWGISRVQAPAAHNRGLTGSGVKVAVLDTGISTHPDLNIRGGASFVPGEPSTQDGNGHGTHVAGTIAALNNSIGVLGVAPDAELYAVKVLGASGGGAISSIAQGLEWAGNNGMHVANLSLGSPSPSATLEQAVNSATSRGVLVVAASGNSGAGSISYPARYANAMAVGATDQNNNRASFSQYGAGLDIVAPGVNVQSTYPGSTYASLNGTSMATPHVAGAAVLVKQKNPSWSNVRIRNHLKNTATSLGSTNLYGSGLVNAEAATR

SEQ ID NO: 63638 - protein, 380 aa, Unidentified
VRSKKLWIVASTALLISVAFSSSIASAAEEAKEKYLIGFNEQEAVSEFVEQVEANDEVAILSEEEEVEIELLHEFETIPVLSVELSPEDVDALELDPAISYIEEDAEVTTMAQSVPWGISRVQAPAAHNRGLTGSGVKVAVLDTGISTHPDLNIRGGASFVPGEPSTQDGNGHGTHVAGTIAALDNSIGVLGVAPSAELYAVKVLGASGGGAISSIAQGLEWAGNNGMHVANLSLGSPSPSATLEQAVNSATSRGVLVVAASGNSGAGSISYPARYANAMAVGATDQNNNRASFSQYGAGLDIVAPGVNVQSTYPGSTYASLNGTSMATPHVAGAAVLVKQKNPSWSNVRIRNHLKNTATSLGSTNLYGSGLVNAEAATR

SEQ ID NO: 63639 - protein, 380 aa, Unidentified
VRSKKLWIVASTALLISVAFSSSIASAAEEAKEKYLIGFNEQEAVSEFVEQVEANDEVAILSEEEEVEIELLHEFETIPVLSVELSPEDVDALELDPAISYIEEDAEVTTMAQSVPWGISRVQAPAAHRRRLTGSGVKVAVLDTGISTHPDLDITGGASFVPGEPSTQDGNGHGTHVAGTIAALDNSIGVLGVAPSAELYAVKVLGASGSGSVSSIAQGLEWAGNNGMHVANLSLGSPSPSATLEQAVNSATSRGVLVVAASGNSGAGSISYPARYANAMAVGATDQNNNRASFSQYGAGLDIVAPGVNVQSTYPGSTYASLNGTSMATPHVAGAAALVKQKNPSWSNVQIRNRLKNTATSLGSTNLYGSGLVNAEAATR

SEQ ID NO: 63640 - protein, 380 aa, Unidentified
VRSKKLWIVASTALLISVAFSSSIASAAEEAKEKYLIGFNEQEAVSEFVEQVEANDEVAILSEEEEVEIELLHEFETIPVLSVELSPEDVDALELDPAISYIEEDAEVTTMAQSVPWGISRVQAPAAHNRRLTGSGVKVAVLDTGISTHPDLNIRGGASFVPGEPSTQDGNGHGTHVAGTIAALNNSIGVLGVAPSAELYAVKVLGASGGGGISSIAQGLEWAGNNGMHVANLSLGSPSPSATLEQAVNSATSRGVLVVAASGNSGAGSISYPARYANAMAVGATDQNNNRASFSQYGAGLDIVAPGVNVQSTYPGSTYASLNGTSMATPHVAGAAVLVKQKNPSWSNVRIRNHLKNTATSLGSTNLYGSGLVNAEAATR

SEQ ID NO: 63641 - protein, 380 aa, Unidentified
VRSKKLWIVASTALLISVAFSSSIASAAEEAKEKYLIGFNEQEAVSEFVEQVEANDEVAILSEEEEVEIELLHEFETIPVLSVELSPEDVDALELDPAISYIEEDAEVTTMAQSVPWGISRVQAPAAHRRGLRGRGVKVAVLDTGISTHPDLNIRGGASFVPGEPSTQDGNGHGTHVAGTIAALDNSIGVLGVAPDAELYAVKVLGASGSGSVSSIAQGLEWAGNNGMHVANLSLGSPSPSATLEQAVNSATSRGVLVVAASGNSGAGSISYPARYANAMAVGATDQNNNRASFSQYGAGLDIVAPGVNVQSTYPGSTYASLNGTSMATPHVAGAAALVKQKNPSWSNVQIRNRLKNTATSLGSTNLYGSGLVNAEAATR

SEQ ID NO: 63642 - protein, 380 aa, Unidentified
VRSKKLWIVASTALLISVAFSSSIASAAEEAKEKYLIGFNEQEAVSEFVEQVEANDEVAILSEEEEVEIELLHEFETIPVLSVELSPEDVDALELDPAISYIEEDAEVTTMAQSVPWGISRVQAPAAHNRGLTGSGVKVAVLDTGISTHPDLNIRGGASFVPGEPSTQDGNGHGTHVAGTIAALDNSIGVLGVAPSAELYAVKVLGASGGGAISSIAQGLEWAGNNGMHVANLSLGSPSPSATLEQAVNSATSRGVLVVAASGNSGAGSISYPARYANAMAVGATDQNNNRASFSQYGAGLDIVAPGVNVQSTYPGSTYASLNGTSMATPHVAGAAVLVKQKNPSWSNVQIRNRLKNTATSLGSTNLYGSGLVNAEAATR

SEQ ID NO: 63643 - protein, 380 aa, Unidentified
VRSKKLWIVASTALLISVAFSSSIASAAEEAKEKYLIGFNEQEAVSEFVEQVEANDEVAILSEEEEVEIELLHEFETIPVLSVELSPEDVDALELDPAISYIEEDAEVTTMAQSVPWGISRVQAPAAHRRGLTGRGVKVAVLDTGISTHPDLDIRGGASFVPGEPSTQDGNGHGTHVAGTIAALDNRIGVLGVAPSAELYAVKVLGASGSGSVSSIAQGLEWAGNNGMHVANLSLGSPSPSATLEQAVNSATSRGVLVVAASGNSGAGSISYPARYANAMAVGATDQNNNRASFSQYGAGLDIVAPGVNVQSTYPGSTYASLNGTSMATPHVAGAAALVKQKNPSWSNVQIRNRLKNTATSLGSTNLYGSGLVNAEAATR

SEQ ID NO: 63644 - protein, 380 aa, Unidentified
VRSKKLWIVASTALLISVAFSSSIASAAEEAKEKYLIGFNEQEAVSEFVEQVEANDEVAILSEEEEVEIELLHEFETIPVLSVELSPEDVDALELDPAISYIEEDAEVTTMAQSVPWGISRVQAPAAHNRRLTGRGVKVAVLDTGISTHPDLRITGGASFVPGEPSTQDGNGHGTHVAGTIAALNNSIGVLGVAPSAELYAVKVLGASGAGSVSSIAQGLEWAGNNGMHVANLSLGSPSPSATLEQAVNSATSRGVLVVAASGNSGAGSISYPARYANAMAVGATDQNNNRASFSQYGAGLDIVAPGVNVQSTYPGSTYASLNGTSMATPHVAGAAALVKQKNPSWSNVQIRNHLKNTATSLGSTNLYGSGLVRAEAATR

SEQ ID NO: 63645 - protein, 380 aa, Unidentified
VRSKKLWIVASTALLISVAFSSSIASAAEEAKEKYLIGFNEQEAVSEFVEQVEANDEVAILSEEEEVEIELLHEFETIPVLSVELSPEDVDALELDPAISYIEEDAEVTTMAQSVPWGISRVQAPAAHNRGLTGSGVKVAVLDTGISTHPDLNIRGGASFVPGEPSTQDGNGHGTHVAGTIAALNNRIGVLGVAPSAELYAVKVLGASGGGAISSIAQGLEWAGNNGMHVANLSLGSPSPSATLEQAVNSATSRGVLVVAASGNSGAGSISYPARYANAMAVGATDQNNNRASFSQYGAGLDIVAPGVNVQSTYPGSTYASLNGTSMATPHVAGAAVLVKQKNPSWSNVRIRNHLKNTATSLGSTNLYGSGLVNAEAATR

SEQ ID NO: 63646 - protein, 380 aa, Unidentified
VRSKKLWIVASTALLISVAFSSSIASAAEEAKEKYLIGFNEQEAVSEFVEQVEANDEVAILSEEEEVEIELLHEFETIPVLSVELSPEDVDALELDPAISYIEEDAEVTTMAQSVPWGISRVQAPAAHNRGLTGSGVKVAVLDTGISTHPDLNIRGGASFVPGEPSTQDGEGHGTHVAGTIAALNNSIGVLGVAPSAELYAVKVLGASGAGSLSSIAQGLEWAGNNGMHVANLSLGSPSPSATLEQAVNSATSRGVLVVAASGNSGEGSISYPARYANAMAVGATDQNNNHASFSQYGAGLDIVAPGVNVQSTYPGSTYASLNGTSMATPHVAGAAALVKQKNPSWSNVQIRNHLKNTATSLGSTNLYGSGLVNAFAATR

SEQ ID NO: 63647 - protein, 380 aa, Unidentified
VRSKKLWIVASTALLISVAFSSSIASAAEEAKEKYLIGFNEQEAVSEFVEQVEANDEVAILSEEEEVEIELLHEFETIPVLSVELSPEDVDALELDPAISYIEEDAEVTTMAQSVPWGISRVQAPAAHNRRLTGRGVKVAVLDTGISTHPDLDITGGASFVPGEPSTQDGNGHGTHVAGTIAALNNSIGVLGVAPSAELYAVKVLGASGSGSVSSIAQGLEWAGNNGMHVANLSLGSPSPSATLEQAVNSATSRGVLVVAASGNSGAGSISYPARYANAMAVGATDQNNNRASFSQYGAGLDIVAPGVNVQSTYPGSTYASLNGTSMATPHVAGEAALVKQKNPSWRNVQIRNHLKNTATSLGSTNLYGSGLVNAEAATR

SEQ ID NO: 63648 - protein, 380 aa, Unidentified
VRSKKLWIVASTALLISVAFSSSIASAAEEAKEKYLIGFNEQEAVSEFVEQVEANDEVAILSEEEEVEIELLHEFETIPVLSVELSPEDVDALELDPAISYIEEDAEVTTMAQSVPWGISRVQAPAAHNRGLTGSGVKVAVLDTGISTHPDLNIRGGASFVPGEPSTQDGNGHGTHVAGTIAALDNSIGVLGVAPRAELYAVKVLGASGSGAISSIAQGLEWAGNNGMHVANLSLGSPSPSATLEQAVNSATSRGVLVVAASGNSGAGSISYPARYANAMAVGATDQNNNRASFSQYGAGLDIVAPGVNVQSTYPGPTYASLNGTSMATPHVAGAAALVKQKNPSWSNVQIRNHLKNTATSLGSTNLYGSGLVNAVAATR

SEQ ID NO: 63649 - protein, 380 aa, Unidentified
VRSKKLWIVASTALLISVAFSSSIASAAEEAKEKYLIGFNEQEAVSEFVEQVEANDEVAILSEEEEVEIELLHEFETIPVLSVELSPEDVDALELDPAISYIEEDAEVTTMAQSVPWGISRVQAPAAHRRGLWGRGVKVAVLDTGISTHPDLNIRGGASFVPGEPSTQDGNGHGTHVAGTIAALDNSIGVLGVAPSAELYAVKVLGASGSGSVSSIAQGLEWAGNNGMHVANLSLGSPSPSATLEQAVNSATSRGVLVVAASGNSGAGSISYPARYANAMAVGATDQNNNRASFSQYGAGLDLVAPGVNVQSTYPGSTYASLNGTSMATPHVAGAAALVKQKNPSWSNVQIRNRLKNTATSLGSTNLYGSGLVNAEAATR

SEQ ID NO: 63650 - protein, 380 aa, Unidentified
VRSKKLWIVASTALLISVAFSSSIASAAEEAKEKYLIGFNEQEAVSEFVEQVEANDEVAILSEEEEVEIELLHEFETIPVLSVELSPEDVDALELDPAISYIEEDAEVTTMAQSVPWGISRVQAPAAHNRGLTGFGVKVAVLDTGISTHPDLNIRGGASFVPGEPSTQDGNGHGTHVAGTIAALNNSIGVLGVAPSAELYAVKVLGASGSASVSSIAQGLEWAGNNGMHVANLSLGSPSPSATLEQAVNSATSRGVLVVAASGNSGAGSISYPARYANAMAVGATDQNNNKASFSQYGAGLDIVAPGVNVQSTYPGSAYASENGTSMATPHVAGAAALVKQKNPSWSFVQIRNHLKNTATSLGSTNLYGSGLVNAEAATR

SEQ ID NO: 63651 - protein, 380 aa, Unidentified
VRSKKLWIVASTALLISVAFSSSIASAAEEAKEKYLIGFNEQEAVSEFVEQVEANDEVAILSEEEEVEIELLHEFETIPVLSVELSPEDVDALELDPAISYIEEDAEVTTMAQSVPWGISRVQAPAAHRRGLTGRGVKVAVLDTGISTHPDLNIRGGASFVPGEPSTQDGNGHGTHVAGTIAALDNSIGVLGVAPSAELYAVKVLGASGSGSVSSIAQGLEWAGANGMHVANLSLGSPSPSATLEQAVNSATSRGVLVVAASGNSGAGSISYPARYANAMAVGATDQDNNRASFSQYGAGLDIVAPGVNVQSTYPGSTYASLNGTSMATPHVAGAAALVKQKNPSWSNVQIRNRLKNTATSLGSTNLYGSGLVNAEAATR

SEQ ID NO: 63652 - protein, 380 aa, Unidentified
VRSKKLWIVASTALLISVAFSSSIASAAEEAKEKYLIGFNEQEAVSEFVEQVEANDEVAILSEEEEVEIELLHEFETIPVLSVELSPEDVDALELDPAISYIEEDAEVTTMAQSVPWGISRVQAPAAHRRGLTGRGVKVAVLDTGISTHPDLRIRGGASFVPGEPSTQDGNGHGTHVAGTIAALDNSIGVLGVAPSAELYAVKVLGASGSGSVSSIAQGLEWAGNNGMHVANLSLGSPSPSATLEQAVNSATSRGVLVVAASGNSGAGSISYPARYANAMAVGATDQNNNRASFSQYGAGLDIVAPGVNVQSTYPGSTYASENGTSMATPHVAGAAALVKQKNPSWSNVQIRNRLKNTATSLGSTNLYGSGLVNAEAATR

SEQ ID NO: 63653 - protein, 380 aa, Unidentified
VRSKKLWIVASTALLISVAFSSSIASAAEEAKEKYLIGFNEQEAVSEFVEQVEANDEVAILSEEEEVEIELLHEFETIPVLSVELSPEDVDALELDPAISYIEEDAEVTTMAQSVPWGISRVQAPAAHRRGLTGRGVKVAVLDTGISTHPDLNIRGGASFVPGEPSTQDGNGHGTHVAGTIAALDNSIGVLGVAPSAELYAVKVLGASGAGSVSSIAQGLEWAGANGMHVANLSLGSPSPSATLEQAVNSATSRGVLVVAASGNSGAGSISYPARYANAMAVGATDQNNNRASFSQYGAGLDIVAPGVNVQSTYPGSTYASLNGTSMATPHVAGAAALVKQKNPSWSNVQIRNRLKNTATSLGSTNLYGSGLVNAEAATR

SEQ ID NO: 63654 - protein, 380 aa, Unidentified
VRSKKLWIVASTALLISVAFSSSIASAAEEAKEKYLIGFNEQEAVSEFVEQVEANDEVAILSEEEEVEIELLHEFETIPVLSVELSPEDVDALELDPAISYIEEDAEVTTMAQSVPWGISRVQAPAAHNRGLTAFGVKVAVLDTGISTHPDLNIRGGASFVPGEPSTQDGEGHGTHVAGTIAALNNSIGVLGVAPSAELYAVKVLGASGSGSVSSIAQGLEWAGNNRMHVANLSLGSPSPSATLEQAVNSATSRGVLVVAASGNSGAGSISYPARYANAMAVGATDQNNNRASFSQYGAGLDIVAPGVNVQSTYPGSAYASLNGTSMATPHVAGAAALVKQKNGSWSNVQIRNHLKNTATSLGSTNLYGSGLVNAEAATR

SEQ ID NO: 63655 - protein, 380 aa, Unidentified
VRSKKLWIVASTALLISVAFSSSIASAAEEAKEKYLIGFNEQEAVSEFVEQVEANDEVAILSEEEEVEIELLHEFETIPVLSVELSPEDVDALELDPAISYIEEDAEVTTMAQSVPWGISRVQAPAAHRRGLTGRGVKVAVLDTGISTHPDLRIRGGASFVPGEPSTQDGNGHGTHVAGTIAALDNSIGVLGVAPDAELYAVKVLGASGSGSVSSIAQGLEWAGNNGMHVANLSLGSPSPSATLEQAVNSATSRGVLVVAASGNSGAGSISYPARYANAMAVGATDQNNNRASFSQYGAGLDIVAPGVNVQSTYPGSTYASLNGTSMATPHVAGAAALVKQKNPSWSNVQIRNRLKNTATSLGSTNLYGSGLVNAEAATR

SEQ ID NO: 63656 - protein, 380 aa, Unidentified
VRSKKLWIVASTALLISVAFSSSIASAAEEAKEKYLIGFNEQEAVSEFVEQVEANDEVAILSEEEEVEIELLHEFETIPVLSVELSPEDVDALELDPAISYIEEDAEVTTMAQSVPWGISRVQAPAAHNRRLTGSGVKVAVLDTGISTHPDLNIRGGASFVPGEPSTQDGNGHGTHVAGTIAALNNSIGVLGVAPSAELYAVKVLGASGAGALSSIAQGLEWAGNNGMHVANLSLGSPSPSATLEQAVNSATSRGVLVVAASGNSGAGSISYPARYANAMAVGATDQNNNRASFSQYGAGLDIVAPGVNVQSTYPGSTYASLNGTSMATPHVAGAAVLVKQKNPSWSNVRIRNHLKNTATSLGSTNLYGSGLVNAEAATR

SEQ ID NO: 63657 - protein, 380 aa, Unidentified
VRSKKLWIVASTALLISVAFSSSIASAAEEAKEKYLIGFNEQEAVSEFVEQVEANDEVAILSEEEEVEIELLHEFETIPVLSVELSPEDVDALELDPAISYIEEDAEVTTMAQSVPWGISRVQAPASHNRGLTGSGVKVAVLDTGISTHPDLNIRGGASFVPGEPSTQDGEGHGTHVAGTIAALNNSIGVLGVAPSAELYAVKVLGASGSGSLSSIAQGLEWAGNNGMHVANLSLGSPSPSATLEQAVNSATSRGVLVVAASGNSGEGSISYPARYANAMAVGATDQNNNHASFSQYGAGLDIVAPGVNVQSTYPGSTYASLNGTSMATPHVAGAAALVKQKNPSWSNVQIRNHLKNTATSLGSTNLYGSGLVNAFAATR

SEQ ID NO: 63658 - protein, 380 aa, Unidentified
VRSKKLWIVASTALLISVAFSSSIASAAEEAKEKYLIGFNEQEAVSEFVEQVEANDEVAILSEEEEVEIELLHEFETIPVLSVELSPEDVDALELDPAISYIEEDAEVTTMAQSVPWGISRVQAPAAHRRRLTGSGVKVAVLDTGISTHPDLRITGGASFVPGEPSTQDGNGHGTHVAGTIAALDNSIGVLGVAPSAELYAVKVLGASGSGSVSSIAQGLEWAGNNGMHVANLSLGSPSPSATLEQAVNSATSRGVLVVAASGNSGAGSISYPARYANAMAVGATDQNNNRASFSQYGAGLDIVAPGVNVQSTYPGSTYASLNGTSMATPHVAGAAALVKQKNPSWSNVQIRNRLKNTATSLGSTNLYGSGLVNAEAATR

SEQ ID NO: 63659 - protein, 380 aa, Unidentified
VRSKKLWIVASTALLISVAFSSSIASAAEEAKEKYLIGFNEQEAVSEFVEQVEANDEVAILSEEEEVEIELLHEFETIPVLSVELSPEDVDALELDPAISYIEEDAEVTTMAQSVPWGISRVQAPAAHRRGLTGRGVKVAVLDTGISTHPDLRIRGGASFVPGEPSTQDGNGHGTHVAGTIAALDNRIGVLGVAPSAELYAVKVLGASGSGSVSSIAQGLEWAGNNGMHVANLSLGSPSPSATLEQAVNSATSRGVLVVAASGNSGAGSISYPARYANAMAVGATDQNNNRASFSQYGAGLDIVAPGVNVQSTYPGSTYASLNGTSMATPHVAGAAALVKQKNPSWSNVQIRNRLKNTATSLGSTNLYGSGLVNAEAATR

SEQ ID NO: 63660 - protein, 380 aa, Unidentified
VRSKKLWIVASTALLISVAFSSSIASAAEEAKEKYLIGFNEQEAVSEFVEQVEANDEVAILSEEEEVEIELLHEFETIPVLSVELSPEDVDALELDPAISYIEEDAEVTTMAQSVPWGISRVQAPAAHRRGLTGRGVKVAVLDTGISTHPDLNIRGGASFVPGEPSTQDGNGHGTHVAGTIAALDNSIGVLGVAPSAELYAVKVLGASGAGSVSSIAQGLEWAGNNGMHVANLSLGSPSPSATLEQAVNSATSRGVLVVAASGNSGAGSISYPARYANAMAVGATDQNNNRASFSQYGAGLDIVAPGVNVQSTYPGSTYFSLNGTSMATPHVAGAAALVKQKNPSWSNVQIRNRLKNTATSLGSTNLYGSGLVNAEAATR

SEQ ID NO: 63661 - protein, 380 aa, Unidentified
VRSKKLWIVASTALLISVAFSSSIASAAEEAKEKYLIGFNEQEAVSEFVEQVEANDEVAILSEEEEVEIELLHEFETIPVLSVELSPEDVDALELDPAISYIEEDAEVTTMAQSVPWGISRVQAPAAHRRGLTGRGVKVAVLDTGISTHPDLNIRGGASFVPGEPSTQDGNGHGTHVAGTIAALDNSIGVLGVAPSAELYAVKVLGASGSGSVSSIAQGLEWAGNNGMHVANLSLGSPSPSATLEQAVNSATSRGVLVLAASGNSGAGSISYPARYANAMAVGATDQNNNRASFSQYGAGLDIVAPGVNVQSTYPGSTYASLNGTSMATPHVAGAAALVKQKNPSWRNVQIRNRLKNTATSLGSTNLYGSGLVNAEAATR

SEQ ID NO: 63662 - protein, 380 aa, Unidentified
VRSKKLWIVASTALLISVAFSSSIASAAEEAKEKYLIGFNEQEAVSEFVEQVEANDEVAILSEEEEVEIELLHEFETIPVLSVELSPEDVDALELDPAISYIEEDAEVTTMAQSVPWGISRVQAPAAHNRGLTGSGVKVAVLDTGISTHPDLNIRGGASFVPGEPSTQDGNGHGTHVAGTIAALNNSIGVLGVAPSAELYAVKVLGASGAGSLSSIAQGLEWAGNNGMHVANLSLGSPSPSATLEQAVNSATSRGVLVVAASGNSGEGSISYPARYANAMAVGATDQNNNHADFSQYGAGLDIVAPGVNVQSTYPGSTYASLNGTSMATPHVAGAAALVKQKNPSWSNVQIRNHLKNTATSLGSTNLYGSGLVNAFAATR

SEQ ID NO: 63663 - protein, 380 aa, Unidentified
VRSKKLWIVASTALLISVAFSSSIASAAEEAKEKYLIGFNEQEAVSEFVEQVEANDEVAILSEEEEVEIELLHEFETIPVLSVELSPEDVDALELDPAISYIEEDAEVTTMAQSVPWGISRVQAPAAHNRGLTGSGVKVAVLDTGISTHPDLNIRGGASFVPGEPSTQDGNGHGTHVAGTIAALNNSIGVLGVAPSAELYAVKVLGASGGGAISSIARGLEWAGNNGMHVANLSLGSPSPSATLEQAVNSATSRGVLVVAASGNSGAGSISYPARYANAMAVGATDQNNNRASFSQYGAGLDIVAPGVNVQSTYPGSTYASLNGTSMATPHVAGAAVLVKQKNPSWSNVRIRNHLKNTATSLGSTNLYGSGLVNAEAATR

SEQ ID NO: 63664 - protein, 380 aa, Unidentified
VRSKKLWIVASTALLISVAFSSSIASAAEEAKEKYLIGFNEQEAVSEFVEQVEANDEVAILSEEEEVEIELLHEFETIPVLSVELSPEDVDALELDPAISYIEEDAEVTTMAQSVPWGISRVQAPAAHNRGLTGSGVKVAVLDTGISTHPDLNIRGGASFVPGEPSTQDGNGHGTHVAGTIAALNNSIGVLGVAPSAELYAVKVLGASGGGAISSIAQGLEWAGNNGMHVANLSLGSPSPSATLEQAVNSATSRGVLVVAASGNSGADSISYPARYANAMAVGATDQNNNRASFSQYGAGLDIVAPGVNVQSTYPGSTYASLNGTSMATPHVAGAAVLVKQKNPSWSNVRIRNHLKNTATSLGSTNLYGSGLVNAEAATR

SEQ ID NO: 63665 - protein, 380 aa, Unidentified
VRSKKLWIVASTALLISVAFSSSIASAAEEAKEKYLIGFNEQEAVSEFVEQVEANDEVAILSEEEEVEIELLHEFETIPVLSVELSPEDVDALELDPAISYIEEDAEVTTMAQSVPWGISRVQAPAAHNRKLTGFGVKVAVLDTGISTHPDLNIRGGASFVPGEPSTQDGEGHGTHVAGTIAALNNSIGVLGVAPSAELYAVKVLGASGSGSVSSIAQGLEWAGLNRMHVANLSLGSPSPSATLEQAVNSATSRGVLVVAASGNSGAGSISYPARYANAMAVGATDQNNNRADFSQYGAGLDIVAPGVNVQSTYPGSTYASLNGTSMATPHVAGAAALVKQKNPSWSNVQIRNHLKNTATSLGSTNLYGSGLVNAEAATR

SEQ ID NO: 63666 - protein, 380 aa, Unidentified
VRSKKLWIVASTALLISVAFSSSIASAAEEAKEKYLIGFNEQEAVSEFVEQVEANDEVAILSEEEEVEIELLHEFETIPVLSVELSPEDVDALELDPAISYIEEDAEVTTMAQSVPWGISRVQAPAAHRRGLTGRGVKVAVLDTGISTHPDLNIRGGASFVPGEPSTQDGNGHGTHVAGTIAALDNRIGVLGVAPDAELYAVKVLGASGSGSVSSIAQGLEWAGNNGMHVANLSLGSPSPSATLEQAVNSATSRGVLVVAASGNSGAGSISYPARYANAMAVGATDQNNNRASFSQYGAGLDIVAPGVNVQSTYPGSTYASLNGTSMATPHVAGAAALVKQKNPSWSNVQIRNRLKNTATSLGSTNLYGSGLVNAEAATR

SEQ ID NO: 63667 - protein, 380 aa, Unidentified
VRSKKLWIVASTALLISVAFSSSIASAAEEAKEKYLIGFNEQEAVSEFVEQVEANDEVAILSEEEEVEIELLHEFETIPVLSVELSPEDVDALELDPAISYIEEDAEVTTMAQSVPWGISRVQAPAAHNRRLTGRGVKVAVLDTGISTHPDLRITGGASFVPGEPSTQDGNGHGTHVAGTIAALNNSIGVLGVAPSAELYAVKVLGASGAGSVSSIAQGLEWAGNNGMHVANLSLGSPSPSATLEQAVNSATSRGVLVVAASGNSGAGSISYPARYANAMAVGATDQNNNRASFSQYGAGLDIVAPGVNVQSTYPGSAYASLNGTSMATPHVAGAAALVKQKNPSWSNVQIRNHLKNTATSLGSTNLYGSGLVNAEAATR

SEQ ID NO: 63668 - protein, 380 aa, Unidentified
VRSKKLWIVASTALLISVAFSSSIASAAEEAKEKYLIGFNEQEAVSEFVEQVEANDEVAILSEEEEVEIELLHEFETIPVLSVELSPEDVDALELDPAISYIEEDAEVTTMAQSVPWGISRVQAPAAHNRGLTGSGVKVAVLDTGISTHPDLNIRGGASFVPGEPSTQDGNGHGTHVAGTIAALNNSIGVLGVAPSAELYAVKVLGASGAGSLSSIAQGLEWAGNNGMHVANLSLGNPSPSATLEQAVNSATSRGVLVVAASGNSGEGSISYPARYANAMAVGATDQNNNHASFSQYGAGLDIVAPGVNVQSTYPGSTYASLNGTSMATPHVAGAAALVKQKNPSWSNVQIRNHLKNTATSLGSTNLYGSGLVNAFAATR

SEQ ID NO: 63669 - protein, 380 aa, Unidentified
VRSKKLWIVASTALLISVAFSSSIASAAEEAKEKYLIGFNEQEAVSEFVEQVEANDEVAILSEEEEVEIELLHEFETIPVLSVELSPEDVDALELDPAISYIEEDAEVTTMAQSVPWGISRVQAPAAHNRGLLGSGVKVAVLDTGISFHPDLNIRGGRSFVPGEPSTQDGEGHGTHVAGTIAALNNSIGVLGVAPSAELYAVKVLGASSSGSVSSIAQGLEWAGNNGMHVANLSLGSPSPSATLEQAVNSATSRGVLVVAASGNSGAGSISYPARYANAMAVGATDQNNNKASFSQYGAGLDIVAPGVNVQSTYPGSTYASLNGTSMATPHVAGAAALVKQKNPSWSNVQIRNHLKNTATSLGSTNLYGSGLVNAEAATR

SEQ ID NO: 63670 - protein, 380 aa, Unidentified
VRSKKLWIVASTALLISVAFSSSIASAAEEAKEKYLIGFNEQEAVSEFVEQVEANDEVAILSEEEEVEIELLHEFETIPVLSVELSPEDVDALELDPAISYIEEDAEVTTMAQSVPWGISRVQAPAAHRRGLTGRGVKVAVLDTGISTHPDLNIRGGASFVPGEPSTQDGNGHGTHVAGTIAALDNSIGVLGVAPSAELYAVKVLGASGSGSVSSIAQGLEWAGNNGMHVANLSLGSPSPSATLEQAVNSATSRGVLVVAASGNSGAGSISYPARYANAMAVGATDQNNNRASFSQYGAGLDIVAPGVNVQSTYPGSTYASENGTSMATPHVAGAAALVKQKNPSWRNVQIRNRLKNTATSLGSTNLYGSGLVNAEAATR

SEQ ID NO: 63671 - protein, 380 aa, Unidentified
VRSKKLWIVASTALLISVAFSSSIASAAEEAKEKYLIGFNEQEAVSEFVEQVEANDEVAILSEEEEVEIELLHEFETIPVLSVELSPEDVDALELDPAISYIEEDAEVTTMAQSVPWGISRVQAPAAHRRGLWGRGVKVAVLDTGISTHPDLNIRGGASFVPGEPSTQDGNGHGTHVAGTIAALDNSIGVLGVAPSAELYAVKVLGASGSGSVSSIAQGLEWAGNNGMHVANLSLGSPSPSATLEQAVNSATSRGVLVVAASGNSGAGSISYPARYANAMAVGATDQNNNRASFSQYGAGLDIVAPGVNVQSTYPQSTYASLNGTSMATPHVAGAAALVKQKNPSWSNVQIRNRLKNTATSLGSTNLYGSGLVNAEAATR

SEQ ID NO: 63672 - protein, 380 aa, Unidentified
VRSKKLWIVASTALLISVAFSSSIASAAEEAKEKYLIGFNEQEAVSEFVEQVEANDEVAILSEEEEVEIELLHEFETIPVLSVELSPEDVDALELDPAISYIEEDAEVTTMAQSVPWGISRVQAPAAHNRRLTGRGVKVAVLDTGISTHPDLNITGGASFVPGEPSTQDGNGHGTHVAGTIAALDNSIGVLGVAPSAELYAVKVLGASGSGSVSSIAQGLEWAGNNGMHVANLSLGSPSPSATLEQAVNSATSRGVLVVAASGNSGAGSISYPARYANAMAVGATDQNNNRASFSQYGAGLDIVAPGVNVQSTYPGSTYASLNGTSMATPHVAGAAALVKQKNPSWRNVQIRNRLKNTATSLGSTNLYGSGLVNAEAATR

SEQ ID NO: 63673 - protein, 380 aa, Unidentified
VRSKKLWIVASTALLISVAFSSSIASAAEEAKEKYLIGFNEQEAVSEFVEQVEANDEVAILSEEEEVEIELLHEFETIPVLSVELSPEDVDALELDPAISYIEEDAEVTTMAQSVPWGISRVQAPAAHNRGLLGSGVKVAVFDTGISTHPDLNIRGGASFVPGEPSTQDGNGHGTHVAGTIAALNNSIGVLGVAPSAELYAVKVLGASGSASVSSIAQGLEWAGNNGMHVANLSLGDPSPSATLEQAVNSATSRGVLVVAASGNSGAGSISYPARYANAMAVGATDQNNNRASFSQYGAGLDIVAPGVNVQSTYPGSTYASLNGTSMAAPHVAGAAALVKQKNPSWSFVQIRNHLKNTATSLGSTNLYGSGLVNAEAATR

SEQ ID NO: 63674 - protein, 380 aa, Unidentified
VRSKKLWIVASTALLISVAFSSSIASAAEEAKEKYLIGFNEQEAVSEFVEQVEANDEVAILSEEEEVEIELLHEFETIPVLSVELSPEDVDALELDPAISYIEEDAEVTTMAQSVPWGISRVQAPAAHRRGLTGRGVKVAVLDTGISTHPDLNIRGGASFVPGEPSTQDGNGHGTHVAGTIAALDNSIGVLGVAPSAELYAVKVLGASGSGSVSSIAQGLEWAGNNGMHVANLSLGSPSPSATLEQAVNSATSRGVLVVAASGNSGAGSISYPARYANAMAVGATDQNNNRASFSQYGAGLDIVAPGVNVQSTYPQSAYASLNGTSMATPHVAGAAALVKQKNPSWSNVQIRNRLKNTATSLGSTNLYGSGLVNAEAATR

SEQ ID NO: 63675 - protein, 380 aa, Unidentified
VRSKKLWIVASTALLISVAFSSSIASAAEEAKEKYLIGFNEQEAVSEFVEQVEANDEVAILSEEEEVEIELLHEFETIPVLSVELSPEDVDALELDPAISYIEEDAEVTTMAQSVPWGISRVQAPAAHRRGLTGRGVKVAVLDTGISTHPDLNIRGGASFVPGEPSTQDGNGHGTHVAGTIAALDNSIGVLGVAPDAELYAVKVLGASGSGSVSSIAQGLEWAGNNGMHVANLSLGSPSPSATLEQAVNSATSRGVLVLAASGNSGAGSISYPARYANAMAVGATDQNNNRASFSQYGAGLDIVAPGVNVQSTYPGSTYASLNGTSMATPHVAGAAALVKQKNPSWSNVQIRNRLKNTATSLGSTNLYGSGLVNAEAATR

SEQ ID NO: 63676 - protein, 380 aa, Unidentified
VRSKKLWIVASTALLISVAFSSSIASAAEEAKEKYLIGFNEQEAVSEFVEQVEANDEVAILSEEEEVEIELLHEFETIPVLSVELSPEDVDALELDPAISYIEEDAEVTTMAQSVPWGISRVQAPAAHNRRLTGSGVKVAVLDTGISTHPDLRIRGGASFVPGEPSTQDGNGHGTHVAGTIAALNNSIGVLGVAPSAELYAVKVLGASGAGSVSSIAQGLEWAGANGMHVANLSLGSPSPSATLEQAVNSATSRGVLVVAASGNSGAGSISYPARYANAMAVGATDQNNNRASFSQYGAGLDIVAPGVNVQSTYPGSAYFSLNGTSMATPHVAGAAALVKQKNPSWSNVQIRNHLKNTATSLGSTNLYGSGLVNAEAATR

SEQ ID NO: 63677 - protein, 380 aa, Unidentified
VRSKKLWIVASTALLISVAFSSSIASAAEEAKEKYLIGFNEQEAVSEFVEQVEANDEVAILSEEEEVEIELLHEFETIPVLSVELSPEDVDALELDPAISYIEEDAEVTTMAQSVPWGISRVQAPAAHNRGLTASGVKVAVLDTGISTHPDLWIRGGASFVPGEPSTQDGEGHGTHVAGTIAALNNSIGVLGVAPSAELYAVKVLGASGSGSVSSIAQGLEWAGLNRMHVANLSLGSPSPSATLEQAVNSATSRGVLVVAASGNSGAGSISYPARYANAMAVGATDQNNNRASFSQYGAGLDIVAPGVNVQSTYPGSAYASLNGTSMATPHVAGAAALVKQKNPSWSNVQIRNHLKNTATSLGSTNLYGSGLVNAEAATR

SEQ ID NO: 63678 - protein, 380 aa, Unidentified
VRSKKLWIVASTALLISVAFSSSIASAAEEAKEKYLIGFNEQEAVSEFVEQVEANDEVAILSEEEEVEIELLHEFETIPVLSVELSPEDVDALELDPAISYIEEDAEVTTMAQSVPWGISRVQAPAAHRRRLWGRGVKVAVLDTGISTHPDLNIRGGASFVPGEPSTQDGNGHGTHVAGTIAALDNSIGVLGVAPSAELYAVKVLGASGSGSVSSIAQGLEWAGNNGMHVANLSLGSPSPSATLEQAVNSATSRGVLVVAASGNSGAGSISYPARYANAMAVGATDQNNNRASFSQYGAGLDIVAPGVNVQSTYPGSTYASLNGTSMATPHVAGAAALVKQKNPSWSNVQIRNRLKNTATSLGSTNLYGSGLVNAEAATR

SEQ ID NO: 63679 - protein, 380 aa, Unidentified
VRSKKLWIVASTALLISVAFSSSIASAAEEAKEKYLIGFNEQEAVSEFVEQVEANDEVAILSEEEEVEIELLHEFETIPVLSVELSPEDVDALELDPAISYIEEDAEVTTMAQSVPWGISRVQAPAAHRRGLTGSGVKVAVLDTGISTHPDLNIRGGASFVPGEPSTQDGNGHGTHVAGTIAALDNSIGVLGVAPSAELYAVKVLGASGGGAISSIAQGLEWAGNNGMHVANLSLGSPSPSATLEQAVNSATSRGVLVVAASGNSGAGSISYPARYANAMAVGATDQNNNRASFSQYGAGLDIVAPGVNVQSTYPGSTYASLNGTSMATPHVAGAAALVKQKNPSWSNVQIRNRLKNTATSLGSTNLYGSGLVNAEAATR

SEQ ID NO: 63680 - protein, 380 aa, Unidentified
VRSKKLWIVASTALLISVAFSSSIASAAEEAKEKYLIGFNEQEAVSEFVEQVEANDEVAILSEEEEVEIELLHEFETIPVLSVELSPEDVDALELDPAISYIEEDAEVTTMAQSVPWGISRVQAPAAHRRGLTGRGVKVAVLDTGISTHPDLRIRGGASFVPGEPSTQDGNGHGTHVAGTIAALDNSIGVLGVAPSAELYAVKVLGASGSGSVSSIAQGLEWAGNNGMHVANLSLGSPSPSATLEQAVNSATSRGVLVLAASGNSGAGSISYPARYANAMAVGATDQNNNRASFSQYGAGLDIVAPGVNVQSTYPGSTYASLNGTSMATPHVAGAAALVKQKNPSWSNVQIRNRLKNTATSLGSTNLYGSGLVNAEAATR

SEQ ID NO: 63681 - protein, 380 aa, Unidentified
VRSKKLWIVASTALLISVAFSSSIASAAEEAKEKYLIGFNEQEAVSEFVEQVEANDEVAILSEEEEVEIELLHEFETIPVLSVELSPEDVDALELDPAISYIEEDAEVTTMAQSVPWGISRVQAPAAHNRGLTGSGVKVAVLDTGISTHPDLNIRGGASFVPGEPSTQDGNGHGTHVAGTIAALNNSIGVLGVAPSAELYAVKVLGASGSGSVSSIAQGLEWAGNNGMHVANLSLGSPSPSATLEQAVNSATSRGVLVVAASGNSGEGSISYPARYANAMAVGATDQNNNRADFSQYGAGLDIVAPGVNVQSTYPGSTYASLNGTSMATPHVAGAAVLVKQKNPSWSNVRIRDRLKNTATSLGSTNLYGSGLVNAEAATR

SEQ ID NO: 63682 - protein, 380 aa, Unidentified
VRSKKLWIVASTALLISVAFSSSIASAAEEAKEKYLIGFNEQEAVSEFVEQVEANDEVAILSEEEEVEIELLHEFETIPVLSVELSPEDVDALELDPAISYIEEDAEVTTMAQSVPWGISRVQAPAAHNRGLTGRGVKVAVLDTGISTHPDLNIRGGASFVPGEPSTQDGNGHGTHVAGTIAALDNSIGVLGVAPSAELYAVKVLGASGGGAISSIAQGLEWAGNNGMHVANLSLGSPSPSATLEQAVNSATSRGVLVVAASGNSGAGSISYPARYANAMAVGATDQNNNRASFSQYGAGLDIVAPGVNVQSTYPGSTYASLNGTSMATPHVAGAAALVKQKNPSWSNVRIRNHLKNTATSLGSTNLYGSGLVNAEAATR

SEQ ID NO: 63683 - protein, 380 aa, Unidentified
VRSKKLWIVASTALLISVAFSSSIASAAEEAKEKYLIGFNEQEAVSEFVEQVEANDEVAILSEEEEVEIELLHEFETIPVLSVELSPEDVDALELDPAISYIEEDAEVTTMAQSVPWGISRVQAPAAHNRGLTGSGVKVAVLDTGISTHPDLNIRGGASFVPGEPSTQDGNGHGTHVAGTIAALNNSIGVLGVAPSAELYAVKVLGASGAGSVSSIAQGLEWAGNNGMHVANLSLGNPSPSATLEQAVNSATSRGVLVVAASGNSGEGSISYPARYANAMAVGATDQNNNRADFSQYGAGLDIVAPGVNVQSTEPGSTYASLNGTSMATPHVAGAAALVKQKNPSWSNVQIRNHLKNTATSLGSTNLYGSGLVNAFAATR

SEQ ID NO: 63684 - protein, 380 aa, Unidentified
VRSKKLWIVASTALLISVAFSSSIASAAEEAKEKYLIGFNEQEAVSEFVEQVEANDEVAILSEEEEVEIELLHEFETIPVLSVELSPEDVDALELDPAISYIEEDAEVTTMAQSVPWGISRVQAPAAHNRGLTGSGVKVAVLDTGISTHPDLNIRGGASFVPGEPSTQDGNGHGTHVAGTIAALNNSIGVLGVAPSAELYAVKVLGASGGGAISSIAQGLEWAGNNGMHVANLSLGSPSPSATLEQAVNSATSRGVLVVAASGNSGAGSISYPARYANAMAVGATDQNNNRASFSQYGAGLDIVAPGVNVQSTYPGSTYASLNGTSMATPHVAGAAVLVKQKNPSWSNVRIRNRLKNTATSLGSTNLYGSGLVNAEAATR

SEQ ID NO: 63685 - protein, 380 aa, Unidentified
VRSKKLWIVASTALLISVAFSSSIASAAEEAKEKYLIGFNEQEAVSEFVEQVEANDEVAILSEEEEVEIELLHEFETIPVLSVELSPEDVDALELDPAISYIEEDAEVTTMAQSVPWGISRVQAPAAHRRGLTGRGVKVAVLDTGISTHPDLNIRGGASFVPGEPSTQDGNGHGTHVAGTIAALDNSIGVLGVAPSAELYAVKVLGASGAGSVSSIAQGLEWAGNNGMHVANLSLGSPSPSATLEQAVNSATSRGVLVVAASGNSGAGSISYPARYANAMAVGATDQNNNRASFSQYGAGLDIVAPGVNVQSTYPQSTYASLNGTSMATPHVAGAAALVKQKNPSWSNVQIRNRLKNTATSLGSTNLYGSGLVNAEAATR

SEQ ID NO: 63686 - protein, 380 aa, Unidentified
VRSKKLWIVASTALLISVAFSSSIASAAEEAKEKYLIGFNEQEAVSEFVEQVEANDEVAILSEEEEVEIELLHEFETIPVLSVELSPEDVDALELDPAISYIEEDAEVTTMAQSVPWGISRVQAPAAHNRRLTGSGVKVAVLDTGISTHPDLDITGGASFVPGEPSTQDGNGHGTHVAGTIAALDNSIGVLGVAPSAELYAVKVLGASGSGSVSSIAQGLEWAGNNGMHVANLSLGSPSPSATLEQAVNSATSRGVLVVAASGNSGAGSISYPARYANAMAVGATDQNNNRASFSQYGAGLDIVAPGVNVQSTYPGSTYASLNGTSMATPHVAGAAALVKQKNPSWRNVQIRNRLKNTATSLGSTNLYGSGLVNAEAATR

SEQ ID NO: 63687 - protein, 380 aa, Unidentified
VRSKKLWIVASTALLISVAFSSSIASAAEEAKEKYLIGFNEQEAVSEFVEQVEANDEVAILSEEEEVEIELLHEFETIPVLSVELSPEDVDALELDPAISYIEEDAEVTTMAQSVPWGISRVQAPAAHRRRLTGSGVKVAVLDTGISTHPDLRIRGGASFVPGEPSTQDGNGHGTHVAGTIAALDNSIGVLGVAPSAELYAVKVLGASGSGSVSSIAQGLEWAGNNGMHVANLSLGSPSPSATLEQAVNSATSRGVLVVAASGNSGAGSISYPARYANAMAVGATDQNNNRASFSQYGAGLDIVAPGVNVQSTYPGSTYASLNGTSMATPHVAGAAALVKQKNPSWRNVQIRNRLKNTATSLGSTNLYGSGLVNAEAATR

SEQ ID NO: 63688 - protein, 380 aa, Unidentified
VRSKKLWIVASTALLISVAFSSSIASAAEEAKEKYLIGFNEQEAVSEFVEQVEANDEVAILSEEEEVEIELLHEFETIPVLSVELSPEDVDALELDPAISYIEEDAEVTTMAQSVPWGISRVQAPAAHRRRLTGRGVKVAVLDTGISTHPDLNIRGGASFVPGEPSTQDGNGHGTHVAGTIAALDNSIGVLGVAPSAELYAVKVLGASGSGSVSSIAQGLEWAGNNGMHVANLSLGSPSPSATLEQAVNSATSRGVLVVAASGNSGAGSISYPARYANAMAVGATDQDNNRASFSQYGAGLDIVAPGVNVQSTYPGSTYASLNGTSMATPHVAGAAALVKQKNPSWSNVQIRNRLKNTATSLGSTNLYGSGLVNAEAATR

SEQ ID NO: 63689 - protein, 380 aa, Unidentified
VRSKKLWIVASTALLISVAFSSSIASAAEEAKEKYLIGFNEQEAVSEFVEQVEANDEVAILSEEEEVEIELLHEFETIPVLSVELSPEDVDALELDPAISYIEEDAEVTTMAQSVPWGISRVQAPAAHNRGLTASGVKVAVLDTGISFHPDLNIRGGASFVPGEPSTQDGNGHGTHVAGTIAALNNNIGVLGVAPSAELYAVKVLGASSSGSVSSIAQGLEWAGNNGMHVANLSLGSPSPSATLEQAVNSATSRGVLVVAASGNSGAGSISYPARYANAMAVGATDQNNNRASFSQYGAGLDIVAPGVNVQSTYPGMTYDSLNGTSMATPHVAGAAALVKQKNPSWSNVQIRNHLKNTATSLGSTNLYGSGLVNAEAATR

SEQ ID NO: 63690 - protein, 380 aa, Unidentified
VRSKKLWIVASTALLISVAFSSSIASAAEEAKEKYLIGFNEQEAVSEFVEQVEANDEVAILSEEEEVEIELLHEFETIPVLSVELSPEDVDALELDPAISYIEEDAEVTTMAQSVPWGISRVQAPAAHNRKLTGSGVKVAVLDTGISTHPDLNIRGGASFVPGEPSTQDGNGHGTHVAGTIAALNNSIGVLGVAPSAELYAVKVLGASSSGSVSSIAQGLEWAGLNGMHVANLSLGSPSPSATLEQAVNSATSRGVLVVAASGNSGEGSIDYPARYANAMAVGATDQNNNRASFSQYGAGLDIVAPGVNVQSTYPGSTYASLNGTSMATPHVAGAAALVKQKNPSWSFVQIRNHLKNTATSLGSTNLYGSGLVNAEAATR

SEQ ID NO: 63691 - protein, 380 aa, Unidentified
VRSKKLWIVASTALLISVAFSSSIASAAEEAKEKYLIGFNEQEAVSEFVEQVEANDEVAILSEEEEVEIELLHEFETIPVLSVELSPEDVDALELDPAISYIEEDAEVTTMAQSVPWGISRVQAPAAHNRGLTGSGVKVAVLDTGISTHPDLNIRGGASFVPGEPSTQDGNGHGTHVAGTIAALNNSIGVLGVAPSAELYAVKVLGASGGGAISSIAQGLEWAGNNGMHVANLSLGSPSPSATLEQAVNSATSRGVLVVAASGNSGAGSISYPARYANAMAVGATDQNNNRASFSQYGAGLDIVAPGVNVQSTYPGSTYASLNGTSMATPHVAGAAVLVKQKNPSWSNRRIRNHLKNTATSLGSTNLYGSGLVNAEAATR

SEQ ID NO: 63692 - protein, 380 aa, Unidentified
VRSKKLWIVASTALLISVAFSSSIASAAEEAKEKYLIGFNEQEAVSEFVEQVEANDEVAILSEEEEVEIELLHEFETIPVLSVELSPEDVDALELDPAISYIEEDAEVTTMAQSVPWGISRVQAPAAHNRGLTGRGVKVAVLDTGISTHPDLRITGGASFVPGEPSTQDGNGHGTHVAGTIAALDNSIGVLGVAPSAELYAVKVLGASGSGSVSSIAQGLEWAGNNGMHVANLSLGSPSPSATLEQAVNSATSRGVLVVAASGNSGAGSISYPARYANAMAVGATDQNNNRASFSQYGAGLDIVAPGVNVQSTYPGSTYASLNGTSMATPHVAGEAALVKQKNPSWSNVQIRNRLKNTATSLGSTNLYGSGLVNAEAATR

SEQ ID NO: 63693 - protein, 380 aa, Unidentified
VRSKKLWIVASTALLISVAFSSSIASAAEEAKEKYLIGFNEQEAVSEFVEQVEANDEVAILSEEEEVEIELLHEFETIPVLSVELSPEDVDALELDPAISYIEEDAEVTTMAQSVPWGISRVQAPAAHNRRLTGRGVEVAVLDTGISTHPDLRIRGGASFVPGEPSTQDGNGHGTHVAGTIAALDNSIGVLGVAPSAELYAVKVLGASGSGSVSSIAQGLEWAGNNGMHVANLSLGSPSPSATLEQAVNSATSRGVLVVAASGNSGAGSISYPARYANAMAVGATDQNNNRASFSQYGAGLDIVAPGVNVQSTYPGSTYASLNGTSMATPHVAGEAALVKQKNPSWSNVQIRNHLKNTATSLGSTNLYGSGLVNAEAATR

SEQ ID NO: 63694 - protein, 380 aa, Unidentified
VRSKKLWIVASTALLISVAFSSSIASAAEEAKEKYLIGFNEQEAVSEFVEQVEANDEVAILSEEEEVEIELLHEFETIPVLSVELSPEDVDALELDPAISYIEEDAEVTTMAQSVPWGISRVQAPAAHNRGLTAFGVKVAVLDTGISTHPDLWIRGGASFVPGEPSTQDGEGHGTHVAGTIAALNNSIGVLGVAPSAELYAVKVLGASGSGSVSSIAQGLEWAGLNRMHVANLSLGSPSPSATLEQAVNSATSRGVLVVAASGNSGAGSISYPARYANAMAVGATDQNNNRASFSQYGAGLDIVAPGVNVQSTYPGSTYASLNGTSMATPHVAGAAALVKQKNPSWSNVQIRNHLKNTATSLGSTNLYGSGLVNAEAATR

SEQ ID NO: 63695 - protein, 380 aa, Unidentified
VRSKKLWIVASTALLISVAFSSSIASAAEEAKEKYLIGFNEQEAVSEFVEQVEANDEVAILSEEEEVEIELLHEFETIPVLSVELSPEDVDALELDPAISYIEEDAEVTTMAQSVPWGISRVQAPAAHRRGLTGRGVKVAVLDTGISTHPDLNIRGGASFVPGEPSTQDGNGHGTHVAGTIAALDNSIGVLGVAPSAELYAVKVLGASGSGSVSSIAQGLEWAGNNGMHVANLSLGSPSPSATLEQAVNSATSRGVLVVAASGNSGAGSISYPARYANAMAVGATDQDNNRASFSQYGAGLDLVAPGVNVQSTYPGSTYASLNGTSMATPHVAGAAALVKQKNPSWSNVQIRNRLKNTATSLGSTNLYGSGLVNAEAATR

SEQ ID NO: 63696 - protein, 380 aa, Unidentified
VRSKKLWIVASTALLISVAFSSSIASAAEEAKEKYLIGFNEQEAVSEFVEQVEANDEVAILSEEEEVEIELLHEFETIPVLSVELSPEDVDALELDPAISYIEEDAEVTTMAQSVPWGISRVQAPAAHNRGLTGRGVKVAVLDTGISTHPDLNITGGASFVPGEPSTQDGNGHGTHVAGTIAALDNSIGVLGVAPSAELYAVKVLGASGSGSVSSIAQGLEWAGNNGMHVANLSLGSPSPSATLEQAVNSATSRGVLVVAASGNSGAGSISYPARYANAMAVGATDQNNNRASFSQYGAGLDIVAPGVNVQSTYPGSTYASLNGTSMATPHVAGEAALVKQKNPSWRNVQIRNRLKNTATSLGSTNLYGSGLVNAEAATR

SEQ ID NO: 63697 - protein, 380 aa, Unidentified
VRSKKLWIVASTALLISVAFSSSIASAAEEAKEKYLIGFNEQEAVSEFVEQVEANDEVAILSEEEEVEIELLHEFETIPVLSVELSPEDVDALELDPAISYIEEDAEVTTMAQSVPWGISRVQAPAAHNRGLTGRGVKVAVLDTGISTHPDLRIRGGASFVPGEPSTQDGNGHGTHVAGTIAALNNSIGVLGVAPSAELYAVKVLGASGAGSVSSIAQGLEWAGANGMHVANLSLGSPSPSATLEQAVNSATSRGVLVVAASGNSGAGSISYPARYANAMAVGATDQNNNRASFSQYGAGLDIVAPGVNVQSTYPGSTYFSLNGTSMATPHVAGAAALVKQKNPSWSNVQIRNHLKNTATSLGSTNLYGSGLVRAEAATR

SEQ ID NO: 63698 - protein, 380 aa, Unidentified
VRSKKLWIVASTALLISVAFSSSIASAAEEAKEKYLIGFNEQEAVSEFVEQVEANDEVAILSEEEEVEIELLHEFETIPVLSVELSPEDVDALELDPAISYIEEDAEVTTMAQSVPWGISRVQAPAAHNRRLTGRGVKVAVLDTGISTHPDLRITGGASFVPGEPSTQDGNGHGTHVAGTIAALNNSIGVLGVAPSAELYAVKVLGASGSGSVSSIAQGLEWAGANGMHVANLSLGSPSPSATLEQAVNSATSRGVLVVAASGNSGAGSISYPARYANAMAVGATDQNNNRASFSQYGAGLDIVAPGVNVQSTYPGSAYASLNGTSMATPHVAGAAALVKQKNPSWSNVQIRNHLKNTATSLGSTNLYGSGLVNAEAATR

SEQ ID NO: 63699 - protein, 380 aa, Unidentified
VRSKKLWIVASTALLISVAFSSSIASAAEEAKEKYLIGFNEQEAVSEFVEQVEANDEVAILSEEEEVEIELLHEFETIPVLSVELSPEDVDALELDPAISYIEEDAEVTTMAQSVPWGISRVQAPAAHNRGLTGSGVKVAVLDTGISTHPDLNIRGGASFVPGEPSTQDGNGHGTHVAGTIAALNNSIGVLGVAPSAELYAVKVLGASGGGAISSIAQGLEWAGNNGMHVANLSLGSPSPSATLEQAVNSATSRGVLVVAASGNSGAGSISYPARYANAMAVGATDQNNNRASFSQYGAGLDIVAPGVNVQSTYPGSTYASLNGTSMATPHVAGAAVLVKQKNPSWRNVRIRNHLKNTATSLGSTNLYGSGLVNAEAATR

SEQ ID NO: 63700 - protein, 380 aa, Unidentified
VRSKKLWIVASTALLISVAFSSSIASAAEEAKEKYLIGFNEQEAVSEFVEQVEANDEVAILSEEEEVEIELLHEFETIPVLSVELSPEDVDALELDPAISYIEEDAEVTTMAQSVPWGISRVQAPAAHNRGLTGSGVKVAVLDTGISTHPDLNIRGGASFVPGEPSTQDGEGHGTHVAGTIAALNNNIGVLGVAPSAELYAVKVLGASGSASVSSIAQGLEWAGLNGMHVANLSLGSPSPSATLEQAVNSATRRGVLVVAASGNSGAGSISYPARYANAMAVGATDQNNNRASFSQYGAGLDIVAPGVNVQSTYPGSTYASLNGTSMATPHVAGAAALVKQKNPSWSNVQIRNHIKNTATSLGSTNLYGSGLVNAEAATR

SEQ ID NO: 63701 - protein, 380 aa, Unidentified
VRSKKLWIVASTALLISVAFSSSIASAAEEAKEKYLIGFNEQEAVSEFVEQVEANDEVAILSEEEEVEIELLHEFETIPVLSVELSPEDVDALELDPAISYIEEDAEVTTMAQSVPWGISRVQAPAAHRRGLTGRGVKVAVLDTGISTHPDLNIRGGASFVPGEPSTQDGNGHGTHVAGTIAALDNSIGVLGVAPSAELYAVKVLGASGSGSVSSIAQGLEWAGANGMHVANLSLGSPSPSATLEQAVNSATSRGVLVVAASGNSGAGSISYPARYANAMAVGATDQNNNRASFSQYGAGLDIVAPGVNVQSTYPGSTYFSLNGTSMATPHVAGAAALVKQKNPSWSNVQIRNRLKNTATSLGSTNLYGSGLVNAEAATR

SEQ ID NO: 63702 - protein, 380 aa, Unidentified
VRSKKLWIVASTALLISVAFSSSIASAAEEAKEKYLIGFNEQEAVSEFVEQVEANDEVAILSEEEEVEIELLHEFETIPVLSVELSPEDVDALELDPAISYIEEDAEVTTMAQSVPWGISRVQAPAAHRRRLTGRGVKVAVLDTGISTHPDLNIRGGASFVPGEPSTQDGNGHGTHVAGTIAALDNSIGVLGVAPSAELYAVKVLGASGSGSVSSIAQGLEWAGNNGMHVANLSLGSPSPSATLEQAVNSATSRGVLVVAASGNSGAGSISYPARYANAMAVGATDQNNNRASFSQYGAGLDIVAPGVNVQSTYPGSTYFSLNGTSMATPHVAGAAALVKQKNPSWSNVQIRNRLKNTATSLGSTNLYGSGLVNAEAATR

SEQ ID NO: 63703 - protein, 380 aa, Unidentified
VRSKKLWIVASTALLISVAFSSSIASAAEEAKEKYLIGFNEQEAVSEFVEQVEANDEVAILSEEEEVEIELLHEFETIPVLSVELSPEDVDALELDPAISYIEEDAEVTTMAQSVPWGISRVQAPAAHNRGLTGSGVKVAVLDTGISTHPDLNIRGGASFVPGEPSTQDGEGHGTHVAGTIAALNNSIGVLGVAPSAELYAVKVLGASGAGSLSSIAQGLEWAGNNGMHVANLSLGSPSPSATLEQAVNSATSRGVLVVAASGNSGAGSISYPARYANAMAVGATDQNNNHADFSQYGAGLDIVAPGVNVQSTYPGSTYASLNGTSMATPHVAGAAALVKQKNPSWSNVQIRNHLKNTATSLGSTNLYGSGLVNAFAATR

SEQ ID NO: 63704 - protein, 380 aa, Unidentified
VRSKKLWIVASTALLISVAFSSSIASAAEEAKEKYLIGFNEQEAVSEFVEQVEANDEVAILSEEEEVEIELLHEFETIPVLSVELSPEDVDALELDPAISYIEEDAEVTTMAQSVPWGISRVQAPAAHNRKLTASGVKVAVLDTGISTHPDLNIRGGASFVPGEPSTQDGEGHGTHVAGTIAALNNSIGVLGVAPSAELYAVKVLGASGSGSVSSIAQGLEWAGLNRMHVANLSLGSPSPSATLEQAVNSATSRGVLVVAASGNSGAGSISYPARYANAMAVGATDQNNNRASFSQYGAGLDIVAPGVNVQSTYPGSAYASLNGTSMATPHVAGAAALVKQKNPSWSNVQIRNHLKNTATSLGSTNLYGSGLVNAEAATR

SEQ ID NO: 63705 - protein, 380 aa, Unidentified
VRSKKLWIVASTALLISVAFSSSIASAAEEAKEKYLIGFNEQEAVSEFVEQVEANDEVAILSEEEEVEIELLHEFETIPVLSVELSPEDVDALELDPAISYIEEDAEVTTMAQSRPWGISRVQAPAAHNRGLTGSGVKVAVLDTGISTHPDLNIRGGASFVPGEPSTQDGNGHGTHVAGTIAALNNSIGVLGVAPSAELYAVKVLGASGGGAISSIAQGLEWAGNNGMHVANLSLGSPSPSATLEQAVNSATSRGVLVVAASGNSGAGSISYPARYANAMAVGATDQNNNRASFSQYGAGLDIVAPGVNVQSTYPGSTYASLNGTSMATPHVAGAAVLVKQKNPSWSNVRIRNHLKNTATSLGSTNLYGSGLVNAEAATR

SEQ ID NO: 63706 - protein, 380 aa, Unidentified
VRSKKLWIVASTALLISVAFSSSIASAAEEAKEKYLIGFNEQEAVSEFVEQVEANDEVAILSEEEEVEIELLHEFETIPVLSVELSPEDVDALELDPAISYIEEDAEVTTMAQSVPWGISRVQAPAAHRRRLTGSGVKVAVLDTGISTHPDLRIRGGASFVPGEPSTQDGNGHGTHVAGTIAALDNSIGVLGVAPSAELYAVKVLGASGSGSVSSIAQGLEWAGNNGMHVANLSLGSPSPSATLEQAVNSATSRGVLVVAASGNSGAGSISYPARYANAMAVGATDQNNNRASFSQYGAGLDIVAPGVNVQSTYPGSTYASLNGTSMATPHVAGEAALVKQKNPSWRNVQIRNHLKNTATSLGSTNLYGSGLVNAEAATR

SEQ ID NO: 63707 - protein, 380 aa, Unidentified
VRSKKLWIVASTALLISVAFSSSIASAAEEAKEKYLIGFNEQEAVSEFVEQVEANDEVAILSEEEEVEIELLHEFETIPVLSVELSPEDVDALELDPAISYIEEDAEVTTMAQSVPWGISRVQAPAAHRRGLTGSGVKVAVLDTGISTHPDLNIRGGASFVPGEPSTQDGNGHGTHVAGTIAALNNSIGVLGVAPSAELYAVKVLGASGGGAISSIAQGLEWAGNNGMHVANLSLGSPSPSATLEQAVNSATSRGVLVVAASGNSGAGSISYPARYANAMAVGATDQNNNRASFSQYGAGLDIVAPGVNVQSTYPGSTYASLNGTSMATPHVAGAAVLVKQKNPSWSNVRIRNHLKNTATSLGSTNLYGSGLVNAEAATR

SEQ ID NO: 63708 - protein, 380 aa, Unidentified
VRSKKLWIVASTALLISVAFSSSIASAAEEAKEKYLIGFNEQEAVSEFVEQVEANDEVAILSEEEEVEIELLHEFETIPVLSVELSPEDVDALELDPAISYIEEDAEVTTMAQSVPWGISRVQAPAAHRRGLTGRGVKVAVLDTGISTHPDLNIRGGASFVPGEPSTQDGNGHGTHVAGTIAALDNSIGVLGVAPSAELYAVKVLGASGSGSVSSIAQGLEWAGNNGMHVANLSLGSPSPSATLEQAVNSATSRGVLVVAASGNSGAGSISYPARYANAMAVGATDQNNNRASFSQYGAGLDLVAPGVNVQSTYPGSAYASLNGTSMATPHVAGAAALVKQKNPSWSNVQIRNRLKNTATSLGSTNLYGSGLVNAEAATR

SEQ ID NO: 63709 - protein, 380 aa, Unidentified
VRSKKLWIVASTALLISVAFSSSIASAAEEAKEKYLIGFNEQEAVSEFVEQVEANDEVAILSEEEEVEIELLHEFETIPVLSVELSPEDVDALELDPAISYIEEDAEVTTMAQSVPWGISRVQAPAAHNRGLTGSGVKVAVLDTGISTHPDLNIRGGASFVPGEPSTQDGNGHGTHVAGTIAALNNSIGVLGVAPSAELYAVKVLGASGSGSLSSIAQGLEWAGNNGMHVANLSLGNPSPSATLEQAVNSATSRGVLVVAASGNSGEGSISYPARYANAMAVGATDQNNNHADFSQYGAGLDIVAPGVNVQSTYPGSTYASLNGTSMATPHVAGAAALVKQKNPSWSNVQIRNHLKNTATSLGSTNLYGSGLVNAFAATR

SEQ ID NO: 63710 - protein, 380 aa, Unidentified
VRSKKLWIVASTALLISVAFSSSIASAAEEAKEKYLIGFNEQEAVSEFVEQVEANDEVAILSEEEEVEIELLHEFETIPVLSVELSPEDVDALELDPAISYIEEDAEVTTMAQSVPWGISRVQAPAAHRRGLTGRGVKVAVLDTGISTHPDLRITGGASFVPGEPSTQDGNGHGTHVAGTIAALNNSIGVLGVAPSAELYAVKVLGASGSGSVSSIAQGLEWAGNNGMHVANLSLGSPSPSATLEQAVNSATSRGVLVVAASGNSGAGSISYPARYANAMAVGATDQNNNRASFSQYGAGLDIVAPGVNVQSTYPGSTYASLNGTSMATPHVAGEAALVKQKNPSWSNVQIRNRLKNTATSLGSTNLYGSGLVNAEAATR

SEQ ID NO: 63711 - protein, 380 aa, Unidentified
VRSKKLWIVASTALLISVAFSSSIASAAEEAKEKYLIGFNEQEAVSEFVEQVEANDEVAILSEEEEVEIELLHEFETIPVLSVELSPEDVDALELDPAISYIEEDAEVTTMAQSVPWGISRVQAPAAHRRGLTGRGVKVAVLDTGISTHPDLNIRGGASFVPGEPSTQDGNGHGTHVAGTIAALDNSIGVLGVAPSAELYAVKVLGASGSGSVSSIAQGLEWAGNNGMHVANLSLGSPSPSATLEQAVNSATSRGVLVVAASGNSGAGSISYPARYANAMAVGATDQDNNRASFSQYGAGLDIVAPGVNVQSTYPGSTYASLNGTSMATPHVAGAAALVKQKNPSWSNVQIRTRLKNTATSLGSTNLYGSGLVNAEAATR

SEQ ID NO: 63712 - protein, 380 aa, Unidentified
VRSKKLWIVASTALLISVAFSSSIASAAEEAKEKYLIGFNEQEAVSEFVEQVEANDEVAILSEEEEVEIELLHEFETIPVLSVELSPEDVDALELDPAISYIEEDAEVTTMAQSVPWGISRVQAPAAHNRGLTGSGVKVAVLDTGISTHPDLNIRGGASFVPGEPSTQDGNGHGTHVAGTIAALNNSIGVLGVAPSAELYAVKVLGASGGGAISSIAQGLEWAGNNGMHVANLSLGSPSPSATLEQAVNSATSRGVLVVAASGNSGAGSISYPARYANAMAVGATDQNNNRASFSQYGAGLDIVAPGVNVQSTYPGSTYASLNGTSMATPHVAGAAVLVKQKNPSWSNVRIRRHLKNTATSLGSTNLYGSGLVNAEAATR

SEQ ID NO: 63713 - protein, 380 aa, Unidentified
VRSKKLWIVASTALLISVAFSSSIASAAEEAKEKYLIGFNEQEAVSEFVEQVEANDEVAILSEEEEVEIELLHEFETIPVLSVELSPEDVDALELDPAISYIEEDAEVTTMAQSVPWGISRVQAPAAHNRGLTGSGVKVAVLDTGISTHPDLNIRGGASFVPGEPSTQDGNGHGTHVAGTIAALNNSIGVLGVAPSAELYAVKVLGASGGGAISSIAQGLEWAGNNGMHVANLSLGSPSPSATLEQAVNSATSRGVLVVAASGNSGAGSISYPARYANAMAVGATDQNNNRASFSQYGAGLDIVAPGVNVQSTYPGSTYASLNGTSMATPHVAGAAVLVKQKNPSWSNVRIRNHLKNTATSLGSTNLYGSGLVRAEAATR

SEQ ID NO: 63714 - protein, 380 aa, Unidentified
VRSKKLWIVASTALLISVAFSSSIASAAEEAKEKYLIGFNEQEAVSEFVEQVEANDEVAILSEEEEVEIELLHEFETIPVLSVELSPEDVDALELDPAISYIEEDAEVTTMRQSVPWGISRVQAPAAHNRGLTGSGVKVAVLDTGISTHPDLNIRGGASFVPGEPSTQDGNGHGTHVAGTIAALNNSIGVLGVAPSAELYAVKVLGASGGGAISSIAQGLEWAGNNGMHVANLSLGSPSPSATLEQAVNSATSRGVLVVAASGNSGAGSISYPARYANAMAVGATDQNNNRASFSQYGAGLDIVAPGVNVQSTYPGSTYASLNGTSMATPHVAGAAVLVKQKNPSWSNVRIRNHLKNTATSLGSTNLYGSGLVNAEAATR

SEQ ID NO: 63715 - protein, 380 aa, Unidentified
VRSKKLWIVASTALLISVAFSSSIASAAEEAKEKYLIGFNEQEAVSEFVEQVEANDEVAILSEEEEVEIELLHEFETIPVLSVELSPEDVDALELDPAISYIEEDAEVTTMAQSVPWGISRVQAPAAHRRGLTGRGVKVAVLDTGISTHPDLNIRGGASFVPGEPSTQDGNGHGTHVAGTIAALDNSIGVLGVAPDAELYAVKVLGASGSGSVSSIAQGLEWAGNNGMHVANLSLGSPSPSATLEQAVNSATSRGVLVVAASGNSGAGSISYPARYANAMAVGATDQNNNRASFSQYGAGLDIVAPGVNVQSTYPGSTYASLNGTSMATPHVAGAAALVKQKNPSWSNVQIRNRLKNTATSLGSTNLYGSGLVRAEAATR

SEQ ID NO: 63716 - protein, 380 aa, Unidentified
VRSKKLWIVASTALLISVAFSSSIASAAEEAKEKYLIGFNEQEAVSEFVEQVEANDEVAILSEEEEVEIELLHEFETIPVLSVELSPEDVDALELDPAISYIEEDAEVTTMAQSVPWGISRVQAPAAHRRRLTGSGVKVAVLDTGISTHPDLDIRGGASFVPGEPSTQDGNGHGTHVAGTIAALDNSIGVLGVAPSAELYAVKVLGASGSGSVSSIAQGLEWAGNNGMHVANLSLGSPSPSATLEQAVNSATSRGVLVVAASGNSGAGSISYPARYANAMAVGATDQNNNRASFSQYGAGLDIVAPGVNVQSTYPGSTYASLNGTSMATPHVAGAAALVKQKNPSWRNVQIRNRLKNTATSLGSTNLYGSGLVNAEAATR

SEQ ID NO: 63717 - protein, 380 aa, Unidentified
VRSKKLWIVASTALLISVAFSSSIASAAEEAKEKYLIGFNEQEAVSEFVEQVEANDEVAILSEEEEVEIELLHEFETIPVLSVELSPEDVDALELDPAISYIEEDAEVTTMAQSVPWGISRVQAPAAHNRGLTGSGVKVAVLDTGISTHPDLNIRGGASFVPGEPSTQDGNGHGTHVAGTIAALNNSIGVLGVAPSAELYAVKVLGASGGGAISSIAQGLEWAGNNGMHVANLSLGSPSPSATLEQAVNSATSRGVLVVAASGNSGAGSISYPARYANAMAVGATDQNNNRASFSQYGAGLDIVAPGVNVQSTYPGSTYASLNGTSMATPHVAGAAVLVKQKNPSWSNVRIRNHLKNTATSLGSTNLYGSGLVNALAATR

SEQ ID NO: 63718 - protein, 380 aa, Unidentified
VRSKKLWIVASTALLISVAFSSSIASAAEEAKEKYLIGFNEQEAVSEFVEQVEANDEVAILSEEEEVEIELLHEFETIPVLSVELSPEDVDALELDPAISYIEEDAEVTTMAQSVPWGISRVQAPAAHRRGLTGSGVKVAVLDTGISTHPDLDITGGASFVPGEPSTQDGNGHGTHVAGTIAALDNSIGVLGVAPSAELYAVKVLGASGSGSVSSIAQGLEWAGNNGMHVANLSLGSPSPSATLEQAVNSATSRGVLVVAASGNSGAGSISYPARYANAMAVGATDQNNNRASFSQYGAGLDIVAPGVNVQSTYPGSTYASLNGTSMATPHVAGAAALVKQKNPSWRNVQIRNRLKNTATSLGSTNLYGSGLVNAEAATR

SEQ ID NO: 63719 - protein, 380 aa, Unidentified
VRSKKLWIVASTALLISVAFSSSIASAAEEAKEKYLIGFNEQEAVSEFVEQVEANDEVAILSEEEEVEIELLHEFETIPVLSVELSPEDVDALELDPAISYIEEDAEVTTMAQSVPWGISRVQAPAAHRRGLRGRGVKVAVLDTGISTHPDLDIRGGASFVPGEPSTQDGNGHGTHVAGTIAALDNSIGVLGVAPSAELYAVKVLGASGSGSVSSIAQGLEWAGNNGMHVANLSLGSPSPSATLEQAVNSATSRGVLVVAASGNSGAGSISYPARYANAMAVGATDQNNNRASFSQYGAGLDIVAPGVNVQSTYPGSTYASLNGTSMATPHVAGAAALVKQKNPSWSNVQIRNRLKNTATSLGSTNLYGSGLVNAEAATR

SEQ ID NO: 63720 - protein, 380 aa, Unidentified
VRSKKLWIVASTALLISVAFSSSIASAAEEAKEKYLIGFNEQEAVSEFVEQVEANDEVAILSEEEEVEIELLHEFETIPVLSVELSPEDVDALELDPAISYIEEDAEVTTMAQSVPWGISRVQAPAAHNRGLTGSGVKVAVLDTGISTHPDLNIRGGASFVPGEPSTQDGNGHGTHVAGTIAALNNSIGVLGVAPSAELYAVKVLGASGGGAISSIAQGLEWARNNGMHVANLSLGSPSPSATLEQAVNSATSRGVLVVAASGNSGAGSISYPARYANAMAVGATDQNNNRASFSQYGAGLDIVAPGVNVQSTYPGSTYASLNGTSMATPHVAGAAVLVKQKNPSWSNVRIRNHLKNTATSLGSTNLYGSGLVNAEAATR

SEQ ID NO: 63721 - protein, 380 aa, Unidentified
VRSKKLWIVASTALLISVAFSSSIASAAEEAKEKYLIGFNEQEAVSEFVEQVEANDEVAILSEEEEVEIELLHEFETIPVLSVELSPEDVDALELDPAISYIEEDAEVTTMAQSVPWGISRVQAPAAHRRRLTGRGVKVAVLDTGISTHPDLNIRGGASFVPGEPSTQDGNGHGTHVAGTIAALDNSIGVLGVAPSAELYAVKVLGASGSGSVSSIAQGLEWAGNNGMHVANLSLGSPSPSATLEQAVNSATSRGVLVVAASGNSGAGSISYPARYANAMAVGATDQNNNRASFSQYGAGLDIVAPGVNVQSTYPGSTYASENGTSMATPHVAGAAALVKQKNPSWSNVQIRNRLKNTATSLGSTNLYGSGLVNAEAATR

SEQ ID NO: 63722 - protein, 380 aa, Unidentified
VRSKKLWIVASTALLISVAFSSSIASAAEEAKEKYLIGFNEQEAVSEFVEQVEANDEVAILSEEEEVEIELLHEFETIPVLSVELSPEDVDALELDPAISYIEEDAEVTTMAQSVPWGISRVQAPAAHRRGLTGRGVKVAVLDTGISTHPDLNIRGGASFVPGEPSTQDGNGHGTHVAGTIAALDNSIGVLGVAPSAELYAVKVLGASGAGSVSSIAQGLEWAGNNGMHVANLSLGSPSPSATLEQAVNSATSRGVLVVAASGNSGAGSISYPARYANAMAVGATDQDNNRASFSQYGAGLDIVAPGVNVQSTYPGSTYASLNGTSMATPHVAGAAALVKQKNPSWSNVQIRNRLKNTATSLGSTNLYGSGLVNAEAATR

SEQ ID NO: 63723 - protein, 380 aa, Unidentified
VRSKKLWIVASTALLISVAFSSSIASAAEEAKEKYLIGFNEQEAVSEFVEQVEANDEVAILSEEEEVEIELLHEFETIPVLSVELSPEDVDALELDPAISYIEEDAEVTTMAQSVPWGISRVQAPAAHRRGLTGSGVKVAVLDTGISTHPDLRITGGASFVPGEPSTQDGNGHGTHVAGTIAALDNSIGVLGVAPSAELYAVKVLGASGSGSVSSIAQGLEWAGNNGMHVANLSLGSPSPSATLEQAVNSATSRGVLVVAASGNSGAGSISYPARYANAMAVGATDQNNNRASFSQYGAGLDIVAPGVNVQSTYPGSTYASLNGTSMATPHVAGEAALVKQKNPSWRNVQIRNHLKNTATSLGSTNLYGSGLVNAEAATR

SEQ ID NO: 63724 - protein, 380 aa, Unidentified
VRSKKLWIVASTALLISVAFSSSIASAAEEAKEKYLIGFNEQEAVSEFVEQVEANDEVAILSEEEEVEIELLHEFETIPVLSVELSPEDVDALELDPAISYIEEDAEVTTMAQSVPWGISRVQAPAAHRRGLTGRGVKVAVLDTGISTHPDLDIRGGASFVPGEPSTQDGNGHGTHVAGTIAALDNSIGVLGVAPSAELYAVKVLGASGSGSVSSIAQGLEWAGNNGMHVANLSLGSPSPSATLEQAVNSATSRGVLVVAASGNSGAGSISYPARYANAMAVGATDQNNNRASFSQYGAGLDIVAPGVNVQSTYPGSTYASLNGTSMATPHVAGAAALVKQKNPSWRNVQIRNRLKNTATSLGSTNLYGSGLVNAEAATR

SEQ ID NO: 63725 - protein, 380 aa, Unidentified
VRSKKLWIVASTALLISVAFSSSIASAAEEAKEKYLIGFNEQEAVSEFVEQVEANDEVAILSEEEEVEIELLHEFETIPVLSVELSPEDVDALELDPAISYIEEDAEVTTMAQSVPWGISRVQAPAAHRRRLTGRGVKVAVLDTGISTHPDLNIRGGASFVPGEPSTQDGNGHGTHVAGTIAALDNSIGVLGVAPDAELYAVKVLGASGSGSVSSIAQGLEWAGNNGMHVANLSLGSPSPSATLEQAVNSATSRGVLVVAASGNSGAGSISYPARYANAMAVGATDQNNNRASFSQYGAGLDIVAPGVNVQSTYPGSTYASLNGTSMATPHVAGAAALVKQKNPSWSNVQIRNRLKNTATSLGSTNLYGSGLVNAEAATR

SEQ ID NO: 63726 - protein, 380 aa, Unidentified
VRSKKLWIVASTALLISVAFSSSIASAAEEAKEKYLIGFNEQEAVSEFVEQVEANDEVAILSEEEEVEIELLHEFETIPVLSVELSPEDVDALELDPAISYIEEDAEVTTMAQSVPWGISRVQAPAAHNRGLTGSGVKVAVLDTGISTHPDLNIRGGASFVPGEPSTQDGNGHGTHVAGTIAALNNSIGVLGVAPSAELYAVKVLGASGAGSLSSIAQGLEWAGNNGMHVANLSLGSPSPSATLEQAVNSATSRGVLVVAASGNSGEGSISYPARYANAMAVGATDQNNNHADFSQYGAGLDIVAPGVNVQSTYPGSTYASLNGTSMATPHVAGAAALVKQKNPSWSNVQIRNRLKNTATSLGSTNLYGSGLVNAEAATR

SEQ ID NO: 63727 - protein, 380 aa, Unidentified
VRSKKLWIVASTALLISVAFSSSIASAAEEAKEKYLIGFNEQEAVSEFVEQVEANDEVAILSEEEEVEIELLHEFETIPVLSVELSPEDVDALELDPAISYIEEDAEVTTMAQSVPWGISRVQAPAAHNRGLTGSGVKVAVLDTGISTHPDLNIRGGASFVPGEPSTQDGEGHGTHVAGTIAALNNSIGVLGVAPSAELYAVKVLGASGAGSVSSIAQGLEWAGNNGMHVANLSLGSPSPSATLEQAVNSATSRGVLVVAASGNSGEGSISYPARYANAMAVGATDQNNNHASFSQYGAGLDIVAPGVNVQSTYPGSTYASLNGTSMATPHVAGAAALVKQKNPSWSNVQIRNRLKNTATSLGSTNLYGSGLVNAFAATR

SEQ ID NO: 63728 - protein, 380 aa, Unidentified
VRSKKLWIVASTALLISVAFSSSIASAAEEAKEKYLIGFNEQEAVSEFVEQVEANDEVAILSEEEEVEIELLHEFETIPVLSVELSPEDVDALELDPAISYIEEDAEVTTMAQSVPWGISRVQAPAAHRRGLTGRGVKVAVLDTGISTHPDLNIRGGASFVPGEPSTQDGNGHGTHVAGTIAALDNSIGVLGVAPSAELYAVKVLGASGSGSVSSIAQGLEWAGANGMHVANLSLGSPSPSATLEQAVNSATSRGVLVVAASGNSGAGSISYPARYANAMAVGATDQNNNRASFSQYGAGLDIVAPGVNVQSTYPQSTYASLNGTSMATPHVAGAAALVKQKNPSWSNVQIRNRLKNTATSLGSTNLYGSGLVNAEAATR

SEQ ID NO: 63729 - protein, 380 aa, Unidentified
VRSKKLWIVASTALLISVAFSSSIASAAEEAKEKYLIGFNEQEAVSEFVEQVEANDEVAILSEEEEVEIELLHEFETIPVLSVELSPEDVDALELDPAISYIEEDAEVTTMAQSVPWGISRVQAPAAHRRGLTGRGVKVAVLDTGISTHPDLNIRGGASFVPGEPSTQDGNGHGTHVAGTIAALDNSIGVLGVAPSAELYAVKVLGASGSGSVSSIAQGLEWAGNNGMHVANLSLGSPSPSATLEQAVNSATSRGVLVVAASGNSGAGSISYPARYANAMAVGATDQNNNRASFSQYGAGLDIVAPGVNVQSTYPGSAYFSLNGTSMATPHVAGAAALVKQKNPSWSNVQIRNRLKNTATSLGSTNLYGSGLVNAEAATR

SEQ ID NO: 63730 - protein, 380 aa, Unidentified
VRSKKLWIVASTALLISVAFSSSIASAAEEAKEKYLIGFNEQEAVSEFVEQVEANDEVAILSEEEEVEIELLHEFETIPVLSVELSPEDVDALELDPAISYIEEDAEVTTMAQSVPWGISRVQAPAAHRRRLTGRGVKVAVLDTGISTHPDLNIRGGASFVPGEPSTQDGNGHGTHVAGTIAALDNSIGVLGVAPSAELYAVKVLGASGSGSVSSIAQGLEWAGNNGMHVANLSLGSPSPSATLEQAVNSATSRGVLVLAASGNSGAGSISYPARYANAMAVGATDQNNNRASFSQYGAGLDIVAPGVNVQSTYPGSTYASLNGTSMATPHVAGAAALVKQKNPSWSNVQIRNRLKNTATSLGSTNLYGSGLVNAEAATR

SEQ ID NO: 63731 - protein, 380 aa, Unidentified
VRSKKLWIVASTALLISVAFSSSIASAAEEAKEKYLIGFNEQEAVSEFVEQVEANDEVAILSEEEEVEIELLHEFETIPVLSVELSPEDVDALELDPAISYIEEDAEVTTMAQSVPWGISRVQAPAAHRRGLTGRGVKVAVLDTGISTHPDLRIRGGASFVPGEPSTQDGNGHGTHVAGTIAALDNSIGVLGVAPSAELYAVKVLGASGSGSVSSIAQGLEWAGNNGMHVANLSLGSPSPSATLEQAVNSATSRGVLVVAASGNSGAGSISYPARYANAMAVGATDQNNNRASFSQYGAGLDIVAPGVNVQSTYPGSTYASLNGTSMATPHVAGAAALVKQKNPSWSNVQIRNRLKNTATSLGSTNLYGSGLVRAEAATR

SEQ ID NO: 63732 - protein, 380 aa, Unidentified
VRSKKLWIVASTALLISVAFSSSIASAAEEAKEKYLIGFNEQEAVSEFVEQVEANDEVAILSEEEEVEIELLHEFETIPVLSVELSPEDVDALELDPAISYIEEDAEVTTMAQSVPWGISRVQAPAAHRRGLTGRGVKVAVLDTGISTHPDLNIRGGASFVPGEPSTQDGNGHGTHVAGTIAALDNSIGVLGVAPSAELYAVKVLGASGSGSVSSIAQGLEWAGNNGMHVANLSLGSPSPSATLEQAVNSATSRGVLVVAASGNSGAGSISYPARYANAMAVGATDQNNNRASFSQYGAGLDLVAPGVNVQSTYPGSTYFSLNGTSMATPHVAGAAALVKQKNPSWSNVQIRNRLKNTATSLGSTNLYGSGLVNAEAATR

SEQ ID NO: 63733 - protein, 380 aa, Unidentified
MRSKKLWIVASTALLISVAFSSSIASAAEEAKXKYLIGFNEQEAVSEFVEQVXANDEVAILSEEEEVEIELLHEFETIPVLSVELSPEDVDALELDPAISYIEEDAEVTTMAQSVPWGISRVQAPAAHNRGLTGSGVKVAVLDTGISTHPDLNIRGGASFVPGEPSTQDGNGHGTHVAGTIAALNNSIGVLGVAPNAELYAVKVLGASGSGSVSSIAQGLEWAGNNVMHVANLSLGLQAPSATLEQAVNSATSRGVLVVAASGNSGAGSISYPARYANAMAVGATDQNNNRASFSQYGAGLDIVAPGVNVQSTYPGSTYASLNGTSMATPHVAGAAALVKQKNPSWSNVQIRNHLKNTATSLGSTNLYGSGLVNAEAATR

SEQ ID NO: 63734 - protein, 380 aa, Unidentified
VRSKKLWIVASTALLISVAFSSSIASAAEEAKEKYLIGFNEQEAVSEFVEQVEANDEVAILSEEEEVEIELLHEFETIPVLSVELSPEDVDALELDPAISYIEEDAEVTTMAQSVPWGISRVQAPAAHRRRLTGRGVKVAVLDTGISTHPDLNIRGGASFVPGEPSTQDGNGHGTHVAGTIAALDNSIGVLGVAPSAELYAVKVLGASGAGSVSSIAQGLEWAGNNGMHVANLSLGSPSPSATLEQAVNSATSRGVLVVAASGNSGAGSISYPARYANAMAVGATDQNNNRASFSQYGAGLDIVAPGVNVQSTYPGSTYASLNGTSMATPHVAGAAALVKQKNPSWSNVQIRNRLKNTATSLGSTNLYGSGLVNAEAATR

SEQ ID NO: 63735 - protein, 380 aa, Unidentified
VRSKKLWIVASTALLISVAFSSSIASAAEEAKEKYLIGFNEQEAVSEFVEQVEANDEVAILSEEEEVEIELLHEFETIPVLSVELSPEDVDALELDPAISYIEEDAEVTTMAQSVPWGISRVQAPAAHRRRLTGRGVKVAVLDTGISTHPDLDIRGGASFVPGEPSTQDGNGHGTHVAGTIAALDNSIGVLGVAPSAELYAVKVLGASGSGSVSSIAQGLEWAGNNGMHVANLSLGSPSPSATLEQAVNSATSRGVLVVAASGNSGAGSISYPARYANAMAVGATDQNNNRASFSQYGAGLDIVAPGVNVQSTYPGSTYASLNGTSMATPHVAGAAALVKQKNPSWRNVQIRNHLKNTATSLGSTNLYGSGLVNAEAATR

SEQ ID NO: 63736 - protein, 380 aa, Unidentified
VRSKKLWIVASTALLISVAFSSSIASAAEEAKEKYLIGFNEQEAVSEFVEQVEANDEVAILSEEEEVEIELLHEFETIPVLSVELSPEDVDALELDPAISYIEEDAEVTTMAQSVPWGISRVQAPAAHNRKLTGFGVKVAVLDTGISTHPDLWIRGGASFVPGEPSTQDGEGHGTHVAGTIAALNNSIGVLGVAPSAELYAVKVLGASGSGSVSSIAQGLEWAGLNGMHVANLSLGSPSPSATLEQAVNSATSRGVLVVAASGNSGAGSISYPARYANAMAVGATDQNNNRASFSQYGAGLDIVAPGVNVQSTYPGSAYASLNGTSMATPHVAGAAALVKQKNPSWSNVQIRNHLKNTATSLGSTNLYGSGLVNAEAATR

SEQ ID NO: 63737 - protein, 380 aa, Unidentified
VRSKKLWIVASTALLISVAFSSSIASAAEEAKEKYLIGFNEQEAVSEFVEQVEANDEVAILSEEEEVEIELLHEFETIPVLSVELSPEDVDALELDPAISYIEEDAEVTTMAQSVPWGISRVQAPAAHNRRLTGRGVRVAVLDTGISTHPDLDIRGGASFVPGEPSTQDGNGHGTHVAGTIAALNNSIGVLGVAPSAELYAVKVLGASGSGSVSSIAQGLEWAGNNGMHVANLSLGSPSPSATLEQAVNSATSRGVLVVAASGNSGAGSISYPARYANAMAVGATDQNNNRASFSQYGAGLDIVAPGVNVQSTYPGSTYASLNGTSMATPHVAGAAALVKQKNPSWRNVQIRNRLKNTATSLGSTNLYGSGLVNAEAATR

SEQ ID NO: 63738 - protein, 380 aa, Unidentified
VRSKKLWIVASTALLISVAFSSSIASAAEEAKEKYLIGFNEQEAVSEFVEQVEANDEVAILSEEEEVEIELLHEFETIPVLSVELSPEDVDALELDPAISYIEEDAEVTTMAQSVPWGISRVQAPAAHRRRLTGRGVKVAVLDTGISTHPDLDITGGASFVPGEPSTQDGNGHGTHVAGTIAALNNSIGVLGVAPSAELYAVKVLGASGSGSVSSIAQGLEWAGNNGMHVANLSLGSPSPSATLEQAVNSATSRGVLVVAASGNSGAGSISYPARYANAMAVGATDQNNNRASFSQYGAGLDIVAPGVNVQSTYPGSTYASLNGTSMATPHVAGAAALVKQKNPSWRNVQIRNHLKNTATSLGSTNLYGSGLVNAEAATR

SEQ ID NO: 63739 - protein, 380 aa, Unidentified
VRSKKLWIVASTALLISVAFSSSIASAAEEAKEKYLIGFNEQEAVSEFVEQVEANDEVAILSEEEEVEIELLHEFETIPVLSVELSPEDVDALELDPAISYIEEDAEVTTMAQSVPWGISRVQAPAAHRRGLTGRGVKVAVLDTGISTHPDLNIRGGASFVPGEPSTQDGNGHGTHVAGTIAALDNSIGVLGVAPSAELYAVKVLGASGAGSVSSIAQGLEWAGNNGMHVANLSLGSPSPSATLEQAVNSATSRGVLVVAASGNSGAGSISYPARYANAMAVGATDQNNNRASFSQYGAGLDLVAPGVNVQSTYPGSTYASLNGTSMATPHVAGAAALVKQKNPSWSNVQIRNRLKNTATSLGSTNLYGSGLVNAEAATR

SEQ ID NO: 63740 - protein, 380 aa, Unidentified
VRSKKLWIVASTALLISVAFSSSIASAAEEAKEKYLIGFNEQEAVSEFVEQVEANDEVAILSEEEEVEIELLHEFETIPVLSVELSPEDVDALELDPAISYIEEDAEVTTMAQSVPWGISRVQAPAAHRRRLTGRGVKVAVLDTGISTHPDLNIRGGASFVPGEPSTQDGNGHGTHVAGTIAALDNSIGVLGVAPSAELYAVKVLGASGSGSVSSIAQGLEWAGNNGMHVANLSLGSPSPSATLEQAVNSATSRGVLVVAASGNSGAGSISYPARYANAMAVGATDQNNNRASFSQYGAGLDLVAPGVNVQSTYPGSTYASLNGTSMATPHVAGAAALVKQKNPSWSNVQIRNRLKNTATSLGSTNLYGSGLVNAEAATR

SEQ ID NO: 63741 - protein, 380 aa, Unidentified
VRSKKLWIVASTALLISVAFSSSIASAAEEAKEKYLIGFNEQEAVSEFVEQVEANDEVAILSEEEEVEIELLHEFETIPVLSVELSPEDVDALELDPAISYIEEDAEVTTMAQSVPWGISRVQAPAAHRRGLTGRGVKVAVLDTGISTHPDLNIRGGASFVPGEPSTQDGNGHGTHVAGTIAALDNSIGVLGVAPSAELYAVKVLGASGSGSVSSIAQGLEWAGNNGMHVANLSLGSPSPSATLEQAVNSATSRGVLVVAASGNSGAGSISYPARYANAMAVGATDQDNNRASFSQYGAGLDIVAPGVNVQSTYPQSTYASLNGTSMATPHVAGAAALVKQKNPSWSNVQIRNRLKNTATSLGSTNLYGSGLVNAEAATR

SEQ ID NO: 63742 - protein, 380 aa, Unidentified
VRSKKLWIVASTALLISVAFSSSIASAAEEAKEKYLIGFNEQEAVSEFVEQVEANDEVAILSEEEEVEIELLHEFETIPVLSVELSPEDVDALELDPAISYIEEDAEVTTMAQSVPWGISRVQAPAAHRRGLRGRGVKVAVLDTGISTHPDLRIRGGASFVPGEPSTQDGNGHGTHVAGTIAALDNSIGVLGVAPSAELYAVKVLGASGSGSVSSIAQGLEWAGNNGMHVANLSLGSPSPSATLEQAVNSATSRGVLVVAASGNSGAGSISYPARYANAMAVGATDQNNNRASFSQYGAGLDIVAPGVNVQSTYPGSTYASLNGTSMATPHVAGAAALVKQKNPSWSNVQIRNRLKNTATSLGSTNLYGSGLVNAEAATR

SEQ ID NO: 63743 - protein, 380 aa, Unidentified
VRSKKLWIVASTALLISVAFSSSIASAAEEAKEKYLIGFNEQEAVSEFVEQVEANDEVAILSEEEEVEIELLHEFETIPVLSVELSPEDVDALELDPAISYIEEDAEVTTMAQSVPWGISRVQAPAAHRRGLTGRGVKVAVLDTGISTHPDLDIRGGASFVPGEPSTQDGNGHGTHVAGTIAALDNSIGVLGVAPSAELYAVKVLGASGSGSVSSIAQGLEWAGNNGMHVANLSLGSPSPSATLEQAVNSATSRGVLVVAASGNSGAGSISYPARYANAMAVGATDQNNNRASFSQYGAGLDIVAPGVNVQSTYPGSTYASLNGTSMATPHVAGAAALVKQKNPSWSNVQIRNRLKNTATSLGSTNLYGSGLVRAEAATR

SEQ ID NO: 63744 - protein, 380 aa, Unidentified
VRSKKLWIVASTALLISVAFSSSIASAAEEAKEKYLIGFNEQEAVSEFVEQVEANDEVAILSEEEEVEIELLHEFETIPVLSVELSPEDVDALELDPAISYIEEDAEVTTMAQSVPWGISRVQAPAAHNRGLTGSGVKVAVLDTGISTHPDLNIRGGASFVPGEPSTQDGNGHGTHVAGTIAALDNSIGVLGVAPSAELYAVKVLGASGGGAISSIAQGLEWAGNNGMHVANLSLGSPSPSATLEQAVNSATSRGVLVVAASGNSGAGSISYPARYANAMAVGATDQNNNRASFSQYGAGLDIVAPGVNVQSTYPGSTYASLNGTSQATPHVAGAAVLVKQKNPSWSNVRIRNHLKNTATSLGSTNLYGSGLVNAEAATR

SEQ ID NO: 63745 - protein, 380 aa, Unidentified
VRSKKLWIVASTALLISVAFSSSIASAAEEAKEKYLIGFNEQEAVSEFVEQVEANDEVAILSEEEEVEIELLHEFETIPVLSVELSPEDVDALELDPAISYIEEDAEVTTMAQSVPWGISRVQAPAAHNRGLTGSGVKVAVLDTGISTHPDLNIRGGASFVPGEPSTQDGNGHGTHVAGTIAALNNSIGVLGVAPSAELYAVKVLGASGGGAISSIAQGLEWAGNNGMHVANLSLGSPSPSATLEQAVNSATSRGVLVVAASGNSGAGSISYPARYANAMAVGATDQNNNRASFSQYGAGLDIVAPGVNVQSTYPGFTYASLNGTSMATPHVAGAAVLVKQKNPSWSNVRIRNHLKNTATSLGSTNLYGSGLVNAEAATR

SEQ ID NO: 63746 - protein, 380 aa, Unidentified
VRSKKLWIVASTALLISVAFSSSIASAAEEAKEKYLIGFNEQEAVSEFVEQVEANDEVAILSEEEEVEIELLHEFETIPVLSVELSPEDVDALELDPAISYIEEDAEVTTMAQSVPWGISRVQAPAAHNRGLTGSGFKVAVLDTGISTHPDLNIRGGRSFVPGEPSTQDGNGHGTHVAGTIAALNNSIGVLGVAPSAELYAVKVLGASGSGSVTSIAQGLEWAGNNGMHVANLSLGSPSPSATLEQAVNSATSRGVLVVAASGNSGAGSISYPARYANAMAVGATDQNNNRASFSQYGAGLDIVAPGVNVQSTYPGSAYASLDGTSMAAPHVAGAAALVKQKNPSWSNVQIRNHLKNTATSLGSTNLYGSGLVNAEAATR

SEQ ID NO: 63747 - protein, 380 aa, Unidentified
VRSKKLWIVASTALLISVAFSSSIASAAEEAKEKYLIGFNEQEAVSEFVEQVEANDEVAILSEEEEVEIELLHEFETIPVLSVELSPEDVDALELDPAISYIEEDAEVTTMAQSVPWGISRVQAPAAHNRRLTGSGVKVAVLDTGISTHPDLNIRGGASFVPGEPSTQDGNGHGTHVAGTIAALNNSIGVLGVAPSAELYAVKVLGASGGGAISSIAQGLEWAGNNGMHVANLSLGSPSPSATLEQAVNSATSRGVLVVAASGNSGAGSISYPARYANAMAVGATDQNNNRASFSQYGAGLDIVAPGVNVQSTYPGSTYASLNGTSMATPHVAGAAVLVKQKNPSWSNVRIRNHLKNTATSLGSTNLYGSGLVNAEAATR

SEQ ID NO: 63748 - protein, 380 aa, Unidentified
VRSKKLWIVASTALLISVAFSSSIASAAEEAKEKYLIGFNEQEAVSEFVEQVEANDEVAILSEEEEVEIELLHEFETIPVLSVELSPEDVDALELDPAISYIEEDAEVTTMAQSVPWGISRVQAPAAHRRGLTGRGVKVAVLDTGISTHPDLNIRGGASFVPGEPSTQDGNGHGTHVAGTIAALDNSIGVLGVAPSAELYAVKVLGASGSGSVSSIAQGLEWAGNNGMHVANLSLGSPSPSATLEQAVNSATSRGVLVVAASGNSGAGSISYPARYANAMAVGATDQDNNRASFSQYGAGLDIVAPGVNVQSTYPGSTYFSLNGTSMATPHVAGAAALVKQKNPSWSNVQIRNRLKNTATSLGSTNLYGSGLVNAEAATR

SEQ ID NO: 63749 - protein, 380 aa, Unidentified
VRSKKLWIVASTALLISVAFSSSIASAAEEAKEKYLIGFNEQEAVSEFVEQVEANDEVAILSEEEEVEIELLHEFETIPVLSVELSPEDVDALELDPAISYIEEDAEVTTMAQSVPWGISRVQAPAAHNRGLTGSGVKVAVLDTGISTHPDLRIRGGASFVPGEPSTQDGNGHGTHVAGTIAALNNSIGVLGVAPSAELYAVKVLGASGGGAISSIAQGLEWAGNNGMHVANLSLGSPSPSATLEQAVNSATSRGVLVVAASGNSGAGSISYPARYANAMAVGATDQNNNRASFSQYGAGLDIVAPGVNVQSTYPGSTYASLNGTSMATPHVAGAAALVKQKNPSWSNVRIRNRLKNTATSLGSTNLYGSGLVNAEAATR

SEQ ID NO: 63750 - protein, 380 aa, Unidentified
VRSKKLWIVASTALLISVAFSSSIASAAEEAKEKYLIGFNEQEAVSEFVEQVEANDEVAILSEEEEVEIELLHEFETIPVLSVELSPEDVDALELDPAISYIEEDAEVTTMAQSVPWGISRVQAPAAHRRGLWGRGVKVAVLDTGISTHPDLNIRGGASFVPGEPSTQDGNGHGTHVAGTIAALDNSIGVLGVAPSAELYAVKVLGASGSGSVSSIAQGLEWAGANGMHVANLSLGSPSPSATLEQAVNSATSRGVLVVAASGNSGAGSISYPARYANAMAVGATDQNNNRASFSQYGAGLDIVAPGVNVQSTYPGSTYASLNGTSMATPHVAGAAALVKQKNPSWSNVQIRNRLKNTATSLGSTNLYGSGLVNAEAATR

SEQ ID NO: 63751 - protein, 380 aa, Unidentified
VRSKKLWIVASTALLISVAFSSSIASAAEEAKEKYLIGFNEQEAVSEFVEQVEANDEVAILSEEEEVEIELLHEFETIPVLSVELSPEDVDALELDPAISYIEEDAEVTTMAQSVPWGISRVQAPAAHNRKLTASGVKVAVLDTGISTHPDLNIRGGASFVPGEPSTQDGEGHGTHVAGTIAALNNSIGVLGVAPSAELYAVKVLGASGSGSVSSIAQGLEWAGLNGMHVANLSLGSPSPSATLEQAVNSATSRGVLVVAASGNSGAGSISYPARYANAMAVGATDQNNNRADFSQYGAGLDIVAPGVNVQSTYPGSAYASLNGTSMATPHVAGAAALVKQKNPSWSNVQIRNHLKNTATSLGSTNLYGSGLVNAEAATR

SEQ ID NO: 63752 - protein, 380 aa, Unidentified
VRSKKLWIVASTALLISVAFSSSIASAAEEAKEKYLIGFNEQEAVSEFVEQVEANDEVAILSEEEEVEIELLHEFETIPVLSVELSPEDVDALELDPAISYIEEDAEVTTMAQSVPWGISRVQAPAAHRRGLTGRGVKVAVLDTGISTHPDLNIRGGASFVPGEPSTQDGNGHGTHVAGTIAALDNSIGVLGVAPDAELYAVKVLGASGSGSVSSIAQGLEWAGNNGMHVANLSLGSPSPSATLEQAVNSATSRGVLVVAASGNSGAGSISYPARYANAMAVGATDQNNNRASFSQYGAGLDIVAPGVNVQSTYPGSTYASLNGTSMATPHVAGAAALVKQKNPSWRNVQIRNRLKNTATSLGSTNLYGSGLVNAEAATR

SEQ ID NO: 63753 - protein, 380 aa, Unidentified
VRSKKLWIVASTALLISVAFSSSIASAAEEAKEKYLIGFNEQEAVSEFVEQVEANDEVAILSEEEEVEIELLHEFETIPVLSVELSPEDVDALELDPAISYIEEDAEVTTMAQSVPWGISRVQAPAAHRRGLTGRGVKVAVLDTGISTHPDLNIRGGASFVPGEPSTQDGNGHGTHVAGTIAALDNSIGVLGVAPSAELYAVKVLGASGSGSVSSIAQGLEWAGANGMHVANLSLGSPSPSATLEQAVNSATSRGVLVVAASGNSGAGSISYPARYANAMAVGATDQNNNRASFSQYGAGLDIVAPGVNVQSTYPGSAYASLNGTSMATPHVAGAAALVKQKNPSWSNVQIRNRLKNTATSLGSTNLYGSGLVNAEAATR

SEQ ID NO: 63754 - protein, 380 aa, Unidentified
VRSKKLWIVASTALLISVAFSSSIASAAEEAKEKYLIGFNEQEAVSEFVEQVEANDEVAILSEEEEVEIELLHEFETIPVLSVELSPEDVDALELDPAISYIEEDAEVTTMAQSVPWGISRVQAPAAHRRGLRGRGVKVAVLDTGISTHPDLNIRGGASFVPGEPSTQDGNGHGTHVAGTIAALDNSIGVLGVAPSAELYAVKVLGASGSGSVSSIAQGLEWAGNNGMHVANLSLGSPSPSATLEQAVNSATSRGVLVLAASGNSGAGSISYPARYANAMAVGATDQNNNRASFSQYGAGLDIVAPGVNVQSTYPGSTYASLNGTSMATPHVAGAAALVKQKNPSWSNVQIRNRLKNTATSLGSTNLYGSGLVNAEAATR

SEQ ID NO: 63755 - protein, 380 aa, Unidentified
VRSKKLWIVASTALLISVAFSSSIASAAEEAKEKYLIGFNEQEAVSEFVEQVEANDEVAILSEEEEVEIELLHEFETIPVLSVELSPEDVDALELDPAISYIEEDAEVTTMAQSVPWGISRVQAPAAHNRGLTGSGVKVAVLDTGISTHPDLDIRGGASFVPGEPSTQDGNGHGTHVAGTIAALNNSIGVLGVAPSAELYAVKVLGASGGGAISSIAQGLEWAGNNGMHVANLSLGSPSPSATLEQAVNSATSRGVLVVAASGNSGAGSISYPARYANAMAVGATDQNNNRASFSQYGAGLDIVAPGVNVQSTYPGSTYASLNGTSMATPHVAGAAVLVKQKNPSWSNVRIRNHLKNTATSLGSTNLYGSGLVNAEAATR

SEQ ID NO: 63756 - protein, 380 aa, Unidentified
VRSKKLWIVASTALLISVAFSSSIASAAEEAKEKYLIGFNEQEAVSEFVEQVEANDEVAILSEEEEVEIELLHEFETIPVLSVELSPEDVDALELDPAISYIEEDAEVTTMAQSVPWGISRVQAPAAHNRRLTGSGVKVAVLDTGISTHPDLNIRGGASFVPGEPSTQDGNGHGTHVAGTIAALNNSIGVLGVAPSAELYAVKVLGASGGGALSSIAQGLEWAGNNGMHVANLSLGSPSPSATLEQAVNSATSRGVLVVAASGNSGAGSISYPARYANAMAVGATDQNNNRASFSQYGAGLDIVAPGVNVQSTYPGSTYASLNGTSMATPHVAGAAVLVKQKNPSWSNVRIRNHLKNTATSLGSTNLYGSGLVNAEAATR

SEQ ID NO: 63757 - protein, 380 aa, Unidentified
VRSKKLWIVASTALLISVAFSSSIASAAEEAKEKYLIGFNEQEAVSEFVEQVEANDEVAILSEEEEVEIELLHEFETIPVLSVELSPEDVDALELDPAISYIEEDAEVTTMAQSVPWGISRVQAPAAHRRRLTGRGVKVAVLDTGISTHPDLNIRGGASFVPGEPSTQDGNGHGTHVAGTIAALDNSIGVLGVAPSAELYAVKVLGASGSGSVSSIAQGLEWAGNNGMHVANLSLGSPSPSATLEQAVNSATSRGVLVVAASGNSGAGSISYPARYANAMAVGATDQNNNRASFSQYGAGLDIVAPGVNVQSTYPQSTYASLNGTSMATPHVAGAAALVKQKNPSWSNVQIRNRLKNTATSLGSTNLYGSGLVNAEAATR

SEQ ID NO: 63758 - protein, 380 aa, Unidentified
VRSKKLWIVASTALLISVAFSSSIASAAEEAKEKYLIGFNEQEAVSEFVEQVEANDEVAILSEEEEVEIELLHEFETIPVLSVELSPEDVDALELDPAISYIEEDAEVTTMAQSVPWGISRVQAPAAHNRGLTGSGVKVAVLDTGISTHPDLNIRGGASFVPGEPSTQDGNGHGTHVAGTIAALDNSIGVLGVAPSAELYAVKVLGASGSGAISSIAQGLEWAGNNGMHVANLSLGSPSPSATLEQAVNSATSRGVLVVAASGNSGAGSISYPARYANAMAVGATDQNNNRASFSQYGAGLDIVAPGVNVQSTYPGPTYASLNGTSMATPHVAGAAALVKQKNPSWSNVLIRNHLKNTATSLGSTNLYGSGLVNAVAATR

SEQ ID NO: 63759 - protein, 380 aa, Unidentified
VRSKKLWIVASTALLISVAFSSSIASAAEEAKEKYLIGFNEQEAVSEFVEQVEANDEVAILSEEEEVEIELLHEFETIPVLSVELSPEDVDALELDPAISYIEEDAEVTTMAQSVPWGISRVQAPAAHNRGLTGSGVKVAVLDTGISTHPDLNIRGGASFVPGEPSTQDGNGHGTHVAGTIAALNNSIGVLGVAPSAELYAVKVLGASGGGAISSIAQGLEWAGNNGMHVANLSLGSPSPSATLEQAVNSATSRGVLVLAASGNSGAGSISYPARYANAMAVGATDQNNNRASFSQYGAGLDIVAPGVNVQSTYPGSTYASLNGTSMATPHVAGAAVLVKQKNPSWSNVRIRNHLKNTATSLGSTNLYGSGLVNAEAATR

SEQ ID NO: 63760 - protein, 380 aa, Unidentified
VRSKKLWIVASTALLISVAFSSSIASAAEEAKXKYLIGFNEQEAVSEFVEQVEANDEVAILSEEEEVEIELLHEFETIPVLSVELSPEDVDALELDPAISYIEEDAEVTTMAQSVPWGISRVQAPAAHNRGLTGSGVKVAVLDTGISTHPDLNIRGGASFVPGEPSTQDGNGHGTHVAGTIAALNNSIGVLGVAPNAELYAVKVLGASGSGSVSSIAQGLEWAGNNVMHVANLSLGLQAPSATLEQAVNSATSRGVLVVAASGNSGAGSISYPARYANAMAVGATDQNNNRASFSQYGAGLDIVAPGVNVQSTYPGSTYASLNGTSMATPHVAGAAALVKQKNPSWSNVQIRNHLKNTATSLGSTNLYGSGLVNAEAATR

SEQ ID NO: 63761 - protein, 380 aa, Unidentified
VRSKKLWIVASTALLISVAFSSSIASAAEEAKEKYLIGFNEQEAVSEFVEQVEANDEVAILSEEEEVEIELLHEFETIPVLSVELSPEDVDALELDPAISYIEEDAEVTTMAQSVPWGISRVQAPAAHNRRLWGSGVKVAVLDTGISTHPDLNIRGGASFVPGEPSTQDGNGHGTHVAGTIAALNNSIGVLGVAPSAELYAVKVLGASGSGAISSIAQGLEWAGNNGMHVANLSLGSPSPSATLEQAVNSATSRGVLVVAASGNSGAGSISYPARYANAMAVGATDQNNNRASFSQYGAGLDIVAPGVNVQSTYPGSTYASLNGTSMATPHVAGAAVLVKQKNPSWSNVRIRNHLKNTATSLGSTNLYGSGLVNAEAATR

SEQ ID NO: 63762 - protein, 380 aa, Unidentified
VRSKKLWIVASTALLISVAFSSSIASAAEEAKEKYLIGFNEQEAVSEFVEQVEANDEVAILSEEEEVEIELLHEFETIPVLSVELSPEDVDALELDPAISYIEEDAEVTTMAQSVPWGISRVQAPAAHNRGLTGSGVKVAVLDTGISTHPDLNIRGGASFVPGEPSTQDGEGHGTHVAGTIAALNNSIGVLGVAPSAELYAVKVLGASGSGSLSSIAQGLEWAGNNGMHVANLSLGSPSPSATLEQAVNSATSRGVLVVAASGNSGEGSISYPARYANAMAVGATDQNNNHADFSQYGAGLDIVAPGVNVQSTYPGSTYASLNGTSMATPHVAGAAALVKQKNPSWSNVQIRNRLKNTATSLGSTNLYGSGLVNAEAATR

SEQ ID NO: 63763 - protein, 380 aa, Unidentified
VRSKKLWIVASTALLISVAFSSSIASAAEEAKEKYLIGFNEQEAVSEFVEQVEANDEVAILSEEEEVEIELLHEFETIPVLSVELSPEDVDALELDPAISYIEEDAEVTTMAQSVPWGISRVQAPAAHNRGLTGSGVKVAVLDTGISTHPDLNIRGGASFVPGEPSTQDGNGHGTHVAGTIAALNNSIGVLGVAPSAELYAVKVLGASGSGAVSSIAQGLEWAGNNGMHVANLSLGSPSPSATLEQAVNSATSRGVLVVAASGNSGAESISYPARYANAMAVGATDQNNNRASFSQYGAGLDIVAPGVNVQSTYPGSTYASLNGTSMATPHVAGAAVLVKQKNPSWSNVRIRDRLKNTATSLGSTNLYGSGLVNAEAATR

SEQ ID NO: 63764 - protein, 380 aa, Unidentified
VRSKKLWIVASTALLISVAFSSSIASAAEEAKEKYLIGFNEQEAVSEFVEQVEANDEVAILSEEEEVEIELLHEFETIPVLSVELSPEDVDALELDPAISYIEEDAEVTTMAQSVPWGISRVQAPAAHNRGLTGSGVKVAVLDTGISTHPDLNIRGGRSFVPGEPSTQDGNGHGTHVAGTIAALNNNIGVLGVAPSAELYAVKVLGASGSGSVSSIAQGLEWAGLNGMHVANLSLGSPSPSATLEQAVNSATSRGVLVVAASGNSGAGSISYPARYANAMAVGATDQNNERASFSQYGAGLDIVAPGVNVQSTYPGSTYASENGTSMATPHVAGAAALVKQKNGSWSNVQIRNHLKNTATSLGSTNLYGSGLVNAEAATR

SEQ ID NO: 63765 - protein, 380 aa, Unidentified
VRSKKLWIVASTALLISVAFSSSIASAAEEAKEKYLIGFNEQEAVSEFVEQVEANDEVAILSEEEEVEIELLHEFETIPVLSVELSPEDVDALELDPAISYIEEDAEVTTMAQSVPWGISRVQAPAAHNRGLTGSGVKVAVLDTGISTHPDLNIRGGASFVPGEPSTQDGNGHGTHVAGTIAALNNSIGVLGVAPSAELYAVKVLGASGSGSLSSIAQGLEWAGNNGMHVANLSLGSPSPSATLEQAVNSATSRGVLVVAASGNSGEGSISYPARYANAMAVGATDQNNNHADFSQYGAGLDIVAPGVNVQSTYPGSTYASLNGTSMATPHVAGAAALVKQKNPSWSNVQIRNRLKNTATSLGSTNLYGSGLVNAFAATR

SEQ ID NO: 63766 - protein, 380 aa, Unidentified
VRSKKLWIVASTALLISVAFSSSIASAAEEAKEKYLIGFNEQEAVSEFVEQVEANDEVAILSEEEEVEIELLHEFETIPVLSVELSPEDVDALELDPAISYIEEDAEVTTMAQSVPWGISRVQAPAAHRRGLTGSGVKVAVLDTGISTHPDLNIRGGASFVPGEPSTQDGNGHGTHVAGTIAALDNSIGVLGVAPSAELYAVKVLGASGGGAISSIAQGLEWAGNNGMHVANLSLGSPSPSATLEQAVNSATSRGVLVVAASGNSGAGSISYPARYANAMAVGATDQNNNRASFSQYGAGLDIVAPGVNVQSTYPGSTYASLNGTSMATPHVAGAAALVKQKNPSWSNVRIRNHLKNTATSLGSTNLYGSGLVNAEAATR

SEQ ID NO: 63767 - protein, 380 aa, Unidentified
VRSKKLWIVASTALLISVAFSSSIASAAEEAKEKYLIGFNEQEAVSEFVEQVEANDEVAILSEEEEVEIELLHEFETIPVLSVELSPEDVDALELDPAISYIEEDAEVTTMAQSVPWGISRVQAPAAHNRGLTGRGVKVAVLDTGISTHPDLNIRGGASFVPGEPSTQDGNGHGTHVAGTIAALNNSIGVLGVAPSAELYAVKVLGASGGGAISSIAQGLEWAGNNGMHVANLSLGSPSPSATLEQAVNSATSRGVLVVAASGNSGAGSISYPARYANAMAVGATDQNNNRASFSQYGAGLDIVAPGVNVQSTYPGSTYASLNGTSMATPHVAGAAVLVKQKNPSWSNVRIRNHLKNTATSLGSTNLYGSGLVNAEAATR

SEQ ID NO: 63768 - protein, 380 aa, Unidentified
VRSKKLWIVASTALLISVAFSSSIASAAEEAKEKYLIGFNEQEAVSEFVEQVEANDEVAILSEEEEVEIELLHEFETIPVLSVELSPEDVDALELDPAISYIEEDAEVTTMAQSVPWGISRVQAPAAHNRGLTAFGVKVAVLDTGISTHPDLNIRGGASFVPGEPSTQDGNGHGTHVAGTIAALNNSIGVLGVAPSAELYAVKVLGASGSGSVSSIAQGLEWAGLNRMHVANLSLGSPSPSATLEQAVNSATSRGVLVVAASGNSGAGSISYPARYANAMAVGATDQNNNRADFSQYGAGLDIVAPGVNVQSTYPGSAYASLNGTSMATPHVAGAAALVKQKNPSWSNVQIRNHLKNTATSLGSTNLYGSGLVNAEAATR

SEQ ID NO: 63769 - protein, 380 aa, Unidentified
VRSKKLWIVASTALLISVAFSSSIASAAEEAKEKYLIGFNEQEAVSEFVEQVEANDEVAILSEEEEVEIELLHEFETIPVLSVELSPEDVDALELDPAISYIEEDAEVTTMAQSVPWGISRVQAPAAHRRGLTGSGVKVAVLDTGISTHPDLRIRGGASFVPGEPSTQDGNGHGTHVAGTIAALDNSIGVLGVAPSAELYAVKVLGASGSGSVSSIAQGLEWAGNNGMHVANLSLGSPSPSATLEQAVNSATSRGVLVVAASGNSGAGSISYPARYANAMAVGATDQNNNRASFSQYGAGLDIVAPGVNVQSTYPGSTYASLNGTSMATPHVAGEAALVKQKNPSWRNVQIRNRLKNTATSLGSTNLYGSGLVNAEAATR

SEQ ID NO: 63770 - protein, 380 aa, Unidentified
VRSKKLWIVASTALLISVAFSSSIASAAEEAKEKYLIGFNEQEAVSEFVEQVEANDEVAILSEEEEVEIELLHEFETIPVLSVELSPEDVDALELDPAISYIEEDAEVTTMAQSVPWGISRVQAPAAHRRGLTGRGVKVAVLDTGISTHPDLNIRGGASFVPGEPSTQDGNGHGTHVAGTIAALDNSIGVLGVAPSAELYAVKVLGASGSGSVSSIAQGLEWAGNNGMHVANLSLGSPSPSATLEQAVNSATSRGVLVVAASGNSGAGSISYPARYANAMAVGATDQDNNRASFSQYGAGLDIVAPGVNVQSTYPGSAYASLNGTSMATPHVAGAAALVKQKNPSWSNVQIRNRLKNTATSLGSTNLYGSGLVNAEAATR

SEQ ID NO: 63771 - protein, 380 aa, Unidentified
VRSKKLWIVASTALLISVAFSSSIASAAEEAKEKYLIGFNEQEAVSEFVEQVEANDEVAILSEEEEVEIELLHEFETIPVLSVELSPEDVDALELDPAISYIEEDAEVTTMAQSVPWGISRVQAPAAHNRGLTGRGVKVAVLDTGISTHPDLNIRGGASFVPGEPSTQDGNGHGTHVAGTIAALDNSIGVLGVAPSAELYAVKVLGASGGGSISSIAQGLEWAGNNGMHVANLSLGSPSPSATLEQAVNSATSRGVLVVAASGNSGAGSISYPARYANAMAVGATDQNNNRASFSQYGAGLDIVAPGVNVQSTYPGSTYASLNGTSMATPHVAGAAVLVKQKNPSWSNVQIRNRLKNTATSLGSTNLYGSGLVNAEAATR

SEQ ID NO: 63772 - protein, 380 aa, Unidentified
VRSKKLWIVASTALLISVAFSSSIASAAEEAKEKYLIGFNEQEAVSEFVEQVEANDEVAILSEEEEVEIELLHEFETIPVLSVELSPEDVDALELDPAISYIEEDAEVTTMAQSVPWGISRVQAPAAHNRGLTGSGVKVAVLDTGISTHPDLRIRGGASFVPGEPSTQDGNGHGTHVAGTIAALNNSIGVLGVAPSAELYAVKVLGASGAGSVSSIAQGLEWAGANGMHVANLSLGSPSPSATLEQAVNSATSRGVLVVAASGNSGAGSISYPARYANAMAVGATDQNNNRASFSQYGAGLDIVAPGVNVQSTYPGSAYFSLNGTSMATPHVAGAAALVKQKNPSWSNVQIRNHLKNTATSLGSTNLYGSGLVRAEAATR

SEQ ID NO: 63773 - protein, 380 aa, Unidentified
VRSKKLWIVASTALLISVAFSSSIASAAEEAKEKYLIGFNEQEAVSEFVEQVEANDEVAILSEEEEVEIELLHEFETIPVLSVELSPEDVDALELDPAISYIEEDAEVTTMAQSVPWGISRVQAPAAHNRGLTASGVKVAVLDTGISTHPDLNIRGGASFVPGEPSTQDGEGHGTHVAGTIAALNNSIGVLGVAPSAELYAVKVLGASGSGSVSSIAQGLEWAGLNRMHVANLSLGSPSPSATLEQAVNSATSRGVLVVAASGNSGAGSISYPARYANAMAVGATDQNNNRADFSQYGAGLDIVAPGVNVQSTYPGSTYASLNGTSMATPHVAGAAALVKQKNGSWSNVQIRNHLKNTATSLGSTNLYGSGLVNAEAATR

SEQ ID NO: 63774 - protein, 380 aa, Unidentified
VRSKKLWIVASTALLISVAFSSSIASAAEEAKEKYLIGFNEQEAVSEFVEQVEANDEVAILSEEEEVEIELLHEFETIPVLSVELSPEDVDALELDPAISYIEEDAEVTTMAQSVPWGISRVQAPAAHNRGLTGRGVKVAVLDTGISTHPDLRITGGASFVPGEPSTQDGNGHGTHVAGTIAALNNSIGVLGVAPSAELYAVKVLGASGSGSVSSIAQGLEWAGNNGMHVANLSLGSPSPSATLEQAVNSATSRGVLVVAASGNSGAGSISYPARYANAMAVGATDQNNNRASFSQYGAGLDIVAPGVNVQSTYPGSAYFSLNGTSMATPHVAGAAALVKQKNPSWSNVQIRNHLKNTATSLGSTNLYGSGLVRAEAATR

SEQ ID NO: 63775 - protein, 380 aa, Unidentified
VRSKKLWIVASTALLISVAFSSSIASAAEEAKEKYLIGFNEQEAVSEFVEQVEANDEVAILSEEEEVEIELLHEFETIPVLSVELSPEDVDALELDPAISYIEEDAEVTTMAQSVPWGISRVQAPASHNRGLTGSGVKVAVLDTGISTHPDLNIRGGASFVPGEPSTQDGEGHGTHVAGTIAALNNSIGVLGVAPSAELYAVKVLGASGSGSLSSIAQGLEWAGNNGMHVANLSLGSPSPSATLEQAVNSATSRGVLVVAASGNSGAGSISYPARYANAMAVGATDQNNNHADFSQYGAGLDIVAPGVNVQSTYPGSTYASLNGTSMATPHVAGAAALVKQKNPSWSNVQIRNHLKNTATSLGSTNLYGSGLVNAFAATR

SEQ ID NO: 63776 - protein, 380 aa, Unidentified
VRSKKLWIVASTALLISVAFSSSIASAAEEAKEKYLIGFNEQEAVSEFVEQVEANDEVAILSEEEEVEIELLHEFETIPVLSVELSPEDVDALELDPAISYIEEDAEVTTMAQSVPWGISRVQAPAAHNRGLTGSGVKVAVLDTGISTHPDLNIRGGASFVPGEPSTQDGEGHGTHVAGTIAALNNSIGVLGVAPSAELYAVKVLGASGSGSLSSIAQGLEWAGNNGMHVANLSLGSPSPSATLEQAVNSATSRGVLVVAASGNSGEGSISYPARYANAMAVGATDQNNNRADFSQYGAGLDIVAPGVNVQSTYPGSTYASLNGTSMATPHVAGAAALVKQKNPSWSNVQIRNRLKNTATSLGSTNLYGSGLVNAFAATR

SEQ ID NO: 63777 - protein, 380 aa, Unidentified
VRSKKLWIVASTALLISVAFSSSIASAAEEAKEKYLIGFNEQEAVSEFVEQVEANDEVAILSEEEEVEIELLHEFETIPVLSVELSPEDVDALELDPAISYIEEDAEVTTMAQSVPWGISRVQAPAAHNRGLTGSGVKVAVLDTGISTHPDLNIRGGASFVPGEPSTQDGNGHGTHVAGTIAALNNSIGVLGVAPSAELYAVKVLGASGGGAISSIAQGLEWAGNNGMHVANLSLGSPSPSATLEQAVNSATSRGVLVVAASGNSGAGSISYPARYANAMAVGATDQNNNRASFSQYGAGLDIVAPGVNVQSTYPGSTYASLNGTSMATPHVAGAAVLVKQKNPSWSNVRIRDHLKNTATSLGSTNLYGSGLVNAEAATR

SEQ ID NO: 63778 - protein, 379 aa, Unidentified
VRSKKLWIVASTALLISVAFSSSIASAAEEAKEKYLIGFNEQEAVSEFVEQVEANDEVAILSEEEEVEIELLHEFETIPVLSVELSPEDVDALELDPAISYIEEDAEVTTMAQSVPWGISRVQAPAAHRRRLTGRGVKVAVLDTGISTHPDLDITGGASFVPGEPSTQDGNGHGTHVAGTIAALNNSIGVLGVAPSAELYAVKVLGASGSGSVSSIAQGLEWAGNNGMHVANLSLGSPSPSATLEQAVNSATSRGVLVVAASGNSGAGSISYPARYANAMAVGATDQNNNRASFSQYGAGLDIVAPGVNVQSTYPGSTYASLNGTSMATPHVAGAAAVKQKNPSWRNVQIRNHLKNTATSLGSTNLYGSGLVNAEAATR

SEQ ID NO: 63779 - protein, 379 aa, Unidentified
RSKKLWIVASTALLISVAFSSSIASAAEEAKEKYLIGFNEQEAVSEFVEQVEANDEVAILSEEEEVEIELLHEFETIPVLSVELSPEDVDALELDPAISYIEEDAEVTTMAQSVPWGISRVQAPAAHNRGLTGSGVKVAVLDTGISTHPDLNIRGGASFVPGEPSTQDGNGHGTHVAGTIAALNNSIGVLGVAPSAELYAVKVLGASGGGAISSIAQGLEWAGNNGMHVANLSLGSPSPSATLEQAVNSATSRGVLVVAASGNSGADSISYPARYANAMAVGATDQNNNRASFSQYGAGLDIVAPGVNVQSTYPGSTYASLNGTSMATPHVAGAAVLVKQKNPSWSNVRIRDHLKNTATSLGSTNLYGSGLVNAEAATR

SEQ ID NO: 63780 - protein, 262 aa, Unidentified
VADVHAFDANGLYVHNSGVKVAVLDTGISTHPDLNIRGGASFVPGEPSTQDGNGHGTHVAGTIAALNNSIGVLGVAPSAELYAVKVLGASGSGSVSSIAQGLEWAGNNGMHVANLSLGSPSPSATLEQAVNSATSRGVLVVAASGNSGAGSISYPARYANAMAVGATDQNNNRASFSQYGAGLDIVAPGVNVQSTYPGSTYASLNGTSMATPHVAGAAALVKQKNPSWSNVQIRNHLKNTATSLGSTNLYGSGLVNAEAATR

SEQ ID NO: 63781 - protein, 262 aa, Unidentified
VSKYHNFVANNIICHNSGVKVAVLDTGISTHPDLNIRGGASFVPGEPSTQDGNGHGTHVAGTIAALNNSIGVLGVAPSAELYAVKVLGASGSGSVSSIAQGLEWAGNNGMHVANLSLGSPSPSATLEQAVNSATSRGVLVVAASGNSGAGSISYPARYANAMAVGATDQNNNRASFSQYGAGLDIVAPGVNVQSTYPGSTYASLNGTSMATPHVAGAAALVKQKNPSWSNVQIRNHLKNTATSLGSTNLYGSGLVNAEAATR

SEQ ID NO: 63782 - protein, 260 aa, Bacillus licheniformis
AEEAKEKYLIGFNEQEAVSEFVEQVEANDEVAILSEEEEVEIELLHEFETIPVLSVELSPEDVDALELDPAISYIEEDAEVTTMAQSVPWGISRVQAPAAHNRGLTGSGVKVAVLDTGISTHPDLNIRGGASFVPGEPSTQDGNGHGTHVAGTIAALNNSIGVLGVAPSAELYAVKVLGASGSGSVSSIAQGLEWAGNNGMHVANLSLGSPSPSATLEQAVNSATSRGVLVVAASGNSGAGCLSLDTMVVTNGKAIEIRD

SEQ ID NO: 63783 - protein, 274 aa, Bacillus clausii
AQTVPYGIPLIKADKVQAQGFKGANVKVAVLDTGIQASHPDLNVVGGASFVAGEAYNTDGNGHGTHVSGTVAALDNNIGVLGVAPSVSLYAVKVLNSFGLGTISGIVSGIEWATTNGMDVINMSLGSPSGSTAMKQAVDNAYARGVVVVAAAGNSGSSGNTNTIRYPAKYDSVIAVGAVDSNSQRASFSSVGAELEVMAPGVGVYSTYPTNTYKTLSGTSMASPHVAGAAALILSKHPNLSASQVRNRLSSTATYLGPSFYYGKGLINVEAAAQ

SEQ ID NO: 63784 - protein, 274 aa, Bacillus clausii
AQTVPYGIPLIKADKVQAQGFKGANVKVAVLDTGIQASHPDLNVVGGASFVAGEAYNTDGNGHGTHVSGTVAALDNNIGVLGVAPSVSLYAVKVLNSFGLGSYSGIVSGIEWATTNGMDVINMSLGSPSGSTAMKQAVDNAYARGVVVVAAAGNEGSSGNTNTIRYPAKYDSVIAVGAVDSNSQRASFSSVGPELEVMAPGVGVYSTYPTNTYKTLSGTSMASPHVAGAAALILSKHPNLSASQVRNRLSSTATYLGPSFYYGKGLINVEAAAQ

SEQ ID NO: 63785 - protein, 274 aa, Bacillus licheniformis
AQVVPYGIPLIKADKVQAQGFKGANVKVAVLDTGIQASHPDLNVVGGASFVAGEAYNTDGNGHGTHVSGTVAALDNNIGVLGVAPSVSLYAVKVLNSSGSGSYSGIVSGIEWATTNGMDVINISLGSPSGSTAMKQAVDNAYARGVVVVAAAGNSGSSGKTNTIQYPAKYDSVIAVGAVDSNSQRASFSSVGAELEVMAPGVGVYSTYPPNTYATLSGTSMASPHVAGAAALILSKHPNLSGSQVRNRLSSTATYLGPSFYYGKGLINVEAAAQ

SEQ ID NO: 63786 - protein, 274 aa, Bacillus clausii
AQTVPYGIPLIKADKVQAQGFKGANVKVAVLDTGIQASHPDLNVVGGASFVAGEAYNTDGNGHGTHVSGTVAALDNNIGVLGVAPSVSLYAVKVLNSFGLGTISGIVSGIEWATTNGMDVINMSLGSPSGSTAMKQAVDNAYARGVVVVAAAGNSGSSGNTNTIQYPAKYDSVIAVGAVDSNSQRASFSSVGAELEVMAPGVGVYSTYPTNTYKTLSGTSMASPHVAGAAALILSKHPNLSASQVRNRLSSTATYLGPSFYYGKGLINVEAAAQ

SEQ ID NO: 63787 - protein, 274 aa, Bacillus licheniformis
AQTVPYGIPLIKADKVQAQGFKGQNVKVAVLDTGIQASHPDLNVIGGASFVAGEAYNTDGNGHGTHVSGTVAALDNNTGVLGVAPSVSLYAVKVLNSRGSGSYSGIVSGIQWATTNGMDVINISLGGASGSTAMKQAVDNAYARGVVVVAAAGNSGSQGNTNTIEYPAKYDSVIAVGAVDSNSQRAEFSSVGAELEVMAPGAGIYSTYPINTYATLSGTSMASPHVAGAAALILSKHPNLSASQVRNRLSSTATYLGSEFYYGKGLINVEAAAQ

SEQ ID NO: 63788 - protein, 274 aa, Bacillus licheniformis
AQVVPYGIPLIKADKVQAQGFKGANVKVAVLDTGIQASHPDLNVVGGASFVAGEAYNTDGNGHGTHVSGTVAALDNNIGVLGVAPSVSLYAVKVLNSSSSGSYSGIVSGIEWATTNGMDVINISLGSPSGSTAMKQAVDNAYARGVVVVAAAGNSGSSGNTNTIQYPAKYDSVIAVGAVDSNSQRASFSSVGAELEVMAPGVGVYSTYPPNTYATLSGTSMASPHVAGAAALILSKHPNLSGSQVRNRLSSTATYLGDSFYYGKGLINVEAAAQ

SEQ ID NO: 63789 - protein, 274 aa, Bacillus clausii
AQTVPYGIPLIKADKVQAQGFKGANVKVAVLDTGIQASHPDLNVVGGASFVAGEAYNTDGNGHGTHVSGTVAALDNNIGVLGVAPSVSLYAVKVLNSFGLGTISGIVSGIEWATTNGMDVINMSLGSPSGSTAMKQAVDNAYARGVVVVAAAGNSGSSGNTNTIQYPAKYDSVIAVGAVDSNSQRASFSSVGPELEVMAPGVGVYSTYPTNTYATLSGTSMASPHVAGAAALILSKHPNLSASQVRNRLSSTATYLGPSFYYGKGLINVEAAAQ

SEQ ID NO: 63790 - protein, 274 aa, Bacillus licheniformis
AQVVPYGIPLIKADKVQAQGFKGANVKVAVLDTGIQASHPDLNVVGGASFVAGEAYNTDGNGHGTHVSGTVAALDNNIGVLGVAPSVSLYAVKVLNSSSSGSYSGIVSGIEWATTNGMDVINISLGSPSGSTAMKQAVDNAYARGVVVVAAAGNSGSSGNTNTIQYPAKYDSVIAVGAVDSNSQRASFSSVGAELEVMAPGVGVYSTYPPNTYATLSGTSMASPHVAGAAALILSKHPNLSGSQVRNRLSSTATYLGPSFYYGKGLINVEAAAQ

SEQ ID NO: 63791 - protein, 274 aa, Bacillus clausii
AQTVPYGIPLIKADKVQAQGFKGANVKVAVLDTGIQASHPDLNVVGGASFVAGEAYNTDGNGHGTHVSGTVAALDNNIGVLGVAPSVSLYAVKVLNSFGLGTISGIVSGIEWATTNGMDVINMSLGSPSGSTAMKQAVDNAYARGVVVVAAAGNSGSSGNTNTIRYPAKYDSVIAVGAVDSNSQRASFSSVGPELEVMAPGVGVYSTYPTNTYATLSGTSMASPHVAGAAALILSKHPNLSASQVRNRLSSTATYLGPSFYYGKGLINVEAAAQ

SEQ ID NO: 63792 - protein, 273 aa, Bacillus licheniformis
AQTVPYGIPLIKADKVQAQQFKGANVKVAVLDTGIQASHPDLNVVGGASFVAGEAYNTDGNGMPTHVAGTVAALDNTTGVLGVAPSVSLYAVKVLPSSGSGSYSGIVSGPEWATTNGMDVINMSLGGASGSTAMKQAVPPAYAKRVVVVAVGNSGSSGNTNTIGYSAKYESVIAVGAVDSNSNRASFSSVGAELEVMPPGPGVYSTYPTSTYATLNGTSMASPHVAGAAALILSKHPNLSASQVRNRLSSTATYLGSSFYYGKGLINVEAAAQ

SEQ ID NO: 63793 - protein, 382 aa, Unidentified
VRSKKLWISLLFALTLIFTMAFSNMSAQAAEEAKEKYLIGFNEQEAVSEFVEQVEANDEVAILSEEEEVEIELLHEFETIPVLSVELSPEDVDALELDPAISYIEEDAEVTTMAQSVPWGISRVQAPAAHNRGLTGSGVKVAVLDTGISTHPDLNIRGGASFVPGEPSTQDGNGHGTHVAGTIAALDNSIGVLGVAPRAELYAVKVLGASGSGSVSSIAQGLEWAGNNGMHVANLSLGLQAPSATLEQAVNSATSRGVLVVAASGNSGAGSISYPARYANAMAVGATDQNNNRADFSQYGAGLDIVAPGVNVQSTYPGSTYASLNGTSMATPHVAGAAALVKQKNPSWSNVQIRRHLKNTATSLGSTNLYGSGLVNAEAATR

SEQ ID NO: 63794 - protein, 382 aa, unidentified
VRSKKLWISLLFALTLIFTMAFSNMSAQAAEEAKEKYLIGFNEQEAVSEFVEQVEANDGVAILSEEEEVEIELLHEFETIPVLSVELSPEDVDALELDPAISYIEEDAEVTTMAQSVPWGISRVQAPAAHNRGLTGSGVKVAVLDTGISTHPDLNIRGGASFVPGEPSTQDGNGHGTHVAGTIAALNNSIGVLGVAPNAELYAVKVLGASGMGSVSSIAQGLEWAGNNVMHVANLSLGLQAPSATLEQAVNSATSRGVLVVAASGNSGAGSISYPARYANAMAVGATDQNNNRASFSQYGAGLDIVAPGVNVQSTYPGSTYASLNGTSMATPHVAGAAALVKQKNPSWSNVQIRNHLKNTATSLGSTNLYGSGLVNAEAATR

SEQ ID NO: 63795 - protein, 381 aa, Unidentified
RTVSFRLVLMCTLLFVSLPITKTSAVGSAEEAKEKYLIGFNEQEAVSEFVEQVEANDEVAILSEEEEVEIELLHEFETIPVLSVELSPEDVDALELDPAISYIEEDAEVTTMAQSVPWGISRVQAPAAHNRGLTGSGVKVAVLDTGISTHPDLNIRGGASFVPGEPSTQDGNGHGTHVAGTIAALNNSIGVLGVAPSAELYAVKVLGASGSGSVSSIAQGLEWAGNNGMHVANLSLGSPSPSATLEQAVNSATSRGVLVVAASGNSGAGSISYPARYANAMAVGATDQNNNRASFSQYGAGLDIVAPGVNVQSTYPGSTYASLNGTSMATPHVAGAAALVKQKNPSWSNVQIRNHLKNTATSLGSTNLYGSGLVNAEAATR

SEQ ID NO: 63796 - protein, 380 aa, Unidentified
VRSKKLWIVASTALLISVAFSSSIASAAEEAKEKYLIGFNEQEAVSEFVEQVEANDEVAILSEEEEVEIELLHEFETIPVLSVELSPEDVDALELDPAISYIEEDAEVTTMAQSVPWGISRVQAPAAHNRGLTGRGVKVAVLDTGISTHPDLRITGGASFVPGEPSTQDGNGHGTHVAGTIAALNNSIGVLGVAPSAELYAVKVLGASGAGSVSSIAQGLEWAGANGMHVANLSLGSPSPSATLEQAVNSATSRGVLVVAASGNSGAGSISYPARYANAMAVGATDQNNNRASFSQYGAGLDIVAPGVNVQSTYPGSTYFSLNGTSMATPHVAGAAALVKQKNPSWSNVQIRNHLKNTATSLGSTNLYGSGLVRAEAATR

SEQ ID NO: 63797 - protein, 380 aa, Unidentified
VRSKKLWIVASTALLISVAFSSSIASAAEEAKEKYLIGFNEQEAVSEFVEQVEANDEVAILSEEEEVEIELLHEFETIPVLSVELSPEDVDALELDPAISYIEEDAEVTTMAQSVPWGISRVQAPAAHNRRLWGSGVKVAVLDTGISTHPDLNIRGGASFVPGEPSTQDGNGHGTHVAGTIAALNNSIGVLGVAPSAELYAVKVLGASGGGAISSIAQGLEWAGNNGMHVANLSLGSPSPSATLEQAVNSATSRGVLVVAASGNSGAGSISYPARYANAMAVGATDQNNNRASFSQYGAGLDIVAPGVNVQSTYPGSTYASLNGTSMATPHVAGAAVLVKQKNPSWSNVRIRNHLKNTATSLGSTNLYGSGLVNAEAATR

SEQ ID NO: 63798 - protein, 380 aa, Unidentified
VRSKKLWIVASTALLISVAFSSSIASAAEEAKEKYLIGFNEQEAVSEFVEQVEANDEVAILSEEEEVEIELLHEFETIPVLSVELSPEDVDALELDPAISYIEEDAEVTTMAQSVSWGISRVQAPAAHNRGLTGSGVKVAVLDTGISTHPDLNIRGGASFVPGEPSTQDGNGHGTHVAGTIAALNNSIGVLGVAPSAELYAVKVLGASGGGAISSIAQGLEWAGNNGMHVANLSLGSPSPSATLEQAVNSATSRGVLVVAASGNSGAGSISYPARYANAMAVGATDQNNNRASFSQYGAGLDIVAPGVNVQSTYPGSTYASLNGTSMATPHVAGAAVLVKQKNPSWSNVRIRNRLKNTATSLGSTNLYGSGLVNAEAATR

SEQ ID NO: 63799 - protein, 380 aa, Unidentified
VRSKKLWIVASTALLISVAFSSSIASAAEEAKEKYLIGFNEQEAVSEFVEQVEANDEVAILSEEEEVEIELLHEFETIPVLSVELSPEDVDALELDPAISYIEEDAEVTTMAQSVPWGISRVQAPAAHNRGLTGSGVKVAVLDTGISTHPDLNIRGGASFVPGEPSTQDGNGHGTHVAGTIAALNNSIGVLGVAPSAELYAVKVLGASGGGAISSIAQGLEWAGNNGMHVANLSLGSPSPSATLEQAVNSATSRGVLVVAASGNSGARSISYPARYANAMAVGATDQNNNRASFSQYGAGLDIVAPGVNVQSTYPGSTYASLNGTSMATPHVAGAAVLVKQKNPSWSNVRIRDHLKNTATSLGSTNLYGSGLVNAEAATR

SEQ ID NO: 63800 - protein, 380 aa, Unidentified
VRSKKLWIVASTALLISVAFSSSIASAAEEAKEKYLIGFNEQEAVSEFVEQVEANDEVAILSEEEEVEIELLHEFETIPVLSVELSPEDVDALELDPAISYIEEDAEVTTMAQSVPWGISRVQAPAAHRRGLTGRGVKVAVLDTGISTHPDLNIRGGASFVPGEPSTQDGNGHGTHVAGTIAALDNSIGVLGVAPSAELYAVKVLGASGAGSVSSIAQGLEWAGNNGMHVANLSLGSPSPSATLEQAVNSATSRGVLVVAASGNSGAGSISYPARYANAMAVGATDQNNNRASFSQYGAGLDIVAPGVNVQSTYPGSAYFSLNGTSMATPHVAGAAALVKQKNPSWSNVQIRNRLKNTATSLGSTNLYGSGLVNAEAATR

SEQ ID NO: 63801 - protein, 380 aa, Unidentified
VRSKKLWIVASTALLISVAFSSSIASAAEEAKEKYLIGFNEQEAVSEFVEQVEANDEVAILSEEEEVEIELLHEFETIPVLSVELSPEDVDALELDPAISYIEEDAEVTTMAQSVPWGISRVQAPAAHRRGLTGRGVKVAVLDTGISTHPDLNIRGGASFVPGEPSTQDGNGHGTHVAGTIAALDNSIGVLGVAPSAELYAVKVLGASGSGSVSSIAQGLEWAGANGMHVANLSLGSPSPSATLEQAVNSATSRGVLVVAASGNSGAGSISYPARYANAMAVGATDQNNNRASFSQYGAGLDIVAPGVNVQSTYPQSTYFSLNGTSMATPHVAGAAALVKQKNPSWSNVQIRNRLKNTATSLGSTNLYGSGLVNAEAATR

SEQ ID NO: 63802 - protein, 380 aa, Unidentified
VRSKKLWIVASTALLISVAFSSSIASAAEEAKEKYLIGFNEQEAVSEFVEQVEANDEVAILSEEEEVEIELLHEFETIPVLSVELSPEDVDALELDPAISYIEEDAEVTTMAQSVPWGISRVQAPAAHRRGLWGRGVKVAVLDTGISTHPDLNIRGGASFVPGEPSTQDGNGHGTHVAGTIAALDNSIGVLGVAPSAELYAVKVLGASGSGSVSSIAQGLEWAGANGMHVANLSLGSPSPSATLEQAVNSATSRGVLVVAASGNSGAGSISYPARYANAMAVGATDQNNNRASFSQYGAGLDLVAPGVNVQSTYPGSTYASLNGTSMATPHVAGAAALVKQKNPSWSNVQIRNRLKNTATSLGSTNLYGSGLVNAEAATR

SEQ ID NO: 63803 - protein, 380 aa, Unidentified
VRSKKLWIVASTALLISVAFSSSIASAAEEAKEKYLIGFNEQEAVSEFVEQVEANDEVAILSEEEEVEIELLHEFETIPVLSVELSPEDVDALELDPAISYIEEDAEVTTMAQSVPWGISRVQAPAAHNRGLTGSGVKVAVLDTGISTHPDLNIRGGASFVPGEPSTQDGNGHGTHVAGTIAALNNRIGVLGVAPSAELYAVKVLGASGGGAISSIAQGLEWAGNNGMHVANLSLGSPSPSATLEQAVNSATSRGVLVVAASGNSGAGSISYPARYANAMAVGATDQNNNRASFSQYGAGLDIVAPGVNVQSTYPGSTYASENGTSMATPHVAGAAVLVKQKNPSWSNVRIRNHLKNTATSLGSTNLYGSGLVNAEAATR

SEQ ID NO: 63804 - protein, 380 aa, Unidentified
VRSKKLWIVASTALLISVAFSSSIASAAEEAKEKYLIGFNEQEAVSEFVEQVEANDEVAILSEEEEVEIELLHEFETIPVLSVELSPEDVDALELDPAISYIEEDAEVTTMAQSVPWGISRVQAPAAHRRGLWGRGVKVAVLDTGISTHPDLNIRGGASFVPGEPSTQDGNGHGTHVAGTIAALDNSIGVLGVAPSAELYAVKVLGASGSGSVSSIAQGLEWAGNNGMHVANLSLGSPSPSATLEQAVNSATSRGVLVVAASGNSGAGSISYPARYANAMAVGATDQNNNRASFSQYGAGLDLVAPGVNVQSTYPGSAYASLNGTSMATPHVAGAAALVKQKNPSWSNVQIRNRLKNTATSLGSTNLYGSGLVNAEAATR

SEQ ID NO: 63805 - protein, 380 aa, Unidentified
VRSKKLWIVASTALLISVAFSSSIASAAEEAKEKYLIGFNEQEAVSEFVEQVEANDEVAILSEEEEVEIELLHEFETIPVLSVELSPEDVDALELDPAISYIEEDAEVTTMAQSVPWGISRVQAPAAHRRGLWGRGVKVAVLDTGISTHPDLNIRGGASFVPGEPSTQDGNGHGTHVAGTIAALDNSIGVLGVAPSAELYAVKVLGASGAGSVSSIAQGLEWAGNNGMHVANLSLGSPSPSATLEQAVNSATSRGVLVVAASGNSGAGSISYPARYANAMAVGATDQDNNRASFSQYGAGLDIVAPGVNVQSTYPGSTYASLNGTSMATPHVAGAAALVKQKNPSWSNVQIRNRLKNTATSLGSTNLYGSGLVNAEAATR

SEQ ID NO: 63806 - protein, 380 aa, Unidentified
VRSKKLWIVASTALLISVAFSSSIASAAEEAKEKYLIGFNEQEAVSEFVEQVEANDEVAILSEEEEVEIELLHEFETIPVLSVELSPEDVDALELDPAISYIEEDAEVTTMAQSVPWGISRVQAPAAHRRGLTGRGVKVAVLDTGISTHPDLNIRGGASFVPGEPSTQDGNGHGTHVAGTIAALDNSIGVLGVAPSAELYAVKVLGASGGGSISSIAQGLEWAGNNGMHVANLSLGSPSPSATLEQAVNSATSRGVLVVAASGNSGAGSISYPARYANAMAVGATDQNNNRASFSQYGAGLDIVAPGVNVQSTYPGSTYASLNGTSMATPHVAGAAVLVKQKNPSWSNVQIRNRLKNTATSLGSTNLYGSGLVNAEAATR

SEQ ID NO: 63807 - protein, 380 aa, Unidentified
VRSKKLWIVASTALLISVAFSSSIASAAEEAKEKYLIGFNEQEAVSEFVEQVEANDEVAILSEEEEVEIELLHEFETIPVLSVELSPEDVDALELDPAISYIEEDAEVTTMAQSVPWGISRVQAPAAHNRGLTGSGVKVAVLDTGISTHPDLNIRGGASFVPGEPSTQDGNGHGTHVAGTIAALNNSIGVLGVAPSAELYAVKVLGASGGGAISSIAQGLEWAGNNGMHVANLSLGSPSPSATLEQAVNSATSRGVLVLAASGNSGAGSISYPARYANAMAVGATDQNNNRASFSQYGAGLDIVAPGVNVQSTYPGSTYASLNGTSMATPHVAGAAVLVKQKNPSWRNVRIRNHLKNTATSLGSTNLYGSGLVNAEAATR

SEQ ID NO: 63808 - protein, 380 aa, Unidentified
VRSKKLWIVASTALLISVAFSSSIASAAEEAKEKYLIGFNEQEAVSEFVEQVEANDEVAILSEEEEVEIELLHEFETIPVLSVELSPEDVDALELDPAISYIEEDAEVTTMAQSVPWGISRVQAPAAHRRGLTGRGVKVAVLDTGISTHPDLNIRGGASFVPGEPSTQDGNGHGTHVAGTIAALDNSIGVLGVAPSAELYAVKVLGASGSGSVSSIAQGLEWAGANGMHVANLSLGSPSPSATLEQAVNSATSRGVLVVAASGNSGAGSISYPARYANAMAVGATDQDNNRASFSQYGAGLDIVAPGVNVQSTYPQSTYASLNGTSMATPHVAGAAALVKQKNPSWSNVQIRNRLKNTATSLGSTNLYGSGLVNAEAATR

SEQ ID NO: 63809 - protein, 380 aa, Unidentified
VRSKKLWIVASTALLISVAFSSSIASAAEEAKEKYLIGFNEQEAVSEFVEQVEANDEVAILSEEEEVEIELLHEFETIPVLSVELSPEDVDALELDPAISYIEEDAEVTTMAQSVPWGISRVQAPAAHRRGLTGRGVKVAVLDTGISTHPDLNIRGGASFVPGEPSTQDGNGHGTHVAGTIAALDNSIGVLGVAPSAELYAVKVLGASGSGSVSSIAQGLEWAGNNGMHVANLSLGSPSPSATLEQAVNSATSRGVLVVAASGNSGAGSISYPARYANAMAVGATDQNNNRASFSQYGAGLDLVAPGVNVQSTYPQSAYASLNGTSMATPHVAGAAALVKQKNPSWSNVQIRNRLKNTATSLGSTNLYGSGLVNAEAATR

SEQ ID NO: 63810 - protein, 380 aa, Unidentified
VRSKKLWIVASTALLISVAFSSSIASAAEEAKEKYLIGFNEQEAVSEFVEQVEANDEVAILSEEEEVEIELLHEFETIPVLSVELSPEDVDALELDPAISYIEEDAEVTTMAQSVPWGISRVQAPAAHNRKLTAFGVKVAVLDTGISTHPDLNIRGGASFVPGEPSTQDGEGHGTHVAGTIAALNNSIGVLGVAPSAELYAVKVLGASGSGSVSSIAQGLEWAGLNGMHVANLSLGSPSPSATLEQAVNSATSRGVLVVAASGNSGAGSISYPARYANAMAVGATDQNNNRADFSQYGAGLDIVAPGVNVQSTYPGSAYASLNGTSMATPHVAGAAALVKQKNPSWSNVQIRNHLKNTATSLGSTNLYGSGLVNAEAATR

SEQ ID NO: 63811 - protein, 380 aa, Unidentified
VRSKKLWIVASTALLISVAFSSSIASAAEEAKEKYLIGFNEQEAVSEFVEQVEANDEVAILSEEEEVEIELLHEFETIPVLSVELSPEDVDALELDPAISYIEEDAEVTTMAQSVPWGISRVQAPAAHNRGLTGRGVKVAVLDTGISTHPDLNIRGGASFVPGEPSTQDGNGHGTHVAGTIAALNNSIGVLGVAPDAELYAVKVLGASGGGAISSIAQGLEWAGNNGMHVANLSLGSPSPSATLEQAVNSATSRGVLVVAASGNSGAGSISYPARYANAMAVGATDQNNNRASFSQYGAGLDIVAPGVNVQSTYPGSTYASLNGTSMATPHVAGAAVLVKQKNPSWSNVRIRNHLKNTATSLGSTNLYGSGLVNAEAATR

SEQ ID NO: 63812 - protein, 380 aa, Unidentified
VRSKKLWIVASTALLISVAFSSSIASAAEEAKEKYLIGFNEQEAVSEFVEQVEANDEVAILSEEEEVEIELLHEFETIPVLSVELSPEDVDALELDPAISYIEEDAEVTTMAQSVPWGISRVQAPAAHNRGLAGSGVKVAVLDTGISTHPDLNIRGGASFVPGEPSTQDGNGHGTHVAGTIAALNNSIGVLGVAPSAELYAVKVLGASGSGAISSIAQGLEWAGNNGMHVANLSLGSPSPSATLEQAVNSATSRGVLVVAASGNSGADSISYPARYANAMAVGATDQNNNRADFSQYGAGLDIVAPGVNVQSTYPGSTYASLNGTSMATPHVAGAAVLVKQKNPSWSNVQIRDHLKNTATSLGSTNLYGSGLVNAEAATR

SEQ ID NO: 63813 - protein, 380 aa, Unidentified
VRSKKLWIVASTALLISVAFSSSIASAAEEAKEKYLIGFNEQEAVSEFVEQVEANDEVAILSEEEEVEIELLHEFETIPVLSVELSPEDVDALELDPAISYIEEDAEVTTMAQSVPWGISRVQAPAAHRRRLTGRGVKVAVLDTGISTHPDLNIRGGASFVPGEPSTQDGNGHGTHVAGTIAALDNSIGVLGVAPSAELYAVKVLGASGSGSVSSIAQGLEWAGNNGMHVANLSLGSPSPSATLEQAVNSATSRGVLVVAASGNSGAGSISYPARYANAMAVGATDQDNNRASFSQYGAGLDIVAPGVNVQSTYPGSTYFSLNGTSMATPHVAGAAALVKQKNPSWSNVQIRNRLKNTATSLGSTNLYGSGLVNAEAATR

SEQ ID NO: 63814 - protein, 380 aa, Unidentified
VRSKKLWIVASTALLISVAFSSSIASAAEEAKEKYLIGFNEQEAVSEFVEQVEANDEVAILSEEEEVEIELLHEFETIPVLSVELSPEDVDALELDPAISYIEEDAEVTTMAQSVPWGISRVQAPAAHRRGLWGRGVKVAVLDTGISTHPDLNIRGGASFVPGEPSTQDGNGHGTHVAGTIAALDNSIGVLGVAPSAELYAVKVLGASGAGSVSSIAQGLEWAGNNGMHVANLSLGSPSPSATLEQAVNSATSRGVLVVAASGNSGAGSISYPARYANAMAVGATDQNNNRASFSQYGAGLDIVAPGVNVQSTYPQSTYASLNGTSMATPHVAGAAALVKQKNPSWSNVQIRNRLKNTATSLGSTNLYGSGLVNAEAATR

SEQ ID NO: 63815 - protein, 380 aa, Unidentified
VRSKKLWIVASTALLISVAFSSSIASAAEEAKEKYLIGFNEQEAVSEFVEQVEANDEVAILSEEEEVEIELLHEFETIPVLSVELSPEDVDALELDPAISYIEEDAEVTTMAQSVPWGISRVQAPAAHNRGLRGSGVKVAVLDTGISTHPDLNIRGGASFVPGEPSTQDGNGHGTHVAGTIAALNNSIGVLGVAPDAELYAVKVLGASGGGAISSIAQGLEWAGNNGMHVANLSLGSPSPSATLEQAVNSATSRGVLVVAASGNSGAGSISYPARYANAMAVGATDQNNNRASFSQYGAGLDIVAPGVNVQSTYPGSTYASLNGTSMATPHVAGAAVLVKQKNPSWSNVRIRNHLKNTATSLGSTNLYGSGLVNAEAATR

SEQ ID NO: 63816 - protein, 380 aa, Unidentified
VRSKKLWIVASTALLISVAFSSSIASAAEEAKEKYLIGFNEQEAVSEFVEQVEANDEVAILSEEEEVEIELLHEFETIPVLSVELSPEDVDALELDPAISYIEEDAEVTTMAQSVPWGISRVQAPAAHRRGLWGRGVKVAVLDTGISTHPDLNIRGGASFVPGEPSTQDGNGHGTHVAGTIAALDNSIGVLGVAPSAELYAVKVLGASGSGSVSSIAQGLEWAGNNGMHVANLSLGSPSPSATLEQAVNSATSRGVLVVAASGNSGAGSISYPARYANAMAVGATDQNNNRASFSQYGAGLDIVAPGVNVQSTYPQSTYFSLNGTSMATPHVAGAAALVKQKNPSWSNVQIRNRLKNTATSLGSTNLYGSGLVNAEAATR

SEQ ID NO: 63817 - protein, 380 aa, Unidentified
VRSKKLWIVASTALLISVAFSSSIASAAEEAKEKYLIGFNEQEAVSEFVEQVEANDEVAILSEEEEVEIELLHEFETIPVLSVELSPEDVDALELDPAISYIEEDAEVTTMAQSVPWGISRVQAPAAHRRGLTGRGVKVAVLDTGISTHPDLNIRGGASFVPGEPSTQDGNGHGTHVAGTIAALDNSIGVLGVAPSAELYAVKVLGASGSGSVSSIAQGLEWAGANGMHVANLSLGSPSPSATLEQAVNSATSRGVLVVAASGNSGAGSISYPARYANAMAVGATDQNNNRASFSQYGAGLDIVAPGVNVQSTYPQSAYASLNGTSMATPHVAGAAALVKQKNPSWSNVQIRNRLKNTATSLGSTNLYGSGLVNAEAATR

SEQ ID NO: 63818 - protein, 380 aa, Unidentified
VRSKKLWIVASTALLISVAFSSSIASAAEEAKEKYLIGFNEQEAVSEFVEQVEANDEVAILSEEEEVEIELLHEFETIPVLSVELSPEDVDALELDPAISYIEEDAEVTTMAQSVPWGISRVQAPAAHNRGLTGSGVKVAVLDTGISTHPDLRITGGASFVPGEPSTQDGNGHGTHVAGTIAALNNSIGVLGVAPSAELYAVKVLGASGGGAISSIAQGLEWAGNNGMHVANLSLGSPSPSATLEQAVNSATSRGVLVVAASGNSGAGSISYPARYANAMAVGATDQNNNRASFSQYGAGLDIVAPGVNVQSTYPGSTYASLNGTSMATPHVAGAAVLVKQKNPSWSNVRIRNHLKNTATSLGSTNLYGSGLVNAEAATR

SEQ ID NO: 63819 - protein, 380 aa, Unidentified
VRSKKLWIVASTALLISVAFSSSIASAAEEAKEKYLIGFNEQEAVSEFVEQVEANDEVAILSEEEEVEIELLHEFETIPVLSVELSPEDVDALELDPAISYIEEDAEVTTMAQSVPWGISRVQAPAAHNRGLTGSGVKVAVLDTGISTHPDLNIRGGASFVPGEPSTQDGNGHGTHVAGTIAALNNSIGVLGVAPSAELYAVKVLGASGGGAISSIAQGLEWAGNNGMHVANLSLGSPSPSATLEQAVNSATSRGVLVVAASGNSGAGSISYPARYANAMAVGATDQNNNRASFSQYGAGLDIVAPGVNVQSTYPGSTYASLNGTSMATPHVAGAAVLVKHKNPSWSNVRIRNHLKKTATSLGSTNLYGSGLVNAEAATR

SEQ ID NO: 63820 - protein, 380 aa, Unidentified
VRSKKLWIVASTALLISVAFSSSIASAAEEAKEKYLIGFNEQEAVSEFVEQVEANDEVAILSEEEEVEIELLHEFETIPVLSVELSPEDVDALELDPAISYIEEDAEVTTMAQSVPWGISRVQAPAAHRRRLTGSGVKVAVLDTGISTHPDLRITGGASFVPGEPSTQDGNGHGTHVAGTIAALDNSIGVLGVAPSAELYAVKVLGASGSGSVSSIAQGLEWAGNNGMHVANLSLGSPSPSATLEQAVNSATSRGVLVVAASGNSGAGSISYPARYANAMAVGATDQNNNRASFSQYGAGLDIVAPGVNVQSTYPGSTYASLNGTSMATPHVAGEAALVKQKNPSWSNVQIRNRLKNTATSLGSTNLYGSGLVNAEAATR

SEQ ID NO: 63821 - protein, 380 aa, Unidentified
VRSKKLWIVASTALLISVAFSSSIASAAEEAKEKYLIGFNEQEAVSEFVEQVEANDEVAILSEEEEVEIELLHEFETIPVLSVELSPEDVDALELDPAISYIEEDAEVTTMAQSVPWGISRVQAPAAHRRRLTGRGVKVAVLDTGISTHPDLNIRGGASFVPGEPSTQDGNGHGTHVAGTIAALDNSIGVLGVAPSAELYAVKVLGASGSGSVSSIAQGLEWAGANGMHVANLSLGSPSPSATLEQAVNSATSRGVLVVAASGNSGAGSISYPARYANAMAVGATDQNNNRASFSQYGAGLDLVAPGVNVQSTYPGSTYASLNGTSMATPHVAGAAALVKQKNPSWSNVQIRNRLKNTATSLGSTNLYGSGLVNAEAATR

SEQ ID NO: 63822 - protein, 380 aa, Unidentified
VRSKKLWIVASTALLISVAFSSSIASAAEEAKEKYLIGFNEQEAVSEFVEQVEANDEVAILSEEEEVEIELLHEFETIPVLSVELSPEDVDALELDPAISYIEEDAEVTTMAQSVPWGISRVQAPAAHNRGLTGSGVKVAVLDTGISTHPDLNIRGGASFVPGEPSTQDGNGHGTHVAGTIAALDNRIGVLGVAPSAELYAVKVLGASGGGAISSIAQGLEWAGNNGMHVANLSLGSPSPSATLEQAVNSATSRGVLVVAASGNSGAGSISYPARYANAMAVGATDQNNNRASFSQYGAGLDIVAPGVNVQSTYPGSTYASLNGTSMATPHVAGAAVLVKQKNPSWSNVRIRNHLKNTATSLGSTNLYGSGLVNAEAATR

SEQ ID NO: 63823 - protein, 380 aa, Unidentified
VRSKKLWIVASTALLISVAFSSSIASAAEEAKEKYLIGFNEQEAVSEFVEQVEANDEVAILSEEEEVEIELLHEFETIPVLSVELSPEDVDALELDPAISYIEEDAEVTTMAQSVPWGISRVQAPAAHRRGLTGSGVKVAVLDTGISTHPDLNITGGASFVPGEPSTQDGNGHGTHVAGTIAALNNSIGVLGVAPSAELYAVKVLGASGGGAISSIAQGLEWAGNNGMHVANLSLGSPSPSATLEQAVNSATSRGVLVVAASGNSGAGSISYPARYANAMAVGATDQNNNRASFSQYGAGLDIVAPGVNVQSTYPGSTYASLNGTSMATPHVAGAAVLVKQKNPSWSNVRIRNHLKNTATSLGSTNLYGSGLVNAEAATR

SEQ ID NO: 63824 - protein, 380 aa, Unidentified
VRSKKLWIVASTALLISVAFSSSIASAAEEAKEKYLIGFNEQEAVSEFVEQVEANDEVAILSEEEEVEIELLHEFETIPVLSVELSPEDVDALELDPAISYIEEDAEVTTMAQSVPWGISRVQAPAAHRRGLWGRGVKVAVLDTGISTHPDLNIRGGASFVPGEPSTQDGNGHGTHVAGTIAALDNSIGVLGVAPSAELYAVKVLGASGSGSVSSIAQGLEWAGNNGMHVANLSLGSPSPSATLEQAVNSATSRGVLVVAASGNSGAGSISYPARYANAMAVGATDQDNNRASFSQYGAGLDIVAPGVNVQSTYPGSAYASLNGTSMATPHVAGAAALVKQKNPSWSNVQIRNRLKNTATSLGSTNLYGSGLVNAEAATR

SEQ ID NO: 63825 - protein, 380 aa, Unidentified
VRSKKLWIVASTALLISVAFSSSIASAAEEAKEKYLIGFNEQEAVSEFVEQVEANDEVAILSEEEEVEIELLHEFETIPVLSVELSPEDVDALELDPAISYIEEDAEVTTMAQSVPWGISRVQAPAAHRRGLWGRGVKVAVLDTGISTHPDLNIRGGASFVPGEPSTQDGNGHGTHVAGTIAALDNSIGVLGVAPSAELYAVKVLGASGAGSVSSIAQGLEWAGANGMHVANLSLGSPSPSATLEQAVNSATSRGVLVVAASGNSGAGSISYPARYANAMAVGATDQNNNRASFSQYGAGLDIVAPGVNVQSTYPGSTYASLNGTSMATPHVAGAAALVKQKNPSWSNVQIRNRLKNTATSLGSTNLYGSGLVNAEAATR

SEQ ID NO: 63826 - protein, 380 aa, Unidentified
VRSKKLWIVASTALLISVAFSSSIASAAEEAKEKYLIGFNEQEAVSEFVEQVEANDEVAILSEEEEVEIELLHEFETIPVLSVELSPEDVDALELDPAISYIEEDAEVTTMAQSVPWGISRVQAPAAHRRGLWGRGVKVAVLDTGISTHPDLNIRGGASFVPGEPSTQDGNGHGTHVAGTIAALDNSIGVLGVAPSAELYAVKVLGASGSGSVSSIAQGLEWAGNNGMHVANLSLGSPSPSATLEQAVNSATSRGVLVVAASGNSGAGSISYPARYANAMAVGATDQNNNRASFSQYGAGLDLVAPGVNVQSTYPGSTYFSLNGTSMATPHVAGAAALVKQKNPSWSNVQIRNRLKNTATSLGSTNLYGSGLVNAEAATR

SEQ ID NO: 63827 - protein, 380 aa, Unidentified
VRSKKLWIVASTALLISVAFSSSIASAAEEAKEKYLIGFNEQEAVSEFVEQVEANDEVAILSEEEEVEIELLHEFETIPVLSVELSPEDVDALELDPAISYIEEDAEVTTMAQSVPWGISRVQAPAAHNRGLTGSGVKVAVLDTGISTHPDLNIRGGASFVPGEPSTQDGNGHGTHVAGTIAALNNSIGVLGVAPSAELYAVKVLGASGGGAISSIAQGLEWAGNNGMHVANLSLGSPSPSATLEQAVNSATSRGVLVVAASGNSGADSISYPARYANAMAVGATDQNNNRASFSQYGAGLDIVAPGVNVQSTYPGSTYASLNGTSMATPHVAGAAVLVKQKNPSWSNVRIRDHLKNTATSLGSTNLYGSGLVNAEAATR

SEQ ID NO: 63828 - protein, 380 aa, Unidentified
VRSKKLWIVASTALLISVAFSSSIASAAEEAKEKYLIGFNEQEAVSEFVEQVEANDEVAILSEEEEVEIELLHEFETIPVLSVELSPEDVDALELDPAISYIEEDAEVTTMAQSVPWGISRVQAPAAHNRGLTGRGVKVAVLDTGISTHPDLDIRGGASFVPGEPSTQDGNGHGTHVAGTIAALNNSIGVLGVAPSAELYAVKVLGASGGGAISSIAQGLEWAGNNGMHVANLSLGSPSPSATLEQAVNSATSRGVLVVAASGNSGAGSISYPARYANAMAVGATDQNNNRASFSQYGAGLDIVAPGVNVQSTYPGSTYASLNGTSMATPHVAGAAVLVKQKNPSWSNVRIRNHLKNTATSLGSTNLYGSGLVNAEAATR

SEQ ID NO: 63829 - protein, 380 aa, Unidentified
VRSKKLWIVASTALLISVAFSSSIASAAEEAKEKYLIGFNEQEAVSEFVEQVEANDEVAILSEEEEVEIELLHEFETIPVLSVELSPEDVDALELDPAISYIEEDAEVTTMAQSVPWGISRVQAPAAHRRGLTGRGVKVAVLDTGISTHPDLNIRGGASFVPGEPSTQDGNGHGTHVAGTIAALDNSIGVLGVAPSAELYAVKVLGASGAGSVSSIAQGLEWAGNNGMHVANLSLGSPSPSATLEQAVNSATSRGVLVVAASGNSGAGSISYPARYANAMAVGATDQNNNRASFSQYGAGLDLVAPGVNVQSTYPGSTYFSLNGTSMATPHVAGAAALVKQKNPSWSNVQIRNRLKNTATSLGSTNLYGSGLVNAEAATR

SEQ ID NO: 63830 - protein, 380 aa, Unidentified
VRSKKLWIVASTALLISVAFSSSIASAAEEAKEKYLIGFNEQEAVSEFVEQVEANDEVAILSEEEEVEIELLHEFETIPVLSVELSPEDVDALELDPAISYIEEDAEVTTMAQSVPWGISRVQAPAAHRRGLWGRGVKVAVLDTGISTHPDLNIRGGASFVPGEPSTQDGNGHGTHVAGTIAALDNSIGVLGVAPSAELYAVKVLGASGSGSVSSIAQGLEWAGANGMHVANLSLGSPSPSATLEQAVNSATSRGVLVVAASGNSGAGSISYPARYANAMAVGATDQNNNRASFSQYGAGLDIVAPGVNVQSTYPGSTYFSLNGTSMATPHVAGAAALVKQKNPSWSNVQIRNRLKNTATSLGSTNLYGSGLVNAEAATR

SEQ ID NO: 63831 - protein, 380 aa, Unidentified
VRSKKLWIVASTALLISVAFSSSIASAAEEAKEKYLIGFNEQEAVSEFVEQVEANDEVAILSEEEEVEIELLHEFETIPVLSVELSPEDVDALELDPAISYIEEDAEVTTMAQSVPWGISRVQAPAAHNRRLTGSGVKVAVLDTGISTHPDLNIRGGASFVPGEPSTQDGNGHGTHVAGTIAALNNRIGVLGVAPSAELYAVKVLGASGAGAISSIAQGLEWAGNNGMHVANLSLGSPSPSATLEQAVNSATSRGVLVVAASGNSGAGSISYPARYANAMAVGATDQNNNRASFSQYGAGLDIVAPGVNVQSTYPGSTYASLNGTSMATPHVAGAAVLVKQKNPSWSNVRIRNHLKNTATSLGSTNLYGSGLVNAEAATR

SEQ ID NO: 63832 - protein, 380 aa, Unidentified
VRSKKLWIVASTALLISVAFSSSIASAAEEAKEKYLIGFNEQEAVSEFVEQVEANDEVAILSEEEEVEIELLHEFETIPVLSVELSPEDVDALELDPAISYIEEDAEVTTMAQSVPWGISRVQAPAAHRRGLWGRGVKVAVLDTGISTHPDLNIRGGASFVPGEPSTQDGNGHGTHVAGTIAALDNSIGVLGVAPSAELYAVKVLGASGSGSVSSIAQGLEWAGANGMHVANLSLGSPSPSATLEQAVNSATSRGVLVVAASGNSGAGSISYPARYANAMAVGATDQNNNRASFSQYGAGLDIVAPGVNVQSTYPGSAYASLNGTSMATPHVAGAAALVKQKNPSWSNVQIRNRLKNTATSLGSTNLYGSGLVNAEAATR

SEQ ID NO: 63833 - protein, 380 aa, Unidentified
VRSKKLWIVASTALLISVAFSSSIASAAEEAKEKYLIGFNEQEAVSEFVEQVEANDEVAILSEEEEVEIELLHEFETIPVLSVELSPEDVDALELDPAISYIEEDAEVTTMAQSVPWGISRVQAPAAHNRGLTGSGVKVAVLDTGISTHPDLRIRGGASFVPGEPSTQDGNGHGTHVAGTIAALNNSIGVLGVAPSAELYAVKVLGASGGGAISSIAQGLEWAGNNGMHVANLSLGSPSPSATLEQAVNSATSRGVLVLAASGNSGAGSISYPARYANAMAVGATDQNNNRASFSQYGAGLDIVAPGVNVQSTYPGSTYASLNGTSMATPHVAGAAVLVKQKNPSWSNVRIRNHLKNTATSLGSTNLYGSGLVNAEAATR

SEQ ID NO: 63834 - protein, 380 aa, Unidentified
VRSKKLWIVASTALLISVAFSSSIASAAEEAKEKYLIGFNEQEAVSEFVEQVEANDEVAILSEEEEVEIELLHEFETIPVLSVELSPEDVDALELDPAISYIEEDAEVTTMAQSVPWGISRVQAPAAHRRGLTGRGVKVAVLDTGISTHPDLNIRGGASFVPGEPSTQDGNGHGTHVAGTIAALDNSIGVLGVAPSAELYAVKVLGASGSGAISSIAQGLEWAGNNGMHVANLSLGSPSPSATIEQAVNSATSRGVLVVAASGNSGAGSISYPARYANAMAVGATDQNNNRASFSQYGAGLDIVAPGVNVQSTYPGSTYASLNGTSMATPHVAGAAVLVKQKNPSWSNVQIRNHLKNTATSLGSTNLYGSGLVNAEAATR

SEQ ID NO: 63835 - protein, 380 aa, Unidentified
VRSKKLWIVASTALLISVAFSSSIASAAEEAKEKYLIGFNEQEAVSEFVEQVEANDEVAILSEEEEVEIELLHEFETIPVLSVELSPEDVDALELDPAISYIEEDAEVTTMAQSVPWGISRVQAPAAHRRRLWGRGVKVAVLDTGISTHPDLNIRGGASFVPGEPSTQDGNGHGTHVAGTIAALDNSIGVLGVAPSAELYAVKVLGASGSGSVSSIAQGLEWAGANGMHVANLSLGSPSPSATLEQAVNSATSRGVLVVAASGNSGAGSISYPARYANAMAVGATDQNNNRASFSQYGAGLDIVAPGVNVQSTYPGSTYASLNGTSMATPHVAGAAALVKQKNPSWSNVQIRNRLKNTATSLGSTNLYGSGLVNAEAATR

SEQ ID NO: 63836 - protein, 380 aa, Unidentified
VRSKKLWIVASTALLISVAFSSSIASAAEEAKEKYLIGFNEQEAVSEFVEQVEANDEVAILSEEEEVEIELLHEFETIPVLSVELSPEDVDALELDPAISYIEEDAEVTTMAQSVPWGISRVQAPAAHRRGLTGRGVKVAVLDTGISTHPDLNIRGGASFVPGEPSTQDGNGHGTHVAGTIAALDNSIGVLGVAPSAELYAVKVLGASGSGSVSSIAQGLEWAGANGMHVANLSLGSPSPSATLEQAVNSATSRGVLVVAASGNSGAGSISYPARYANAMAVGATDQNNNRASFSQYGAGLDIVAPGVNVQSTYPGSAYFSLNGTSMATPHVAGAAALVKQKNPSWSNVQIRNRLKNTATSLGSTNLYGSGLVNAEAATR

SEQ ID NO: 63837 - protein, 380 aa, Unidentified
VRSKKLWIVASTALLISVAFSSSIASAAEEAKEKYLIGFNEQEAVSEFVEQVEANDEVAILSEEEEVEIELLHEFETIPVLSVELSPEDVDALELDPAISYIEEDAEVTTMAQSVPWGISRVQAPAAHRRGLTGRGVKVAVLDTGISTHPDLNIRGGASFVPGEPSTQDGNGHGTHVAGTIAALDNSIGVLGVAPSAELYAVKVLGASGSGSVSSIAQGLEWAGANGMHVANLSLGSPSPSATLEQAVNSATSRGVLVVAASGNSGAGSISYPARYANAMAVGATDQNNNRASFSQYGAGLDLVAPGVNVQSTYPQSTYASLNGTSMATPHVAGAAALVKQKNPSWSNVQIRNRLKNTATSLGSTNLYGSGLVNAEAATR

SEQ ID NO: 63838 - protein, 380 aa, Unidentified
VRSKKLWIVASTALLISVAFSSSIASAAEEAKEKYLIGFNEQEAVSEFVEQVEANDEVAILSEEEEVEIELLHEFETIPVLSVELSPEDVDALELDPAISYIEEDAEVTTMAQSVPWGISRVQAPAAHNRRLTGSGVKVAVLDTGISTHPDLRIRGGASFVPGEPSTQDGNGHGTHVAGTIAALNNSIGVLGVAPSAELYAVKVLGASGGGAISSIAQGLEWAGNNGMHVANLSLGSPSPSATLEQAVNSATSRGVLVVAASGNSGAGSISYPARYANAMAVGATDQNNNRASFSQYGAGLDIVAPGVNVQSTYPGSTYASLNGTSMATPHVAGAAVLVKQKNPSWSNVRIRNHLKNTATSLGSTNLYGSGLVNAEAATR

SEQ ID NO: 63839 - protein, 380 aa, Unidentified
VRSKKLWIVASTALLISVAFSSSIASAAEEAKEKYLIGFNEQEAVSEFVEQVEANDEVAILSEEEEVEIELLHEFETIPVLSVELSPEDVDALELDPAISYIEEDAEVTTMAQSVPWGISRVQAPAAHNRGLTGSGVKVAVLDTGISTHPDLDIRGGASFVPGEPSTQDGNGHGTHVAGTIAALDNSIGVLGVAPSAELYAVKVLGASGGGAISSIAQGLEWAGNNGMHVANLSLGSPSPSATLEQAVNSATSRGVLVVAASGNSGAGSISYPARYANAMAVGATDQNNNRASFSQYGAGLDIVAPGVNVQSTYPGSTYASLNGTSMATPHVAGAAVLVKQKNPSWSNVRIRNHLKNTATSLGSTNLYGSGLVNAEAATR

SEQ ID NO: 63840 - protein, 380 aa, Unidentified
VRSKKLWIVASTALLISVAFSSSIASAAEEAKEKYLIGFNEQEAVSEFVEQVEANDEVAILSEEEEVEIELLHEFETIPVLSVELSPEDVDALELDPAISYIEEDAEVTTMAQSVPWGISRVQAPAAHNRGLTGSGVKVAVLDTGISTHPDLNIRGGASFVPGEPSTQDGNGHGTHVAGTIAALNNRIGVLGVAPDAELYAVKVLGASGGGAISSIAQGLEWAGNNGMHVANLSLGSPSPSATLEQAVNSATSRGVLVVAASGNSGAGSISYPARYANAMAVGATDQNNNRASFSQYGAGLDIVAPGVNVQSTYPGSTYASLNGTSMATPHVAGAAVLVKQKNPSWSNVRIRNHLKNTATSLGSTNLYGSGLVNAEAATR

SEQ ID NO: 63841 - protein, 380 aa, Unidentified
VRSKKLWIVASTALLISVAFSSSIASAAEEAKEKYLIGFNEQEAVSEFVEQVEANDEVAILSEEEEVEIELLHEFETIPVLSVELSPEDVDALELDPAISYIEEDAEVTTMAQSVPWGISRVQAPAAHRRGLWGRGVKVAVLDTGISTHPDLNIRGGASFVPGEPSTQDGNGHGTHVAGTIAALDNSIGVLGVAPSAELYAVKVLGASGAGSVSSIAQGLEWAGNNGMHVANLSLGSPSPSATLEQAVNSATSRGVLVVAASGNSGAGSISYPARYANAMAVGATDQNNNRASFSQYGAGLDLVAPGVNVQSTYPGSTYASLNGTSMATPHVAGAAALVKQKNPSWSNVQIRNRLKNTATSLGSTNLYGSGLVNAEAATR

SEQ ID NO: 63842 - protein, 380 aa, Unidentified
VRSKKLWIVASTALLISVAFSSSIASAAEEAKEKYLIGFNEQEAVSEFVEQVEANDEVAILSEEEEVEIELLHEFETIPVLSVELSPEDVDALELDPAISYIEEDAEVTTMAQSVPWGISRVQAPAAHNRGLTGSGVKVAVLDTGISTHPDLRIRGGASFVPGEPSTQDGNGHGTHVAGTIAALNNSIGVLGVAPSAELYAVKVLGASGGGAISSIAQGLEWAGNNGMHVANLSLGSPSPSATLEQAVNSATSRGVLVVAASGNSGAGSISYPARYANAMAVGATDQNNNRASFSQYGAGLDIVAPGVNVQSTYPGSTYASLNGTSMATPHVAGAAVLVKQKNPSWRNVRIRNHLKNTATSLGSTNLYGSGLVNAEAATR

SEQ ID NO: 63843 - protein, 380 aa, Unidentified
VRSKKLWIVASTALLISVAFSSSIASAAEEAKEKYLIGFNEQEAVSEFVEQVEANDEVAILSEEEEVEIELLHEFETIPVLSVELSPEDVDALELDPAISYIEEDAEVTTMAQSVPWGISRVQAPAAHNRRLTGSGVKVAVLDTGISTHPDLNIRGGASFVPGEPSTQDGNGHGTHVAGTIAALNNSIGVLGVAPSAELYAVKVLGASGGGAISSIAQGLEWAGNNGMHVANLSLGSPSPSATLEQAVNSATSRGVLVVAASGNSGAGSISYPARYANAMAVGATDQNNNRASFSQYGAGLDIVAPGVNVQSTYPGSTYFSLNGTSMATPHVAGAAVLVKQKNPSWSNVRIRNHLKNTATSLGSTNLYGSGLVNAEAATR

SEQ ID NO: 63844 - protein, 380 aa, Unidentified
VRSKKLWIVASTALLISVAFSSSIASAAEEAKEKYLIGFNEQEAVSEFVEQVEANDEVAILSEEEEVEIELLHEFETIPVLSVELSPEDVDALELDPAISYIEEDAEVTTMAQSVPWGISRVQAPAAHNRGLTGRGVKVAVLDTGISTHPDLNIRGGASFVPGEPSTQDGNGHGTHVAGTIAALDNSIGVLGVAPSAELYAVKVLGASGGGAISSIAQGLEWAGNNGMHVANLSLGSPSPSATLEQAVNSATSRGVLVVAASGNSGAGSISYPARYANALAVGATDQNNNRASFSQYGAGLDIVAPGVNVQSTYPGSTYASLNGTSMATPHVAGAAALVKQKNPSWSNVQIRNRLKNTATSLGSTNLYGSGLVNAEAATR

SEQ ID NO: 63845 - protein, 380 aa, Unidentified
VRSKKLWIVASTALLISVAFSSSIASAAEEAKEKYLIGFNEQEAVSEFVEQVEANDEVAILSEEEEVEIELLHEFETIPVLSVELSPEDVDALELDPAISYIEEDAEVTTMAQSVPWGISRVQAPAAHRRRLTGRGVKVAVLDTGISTHPDLNIRGGASFVPGEPSTQDGNGHGTHVAGTIAALDNSIGVLGVAPSAELYAVKVLGASGSGSVSSIAQGLEWAGNNGMHVANLSLGSPSPSATLEQAVNSATSRGVLVVAASGNSGAGSISYPARYANAMAVGATDQDNNRASFSQYGAGLDLVAPGVNVQSTYPGSTYASLNGTSMATPHVAGAAALVKQKNPSWSNVQIRNRLKNTATSLGSTNLYGSGLVNAEAATR

SEQ ID NO: 63846 - protein, 380 aa, Unidentified
VRSKKLWIVASTALLISVAFSSSIASAAEEAKEKYLIGFNEQEAVSEFVEQVEANDEVAILSEEEEVEIELLHEFETIPVLSVELSPEDVDALELDPAISYIEEDAEVTTMAQSVPWGISRVQAPAAHNRRLTGSGVKVAVLDTGISTHPDLNIRGGASFVPGEPSTQDGNGHGTHVAGTIAALNNSIGVLGVAPSAELYAVKVLGASGAGAISSIAQGLEWAGNNGMHVANLSLGSPSPSATLEQAVNSATSRGVLVVAASGNSGAGSISYPARYANAMAVGATDQNNNRASFSQYGAGLDIVAPGVNVQSTYPGSTYFSLNGTSMATPHVAGAAVLVKQKNPSWSNVRIRNHLKNTATSLGSTNLYGSGLVNAEAATR

SEQ ID NO: 63847 - protein, 380 aa, Unidentified
VRSKKLWIVASTALLISVAFSSSIASAAEEAKEKYLIGFNEQEAVSEFVEQVEANDEVAILSEEEEVEIELLHEFETIPVLSVELSPEDVDALELDPAISYIEEDAEVTTMAQSVPWGISRVQAPAAHNRGLTGSGVKVAVLDTGISTHPDLNIRGGASFVPGEPSTQDGNGHGTHVAGTIAALNNSIGVLGVAPSAELYAVKVLGASGAGGVSSIAQGLEWAGNNGMHVANLSLGSPSPSATLEQAVNSATSRGVLVVAASGNSGAESISYPARYANAMAVGATDQNNNRASFSQYGAGLDIVAPGVNVQSTYPGSTYASLNGTSMATPHVAGAAVLVKQKNPSWSNVRIRDRLKNTATSLGSTNLYGSGLVNAEAATR

SEQ ID NO: 63848 - protein, 380 aa, Unidentified
VRSKKLWIVASTALLISVAFSSSIASAAEEAKEKYLIGFNEQEAVSEFVEQVEANDEVAILSEEEEVEIELLHEFETIPVLSVELSPEDVDALELDPAISYIEEDAEVTTMAQSVPWGISRVQAPAAHNRRLTGSGVKVAVLDTGISTHPDLDIRGGASFVPGEPSTQDGNGHGTHVAGTIAALNNSIGVLGVAPSAELYAVKVLGASGGGAISSIAQGLEWAGNNGMHVANLSLGSPSPSATLEQAVNSATSRGVLVVAASGNSGAGSISYPARYANAMAVGATDQNNNRASFSQYGAGLDIVAPGVNVQSTYPGSTYASLNGTSMATPHVAGAAVLVKQKNPSWSNVRIRNHLKNTATSLGSTNLYGSGLVNAEAATR

SEQ ID NO: 63849 - protein, 380 aa, Unidentified
VRSKKLWIVASTALLISVAFSSSIASAAEEAKEKYLIGFNEQEAVSEFVEQVEANDEVAILSEEEEVEIELLHEFETIPVLSVELSPEDVDALELDPAISYIEEDAEVTTMAQSVPWGISRVQAPAAHNRGLTGSGVKVAVLDTGISTHPDLNIRGGASFVPGEPSTQDGNGHGTHVAGTIAALNNRIGVLGVAPSAELYAVKVLGASGGGAISSIAQGLEWAGNNGMHVANLSLGSPSPSATLEQAVNSATSRGVLVVAASGNSGAGSISYPARYANAMAVGATDQNNNRASFSQYGAGLDIVAPGVNVQSTYPGSTYASLNGTSMATPHVAGAAVLVKQKNPSWSNVRIRNRLKNTATSLGSTNLYGSGLVNAEAATR

SEQ ID NO: 63850 - protein, 380 aa, Unidentified
VRSKKLWIVASTALLISVAFSSSIASAAEEAKEKYLIGFNEQEAVSEFVEQVEANDEVAILSEEEEVEIELLHEFETIPVLSVELSPEDVDALELDPAISYIEEDAEVTTMAQSVPWGISRVQAPAAHNRGLTGSGVKVAVLDTGISTHPDLNIRGGASFVPGEPSTQDGNGHGTHVAGTIAALNNSIGVLGVAPSAELYAVKVLGASGGGAISSIAQGLEWAGNNGMHVANLSLGSPSPSATLEQAVNSATSRGVLVVAASGNSGAGSISYPARYANAMAVGATDQNNNRASFSQYGAGLDIVAPGVNVQSTYPGSTYASLNGTSMATPHVAGAAVLVKQKNPSWSNVRIRNRLKNTATSLGSTNLYGSGLVRAEAATR

SEQ ID NO: 63851 - protein, 380 aa, Unidentified
VRSKKLWIVASTALLISVAFSSSIASAAEEAKEKYLIGFNEQEAVSEFVEQVEANDEVAILSEEEEVEIELLHEFETIPVLSVELSPEDVDALELDPAISYIEEDAEVTTMAQSVPWGISRVQAPAAHRRGLWGRGVKVAVLDTGISTHPDLNIRGGASFVPGEPSTQDGNGHGTHVAGTIAALDNSIGVLGVAPSAELYAVKVLGASGSGSVSSIAQGLEWAGNNGMHVANLSLGSPSPSATLEQAVNSATSRGVLVVAASGNSGAGSISYPARYANAMAVGATDQDNNRASFSQYGAGLDIVAPGVNVQSTYPQSTYASLNGTSMATPHVAGAAALVKQKNPSWSNVQIRNRLKNTATSLGSTNLYGSGLVNAEAATR

SEQ ID NO: 63852 - protein, 380 aa, Unidentified
VRSKKLWIVASTALLISVAFSSSIASAAEEAKEKYLIGFNEQEAVSEFVEQVEANDEVAILSEEEEVEIELLHEFETIPVLSVELSPEDVDALELDPAISYIEEDAEVTTMAQSVPWGISRVQAPAAHRRGLTGRGVKVAVLDTGISTHPDLNIRGGASFVPGEPSTQDGNGHGTHVAGTIAALDNSIGVLGVAPSAELYAVKVLGASGSGSVSSIAQGLEWAGNNGMHVANLSLGSPSPSATLEQAVNSATSRGVLVVAASGNSGAGSISYPARYANAMAVGATDQDNNRASFSQYGAGLDIVAPGVNVQSTYPQSTYFSLNGTSMATPHVAGAAALVKQKNPSWSNVQIRNRLKNTATSLGSTNLYGSGLVNAEAATR

SEQ ID NO: 63853 - protein, 380 aa, Unidentified
VRSKKLWIVASTALLISVAFSSSIASAAEEAKEKYLIGFNEQEAVSEFVEQVEANDEVAILSEEEEVEIELLHEFETIPVLSVELSPEDVDALELDPAISYIEEDAEVTTMAQSVPWGISRVQAPAAHRRGLTGRGVKVAVLDTGISTHPDLNIRGGASFVPGEPSTQDGNGHGTHVAGTIAALDNSIGVLGVAPSAELYAVKVLGASGAGSVSSIAQGLEWAGANGMHVANLSLGSPSPSATLEQAVNSATSRGVLVVAASGNSGAGSISYPARYANAMAVGATDQDNNRASFSQYGAGLDIVAPGVNVQSTYPGSTYASLNGTSMATPHVAGAAALVKQKNPSWSNVQIRNRLKNTATSLGSTNLYGSGLVNAEAATR

SEQ ID NO: 63854 - protein, 380 aa, Unidentified
VRSKKLWIVASTALLISVAFSSSIASAAEEAKEKYLIGFNEQEAVSEFVEQVEANDEVAILSEEEEVEIELLHEFETIPVLSVELSPEDVDALELDPAISYIEEDAEVTTMAQSVPWGISRVQAPAAHRRGLTGRGVKVAVLDTGISTHPDLNIRGGASFVPGEPSTQDGNGHGTHVAGTIAALDNSIGVLGVAPSAELYAVKVLGASGSGSVSSIAQGLEWAGNNGMHVANLSLGSPSPSATLEQAVNSATSRGVLVVAASGNSGAGSISYPARYANAMAVGATDQNNNRASFSQYGAGLDLVAPGVNVQSTYPQSTYFSLNGTSMATPHVAGAAALVKQKNPSWSNVQIRNRLKNTATSLGSTNLYGSGLVNAEAATR

SEQ ID NO: 63855 - protein, 380 aa, Unidentified
VRSKKLWIVASTALLISVAFSSSIASAAEEAKEKYLIGFNEQEAVSEFVEQVEANDEVAILSEEEEVEIELLHEFETIPVLSVELSPEDVDALELDPAISYIEEDAEVTTMAQSVPWGISRVQAPAAHRRRLTGRGVKVAVLDTGISTHPDLNIRGGASFVPGEPSTQDGNGHGTHVAGTIAALDNSIGVLGVAPSAELYAVKVLGASGSGSVSSIAQGLEWAGNNGMHVANLSLGSPSPSATLEQAVNSATSRGVLVVAASGNSGAGSISYPARYANAMAVGATDQNNNRASFSQYGAGLDIVAPGVNVQSTYPQSTYFSLNGTSMATPHVAGAAALVKQKNPSWSNVQIRNRLKNTATSLGSTNLYGSGLVNAEAATR

SEQ ID NO: 63856 - protein, 380 aa, Unidentified
VRSKKLWIVASTALLISVAFSSSIASAAEEAKEKYLIGFNEQEAVSEFVEQVEANDEVAILSEEEEVEIELLHEFETIPVLSVELSPEDVDALELDPAISYIEEDAEVTTMAQSVPWGISRVQAPAAHRRRLTGRGVKVAVLDTGISTHPDLRITGGASFVPGEPSTQDGNGHGTHVAGTIAALDNSIGVLGVAPSAELYAVKVLGASGSGSVSSIAQGLEWAGNNGMHVANLSLGSPSPSATLEQAVNSATSRGVLVVAASGNSGAGSISYPARYANAMAVGATDQNNNRASFSQYGAGLDIVAPGVNVQSTYPGSTYASLNGTSMATPHVAGAAALVKQKNPSWSNVQIRNRLKNTATSLGSTNLYGSGLVNAEAATR

SEQ ID NO: 63857 - protein, 380 aa, Unidentified
VRSKKLWIVASTALLISVAFSSSIASAAEEAKEKYLIGFNEQEAVSEFVEQVEANDEVAILSEEEEVEIELLHEFETIPVLSVELSPEDVDALELDPAISYIEEDAEVTTMAQSVPWGISRVQAPAAHNRGLTGSGVKVAVLDTGISTHPDLNIRGGASFVPGEPSTQDGNGHGTHVAGTIAALNNSIGVLGVAPSAELYAVKVLGASGSGAISSIAQGLEWAGNNGMHVANLSLGSPSPSATLEQAVNSATSRGVLVVAASGNSGAESISYPARYANAMAVGATDQNNNRASFSQYGAGLDIVAPGVNVQSTYPGSTYASLNGTSMATPHVAGAAVLVKQKNPSWSNVRIRDRLKNTATSLGSTNLYGSGLVNAEAATR

SEQ ID NO: 63858 - protein, 380 aa, Unidentified
VRSKKLWIVASTALLISVAFSSSIASAAEEAKEKYLIGFNEQEAVSEFVEQVEANDEVAILSEEEEVEIELLHEFETIPVLSVELSPEDVDALELDPAISYIEEDAEVTTMAQSVPWGISRVQAPAAHRRRLTGRGVKVAVLDTGISTHPDLNIRGGASFVPGEPSTQDGNGHGTHVAGTIAALDNSIGVLGVAPSAELYAVKVLGASGSGSVSSIAQGLEWAGNNGMHVANLSLGSPSPSATLEQAVNSATSRGVLVVAASGNSGAGSISYPARYANAMAVGATDQNNNRASFSQYGAGLDLVAPGVNVQSTYPGSTYFSLNGTSMATPHVAGAAALVKQKNPSWSNVQIRNRLKNTATSLGSTNLYGSGLVNAEAATR

SEQ ID NO: 63859 - protein, 380 aa, Unidentified
VRSKKLWIVASTALLISVAFSSSIASAAEEAKEKYLIGFNEQEAVSEFVEQVEANDEVAILSEEEEVEIELLHEFETIPVLSVELSPEDVDALELDPAISYIEEDAEVTTMAQSVPWGISRVQAPAAHRRGLWGRGVKVAVLDTGISTHPDLNIRGGASFVPGEPSTQDGNGHGTHVAGTIAALDNSIGVLGVAPSAELYAVKVLGASGSGSVSSIAQGLEWAGNNGMHVANLSLGSPSPSATLEQAVNSATSRGVLVVAASGNSGAGSISYPARYANAMAVGATDQNNNRASFSQYGAGLDIVAPGVNVQSTYPQSAYASLNGTSMATPHVAGAAALVKQKNPSWSNVQIRNRLKNTATSLGSTNLYGSGLVNAEAATR

SEQ ID NO: 63860 - protein, 380 aa, Unidentified
VRSKKLWIVASTALLISVAFSSSIASAAEEAKEKYLIGFNEQEAVSEFVEQVEANDEVAILSEEEEVEIELLHEFETIPVLSVELSPEDVDALELDPAISYIEEDAEVTTMAQSVPWGISRVQAPAAHNRGLTGSGVKVAVLDTGISTHPDLNITGGASFVPGEPSTQDGNGHGTHVAGTIAALNNSIGVLGVAPSAELYAVKVLGASGGGAISSIAQGLEWAGNNGMHVANLSLGSPSPSATLEQAVNSATSRGVLVVAASGNSGAGSISYPARYANAMAVGATDQNNNRASFSQYGAGLDIVAPGVNVQSTYPGSTYASLNGTSMATPHVAGAAVLVKQKNPSWSNVRIRNHLKNTATSLGSTNLYGSGLVRAEAATR

SEQ ID NO: 63861 - protein, 380 aa, Unidentified
VRSKKLWIVASTALLISVAFSSSIASAAEEAKEKYLIGFNEQEAVSEFVEQVEANDEVAILSEEEEVEIELLHEFETIPVLSVELSPEDVDALELDPAISYIEEDAEVTTMAQSVPWGISRVQAPAAHRRGLTGRGVKVAVLDTGISTHPDLNIRGGASFVPGEPSTQDGNGHGTHVAGTIAALDNSIGVLGVAPSAELYAVKVLGASGSGSVSSIAQGLEWAGANGMHVANLSLGSPSPSATLEQAVNSATSRGVLVTAASGNSGAGSISYPARYANAMAVGATDQNNNRASFSQYGAGLDIVAPGVNVQSTYPGSAYASLNGTSMATPHVAGAAALVKQKNPSWSNVQIRNRLKNTATSLGSTNLYGSGLVNAEAATR

SEQ ID NO: 63862 - protein, 380 aa, Unidentified
VRSKKLWIVASTALLISVAFSSSIASAAEEAKEKYLIGFNEQEAVSEFVEQVEANDEVAILSEEEEVEIELLHEFETIPVLSVELSPEDVDALELDPAISYIEEDAEVTTMAQSVPWGISRVQAPAAHNRGLTGSGVKVAVLDTGISTHPDLDITGGASFVPGEPSTQDGNGHGTHVAGTIAALNNSIGVLGVAPSAELYAVKVLGASGGGAISSIAQGLEWAGNNGMHVANLSLGSPSPSATLEQAVNSATSRGVLVVAASGNSGAGSISYPARYANAMAVGATDQNNNRASFSQYGAGLDIVAPGVNVQSTYPGSTYASLNGTSMATPHVAGAAVLVKQKNPSWSNVRIRNHLKNTATSLGSTNLYGSGLVNAEAATR

SEQ ID NO: 63863 - protein, 380 aa, Unidentified
VRSKKLWIVASTALLISVAFSSSIASAAEEAKEKYLIGFNEQEAVSEFVEQVEANDEVAILSEEEEVEIELLHEFETIPVLSVELSPEDVDALELDPAISYIEEDAEVTTMAQSVPWGISRVQAPAAHRRGLTGRGVKVAVLDTGISTHPDLNIRGGASFVPGEPSTQDGNGHGTHVAGTIAALDNSIGVLGVAPSAELYAVKVLGASGSGSVSSIAQGLEWAGANGMHVANLSLGSPSPSATLEQAVNSATSRGVLVVAASGNSGAGSISYPARYANAMAVGATDQDNNRASFSQYGAGLDLVAPGVNVQSTYPGSTYASLNGTSMATPHVAGAAALVKQKNPSWSNVQIRNRLKNTATSLGSTNLYGSGLVNAEAATR

SEQ ID NO: 63864 - protein, 380 aa, Unidentified
VRSKKLWIVASTALLISVAFSSSIASAAEEAKEKYLIGFNEQEAVSEFVEQVEANDEVAILSEEEEVEIELLHEFETIPVLSVELSPEDVDALELDPAISYIEEDAEVTTMAQSVPWGISRVQAPAAHNRGLTGSGVKVAVLDTGISTHPDLNIRGGASFVPGEPSTQDGNGHGTHVAGTIAALDNSIGVLGVAPSAELYAVKVLGASGGGAISSIAQGLEWAGNNGMHVANLSLGSPSPSATLEQAVNSATSRGVLVVAASGNSGAGSISYPARYANAMAVGATDQNNNRASFSQYGAGLDIVAPGVNVQSTYPGSTYASLNGTSMATPHVAGAAVLVKQKNPSWRNVRIRNHLKNTATSLGSTNLYGSGLVNAEAATR

SEQ ID NO: 63865 - protein, 380 aa, Unidentified
VRSKKLWIVASTALLISVAFSSSIASAAEEAKEKYLIGFNEQEAVSEFVEQVEANDEVAILSEEEEVEIELLHEFETIPVLSVELSPEDVDALELDPAISYIEEDAEVTTMAQSVPWGISRVQAPAAHRRGLTGRGVKVAVLDTGISTHPDLNIRGGASFVPGEPSTQDGNGHGTHVAGTIAALDNSIGVLGVAPSAELYAVKVLGASGSGSVSSIAQGLEWAGNNGMHVANLSLGSPSPSATLEQAVNSATSRGVLVVAASGNSGAGSISYPARYANAMAVGATDQDNNRASFSQYGAGLDIVAPGVNVQSTYPQSAYASLNGTSMATPHVAGAAALVKQKNPSWSNVQIRNRLKNTATSLGSTNLYGSGLVNAEAATR

SEQ ID NO: 63866 - protein, 380 aa, Unidentified
VRSKKLWIVASTALLISVAFSSSIASAAEEAKEKYLIGFNEQEAVSEFVEQVEANDEVAILSEEEEVEIELLHEFETIPVLSVELSPEDVDALELDPAISYIEEDAEVTTMAQSVPWGISRVQAPAAHNRRLTGRGVKVAVLDTGISTHPDLRITGGASFVPGEPSTQDGNGHGTHVAGTIAALDNSIGVLGVAPSAELYAVKVLGASGSGSVSSIAQGLEWAGNNGMHVANLSLGSPSPSATLEQAVNSATSRGVLVVAASGNSGAGSISYPARYANAMAVGATDQNNNRASFSQYGAGLDIVAPGVNVQSTYPGSTYASLNGTSMATPHVAGAAALVKQKNPSWRNVQIRNRLKNTATSLGSTNLYGSGLVNAEAATR

SEQ ID NO: 63867 - protein, 380 aa, Unidentified
VRSKKLWIVASTALLISVAFSSSIASAAEEAKEKYLIGFNEQEAVSEFVEQVEANDEVAILSEEEEVEIELLHEFETIPVLSVELSPEDVDALELDPAISYIEEDAEVTTMAQSVPWGISRVQAPAAHRRGLTGSGVKVAVLDTGISTHPDLNIRGGASFVPGEPSTQDGNGHGTHVAGTIAALNNSIGVLGVAPSAELYAVKVLGASGGGAISSIAQGLEWAGNNGMHVANLSLGSPSPSATLEQAVNSATSRGVLVVAASGNSGAGSISYPARYANAMAVGATDQNNNRASFSQYGAGLDIVAPGVNVQSTYPGSTYASLNGTSMATPHVAGAAVLVKQKNPSWSNVRIRNHLKNTATSLGSTNLYGSGLVRAEAATR

SEQ ID NO: 63868 - protein, 380 aa, Unidentified
VRSKKLWIVASTALLISVAFSSSIASAAEEAKEKYLIGFNEQEAVSEFVEQVEANDEVAILSEEEEVEIELLHEFETIPVLSVELSPEDVDALELDPAISYIEEDAEVTTMAQSVPWGISRVQAPAAHNRGLTGRGVKVAVLDTGISTHPDLRIRGGASFVPGEPSTQDGNGHGTHVAGTIAALNNSIGVLGVAPSAELYAVKVLGASGGGAISSIAQGLEWAGNNGMHVANLSLGSPSPSATLEQAVNSATSRGVLVVAASGNSGAGSISYPARYANAMAVGATDQNNNRASFSQYGAGLDIVAPGVNVQSTYPGSTYASLNGTSMATPHVAGAAVLVKQKNPSWSNVRIRNHLKNTATSLGSTNLYGSGLVNAEAATR

SEQ ID NO: 63869 - protein, 380 aa, Unidentified
VRSKKLWIVASTALLISVAFSSSIASAAEEAKEKYLIGFNEQEAVSEFVEQVEANDEVAILSEEEEVEIELLHEFETIPVLSVELSPEDVDALELDPAISYIEEDAEVTTMAQSVPWGISRVQAPAAHNRGLTGSGVKVAVLDTGISTHPDLRIRGGASFVPGEPSTQDGNGHGTHVAGTIAALNNSIGVLGVAPSAELYAVKVLGASGGGAISSIAQGLEWAGNNGMHVANLSLGSPSPSATLEQAVNSATSRGVLVVAASGNSGAGSISYPARYANAMAVGATDQNNNRASFSQYGAGLDIVAPGVNVQSTYPGSTYASLNGTSMATPHVAGAAVLVKQKNPSWSNVRIRNHLKNTATSLGSTNLYGSGLVRAEAATR

SEQ ID NO: 63870 - protein, 380 aa, Unidentified
VRSKKLWIVASTALLISVAFSSSIASAAEEAKEKYLIGFNEQEAVSEFVEQVEANDEVAILSEEEEVEIELLHEFETIPVLSVELSPEDVDALELDPAISYIEEDAEVTTMAQSVPWGISRVQAPAAHNRRLTGSGVKVAVLDTGISTHPDLNIRGGASFVPGEPSTQDGNGHGTHVAGTIAALNNSIGVLGVAPSAELYAVKVLGASGGGAISSIAQGLEWAGANGMHVANLSLGSPSPSATLEQAVNSATSRGVLVVAASGNSGAGSISYPARYANAMAVGATDQNNNRASFSQYGAGLDIVAPGVNVQSTYPGSTYASLNGTSMATPHVAGAAVLVKQKNPSWSNVRIRNHLKNTATSLGSTNLYGSGLVNAEAATR

SEQ ID NO: 63871 - protein, 380 aa, Unidentified
VRSKKLWIVASTALLISVAFSSSIASAAEEAKEKYLIGFNEQEAVSEFVEQVEANDEVAILSEEEEVEIELLHEFETIPVLSVELSPEDVDALELDPAISYIEEDAEVTTMAQSVPWGISRVQAPAAHRRRLTGRGVKVAVLDTGISTHPDLNIRGGASFVPGEPSTQDGNGHGTHVAGTIAALDNSIGVLGVAPSAELYAVKVLGASGSGSVSSIAQGLEWAGNNGMHVANLSLGSPSPSATLEQAVNSATSRGVLVVAASGNSGAGSISYPARYANAMAVGATDQNNNRASFSQYGAGLDIVAPGVNVQSTYPQSTYASLNGTSMATPHVAGAAALVKQKNPSWSDVQIRNRLKNTATSLGSTNLYGSGLVNAEAATR

SEQ ID NO: 63872 - protein, 380 aa, Unidentified
VRSKKLWIVASTALLISVAFSSSIASAAEEAKEKYLIGFNEQEAVSEFVEQVEANDEVAILSEEEEVEIELLHEFETIPVLSVELSPEDVDALELDPAISYIEEDAEVTTMAQSVPWGISRVQAPAAHRRGLTGRGVKVAVLDTGISTHPDLNIRGGASFVPGEPSTQDGNGHGTHVAGTIAALDNSIGVLGVAPSAELYAVKVLGASGSGSVSSIAQGLEWAGNNGMHVANLSLGSPSPSATLEQAVNSATSRGVLVVAASGNSGAGSISYPARYANAMAVGATDQDNNRASFSQYGAGLDLVAPGVNVQSTYPGSTYFSLNGTSMATPHVAGAAALVKQKNPSWSNVQIRNRLKNTATSLGSTNLYGSGLVNAEAATR

SEQ ID NO: 63873 - protein, 380 aa, Unidentified
VRSKKLWIVASTALLISVAFSSSIASAAEEAKEKYLIGFNEQEAVSEFVEQVEANDEVAILSEEEEVEIELLHEFETIPVLSVELSPEDVDALELDPAISYIEEDAEVTTMAQSVPWGISRVQAPAAHRRGLTGRGVKVAVLDTGISTHPDLNIRGGASFVPGEPSTQDGNGHGTHVAGTIAALDNSIGVLGVAPSAELYAVKVLGASGAGSVSSIAQGLEWAGANGMHVANLSLGSPSPSATLEQAVNSATSRGVLVVAASGNSGAGSISYPARYANAMAVGATDQNNNRASFSQYGAGLDIVAPGVNVQSTYPQSTYASLNGTSMATPHVAGAAALVKQKNPSWSNVQIRNRLKNTATSLGSTNLYGSGLVNAEAATR

SEQ ID NO: 63874 - protein, 380 aa, Unidentified
VRSKKLWIVASTALLISVAFSSSIASAAEEAKEKYLIGFNEQEAVSEFVEQVEANDEVAILSEEEEVEIELLHEFETIPVLSVELSPEDVDALELDPAISYIEEDAEVTTMAQSVPWGISRVQAPAAHRRGLTGRGVKVAVLDTGISTHPDLNIRGGASFVPGEPSTQDGNGHGTHVAGTIAALDNSIGVLGVAPSAELYAVKVLGASGAGSVSSIAQGLEWAGNNGMHVANLSLGSPSPSATLEQAVNSATSRGVLVVAASGNSGAGSISYPARYANAMAVGATDQNNNRASFSQYGAGLDLVAPGVNVQSTYPGSAYASLNGTSMATPHVAGAAALVKQKNPSWSNVQIRNRLKNTATSLGSTNLYGSGLVNAEAATR

SEQ ID NO: 63875 - protein, 380 aa, Unidentified
VRSKKLWIVASTALLISVAFSSSIASAAEEAKEKYLIGFNEQEAVSEFVEQVEANDEVAILSEEEEVEIELLHEFETIPVLSVELSPEDVDALELDPAISYIEEDAEVTTMAQSVPWGISRVQAPAAHNRGLTGSGVKVAVLDTGISTHPDLNIRGGASFVPGEPSTQDGNGHGTHVAGTIAALNNSIGVLGVAPSAELYAVKVLGASGGGAISSIAQGLEWAGNNGMHVANLSLGSPSPSATLEQAVNSATSRGVLVLAASGNSGAGSISYPARYANAMAVGATDQNNNRASFSQYGAGLDIVAPGVNVQSTYPGSTYASLNGTSMATPHVAGAAVLVKQKNPSWSNVRIRNRLKNTATSLGSTNLYGSGLVNAEAATR

SEQ ID NO: 63876 - protein, 380 aa, Unidentified
VRSKKLWIVASTALLISVAFSSSIASAAEEAKEKYLIGFNEQEAVSEFVEQVEANDEVAILSEEEEVEIELLHEFETIPVLSVELSPEDVDALELDPAISYIEEDAEVTTMAQSVPWGISRVQAPAAHRRGLTGRGVKVAVLDTGISTHPDLNIRGGASFVPGEPSTQDGNGHGTHVAGTIAALDNSIGVLGVAPSAELYAVKVLGASGSGSVSSIAQGLEWAGNNGMHVANLSLGSPSPSATLEQAVNSATSRGVLVVAASGNSGAGSISYPARYANAMAVGATDQNNNRASFSQYGAGLDLVAPGVNVQSTYPGSAYFSLNGTSMATPHVAGAAALVKQKNPSWSNVQIRNRLKNTATSLGSTNLYGSGLVNAEAATR

SEQ ID NO: 63877 - protein, 380 aa, Unidentified
VRSKKLWIVASTALLISVAFSSSIASAAEEAKEKYLIGFNEQEAVSEFVEQVEANDEVAILSEEEEVEIELLHEFETIPVLSVELSPEDVDALELDPAISYIEEDAEVTTMAQSVPWGISRVQAPAAHRRRLTGRGVKVAVLDTGISTHPDLNIRGGASFVPGEPSTQDGNGHGTHVAGTIAALDNSIGVLGVAPSAELYAVKVLGASGSGSVSSIAQGLEWAGNNGMHVANLSLGSPSPSATLEQAVNSATSRGVLVVAASGNSGAGSISYPARYANAMAVGATDQNNNRASFSQYGAGLDIVAPGVNVQSTYPQSAYASLNGTSMATPHVAGAAALVKQKNPSWSNVQIRNRLKNTATSLGSTNLYGSGLVNAEAATR

SEQ ID NO: 63878 - protein, 380 aa, Unidentified
VRSKKLWIVASTALLISVAFSSSIASAAEEAKEKYLIGFNEQEAVSEFVEQVEANDEVAILSEEEEVEIELLHEFETIPVLSVELSPEDVDALELDPAISYIEEDAEVTTMAQSVPWGISRVQAPAAHNRGLRGSGVKVAVLDTGISTHPDLNIRGGASFVPGEPSTQDGNGHGTHVAGTIAALDNSIGVLGVAPSAELYAVKVLGASGGGAISSIAQGLEWAGNNGMHVANLSLGSPSPSATLEQAVNSATSRGVLVVAASGNSGAGSISYPARYANAMAVGATDQNNNRASFSQYGAGLDIVAPGVNVQSTYPGSTYASLNGTSMATPHVAGAAVLVKQKNPSWSNVRIRNHLKNTATSLGSTNLYGSGLVNAEAATR

SEQ ID NO: 63879 - protein, 380 aa, Unidentified
VRSKKLWIVASTALLISVAFSSSIASAAEEAKEKYLIGFNEQEAVSEFVEQVEANDEVAILSEEEEVEIELLHEFETIPVLSVELSPEDVDALELDPAISYIEEDAEVTTMAQSVPWGISRVQAPAAHRRRLTGRGVKVAVLDTGISTHPDLNIRGGASFVPGEPSTQDGNGHGTHVAGTIAALDNSIGVLGVAPSAELYAVKVLGASGSGSVSSIAQGLEWAGANGMHVANLSLGSPSPSATLEQAVNSATSRGVLVVAASGNSGAGSISYPARYANAMAVGATDQNNNRASFSQYGAGLDIVAPGVNVQSTYPGSTYFSLNGTSMATPHVAGAAALVKQKNPSWSNVQIRNRLKNTATSLGSTNLYGSGLVNAEAATR

SEQ ID NO: 63880 - protein, 380 aa, Unidentified
VRSKKLWIVASTALLISVAFSSSIASAAEEAKEKYLIGFNEQEAVSEFVEQVEANDEVAILSEEEEVEIELLHEFETIPVLSVELSPEDVDALELDPAISYIEEDAEVTTMAQSVPWGISRVQALAAHNRRLTGRGVKVAVLDTGISTHPDLRITGGASFVPGEPSTQDGNGHGTHVAGTIAALNNSIGVLGVAPSAELYAVKVLGASGAGSVSSIAQGLEWAGNNGMHVANLSLGSPSPSATLEQAVNSATSRGVLVVAASGNSGAGSISYPARYANAMAVGATDQNNNRASFSQYGAGLDIVAPGVNVQSTYPGSTYFSLNGTSMATPHVAGAAALVKQKNPSWSNVQIRNHLKNTATSLGSTNLYGSGLVNAEAATR

SEQ ID NO: 63881 - protein, 380 aa, Unidentified
VRSKKLWIVASTALLISVAFSSSIASAAEEAKEKYLIGFNEQEAVSEFVEQVEANDEVAILSEEEEVEIELLHEFETIPVLSVELSPEDVDALELDPAISYIEEDAEVTTMAQSVPWGISRVQAPAAHRRGLTGRGVKVAVLDTGISTHPDLNIRGGASFVPGEPSTQDGNGHGTHVAGTIAALDNSIGVLGVAPSAELYAVKVLGASGAGSVSSIAQGLEWAGNNGMHVANLSLGSPSPSATLEQAVNSATSRGVLVVAASGNSGAGSISYPARYANAMAVGATDQDNNRASFSQYGAGLDIVAPGVNVQSTYPQSTYASLNGTSMATPHVAGAAALVKQKNPSWSNVQIRNRLKNTATSLGSTNLYGSGLVNAEAATR

SEQ ID NO: 63882 - protein, 380 aa, Unidentified
VRSKKLWIVASTALLISVAFSSSIASAAEEAKEKYLIGFNEQEAVSEFVEQVEANDEVAILSEEEEVEIELLHEFETIPVLSVELSPEDVDALELDPAISYIEEDAEVTTMAQSVPWGISRVQAPAAHNRGLTGSGVKVAVLDTGISTHPDLNIRGGASFVPGEPSTQDGNGHGTHVAGTIAALNNSIGVLGVAPSAELYAVKVLGASGGGAISSIAQGLEWAGNNGMHVANLSLGSPSPSATLEQAVNSATSRGVLVLAASGNSGAGSISYPARYANAMAVGATDQNNNRASFSQYGAGLDIVAPGVNVQSTYPGSTYASLNGTSMATPHVAGAAVLVKQKNPSWSNVRIRNHLKNTATSLGSTNLYGSGLVRAEAATR

SEQ ID NO: 63883 - protein, 380 aa, Unidentified
VRSKKLWIVASTALLISVAFSSSIASAAEEAKEKYLIGFNEQEAVSEFVEQVEANDEVAILSEEEEVEIELLHEFETIPVLSVELSPEDVDALELDPAISYIEEDAEVTTMAQSVPWGISRVQAPAAHRRGLTGRGVKVAVLDTGISTHPDLNIRGGASFVPGEPSTQDGNGHGTHVAGTIAALDNSIGVLGVAPSAELYAVKVLGASGGGAISSIAQGLEWAGNNGMHVANLSLGSPSPSATLEQAVNSATSRGVLVVAASGNSGAGSISYPARYANAMAVGATDQNNNRASFSQYGAGLDIVAPGVNVQSTYPGSTYASLNGTSMATPHVAGAAVLVKQKNPSWSNVQIRNHLKNTATSLGSTNLYGSGLVNAEAATR

SEQ ID NO: 63884 - protein, 380 aa, Unidentified
VRSKKLWIVASTALLISVAFSSSIASAAEEAKEKYLIGFNEQEAVSEFVEQVEANDEVAILSEEEEVEIELLHEFETIPVLSVELSPEDVDALELDPAISYIEEDAEVTTMAQSVPWGISRVQAPAAHNRKLTASGVKVAVLDTGISTHPDLWIRGGASFVPGEPSTQDGNGHGTHVAGTIAALNNSIGVLGVAPSAELYAVKVLGASGSGSVSSIAQGLEWAGLNGMHVANLSLGSPSPSATLEQAVNSATSRGVLVVAASGNSGAGSISYPARYANAMAVGATDQNNNRADFSQYGAGLDIVAPGVNVQSTYPGSAYASLNGTSMATPHVAGAAALVKQKNGSWSNVQIRNHLKNTATSLGSTNLYGSGLVNAEAATR

SEQ ID NO: 63885 - protein, 380 aa, Unidentified
VRSKKLWIVASTALLISVAFSSSIASAAEEAKEKYLIGFNEQEAVSEFVEQVEANDEVAILSEEEEVEIELLHEFETIPVLSVELSPEDVDALELDPAISYIEEDAEVTTMAQSVPWGISRVQAPAAHNRGLTGSGVKVAVLDTGISTHPDLNIRGGASFVPGEPSTQDGNGHGTHVAGTIAALNNSIGVLGVAPSAELYAVKVLGASGAGSISSIAQGLEWAGNNGMHVANLSLGSPSPSATLEQAVNSATSRGVLVVAASGNSGAESISYPARYANAMAVGATDQNNNRASFSQYGAGLDIVAPGVNVQSTYPGSTYASLNGTSMATPHVAGAAVLVKQKNPSWSNVRIRDRLKNTATSLGSTNLYGSGLVNAEAATR

SEQ ID NO: 63886 - protein, 380 aa, Unidentified
VRSKKLWIVASTALLISVAFSSSIASAAEEAKEKYLIGFNEQEAVSEFVEQVEANDEVAILSEEEEVEIELLHEFETIPVLSVELSPEDVDALELDPAISYIEEDAEVTTMAQSVPWGISRVQAPAAHNRGLTGSGVKVAVLDTGISTHPDLRIRGGASFVPGEPSTQDGNGHGTHVAGTIAALNNSIGVLGVAPDAELYAVKVLGASGGGAISSIAQGLEWAGNNGMHVANLSLGSPSPSATLEQAVNSATSRGVLVVAASGNSGAGSISYPARYANAMAVGATDQNNNRASFSQYGAGLDIVAPGVNVQSTYPGSTYASLNGTSMATPHVAGAAVLVKQKNPSWSNVRIRNHLKNTATSLGSTNLYGSGLVNAEAATR

SEQ ID NO: 63887 - protein, 380 aa, Unidentified
VRSKKLWIVASTALLISVAFSSSIASAAEEAKEKYLIGFNEQEAVSEFVEQVEANDEVAILSEEEEVEIELLHEFETIPVLSVELSPEDVDALELDPAISYIEEDAEVTTMAQSVPWGISRVQAPAAHNRRLTGRGVKVAVLDTGISTHPDLRITGGASFVPGEPSTQDGNGHGTHVAGTIAALNNSIGVLGVAPSAELYAVKVLGASGSGSVSSIAQGLEWAGANGMHVANLSLGSPSPSATLEQAVNSATSRGVLVVAASGNSGAGSISYPARYANAMAVGATDQNNNRASFSQYGAGLDIVAPGVNVQSTYPGSAYFSLNGTSMATPHVAGAAALVKQKNPSWSNVQIRNHLKNTATSLGSTNLYGSGLVNAEAATR

SEQ ID NO: 63888 - protein, 380 aa, Unidentified
VRSKKLWIVASTALLISVAFSSSIASAAEEAKEKYLIGFNEQEAVSEFVEQVEANDEVAILSEEEEVEIELLHEFETIPVLSVELSPEDVDALELDPAISYIEEDAEVTTMAQSVPWGISRVQAPAAHNRGLTGRGVKVAVLDTGISTHPDLNIRGGASFVPGEPSTQDGNGHGTHVAGTIAALNNSIGVLGVAPSAELYAVKVLGASGGGAISSIAQGLEWAGNNGMHVANLSLGSPSPSATLEQAVNSATSRGVLVLAASGNSGAGSISYPARYANAMAVGATDQNNNRASFSQYGAGLDIVAPGVNVQSTYPGSTYASLNGTSMATPHVAGAAVLVKQKNPSWSNVRIRNHLKNTATSLGSTNLYGSGLVNAEAATR

SEQ ID NO: 63889 - protein, 380 aa, Unidentified
VRSKKLWIVASTALLISVAFSSSIASAAEEAKEKYLIGFNEQEAVSEFVEQVEANDEVAILSEEEEVEIELLHEFETIPVLSVELSPEDVDALELDPAISYIEEDAEVTTMAQSVPWGISRVQAPAAHNRRLWGSGVKVAVLDTGISTHPDLNIRGGASFVPGEPSTQDGNGHGTHVAGTIAALNNSIGVLGVAPSAELYAVKVLGASGAGAISSIAQGLEWAGNNGMHVANLSLGSPSPSATLEQAVNSATSRGVLVVAASGNSGAGSISYPARYANAMAVGATDQNNNRASFSQYGAGLDIVAPGVNVQSTYPGSTYASLNGTSMATPHVAGAAVLVKQKNPSWSNVRIRNHLKNTATSLGSTNLYGSGLVNAEAATR

SEQ ID NO: 63890 - protein, 380 aa, Unidentified
VRSKKLWIVASTALLISVAFSSSIASAAEEAKEKYLIGFNEQEAVSEFVEQVEANDEVAILSEEEEVEIELLHEFETIPVLSVELSPEDVDALELDPAISYIEEDAEVTTMAQSVPWGISRVQAPAAHRRGLWGRGVKVAVLDTGISTHPDLNIRGGASFVPGEPSTQDGNGHGTHVAGTIAALDNSIGVLGVAPSAELYAVKVLGASGSGSVSSIAQGLEWAGNNGMHVANLSLGSPSPSATLEQAVNSATSRGVLVVAASGNSGAGSISYPARYANAMAVGATDQNNNRASFSQYGAGLDLVAPGVNVQSTYPQSTYASLNGTSMATPHVAGAAALVKQKNPSWSNVQIRNRLKNTATSLGSTNLYGSGLVNAEAATR

SEQ ID NO: 63891 - protein, 380 aa, Unidentified
VRSKKLWIVASTALLISVAFSSSIASAAEEAKEKYLIGFNEQEAVSEFVEQVEANDEVAILSEEEEVEIELLHEFETIPVLSVELSPEDVDALELDPAISYIEEDAEVTTMAQSVPWGISRVQAPAAHRRGLTGRGVKVAVLDTGISTHPDLNIRGGASFVPGEPSTQDGNGHGTHVAGTIAALDNSIGVLGVAPSAELYAVKVLGASGAGSVSSIAQGLEWAGNNGMHVANLSLGSPSPSATLEQAVNSATSRGVLVVAASGNSGAGSISYPARYANAMAVGATDQDNNRASFSQYGAGLDIVAPGVNVQSTYPGSAYASLNGTSMATPHVAGAAALVKQKNPSWSNVQIRNRLKNTATSLGSTNLYGSGLVNAEAATR

SEQ ID NO: 63892 - protein, 380 aa, Unidentified
VRSKKLWIVASTALLISVAFSSSIASAAEEAKEKYLIGFNEQEAVSEFVEQVEANDEVAILSEEEEVEIELLHEFETIPVLSVELSPEDVDALELDPAISYIEEDAEVTTMAQSVPWGISRVQAPAAHNRGLRGSGVKVAVLDTGISTHPDLRIRGGASFVPGEPSTQDGNGHGTHVAGTIAALNNSIGVLGVAPSAELYAVKVLGASGGGAISSIAQGLEWAGNNGMHVANLSLGSPSPSATLEQAVNSATSRGVLVVAASGNSGAGSISYPARYANAMAVGATDQNNNRASFSQYGAGLDIVAPGVNVQSTYPGSTYASLNGTSMATPHVAGAAVLVKQKNPSWSNVRIRNHLKNTATSLGSTNLYGSGLVNAEAATR

SEQ ID NO: 63893 - protein, 380 aa, Unidentified
VRSKKLWIVASTALLISVAFSSSIASAAEEAKEKYLIGFNEQEAVSEFVEQVEANDEVAILSEEEEVEIELLHEFETIPVLSVELSPEDVDALELDPAISYIEEDAEVTTMAQSVPWGISRVQAPAAHNRGLRGSGVKVAVLDTGISTHPDLNIRGGASFVPGEPSTQDGNGHGTHVAGTIAALNNSIGVLGVAPSAELYAVKVLGASGGGAISSIAQGLEWAGNNGMHVANLSLGSPSPSATLEQAVNSATSRGVLVLAASGNSGAGSISYPARYANAMAVGATDQNNNRASFSQYGAGLDIVAPGVNVQSTYPGSTYASLNGTSMATPHVAGAAVLVKQKNPSWSNVRIRNHLKNTATSLGSTNLYGSGLVNAEAATR

SEQ ID NO: 63894 - protein, 380 aa, Unidentified
VRSKKLWIVASTALLISVAFSSSIASAAEEAKEKYLIGFNEQEAVSEFVEQVEANDEVAILSEEEEVEIELLHEFETIPVLSVELSPEDVDALELDPAISYIEEDAEVTTMAQSVPWGISRVQAPAAHNRRLTGSGVKVAVLDTGISTHPDLNIRGGASFVPGEPSTQDGNGHGTHVAGTIAALNNSIGVLGVAPSAELYAVKVLGASGGGSISSIAQGLEWAGNNGMHVANLSLGSPSPSATLEQAVNSATSRGVLVVAASGNSGAGSISYPARYANAMAVGATDQNNNRASFSQYGAGLDIVAPGVNVQSTYPGSAYFSLNGTSMATPHVAGAAVLVKQKNPSWSNVRIRNHLKNTATSLGSTNLYGSGLVNAEAATR

SEQ ID NO: 63895 - protein, 380 aa, Unidentified
VRSKKLWIVASTALLISVAFSSSIASAAEEAKEKYLIGFNEQEAVSEFVEQVEANDEVAILSEEEEVEIELLHEFETIPVLSVELSPEDVDALELDPAISYIEEDAEVTTMAQSVPWGISRVQAPAAHNRGLTGSGVKVAVLDTGISTHPDLNIRGGASFVPGEPSTQDGNGHGTHVAGTIAALNNSIGVLGVAPDAELYAVKVLGASGGGAISSIAQGLEWAGNNGMHVANLSLGSPSPSATLEQAVNSATSRGVLVVAASGNSGAGSISYPARYANAMAVGATDQNNNRASFSQYGAGLDIVAPGVNVQSTYPGSTYASLNGTSMATPHVAGAAVLVKQKNPSWSNVRIRNHLKNTATSLGSTNLYGSGLVRAEAATR

SEQ ID NO: 63896 - protein, 380 aa, Unidentified
VRSKKLWIVASTALLISVAFSSSIASAAEEAKEKYLIGFNEQEAVSEFVEQVEANDEVAILSEEEEVEIELLHEFETIPVLSVELSPEDVDALELDPAISYIEEDAEVTTMAQSVPWGISRVQAPAAHNRGLTGSGVKVAVLDTGISTHPDLNIRGGASFVPGEPSTQDGNGHGTHVAGTIAALDNSIGVLGVAPSAELYAVKVLGASGGGAISSIAQGLEWAGNNGMHVANLSLGSPSPSATLEQAVNSATSRGVLVVAASGNSGAGSISYPARYANAMAVGATDQNNNRASFSQYGAGLDIVAPGVNVQSTYPGSTYASLNGTSMATPHVAGAAVLVKQKNPSWSNVRIRNRLKNTATSLGSTNLYGSGLVNAEAATR

SEQ ID NO: 63897 - protein, 380 aa, Unidentified
VRSKKLWIVASTALLISVAFSSSIASAAEEAKEKYLIGFNEQEAVSEFVEQVEANDEVAILSEEEEVEIELLHEFETIPVLSVELSPEDVDALELDPAISYIEEDAEVTTMAQSVPWGISRVQAPAAHRRGLTGSGVKVAVLDTGISTHPDLRIRGGASFVPGEPSTQDGNGHGTHVAGTIAALNNSIGVLGVAPSAELYAVKVLGASGGGAISSIAQGLEWAGNNGMHVANLSLGSPSPSATLEQAVNSATSRGVLVVAASGNSGAGSISYPARYANAMAVGATDQNNNRASFSQYGAGLDIVAPGVNVQSTYPGSTYASLNGTSMATPHVAGAAVLVKQKNPSWSNVRIRNHLKNTATSLGSTNLYGSGLVNAEAATR

SEQ ID NO: 63898 - protein, 380 aa, Unidentified
VRSKKLWIVASTALLISVAFSSSIASAAEEAKEKYLIGFNEQEAVSEFVEQVEANDEVAILSEEEEVEIELLHEFETIPVLSVELSPEDVDALELDPAISYIEEDAEVTTMAQSVPWGISRVQAPAAHRRGLTGRGVKVAVLDTGISTHPDLNIRGGASFVPGEPSTQDGNGHGTHVAGTIAALDNSIGVLGVAPSAELYAVKVLGASGSGSVSSIAQGLEWAGNNGMHVANLSLGSPSPSATLEQAVNSATSRGVLVVAASGNSGAGSISYPARYANAMAVGATDQNNNRASFSQYGAGLDIVAPGVNVQSTYPQSAYFSLNGTSMATPHVAGAAALVKQKNPSWSNVQIRNRLKNTATSLGSTNLYGSGLVNAEAATR

SEQ ID NO: 63899 - protein, 380 aa, Unidentified
VRSKKLWIVASTALLISVAFSSSIASAAEEAKEKYLIGFNEQEAVSEFVEQVEANDEVAILSEEEEVEIELLHEFETIPVLSVELSPEDVDALELDPAISYIEEDAEVTTMAQSVPWGISRVQAPAAHRRRLTGRGVKVAVLDTGISTHPDLNIRGGASFVPGEPSTQDGNGHGTHVAGTIAALDNSIGVLGVAPSAELYAVKVLGASGSGSVSSIAQGLEWAGNNGMHVANLSLGSPSPSATLEQAVNSATSRGVLVVAASGNSGAGSISYPARYANAMAVGATDQDNNRASFSQYGAGLDIVAPGVNVQSTYPGSAYASLNGTSMATPHVAGAAALVKQKNPSWSNVQIRNRLKNTATSLGSTNLYGSGLVNAEAATR

SEQ ID NO: 63900 - protein, 380 aa, Unidentified
VRSKKLWIVASTALLISVAFSSSIASAAEEAKEKYLIGFNEQEAVSEFVEQVEANDEVAILSEEEEVEIELLHEFETIPVLSVELSPEDVDALELDPAISYIEEDAEVTTMAQSVPWGISRVQAPAAHRRGLTGRGVKVAVLDTGISTHPDLNIRGGASFVPGEPSTQDGNGHGTHVAGTIAALDNSIGVLGVAPSAELYAVKVLGASGSGSVSSIAQGLEWAGNNGMHVANLSLGSPSPSATLEQAVNSATSRGVLVVAASGNSGAGSISYPARYANAMAVGATDQNNNRASFSQYGAGLDIVAPGVNVQSTYPGSAYFSLNGTSMATPHVAGAAALVKQKNPSWSNVQIRNRLKNTATSLGSKNLYGSGLVNAEAATR

SEQ ID NO: 63901 - protein, 380 aa, Unidentified
VRSKKLWIVASTALLISVAFSSSIASAAEEAKEKYLIGFNEQEAVSEFVEQVEANDEVAILSEEEEVEIELLHEFETIPVLSVELSPEDVDALELDPAISYIEEDAEVTTMAQSVPWGISRVQAPAAHRRGLTGRGVKVAVLDTGISTHPDLNIRGGASFVPGEPSTQDGNGHGTHVAGTIAALDNSIGVLGVAPSAELYAVKVLGASGSGSVSSIAQGLEWAGANGMHVANLSLGSPSPSATLEQAVNSATSRGVLVVAASGNSGAGSISYPARYANAMAVGATDQDNNRASFSQYGAGLDIVAPGVNVQSTYPGSAYASLNGTSMATPHVAGAAALVKQKNPSWSNVQIRNRLKNTATSLGSTNLYGSGLVNAEAATR

SEQ ID NO: 63902 - protein, 380 aa, Unidentified
VRSKKLWIVASTALLISVAFSSSIASAAEEAKEKYLIGFNEQEAVSEFVEQVEANDEVAILSEEEEVEIELLHEFETIPVLSVELSPEDVDALELDPAISYIEEDAEVTTMAQSVPWGISRVQAPAAHRRRLTGRGVKVAVLDTGISTHPDLNIRGGASFVPGEPSTQDGNGHGTHVAGTIAALDNSIGVLGVAPSAELYAVKVLGASGAGSVSSIAQGLEWAGNNGMHVANLSLGSPSPSATLEQAVNSATSRGVLVVAASGNSGAGSISYPARYANAMAVGATDQNNNRASFSQYGAGLDIVAPGVNVQSTYPGSTYASLNGTSMATPHVAGAAVLVKQKNPSWSNVRIRNHLKNTATSLGSTNLYGSGLVNAEAATR

SEQ ID NO: 63903 - protein, 380 aa, Unidentified
VRSKKLWIVASTALLISVAFSSSIASAAEEAKEKYLIGFNEQEAVSEFVEQVEANDEVAILSEEEEVEIELLHEFETIPVLSVELSPEDVDALELDPAISYIEEDAEVTTMAQSVPWGISRVQAPAAHNRGLTAFGVKVAVLDTGISTHPDLWIRGGASFVPGEPSTQDGNGHGTHVAGTIAALNNSIGVLGVAPSAELYAVKVLGASGSGSVSSIAQGLEWAGLNRMHVANLSLGSPSPSATLEQAVNSATSRGVLVVAASGNSGAGSISYPARYANAMAVGATDQNNNRADFSQYGAGLDIVAPGVNVQSTYPGSTYASLNGTSMATPHVAGAAALVKQKNGSWSNVQIRNHLKNTATSLGSTNLYGSGLVNAEAATR

SEQ ID NO: 63904 - protein, 380 aa, Unidentified
VRSKKLWIVASTALLISVAFSSSIASAAEEAKEKYLIGFNEQEAVSEFVEQVEANDEVAILSEEEEVEIELLHEFETIPVLSVELSPEDVDALELDPAISYIEEDAEVTTMAQSVPWGISRVQAPAAHNRGLTGSGVKVAVLDTGISTHPDLRIRGGASFVPGEPSTQDGNGHGTHVAGTIAALDNSIGVLGVAPSAELYAVKVLGASGGGAISSIAQGLEWAGNNGMHVANLSLGSPSPSATLEQAVNSATSRGVLVVAASGNSGAGSISYPARYANAMAVGATDQNNNRASFSQYGAGLDIVAPGVNVQSTYPGSTYASLNGTSMATPHVAGAAVLVKQKNPSWSNVRIRNHLKNTATSLGSTNLYGSGLVNAEAATR

SEQ ID NO: 63905 - protein, 380 aa, Unidentified
VRSKKLWIVASTALLISVAFSSSIASAAEEAKEKYLIGFNEQEAVSEFVEQVEANDEVAILSEEEEVEIELLHEFETIPVLSVELSPEDVDALELDPAISYIEEDAEVTTMAQSVPWGISRVQAPAAHNRKLTGSGVKVAVLDTGISTHPDLWIRGGASFVPGEPSTQDGEGHGTHVAGTIAALNNSIGVLGVAPSAELYAVKVLGASGSGSVSSIAQGLEWAGLNGMHVANLSLGSPSPSATLEQAVNSATSRGVLVVAASGNSGAGSISYPARYANAMAVGATDQNNNRADFSQYGAGLDIVAPGVNVQSTYPGSAYASLNGTSMATPHVAGAAALVKQKNGSWSNVQIRNHLKNTATSLGSTNLYGSGLVNAEAATR

SEQ ID NO: 63906 - protein, 380 aa, Unidentified
VRSKKLWIVASTALLISVAFSSSIASAAEEAKEKYLIGFNEQEAVSEFVEQVEANDEVAILSEEEEVEIELLHEFETIPVLSVELSPEDVDALELDPAISYIEEDAEVTTMAQSVPWGISRVQAPAAHNRKLTAFGVKVAVLDTGISTHPDLNIRGGASFVPGEPSTQDGEGHGTHVAGTIAALNNSIGVLGVAPSAELYAVKVLGASGSGSVSSIAQGLEWAGNNRMHVANLSLGSPSPSATLEQAVNSATSRGVLVVAASGNSGAGSISYPARYANAMAVGATDQNNNRADFSQYGAGLDIVAPGVNVQSTYPGSAYASLNGTSMATPHVAGAAALVKQKNPSWSNVQIRNHLKNTATSLGSTNLYGSGLVNAEAATR

SEQ ID NO: 63907 - protein, 380 aa, Unidentified
VRSKKLWIVASTALLISVAFSSSIASAAEEAKEKYLIGFNEQEAVSEFVEQVEANDEVAILSEEEEVEIELLHEFETIPVLSVELSPEDVDALELDPAISYIEEDAEVTTMAQSRPWGISRVQAPAAHNRGLTGSGVKVAVLDTGISTHPDLRIRGGASFVPGEPSTQDGNGHGTHVAGTIAALNNSIGVLGVAPSAELYAVKVLGASGGGAISSIAQGLEWAGNNGMHVANLSLGSPSPSATLEQAVNSATSRGVLVVAASGNSGAGSISYPARYANAMAVGATDQNNNRASFSQYGAGLDIVAPGVNVQSTYPGSTYASLNGTSMATPHVAGAAVLVKQKNPSWSNVRIRNHLKNTATSLGSTNLYGSGLVNAEAATR

SEQ ID NO: 63908 - protein, 380 aa, Unidentified
VRSKKLWIVASTALLISVAFSSSIASAAEEAKEKYLIGFNEQEAVSEFVEQVEANDEVAILSEEEEVEIELLHEFETIPVLSVELSPEDVDALELDPAISYIEEDAEVTTMAQSVPWGISRVQAPAAHRRGLTGRGVKVAVLDTGISTHPDLNIRGGASFVPGEPSTQDGNGHGTHVAGTIAALDNSIGVLGVAPSAELYAVKVLGASGAGSVSSIAQGLEWAGNNGMHVANLSLGSPSPSATLEQAVNSATSRGVLVVAASGNSGAGSISYPARYANAMAVGATDQNNNRASFSQYGAGLDIVAPGVNVQSTYPQSAYASLNGTSMATPHVAGAAALVKQKNPSWSNVQIRNRLKNTATSLGSTNLYGSGLVNAEAATR

SEQ ID NO: 63909 - protein, 380 aa, Unidentified
VRSKKLWIVASTALLISVAFSSSIASAAEEAKEKYLIGFNEQEAVSEFVEQVEANDEVAILSEEEEVEIELLHEFETIPVLSVELSPEDVDALELDPAISYIEEDAEVTTMAQSVPWGISRVQAPAAHRRGLTGRGVKVAVLDTGISTHPDLNIRGGASFVPGEPSTQDGNGHGTHVAGTIAALDNSIGVLGVAPSAELYAVKVLGASGSGSVSSIAQGLEWAGNNGMHVANLSLGSPSPSATLEQAVNSATSRGVLVVAASGNSGAGSISYPARYANAMAVGATDQDNNRASFSQYGAGLDLVAPGVNVQSTYPQSTYASLNGTSMATPHVAGAAALVKQKNPSWSNVQIRNRLKNTATSLGSTNLYGSGLVNAEAATR

SEQ ID NO: 63910 - protein, 380 aa, Unidentified
VRSKKLWIVASTALLISVAFSSSIASAAEEAKEKYLIGFNEQEAVSEFVEQVEANDEVAILSEEEEVEIELLHEFETIPVLSVELSPEDVDALELDPAISYIEEDAEVTTMAQSVPWGISRVQAPAAHNRGLTGSGVKVAVLDTGISTHPDLNIRGGASFVPGEPSTQDGNGHGTHVAGTIAALDNSIGVLGVAPDAELYAVKVLGASGGGAISSIAQGLEWAGNNGMHVANLSLGSPSPSATLEQAVNSATSRGVLVVAASGNSGAGSISYPARYANAMAVGATDQNNNRASFSQYGAGLDIVAPGVNVQSTYPGSTYASLNGTSMATPHVAGAAVLVKQKNPSWSNVRIRNHLKNTATSLGSTNLYGSGLVNAEAATR

SEQ ID NO: 63911 - protein, 380 aa, Unidentified
VRSKKLWIVASTALLISVAFSSSIASAAEEAKEKYLIGFNEQEAVSEFVEQVEANDEVAILSEEEEVEIELLHEFETIPVLSVELSPEDVDALELDPAISYIEEDAEVTTMAQSVPWGISRVQAPAAHNRGLTGSGVKVAVLDTGISTHPDLDIRGGASFVPGEPSTQDGNGHGTHVAGTIAALNNSIGVLGVAPSAELYAVKVLGASGGGAISSIAQGLEWAGNNGMHVANLSLGSPSPSATLEQAVNSATSRGVLVVAASGNSGAGSISYPARYANAMAVGATDQNNNRASFSQYGAGLDIVAPGVNVQSTYPGSTYASLNGTSMATPHVAGAAVLVKQKNPSWSNVRIRNHLKNTATSLGSTNLYGSGLVRAEAATR

SEQ ID NO: 63912 - protein, 380 aa, Unidentified
VRSKKLWIVASTALLISVAFSSSIASAAEEAKEKYLIGFNEQEAVSEFVEQVEANDEVAILSEEEEVEIELLHEFETIPVLSVELSPEDVDALELDPAISYIEEDAEVTTMAQSVPWGISRVQAPAAHRRRLTGRGVKVAVLDTGISTHPDLRITGGASFVPGEPSTQDGNGHGTHVAGTIAALDNSIGVLGVAPSAELYAVKVLGASGSGSVSSIAQGLEWAGNNGMHVANLSLGSPSPSATLEQAVNSATSRGVLVVAASGNSGAGSISYPARYANAMAVGATDQNNNRASFSQYGAGLDIVAPGVNVQSTYPGSTYASLNGTSMATPHVAGEAALVKQKNPSWSNVQIRNHLKNTATSLGSTNLYGSGLVNAEAATR

SEQ ID NO: 63913 - protein, 380 aa, Unidentified
VRSKKLWIVASTALLISVAFSSSIASAAEEAKXKYLIGFNEQEAVSEFVEQVXANDEVAILSEEEEVEIELLHEFETIPVLSVELSPEDVDALELDPAISYIEEDAEVTTMAQSVPWGISRVQAPAAHNRGLTGSGVKVAVLDTGISTHPDLNIRGGASFVPGEPSTQDGNGHGTHVAGTIAALNNSIGVLGVAPNAELYAVKVLGASGSGSVSSIAQGLEWAGNNVMHVANLSLGLQAPSATLEQAVNSATSRGVLVVAASGNSGAGSISYPARYANAMAVGATDQNNNRASFSQYGAGLDIVAPGVNVQSTYPGSTYASLNGTSMATPHVAGAAALVKQKNPSWSNVQIRNHLKNTATSLGSTNLYGSGLVNAEAATR

SEQ ID NO: 63914 - protein, 380 aa, Unidentified
VRSKKLWIVASTALLISVAFSSSIASAAEEAKEKYLIGFNEQEAVSEFVEQVEANDEVAILSEEEEVEIELLHEFETIPVLSVELSPEDVDALELDPAISYIEEDAEVTTMAQSVPWGISRVQAPAAHRRGLTGRGVKVAVLDTGISTHPDLNIRGGASFVPGEPSTQDGNGHGTHVAGTIAALDNSIGVLGVAPSAELYAVKVLGASGSGSVSSIAQGLEWAGANGMHVANLSLGSPSPSATLEQAVNSATSRGVLVVAASGNSGAGSISYPARYANAMAVGATDQDNNRASFSQYGAGLDIVAPGVNVQSTYPGSTYFSLNGTSMATPHVAGAAALVKQKNPSWSNVQIRNRLKNTATSLGSTNLYGSGLVNAEAATR

SEQ ID NO: 63915 - protein, 380 aa, Unidentified
VRSKKLWIVASTALLISVAFSSSIASAAEEAKEKYLIGFNEQEAVSEFVEQVEANDEVAILSEEEEVEIELLHEFETIPVLSVELSPEDVDALELDPAISYIEEDAEVTTMAQSVPWGISRVQAPAAHNRGLTGSGVKVAVLDTGISTHPDLNIRGGASFVPGEPSTQDGNGHGTHVAGTIAALNNSIGVLGVAPSAELYAVKVLGASGSGGVSSIAQGLEWAGNNGMHVANLSLGSPSPSATLEQAVNSATSRGVLVVAASGNSGEGSISYPARYANAMAVGATDQNNNRADFSQYGAGLDIVAPGVNVQSTYPGSTYASLNGTSMATPHVAGAAVLVKQKNPSWSNVRIRDRLKNTATSLGSTNLYGSGLVNAEAATR

SEQ ID NO: 63916 - protein, 380 aa, Unidentified
VRSKKLWIVASTALLISVAFSSSIASAAEEAKEKYLIGFNEQEAVSEFVEQVEANDEVAILSEEEEVEIELLHEFETIPVLSVELSPEDVDALELDPAISYIEEDAEVTTMAQSVPWGISRVQAPAAHRRGLTGRGVKVAVLDTGISTHPDLNIRGGASFVPGEPSTQDGNGHGTHVAGTIAALDNSIGVLGVAPSAELYAVKVLGASGAGSVSSIAQGLEWAGNNGMHVANLSLGSPSPSATLEQAVNSATSRGVLVVAASGNSGAGSISYPARYANAMAVGATDQNNNRASFSQYGAGLDLVAPGVNVQSTYPQSTYASLNGTSMATPHVAGAAALVKQKNPSWSNVQIRNRLKNTATSLGSTNLYGSGLVNAEAATR

SEQ ID NO: 63917 - protein, 380 aa, Unidentified
VRSKKLWIVASTALLISVAFSSSIASAAEEAKEKYLIGFNEQEAVSEFVEQVEANDEVAILSEEEEVEIELLHEFETIPVLSVELSPEDVDALELDPAISYIEEDAEVTTMAQSVPWGISRVQAPAAHRRGLTGSGVKVAVLDTGISTHPDLDIRGGASFVPGEPSTQDGNGHGTHVAGTIAALNNSIGVLGVAPSAELYAVKVLGASGGGAISSIAQGLEWAGNNGMHVANLSLGSPSPSATLEQAVNSATSRGVLVVAASGNSGAGSISYPARYANAMAVGATDQNNNRASFSQYGAGLDIVAPGVNVQSTYPGSTYASLNGTSMATPHVAGAAVLVKQKNPSWSNVRIRNHLKNTATSLGSTNLYGSGLVNAEAATR

SEQ ID NO: 63918 - protein, 380 aa, Unidentified
VRSKKLWIVASTALLISVAFSSSIASAAEEAKEKYLIGFNEQEAVSEFVEQVEANDEVAILSEEEEVEIELLHEFETIPVLSVELSPEDVDALELDPAISYIEEDAEVTTMAQSVPWGISRVQAPAAHRRGLTGSGVKVAVLDTGISTHPDLNIRGGASFVPGEPSTQDGNGHGTHVAGTIAALNNSIGVLGVAPSAELYAVKVLGASGGGAISSIAQGLEWAGNNGMHVANLSLGSPSPSATLEQAVNSATSRGVLVLAASGNSGAGSISYPARYANAMAVGATDQNNNRASFSQYGAGLDIVAPGVNVQSTYPGSTYASLNGTSMATPHVAGAAVLVKQKNPSWSNVRIRNHLKNTATSLGSTNLYGSGLVNAEAATR

SEQ ID NO: 63919 - protein, 380 aa, Unidentified
VRSKKLWIVASTALLISVAFSSSIASAAEEAKEKYLIGFNEQEAVSEFVEQVEANDEVAILSEEEEVEIELLHEFETIPVLSVELSPEDVDALELDPAISYIEEDAEVTTMAQSVPWGISRVQAPAAHRRGLTGRGVKVAVLDTGISTHPDLNIRGGASFVPGEPSTQDGNGHGTHVAGTIAALDNSIGVLGVAPSAELYAVKVLGASGAGSVSSIAQGLEWAGNNGMHVANLSLGSPSPSATLEQAVNSATSRGVLVVAASGNSGAGSISYPARYANAMAVGATDQNNNRASFSQYGAGLDIVAPGVNVQSTYPQSTYFSLNGTSMATPHVAGAAALVKQKNPSWSNVQIRNRLKNTATSLGSTNLYGSGLVNAEAATR

SEQ ID NO: 63920 - protein, 380 aa, Unidentified
VRSKKLWIVASTALLISVAFSSSIASAAEEAKEKYLIGFNEQEAVSEFVEQVEANDEVAILSEEEEVEIELLHEFETIPVLSVELSPEDVDALELDPAISYIEEDAEVTTMAQSVPWGISRVQAPAAHNRGLTGSGVKVAVLDTGISTHPDLNIRGGASFVPGEPSTQDGNGHGTHVAGTIAALNNSIGVLGVAPSAELYAVKVLGASGGGAISSIAQGLEWAGNNGMHVANLSLGSPSPSATLEQAVNSATSRGVLVVAASGNSGADSISYPARYANAMAVGATDQNNNRASFSQYGAGLDIVAPGVNVQSTYPGSTYASLNGTSMATPHVAGAAVLVKQKNPSWSNVRIRRHLKNTATSLGSTNLYGSGLVNAEAATR

SEQ ID NO: 63921 - protein, 380 aa, Unidentified
VRSKKLWIVASTALLISVAFSSSIASAAEEAKEKYLIGFNEQEAVSEFVEQVEANDEVAILSEEEEVEIELLHEFETIPVLSVELSPEDVDALELDPAISYIEEDAEVTTMAQSVPWGISRVQAPAAHNRGLTGSGVKVAVLDTGISTHPDLNIRGGASFVPGEPSTQDGNGHGTHVAGTIAALNNSIGVLGVAPSAELYAVKVLGASGGGAISSIARGLEWAGNNGMHVANLSLGSPSPSATLEQAVNSATSRGVLVVAASGNSGAGSISYPARYANAMAVGATDQNNNRASFSQYGAGLDIVAPGVNVQSTYPGPTYASLNGTSMATPHVAGAAVLVKQKNPSWSNVRIRNHLKNTATSLGSTNLYGSGLVNAEAATR

SEQ ID NO: 63922 - protein, 380 aa, Unidentified
VRSKKLWIVASTALLISVAFSSSIASAAEEAKEKYLIGFNEQEAVSEFVEQVEANDEVAILSEEEEVEIELLHEFETIPVLSVELSPEDVDALELDPAISYIEEDAEVTTMAQSVPWGISRVQAPAAHRRRLTGRGVKVAVLDTGISTHPDLNIRGGASFVPGEPSTQDGNGHGTHVAGTIAALDNSIGVLGVAPSAELYAVKVLGASGSGSVSSIAQGLEWAGNNGMHVANLSLGSPSTSATLEQAVNSATSRGVLVVAASGNSGAGSISYPARYANAMAVGATDQNNNRASFSQYGAGLDIVAPGVNVQSTYPGSTYFSLNGTSMATPHVAGAAALVKQKNPSWSNVQIRNRLKNTATSLGSTNLYGSGLVNAEAATR

SEQ ID NO: 63923 - protein, 380 aa, Unidentified
VRSKKLWIVASTALLISVAFSSSIASAAEEAKEKYLIGFNEQEAVSEFVEQVEANDEVAILSEEEEVEIELLHEFETIPVLSVELSPEDVDALELDPAISYIEEDAEVTTMAQSVPWGISRVQAPAAHRRGLTGRGVKVAVLDTGISTHPDLNIRGGASFVPGEPSTQDGNGHGTHVAGTIAALDNSIGVLGVAPSAELYAVKVLGASGSGSVSSIAQGLEWAGNNGMHVANLSLGSPSPSATLEQAVNSATSRGVLVVAASGNSGAGSISYPARYANAMAVGATDQDNNRASFSQYGAGLDIVAPGVNVQSTYPGSAYFSLNGTSMATPHVAGAAALVKQKNPSWSNVQIRNRLKNTATSLGSTNLYGSGLVNAEAATR

SEQ ID NO: 63924 - protein, 380 aa, Unidentified
VRSKKLWIVASTALLISVAFSSSIASAAEEAKEKYLIGFNEQEAVSEFVEQVEANDEVAILSEEEEVEIELLHEFETIPVLSVELSPEDVDALELDPAISYIEEDAEVTTMAQSVPWGISRVQAPAAHNRRLTGSGVKVAVLDTGISTHPDLNIRGGASFVPGEPSTQDGNGHGTHVAGTIAALNNSIGVLGVAPSAELYAVKVLGASGAGAISSIAQGLEWAGNNGMHVANLSLGSPSPSATLEQAVNSATSRGVLVVAASGNSGAGSISYPARYANAMAVGATDQNNNRASFSQYGAGLDIVAPGVNVQSTYPGSAYASLNGTSMATPHVAGAAVLVKQKNPSWSNVRIRNHLKNTATSLGSTNLYGSGLVNAEAATR

SEQ ID NO: 63925 - protein, 380 aa, Unidentified
VRSKKLWIVASTALLISVAFSSSIASAAEEAKEKYLIGFNEQEAVSEFVEQVEANDEVAILSEEEEVEIELLHEFETIPVLSVELSPEDVDALELDPAISYIEEDAEVTTMAQSVPWGISRVQAPAAHNRGLTGSGVKVAVLDTGISTHPDLDIRGGASFVPGEPSTQDGNGHGTHVAGTIAALNNSIGVLGVAPSAELYAVKVLGASGGGAISSIAQGLEWAGNNGMHVANLSLGSPSPSATLEQAVNSATSRGVLVVAASGNSGAGSISYPARYANAMAVGATDQNNNRASFSQYGAGLDIVAPGVNVQSTYPGSTYASLNGTSMATPHVAGAAVLVKQKNPSWSNVRIRNRLKNTATSLGSTNLYGSGLVNAEAATR

SEQ ID NO: 63926 - protein, 380 aa, Unidentified
VRSKKLWIVASTALLISVAFSSSIASAAEEAKEKYLIGFNEQEAVSEFVEQVEANDEVAILSEEEEVEIELLHEFETIPVLSVELSPEDVDALELDPAISYIEEDAEVTTMAQSVPWGISRVQAPAAHRRGLTGRGVKVAVLDTGISTHPDLNIRGGASFVPGEPSTQDGNGHGTHVAGTIAALDNSIGVLGVAPSAELYAVKVLGASGAGSVSSIAQGLEWAGANGMHVANLSLGSPSPSATLEQAVNSATSRGVLVVAASGNSGAGSISYPARYANAMAVGATDQNNNRASFSQYGAGLDLVAPGVNVQSTYPGSTYASLNGTSMATPHVAGAAALVKQKNPSWSNVQIRNRLKNTATSLGSTNLYGSGLVNAEAATR

SEQ ID NO: 63927 - protein, 380 aa, Unidentified
VRSKKLWIVASTALLISVAFSSSIASAAEEAKEKYLIGFNEQEAVSEFVEQVEANDEVAILSEEEEVEIELLHEFETIPVLSVELSPEDVDALELDPAISYIEEDAEVTTMAQSVPWGISRVQAPAAHNRGLTGSGVKVAVLDTGISTHPDLNIRGGASFVPGEPSTQDGNGHGTHVAGTIAALDNSIGVLGVAPSAELYAVKVLGASGGGAISSIAQGLEWAGNNGMHVANLSLGSPSPSATLEQAVNSATSRGVLVVAASGNSGAGSISYPARYANAMAVGATDQNNNRASFSQYGAGLDIVAPGVNVQSTYPGSTYASLNGTSMATPHVAGAAVLVKQKNPSWSNVRIRNHLKNTATSLGSTNLYGSGLVRAEAATR

SEQ ID NO: 63928 - protein, 380 aa, Unidentified
VRSKKLWIVASTALLISVAFSSSIASAAEEAKEKYLIGFNEQEAVSEFVEQVEANDEVAILSEEEEVEIELLHEFETIPVLSVELSPEDVDALELDPAISYIEEDAEVTTMAQSVPWGISRVQAPAAHNRRLTGSGVKVAVLDTGISTHPDLNIRGGASFVPGEPSTQDGNGHGTHVAGTIAALNNSIGVLGVAPSAELYAVKVLGASGGGAISSIAQGLEWAGNNGMHVANLSLGSPSPSATLEQAVNSATSRGVLVLAASGNSGAGSISYPARYANAMAVGATDQNNNRASFSQYGAGLDIVAPGVNVQSTYPGSTYASLNGTSMATPHVAGAAVLVKQKNPSWSNVRIRNHLKNTATSLGSTNLYGSGLVNAEAATR

SEQ ID NO: 63929 - protein, 380 aa, Unidentified
VRSKKLWIVASTALLISVAFSSSIASAAEEAKEKYLIGFNEQEAVSEFVEQVEANDEVAILSEEEEVEIELLHEFETIPVLSVELSPEDVDALELDPAISYIEEDAEVTTMAQSVPWGISRVQAPAAHRRGLWGRGVKVAVLDTGISTHPDLNIRGGASFVPGEPSTQDGNGHGTHVAGTIAALDNSIGVLGVAPSAELYAVKVLGASGAGSVSSIAQGLEWAGNNGMHVANLSLGSPSPSATLEQAVNSATSRGVLVVAASGNSGAGSISYPARYANAMAVGATDQNNNRASFSQYGAGLDIVAPGVNVQSTYPGSTYFSLNGTSMATPHVAGAAALVKQKNPSWSNVQIRNRLKNTATSLGSTNLYGSGLVNAEAATR

SEQ ID NO: 63930 - protein, 380 aa, Unidentified
VRSKKLWIVASTALLISVAFSSSIASAAEEAKEKYLIGFNEQEAVSEFVEQVEANDEVAILSEEEEVEIELLHEFETIPVLSVELSPEDVDALELDPAISYIEEDAEVTTMAQSVPWGISRVQAPAAHRRGLTGRGVKVAVLDTGISTHPDLNIRGGASFVPGEPSTQDGNGHGTHVAGTIAALDNSIGVLGVAPSAELYAVKVLGASGSGSVSSIAQGLEWAGANGMHVANLSLGSPSPSATLEQAVNSATSRGVLVVAASGNSGAGSISYPARYANAMAVGATDQNNNRASFSQYGAGLDLVAPGVNVQSTYPGSAYASLNGTSMATPHVAGAAALVKQKNPSWSNVQIRNRLKNTATSLGSTNLYGSGLVNAEAATR

SEQ ID NO: 63931 - protein, 380 aa, Unidentified
VRSKKLWIVASTALLISVAFSSSIASAAEEAKEKYLIGFNEQEAVSEFVEQVEANDEVAILSEEEEVEIELLHEFETIPVLSVELSPEDVDALELDPAISYIEEDAEVTTMAQSVPWGISRVQAPAAHNRGLTGSGVKVAVLDTGISTHPDLNIRGGASFVPGEPSTQDGNGHGTHVAGTIAALNNSIGVLGVAPSAELYAVKVLGASGAGSLSSIAQGLEWAGNNGMHVANLSLGSPSPSATLEQAVNSATSRGVLVVAASGNSGAESISYPARYANAMAVGATDQNNNRASFSQYGAGLDIVAPGVNVQSTYPGSTYASLNGTSMATPHVAGAAVLVKQKNPSWSNVRIRDRLKNTATSLGSTNLYGSGLVNAEAATR

SEQ ID NO: 63932 - protein, 380 aa, Unidentified
VRSKKLWIVASTALLISVAFSSSIASAAEEAKEKYLIGFNEQEAVSEFVEQVEANDEVAILSEEEEVEIELLHEFETIPVLSVELSPEDVDALELDPAISYIEEDAEVTTMAQSVPWGISRVQAPAAHNRRLTGSGVKVAVLDTGISTHPDLNIRGGASFVPGEPSTQDGNGHGTHVAGTIAALNNSIGVLGVAPDAELYAVKVLGASGGGAISSIAQGLEWAGNNGMHVANLSLGSPSPSATLEQAVNSATSRGVLVVAASGNSGAGSISYPARYANAMAVGATDQNNNRASFSQYGAGLDIVAPGVNVQSTYPGSTYASLNGTSMATPHVAGAAVLVKQKNPSWSNVRIRNHLKNTATSLGSTNLYGSGLVNAEAATR

SEQ ID NO: 63933 - protein, 380 aa, Unidentified
VRSKKLWIVASTALLISVAFSSSIASAAEEAKEKYLIGFNEQEAVSEFVEQVEANDEVAILSEEEEVEIELLHEFETIPVLSVELSPEDVDALELDPAISYIEEDAEVTTMAQSVPWGISRVQAPAAHNRGLTGSGVKVAVLDTGISTHPDLNIRGGASFVPGEPSTQDGNGHGTHVAGTIAALDNSIGVLGVAPSAELYAVKVLGASGGGAISSIAQGLEWAGNNGMHVANLSLGSPSPSATLEQAVNSATSRGVLVLAASGNSGAGSISYPARYANAMAVGATDQNNNRASFSQYGAGLDIVAPGVNVQSTYPGSTYASLNGTSMATPHVAGAAVLVKQKNPSWSNVRIRNHLKNTATSLGSTNLYGSGLVNAEAATR

SEQ ID NO: 63934 - protein, 380 aa, Unidentified
VRSKKLWIVASTALLISVAFSSSIASAAEEAKEKYLIGFNEQEAVSEFVEQVEANDEVAILSEEEEVEIELLHEFETIPVLSVELSPEDVDALELDPAISYIEEDAEVTTMAQSVPWGISRVQAPAAHNRGLTGSGVKVAVLDTGISTHPDLNIRGGASFVPGEPSTQDGNGHGTHVAGTIAALNNRIGVLGVAPSAELYAVKVLGASGGGAISSIAQGLEWAGNNGMHVANLSLGSPSPSATLEQAVNSATSRGVLVVAASGNSGAGSISYPARYANAMAVGATDQNNNRASFSQYGAGLDIVAPGVNVQSTYPGSTYASLNGTSMATPHVAGAAVLVKQKNPSWSNVRIRNHLKNTATSLGSTNLYGSGLVRAEAATR

SEQ ID NO: 63935 - protein, 380 aa, Unidentified
VRSKKLWIVASTALLISVAFSSSIASAAEEAKEKYLIGFNEQEAVSEFVEQVEANDEVAILSEEEEVEIELLHEFETIPVLSVELSPEDVDALELDPAISYIEEDAEVTTMAQSVPWGISRVQAPAAHNRRLTGSGVKVAVLDTGISTHPDLNIRGGASFVPGEPSTQDGNGHGTHVAGTIAALDNSIGVLGVAPSAELYAVKVLGASGGGAISSIAQGLEWAGNNGMHVANLSLGSPSPSATLEQAVNSATSRGVLVVAASGNSGAGSISYPARYANAMAVGATDQNNNRASFSQYGAGLDIVAPGVNVQSTYPGSTYASLNGTSMATPHVAGAAVLVKQKNPSWSNVRIRNHLKNTATSLGSTNLYGSGLVNAEAATR

SEQ ID NO: 63936 - protein, 380 aa, Unidentified
VRSKKLWIVASTALLISVAFSSSIASAAEEAKEKYLIGFNEQEAVSEFVEQVEANDEVAILSEEEEVEIELLHEFETIPVLSVELSPEDVDALELDPAISYIEEDAEVTTMAQSVPWGISRVQAPAAHNRGLTGSGVKVAVLDTGISTHPDLNIRGGASFVPGEPSTQDGNGHGTHVAGTIAALNNRIGVLGVAPSAELYAVKVLGASGGGAISSIAQGLEWAGNNGMHVANLSLGSPSPSATLEQAVNSATSRGVLVLAASGNSGAGSISYPARYANAMAVGATDQNNNRASFSQYGAGLDIVAPGVNVQSTYPGSTYASLNGTSMATPHVAGAAVLVKQKNPSWSNVRIRNHLKNTATSLGSTNLYGSGLVNAEAATR

SEQ ID NO: 63937 - protein, 380 aa, Unidentified
VRSKKLWIVASTALLISVAFSSSIASAAEEAKEKYLIGFNEQEAVSEFVEQVEANDEVAILSEEEEVEIELLHEFETIPVLSVELSPEDVDALELDPAISYIEEDAEVTTMAQSVPWGISRVQAPAAHRRGLTGSGVKVAVLDTGISTHPDLNIRGGASFVPGEPSTQDGNGHGTHVAGTIAALNNRIGVLGVAPSAELYAVKVLGASGGGAISSIAQGLEWAGNNGMHVANLSLGSPSPSATLEQAVNSATSRGVLVVAASGNSGAGSISYPARYANAMAVGATDQNNNRASFSQYGAGLDIVAPGVNVQSTYPGSTYASLNGTSMATPHVAGAAVLVKQKNPSWSNVRIRNHLKNTATSLGSTNLYGSGLVNAEAATR

SEQ ID NO: 63938 - protein, 380 aa, Unidentified
VRSKKLWIVASTALLISVAFSSSIASAAEEAKEKYLIGFNEQEAVSEFVEQVEANDEVAILSEEEEVEIELLHEFETIPVLSVELSPEDVDALELDPAISYIEEDAEVTTMAQSVPWGISRVQAPAAHRRGLTGSGVKVAVLDTGISTHPDLNIRGGASFVPGEPSTQDGNGHGTHVAGTIAALDNSIGVLGVAPSAELYAVKVLGASGGGAISSIAQGLEWAGNNGMHVANLSLGSPSPSATLEQAVNSATSRGVLVVAASGNSGAGSISYPARYANAMAVGATDQNNNRASFSQYGAGLDIVAPGVNVQSTYPGSTYASLNGTSMATPHVAGAAVLVKQKNPSWSNVRIRNHLKNTATSLGSTNLYGSGLVNAEAATR

SEQ ID NO: 63939 - protein, 380 aa, Unidentified
VRSKKLWIVASTALLISVAFSSSIASAAEEAKEKYLIGFNEQEAVSEFVEQVEANDEVAILSEEEEVEIELLHEFETIPVLSVELSPEDVDALELDPAISYIEEDAEVTTMAQSVPWGISRVQAPAAHRRGLTGRGVKVAVLDTGISTHPDLNIRGGASFVPGEPSTQDGNGHGTHVAGTIAALDNSIGVLGVAPSAELYAVKVLGASGAGSVSSIAQGLEWAGNNGMHVANLSLGSPSPSATLEQAVNSATSRGVLVVAASGNSGAGSISYPARYANAMAVGATDQDNNRASFSQYGAGLDLVAPGVNVQSTYPGSTYASLNGTSMATPHVAGAAALVKQKNPSWSNVQIRNRLKNTATSLGSTNLYGSGLVNAEAATR

SEQ ID NO: 63940 - protein, 380 aa, Unidentified
VRSKKLWIVASTALLISVAFSSSIASAAEEAKEKYLIGFNEQEAVSEFVEQVEANDEVAILSEEEEVEIELLHEFETIPVLSVELSPEDVDALELDPAISYIEEDAEVTTMAQSVPWGISRVQAPAAHNRGLTGSGVKVAVLDTGISTHPDLNIRGGASFVPGEPSTQDGNGHGTHVAGTIAALNNSIGVLGVAPSAELYAVKVLGASGAGAISSIAQGLEWAGNNGMHVANLSLGSPSPSATLEQAVNSATSRGVLVVAASGNSGAGSISYPARYANAMAVGATDQNNNRASFSQYGAGLDIVAPGVNVQSTYPGSAYASLNGTSMATPHVAGAAVLVKQKNPSWSNVRIRNHLKNTATSLGSTNLYGSGLVRAEAATR

SEQ ID NO: 63941 - protein, 380 aa, Unidentified
VRSKKLWIVASTALLISVAFSSSIASAAEEAKEKYLIGFNEQEAVSEFVEQVEANDEVAILSEEEEVEIELLHEFETIPVLSVELSPEDVDALELDPAISYIEEDAEVTTMAQSVPWGISRVQAPAAHNRGLTGSGVKVAVLDTGISTHPDLNITGGASFVPGEPSTQDGNGHGTHVAGTIAALNNRIGVLGVAPSAELYAVKVLGASGGGAISSIAQGLEWAGNNGMHVANLSLGSPSPSATLEQAVNSATSRGVLVVAASGNSGAGSISYPARYANAMAVGATDQNNNRASFSQYGAGLDIVAPGVNVQSTYPGSTYASLNGTSMATPHVAGAAVLVKQKNPSWSNVRIRNHLKNTATSLGSTNLYGSGLVNAEAATR

SEQ ID NO: 63942 - protein, 380 aa, Unidentified
VRSKKLWIVASTALLISVAFSSSIASAAEEAKEKYLIGFNEQEAVSEFVEQVEANDEVAILSEEEEVEIELLHEFETIPVLSVELSPEDVDALELDPAISYIEEDAEVTTMAQSVPWGISRVQAPAAHNRRLTGSGVKVAVLDTGISTHPDLNIRGGASFVPGEPSTQDGNGHGTHVAGTIAALNNSIGVLGVAPSAELYAVKVLGASGGGAISSIAQGLEWAGNNGMHVANLSLGSPSPSATLEQAVNSATSRGVLVVAASGNSGAGSISYPARYANAMAVGATDQNNNRASFSQYGAGLDIVAPGVNVQSTYPGSTYASLNGTSMATPHVAGAAVLVKQKNPSWSNVRIRNHLKNTATSLGSTNLYGSGLVRAEAATR

SEQ ID NO: 63943 - protein, 380 aa, Unidentified
VRSKKLWIVASTALLISVAFSSSIASAAEEAKEKYLIGFNEQEAVSEFVEQVEANDEVAILSEEEEVEIELLHEFETIPVLSVELSPEDVDALELDPAISYIEEDAEVTTMAQSVPWGISRVQAPAAHNRGLTGSGVKVAVLDTGISTHPDLDIRGGASFVPGEPSTQDGNGHGTHVAGTIAALNNRIGVLGVAPSAELYAVKVLGASGGGAISSIAQGLEWAGNNGMHVANLSLGSPSPSATLEQAVNSATSRGVLVVAASGNSGAGSISYPARYANAMAVGATDQNNNRASFSQYGAGLDIVAPGVNVQSTYPGSTYASLNGTSMATPHVAGAAVLVKQKNPSWSNVRIRNHLKNTATSLGSTNLYGSGLVNAEAATR

SEQ ID NO: 63944 - protein, 380 aa, Unidentified
VRSKKLWIVASTALLISVAFSSSIASAAEEAKEKYLIGFNEQEAVSEFVEQVEANDEVAILSEEEEVEIELLHEFETIPVLSVELSPEDVDALELDPAISYIEEDAEVTTMAQSVPWGISRVQAPAAHNRGLTGSGVKVAVLDTGISTHPDLRIRGGASFVPGEPSTQDGNGHGTHVAGTIAALNNRIGVLGVAPSAELYAVKVLGASGGGAISSIAQGLEWAGNNGMHVANLSLGSPSPSATLEQAVNSATSRGVLVVAASGNSGAGSISYPARYANAMAVGATDQNNNRASFSQYGAGLDIVAPGVNVQSTYPGSTYASLNGTSMATPHVAGAAVLVKQKNPSWSNVRIRNHLKNTATSLGSTNLYGSGLVNAEAATR

SEQ ID NO: 63945 - protein, 380 aa, Unidentified
VRSKKLWIVASTALLISVAFSSSIASAAEEAKEKYLIGFNEQEAVSEFVEQVEANDEVAILSEEEEVEIELLHEFETIPVLSVELSPEDVDALELDPAISYIEEDAEVTTMAQSVPWGISRVQAPAAHRRGLTGRGVKVAVLDTGISTHPDLNIRGGASFVPGEPSTQDGNGHGTHVAGTIAALDNSIGVLGVAPSAELYAVKVLGASGAGSVSSIAQGLEWAGANGMHVANLSLGSPSPSATLEQAVNSATSRGVLVVAASGNSGAGSISYPARYANAMAVGATDQNNNRASFSQYGAGLDIVAPGVNVQSTYPGSAYASLNGTSMATPHVAGAAALVKQKNPSWSNVQIRNRLKNTATSLGSTNLYGSGLVNAEAATR

SEQ ID NO: 63946 - protein, 380 aa, Unidentified
VRSKKLWIVASTALLISVAFSSSIASAAEEAKEKYLIGFNEQEAVSEFVEQVEANDEVAILSEEEEVEIELLHEFETIPVLSVELSPEDVDALELDPAISYIEEDAEVTTMAQSVPWGISRVQAPAAHNRRLTGSGVKVAVLDTGISTHPDLNIRGGASFVPGEPSTQDGNGHGTHVAGTIAALNNSIGVLGVAPSAELYAVKVLGASGAGAISSIAQGLEWAGNNRMHVANLSLGSPSPSATLEQAVNSATSRGVLVVAASGNSGAGSISYPARYANAMAVGATDQNNNRASFSQYGAGLDIVAPGVNVQSTYPGSTYASLNGTSMATPHVAGAAVLVKQKNPSWSNVRIRNHLKNTATSLGSTNLYGSGLVNAEAATR

SEQ ID NO: 63947 - protein, 380 aa, Unidentified
VRSKKLWIVASTALLISVAFSSSIASAAEEAKEKYLIGFNEQEAVSEFVEQVEANDEVAILSEEEEVEIELLHEFETIPVLSVELSPEDVDALELDPAISYIEEDAEVTTMAQSVPWGISRVQAPAAHRRGLWGRGVKVAVLDTGISTHPDLNIRGGASFVPGEPSTQDGNGHGTHVAGTIAALDNSIGVLGVAPSAELYAVKVLGASGAGSVSSIAQGLEWAGNNGMHVANLSLGSPSPSATLEQAVNSATSRGVLVVAASGNSGAGSISYPARYANAMAVGATDQNNNRASFSQYGAGLDIVAPGVNVQSTYPGSAYASLNGTSMATPHVAGAAALVKQKNPSWSNVQIRNRLKNTATSLGSTNLYGSGLVNAEAATR

SEQ ID NO: 63948 - protein, 380 aa, Unidentified
VRSKKLWIVASTALLISVAFSSSIASAAEEAKEKYLIGFNEQEAVSEFVEQVEANDEVAILSEEEEVEIELLHEFETIPVLSVELSPEDVDALELDPAISYIEEDAEVTTMAQSVPWGISRVQAPAAHNRGLTGRGVKVAVLDTGISTHPDLNIRGGASFVPGEPSTQDGNGHGTHVAGTIAALDNSIGVLGVAPSAELYAVKVLGASGGGAISSIAQGLEWAGNNGMHVANLSLGSPSPSATLEQAVNSATSRGVLVVAASGNSGAGSISYPARYANAMAVGATDQNNNRASFSQYGAGLDIVAPGVNVQSTYPGSTYASLNGTSMATPHVAGAAVLVKQKNPSWSNVRIRNHLKNTATSLGSTNLYGSGLVNAEAATR

SEQ ID NO: 63949 - protein, 380 aa, Unidentified
VRSKKLWIVASTALLISVAFSSSIASAAEEAKEKYLIGFNEQEAVSEFVEQVEANDEVAILSEEEEVEIELLHEFETIPVLSVELSPEDVDALELDPAISYIEEDAEVTTMAQSVPWGISRVQAPAAHRRGLTGRGVKVAVLDTGISTHPDLNIRGGASFVPGEPSTQDGNGHGTHVAGTIAALDNSIGVLGVAPSAELYAVKVLGASGSGSVSSIAQGLEWAGANGMHVANLSLGSPSPSATLEQAVNSATSRGVLVVAASGNSGAGSISYPARYANAMAVGATDQNNNRASFSQYGAGLDLVAPGVNVQSTYPGSTYFSLNGTSMATPHVAGAAALVKQKNPSWSNVQIRNRLKNTATSLGSTNLYGSGLVNAEAATR

SEQ ID NO: 63950 - protein, 380 aa, Unidentified
VRSKKLWIVASTALLISVAFSSSIASAAEEAKEKYLIGFNEQEAVSEFVEQVEANDEVAILSEEEEVEIELLHEFETIPVLSVELSPEDVDALELDPAISYIEEDAEVTTMAQSVPWGISRVQAPAAHRRGLTGRGVKVAVLDTGISTHPDLNIRGGASFVPGEPSTQDGNGHGTHVAGTIAALDNSIGVLGVAPSAELYAVKVLGASGSGSVSSIAQGLEWAGNNGMHVANLSLGSPSPSATLEQAVNSATSRGVLVVAASGNSGAGSISYPARYANAMAVGATDQDNNRASFSQYGAGLDLVAPGVNVQSTYPGSAYASLNGTSMATPHVAGAAALVKQKNPSWSNVQIRNRLKNTATSLGSTNLYGSGLVNAEAATR

SEQ ID NO: 63951 - protein, 380 aa, Unidentified
VRSKKLWIVASTALLISVAFSSSIASAAEEAKEKYLIGFNEQEAVSEFVEQVEANDEVAILSEEEEVEIELLHEFETIPVLSVELSPEDVDALELDPAISYIEEDAEVTTMAQSVPWGISRVQAPAAHRRRLTGRGVKVAVLDTGISTHPDLNIRGGASFVPGEPSTQDGNGHGTHVAGTIAALDNSIGVLGVAPSAELYAVKVLGASGSGSVSSIAQGLEWAGNNGMHVANLSLGSPSPSATLEQAVNSATSRGVLVVAASGNSGAGSISYPARYANAMAVGATDQNNNRASFSQYGAGLDLVAPGVNVQSTYPGSAYASLNGTSMATPHVAGAAALVKQKNPSWSNVQIRNRLKNTATSLGSTNLYGSGLVNAEAATR

SEQ ID NO: 63952 - protein, 380 aa, Unidentified
VRSKKLWIVASTALLISVAFSSSIASAAEEAKEKYLIGFNEQEAVSEFVEQVEANDEVAILSEEEEVEIELLHEFETIPVLSVELSPEDVDALELDPAISYIEEDAEVTTMAQSVPWGISRVQAPAAHRRRLTGRGVKVAVLDTGISTHPDLNIRGGASFVPGEPSTQDGNGHGTHVAGTIAALDNSIGVLGVAPSAELYAVKVLGASGSGSVSSIAQGLEWAGNNGMHVANLSLGSPSPSATLEQAVNSATSRGVLVVAASGNSGAGSISYPARYANAMAVGATDQDNNRASFSQYGAGLDIVAPGVNVQSTYPQSTYASLNGTSMATPHVAGAAALVKQKNPSWSNVQIRNRLKNTATSLGSTNLYGSGLVNAEAATR

SEQ ID NO: 63953 - protein, 380 aa, Unidentified
VRSKKLWIVASTALLISVAFSSSIASAAEEAKEKYLIGFNEQEAVSEFVEQVEANDEVAILSEEEEVEIELLHEFETIPVLSVELSPEDVDALELDPAISYIEEDAEVTTMAQSVPWGISRVQAPAAHRRGLTGSGVKVAVLDTGISTHPDLNIRGGASFVPGEPSTQDGNGHGTHVAGTIAALNNSIGVLGVAPDAELYAVKVLGASGGGAISSIAQGLEWAGNNGMHVANLSLGSPSPSATLEQAVNSATSRGVLVVAASGNSGAGSISYPARYANAMAVGATDQNNNRASFSQYGAGLDIVAPGVNVQSTYPGSTYASLNGTSMATPHVAGAAVLVKQKNPSWSNVRIRNHLKNTATSLGSTNLYGSGLVNAEAATR

SEQ ID NO: 63954 - protein, 380 aa, Unidentified
VRSKKLWIVASTALLISVAFSSSIASAAEEAKEKYLIGFNEQEAVSEFVEQVEANDEVAILSEEEEVEIELLHEFETIPVLSVELSPEDVDALELDPAISYIEEDAEVTTMAQSVPWGISRVQAPAAHNRGLTGSGVKVAVLDTGISTHPDLNIRGGASFVPGEPSTQDGNGHGTHVAGTIAALNNSIGVLGVAPSAELYAVKVLGASGGGSLSSIAQGLEWAGNNGMHVANLSLGSPSPSATLEQAVNSATSRGVLVVAASGNSGAESISYPARYANAMAVGATDQNNNRASFSQYGAGLDIVAPGVNVQSTYPGSTYASLNGTSMATPHVAGAAVLVKQKNPSWSNVRIRDRLKNTATSLGSTNLYGSGLVNAEAATR

SEQ ID NO: 63955 - protein, 380 aa, Unidentified
VRSKKLWIVASTALLISVAFSSSIASAAEEAKEKYLIGFNEQEAVSEFVEQVEANDEVAILSEEEEVEIELLHEFETIPVLSVELSPEDVDALELDPAISYIEEDAEVTTMAQSVPWGISRVQAPAAHRRRLWGRGVKVAVLDTGISTHPDLNIRGGASFVPGEPSTQDGNGHGTHVAGTIAALDNSIGVLGVAPSAELYAVKVLGASGSGSVSSIAQGLEWAGNNGMHVANLSLGSPSPSATLEQAVNSATSRGVLVVAASGNSGAGSISYPARYANAMAVGATDQNNNRASFSQYGAGLDIVAPGVNVQSTYPGSAYASLNGTSMATPHVAGAAALVKQKNPSWSNVQIRNRLKNTATSLGSTNLYGSGLVNAEAATR

SEQ ID NO: 63956 - protein, 380 aa, Unidentified
VRSKKLWIVASTALLISVAFSSSIASAAEEAKEKYLIGFNEQEAVSEFVEQVEANDEVAILSEEEEVEIELLHEFETIPVLSVELSPEDVDALELDPAISYIEEDAEVTTMAQSVPWGISRVQAPAAHNRGLTGSGVKVAVLDTGISTHPDLNIRGGASFVPGEPSTQDGNGHGTHVAGTIAALNNSIGVLGVAPSAELYAVKVLGASGSGSISSIAQGLEWAGNNGMHVANLSLGSPSPSATLEQAVNSATSRGVLVVAASGNSGEGSISYPARYANAMAVGATDQNNNRADFSQYGAGLDIVAPGVNVQSTYPGSTYASLNGTSMATPHVAGAAVLVKQKNPSWSNVRIRDRLKNTATSLGSTNLYGSGLVNAEAATR

SEQ ID NO: 63957 - protein, 380 aa, Unidentified
VRSKKLWIVASTALLISVAFSSSIASAAEEAKEKYLIGFNEQEAVSEFVEQVEANDEVAILSEEEEVEIELLHEFETIPVLSVELSPEDVDALELDPAISYIEEDAEVTTMTQSVPWGISRVQAPAAHRRGLTGRGVKVAVLDTGISTHPDLNIRGGASFVPGEPSTQDGNGHGTHVAGTIAALDNSIGVLGVAPSAELYAVKVLGASGSGSVSSIAQGLEWAGANGMHVANLSLGSPSPSATLEQAVNSATSRGVLVVAASGNSGAGSISYPARYANAMAVGATDQNNNRASFSQYGAGLDIVAPGVNVQSTYPGSAYASLNGTSMATPHVAGAAALVKQKNPSWSNVQIRNRLKNTATSLGSTNLYGSGLVNAEAATR

SEQ ID NO: 63958 - protein, 380 aa, Unidentified
VRSKKLWIVASTALLISVAFSSSIASAAEEAKEKYLIGFNEQEAVSEFVEQVEANDEVAILSEEEEVEIELLHEFETIPVLSVELSPEDVDALELDPAISYIEEDAEVTTMAQSVPWGISRVQAPAAHRRRLTGRGVKVAVLDTGISTHPDLNIRGGASFVPGEPSTQDGNGHGTHVAGTIAALDNSIGVLGVAPSAELYAVKVLGASGSGSVSSIAQGLEWAGNNGMHVANLSLGSPSPSATLEQAVNSATSRGVLVVAASGNSGAGSISYPARYANAMAVGATDQNNNRASFSQYGAGLDIVAPGVDVQSTYPGSAYASLNGTSMATPHVAGAAALVKQKNPSWSNVQIRNRLKNTATSLGSTNLYGSGLVNAEAATR

SEQ ID NO: 63959 - protein, 380 aa, Unidentified
VRSKKLWIVASTALLISVAFSSSIASAAEEAKEKYLIGFNEQEAVSEFVEQVEANDEVAILSEEEEVEIELLHEFETIPVLSVELSPEDVDALELDPAISYIEEDAEVTTMAQSVPWGISRVQAPAAHRRGLWGRGVKVAVLDTGISTHPDLNIRGGASFVPGEPSTQDGNGHGTHVAGTIAALDNSIGVLGVAPSAELYAVKVLGASGSGSVSSIAQGLEWAGNNGMHVANLSLGSPSPSATLEQAVNSATSRGVLVVAASGNSGAGSISYPARYANAMAVGATDQDNNRASFSQYGAGLDLVAPGVNVQSTYPGSTYASLNGTSMATPHVAGAAALVKQKNPSWSNVQIRNRLKNTATSLGSTNLYGSGLVNAEAATR

SEQ ID NO: 63960 - protein, 380 aa, Unidentified
VRSKKLWIVASTALLISVAFSSSIASAAEEAKEKYLIGFNEQEAVSEFVEQVEANDEVAILSEEEEVEIELLHEFETIPVLSVELSPEDVDALELDPAISYIEEDAEVTTMAQSVPWGISRVQAPAAHRRGLTGRGVKVAVLDTGISTHPDLNIRGGASFVPGEPSTQDGNGHGTHVAGTIAALDNSIGVLGVAPSAELYAVKVLGASGAGSVSSIAQGLEWAGNNGMHVANLSLGSPSPSATLEQAVNSATSRGVLVVAASGNSGAGSISYPARYANAMAVGATDQDNNRASFSQYGAGLDIVAPGVNVQSTYPGSTYFSLNGTSMATPHVAGAAALVKQKNPSWSNVQIRNRLKNTATSLGSTNLYGSGLVNAEAATR

SEQ ID NO: 63961 - protein, 380 aa, Unidentified
VRSKKLWIVASTALLISVAFSSSIASAAEEAKEKYLIGFNEQEAVSEFVEQVEANDEVAILSEEEEVEIELLHEFETIPVLSVELSPEDVDALELDPAISYIEEDAEVTTMAQSVPWGISRVQAPAAHNRGLTGSGVKVAVLDTGISTHPDLNIRGGASFVPGEPSTQDGNGHGTHVAGTIAALNNSIGVLGVAPSAELYAVKVLGASGSGALSSIAQGLEWAGNNGMHVANLSLGSPSPSATLEQAVNSATSRGVLVVAASGNSGAESISYPARYANAMAVGATDQNNNRASFSQYGAGLDIVAPGVNVQSTYPGSTYASLNGTSMATPHVAGAAVLVKQKNPSWSNVRIRDRLKNTATSLGSTNLYGSGLVNAEAATR

SEQ ID NO: 63962 - protein, 380 aa, Unidentified
VRSKKLWIVASTALLISVAFSSSIASAAEEAKEKYLIGFNEQEAVSEFVEQVEANDEVAILSEEEEVEIELLHEFETIPVLSVELSPEDVDALELDPAISYIEEDAEVTTMAQSVPWGISRVQAPAAHNRGLTGRGVKVAVLDTGISTHPDLRITGGASFVPGEPSTQDGNGHGTHVAGTIAALNNSIGVLGVAPSAELYAVKVLGASGAGSVSSIAQGLEWAGANGMHVANLSLGSPSPSATLEQAVNSATSRGVLVVAASGNSGAGSISYPARYANAMAVGATDQNNNRASFSQYGAGLDIVAPGVNVQSTYPGSAYASLNGTSMATPHVAGAAALVKQKNPSWSNVQIRNHLKNTATSLGSTNLYGSGLVRAEAATR

SEQ ID NO: 63963 - protein, 380 aa, Unidentified
VRSKKLWIVASTALLISVAFSSSIASAAEEAKEKYLIGFNEQEAVSEFVEQVEANDEVAILSEEEEVEIELLHEFETIPVLSVELSPEDVDALELDPAISYIEEDAEVTTMAQSVPWGISRVQAPAAHNRKLTAFGVKVAVLDTGISTHPDLNIRGGASFVPGEPSTQDGEGHGTHVAGTIAALNNSIGVLGVAPSAELYAVKVLGASGSGSVSSIAQGLEWAGNNGMHVANLSLGSPSPSATLEQAVNSATSRGVLVVAASGNSGAGSISYPARYANAMAVGATDQNNNRADFSQYGAGLDIVAPGVNVQSTYPGSAYASLNGTSMATPHVAGAAALVKQKNGSWSNVQIRNHLKNTATSLGSTNLYGSGLVNAEAATR

SEQ ID NO: 63964 - protein, 380 aa, Unidentified
VRSKKLWIVASTALLISVAFSSSIASAAEEAKEKYLIGFNEQEAVSEFVEQVEANDEVAILSEEEEVEIELLHEFETIPVLSVELSPEDVDALELDPAISYIEEDAEVTTMAQSVPWGISRVQAPAAHRRGLWGRGVKVAVLDTGISTHPDLNIRGGASFVPGEPSTQDGNGHGTHVAGTIAALDNSIGVLGVAPSAELYAVKVLGASGSGSVSSIAQGLEWAGNNGMHVANLSLGSPSPSATLEQAVNSATSRGVLVVAASGNSGAGSISYPARYANAMAVGATDQNNNRASFSQYGAGLDIVAPGVNVQSTYPGSAYFSLNGTSMATPHVAGAAALVKQKNPSWSNVQIRNRLKNTATSLGSTNLYGSGLVNAEAATR

SEQ ID NO: 63965 - protein, 380 aa, Unidentified
VRSKKLWIVASTALLISVAFSSSIASAAEEAKEKYLIGFNEQEAVSEFVEQVEANDEVAILSEEEEVEIELLHEFETIPVLSVELSPEDVDALELDPAISYIEEDAEVTTMAQSVPWGISRVQAPAAHNRGLTGSGVKVAVLDTGISTHPDLNIRGGASFVPGEPSTQDGNGHGTHVAGTIAALNNSIGVLGVAPDAELYAVKVLGASGGGAISSIAQGLEWAGNNGMHVANLSLGSPSPSATLEQAVNSATSRGVLVVAASGNSGAGSISYPARYANAMAVGATDQNNNRASFSQYGAGLDIVAPGVNVQSTYPGSTYASLNGTSMATPHVAGAAVLVKQKNPSWRNVRIRNHLKNTATSLGSTNLYGSGLVNAEAATR

SEQ ID NO: 63966 - protein, 380 aa, Unidentified
VRSKKLWIVASTALLISVAFSSSIASAAEEAKEKYLIGFNEQEAVSEFVEQVEANDEVAILSEEEEVEIELLHEFETIPVLSVELSPEDVDALELDPAISYIEEDAEVTTMAQSVPWGISRVQAPAAHNRGLTGSGVKVAVLDTGISTHPDLRIRGGASFVPGEPSTQDGNGHGTHVAGTIAALNNSIGVLGVAPSAELYAVKVLGASGGGAISSIAQGLEWAGNNGMHVANLSLGSPSPSATLEQAVNSATSRGVLVVAASGNSGAGSISYPARYANAMAVGATDQNNNRASFSQYGAGLDIVAPGVNVQSTYPGSTYASLNGTSMATPHVAGAAVLVKQKNPSWSNVRIRNRLKNTATSLGSTNLYGSGLVNAEAATR

SEQ ID NO: 63967 - protein, 380 aa, Unidentified
VRSKKLWIVASTALLISVAFSSSIASAAEEAKEKYLIGFNEQEAVSEFVEQVEANDEVAILSEEEEVEIELLHEFETIPVLSVELSPEDVDALELDPAISYIEEDAEVTTMAQSVPWGISRVQAPAAHRRGLWGRGVKVAVLDTGISTHPDLNIRGGASFVPGEPSTQDGNGHGTHVAGTIAALDNSIGVLGVAPSAELYAVKVLGASGSGSVSSIAQGLEWAGANGMHVANLSLGSPSPSATLEQAVNSATSRGVLVVAASGNSGAGSISYPARYANAMAVGATDQNNNRASFSQYGAGLDIVAPGVNVQSTYPQSTYASLNGTSMATPHVAGAAALVKQKNPSWSNVQIRNRLKNTATSLGSTNLYGSGLVNAEAATR

SEQ ID NO: 63968 - protein, 380 aa, Unidentified
VRSKKLWIVASTALLISVAFSSSIASAAEEAKEKYLIGFNEQEAVSEFVEQVEANDEVAILSEEEEVEIELLHEFETIPVLSVELSPEDVDALELDPAISYIEEDAEVTTMAQSVPWGISRVQAPAAHNRRLTGSGVKVAVLDTGISTHPDLNITGGASFVPGEPSTQDGNGHGTHVAGTIAALNNSIGVLGVAPSAELYAVKVLGASGGGAISSIAQGLEWAGNNGMHVANLSLGSPSPSATLEQAVNSATSRGVLVVAASGNSGAGSISYPARYANAMAVGATDQNNNRASFSQYGAGLDIVAPGVNVQSTYPGSTYASLNGTSMATPHVAGAAVLVKQKNPSWSNVRIRNHLKNTATSLGSTNLYGSGLVNAEAATR

SEQ ID NO: 63969 - protein, 380 aa, Unidentified
VRSKKLWIVASTALLISVAFSSSIASAAEEAKEKYLIGFNEQEAVSEFVEQVEANDEVAILSEEEEVEIELLHEFETIPVLSVELSPEDVDALELDPAISYIEEDAEVTTMAQSVPWGISRVQAPAAHRRGLTGSGVKVAVLDTGISTHPDLNIRGGASFVPGEPSTQDGNGHGTHVAGTIAALNNSIGVLGVAPSAELYAVKVLGASGGGAISSIAQGLEWAGNNGMHVANLSLGSPSPSATLEQAVNSATSRGVLVVAASGNSGAGSISYPARYANAMAVGATDQNNNRASFSQYGAGLDIVAPGVNVQSTYPGSTYASLNGTSMATPHVAGAAVLVKQKNPSWSNVRIRNRLKNTATSLGSTNLYGSGLVNAEAATR

SEQ ID NO: 63970 - protein, 380 aa, Unidentified
VRSKKLWIVASTALLISVAFSSSIASAAEEAKEKYLIGFNEQEAVSEFVEQVEANDEVAILSEEEEVEIELLHEFETIPVLSVELSPEDVDALELDPAISYIEEDAEVTTMAQSVPWGISRVQAPAAHNRGLTGSGVKVAVLDTGISTHPDLRIRGGASFVPGEPSTQDGNGHGTHVAGTIAALNNSIGVLGVAPSAELYAVKVLGASGGGAISSIAQGLEWAGNNGMHVANLSLGSPSPSATLEQAVNSATSRGVLVVAASGNSGAGSISYPARYANAMAVGATDQNNNRASFSQYGAGLDIVAPGVNVQSTYPGSTYASLNGTSMATPHVAGAAVLVKQKNPSWSNVRIRNHLKNTATSLGSTNLYGSGLVNALAATR

SEQ ID NO: 63971 - protein, 269 aa, Unidentified
AQSVPWGISRVQAPAAHNRGLAGSGVKVAVLDTGISTHPDLNIRGGASFVPGEPSTQDGNGHGTHVAGTIAALDNNIGVLGVAPSAELYAVKVLSASGQGAISSIAQGLEWAGNNGMHVANLSLGSPSPSATLEQAVNSATSRGVLVVAASGNSGADSISYPARYANAMAVGATDQNNNRADFSQYGAGLDIVAPGVNVQSTYPGSTYASQNGTSMATPHVAGAAVLVKQKNPSWSNVRIRDHLKNTATSLGSTNLYGSGLVNAFAATR

SEQ ID NO: 63972 - protein, 269 aa, Unidentified
AQSVPWGISRVQAPAAHNRGLAGSGVKVAVLDTGISTHPDLNIRGGASFVPGEPSTQDGNGHGTHVAGTIAALNNSIGVLGVAPSAELYAVKVLGASGQGAISSIAQGLEWAGNNGMHVANLSIGASSPSATLEQAVNSATSRGVLVVAASGNSGADSISYPARYANAMAVGATDQNNNRADFSQYGAGLDIVAPGVNVQSTYPGSTYASQNGTSMATPHVAGAAVLVKQKNPSWSNVRIRDHLKNTATSLGSTNLYGSGLVNAFAATR

SEQ ID NO: 63973 - protein, 269 aa, Unidentified
AQSVPWGISRVQAPAAHNRGLAGGGVKVAVLDTGISTHPDLNIRGGASFVPGEPSTQDGNGHGTHVAGTIAALDNSIGVLGVAPSAELYAVKVLSESGGGAISSIAQGLEWAGNNGMHVANLSLGSPSPSATLEQAVNSATSRGVLVVAASGNSGADSISYPARYANAMAVGATDQNNNRADFSQYGAGLDIVAPGVNVQSTYPGSTYASLNGTSMATPHVAGAAVLVKQKNPSWSNVRIRDHLKNTATSLGSTNLYGSGLVNAFAATR

SEQ ID NO: 63974 - protein, 269 aa, Unidentified
AQSVPWGISRVQAPAAHNRGLAGSGVKVAVLDTGISTHPDLNIRGGASFVPGEPSTQDGNGHGTHVAGTIAALNNNIGVLGVAPSAELYAVKVLSASGQGAISSIAGGLEWAGNNGMHVANLSLGAPSPSATLEQAVNSATSRGVLVVAASGNSGADSISYPARYANAMAVGATDQNNNRADFSQYGAGLDIVAPGVNVQSTYPGSTYASLNGTSMATPHVAGAAVLVKQKNPSWSNVRIRDHLKNTATSLGSTNLYGSGLVNAFAATR

SEQ ID NO: 63975 - protein, 269 aa, Unidentified
AQSVPWGISRVQAPAAHNRGLTGRGVRVAVLDTGISTHPDLNIRGGASFVPGEPSTQDGNGHGTHVAGTIAALNNSIGVLGVAPSAELYAVKVLGASGGGAISSIAQGLEWAGNNGMHVANLSLGLQAPSATLEQAVNSATSRGVLVVAASGNSGEGSISYPARYANAMAVGATDQNNNRADFSQYGAGLDIVAPGVNVQSTYPGSTYASLNGTSMATPHVAGAAVLVKQKNPSWSNVRIRDRLKNTATSLGSTNLYGSGLVNAEAATR

SEQ ID NO: 63976 - protein, 269 aa, Unidentified
AQSVPWGISRVQAPAAHNRGLAGRGVKVAVLDTGISTHPDLNIRGGASFVPGEPSTQDGNGHGTHVAGTIAALNNSIGVLGVAPSAELYAVKVLGASGGGAISSVAQGLEWAGNNGMHVANLSLGSESPSATLEQAVNSATSRGVLVVAASGNSGADSISYPARYANAMAVGATDQNNNRADFSQYGAGLDIVAPGVNVQSTYPGSTYASLNGTSMATPHVAGAAVLVKQKYPSWSNVRIRDHLKNTATSLGSTNLYGSGLVNAFAATR

SEQ ID NO: 63977 - protein, 269 aa, Unidentified
AQSVPWGIERVQAPAAHNRGLTGSGVKVAVLDTGISTHPDLRIRGGASFVPGEPSTQDGNGHGTHVAGTIAALDNSIGVLGVAPSAELYAVKVLGASGSGSVSSIAQGLEWAGNHGMDVANLSLGSPSPSATLEQAVNSATSRGVLVVAASGNSGEPEISYPARYANAMAVGATDQNNNRASFSQYGPGLDIVAPGVNVLSTWPGSTYASLNGTSMATPHVAGAAALVKQKHPSWSNVQIRNHLKNTATSLGDTNEYGSGLVNAEAATR

SEQ ID NO: 63978 - protein, 269 aa, Unidentified
AQSVPWGISRVQAPAAHNRGLAGGGVKVAVLDTGISTHPDLNIRGGASFVPGEPSTQDGNGHGTHVAGTIAALNNSIGVLGVAPSAELYAVKVLSASGQGAISSIANGLEWAGNNGMHVANLSLGSPSPSATLEQAVNSATSRGVLVVAASGNSGADSISYPARYANAMAVGATDQNNNRADFSQYGAGLDIVAPGVNVQSTYPGSTYASQNGTSMATPHVAGAAVLVKQKNPSWSNVRIRDHLKNTATSLGSTNLYGSGLVNAFAATR

SEQ ID NO: 63979 - protein, 269 aa, Unidentified
AQSVPWGISRVQAPAAHNRGLAGSGVKVAVLDTGISTHPDLNIRGGASFVPGEPSTQDGNGHGTHVAGTIAALDNSIGVLGVAPSAELYAVKVLSASGQGAISSIAGGLEWAGNNGMHVANLSLGAPSPSATLEQAVNSATSRGVLVVAASGNSGADSISYPARYANAMAVGATDQNNNRADFSQYGAGLDIVAPGVNVQSTYPGSTYASLNGTSMATPHVAGAAVLVKQKNPSWSNVRIRDHLKNTATSLGSTNLYGSGLVNAFAATR

SEQ ID NO: 63980 - protein, 269 aa, Unidentified
AQSVPWGISRVQAPAAHNRGLAGRGVKVAVLDTGISTHPDLNIRGGASFVPGEPSTQDGNGHGTHVAGTIAALDNSIGVLGVAPSAELYAVKVLGASGGGAISSIAQGLEWAGNNGMHVANLSLGSPSPSATLEQAVNSATSRGVLVVAASGNSGADSISYPARYANAMAVGATDQNNNRADFSQYGAGLDIVAPGVNVQSTYPGSTYASLNGTSMATPHVAGAAVLVKQKNPSWSNVRIRDHLKNTATSLGSTNLYGSGLVNVFVATR

SEQ ID NO: 63981 - protein, 269 aa, Unidentified
AQSVPWGISRVQAPAAHNRGLAGRGVKVAVLDTGISTHPDLNIRGGASFVPGEPSTQDGNGHGTHVAGTIAALNNSIGVLGVAPSAELYAVKVLGASGGGAISSVAQGLEWAGNNGMHVANLSLGSESPSATLEQAVNSATSRGVLVVAASGNSGADSISYPARYANAMAVGATDQNNNRADFSQYGAGLDIVAPGVNVQSTYPGSTYASLNGTSMATPHVAGAAVLVKQKNPSWSNVRIRDHLKNTATSLGSTNLYGSGLVNAFVATR

SEQ ID NO: 63982 - protein, 269 aa, Unidentified
AQSVPWGISRVQAPAAHNRGLAGSGVKVAVLDTGISTHPDLNIRGGASFVPGEPSTQDGNGHGTHVAGTIAALDNNIGVLGVAPSAELYAVKVLGASGNGAISSIAQGLEWAGNNGMHVANLSLGAPSPSATLEQAVNSATSRGVLVVAASGNSGADSISYPARYANAMAVGATDQNNNRADFSQYGAGLDIVAPGVNVQSTYPGSTYASQNGTSMATPHVAGAAVLVKQKNPSWSNVRIRDHLKNTATSLGSTNLYGSGLVNAFAATR

SEQ ID NO: 63983 - protein, 269 aa, Unidentified
AQSVPWGISRVQAPAAHNRGLAGGGVKVAVLDTGISTHPDLNIRGGASFVPGEPSTQDGNGHGTHVAGTIAALNNNIGVLGVAPSAELYAVKVLSASGQGAISSIAGGLEWAGNNGMHVANLSLGSPSPSATLEQAVNSATSRGVLVVAASGNSGADSISYPARYANAMAVGATDQNNNRADFSQYGAGLDIVAPGVNVQSTYPGSTYASLNGTSMATPHVAGAAVLVKQKNPSWSNVRIRDHLKNTATSLGSTNLYGSGLVNAFAATR

SEQ ID NO: 63984 - protein, 269 aa, Unidentified
AQSVPWGISRVQAPAAHNRGLAGRGVKVAVLDTGISTHPDLNIRGGASFVPGEPSTQDGNGHGTHVAGTIAALDNSIGVLGVAPSAELYAVKVLGASGGGAISSIAQGLEWAGNNGMHVANLSLGSPSPSATLEQAVNSATSRGVLVVAASGNSGADSISYPARYANAMAVGATDQNNNRADFSQYGAGLDIVAPGVNVQSTYPGSTYASLNGTSMATPHVAGAAVLVKQKYPSWSNVRIRDHLKNTATSLGSTNLYGSGLVNVFAATR

SEQ ID NO: 63985 - protein, 269 aa, Unidentified
AQSVPWGISRVQAPAAHNRGLAGSGVKVAVLDTGISTHPDLNIRGGASFVPGEPSTQDGNGHGTHVAGTIAALNNSIGVLGVAPSAELYAVKVLAASGQGAISSIAQGLEWAGNNGMHVANLSIGASSPSATLEQAVNSATSRGVLVVAASGNSGADSISYPARYANAMAVGATDQNNNRADFSQYGAGLDIVAPGVNVQSTYPGSTYASLNGTSMATPHVAGAAVLVKQKNPSWSNVRIRDHLKNTATSLGSTNLYGSGLVNAFAATR

SEQ ID NO: 63986 - protein, 269 aa, Unidentified
AQSVPWGISRVQAPAAHNRGLAGSGVKVAVLDTGISTHPDLNIRGGASFVPGEPSTQDGNGHGTHVAGTIAALNNSIGVLGVAPSAELYAVKVLGASGQGAISSIAQGLEWAGNNGMHVANVSLGAESPSATLEQAVNSATSRGVLVVAASGNSGADSISYPARYANAMAVGATDQNNNRADFSQYGAGLDIVAPGVNVQSTYPGSTYASQNGTSMATPHVAGAAVLVKQKNPSWSNVRIRDHLKNTATSLGSTNLYGSGLVNAFAATR

SEQ ID NO: 63987 - protein, 269 aa, Unidentified
AQSVPWGISRVQAPAAHNRGLAGGGVKVAVLDTGISTHPDLNIRGGASFVPGEPSTQDGNGHGTHVAGTIAALDNSIGVLGVAPSAELYAVKVLSASGGGAISSIAQGLEWAGNNGMHVANLSLGSPSPSATLEQAVNSATSRGVLVVAASGNSGADSISYPARYANAMAVGATDQNNNRADFSQYGAGLDIVAPGVNVQSTYPGSTYASQNGTSMATPHVAGAAVLVKQKNPSWSNVRIRDHLKNTATSLGSTNLYGSGLVNAFAATR

SEQ ID NO: 63988 - protein, 269 aa, Unidentified
AQSVPWGISRVQAPAAHNRGLAGSGVKVAVLDTGISTHPDLNIRGGASFVPGEPSTQDGNGHGTHVAGTIAALDNNIGVLGVAPSAELYAVKVLAASGNGAISSIAQGLEWAGNNGMHVANLSLGSPSPSATLEQAVNSATSRGVLVVAASGNSGADSISYPARYANAMAVGATDQNNNRADFSQYGAGLDIVAPGVNVQSTYPGSTYASQNGTSMATPHVAGAAVLVKQKNPSWSNVRIRDHLKNTATSLGSTNLYGSGLVNAFAATR

SEQ ID NO: 63989 - protein, 269 aa, Unidentified
AQSVPWGISRVQAPAAHNRGLAGSGVKVAVLDTGISTHPDLRIRGGASFVPGEPSTQDGNGHGTHVAGTIAALDNSIGVLGVAPSAELYAVKVLGASGGGAISSIAQGLEWAGNNGMHVANLSLGSESPSATLEQAVNSATSRGVLVVAASGNSGEESISYPARYANAMAVGATDQNNNRADFSQYGAGLDIVAPGVNVQSTYPGSTYASLNGTSMATPHVAGAAVLVKQKNPSWSNVRIRDHLKNTATSLGSTNLYGSGLVNAFAATR

SEQ ID NO: 63990 - protein, 269 aa, Bacillus clausii
AQSVPWGIERVQAPAAHNRGLTGSGVKVAVLDTGISTHPDLRIRGGASFVPGEPSTQDGNGHGTHVAGTIAALDNSIGVLGVAPSAELYAVKVLGAFGLGSISSIAQGLEWAGNNGMHVANLSLGSPSPSATLEQAVNSATSRGVLVVAASGNEGAGSIRYPARYANAMAVGATDQNNNRASFSQYGAGLDIVAPGVNILSTWPGSTYASLNGTSMATPHVAGAAALVKQKNPSWSNVQIRNHLKNTATSLGDTWEYGSGLVNAEAATR

SEQ ID NO: 63991 - protein, 269 aa, Unidentified
AQSVPWGISRVQAPAAHNRGLAGSGVKVAVLDTGISTHPDLNIRGGASFVPGEPSTQDGNGHGTHVAGTIAALNNNIGVLGVAPSAELYAVKVLGASGQGAISSIAGGLEWAGNNGMHVANLSLGAPSPSATLEQAVNSATSRGVLVVAASGNSGADSISYPARYANAMAVGATDQNNNRADFSQYGAGLDIVAPGVNVQSTYPGSTYASQNGTSMATPHVAGAAVLVKQKNPSWSNVRIRDHLKNTATSLGSTNLYGSGLVNAFAATR

SEQ ID NO: 63992 - protein, 269 aa, Unidentified
AQSVPWGISRVQAPAAHNRGLAGGGVKVAVLDTGISTHPDLNIRGGASFVPGEPSTQDGNGHGTHVAGTIAALNNNIGVLGVAPSAELYAVKVLAASGNGAISSIAGGLEWAGNNGMHVANLSLGSPSPSATLEQAVNSATSRGVLVVAASGNSGADSISYPARYANAMAVGATDQNNNRADFSQYGAGLDIVAPGVNVQSTYPGSTYASLNGTSMATPHVAGAAVLVKQKNPSWSNVRIRDHLKNTATSLGSTNLYGSGLVNAFAATR

SEQ ID NO: 63993 - protein, 269 aa, Unidentified
AQSVPWGISRVQAPAAHNRGLAGSGVKVAVLDTGISTHPDLNIRGGASFVPGEPSTQDGNGHGTHVAGTIAALDNNIGVLGVAPSAELYAVKVLSASGGGAISSIAQGLEWAGNNGMHVANLSLGSPSPSATLEQAVNSATSRGVLVVAASGNSGADSISYPARYANAMAVGATDQNNNRADFSQYGAGLDIVAPGVNVQSTYPGSTYASQNGTSMATPHVAGAAVLVKQKNPSWSNVRIRDHLKNTATSLGSTNLYGSGLVNAFAATR

SEQ ID NO: 63994 - protein, 269 aa, Unidentified
AQSVPWGISRVQAPAAHNRGLAGGGVKVAVLDTGISTHPDLNIRGGASFVPGEPSTQDGNGHGTHVAGTIAALDNNIGVLGVAPSAELYAVKVLGASGGGAISSIAGGLEWAGNNGMHVANLSLGSPSPSATLEQAVNSATSRGVLVVAASGNSGADSISYPARYANAMAVGATDQNNNRADFSQYGAGLDIVAPGVNVQSTYPGSTYASLNGTSMATPHVAGAAVLVKQKNPSWSNVRIRDHLKNTATSLGSTNLYGSGLVNAFAATR

SEQ ID NO: 63995 - protein, 269 aa, Unidentified
AQSVPWGISRVQAPAAHNRGLAGGGVKVAVLDTGISTHPDLNIRGGASFVPGEPSTQDGNGHGTHVAGTIAALNNNIGVLGVAPSAELYAVKVLGASGQGAISSIAQGLEWAGNNGMHVANLSLGSPSPSATLEQAVNSATSRGVLVVAASGNSGADSISYPARYANAMAVGATDQNNNRADFSQYGAGLDIVAPGVNVQSTYPGSTYAGQNGTSMATPHVAGAAVLVKQKNPSWSNVRIRDHLKNTATSLGSTNLYGSGLVNAFAATR

SEQ ID NO: 63996 - protein, 269 aa, Unidentified
AQSVPWGISRVQAPAAHNRGLAGGGVKVAVLDTGISTHPDLNIRGGASFVPGEPSTQDGNGHGTHVAGTIAALNNNIGVLGVAPSAELYAVKVLSASGNGAISSIAQGLEWAGNNGMHVANLSLGAPSPSATLEQAVNSATSRGVLVVAASGNSGADSISYPARYANAMAVGATDQNNNRADFSQYGAGLDIVAPGVNVQSTYPGSTYASLNGTSMATPHVAGAAVLVKQKNPSWSNVRIRDHLKNTATSLGSTNLYGSGLVNAFAATR

SEQ ID NO: 63997 - protein, 269 aa, Unidentified
AQSVPWGISRVQAPAAHNRGLAGSGVKVAVLDTGISTHPDLNIRGGASFVPGEPSTQDGNGHGTHVAGTIAALNNNIGVLGVAPSAELYAVKVLAASGQGAISSIAQGLEWAGNNGMHVANLSLGAPSPSATLEQAVNSATSRGVLVVAASGNSGADSISYPARYANAMAVGATDQNNNRADFSQYGAGLDIVAPGVNVQSTYPGSTYASQNGTSMATPHVAGAAVLVKQKNPSWSNVRIRDHLKNTATSLGSTNLYGSGLVNAFAATR

SEQ ID NO: 63998 - protein, 269 aa, Unidentified
AQSVPWGISRVQAPAAHNRGLAGGGVKVAVLDTGISTHPDLNIRGGASFVPGEPSTQDGNGHGTHVAGTIAALDNNIGVLGVAPSAELYAVKVLGASGGGAISSIAQGLEWAGNNGMHVANLSLGSPSPSATLEQAVNSATSRGVLVVAASGNSGADSISYPARYANAMAVGATDQNNNRADFSQYGAGLDIVAPGVNVQSTYPGSTYASLNGTSMATPHVAGAAVLVKQKNPSWSNVRIRDHLKNTATSLGSTNLYGSGLVNAFTATR

SEQ ID NO: 63999 - protein, 269 aa, Unidentified
AQSVPWGISRVQAPAAHNRGLAGSGVKVAVLDTGISTHPDLNIRGGASFVPGEPSTQDGNGHGTHVAGTIAALNNSIGVLGVAPSAELYAVKVLGASGGGAISSIAQGLEWAGNNGMHVANLSIGAESPSATLEQAVNSATSRGVLVVAASGNSGADSISYPARYANAMAVGATDQNNNRADFSQYGAGLDIVAPGVNVQSTYPGSTYASQNGTSMATPHVAGAAVLVKQKNPSWSNVRIRDHLKNTATSLGSTNLYGSGLVNAFAATR

SEQ ID NO: 64000 - protein, 269 aa, Unidentified
AQSVPWGISRVQAPAAHNRGLAGGGVKVAVLDTGISTHPDLNIRGGASFVPGEPSTQDGNGHGTHVAGTIAALDNSIGVLGVAPSAELYAVKVLSASGNGAISSIAQGLEWAGNNGMHVANLSLGSPSPSATLEQAVNSATSRGVLVVAASGNSGADSISYPARYANAMAVGATDQNNNRADFSQYGAGLDIVAPGVNVQSTYPGSTYASQNGTSMATPHVAGAAVLVKQKNPSWSNVRIRDHLKNTATSLGSTNLYGSGLVNAFAATR

SEQ ID NO: 64001 - protein, 269 aa, Unidentified
AQSVPWGISRVQAPAAHNRGLAGRGVKVAVLDTGISTHPDLRIRGGASFVPGEPSTQDGNGHGTHVAGTIAALDNSIGVLGVAPSAELYAVKVLGASGGGAISSIAQGLEWAGNNGMHVANLSLGSESPSATLEQAVNSATSRGVLVVAASGNSGAGSISYPARYANAMAVGATDQNNNRADFSQYGAGLDIVAPGVNVQSTYPGSTYASLNGTSMATPHVAGAAVLVKQKNPSWSNVRIRDHLKNTATSLGSTNLYGSGLVNAFVATR

SEQ ID NO: 64002 - protein, 269 aa, Bacillus clausii
AQSVPWGIERVQAPAAHNRGLTGSGVKVAVLDTGISTHPDLRIRGGASFVPGEPSTQDGNGHGTHVAGTIAALDNSIGVLGVAPSAELYAVKVLGAFGLGTISSIAQGLEWAGNNGMHVANLSLGSPSPSATLEQAVNSATSRGVLVVAASGNSGAGSISYPARYANAMAVGATDQNNNRASFSQYGAGLDIVAPGVNILSTWPGSTYKSLNGTSMATPHVAGAAALVKQKNPSWSNVQIRNHLKNTATSLGDTWEYGSGLVNAEAATR

SEQ ID NO: 64003 - protein, 269 aa, Unidentified
AQSVPWGISRVQAPAAHNRGLAGGGVKVAVLDTGISTHPDLNIRGGASFVPGEPSTQDGNGHGTHVAGTIAALDNSIGVLGVAPSAELYAVKVLAASGNGAISSIANGLEWAGNNGMHVANLSLGSPSPSATLEQAVNSATSRGVLVVAASGNSGADSISYPARYANAMAVGATDQNNNRADFSQYGAGLDIVAPGVNVQSTYPGSTYASLNGTSMATPHVAGAAVLVKQKNPSWSNVRIRDHLKNTATSLGSTNLYGSGLVNAFAATR

SEQ ID NO: 64004 - protein, 269 aa, Unidentified
AQSVPWGISRVQAPAAHNRGLAGSGVKVAVLDTGISTHPDLNIRGGASFVPGEPSTQDGNGHGTHVAGTIAALDNSIGVLGVAPSAELYAVKVLSASGNGAISSIAGGLEWAGNNGMHVANLSLGAPSPSATLEQAVNSATSRGVLVVAASGNSGADSISYPARYANAMAVGATDQNNNRADFSQYGAGLDIVAPGVNVQSTYPGSTYASLNGTSMATPHVAGAAVLVKQKNPSWSNVRIRDHLKNTATSLGSTNLYGSGLVNAFAATR

SEQ ID NO: 64005 - protein, 269 aa, Unidentified
AQSVPWGISRVQAPAAHNRGLAGGGVKVAVLDTGISTHPDLNIRGGASFVPGEPSTQDGNGHGTHVAGTIAALDNSIGVLGVAPSAELYAIKVLGASGNGAISSIAQGLEWAGNNGMHVANLSLGSPSPSATLEQAVNSATSRGVLVVAASGNSGADSISYPARYANAMAVGATDQNNNRADFSQYGAGLDIVAPGVNVQSTYPGSTYASQNGTSMATPHVAGAAVLVKQKNPSWSNVRIRDHLKNTATSLGSTNLYGSGLVNAFAATR

SEQ ID NO: 64006 - protein, 269 aa, Unidentified
AQSVPWGISRVQAPAAHNRGLAGSGVKVAVLDTGISTHPDLNIRGGASFVPGEPSTQDGNGHGTHVAGTIAALDNNIGVLGVAPSAELYAVKVLAASGNGAISSIAGGLEWAGNNGMHVANLSLGSPSPSATLEQAVNSATSRGVLVVAASGNSGADSISYPARYANAMAVGATDQNNNRADFSQYGAGLDIVAPGVNVQSTYPGSTYASLNGTSMATPHVAGAAVLVKQKNPSWSNVRIRDHLKNTATSLGSTNLYGSGLVNAFAATR

SEQ ID NO: 64007 - protein, 269 aa, Unidentified
AQSVPWGISRVQAPAAHNRGLAGSGVKVAVLDTGISTHPDLNIRGGASFVPGEPSTQDGNGHGTHVAGTIAALNNSIGVLGVAPSAELYAVKVLAASGNGAISSIAQGLEWAGNNGMHVANVSLGASSPSATLEQAVNSATSRGVLVVAASGNSGADSISYPARYANAMAVGATDQNNNRADFSQYGAGLDIVAPGVNVQSTYPGSTYASLNGTSMATPHVAGAAVLVKQKNPSWSNVRIRDHLKNTATSLGSTNLYGSGLVNAFAATR

SEQ ID NO: 64008 - protein, 269 aa, Unidentified
AQSVPWGISRVQAPAAHNRGLAGFGVKVAVLDTGISTHPDLRIRGGASFVPGEPSTQDGNGHGTHVAGTIAALDNSIGVLGVAPSAELYAVKVLGASGGGAISSIAQGLEWAGNNGMHVANLSLGSPSPSATLEQAVNSATSRGVLVVAASGNSGEGSISYPARYANAMAVGATDQNNNRADFSQYGAGLDIVAPGVNVQSTYPGSTYASLNGTSMATPHVAGAAVLVKQKNPSWSNVRIRDHLKNTATSLGSTNLYGSGLVNAFVATR

SEQ ID NO: 64009 - protein, 269 aa, Unidentified
AQSVPWGISRVQAPAAHNRGLAGRGVKVAVLDTGISTHPDLNIRGGASFVPGEPSTQDGNGHGTHVAGTIAALNNSIGVLGVAPSAELYAVKVLGASGGGAISSIAQGLEWAGNNGMHVANLSLGSPSPSATLEQAVNSATSRGVLVVAASGNSGADSISYPARYANAMAVGATDQNNNRADFSQYGAGLDIVAPGVNVQSTYPGSTYASLNGTSMATPHVAGAAVLVKQKYPSWSNVRIRDHLKNTATSLGSTNLYGSGLVNVFVATR

SEQ ID NO: 64010 - protein, 269 aa, Unidentified
AQSVPWGISRVQAPAAHNRGLAGGGVKVAVLDTGISTHPDLNIRGGASFVPGEPSTQDGNGHGTHVAGTIAALDNSIGVLGVAPSAELYAVKVLSASGQGAISSIAQGLEWAGNNGMHVANLSLGSPSPSATLEQAVNSATSRGVLVVAASGNSGADSISYPARYANAMAVGATDQNNNRADFSQYGAGLDIVAPGVNVQSTYPGSTYASQNGTSMATPHVAGAAVLVKQKNPSWSNVRIRDHLKNTATSLGSTNLYGSGLVNAFAATR

SEQ ID NO: 64011 - protein, 269 aa, Unidentified
AQSVPWGISRVQAPAAHNRGLAGSGVKVAVLDTGISTHPDLNIRGGASFVPGEPSTQDGNGHGTHVAGTIAALNNSIGVLGVAPSAELYAVKVLAASGQGAISSIAQGLEWAGNNGMHVANLSIGSSSPSATLEQAVNSATSRGVLVVAASGNSGADSISYPARYANAMAVGATDQNNNRADFSQYGAGLDIVAPGVNVQSTYPGSTYASQNGTSMATPHVAGAAVLVKQKNPSWSNVRIRDHLKNTATSLGSTNLYGSGLVNAFAATR

SEQ ID NO: 64012 - protein, 269 aa, Unidentified
AQSVPWGISRVQAPAAHNSGLAGRGVKVAVLDTGISTHPDLNIRGGASFVPGEPSTQDGNGHGTHVAGTIAALDNSIGVLGVAPSAELYAVKVLGASGGGAISSIAQGLEWAGNNGMHVANLSLGSPSPSATLEQAVNSATSRGVLVVAASGNSGADSISYPARYANAMAVGATDQNNNRADFSQYGAGLDIVAPGVNVQSTYPGSTYASLNGTSMATPHVAGAAVLVKQKYPSWSNVRIRDHLKNTATSLGSTNLYGSGLVNAFAATR

SEQ ID NO: 64013 - protein, 269 aa, Unidentified
AQSVPWGISRVQAPAAHNRGFAGGGVKVAVLDTGISTHPDLNIRGGASFVPGEPSTQDGNGHGTHVAGTIAALNNNIGVLGVAPSAELYAVKVLGASGQGAISSIAQGLEWAGNNGMHVANLSLGSPSPSATLEQAVNSATSRGVLVVAASGNSGADSISYPARYANAMAVGATDQNNNRADFSQYGAGLDIVAPGVNVQSTYPGSTYASQNGTSMATPHVAGAAVLVKQKNPSWSNVRIRDHLKNTATSLGSTNLYGSGLVNAFAATR

SEQ ID NO: 64014 - protein, 269 aa, Unidentified
AQSVPWGISRVQAPAAHNRGLAGGGVKVAVLDTGISTHPDLNIRGGASFVPGEPSTQDGNGHGTHVAGTIAALNNNIGVLGVAPSAELYAVKVLAASGQGAISSIAQGLEWAGNNGMHVANLSLGAPSPSATLEQAVNSATSRGVLVVAASGNSGADSISYPARYANAMAVGATDQNNNRADFSQYGAGLDIVAPGVNVQSTYPGSTYASLNGTSMATPHVAGAAVLVKQKNPSWSNVRIRDHLKNTATSLGSTNLYGSGLVNAFAATR

SEQ ID NO: 64015 - protein, 269 aa, Unidentified
AQSVPWGISRVQAPAAHNRGLAGRGVKVAVLDTGISTHPDLNIRGGASFVPGEPSTQDGNGHGTHVAGTIAALDNSIGVLGVAPSAELYAVKVLGASGGGAISSIAQGLEWAGNNGMHVANLSLGSESPSATLEQAVNSATSRGVLVVAASGNSGADSISYPARYANAMAVGATDQNNNRADFSQYGAGLDIVAPGVNVQSTYPGSTYASLNGTSMATPHVAGAAVLVKQKNPSWSNVRIRDHLKNTATSLGSTNLYGSGLVNAFVATR

SEQ ID NO: 64016 - protein, 269 aa, Unidentified
AQSVPWGISRVQAPAAHNRGLAGGGVKVAVLDTGISTHPDLNIRGGASFVPGEPSTQDGNGHGTHVAGTIAALDNSIGVLGVAPSAELYAVKVLSASGQGAISSIAQGLEWAGNNGMHVANLSLGAPSPSATLEQAVNSATSRGVLVVAASGNSGADSISYPARYANAMAVGATDQNNNRADFSQYGAGLDIVAPGVNVQSTYPGSTYASLNGTSMATPHVAGAAVLVKQKNPSWSNVRIRDHLKNTATSLGSTNLYGSGLVNAFAATR

SEQ ID NO: 64017 - protein, 269 aa, Unidentified
AQSVPWGISRVQAPAAHNRGLAGSGVKVAVLDTGISTHPDLNIRGGASFVPGEPSTQDGNGHGTHVAGTIAALDNSIGVLGVAPSAELYAVKVLGASGNGAISSIANGLEWAGNNGMHVANLSLGAPSPSATLEQAVNSATSRGVLVVAASGNSGADSISYPARYANAMAVGATDQNNNRADFSQYGAGLDIVAPGVNVQSTYPGSTYASQNGTSMATPHVAGAAVLVKQKNPSWSNVRIRDHLKNTATSLGSTNLYGSGLVNAFAATR

SEQ ID NO: 64018 - protein, 269 aa, Unidentified
AQSVPWGISRVQAPAAHNRGLAGGGVKVAVLDTGISTHPDLNIRGGASFVPGEPSTQDGNGHGTHVAGTIAALNNNIGVLGVAPSAELYAVKVLAASGGGAISSIAQGLEWAGNNGMHVANLSLGAPSPSATLEQAVNSATSRGVLVVAASGNSGADSISYPARYANAMAVGATDQNNNRADFSQYGAGLDIVAPGVNVQSTYPGSTYASLNGTSMATPHVAGAAVLVKQKNPSWSNVRIRDHLKNTATSLGSTNLYGSGLVNAFAATR

SEQ ID NO: 64019 - protein, 269 aa, Unidentified
AQSVPWGISRVQAPAAHNRGLAGGGVKVAVLDTGISTHPDLNIRGGASFVPGEPSTQDGNGHGTHVAGTIAALNNNIGVLGVAPSAELYAVKVLSASGQGAISSIAQGLEWAGNNGMHVANLSLGAPSPSATLEQAVNSATSRGVLVVAASGNSGADSISYPARYANAMAVGATDQNNNRADFSQYGAGLDIVAPGVNVQSTYPGSTYASLNGTSMATPHVAGAAVLVKQKNPSWSNVRIRDHLKNTATSLGSTNLYGSGLVNAFAATR

SEQ ID NO: 64020 - protein, 269 aa, Unidentified
AQSVPWGISRVQAPAAHNRGLAGSGVKVAVLDTGISTHPDLNIRGGASFVPGEPSTQDGNGHGTHVAGTIAALNNSIGVLGVAPSAELYAVKVLGASGNGAISSIAQGLEWAGNNGMHVANVSIGAESPSATLEQAVNSATSRGVLVVAASGNSGADSISYPARYANAMAVGATDQNNNRADFSQYGAGLDIVAPGVNVQSTYPGSTYASLNGTSMATPHVAGAAVLVKQKNPSWSNVRIRDHLKNTATSLGSTNLYGSGLVNAFAATR

SEQ ID NO: 64021 - protein, 269 aa, Unidentified
AQSVPWGISRVQAPAAHNRGLAGRGVKVAVLDTGISTHPDLNIRGGASFVPGEPSTQDGNGHGTHVAGTIAALDNSIGVLGVAPSAELYAVKVLGASGGGAISSIAQGLEWAGNNGMHVANLSLGSESPSATLEQAVNSATSRGVLVVAASGNSGEGSISYPARYANAMAVGATDQNNNRADFSQYGAGLDIVAPGVNVQSTYPGSTYASLNGTSMATPHVAGAAVLVKQKNPSWSNVRIRDHLKNTATSLGSTNLYGSGLVNAFVATR

SEQ ID NO: 64022 - protein, 269 aa, Unidentified
AQSVPWGISRVQAPAAHNRGLAGSGVKVAVLDTGISTHPDLNIRGGASFVPGEPSTQDGNGHGTHVAGTIAALDNNIGVLGVAPSAELYAVKVLGASGNGAISSIAGGLEWAGNNGMHVANLSLGAPSPSATLEQAVNSATSRGVLVVAASGNSGADSISYPARYANAMAVGATDQNNNRADFSQYGAGLDIVAPGVNVQSTYPGSTYASLNGTSMATPHVAGAAVLVKQKNPSWSNVRIRDHLKNTATSLGSTNLYGSGLVNAFAATR

SEQ ID NO: 64023 - protein, 269 aa, Unidentified
AQSVPWGISRVQAPAAHNRGLAGGGVKVAVLDTGISTHPDLNIRGGASFVPGEPSTQDGNGHGTHVAGTIAALNNSIGVLGVAPSAELYAVKVLAASGNGAISSIAGGLEWAGNNGMHVANLSLGAPSPSATLEQAVNSATSRGVLVVAASGNSGADSISYPARYANAMAVGATDQNNNRADFSQYGAGLDIVAPGVNVQSTYPGSTYASLNGTSMATPHVAGAAVLVKQKNPSWSNVRIRDHLKNTATSLGSTNLYGSGLVNAFAATR

SEQ ID NO: 64024 - protein, 269 aa, Unidentified
AQSVPWGISRVQAPAAHNHGLAGSGVKVAVLDTGISTHPDLRIRGGASFVPGEPSTQDGNGHGTHVAGTIAALDNSIGVLGVAPSAELYAVKVLGASGGGAISSIAQGLEWAGNNGMHVANLSLGSESPSATLEQAVNSATSRGVLVVAASGNSGAGSISYPARYANAMAVGATDQNNNRADFSQYGAGLDIVAPGVNVQSTYPGSTYASLNGTSMATPHVAGAAVLVKQKNPSWSNVRIRDHLKNTATSLGSTNLYGSGLVNAFVATR

SEQ ID NO: 64025 - protein, 269 aa, Unidentified
AQSVPWGISRVQAPAAHNRGLAGSGVKVAVLDTGISTHPDLNIRGGASFVPGEPSTQDGNGHGTHVAGTIAALNNSIGVLGVAPSAELYAVKVLAASGQGAISSIAQGLEWAGNNGMHVANVSLGSESPSATLEQAVNSATSRGVLVVAASGNSGADSISYPARYANAMAVGATDQNNNRADFSQYGAGLDIVAPGVNVQSTYPGSTYASQNGTSMATPHVAGAAVLVKQKNPSWSNVRIRDHLKNTATSLGSTNLYGSGLVNAFAATR

SEQ ID NO: 64026 - protein, 269 aa, Unidentified
AQSVPWGISRVQAPAAHNRGLAGSGVKVAVLDTGISTHPDLNIRGGASFVPGEPSTQDGNGHGTHVAGTIAALNNSIGVLGVAPSAELYAVKVLGASGGGAISSIAQGLEWAGNNGMHVANVSLGAESPSATLEQAVNSATSRGVLVVAASGNSGADSISYPARYANAMAVGATDQNNNRADFSQYGAGLDIVAPGVNVQSTYPGSTYASQNGTSMATPHVAGAAVLVKQKNPSWSNVRIRDHLKNTATSLGSTNLYGSGLVNAFAATR

SEQ ID NO: 64027 - protein, 269 aa, Unidentified
AQSVPWGISRVQAPAAHNRGLAGSGVKVAVLDTGISTHPDLNIRGGASFVPGEPSTQDGNGHGTHVAGTIAALNNNIGVLGVAPSAELYAVKVLSASGQGAISSIANGLEWAGNNGMHVANLSLGAPSPSATLEQAVNSATSRGVLVVAASGNSGADSISYPARYANAMAVGATDQNNNRADFSQYGAGLDIVAPGVNVQSTYPGSTYASLNGTSMATPHVAGAAVLVKQKNPSWSNVRIRDHLKNTATSLGSTNLYGSGLVNAFAATR

SEQ ID NO: 64028 - protein, 269 aa, Unidentified
AQSVPWGISRVQAPAAHNRGLAGRGVKVAVLDTGISTHPDLRIRGGASFVPGEPSTQDGNGHGTHVAGTIAALNNSIGVLGVAPSAELYAVKVLGASGGGAISSIAQGLEWAGNNGMHVANLSLGSESPSATLEQAVNSATSRGVLVVAASGNSGEESISYPARYANAMAVGATDQNNNRADFSQYGAGLDIVAPGVNVQSTYPGSTYASLNGTSMATPHVAGAAVLVKQKNPSWSNVRIRDHLKNTATSLGSTNLYGSGLVNAFAATR

SEQ ID NO: 64029 - protein, 269 aa, Unidentified
AQSVPWGISRVQAPAAHNRGLAGGGVKVAVLDTGISTHPDLNIRGGASFVPGEPSTQDGNGHGTHVAGTIAALNNNIGVLGVAPSAELYAVKVLGASGQGAISSIAGGLEWAGNNGMHVANLSLGSPSPSATLEQAVNSATSRGVLVVAASGNSGADSISYPARYANAMAVGATDQNNNRADFSQYGAGLDIVAPGVNVQSTYPGSTYASQNGTSMATPHVAGAAVLVKQKNPSWSNVRIRDHLKNTATSLGSTNLYGSGLVNAFAATR

SEQ ID NO: 64030 - protein, 269 aa, Unidentified
AQSVPWGISRVQAPAAHNRGLAGGGVKVAVLDTGISTHPDLNIRGGASFVPGEPSTQDGNGHGTHVAGTIAALNNNIGVLGVAPSAELYAVKVLGASGNGAISSIANGLEWAGNNGMHVANLSLGAPSPSATLEQAVNSATSRGVLVVAASGNSGADSISYPARYANAMAVGATDQNNNRADFSQYGAGLDIVAPGVNVQSTYPGSTYASLNGTSMATPHVAGAAVLVKQKNPSWSNVRIRDHLKNTATSLGSTNLYGSGLVNAFAATR

SEQ ID NO: 64031 - protein, 269 aa, Unidentified
AQSVPWGISRVQAPAAHNRGLAGRGVKVAVLDTGISTHPDLNIRGGASFVPGEPSTQDGNGHGTHVAGTIAALDNSIGVLGVAPSAELYAVKVLGASGGGAISSIAQGLEWAGNNGMHVANLSLGSESPSATLEQAVNSATSRGVLVVAASGNSGADSISYPARYANAMAVGATDQNNNRADFSQYGAGLDIVAPGVNVQSTYPGSTYASLNGTSMATPHVAGAAVLVKQKYPSWSNVRIRDHLKNTATSLGSTNLYGSGLVNAFAATR

SEQ ID NO: 64032 - protein, 269 aa, Unidentified
AQSVPWGISRVQAPAAHNRGLAGSGVKVAVLDTGISTHPDLRIRGGASFVPGEPSTQDGNGHGTHVAGTIAALNNSIGVLGVAPSAELYAVKVLGASGGGAISSIAQGLEWAGNNGMHVANLSLGSESPSATLEQAVNSATSRGVLVVAASGNSGEEPISYPARYANAMAVGATDQNNNRADFSQYGAGLDIVAPGVNVQSTYPGSTYASLNGTSMATPHVAGAAVLVKQKNPSWSNVRIRDHLKNTATSLGSTNLYGSGLVNAFAATR

SEQ ID NO: 64033 - protein, 269 aa, Unidentified
AQSVPWGISRVQAPAAHNRGLAGGGVKVAVLDTGISTHPDLNIRGGASFVPGEPSTQDGNGHGTHVAGTIAALDNSIGVLGVAPSAELYAVKVLAASGNGAISSIAQGLEWAGNNGMHVANLSLGAPSPSATLEQAVNSATSRGVLVVAASGNSGADSISYPARYANAMAVGATDQNNNRADFSQYGAGLDIVAPGVNVQSTYPGSTYASLNGTSMATPHVAGAAVLVKQKNPSWSNVRIRDHLKNTATSLGSTNLYGSGLVNAFAATR

SEQ ID NO: 64034 - protein, 269 aa, Unidentified
AQSVPWGISRVQAPAAHNRGLAGSGVKVAVLDTGISTHPDLNIRGGASFVPGEPSTQDGNGHGTHVAGTIAALDNSIGVLGVAPSAELYAVKVLGASGGGAISSVAQGLEWAGNNGMHVANLSLGSESPSATLEQAVNSATSRGVLVVAASGNSGADSISYPARYANAMAVGATDQNNNRADFSQYGAGLDIVAPGVNVQSTYPGSTYASLNGTSMATPHVAGAAVLVKQKNPSWSNVRIRDHLKNTATSLGSTNLYGSGLVNAFVATR

SEQ ID NO: 64035 - protein, 269 aa, Unidentified
AQSVPWGISRVQAPAAHNRGLAGGGVKVAVLDTGISTHPDLNIRGGASFVPGEPSTQDGNGHGTHVAGTIAALDNNIGVLGVAPSAELYAVKVLAASGNGAISSIAQGLEWAGNNGMHVANLSLGSPSPSATLEQAVNSATSRGVLVVAASGNSGADSISYPARYANAMAVGATDQNNNRADFSQYGAGLDIVAPGVNVQSTYPGSTYASLNGTSMATPHVAGAAVLVKQKNPSWSNVRIRDHLKNTATSLGSTNLYGSGLVNAFAATR

SEQ ID NO: 64036 - protein, 269 aa, Unidentified
AQSVPWGISRVQAPAAHNRGLAGGGVKVAVLDTGISTHPDLNIRGGASFVPGEPSTQDGNGHGTHVAGTIAALDNNIGVLGVAPSAELYAVKVLAASGGGAISSIAQGLEWAGNNGMHVANLSLGSPSPSATLEQAVNSATSRGVLVVAASGNSGADSISYPARYANAMAVGATDQNNNRADFSQYGAGLDIVAPGVNVQSTYPGSTYASLNGTSMATPHVAGAAVLVKQKNPSWSNVRIRDHLKNTATSLGSTNLYGSGLVNAFAATR

SEQ ID NO: 64037 - protein, 269 aa, Unidentified
AQSVPWGISRVQAPAAHNRGLAGSGVKVAVLDTGISTHPDLNIRGGASFVPGEPSTQDGNGHGTHVAGTIAALNNSIGVLGVAPSAELYAVKVLGASGNGAISSIAQGLEWAGNNGMHVANVSLGAESPSATLEQAVNSATSRGVLVVAASGNSGADSISYPARYANAMAVGATDQNNNRADFSQYGAGLDIVAPGVNVQSTYPGSTYASQNGTSMATPHVAGAAVLVKQKNPSWSNVRIRDHLKNTATSLGSTNLYGSGLVNAFAATR

SEQ ID NO: 64038 - protein, 269 aa, Unidentified
AQSVPWGISRVQAPAAHNRGLAGSGVKVAVLDTGISTHPDLNIRGGASFVPGEPSTQDGNGHGTHVAGTIAALNNSIGVLGVAPSAELYAVKVLGASGQGAISSIAQGLEWAGNNGMHVANVSIGASSPSATLEQAVNSATSRGVLVVAASGNSGADSISYPARYANAMAVGATDQNNNRADFSQYGAGLDIVAPGVNVQSTYPGSTYASLNGTSMATPHVAGAAVLVKQKNPSWSNVRIRDHLKNTATSLGSTNLYGSGLVNAFAATR

SEQ ID NO: 64039 - protein, 269 aa, Unidentified
AQSVPWGISRVQAPAAHNRGLAGSGVKVAVLDTGISTHPDLNIRGGASFVPGEPSTQDGNGHGTHVAGTIAALNNSIGVLGVAPSAELYAVKVLGASGNGAISSIAQGLEWAGNNGMHVANVSLGASSPSATLEQAVNSATSRGVLVVAASGNSGADSISYPARYANAMAVGATDQNNNRADFSQYGAGLDIVAPGVNVQSTYPGSTYASQNGTSMATPHVAGAAVLVKQKNPSWSNVRIRDHLKNTATSLGSTNLYGSGLVNAFAATR

SEQ ID NO: 64040 - protein, 269 aa, Unidentified
AQSVPWGISRVQAPAAHNRGLAGRGVKVAVLDTGISTHPDLNIRGGASFVPGEPSTQDGNGHGTHVAGTIAALNNSIGVLGVAPSAELYAVKVLGASGGGAISSIAQGLEWAGNNGMHVANLSLGSESPSATLEQAVNSATSRGVLVVAASGNSGADSISYPARYANAMAVGATDQNNNRADFSQYGAGLDIVAPGVNVQSTYPGSTYASLNGTSMATPHVAGAAVLVKQKNPSWSNVRIRDHLKNTATSLGSTNLYGSGLVNVFVATR

SEQ ID NO: 64041 - protein, 269 aa, Unidentified
AQSVPWGISRVQAPAAHNRGLAGGGVKVAVLDTGISTHPDLNIRGGASFVPGEPSTQDGNGHGTHVAGTIAALNNNIGVLGVAPSAELYAVKVLGASGQGAISSIAQGLEWAGNNGMHVANLSLGSESPSATLEQAVNSATSRGVLVVAASGNSGADSISYPARYANAMAVGATDQNNNRADFSQYGAGLDIVAPGVNVQSTYPGSTYASQNGTSMATPHVAGAAVLVKQKNPSWSNVRIRDHLKNTATSLGSTNLYGSGLVNAFAATR

SEQ ID NO: 64042 - protein, 269 aa, Unidentified
AQSVPWGISRVQAPAAHNRGLAGGGVKVAVLDTGISTHPDLNIRGGASFVPGEPSTQDGNGHGTHVAGTIAALDNSIGVLGVAPSAELYAVKVLAASGQGAISSIAQGLEWAGNNGMHVANLSLGSPSPSATLEQAVNSATSRGVLVVAASGNSGADSISYPARYANAMAVGATDQNNNRADFSQYGAGLDIVAPGVNVQSTYPGSTYASQNGTSMATPHVAGAAVLVKQKNPSWSNVRIRDHLKNTATSLGSTNLYGSGLVNAFAATR

SEQ ID NO: 64043 - protein, 269 aa, Unidentified
AQSVPWGISRVQAPAAHNRGLAGSGVKVAVLDTGISTHPDLNIRGGASFVPGEPSTQDGNGHGTHVAGTIAALNNSIGVLGVAPSAELYAVKVLAASGQGAISSIAQGLEWAGNNGMHVANVSLGASSPSATLEQAVNSATSRGVLVVAASGNSGADSISYPARYANAMAVGATDQNNNRADFSQYGAGLDIVAPGVNVQSTYPGSTYASLNGTSMATPHVAGAAVLVKQKNPSWSNVRIRDHLKNTATSLGSTNLYGSGLVNAFAATR

SEQ ID NO: 64044 - protein, 269 aa, Unidentified
AQSVPWGISRVQAPAAHNRGLAGGGVKVAVLDTGISTHPDLNIRGGASFVPGEPSTQDGNGHGTHVAGTIAALNNSIGVLGVAPSAELYAVKVLGASGGGAISSIAQGLEWAGNNGMHVANLSIGSSSPSATLEQAVNSATSRGVLVVAASGNSGADSISYPARYANAMAVGATDQNNNRADFSQYGAGLDIVAPGVNVQSTYPGSTYASQNGTSMATPHVAGAAVLVKQKNPSWSNVRIRDHLKNTATSLGSTNLYGSGLVNAFAATR

SEQ ID NO: 64045 - protein, 269 aa, Unidentified
AQSVPWGISRVQAPAAHNRGLAGRGVKVAVLDTGISTHPDLNIRGGASFVPGEPSTQDGNGHGTHVAGTIAALNNSIGVLGVAPSAELYAVKVLGASGGGAISSVAQGLEWAGNNGMHVANLSLGSESPSATLEQAVNSATSRGVLVVAASGNSGADSISYPARYANAMAVGATDQNNNRADFSQYGAGLDIVAPGVNVQSTYPGSTYASLNGTSMATPHVAGAAVLVKQKNPSWSNVRIRDHLKNTATSLGSTNLYGSGLVNVFAATR

SEQ ID NO: 64046 - protein, 269 aa, Unidentified
AQSVPWGISRVQAPAAHNRGLAGGGVKVAVLDTGISTHPDLNIRGGANFVPGEPSTQDGNGHGTHVAGTIAALDNSIGVLGVAPSAELYAVKVLGASGGGAISSIAQGLEWAGNNGMHVANLSLGSPSPSATLEQAVNSATSRGVLVVAASGNSGADSISYPARYANAMAVGATDQNNNRADFSQYGAGLDIVAPGVNVQSTYPGSTYASQNGTSMATPHVAGAAVLVKQKNPSWSNVRIRDHLKNTATSLGSTNLYGSGLVNAFAATR

SEQ ID NO: 64047 - protein, 269 aa, Unidentified
AQSVPWGISRVQAPAAHNRGLAGRGVKVAVLDTGISTHPDLNIRGGASFVPGEPSTQDGNGHGTHVAGTIAALDNSIGVLGVAPSAELYAVKVLGASGGGAISSIAQGLEWAGNNGMHVANLSLGSESPSATLEQAVNSATSRGVLVVAASGNSGAESISYPARYANAMAVGATDQNNNRADFSQYGAGLDIVAPGVNVQSTYPGSTYASLNGTSMATPHVAGAAVLVKQKNPSWSNVRIRDHLKNTATSLGSTNLYGSGLVNAFVATR

SEQ ID NO: 64048 - protein, 269 aa, Unidentified
AQSVPWGISRVQAPAAHNRGLAGSGVKVAVLDTGISTHPDLNIRGGASFVPGEPSTQDGNGHGTHVAGTIAALNNSIGVLGVAPSAELYAVKVLAASGNGAISSIAQGLEWAGNNGMHVANVSLGSSSPSATLEQAVNSATSRGVLVVAASGNSGADSISYPARYANAMAVGATDQNNNRADFSQYGAGLDIVAPGVNVQSTYPGSTYASQNGTSMATPHVAGAAVLVKQKNPSWSNVRIRDHLKNTATSLGSTNLYGSGLVNAFAATR

SEQ ID NO: 64049 - protein, 269 aa, Unidentified
AQSVPWGISRVQAPAAHNRGLAGGGVKVAVLDTGISTHPDLNIRGGASFVPGEPSTQDGNGHGTHVAGTIAALNNSIGVLGVAPSAELYAVKVLAASGQGAISSIANGLEWAGNNGMHVANLSLGSPSPSATLEQAVNSATSRGVLVVAASGNSGADSISYPARYANAMAVGATDQNNNRADFSQYGAGLDIVAPGVNVQSTYPGSTYASQNGTSMATPHVAGAAVLVKQKNPSWSNVRIRDHLKNTATSLGSTNLYGSGLVNAFAATR

SEQ ID NO: 64050 - protein, 269 aa, Unidentified
AQSVPWGISRVQAPAAHNRGLAGSGVKVAVLDTGISTHPDLNIRGGASFVPGEPSTQDGNGHGTHVAGTIAALDNSIGVLGVAPSAELYAVKVLGASGNGAISSIAGGLEWAGNNGMHVANLSLGAPSPSATLEQAVNSATSRGVLVVAASGNSGADSISYPARYANAMAVGATDQNNNRADFSQYGAGLDIVAPGVNVQSTYPGSTYASQNGTSMATPHVAGAAVLVKQKNPSWSNVRIRDHLKNTATSLGSTNLYGSGLVNAFAATR

SEQ ID NO: 64051 - protein, 269 aa, Unidentified
AQSVPWGISRVQAPAAHNRGLAGSGVKVAVLDTGISTHPDLNIRGGASFVPGEPSTQDGNGHGTHVAGTIAALDNNIGVLGVAPSAELYAVKVLSASGNGAISSIAGGLEWAGNNGMHVANLSLGSPSPSATLEQAVNSATSRGVLVVAASGNSGADSISYPARYANAMAVGATDQNNNRADFSQYGAGLDIVAPGVNVQSTYPGSTYASLNGTSMATPHVAGAAVLVKQKNPSWSNVRIRDHLKNTATSLGSTNLYGSGLVNAFAATR

SEQ ID NO: 64052 - protein, 269 aa, Unidentified
AQSVPWGISRVQAPAAHNRGLAGGGVKVAVLDTGISTHPDLNIRGGASFVPGEPSTQDGNGHGTHVAGTIAALDNNIGVLGVAPSAELYAVKVLSASGQGAISSIAQGLEWAGNNGMHVANLSLGSPSPSATLEQAVNSATSRGVLVVAASGNSGADSISYPARYANAMAVGATDQNNNRADFSQYGAGLDIVAPGVNVQSTYPGSTYASLNGTSMATPHVAGAAVLVKQKNPSWSNVRIRDHLKNTATSLGSTNLYGSGLVNAFAATR

SEQ ID NO: 64053 - protein, 269 aa, Unidentified
AQSVPWGISRVQAPAAHNRGLAGSGVKVAVLDTGISTHPDLNIRGGASFVPGEPSTQDGNGHGTHVAGTIAALDNSIGVLGVAPSAELYAVKVLGASGGGAISSVAQGLEWAGNNGMHVANLSLGSPSPSATLEQAVNSATSRGVLVVAASGNSGADSISYPARYANAMAVGATDQNNNRADFSQYGAGLDIVAPGVNVQSTYPGSTYASLNGTSMATPHVAGAAVLVKQKYPSWSNVRIRDHLKNTATSLGSTNLYGSGLVNVFAATR

SEQ ID NO: 64054 - protein, 269 aa, Unidentified
AQSVPWGISRVQAPAAHNRGLAGGGVKVAVLDTGISTHPDLNIRGGASFVPGEPSTQDGNGHGTHVAGTIAALNNSIGVLGVAPSAELYAVKVLSASGNGAISSIANGLEWAGNNGMHVANLSLGAPSPSATLEQAVNSATSRGVLVVAASGNSGADSISYPARYANAMAVGATDQNNNRADFSQYGAGLDIVAPGVNVQSTYPGSTYASLNGTSMATPHVAGAAVLVKQKNPSWSNVRIRDHLKNTATSLGSTNLYGSGLVNAFAATR

SEQ ID NO: 64055 - protein, 269 aa, Unidentified
AQSVPWGISRVQAPAAHNRGLAGSGVKVAVLDTGISTHPDLNIRGGASFVPGEPSTQDGNGHGTHVAGTIAALDNSIGVLGVAPSAELYAVKVLAASGQGAISSIAQGLEWAGNNGMHVANLSLGAPSPSATLEQAVNSATSRGVLVVAASGNSGADSISYPARYANAMAVGATDQNNNRADFSQYGAGLDIVAPGVNVQSTYPGSTYASQNGTSMATPHVAGAAVLVKQKNPSWSNVRIRDHLKNTATSLGSTNLYGSGLVNAFAATR

SEQ ID NO: 64056 - protein, 269 aa, Unidentified
AQSVPWGISRVQAPAAHNRGLAGRGVKVAVLDTGISTHPDLRIRGGASFVPGEPSTQDGNGHGTHVAGTIAALDNSIGVLGVAPSAELYAVKVLGASGGGAISSIAQGLEWAGNNGMHVANLSLGSESPSATLEQAVNSATSRGVLVVAASGNSGAESISYPARYANAMAVGATDQNNNRADFSQYGAGLDIVAPGVNVQSTYPGSTYASLNGTSMATPHVAGAAVLVKQKNPSWSNVRIRDHLKNTATSLGSTNLYGSGLVNAFAATR

SEQ ID NO: 64057 - protein, 269 aa, Unidentified
AQSVPWGISRVQAPAAHNRGLAGGGVKVAVLDTGISTHPDLNIRGGASFVPGEPSTQDGNGHGTHVAGTIAALNNSIGVLGVAPSAELYAVKVLAASGQGAISSIAQGLEWAGNNGMHVANLSLGAPSPSATLEQAVNSATSRGVLVVAASGNSGADSISYPARYANAMAVGATDQNNNRADFSQYGAGLDIVAPGVNVQSTYPGSTYASQNGTSMATPHVAGAAVLVKQKNPSWSNVRIRDHLKNTATSLGSTNLYGSGLVNAFAATR

SEQ ID NO: 64058 - protein, 269 aa, Unidentified
AQSVPWGISRVQAPAAHNRGLAGSGVKVAVLDTGISTHPDLNIRGGASFVPGEPSTQDGNGHGTHVAGTIAALNNSIGVLGVAPSAELYAVKVLAASGQGAISSIAQGLEWAGNNGMHVANLSIGAESPSATLEQAVNSATSRGVLVVAASGNSGADSISYPARYANAMAVGATDQNNNRADFSQYGAGLDIVAPGVNVQSTYPGSTYASLNGTSMATPHVAGAAVLVKQKNPSWSNVRIRDHLKNTATSLGSTNLYGSGLVNAFAATR

SEQ ID NO: 64059 - protein, 269 aa, Unidentified
AQSVPWGISRVQAPAAHNRGLAGSGVKVAVLDTGISTHPDLRIRGGASFVPGEPSTQDGNGHGTHVAGTIAALDNPIGVLGVAPSAELYAVKVLGASGGGAISSIAQGLEWAGNNGMHVANLSLGSPSPSATLEQAVNSATSRGVLVVAASGNSGEESISYPARYANAMAVGATDQNNNRADFSQYGAGLDIVAPGVNVQSTYPGSTYASLNGTSMATPHVAGAAVLVKQKNPSWSNVRIRDHLKNTATSLGSTNLYGSGLVNAFAATR

SEQ ID NO: 64060 - protein, 269 aa, Unidentified
AQSVPWGISRVQAPAAHNRGLAGGGVKVAVLDTGISTHPDLNIRGGASFVPGEPSTQDGNGHGTHVAGTIAALNNSIGVLGVAPSAELYAVKVLAASGGGAISSIAQGLEWAGNNGMHVANLSLGAPSPSATLEQAVNSATSRGVLVVAASGNSGADSISYPARYANAMAVGATDQNNNRADFSQYGAGLDIVAPGVNVQSTYPGSTYASQNGTSMATPHVAGAAVLVKQKNPSWSNVRIRDHLKNTATSLGSTNLYGSGLVNAFAATR

SEQ ID NO: 64061 - protein, 269 aa, Unidentified
AQSVPWGIERVQAPAAHNRGLTGSGVKVAVLDTGISTHPDLRIRGGASFVPGEPSTQDGNGHGTHVAGTIAALDNSIGVLGVAPSAELYAVKVLGASGSGSVSSIAQGLEWAGNNGMHVANLSLGSPSPSATLEHAVNHATSHGVLVVAASGNSGAGSISYPARYANAMAVGATDQNNNRASFSQYGPGLDIVAPGVDILSTWPGGTYAVLNGTSMATPHVAGAAALVKQKNPSWSNVQIRNHLKNTATSLGSTNEYGSGLVNAEAATR

SEQ ID NO: 64062 - protein, 269 aa, Unidentified
AQSVPWGISRVQAPAAHNRGLAGSGVKVAVLDTGISTHPDLNIRGGASFVPGEPSTQDGNGHGTHVAGTIAALDNSIGVLGVAPSAELYAVKVLATSGQGAISSIAQGLEWAGNNGMHVANLSLGSPSPSATLEQAVNSATSRGVLVVAASGNSGADSISYPARYANAMAVGATDQNNNRADFSQYGAGLDIVAPGVNVQSTYPGSTYASQNGTSMATPHVAGAAVLVKQKNPSWSNVRIRDHLKNTATSLGSTNLYGSGLVNAFAATR

SEQ ID NO: 64063 - protein, 269 aa, Unidentified
AQSVPWGISRVQAPAAHNRGLAGRGVKVAVLDTGISTHPDLRIRGGASFVPGEPSTQDGNGHGTHVAGTIAALNNSIGVLGVAPSAELYAVKVLGASGSGAISSIAQGLEWAGNNRMHVANLSLGIESPSATLEQAVNSATSRGVLVVAASGNSGADSISYPARYANAMAVGATDQNNNRADFSQYGAGLDIVAPGVNVQSTYPGSTYASDNGTSMATPHVAGAAVLVKQKNPSWSNVQIRDHLKNTATSLGSTNLYGSGLVNAFAATR

SEQ ID NO: 64064 - protein, 269 aa, Unidentified
AQSVPWGISRVQAPAAHNRGLAGGGVKVAVLDTGISTHPDLNIRGGASFVPGEPSTQDGNGHGTHVAGTIAALDNSIGVLGVAPSAELYAVKVLGASGNGAISSIAGGLEWAGNNGMHVANLSLGAPSPSATLEQAVNSATSRGVLVVAASGNSGADSISYPARYANAMAVGATDQNNNRADFSQYGAGLDIVAPGVNVQSTYPGSTYASLNGTSMATPHVAGAAVLVKQKNPSWSNVRIRDHLKNTATSLGSTNLYGSGLVNAFAATR

SEQ ID NO: 64065 - protein, 269 aa, Unidentified
AQSVPWGISRVQAPAAHNRGLAGSGVKVAVLDTGISTHPDLNIRGGASFVPGEPSTQDGNGHGTHVAGTIAALDNSIGVLGVAPSAELYAVKVLGASGGGAISSVAQGLEWAGNNGMHVANLSLGSPSPSATLEQAVNSATSRGVLVVAASGNSGADSISYPARYANAMAVGATDQNNNRADFSQYGAGLDIVAPGVNVQSTYPGSTYASLNGTSMATPHVAGAAVLVKQKNPSWSNVRIRDHLKNTATSLGSTNLYGSGLVNVFVATR

SEQ ID NO: 64066 - protein, 269 aa, Unidentified
AQSVPWGISRVQAPAAHNRGLAGSGVKVAVLDTGISTHPDLNIRGGASFVPGEPSTQDGNGHGTHVAGTIAALDNNIGVLGVAPSAELYAVKVLSASGNGAISSIAQGLEWAGNNGMHVANLSLGSPSPSATLEQAVNSATSRGVLVVAASGNSGADSISYPARYANAMAVGATDQNNNRADFSQYGAGLDIVAPGVNVQSTYPGSTYASQNGTSMATPHVAGAAVLVKQKNPSWSNVRIRDHLKNTATSLGSTNLYGSGLVNAFAATR

SEQ ID NO: 64067 - protein, 269 aa, Unidentified
AQSVPWGISRVQAPAAHNRGLAGSGVKVAVLDTGISTHPDLNIRGGASFVPGEPSTQDGNGHGTHVAGTIAALNNSIGVLGVAPSAELYAVKVLAASGNGAISSIAQGLEWAGNNGMHVANLSLGASSPSATLEQAVNSATSRGVLVVAASGNSGADSISYPARYANAMAVGATDQNNNRADFSQYGAGLDIVAPGVNVQSTYPGSTYASQNGTSMATPHVAGAAVLVKQKNPSWSNVRIRDHLKNTATSLGSTNLYGSGLVNAFAATR

SEQ ID NO: 64068 - protein, 269 aa, Unidentified
AQSVPWGISRVQAPAAHNRGLAGSGVKVAVLDSGISTHPDLNIRGGASFVPGEPSTQDGNGHGTHVAGTIAALNNSIGVLGVAPSAELYAVKVLGASGGGAISSIAQGLEWAGLNGMHVANLSLGLPSPSATLEQAVNSATSRGVLVVAASGNSGADSISYPARYANAMAVGATDQNNNRADFSQYGAGLDIVAPGVNVQSTYPGSAYASLNGTSMATPHVAGAAVLVKQKNPSWSNVRIRDHLKNTATSLGSTNLYGSGLVNAFAATR

SEQ ID NO: 64069 - protein, 269 aa, Unidentified
AQVVPWGIRRVQAPAAHNRGLTGSGVKVAVLDTGISTHPDLNIRGGASFVPGEPSTQDGNGHGTHVAGTIAALDNSIGVLGVAPSAELYAVKVLGASGSGSVSSIAQGLEWAGNNGMVVANLSLGSPSPSATLEQAVNSATSRGVLVVAASGNSGAGSISYPARYANAMAVGATDENNERAEFSQYGAGLDIVAPGVNILSTWPGSTYASLVGTSMATPHVAGAAALVKQKNPSWSNVQIRNHLKNTATDLGSTWEYGSGLVNAEAATR

SEQ ID NO: 64070 - protein, 269 aa, Unidentified
AQSVPWGISRVQAPAAHNRGLAGGGVKVAVLDTGISTHPDLNIRGGASFVPGEPSTQDGNGHGTHVAGTIAALDNSIGVLGVAPSAELYAVKVLGASGNGAISSIAGGLEWAGNNGMHVANLSLGSPSPSATLEQAVNSATSRGVLVVAASGNSGADSISYPARYANAMAVGATDQNNNRADFSQYGAGLDIVAPGVNVQSTYPGSTYASQNGTSMATPHVAGAAVLVKQKNPSWSNVRIRDHLKNTATSLGSTNLYGSGLVNAFAATR

SEQ ID NO: 64071 - protein, 269 aa, Unidentified
AQSVPWGISRVQAPAAHNRGLAGGGVKVAVLDTGISTHPDLNIRGGASFVPGEPSTQDGNGHGTHVAGTIAALDNSIGVLGVAPSAELYAVKVLSASGNGAISSIAGGLEWAGNNGMHVANLSLGSPSPSATLEQAVNSATSRGVLVVAASGNSGASSISYPARYANAMAVGATDQNNNRADFSQYGAGLDIVAPGVNVQSTYPGSTYASLNGTSMATPHVAGAAVLVKQKNPSWSNVRIRDHLKNTATSLGSTNLYGSGLVNAFAATR

SEQ ID NO: 64072 - protein, 269 aa, Unidentified
AQSVPWGISRVQAPAAHNRGLAGSGVKVAVLDTGISTHPDLNIRGGASFVPGEPSTQDGNGHGTHVAGTIAALNNNIGVLGVAPSAELYAVKVLAASGNGAISSIAQGLEWAGNNGMHVANLSLGAPSPSATLEQAVNSATSRGVLVVAASGNSGADSISYPARYANAMAVGATDQNNNRADFSQYGAGLDIVAPGVNVQSTYPGSTYASQNGTSMATPHVAGAAVLVKQKNPSWSNVRIRDHLKNTATSLGSTNLYGSGLVNAFAATR

SEQ ID NO: 64073 - protein, 269 aa, Unidentified
AQSVPWGISRVQAPAAHNRGLAGSGVKVAVLDTGISTHPDLNIRGGASFVPGEPSTQDGNGHGTHVAGTIAALDNSIGVLGVAPSAELYAVKVLGASGNGAISSIAQGLEWAGNNGMHVANLSLGAPSPSATLEQAVNSATSRGVLVVAASGNSGADSISYPARYANAMAVGATDQNNNRADFSQYGAGLDIVAPGVNVQSTYPGSTYASQNGTSMATPHVAGAAVLVKQKNPSWSNVRIRDHLKNTATSLGSTNLYGSGLVNAFAAAR

SEQ ID NO: 64074 - protein, 269 aa, Unidentified
AQSVPWGISRVQAPAAHNRGLAGSGVKVAVLDTGISTHPDLNIRGGASFVPGEPSTQDGNGHGTHVAGTIAALNNSIGVLGVAPSAELYAVKVLAASGNGAISSIAQGLEWAGNNGMHVANLSIGSSSPSATLEQAVNSATSRGVLVVAASGNSGADSISYPARYANAMAVGATDQNNNRADFSQYGAGLDIVAPGVNVQSTYPGSTYASQNGTSMATPHVAGAAVLVKQKNPSWSNVRIRDHLKNTATSLGSTNLYGSGLVNAFAATR

SEQ ID NO: 64075 - protein, 269 aa, Unidentified
AQSVPWGISRVQAPAAHNRGLAGSGVKVAVLDTGISTHPDLNIRGGASFVPGEPSTQDGNGHGTHVAGTIAALNNSIGVLGVAPSAELYAVKVLAASGNGAISSIAQGLEWAGNNGMHVANLSIGSESPSATLEQAVNSATSRGVLVVAASGNSGADSISYPARYANAMAVGATDQNNNRADFSQYGAGLDIVAPGVNVQSTYPGSTYASQNGTSMATPHVAGAAVLVKQKNPSWSNVRIRDHLKNTATSLGSTNLYGSGLVNAFAATR

SEQ ID NO: 64076 - protein, 269 aa, Unidentified
AQSVPWGISRVQAPAAHRRRLTGRGVKVAVLDTGISTHPDLNIRGGASFVPGEPSTQDGNGHGTHVAGTIAALDNSIGVLGVAPSAELYAVKVLGASGAGAISSIAQGLEWAGNNGMHVANLSLGSPSPSATLEQAVNSATSRGVLVVAASGNSGAGSISYPARYANAMAVGATDQDNNRASFSQYGAGLDLVAPGVNVQSTYPQSAYASLNGTSMATPHVAGAAVLVKQKNPSWSNVRIRNRLKNTATSLGSTNLYGSGLVNAEAATR

SEQ ID NO: 64077 - protein, 269 aa, Unidentified
AQSVPWGISRVQAPAAHNRGLAGRGVKVAVLDTGISTHPDLNIRGGASFVPGEPSTQDGNGHGTHVAGTIAALNNSIGVLGVAPSAELYAVKVLGASGGGAISSIAQGLEWAGNNGMHVANLSLGSESPSATLEQAVNSATSRGVLVVAASGNSGADSISYPARYANAMAVGATDQNNNRADFSQYGAGLDIVAPGVNVQSTYPGSTYASLNGTSMATPHVAGAAVLVKQKYPSWSNVRIRDHLKNTATSLGSTNLYGSGLVNAFVATR

SEQ ID NO: 64078 - protein, 269 aa, Unidentified
AQSVPWGISRVQAPAAHNRGLAGSGVKVAVLDTGISTHPDLRIRGGASFVPGEPSTQDGNGHGTHVAGTIAALDNSIGVLGVAPSAELYAVKVLGASGGGAISSIAQGLEWAGNNGMHVANLSLGSESPSATLEQAVNSATSRGVLVVAASGNSGEGSISYPARYANAMAVGATDQNNNRADFSQYGAGLDIVAPGVNVQSTYPGSTYASLNGTSMATPHVAGAAVLVKQKNPSWSNVRIRDHLKNTATSLGSTNLYGSGLVNAFVATR

SEQ ID NO: 64079 - protein, 269 aa, Unidentified
AQSVPWGISRVQAPAAHNRGLAGGGVKVAVLDTGISTHPDLNIRGGASFVPGEPSTQDGNGHGTHVAGTIAALNNNIGVLGVAPSAELYAVKVLGASGGGAISSIAQGLEWAGNNGMHVANLSLGAPSPSATLEQAVNSATSRGVLVVAASGNSGADSISYPARYANAMAVGATDQNNNRADFSQYGAGLDIVAPGVNVQSTYPGSTYASQNGTSMATPHVAGAAVLVKQKNPSWSNVRIRDHLKNTATSLGSTNLYGSGLVNAFAATR

SEQ ID NO: 64080 - protein, 269 aa, Bacillus clausii
AQSVPWGIERVQAPAAHNRGLTGSGVKVAVLDTGISTHPDLRIRGGASFVPGEPSTQDGNGHGTHVAGTIAALDNSIGVLGVAPSAELYAVKVLGAFGLGTISSIAQGLEWAGNNGMHVANLSLGSPSPSATLEQAVNSATSRGVLVVAASGNSGAGSIRYPARYANAMAVGATDQNNNRASFSQYGAGLDIVAPGVNILSTWPGSTYASLNGTSMATPHVAGAAALVKQKNPSWSNVQIRNHLKNTATSLGDTWEYGSGLVNAEAATR

SEQ ID NO: 64081 - protein, 269 aa, Unidentified
AQSVPWGISRVQAPAAHNRGLAGGGVKVAVLDTGISTHPDLNIRGGASFVPGEPSTQDGNGHGTHVAGTIAALNNNIGVLGVAPSAELYAVKVLGASGQGAISSIANGLEWAGNNGMHVANLSLGSPSPSATLEQAVNSATSRGVLVVAASGNSGADSISYPARYANAMAVGATDQNNNRADFSQYGAGLDIVAPGVNVQSTYPGSTYASQNGTSMATPHVAGAAVLVKQKNPSWSNVRIRDHLKNTATSLGSTNLYGSGLVNAFAATR

SEQ ID NO: 64082 - protein, 269 aa, Unidentified
AQSVPWGISRVQAPAAHNRGLAGGGVKVAVLDTGISTHPDLNIRGGASFVPGEPSTQDGNGHGTHVAGTIAALNNSIGVLGVAPSAELYAVKVLSASGNGAISSIAQGLEWAGNNGMHVANLSLGAPSPSATLEQAVNSATSRGVLVVAASGNSGADSISYPARYANAMAVGATDQNNNRADFSQYGAGLDIVAPGVNVQSTYPGSTYASQNGTSMATPHVAGAAVLVKQKNPSWSNVRIRDHLKNTATSLGSTNLYGSGLVNAFAATR

SEQ ID NO: 64083 - protein, 269 aa, Unidentified
AQSVPWGISRVQAPAAHNRGLAGSGVKVAVLDTGISTHPDLNIRGGASFVPGEPSTQDGNGHGTHVAGTIAALNNSIGVLGVAPSAELYAVKVLAASGQGAISSIAQGLEWAGNNGMHVANVSLGAESPSATLEQAVNSATSRGVLVVAASGNSGADSISYPARYANAMAVGATDQNNNRADFSQYGAGLDIVAPGVNVQSTYPGSTYASLNGTSMATPHVAGAAVLVKQKNPSWSNVRIRDHLKNTATSLGSTNLYGSGLVNAFAATR

SEQ ID NO: 64084 - protein, 269 aa, Unidentified
AQSVPWGISRVQAPAAHNRGLAGSGVKVAVLDTGISTHPDLNIRGGASFVPGEPSTQDGNGHGTHVAGTIAALNNSIGVLGVAPSAELYAVKVLGASGGGAISSVAQGLEWAGNNGMHVANLSLGSPSPSATLEQAVNSATSRGVLVVAASGNSGADSISYPARYANAMAVGATDQNNNRADFSQYGAGLDIVAPGVNVQSTYPGSTYASLNGTSMATPHVAGAAVLVKQKYPSWSNVRIRDHLKNTATSLGSTNLYGSGLVNVFVATR

SEQ ID NO: 64085 - protein, 269 aa, Unidentified
AQSVPWGISRVQAPAAHNRGLAGGGVKVAVLDTGISTHPDLNIRGGASFVPGEPSTQDGNGHGTHVAGTIAALDNNIGVLGVAPSAELYAVKVLSASGNGAISSIAQGLEWAGNNGMHVANLSLGSPSPSATLEQAVNSATSRGVLVVAASGNSGADSISYPARYANAMAVGATDQNNNRADFSQYGAGLDIVAPGVNVQSTYPGSTYASLNGTSMATPHVAGAAVLVKQKNPSWSNVRIRDHLKNTATSLGSTNLYGSGLVNAFAATR

SEQ ID NO: 64086 - protein, 269 aa, Unidentified
AQSVPWGISRVQAPAAHNRGLAGRGVKVAVLDTGISTHPDLNIRGGASFVPGEPSTQDGNGHGTHVAGTIAALNNSIGVLGVAPSAELYAVKVLGASGGGAISSIAQGLEWAGNNGMHVANLSLGSESPSATLEQAVNSATSRGVLVVAASGNSGEESISYPARYANAMAVGATDQNNNRADFSQYGAGLDIVAPGVNVQSTYPGSTYASLNGTSMATPHVAGAAVLVKQKNPSWSNVRIRDHLKNTATSLGSTNLYGSGLVNAFVATR

SEQ ID NO: 64087 - protein, 269 aa, Unidentified
AQSVPWGISRVQAPAAHNRGLAGSGVKVAVLDTGISTHPDLNIRGGASFVPGEPSTQDGNGHGTHVAGTIAALNNSIGVLGVAPSAELYAVKVLSASGNGAISSIANGLEWAGNNGMHVANLSLGAPSPSATLEQAVNSATSRGVLVVAASGNSGADSISYPARYANAMAVGATDQNNNRADFSQYGAGLDIVAPGVNVQSTYPGSTYASQNGTSMATPHVAGAAVLVKQKNPSWSNVRIRDHLKNTATSLGSTNLYGSGLVNAFAATR

SEQ ID NO: 64088 - protein, 269 aa, Unidentified
AQSVPWGISRVQAPAAHNRGLAGGGVKVAVLDTGISTHPDLNIRGGASFVPGEPSTQDGNGHGTHVAGTIAALNNNIGVLGVAPSAELYAVKVLSASGNGAISSIAQGLEWAGNNGMHVANLSLGSPSPSATLEQAVNSATSRGVLVVAASGNSGADSISYPARYANAMAVGATDQNNNRADFSQYGAGLDIVAPGVNVQSTYPGSTYASQNGTSMATPHVAGAAVLVKQKNPSWSNVRIRDHLKNTATSLGSTNLYGSGLVNAFAATR

SEQ ID NO: 64089 - protein, 269 aa, Unidentified
AQSVPWGISRVQAPAAHNRGLAGSGVKVAVLDTGISTHPDLNIRGGASFVPGEPSTQDGNGHGTHVAGTIAALDNSIGVLGVAPSAELYAVKVLGASGGGAISSIAQGLEWAGNNGMHVANLSLGSESPSATLEQAVNSATSRGVLVVAASGNSGADSISYPARYANAMAVGATDQNNNRADFSQYGAGLDIVAPGVNVQSTYPGSTYASLNGTSMATPHVAGAAVLVKQKNPSWSNVRIRDHLKNTATSLGSTNLYGSGLVNVFVATR

SEQ ID NO: 64090 - protein, 269 aa, Unidentified
AQSVPWGISRVQAPAAHNRGLAGSGVKVAVLDTGISTHPDLNIRGGASFVPGEPSTQDGNGHGTHVAGTIAALDNSIGVLGVAPSAELYAVKVLGASGGGAISSIAQGLEWAGNNGMHVANLSLGSESPSATLEQAVNSATSRGVLVVAASGNSGEESISYPARYANAMAVGATDQNNNRADFSQYGAGLDIVAPGVNVQSTYPGSTYASLNGTSMATPHVAGAAVLVKQKNPSWSNVRIRDHLKNTATSLGSTNLYGSGLVNAFVATR

SEQ ID NO: 64091 - protein, 269 aa, Unidentified
AQSVPWGISRVQAPAAHNRGLAGSGVKVAVLDTGISTHPDLNIRGGASFVPGEPSTQDGNGHGTHVAGTIAALDNSIGVLGVAPSAELYAVKVLSASGQGAISSIAQGLEWAGNNGMHVANLSLGAPSPSATLEQAVNSATSRGVLVVAASGNSGADSISYPARYANAMAVGATDQNNNRADFSQYGAGLDIVAPGVNVQSTYPGSTYASQNGTSMATPHVAGAAVLVKQKNPSWSNVRIRDHLKNTATSLGSTNLYGSGLVNAFAATR

SEQ ID NO: 64092 - protein, 269 aa, Unidentified
AQSVPWGISRVQAPAAHNRGLAGSGVKVAVLDTGISTHPDLNIRGGASFVPGEPSTQDGNGHGTHVAGTIAALDNSIGVLGVAPSAELYAVKVLGASGGGAISSIAQGLEWAGNNGMHVANLSLGSPSPSATLEQAVNSATSRGVLVVAASGNSGADSISYPARYANAMAVGATDQNNNRADFSQYGAGLDIVAPGVNVQSTYPGSTYASLNGTSMATPHVAGAAVLVKQKYPSWSNVRIRDHLKNTATSLGSTNLYGSGLVNVFVATR

SEQ ID NO: 64093 - protein, 269 aa, Unidentified
AQSVPWGISRVQAPAAHNRGLAGSGVKVAVLDTGISTHPDLRIRGGASFVPGEPSTQDGNGHGTHVAGTIAALDNSIGVLGVAPSAELYAVKVLGASGGGAISSIAQGLEWAGNNGMHVANLSLGSESPSATLEQAVNSATSRGVLVVAASGNSGEGSISYPARYANAMAVGATDQNNNRADFSQYGAGLDIVAPGVNVQSTYPGSTYASLNGTSMATPHVAGAAVLVKQKNPSWSNVRIRDHLKNTATSLGSTNLYGSGLVNVFAATR

SEQ ID NO: 64094 - protein, 269 aa, Unidentified
AQSVPWGISRVQAPAAHNRGLTGRGVKVAVLDTGISTHPDLNIRGGASFVPGEPSTQDGNGHGTHVAGTIAALNNSIGVLGVAPSAELYAVKVLGASGGGAISSIAQGLEWAGNNGMHVANLSLGLQAPSATLEQAVNSATSRGVLVVAASGNSGEGSISYPARYANAMAVGATDQDNNRADFSQYGAGLDIVAPGVNVQSTYPGSTYASLNGTSMATPHVAGAAVLVKQKNPSWSNVRIRDRLKNTATSLGSTNLYGSGLVNAEAATR

SEQ ID NO: 64095 - protein, 269 aa, Unidentified
AQSVPWGIERVQAPAAHNRGLTGSGVKVAVLDTGISTHPDLRIRGGASFVPGEPSTQDGNGHGTHVAGTIAALDNSIGVLGVAPSAELYAVKVLGASGSGSVSSIAQGLEWAGNNGMHVANLSLGSDSPSATLEQAVNSATSRGVLVVAASGNSGAGSISYPARYANAMAVGATDQNNNRASFSQYGPGLDIVAPGVDILSTWPGGTYAVLNGTSMATPHVAGAAALVKQKNPSWSNVQIRNHLKNTATDLGSANEYGSGLVNAEAATR

SEQ ID NO: 64096 - protein, 269 aa, Unidentified
AQSVPWGISRVQAPAAHNRGLAGSGVKVAVLDTGISTHPDLNIRGGASFVPGEPSTQDGNGHGTHVAGTIAALDNNIGVLGVAPSAELYAVKVLAASGQGAISSIAQGLEWAGNNGMHVANLSLGAPSPSATLEQAVNSATSRGVLVVAASGNSGADSISYPARYANAMAVGATDQNNNRADFSQYGAGLDIVAPGVNVQSTYPGSTYASLNGTSMATPHVAGAAVLVKQKNPSWSNVRIRDHLKNTATSLGSTNLYGSGLVNAFAATR

SEQ ID NO: 64097 - protein, 269 aa, Unidentified
AQSVPWGISRVQAPAAHNRGLAGRGVKVAVLDTGISTHPDLNIRGGASFVPGEPSTQDGNGHGTHVAGTIAALDNSIGVLGVAPSAELYAVKVLGASGGGAISSIAQGLEWAGNNGMHVANLSLGSESPSATLEQAVNSATSRGVLVVAASGNSGADSISYPARYANAMAVGATDQNNNRADFSQYGAGLDIVAPGVNVQSTYPGSTYASLNGTSMATPHVAGAAVLVKQKNPSWSNVRIRDHLKNTATSLGSTNLYGSGLVNVFAATR

SEQ ID NO: 64098 - protein, 269 aa, Unidentified
AQSVPWGISRVQAPAAHNRGLAGSGVKVAVLDTGISTHPDLNIRGGASFVPGEPSTQDGNGHGTHVAGTIAALNNSIGVLGVAPSAELYAVKVLAASGNGAISSIAGGLEWAGNNGMHVANLSLGAPSPSATLEQAVNSATSRGVLVVAASGNSGADSISYPARYANAMAVGATDQNNNRADFSQYGAGLDIVAPGVNVQSTYPGSTYASQNGTSMATPHVAGAAVLVKQKNPSWSNVRIRDHLKNTATSLGSTNLYGSGLVNAFAATR

SEQ ID NO: 64099 - protein, 269 aa, Unidentified
AQSVPWGISRVQAPAAHNRGLAGSGVKVAVLDTGISTHPDLRIRGGASFVPGEPSTQDGNGHGTHVAGTIAALDNSIGVLGVAPSAELYAVKVLGASGGGSISSIAQGLEWAGNNGMHVANLSLGSPAPSATLEQAVNSATSRGVLVVAASGNSGEESISYPARYANAMAVGATDQNNNRADFSQYGAGLDIVAPGVNVQSTYPGSTYASLNGTSMATPHVAGAAVLVKQKNPSWSNVRIRDHLKNTATSLGSTNLYGSGLVNAFVATR

SEQ ID NO: 64100 - protein, 269 aa, Unidentified
AQSVPWGIERVQAPAAHNRGLTGSGVKVAVLDTGISTHPDLRIRGGASFVPGEPSTQDGNGHGTHVAGTIAALDNSIGVLGVAPSAELYAVKVLGASGSGSVSSIAQGLEWAGNNGMHVANLSLGSPSPSATLEQAVNSATSRGVLVVAASGNSGEPEISYPARYANAMAVGATDQNNNRASFSQYGPGLDIVAPGVDILSTWPGGTYAVLNGTSMATPHVAGAAALVKQKNPSWSNVQIRNHLKNTATSLGSTNEYGSGLVNAEAATR

SEQ ID NO: 64101 - protein, 269 aa, Unidentified
AQSVPWGISRVQAPAAHNRGLAGSGVKVAVLDTGISTHPDLNIRGGASFVPGEPSTQDGNGHGTHVAGTIAALDNNIGVLGVAPSAELYAVKVLAASGNGAISSIANGLEWAGNNGMHVANLSLGSPSPSATLEQAVNSATSRGVLVVAASGNSGADSISYPARYANAMAVGATDQNNNRADFSQYGAGLDIVAPGVNVQSTYPGSTYASLNGTSMATPHVAGAAVLVKQKNPSWSNVRIRDHLKNTATSLGSTNLYGSGLVNAFAATR

SEQ ID NO: 64102 - protein, 269 aa, Unidentified
AQSVPWGISRVQAPAAHNRGLAGGGVKVAVLDTGISTHPDLNIRGGASFVPGEPSTQDGNGHGTHVAGTIAALDNSIGVLGVAPSAELYAVKVLSASGQGAISSIANGLEWAGNNGMHVANLSLGSPSPSATLEQAVNSATSRGVLVVAASGNSGADSISYPARYANAMAVGATDQNNNRADFSQYGAGLDIVAPGVNVQSTYPGSTYASLNGTSMATPHVAGAAVLVKQKNPSWSNVRIRDHLKNTATSLGSTNLYGSGLVNAFAATR

SEQ ID NO: 64103 - protein, 269 aa, Unidentified
AQSVPWGISRVQAPAAHNRGLAGGGVKVAVLDTGISTHPDLNIRGGASFVPGEPSTQDGNGHGTHVAGTIAALDNNIGVLGVAPSAELYAVKVLGASGNGAISSIAQGLEWAGNNGMHVANLSLGAPSPSATLEQAVNSATSRGVLVVAASGNSGADSISYPARYANAMAVGATDQNNNRADFSQYGAGLDIVAPGVNVQSTYPGSTYASLNGTSMATPHVAGAAVLVKQKNPSWSNVRIRDHLKNTATSLGSTNLYGSGLVNAFAATR

SEQ ID NO: 64104 - protein, 269 aa, Unidentified
AQSVPWGISRVQAPAAHNRGLAGRGVKVAVLDTGISTHPDLNIRGGASFVPGEPSTQDGNGHGTHVAGTIAALDNSIGVLGVAPSAELYAVKVLGASGGGAISSIAQGLEWAGNNGMHVANLSLGSPSPSATLEQAVNSATSRGVLVVAASGNSGADSISYPARYANAMAVGATDQNNNRADFSQYGAGLDIVAPGVNVQSTYPGSTYASLNGTSMATPHVAGAAVLVKQKYPSWSNVRIRDHLKNTATSLGSTNLYGSGLVNAFVATR

SEQ ID NO: 64105 - protein, 269 aa, Unidentified
AQSVPWGISRVQAPAAHNRGLAGSGVKVAVLDTGISTHPDLNIRGGASFVPGEPSTQDGNGHGTHVAGTIAALNNSIGVLGVAPSAELYAVKVLAASGNGAISSIAQGLEWAGNNGMHVANVSLGAESPSATLEQAVNSATSRGVLVVAASGNSGADSISYPARYANAMAVGATDQNNNRADFSQYGAGLDIVAPGVNVQSTYPGSTYASLNGTSMATPHVAGAAVLVKQKNPSWSNVRIRDHLKNTATSLGSTNLYGSGLVNAFAATR

SEQ ID NO: 64106 - protein, 269 aa, Unidentified
AQSVPWGISRVQAPAAHNRGLAGSGVKVAVLDTGISTHPDLNIRGGASFVPGEPSTQDGNGHGTHVAGTIAALDNSIGVLGVAPSAELYAVKVLGASGGGAISSIAQGLEWAGNNGMHVANLSLGSESPSATLEQAVNSATSRGVLVVAASGNSGADSISYPARYANAMAVGATDQNNNRADFSQYGAGLDIVAPGVNVQSTYPGSTYASLNGTSMATPHVAGAAVLVKQKYPSWSNVRIRDHLKNTATSLGSTNLYGSGLVNVFAATR

SEQ ID NO: 64107 - protein, 269 aa, Unidentified
AQSVPWGISRVQAPAAHNRGLAGSGVKVAVLDTGISTHPDLNIRGGASFVPGEPSTQDGNGHGTHVAGTIAALDNNIGVLGVAPSAELYAVKVLSASGNGAISSIAQGLEWAGNNGMHVANLSLGAPSPSATLEQAVNSATSRGVLVVAASGNSGADSISYPARYANAMAVGATDQNNNRADFSQYGAGLDIVAPGVNVQSTYPGSTYASLNGTSMATPHVAGAAVLVKQKNPSWSNVRIRDHLKNTATSLGSTNLYGSGLVNAFAATR

SEQ ID NO: 64108 - protein, 269 aa, Unidentified
AQSVPWGISRVQAPAAHNRGLAGGGVKVAVLDTGISTHPDLNIRGGASFVPGEPSTQDGNGHGTHVAGTIAALNNSIGVLGVAPSAELYAVKVLGASGNGAISSIANGLEWAGNNGMHVANLSLGAPSPSATLEQAVNSATSRGVLVVAASGNSGADSISYPARYANAMAVGATDQNNNRADFSQYGAGLDIVAPGVNVQSTYPGSTYASQNGTSMATPHVAGAAVLVKQKNPSWSNVRIRDHLKNTATSLGSTNLYGSGLVNAFAATR

SEQ ID NO: 64109 - protein, 269 aa, Unidentified
AQSVPWGISRVQAPAAHNRGLAGSGVKVAVLDTGISTHPDLNIRGGASFVPGEPSTQDGNGHGTHVAGTIAALDNSIGVLGVAPSAELYAVKVLGASGQGAISSIAGGLEWAGNNGMHVANLSLGAPSPSATLEQAVNSATSRGVLVVAASGNSGADSISYPARYANAMAVGATDQNNNRADFSQYGAGLDIVAPGVNVQSTYPGSTYASQNGTSMATPHVAGAAVLVKQKNPSWSNVRIRDHLKNTATSLGSTNLYGSGLVNAFAATR

SEQ ID NO: 64110 - protein, 269 aa, Unidentified
AQSVPWGISRVQAPAAHNRGLAGSGVKVAVLDTGISTHPDLNIRGGASFVPGEPSTQDGNGHGTHVAGTIAALDNNIGVLGVAPSAELYAVKVLSASGQGAISSIAQGLEWAGNNGMHVANLSLGAPSPSATLEQAVNSATSRGVLVVAASGNSGADSISYPARYANAMAVGATDQNNNRADFSQYGAGLDIVAPGVNVQSTYPGSTYASLNGTSMATPHVAGAAVLVKQKNPSWSNVRIRDHLKNTATSLGSTNLYGSGLVNAFAATR

SEQ ID NO: 64111 - protein, 269 aa, Unidentified
AQSVPWGISRVQAPAAHNRGLAGRGVKVAVLDTGISTHPDLNIRGGASFVPGEPSTQDGNGHGTHVAGTIAALNNSIGVLGVAPSAELYAVKVLGASGGGAISSIAQGLEWAGNNGMHVANLSLGSESPSATLEQAVNSATSRGVLVVAASGNSGADSISYPARYANAMAVGATDQNNNRADFSQYGAGLDIVAPGVNVQSTYPGSTYASLNGTSMATPHVAGAAVLVKQKYPSWSNVRIRDHLKNTATSLGSTNLYGSGLVNVFAATR

SEQ ID NO: 64112 - protein, 269 aa, Unidentified
AQSVPWGISRVQAPAAHNRGLAGSGVKVAVLDTGISTHPDLNIRGGASFVPGEPSTQDGNGHGTHVAGTIAALNNSIGVLGVAPSAELYAVKVLGASGGGAISSIAQGLEWAGNNGMHVANVSLGASSPSATLEQAVNSATSRGVLVVAASGNSGADSISYPARYANAMAVGATDQNNNRADFSQYGAGLDIVAPGVNVQSTYPGSTYASQNGTSMATPHVAGAAVLVKQKNPSWSNVRIRDHLKNTATSLGSTNLYGSGLVNAFAATR

SEQ ID NO: 64113 - protein, 269 aa, Unidentified
AQSVPWGISRVQAPAAHNRGLAGGGVKVAVLDTGISTHPDLNIRGGASFVPGEPSTQDGNGHGTHVAGTIAALNNSIGVLGVAPSAELYAVKVLSASGQGAISSIAQGLEWAGNNGMHVANLSLGAPSPSATLEQAVNSATSRGVLVVAASGNSGADSISYPARYANAMAVGATDQNNNRADFSQYGAGLDIVAPGVNVQSTYPGSTYASQNGTSMATPHVAGAAVLVKQKNPSWSNVRIRDHLKNTATSLGSTNLYGSGLVNAFAATR

SEQ ID NO: 64114 - protein, 269 aa, Unidentified
AQSVPWGISRVQAPAAHNRGLTGRGVKVAVLDTGISTHPDLNIRGGASFVPGEPSTQDGNGHGTHVAGTIAALDNNIGVLGVAPDAELYAVKVLGASSVGSVSSIAQGLEWAGMNRMHVANMSLGLQAPSATLEQAVNSATSRGVLVVAASGNSGAGSISYPARYANAMAVGATDQNNNRASFSQYGDGLDIVAPGVNVLSTYPGSTYASLNGTSMATPHVAGAAALVKQKNPSWSNVQIRNHLKNTATSLGSTNLYGSGLVNAEAATR

SEQ ID NO: 64115 - protein, 269 aa, Unidentified
AQSVPWGISRVQAPAAHNRGLAGRGVKVAVLDTGISTHPDLNIRGGASFVPGEPSTQDGNGHGTHVAGTIAALDNSIGVLGVAPSAELYAVKVLGASGGGAISSIAQGLEWAGNNGMHVANLSLGSESPSATLEQAVNSATSRGVLVVAASGNSGEESISYPARYANAMAVGATDQNNNRADFSQYGAGLDIVAPGVNVQSTYPGSTYASLNGTSMATPHVAGAAVLVKQKNPSWSNVRIRDHLKNTATSLGSTNLYGSGLVNAFAATR

SEQ ID NO: 64116 - protein, 269 aa, Unidentified
AQSVPWGISRVQAPAAHNRGLAGSGVKVAVLDTGISTHPDLNIRGGASFVPGEPSTQDGNGHGTHVAGTIAALNNNIGVLGVAPSAELYAVKVLGASGNGAISSIAGGLEWAGNNGMHVANLSLGAPSPSATLEQAVNSATSRGVLVVAASGNSGADSISYPARYANAMAVGATDQNNNRADFSQYGAGLDIVAPGVNVQSTYPGSTYASQNGTSMATPHVAGAAVLVKQKNPSWSNVRIRDHLKNTATSLGSTNLYGSGLVNAFAATR

SEQ ID NO: 64117 - protein, 269 aa, Unidentified
AQSVPWGISRVQAPAAHNRGLAGGGVKVAVLDTGISTHPDLNIRGGASFVPGEPSTQDGNGHGTHVAGTIAALNNNIGVLGVAPSAELYAVKVLGASGNGAISSIAGGLEWAGNNGMHVANLSLGAPSPSATLEQAVNSATSRGVLVVAASGNSGADSISYPARYANAMAVGATDQNNNRADFSQYGAGLDIVAPGVNVQSTYPGSTYASLNGTSMATPHVAGAAVLVKQKNPSWSNVRIRDHLKNTATSLGSTNLYGSGLVNAFAATR

SEQ ID NO: 64118 - protein, 269 aa, Unidentified
AQSVPWGISRVQAPAAHNRGLAGSGVKVAVLDTGISTHPDLNIRGGASFVPGEPSTQDGNGHGTHVAGTIAALDNSIGVLGVAPSAELYAVKVLAASGQGAISSIANGLEWAGNNGMHVANLSLGSESPSATLEQAVNSATSRGVLVVAASGNSGADSISYPARYANAMAVGATDQNNNRADFSQYGAGLDIVAPGVNVQSTYPGSTYASLNGTSMATPHVAGAAVLVKQKNPSWSNVRIRDHLKNTATSLGSTNLYGSGLVNAFAATR

SEQ ID NO: 64119 - protein, 269 aa, Unidentified
AQSVPWGISRVQAPAAHNRGLAGSGVKVAVLDTGISTHPDLRIRGGASFVPGEPSTQDGNGHGTHVAGTIAALDNSIGVLGVAPSAELYAVKVLGASGGGAISSIAQGLEWAGNNGMHVANLSLGSESPSATLEQAVNSATSRGVLVVAASGNSGAESISYPARYANAMAVGATDQNNNRADFSQYGAGLDIVAPGVNVQSTYPGSTYASLNGTSMATPHVAGAAVLVKQKNPSWSNVRIRDHLKNTATSLGSTNLYGSGLVNAFVATR

SEQ ID NO: 64120 - protein, 269 aa, Unidentified
AQSVPWGISRVQAPAAHNRGLAGGGVKVAVLDTGISTHPDLNIRGGASFVPGEPSTQDGNGHGTHVAGTIAALNNSIGVLGVAPSAELYAVKVLAASGNGAISSIAGGLEWAGNNGMHVANLSLGSPSPSATLEQAVNSATSRGVLVVAASGNSGADSISYPARYANAMAVGATDQNNNRADFSQYGAGLDIVAPGVNVQSTYPGSTYASQNGTSMATPHVAGAAVLVKQKNPSWSNVRIRDHLKNTATSLGSTNLYGSGLVNAFAATR

SEQ ID NO: 64121 - protein, 269 aa, Unidentified
AQSVPWGISRVQAPAAHNRGLAGSGVKVAVLDTGISTHPDLNIRGGASFVPGEPSTQDGNGHGTHVAGTIAALDNSIGVLGVAPSAELYAVKVLGASGGGAISSVAQGLEWAGNNGMHVANLSLGSESPSATLEQAVNSATSRGVLVVAASGNSGADSISYPARYANAMAVGATDQNNNRADFSQYGAGLDIVAPGVNVQSTYPGSTYASLNGTSMATPHVAGAAVLVKQKYPSWSNVRIRDHLKNTATSLGSTNLYGSGLVNAFAATR

SEQ ID NO: 64122 - protein, 269 aa, Unidentified
AQSVPWGIERVQAPAAHNRGLTGSGVKVAVLDTGISTHPDLRIRGGHSFVPGEPSTQDGNGHGTHVAGTIAALDNSIGVLGVAPSAELYAVKVLGASGSGSVSSIAQGLEWAGNHGMHVANLSLGSPSPSATLEQAVNSATSRGVLVVAASGNSGEPEISYPARYANAMAVGATDQNNNRASFSQYGPGLDIVAPGVNVLSTWPGSTYASLNGTSMATPHVAGAAALVKQKHPSWSNVQIRNHLKNTATSLGDTNEYGSGLVNAEAATR

SEQ ID NO: 64123 - protein, 269 aa, Unidentified
AQSVPWGISRVQAPAAHNRGLAGGGVKVAVLDTGISTHPDLNIRGGASFVPGEPSTQDGNGHGTHVAGTIAALDNSIGVLGVAPSAELYAVKVLGASGGGAISSIAQGLEWAGNNGMHVANLSLGSESPSATLEQAVNSATSRGVLVVAASGNSGADSISYPARYANAMAVGATDQNNNRADFSQYGAGLDIVAPGVNVQSTYPGSTYASQNGTSMATPHVAGAAVLVKQKNPSWSNVRIRDHLKNTATSLGSTNLYGSGLVNAFAATR

SEQ ID NO: 64124 - protein, 269 aa, Unidentified
AQSVPWGISRVQAPAAHNRGLAGGGVKVAVLDTGISTHPDLNIRGGASFVPGEPSTQDGNGHGTHVAGTIAALDNSIGVLGVAPSAELYAVKVLAASGGGAISSIAQGLEWAGNNGMHVANLSLGAPSPSATLEQAVNSATSRGVLVVAASGNSGADSISYPARYANAMAVGATDQNNNRADFSQYGAGLDIVAPGVNVQSTYPGSTYASLNGTSMATPHVAGAAVLVKQKNPSWSNVRIRDHLKNTATSLGSTNLYGSGLVNAFAATR

SEQ ID NO: 64125 - protein, 269 aa, Unidentified
AQSVPWGISRVQAPAAHNRGLAGSGVKVAVLDTGISTHPDLNIRGGASFVPGEPSTQDGNGHGTHVAGTIAALNNSIGVLGVAPSAELYAVKVLGASGGGAISSIAQGLEWAGNNGMHVANLSLGSESPSATLEQAVNSATSRGVLVVAASGNSGADSISYPARYANAMAVGATDQNNNRADFSQYGAGLDIVAPGVNVQSTYPGSTYASLNGTSMATPHVAGAAVLVKQKYPSWSNVRIRDHLKNTATSLGSTNLYGSGLVNVFVATR

SEQ ID NO: 64126 - protein, 269 aa, Unidentified
AQSVPWGISRVQAPAAHNRGLAGSGVKVAVLDTGISTHPDLNIRGGASFVPGEPSTQDGNGHGTHVAGTIAALNNNIGVLGVAPSAELYAVKVLSASGNGAISSIAQGLEWAGNNGMHVANLSLGAPSPSATLEQAVNSATSRGVLVVAASGNSGADSISYPARYANAMAVGATDQNNNRADFSQYGAGLDIVAPGVNVQSTYPGSTYASQNGTSMATPHVAGAAVLVKQKNPSWSNVRIRDHLKNTATSLGSTNLYGSGLVNAFAATR

SEQ ID NO: 64127 - protein, 269 aa, Unidentified
AQVVPWGISRVQAPAAHNRGLTGSGVKVAVLDTGISTHPDLNIRGGASFVPGEPSTQDGNGHGTHVAGTIAALDNSIGVLGVAPSAELYAVKVLGASGSGSVSSIAQGLEWAGNNGMVVANLSLGSPSPSATLEQAVNSATSRGVLVVAASGNSGAGSISYPARYANAMAVGATDENNERAEFSQYGAGLDIVAPGVNILSTWPGSTYAVLNGTSMATPHVAGAAALVKQKNPSWSNVQIRNHLKNTATDLGDTWEYGSGLVNAEAATR

SEQ ID NO: 64128 - protein, 269 aa, Unidentified
AQSVPWGISRVQAPAAHNRGLAGSGVKVAVLDTGISTHPDLNIRGGASFVPGEPSTQDGNGHGTHVAGTIAALDNSIGVLGVAPSAELYAVKVLGASGGGAISSVAQGLEWAGNNGMHVANLSLGSPSPSATLEQAVNSATSRGVLVVAASGNSGADSISYPARYANAMAVGATDQNNNRADFSQYGAGLDIVAPGVNVQSTYPGSTYASLNGTSMATPHVAGAAVLVKQKYPSWSNVRIRDHLKNTATSLGSTNLYGSGLVNAFVATR

SEQ ID NO: 64129 - protein, 269 aa, Unidentified
AQSVPWGISRVQAPAAHNRGLTGRGVKVAVLDTGISTHPDLNIRGGASFVPGEPSTQDGNGHGTHVAGTIAALNNSIGVLGVAPSAELYAVKVLGASGGGAISSIAQGLEWAGNNGMHVANLSLGLQAPSATLEQAVNSATSRGVLVVAASGNSGEGSISYPARYANAMAVGATDQDNNRADFSQYGAGLDIVAPGVNVQSTYPGSTYASLNGTSMATPHVAGAAVLVKQKNPSWSNVRIRDHLKNTARSLGSTNLYGSGLVNAEAATR

SEQ ID NO: 64130 - protein, 269 aa, Unidentified
AQSVPWGISRVQAPAAHNRGLAGRGVKVAVLDTGISTHPDLRIRGGASFVPGEPSTQDGNGHGTHVAGTIAALDNSIGVLGVAPSAELYAVKVLGASGGGAISSIAQGLEWAGNNGMHVANLSLGSESPSATLEQAVNSATSRGVLVVAASGNSGEGSISYPARYANAMAVGATDQNNNRADFSQYGAGLDIVAPGVNVQSTYPGSTYASLNGTSMATPHVAGAAVLVKQKNPSWSNVRIRDHLKNTATSLGSTNLYGSGLVNAFAATR

SEQ ID NO: 64131 - protein, 269 aa, Unidentified
AQSVPWGISRVQAPAAHNRGLAGSGVKVAVLDTGISTHPDLNIRGGASFVPGEPSTQDGNGHGTHVAGTIAALNNSIGVLGVAPSAELYAVKVLAASGGGAISSIAQGLEWAGNNGMHVANVSLGAESPSATLEQAVNSATSRGVLVVAASGNSGADSISYPARYANAMAVGATDQNNNRADFSQYGAGLDIVAPGVNVQSTYPGSTYASLNGTSMATPHVAGAAVLVKQKNPSWSNVRIRDHLKNTATSLGSTNLYGSGLVNAFAATR

SEQ ID NO: 64132 - protein, 269 aa, Unidentified
AQSVPWGISRVQAPAAHRRGLTGRGVKVAVLDTGISTHPDLNIRGGASFVPGEPSTQDGNGHGTHVAGTIAALDNNIGVLGVAPRAELYAVKVLGANGSGSVSSIAQGLEWAGNNRMHVANLSLGLQAPSATLEQAVNSATSRGVLVVAASGNSGTGSISYPARYANAMAVGATDQNNNRASFSQYGAGLDIVAPGVNVLSTYPGSTYASLNGTSMATPHVAGAAALVKQKNPSWSNVQVRNRLKNTATSLGSTNLYGSGLVNAEAATR

SEQ ID NO: 64133 - protein, 269 aa, Unidentified
AQSVPWGISRVQAPAAHNRGLTGRGVKTAVLDTGISTHPDLNIRGGASFVPGEPSTQDGNGHGTHVAGTIAALDNNIGVLGVAPRAELYAVKVLGASGVGSVSSISQGLEWAGNNRMHVANLSLGLQAPSATLEQAVNSATSRGVLVVAASGNSGAGSISYPARYANAMAVGATDQNNNRASFSQYGAGLDIVAPGVNVLSTYPGSAYASKNGTSMATPHVAGAAALVKQKNPSWSNVQIRNHLKNTATSLGSTNLYGSGLVNAEAATR

SEQ ID NO: 64134 - protein, 269 aa, Unidentified
AQSVPWGISRVQAPAAHNRGLAGGGVKVAVLDTGISTHPDLNIRGGASFVPGEPSTQDGNGHGTHVAGTIAALDNSIGVLGVAPSAELYAVKVLAASGQGAISSIAQGLEWAGNNGMHVANLSLGAPSPSATLEQAVNSATSRGVLVVAASGNSGADSISYPARYANAMAVGATDQNNNRADFSQYGAGLDIVAPGVNVQSTYPGSTYASLNGTSMATPHVAGAAVLVKQKNPSWSNVRIRDHLKNTATSLGSTNLYGSGLVNAFAATR

SEQ ID NO: 64135 - protein, 269 aa, Unidentified
AQSVPWGISRVQAPAAHNRGLAGSGVKVAVLDTGISTHPDLNIRGGASFVPGEPSTQDGNGHGTHVAGTIAALDNSIGVLGVAPSAELYAVKVLAASGNGAISSIAQGLEWAGNNGMHVANLSLGAPSPSATLEQAVNSATSRGVLVVAASGNSGADSISYPARYANAMAVGATDQNNNRADFSQYGAGLDIVAPGVNVQSTYPGSTYASQNGTSMATPHVAGAAVLVKQKNPSWSNVRIRDHLKNTATSLGSTNLYGSGLVNAFAATR

SEQ ID NO: 64136 - protein, 269 aa, Unidentified
AQSVPWGISRVQAPAAHNRGLTGRGVRVAVLDTGISTHPDLNIRGGASFVPGEPSTQDGNGHGTHVAGTIAALNNSIGVLGVAPSAELYAVKVLGASGGGAISSIAQGLEWAGNNGMHVANLSLGLQAPSATLEQAVNSATSRGVLVVAASGNSGEGSISYPARYANAMAVGATDQNNNRASFSQDGAGLDIVAPGVNVQSTYPGSTYASLNGTSMATPHVAGAAVLVKQKNPSWSNVRIRDRLKNTATSLGSTNLYGSGLVNAEAATR

SEQ ID NO: 64137 - protein, 269 aa, Unidentified
AQSVPWGISRVQAPAAHNRGLAGRGVKVAVLDTGISTHPDLRIRGGASFVPGEPSTQDGNGHGTHVAGTIAALDNSIGVLGVAPSAELYAVKVLGASGGGAISSIAQGLEWAGNNGMHVANLSLGSPSPSATLEQAVNSATSRGVLVVAASGNSGEGSISYPARYANAMAVGATDQNNNRADFSQYGAGLDIVAPGVNVQSTYPGSTYASLNGTSMATPHVAGAAVLVKQKNPSWSNVRIRDHLKNTATSLGSTNLYGSGLVNAFVATR

SEQ ID NO: 64138 - protein, 269 aa, Unidentified
AQSVPWGISRVQAPAAHNRGLAGSGVKVAVLDTGISTHPDLNIRGGASFVPGEPSTQDGNGHGTHVAGTIAALNNNIGVLGVAPSAELYAVKVLAASGQGAISSIANGLEWAGNNGMHVANLSLGAPSPSATLEQAVNSATSRGVLVVAASGNSGADSISYPARYANAMAVGATDQNNNRADFSQYGAGLDIVAPGVNVQSTYPGSTYASLNGTSMATPHVAGAAVLVKQKNPSWSNVRIRDHLKNTATSLGSTNLYGSGLVNAFAATR

SEQ ID NO: 64139 - protein, 269 aa, Unidentified
AQSVPWGISRVQAPAAHNRGLAGGGVKVAVLDTGISTHPDLNIRGGASFVPGEPSTQDGNGHGTHVAGTIAALDNNIGVLGVAPSAELYAVKVLGASGNGAISSIAQGLEWAGNNGMHVANLSLGSPSPSATLEQAVNSATSRGVLVVAASGNSGADSISYPARYANAMAVGATDQNNNRADFSQYGAGLDIVAPGVNVQSTYPGSTYASQNGTSMATPHVAGAAVLVKQKNPSWSNVRIRDHLKNTATSLGSTNLYGSGLVNAFAATR

SEQ ID NO: 64140 - protein, 269 aa, Unidentified
AQSVPWGISRVQAPAAHNRGLAGSGVKVAVLDTGISTHPDLNIRGGASFVPGEPSTQDGNGHGTHVAGTIAALNNNIGVLGVAPSAELYAVKVLAAGGGGAISSIAQGLEWAGNNGMHVANLSLGAPSPSATLEQAVNSATSRGVLVVAASGNSGADSISYPARYANAMAVGATDQNNNRADFSQYGAGLDIVAPGVNVQSTYPGSTYASLNGTSMATPHVAGAAVLVKQKNPSWSNVRIRDHLKNTATSLGSTNLYGSGLVNAFAATR

SEQ ID NO: 64141 - protein, 269 aa, Unidentified
AQSVPWGISRVQAPAAHNRGLAGGGVKVAVLDTGISTHPDLNIRGGASFVPGEPSTQDGNGHGTHVAGTIAALNNSIGVLGVAPSAELYAVKVLAASGNGAISSIAQGLEWAGNNGMHVANLSLGAPSPSATLEQAVNSATSRGVLVVAASGNSGADSISYPARYANAMAVGATDQNNNRADFSQYGAGLDIVAPGVNVQSTYPGSTYASQNGTSMATPHVAGAAVLVKQKNPSWSNVRIRDHLKNTATSLGSTNLYGSGLVNAFAATR

SEQ ID NO: 64142 - protein, 269 aa, Unidentified
AQSVPWGISRVQAPAAHNRGLAGGGVFVAVLDTGISTHPDLNIRGGASFVPGEPSTQDGNGHGTHVAGTIAALNNNIGVLGVAPSAELYAVKVLAASGNGAISSIAQGLEWAGNNGMHVANLSLGAPSPSATLEQAVNSATSRGVLVVAASGNSGADSISYPARYANAMAVGATDQNNNRADFSQYGAGLDIVAPGVNVQSTYPGSTYASLNGTSMATPHVAGAAVLVKQKNPSWSNVRIRDHLKNTATSLGSTNLYGSGLVNAEAATR

SEQ ID NO: 64143 - protein, 269 aa, Unidentified
AQSVPWGISRVQAPAAHNRGLAGGGVKVAVLDTGISTHPDLNIRGGASFVPGEPSTQDGNGHGTHVAGTIAALDNSIGVLGVAPSAELYAVKVLAASGGGAISSIAQGLEWAGNNGMHVANLSLGSPSPSATLEQAVNSATSRGVLVVAASGNSGADSISYPARYANAMAVGATDQNNNRADFSQYGAGLDIVAPGVNVQSTYPGSTYASQNGTSMATPHVAGAAVLVKQKNPSWSNVRIRDHLKNTATSLGSTNLYGSGLVNAFAATR

SEQ ID NO: 64144 - protein, 269 aa, Unidentified
AQSVPWGISRVQAPAAHNRGLAGSGVKVAVLDTGISTHPDLNIRGGASFVPGEPSTQDGNGHGTHVAGTIAALDNSIGVLGVAPSAELYAVKVLGASGGGAISSIAQGLEWAGNNGMHVANLSLGSESPSATLEQAVNSATSRGVLVVAASGNSGADSISYPARYANAMAVGATDQNNNRADFSQYGAGLDIVAPGVNVQSTYPGSTYASLNGTSMATPHVAGAAVLVKQKYPSWSNVRIRDHLKNTATSLGSTNLYGSGLVNAFVATR

SEQ ID NO: 64145 - protein, 269 aa, Unidentified
AQSVPWGISRVQAPAAHNRGLAGGGVKVAVLDTGISTHPDLNIRGGASFVPGEPSTQDGNGHGTHVAGTIAALDNSIGVLGVAPSAELYAVKVLGASGQGAISSIANGLEWAGNNGMHVANLSLGAPSPSATLEQAVNSATSRGVLVVAASGNSGADSISYPARYANAMAVGATDQNNNRADFSQYGAGLDIVAPGVNVQSTYPGSTYASLNGTSMATPHVAGAAVLVKQKNPSWSNVRIRDHLKNTATSLGSTNLYGSGLVNAFAATR

SEQ ID NO: 64146 - protein, 269 aa, Unidentified
AQSVPWGISRVQAPAAHNRGLAGGGVKVAVLDTGISTHPDLNIRGGASFVPGEPSTQDGNGHGTHVAGTIAALNNNIGVLGVAPSAELYAVKVLSASGGGAISSIAQGLEWAGNNGMHVANLSLGSPSPSATLEQAVNSATSRGVLVVAASGNSGADSISYPARYANAMAVGATDQNNNRADFSQYGAGLDIVAPGVNVQSTYPGSTYASQNGTSMATPHVAGAAVLVKQKNPSWSNVRIRDHLKNTATSLGSTNLYGSGLVNAFAATR

SEQ ID NO: 64147 - protein, 269 aa, Unidentified
AQSVPWGISRVQAPAAHNRGLAGSGVKVAVLDTGISTHPDLRIRGGASFVPGEPSTQDGNGHGTHVAGTIAALNNSIGVLGVAPSAELYAVKVLGASGGGAISSIAQGLEWAGNNGMHVANLSLGSPSPSATLEQAVNSATSRGVLVVAASGNSGEESISYPARYANAMAVGATDQNNNRADFSQYGAGLDIVAPGVNVQSTYPGSTYVSLNGTSMATPHVAGAAVLVKQKNPSWSNVRIRDHLKNTATSLGSTNLYGSGLVNAFVATR

SEQ ID NO: 64148 - protein, 269 aa, Unidentified
AQSVPWGISRVQAPAAHNRGLAGSGVKVAVLDTGISTHPDLNIRGGASFVPGEPSTQDGNGHGTHVAGTIAALNNSIGVLGVAPSAELYAVKVLSASGNGAISSIAGGLEWAGNNGMHVANLSLGAPSPSATLEQAVNSATSRGVLVVAASGNSGADSISYPARYANAMAVGATDQNNNRADFSQYGAGLDIVAPGVNVQSTYPGSTYASQNGTSMATPHVAGAAVLVKQKNPSWSNVRIRDHLKNTATSLGSTNLYGSGLVNAFAATR

SEQ ID NO: 64149 - protein, 269 aa, Unidentified
AQSVPWGISRVQAPAAHNRGLAGGGVKVAVLDTGISTHPDLNIRGGASFVPGEPSTQDGNGHGTHVAGTIAALDNSIGVLGVAPSAELYAVKVLGASGGGAISSIANGLEWAGNNGMHVANLSLGAPSPSATLEQAVNSATSRGVLVVAASGNSGADSISYPARYANAMAVGATDQNNNRADFSQYGAGLDIVAPGVNVQSTYPGSTYASLNGTSMATPHVAGAAVLVKQKNPSWSNVRIRDHLKNTATSLGSTNLYGSGLVNAFAATR

SEQ ID NO: 64150 - protein, 269 aa, Unidentified
AQSVPWGISRVQAPAAHNRGLAGSGVKVAVLDTGISTHPDLNIRGGASFVPGEPSTDDGNGHGTHVAGTIAALNNSIGVLGVAPSAELYAVKVLAASGNGAISSIAQGLEWAGNNGMHVANLSIGAESPSATLEQAVNSATSRGVLVVAASGNSGAGSISYPARYANAMAVGATDQNNNRADFSQYGAGLDIVAPGVNVQSTYPGSTYASLNGTSMATPHVAGAAVLVKQKNPSWSNVRIRDHLKNTATSLGSTNLYGSGLVNAFAATR

SEQ ID NO: 64151 - protein, 269 aa, Unidentified
AQSVPWGISRVQAPAAHNRGLAGSGVKVAVLDTGISTHPDLNIRGGASFVPGEPSTQDGNGHGTHVAGTIAALDNNIGVLGVAPSAELYAVKVLAASGNGAISSIAQGLEWAGNNGMHVANLSLGAPSPSATLEQAVNSATSRGVLVVAASGNSGADSISYPARYANAMAVGATDQNNNRADFSQYGAGLDIVAPGVNVQSTYPGSTYASLNGTSMATPHVAGAAVLVKQKNPSWSNVRIRDHLKNTATSLGSTNLYGSGLVNAFAATR

SEQ ID NO: 64152 - protein, 269 aa, Unidentified
AQSVPWGISRVQAPAAHNRGLAGSGVKVAVLDTGISTHPDLNIRGGASFVPGEPSTQDGNGHGTHVAGTIAALNNSIGVLGVAPSAELYAVKVLAASGNGAISSIAQGLEWAGNNGMHVANVSLGAPSPSATLEQAVNSATSRGVLVVAASGNSGADSISYPARYANAMAVGATDQNNNRADFSQYGAGLDIVAPGVNVQSTYPGSTYASQNGTSMATPHVAGAAVLVKQKNPSWSNVRIRDHLKNTATSLGSTNLYGSGLVNAFAATR

SEQ ID NO: 64153 - protein, 269 aa, Unidentified
AQVVPWGISRVQAPAAHNRGLTGSGVKVAVLDTGISTHPDLNIRGGASFVPGEPSTQDGNGHGTHVAGTIAALDNGIGVLGVAPTAELYAVKVLGASGQGSVSSIAQGLEWAGNNAMHVANLSLGSPQPSATLEQAVNSATSRGVLVVAASGNSGAGSINYPARYANAMAVGATDQNNNRASFSQYGPGLDIVAPGVNVQSTYIGSTYASLSGTSMATPHVAGAAALVKQKNPSWSNVQIRDHLKNTATPLGSTILYGSGLVNAEAATR

SEQ ID NO: 64154 - protein, 269 aa, Unidentified
AQSVPWGISRVQAPAAHNRGLAGGGVKVAVLDTGISTHPDLNIRGGASFVPGEPSTQDGNGHGTHVAGTIAALNNNIGVLGVAPSAGLYAVKVLGASGQGAISSIAQGLEWAGNNGMHVANLSLGSPSPSATLEQAVNSATSRGVLVVAASGNSGADSISYPARYANAMAVGATDQNNNRADFSQYGAGLDIVAPGVNVQSTYPGSTYASQNGTSMATPHVAGAAVLVKQKNPSWSNVRIRDHLKNTATSLGSTNLYGSGLVNAFAATR

SEQ ID NO: 64155 - protein, 268 aa, Unidentified
AQSVPWGISRVQAPAAHNRGLAGGGVKVAVLDTGISTHPDLNIRGGASFVPGEPSTQDGNGHGTHVAGTIAALDNNIGVLGVAPSAELYAVKVLGASGGGASSIAQGLEWAGNNGMHVANLSLGAPSPSATLEQAVNSATSRGVLVVAASGNSGADSISYPARYANAMAVGATDQNNNRADFSQYGAGLDIVAPGVNVQSTYPGSTYASQNGTSMATPHVAGAAVLVKQKNPSWSNVRIRDHLKNTATSLGSTNLYGSGLVNAFAATR

SEQ ID NO: 64156 - protein, 268 aa, Unidentified
AQSVPWGISRVQAPAAHNRGLAGSGVKVAVLDTGISTHPDLNIRGGASFVPGEPSTQDGNGHGTHVAGTIAALNNSIGVLGVAPSAELYAVKVLAASGNGAISSIAQGLEWAGNNGMHVANLSIGSSSPSATLEQAVNSATSRGVLVAASGNSGADSISYPARYANAMAVGATDQNNNRADFSQYGAGLDIVAPGVNVQSTYPGSTYASQNGTSMATPHVAGAAVLVKQKNPSWSNVRIRDHLKNTATSLGSTNLYGSGLVNAFAATR

SEQ ID NO: 64157 - protein, 262 aa, Unidentified
VADIHAFDANGLYVHNSGVKVAVLDTGISTHPDLNIRGGASFVPGEPSTQDGNGHGTHVAGTIAALNNSIGVLGVAPSAELYAVKVLGASGSGSVSSIAQGLEWAGNNGMHVANLSLGSPSPSATLEQAVNSATSRGVLVVAASGNSGAGSISYPARYANAMAVGATDQNNNRASFSQYGAGLDIVAPGVNVQSTYPGSTYASLNGTSMATPHVAGAAALVKQKNPSWSNVQIRNHLKNTATSLGSTNLYGSGLVNAEAATR

SEQ ID NO: 64158 - protein, 381 aa, Unidentified
VRSKKLWISLLFALTLIFTMAFSNMSAQAAEEAKEKYLIGFNEQEAVSEFVEQVEANDEVAILSEEEEVEIELLHEFETIPVLSVELSPEDVDALELDPAISYIEEDAEVTTMAQSVPWGISRVQAPAAHNRGLTGSGVKVAVLDTGISTHPDLNIRGGASFVPGEPSTQDGNGHGTHVAGTIAALDNSIGVLGVAPRAELYAVKVLGASGSGSVSSIAQGLEWAGNNRMHVANLSLGLQAPSATLEQAVNSATSRGVLVVAASGNSGAGSISYPARYANAMAVGATDQNNNRADFSQYGAGLDIVAPGVNVQSTYPGSTYASLNGTSMATPHVAGAAALVKQKNPSWSNRQIRNHLKNTATSLGSTNLYGSGLVNAEAAT

SEQ ID NO: 64159 - protein, 224 aa, Unidentified
AQSVPWGISRVQAPAAHNRGLTGSGVKVAVLDTGISTHPDLNIRGGASFVPGEPSTQDGNGHGTHVAGTIAALNNSIGVLGVAPSAELYAVKVLGASGSGSVSSIAQGLEWAGNNGMHVANLSLGSPSPSATLEQAVNSATSRGVLVVAASGNSGAGSISYPARYANAMAVGATDQNNNRASFSQYGAGLDIVAPGVNVQSTYPGSIPGDEVVWAKVDGEAKLI

SEQ ID NO: 64160 - protein, 380 aa, Unidentified
VRSKKLWIVASTALLISVAFSSSIASAAEEAKEKYLIGFNEQEAVSEFVEQVEANDEVAILSEEEEVEIELLHEFETIPVLSVELSPEDVDALELDPAISYIEEDAEVTTMAQSVPWGISRVQAPAAHRRGLTGRGVKVAVLDTGISTHPDLNIRGGASFVPGEPSTQDGNGHGTHVAGTIAALDNSIGVLGVAPSAELYAVKVLGASGAGSVSSIAQGLEWAGNNGMHVANLSLGSPSPSATLEQAVNSATSRGVLVVAASGNSGAGSISYPARYANAMAVGATDQDNNRASFSQYGAGLDLVAPGVNVQSTYPQSTYASLNGTSMATPHVAGAAALVKQKNPSWSNVQIRNRLKNTATSLGSTNLYGSGLVNAEAATR

SEQ ID NO: 64161 - protein, 380 aa, Unidentified
VRSKKLWIVASTALLISVAFSSSIASAAEEAKEKYLIGFNEQEAVSEFVEQVEANDEVAILSEEEEVEIELLHEFETIPVLSVELSPEDVDALELDPAISYIEEDAEVTTMAQSVPWGISRVQAPAAHNRGLTGSGVKVAVLDTGISTHPDLNIRGGASFVPGEPSTQDGNGHGTHVAGTIAALNNSIGVLGVAPSAELYAVKVLGASGGGALSSIAQGLEWAGNNGMHVANLSLGSPSPSATLEQAVNSATSRGVLVVAASGNSGAGSISYPARYANAMAVGATDQNNNRASFSQYGAGLDIVAPGVNVQSTYPGSTYASLNGTSMATPHVAGAAVLVKHKNPSWSNVRIRDHLKKTATSLGSTNLYGSGLVNAEAATR

SEQ ID NO: 64162 - protein, 380 aa, Unidentified
VRSKKLWIVASTALLISVAFSSSIASAAEEAKEKYLIGFNEQEAVSEFVEQVEANDEVAILSEEEEVEIELLHEFETIPVLSVELSPEDVDALELDPAISYIEEDAEVTTMAQSVPWGISRVQAPAAHRRGLWGRGVKVAVLDTGISTHPDLNIRGGASFVPGEPSTQDGNGHGTHVAGTIAALDNSIGVLGVAPSAELYAVKVLGASGSGSVSSIAQGLEWAGNNGMHVANLSLGSPSPSATLEQAVNSATSRGVLVVAASGNSGAGSISYPARYANAMAVGATDQDNNRASFSQYGAGLDIVAPGVNVQSTYPQSAYASLNGTSMATPHVAGAAALVKQKNPSWSNVQIRNRLKNTATSLGSTNLYGSGLVNAEAATR

SEQ ID NO: 64163 - protein, 380 aa, Unidentified
VRSKKLWIVASTALLISVAFSSSIASAAEEAKEKYLIGFNEQEAVSEFVEQVEANDEVAILSEEEEVEIELLHEFETIPVLSVELSPEDVDALELDPAISYIEEDAEVTTMAQSVPWGISRVQAPAAHRRRLTGRGVKVAVLDTGISTHPDLNIRGGASFVPGEPSTQDGNGHGTHVAGTIAALDNSIGVLGVAPSAELYAVKVLGASGSGSVSSIAQGLEWAGANGMHVANLSLGSPSPSATLEQAVNSATSRGVLVVAASGNSGAGSISYPARYANAMAVGATDQDNNRASFSQYGAGLDLVAPGVNVQSTYPGSTYASLNGTSMATPHVAGAAALVKQKNPSWSNVQIRNRLKNTATSLGSTNLYGSGLVNAEAATR

SEQ ID NO: 64164 - protein, 380 aa, Unidentified
VRSKKLWIVASTALLISVAFSSSIASAAEEAKEKYLIGFNEQEAVSEFVEQVEANDEVAILSEEEEVEIELLHEFETIPVLSVELSPEDVDALELDPAISYIEEDAEVTTMAQSVPWGISRVQAPAAHRRRLTGRGVKVAVLDTGISTHPDLNIRGGASFVPGEPSTQDGNGHGTHVAGTIAALDNSIGVLGVAPSAELYAVKVLGASGSGSVSSIAQGLEWAGANGMHVANLSLGSPSPSATLEQAVNSATSRGVLVVAASGNSGAGSISYPARYANAMAVGATDQDNNRASFSQYGAGLDIVAPGVNVQSTYPGSTYFSLNGTSMATPHVAGAAALVKQKNPSWSNVQIRNRLKNTATSLGSTNLYGSGLVNAEAATR

SEQ ID NO: 64165 - protein, 380 aa, Unidentified
VRSKKLWIVASTALLISVAFSSSIASAAEEAKEKYLIGFNEQEAVSEFVEQVEANDEVAILSEEEEVEIELLHEFETIPVLSVELSPEDVDALELDPAISYIEEDAEVTTMAQSVPWGISRVQAPAAHRRGLTGRGVKVAVLDTGISTHPDLNIRGGASFVPGEPSTQDGNGHGTHVAGTIAALDNSIGVLGVAPSAELYAVKVLGASGSGSVSSIAQGLEWAGNNGMHVANLSLGSPSPSATLEQAVNSATSRGVLVVAASGNSGAGSISYPARYANAMAVGATDQDNNRASFSQYGAGLDLVAPGVNVQSTYPQSTYFSLNGTSMATPHVAGAAALVKQKNPSWSNVQIRNRLKNTATSLGSTNLYGSGLVNAEAATR

SEQ ID NO: 64166 - protein, 380 aa, Unidentified
VRSKKLWIVASTALLISVAFSSSIASAAEEAKEKYLIGFNEQEAVSEFVEQVEANDEVAILSEEEEVEIELLHEFETIPVLSVELSPEDVDALELDPAISYIEEDAEVTTMAQSVPWGISRVQAPAAHRRGLTGRGVKVAVLDTGISTHPDLNIRGGASFVPGEPSTQDGNGHGTHVAGTIAALDNSIGVLGVAPSAELYAVKVLGASGSGSVSSIAQGLEWAGANGMHVANLSLGSPSPSATLEQAVNSATSRGVLVVAASGNSGAGSISYPARYANAMAVGATDQNNNRASFSQYGAGLDLVAPGVNVQSTYPGSAYFSLNGTSMATPHVAGAAALVKQKNPSWSNVQIRNRLKNTATSLGSTNLYGSGLVNAEAATR

SEQ ID NO: 64167 - protein, 380 aa, Unidentified
VRSKKLWIVASTALLISVAFSSSIASAAEEAKEKYLIGFNEQEAVSEFVEQVEANDEVAILSEEEEVEIELLHEFETIPVLSVELSPEDVDALELDPAISYIEEDAEVTTMAQSVPWGISRVQAPAAHNRGLTGSGVKVAVLDTGISTHPDLNIRGGASFVPGEPSTQDGNGHGTHVAGTIAALNNSIGVLGVAPSAELYAVKVLGASGGGAISSIAQGLEWAGNNGMHVANLSLGSPSPSATLEQAVNSATSRGVLVVAASGNSGAESISYPARYANAMAVGATDQNNNRASFSQYGAGLDIVAPGVNVQSTYPGSTYASLNGTSMATPHVAGAAVLVKQKNPSWSNVRIRDRLKNTATSLGSTNLYGSGLVNAEAATR

SEQ ID NO: 64168 - protein, 380 aa, Unidentified
VRSKKLWIVASTALLISVAFSSSIASAAEEAKEKYLIGFNEQEAVSEFVEQVEANDEVAILSEEEEVEIELLHEFETIPVLSVELSPEDVDALELDPAISYIEEDAEVTTMAQSVPWGISRVQAPAAHNRGLTGSGVKVAVLDTGISTHPDLNIRGGASFVPGEPSTQDGNGHGTHVAGTIAALNNSIGVLGVAPSAELYAVKVLGASGGGALSSIAQGLEWAGNNGMHVANLSLGSPSPSATLEQAVNSATSRGVLVVAASGNSGADSISYPARYANAMAVGATDQNNNRASFSQYGAGLDIVAPGVNVQSTYPGSTYASLNGTSMATPHVAGAAALVKHKNPSWSNVRIRDHLKKTATSLGSTNLYGSGLVNAEAATR

SEQ ID NO: 64169 - protein, 380 aa, Unidentified
VRSKKLWIVASTALLISVAFSSSIASAAEEAKEKYLIGFNEQEAVSEFVEQVEANDEVAILSEEEEVEIELLHEFETIPVLSVELSPEDVDALELDPAISYIEEDAEVTTMAQSVPWGISRVQAPAAHNRGLTGSGVKVAVLDTGISTHPDLNIRGGASFVPGEPSTQDGNGHGTHVAGTIAALNNSIGVLGVAPSAELYAVKVLGASGGGAISSIAQGLEWAGNNGMHVANLSLGSESPSATLEQAVNSATSRGVLVVAASGNSGAGSISYPARYANAMAVGATDQNNNRADFSQYGAGLDIVAPGVNVQSTYPGSTYASLNGTSMATPHVAGAAVLVKQKNPSWSNVRIRDHLKNTATSLGSTNLYGSGLVNAEAATR

SEQ ID NO: 64170 - protein, 380 aa, Unidentified
VRSKKLWIVASTALLISVAFSSSIASAAEEAKEKYLIGFNEQEAVSEFVEQVEANDEVAILSEEEEVEIELLHEFETIPVLSVELSPEDVDALELDPAISYIEEDAEVTTMAQSVPWGISRVQAPAAHNRGLTGSGVKVAVLDTGISTHPDLNIRGGASFVPGEPSTQDGNGHGTHVAGTIAALNNSIGVLGVAPSAELYAVKVLGASGGGAISSIAQGLEWAGNNGMHVANLSLGSPSPSATLEQAVNSATSRGVLVVAASGNSGEGSISYPARYANAMAVGATDQNNNRASFSQYGAGLDIVAPGVNVQSTYPGSTYASLNGTSMATPHVAGAAVLVKQKNPSWSNVRIRDHLKNTATSLGSTNLYGSGLVNAFAATR

SEQ ID NO: 64171 - protein, 380 aa, Unidentified
VRSKKLWIVASTALLISVAFSSSIASAAEEAKEKYLIGFNEQEAVSEFVEQVEANDEVAILSEEEEVEIELLHEFETIPVLSVELSPEDVDALELDPAISYIEEDAEVTTMAQSVPWGISRVQAPAAHRRRLTGRGVKVAVLDTGISTHPDLNIRGGASFVPGEPSTQDGNGHGTHVAGTIAALDNSIGVLGVAPSAELYAVKVLGASGSGSVSSIAQGLEWAGNNGMHVANLSLGSPSPSATLEQAVNSATSRGVLVVAASGNSGAGSISYPARYANAMAVGATDQNNNRASFSQYGAGLDLVAPGVNVQSTYPGSAYFSLNGTSMATPHVAGAAALVKQKNPSWSNVQIRNRLKNTATSLGSTNLYGSGLVNAEAATR

SEQ ID NO: 64172 - protein, 380 aa, Unidentified
VRSKKLWIVASTALLISVAFSSSIASAAEEAKEKYLIGFNEQEAVSEFVEQVEANDEVAILSEEEEVEIELLHEFETIPVLSVELSPEDVDALELDPAISYIEEDAEVTTMAQSVPWGISRVQAPAAHRRGLTGRGVKVAVLDTGISTHPDLNIRGGASFVPGEPSTQDGNGHGTHVAGTIAALDNSIGVLGVAPSAELYAVKVLGASGSGSVSSIAQGLEWAGANGMHVANLSLGSPSPSATLEQAVNSATSRGVLVVAASGNSGAGSISYPARYANAMAVGATDQDNNRASFSQYGAGLDLVAPGVNVQSTYPGSAYASLNGTSMATPHVAGAAALVKQKNPSWSNVQIRNRLKNTATSLGSTNLYGSGLVNAEAATR

SEQ ID NO: 64173 - protein, 380 aa, Unidentified
VRSKKLWIVASTALLISVAFSSSIASAAEEAKEKYLIGFNEQEAVSEFVEQVEANDEVAILSEEEEVEIELLHEFETIPVLSVELSPEDVDALELDPAISYIEEDAEVTTMAQSVPWGISRVQAPAAHNRGLTGSGVKVAVLDTGISTHPDLRIRGGASFVPGEPSTQDGNGHGTHVAGTIAALDNRIGVLGVAPSAELYAVKVLGASGGGAISSIAQGLEWAGNNGMHVANLSLGSPSPSATLEQAVNSATSRGVLVVAASGNSGAGSISYPARYANAMAVGATDQNNNRASFSQYGAGLDIVAPGVNVQSTYPGSTYASLNGTSMATPHVAGAAVLVKQKNPSWSNVRIRNHLKNTATSLGSTNLYGSGLVNAEAATR

SEQ ID NO: 64174 - protein, 380 aa, Unidentified
VRSKKLWIVASTALLISVAFSSSIASAAEEAKEKYLIGFNEQEAVSEFVEQVEANDEVAILSEEEEVEIELLHEFETIPVLSVELSPEDVDALELDPAISYIEEDAEVTTMAQSVPWGISRVQAPAAHNRGLTGSGVKVAVLDTGISTHPDLNIRGGASFVPGEPSTQDGNGHGTHVAGTIAALNNSIGVLGVAPSAELYAVKVLGASGAGSISSIAQGLEWAGNNGMHVANLSLGSPSPSATLEQAVNSATSRGVLVVAASGNSGEGSISYPARYANAMAVGATDQNNNRADFSQYGAGLDIVAPGVNVQSTYPGSTYASLNGTSMATPHVAGAAVLVKQKNPSWSNVRIRDRLKNTATSLGSTNLYGSGLVNAEAATR

SEQ ID NO: 64175 - protein, 380 aa, Unidentified
VRSKKLWIVASTALLISVAFSSSIASAAEEAKEKYLIGFNEQEAVSEFVEQVEANDEVAILSEEEEVEIELLHEFETIPVLSVELSPEDVDALELDPAISYIEEDAEVTTMAQSVPWGISRVQAPAAHNRGLTGSGVKVAVLDTGISTHPDLNIRGGASFVPGEPSTQDGNGHGTHVAGTIAALNNSIGVLGVAPSAELYAVKVLGASGGGALSSIAQGLEWAGNNGMHVANLSLGSPSPSATLEQAVNSATSRGVLVVAASGNSGADSISYPARYANAMAVGATDQNNNRASFSQYGAGLDIVAPGVNVQSTYPGSTYASLNGTSMATPHVAGAAVLVKHKNPSWSNVRIRNHLKKTATSLGSTNLYGSGLVNAEAATR

SEQ ID NO: 64176 - protein, 380 aa, Unidentified
VRSKKLWIVASTALLISVAFSSSIASAAEEAKEKYLIGFNEQEAVSEFVEQVEANDEVAILSEEEEVEIELLHEFETIPVLSVELSPEDVDALELDPAISYIEEDAEVTTMAQSVPWGISRVQAPAAHRRGLTGSGVKVAVLDTGISTHPDLNITGGASFVPGEPSTQDGNGHGTHVAGTIAALNNRIGVLGVAPSAELYAVKVLGASGGGAISSIAQGLEWAGNNGMHVANLSLGSPSPSATLEQAVNSATSRGVLVVAASGNSGAGSISYPARYANAMAVGATDQNNNRASFSQYGAGLDIVAPGVNVQSTYPGSTYASLNGTSMATPHVAGAAVLVKQKNPSWSNVRIRNHLKNTATSLGSTNLYGSGLVNAEAATR

SEQ ID NO: 64177 - protein, 380 aa, Unidentified
VRSKKLWIVASTALLISVAFSSSIASAAEEAKEKYLIGFNEQEAVSEFVEQVEANDEVAILSEEEEVEIELLHEFETIPVLSVELSPEDVDALELDPAISYIEEDAEVTTMAQSVPWGISRVQAPAAHNRKLTGFGVKVAVLDTGISTHPDLWIRGGASFVPGEPSTQDGEGHGTHVAGTIAALNNSIGVLGVAPSAELYAVKVLGASGSGSVSSIAQGLEWAGLNRMHVANLSLGSPSPSATLEQAVNSATSRGVLVVAASGNSGAGSISYPARYANAMAVGATDQNNNRADFSQYGAGLDIVAPGVNVQSTYPGSTYASLNGTSMATPHVAGAAALVKQKNGSWSNVQIRNHLKNTATSLGSTNLYGSGLVNAEAATR

SEQ ID NO: 64178 - protein, 380 aa, Unidentified
VRSKKLWIVASTALLISVAFSSSIASAAEEAKEKYLIGFNEQEAVSEFVEQVEANDEVAILSEEEEVEIELLHEFETIPVLSVELSPEDVDALELDPAISYIEEDAEVTTMAQSVPWGISRVQAPAAHRRGLTGRGVKVAVLDTGISTHPDLNIRGGASFVPGEPSTQDGNGHGTHVAGTIAALDNSIGVLGVAPSAELYAVKVLGASGSGSVSSIAQGLEWAGNNGMHVANLSLGSPSPSATLEQAVNSATSRGVLVVAASGNSGAGSISYPARYANAMAVGATDQNNNRASFSQYGAGLDLVAPGVNVQSTYPQSAYFSLNGTSMATPHVAGAAALVKQKNPSWSNVQIRNRLKNTATSLGSTNLYGSGLVNAEAATR

SEQ ID NO: 64179 - protein, 380 aa, Unidentified
VRSKKLWIVASTALLISVAFSSSIASAAEEAKEKYLIGFNEQEAVSEFVEQVEANDEVAILSEEEEVEIELLHEFETIPVLSVELSPEDVDALELDPAISYIEEDAEVTTMAQSVPWGISRVQAPAAHRRRLTGSGVKVAVLDTGISTHPDLNITGGASFVPGEPSTQDGNGHGTHVAGTIAALNNSIGVLGVAPSAELYAVKVLGASGGGAISSIAQGLEWAGNNGMHVANLSLGSPSPSATLEQAVNSATSRGVLVVAASGNSGAGSISYPARYANAMAVGATDQNNNRASFSQYGAGLDIVAPGVNVQSTYPGSTYASLNGTSMATPHVAGAAVLVKQKNPSWSNVRIRNHLKNTATSLGSTNLYGSGLVNAEAATR

SEQ ID NO: 64180 - protein, 380 aa, Unidentified
VRSKKLWIVASTALLISVAFSSSIASAAEEAKEKYLIGFNEQEAVSEFVEQVEANDEVAILSEEEEVEIELLHEFETIPVLSVELSPEDVDALELDPAISYIEEDAEVTTMAQSVPWGISRVQAPAAHRRGLTGRGVKVASSIQVFSTHPDLNIRGGASFVPGEPSTQDGNGHGTHVAGTIAALNNSIGVLGVAPSAELYAVKVLGASGSGSVSSIAQGLEWAGNNGMHVANLSLGSPSPSATLEQAVNSATSRGVLVVAASGNSGAGSISYPARYANAMAVGATDQNNNRASFSQYGAGLDIVAPGVNVQSTYPGSTYASLNGTSMATPHVAGAAALVKQKNPSWSNVQIRNHLKNTATSLGSTNLYGSGLVNAEAATR

SEQ ID NO: 64181 - protein, 380 aa, Unidentified
VRSKKLWIVASTALLISVAFSSSIASAAEEAKEKYLIGFNEQEAVSEFVEQVEANDEVAILSEEEEVEIELLHEFETIPVLSVELSPEDVDALELDPAISYIEEDAEVTTMAQSVPWGISRVQAPAAHRRGLTGRGVKVAVLDTGISTHPDLNIRGGASFVPGEPSTQDGNGHGTHVAGTIAALDNSIGVLGVAPSAELYAVKVLGASGAGSVSSIAQGLEWAGANGMHVANLSLGSPSPSATLEQAVNSATSRGVLVVAASGNSGAGSISYPARYANAMAVGATDQNNNRASFSQYGAGLDIVAPGVNVQSTYPQSAYASLNGTSMATPHVAGAAALVKQKNPSWSNVQIRNRLKNTATSLGSTNLYGSGLVNAEAATR

SEQ ID NO: 64182 - protein, 380 aa, Unidentified
VRSKKLWIVASTALLISVAFSSSIASAAEEAKEKYLIGFNEQEAVSEFVEQVEANDEVAILSEEEEVEIELLHEFETIPVLSVELSPEDVDALELDPAISYIEEDAEVTTMAQSVPWGISRVQAPAAHRRGLTGRGVKVAVLDTGISTHPDLNIRGGASFVPGEPSTQDGNGHGTHVAGTIAALDNSIGVLGVAPSAELYAVKVLGASGAGSVSSIAQGLEWAGANGMHVANLSLGSPSPSATLEQAVNSATSRGVLVVAASGNSGAGSISYPARYANAMAVGATDQDNNRASFSQYGAGLDIVAPGVNVQSTYPQSTYASLNGTSMATPHVAGAAALVKQKNPSWSNVQIRNRLKNTATSLGSTNLYGSGLVNAEAATR

SEQ ID NO: 64183 - protein, 380 aa, Unidentified
VRSKKLWIVASTALLISVAFSSSIASAAEEAKEKYLIGFNEQEAVSEFVEQVEANDEVAILSEEEEVEIELLHEFETIPVLSVELSPEDVDALELDPAISYIEEDAEVTTMAQSVPWGISRVQAPAAHRRGLWGRGVKVAVLDTGISTHPDLNIRGGASFVPGEPSTQDGNGHGTHVAGTIAALDNSIGVLGVAPSAELYAVKVLGASGAGSVSSIAQGLEWAGNNGMHVANLSLGSPSPSATLEQAVNSATSRGVLVVAASGNSGAGSISYPARYANAMAVGATDQNNNRASFSQYGAGLDLVAPGVNVQSTYPQSTYASLNGTSMATPHVAGAAALVKQKNPSWSNVRIRNHLKNTATSLGSTNLYGSGLVNAEAATR

SEQ ID NO: 64184 - protein, 380 aa, Unidentified
VRSKKLWIVASTALLISVAFSSSIASAAEEAKEKYLIGFNEQEAVSEFVEQVEANDEVAILSEEEEVEIELLHEFETIPVLSVELSPEDVDALELDPAISYIEEDAEVTTMAQSVPWGISRVQAPAAHNRRLTGSGVKVAVLDTGISTHPDLNIRGGASFVPGEPSTQDGNGHGTHVAGTIAALNNSIGVLGVAPSAELYAVKVLGASGGGAISSIAQGLEWAGANGMHVANLSLGSPSPSATLEQAVNSATSRGVLVVAASGNSGAGSISYPARYANAMAVGATDQDNNRASFSQYGAGLDIVAPGVNVQSTYPGSTYASLNGTSMATPHVAGAAVLVKQKNPSWSNVRIRNHLKNTATSLGSTNLYGSGLVNAEAATR

SEQ ID NO: 64185 - protein, 380 aa, Unidentified
VRSKKLWIVASTALLISVAFSSSIASAAEEAKEKYLIGFNEQEAVSEFVEQVEANDEVAILSEEEEVEIELLHEFETIPVLSVELSPEDVDALELDPAISYIEEDAEVTTMAQSVPWGISRVQAPAAHRRGLTGSGVKVAVLDTGISTHPDLNIRGGASFVPGEPSTQDGNGHGTHVAGTIAALNNRIGVLGVAPSAELYAVKVLGASGGGAISSIAQGLEWAGNNGMHVANLSLGSPSPSATLEQAVNSATSRGVLVVAASGNSGAGSISYPARYANAMAVGATDQNNNRASFSQYGAGLDIVAPGVNVQSTYPGSTYASENGTSMATPHVAGAAVLVKQKNPSWSNVRIRNHLKNTATSLGSTNLYGSGLVNAEAATR

SEQ ID NO: 64186 - protein, 380 aa, Unidentified
VRSKKLWIVASTALLISVAFSSSIASAAEEAKEKYLIGFNEQEAVSEFVEQVEANDEVAILSEEEEVEIELLHEFETIPVLSVELSPEDVDALELDPAISYIEEDAEVTTMAQSVPWGISRVQAPAAHNRGLTGSGVKVAVLDTGISTHPDLNIRGGASFVPGEPSTQDGNGHGTHVAGTIAALDNRIGVLGVAPSAELYAVKVLGASGGGAISSIAQGLEWAGNNGMHVANLSLGSPSPSATLEQAVNSATSRGVLVVAASGNSGAGSISYPARYANAMAVGATDQNNNRASFSQYGAGLDIVAPGVNVQSTYPGSTYASLNGTSMATPHVAGAAVLVKQKNPSWSNVRIRNRLKNTATSLGSTNLYGSGLVNAEAATR

SEQ ID NO: 64187 - protein, 380 aa, Unidentified
VRSKKLWIVASTALLISVAFSSSIASAAEEAKEKYLIGFNEQEAVSEFVEQVEANDEVAILSEEEEVEIELLHEFETIPVLSVELSPEDVDALELDPAISYIEEDAEVTTMAQSVPWGISRVQAPAAHRRRLTGRGVKVAVLDTGISTHPDLNIRGGASFVPGEPSTQDGNGHGTHVAGTIAALDNSIGVLGVAPSAELYAVKVLGASGSGSVSSIAQGLEWAGNNGMHVANLSLGSPSPSATLEQAVNSATSRGVLVVAASGNSGAGSISYPARYANAMAVGATDQDNNRASFSQYGAGLDIVAPGVNVQSTYPQSTYFSLNGTSMATPHVAGAAALVKQKNPSWSNVQIRNRLKNTATSLGSTNLYGSGLVNAEAATR

SEQ ID NO: 64188 - protein, 380 aa, Unidentified
VRSKKLWIVASTALLISVAFSSSIASAAEEAKEKYLIGFNEQEAVSEFVEQVEANDEVAILSEEEEVEIELLHEFETIPVLSVELSPEDVDALELDPAISYIEEDAEVTTMAQSVPWGISRVQAPAAHNRGLTGRGVKVAVLDTGISTHPDLNIRGGASFVPGEPSTQDGNGHGTHVAGTIAALNNSIGVLGVAPSAELYAVKVLGASGGGAISSIAQGLEWAGNNGMHVANLSLGSPSPSATLEQAVNSATSRGVLVVAASGNSGADSISYPARYANAMAVGATDQNNNRASFSQYGAGLDIVAPGVNVQSTYPGSTYASLNGTSMATPHVAGAAVLVKQKNPSWSNVRIRDHLKNTATSLGSTNLYGSGLVNAEAATR

SEQ ID NO: 64189 - protein, 380 aa, Unidentified
VRSKKLWIVASTALLISVAFSSSIASAAEEAKEKYLIGFNEQEAVSEFVEQVEANDEVAILSEEEEVEIELLHEFETIPVLSVELSPEDVDALELDPAISYIEEDAEVTTMAQSVPWGISRVQAPAAHRRGLTGSGVKVAVLDTGISTHPDLNITGGASFVPGEPSTQDGNGHGTHVAGTIAALNNSIGVLGVAPSAELYAVKVLGASGGGAISSIAQGLEWAGNNGMHVANLSLGSPSPSATLEQAVNSATSRGVLVVAASGNSGAGSISYPARYANAMAVGATDQNNNRASFSQYGAGLDIVAPGVNVQSTYPGSTYASLNGTSMATPHVAGAAVLVKQKNPSWSNVRIRNRLKNTATSLGSTNLYGSGLVNAEAATR

SEQ ID NO: 64190 - protein, 380 aa, Unidentified
VRSKKLWIVASTALLISVAFSSSIASAAEEAKEKYLIGFNEQEAVSEFVEQVEANDEVAILSEEEEVEIELLHEFETIPVLSVELSPEDVDALELDPAISYIEEDAEVTTMAQSVPWGISRVQAPAAHNRRLTGSGVKVAVLDTGISTHPDLDIRGGASFVPGEPSTQDGNGHGTHVAGTIAALNNRIGVLGVAPSAELYAVKVLGASGGGAISSIAQGLEWAGNNGMHVANLSLGSPSPSATLEQAVNSATSRGVLVVAASGNSGAGSISYPARYANAMAVGATDQNNNRASFSQYGAGLDIVAPGVNVQSTYPGSTYASLNGTSMATPHVAGAAVLVKQKNPSWSNVRIRNHLKNTATSLGSTNLYGSGLVNAEAATR

SEQ ID NO: 64191 - protein, 380 aa, Unidentified
VRSKKLWIVASTALLISVAFSSSIASAAEEAKEKYLIGFNEQEAVSEFVEQVEANDEVAILSEEEEVEIELLHEFETIPVLSVELSPEDVDALELDPAISYIEEDAEVTTMAQSVPWGISRVQAPAAHNRGLTGSGVKVAVLDTGISTHPDLRITGGASFVPGEPSTQDGNGHGTHVAGTIAALDNSIGVLGVAPSAELYAVKVLGASGGGAISSIAQGLEWAGNNGMHVANLSLGSPSPSATLEQAVNSATSRGVLVVAASGNSGAGSISYPARYANAMAVGATDQNNNRASFSQYGAGLDIVAPGVNVQSTYPGSTYASLNGTSMATPHVAGAAVLVKQKNPSWSNVRIRNHLKNTATSLGSTNLYGSGLVNAEAATR

SEQ ID NO: 64192 - protein, 380 aa, Unidentified
VRSKKLWIVASTALLISVAFSSSIASAAEEAKEKYLIGFNEQEAVSEFVEQVEANDEVAILSEEEEVEIELLHEFETIPVLSVELSPEDVDALELDPAISYIEEDAEVTTMAQSVPWGISRVQAPAAHNRRLWGSGVKVAVLDTGISTHPDLNIRGGASFVPGEPSTQDGNGHGTHVAGTIAALNNSIGVLGVAPSAELYAVKVLGASGGGAISSIAQGLEWAGNNGMHVANLSLGSPSPSATLEQAVNSATSRGVLVVAASGNSGAGSISYPARYANAMAVGATDQNNNRASFSQYGAGLDIVAPGVNVQSTYPQSTYASLNGTSMATPHVAGAAVLVKQKNPSWSNVRIRNHLKNTATSLGSTNLYGSGLVNAEAATR

SEQ ID NO: 64193 - protein, 380 aa, Unidentified
VRSKKLWIVASTALLISVAFSSSIASAAEEAKEKYLIGFNEQEAVSEFVEQVEANDEVAILSEEEEVEIELLHEFETIPVLSVELSPEDVDALELDPAISYIEEDAEVTTMAQSVPWGISRVQAPAAHRRRLTGSGVKVAVLDTGISTHPDLDIRGGASFVPGEPSTQDGNGHGTHVAGTIAALNNSIGVLGVAPSAELYAVKVLGASGGGAISSIAQGLEWAGNNGMHVANLSLGSPSPSATLEQAVNSATSRGVLVVAASGNSGAGSISYPARYANAMAVGATDQNNNRASFSQYGAGLDIVAPGVNVQSTYPGSTYASLNGTSMATPHVAGAAVLVKQKNPSWSNVRIRNHLKNTATSLGSTNLYGSGLVNAEAATR

SEQ ID NO: 64194 - protein, 380 aa, Unidentified
VRSKKLWIVASTALLISVAFSSSIASAAEEAKEKYLIGFNEQEAVSEFVEQVEANDEVAILSEEEEVEIELLHEFETIPVLSVELSPEDVDALELDPAISYIEEDAEVTTMAQSVPWGISRVQAPAAHRRGLWGRGVKVAVLDTGISTHPDLNIRGGASFVPGEPSTQDGNGHGTHVAGTIAALDNSIGVLGVAPSAELYAVKVLGASGSGSVSSIAQGLEWAGANGMHVANLSLGSPSPSATLEQAVNSATSRGVLVVAASGNSGAGSISYPARYANAMAVGATDQNNNRASFSQYGAGLDIVAPGVNVQSTYPQSTYFSLNGTSMATPHVAGAAALVKQKNPSWSNVQIRNRLKNTATSLGSTNLYGSGLVNAEAATR

SEQ ID NO: 64195 - protein, 380 aa, Unidentified
VRSKKLWIVASTALLISVAFSSSIASAAEEAKEKYLIGFNEQEAVSEFVEQVEANDEVAILSEEEEVEIELLHEFETIPVLSVELSPEDVDALELDPAISYIEEDAEVTTMAQSVPWGISRVQAPAAHNRGLTGSGVKVAVLDTGISTHPDLNIRGGASFVPGEPSTQDGNGHGTHVAGTIAALNNSIGVLGVAPSAELYAVKVLGASGSGAISSIAQGLEWAGNNGMHVANLSLGSPSPSATLEQAVNSATSRGVLVVAASGNSGADSISYPARYANAMAVGATDQNNNRASFSQYGAGLDIVAPGVNVQSTYPGSTYASLNGTSMATPHVAGAAVLVKHKNPSWSNVRIRDHLKKTATSLGSTNLYGSGLVNAEAATR

SEQ ID NO: 64196 - protein, 380 aa, Unidentified
VRSKKLWIVASTALLISVAFSSSIASAAEEAKEKYLIGFNEQEAVSEFVEQVEANDEVAILSEEEEVEIELLHEFETIPVLSVELSPEDVDALELDPAISYIEEDAEVTTMAQSVPWGISRVQAPAAHRRRLTGRGVKVAVLDTGISTHPDLNIRGGASFVPGEPSTQDGNGHGTHVAGTIAALNNSIGVLGVAPSAELYAVKVLGASGGGAISSIAQGLEWAGNNGMHVANLSLGSPSPSATLEQAVNSATSRGVLVVAASGNSGAGSISYPARYANAMAVGATDQNNNRASFSQYGAGLDIVAPGVNVQSTYPGSTYASLNGTSMATPHVAGAAVLVKQKNPSWSNVRIRNHLKNTATSLGSTNLYGSGLVNAEAATR

SEQ ID NO: 64197 - protein, 380 aa, Unidentified
VRSKKLWIVASTALLISVAFSSSIASAAEEAKEKYLIGFNEQEAVSEFVEQVEANDEVAILSEEEEVEIELLHEFETIPVLSVELSPEDVDALELDPAISYIEEDAEVTTMAQSVPWGISRVQAPAAHRRGLTGSGVKVAVLDTGISTHPDLDIRGGASFVPGEPSTQDGNGHGTHVAGTIAALNNSIGVLGVAPSAELYAVKVLGASGGGAISSIAQGLEWAGNNGMHVANLSLGSPSPSATLEQAVNSATSRGVLVVAASGNSGAGSISYPARYANAMAVGATDQNNNRASFSQYGAGLDIVAPGVNVQSTYPGSTYASLNGTSMATPHVAGAAVLVKQKNPSWSNVRIRNRLKNTATSLGSTNLYGSGLVNAEAATR

SEQ ID NO: 64198 - protein, 380 aa, Unidentified
VRSKKLWIVASTALLISVAFSSSIASAAEEAKEKYLIGFNEQEAVSEFVEQVEANDEVAILSEEEEVEIELLHEFETIPVLSVELSPEDVDALELDPAISYIEEDAEVTTMAQSVPWGISRVQAPAAHRRRLTGRGVKVAVLDTGISTHPDLNIRGGASFVPGEPSTQDGNGHGTHVAGTIAALDNSIGVLGVAPSAELYAVKVLGASGSGSVSSIAQGLEWAGNNGMHVANLSLGSPSPSATLEQAVNSATSRGVLVVAASGNSGAGSISYPARYANAMAVGATDQDNNRASFSQYGAGLDLVAPGVNVQSTYPGSAYASLNGTSMATPHVAGAAALVKQKNPSWSNVQIRNRLKNTATSLGSTNLYGSGLVNAEAATR

SEQ ID NO: 64199 - protein, 380 aa, Unidentified
VRSKKLWIVASTALLISVAFSSSIASAAEEAKEKYLIGFNEQEAVSEFVEQVEANDEVAILSEEEEVEIELLHEFETIPVLSVELSPEDVDALELDPAISYIEEDAEVTTMAQSVPWGISRVQAPAAHRRGLTGRGVKVAVLDTGISTHPDLNIRGGASFVPGEPSTQDGNGHGTHVAGTIAALDNSIGVLGVAPSAELYAVKVLGASGAGSVSSIAQGLEWAGNNGMHVANLSLGSPSPSATLEQAVNSATSRGVLVVAASGNSGAGSISYPARYANAMAVGATDQDNNRASFSQYGAGLDIVAPGVNVQSTYPQSTYFSLNGTSMATPHVAGAAALVKQKNPSWSNVQIRNRLKNTATSLGSTNLYGSGLVNAEAATR

SEQ ID NO: 64200 - protein, 380 aa, Unidentified
VRSKKLWIVASTALLISVAFSSSIASAAEEAKEKYLIGFNEQEAVSEFVEQVEANDEVAILSEEEEVEIELLHEFETIPVLSVELSPEDVDALELDPAISYIEEDAEVTTMAQSVPWGISRVQAPAAHNRGLTGSGVKVAVLDTGISTHPDLRITGGASFVPGEPSTQDGNGHGTHVAGTIAALNNRIGVLGVAPSAELYAVKVLGASGGGAISSIAQGLEWAGNNGMHVANLSLGSPSPSATLEQAVNSATSRGVLVVAASGNSGAGSISYPARYANAMAVGATDQNNNRASFSQYGAGLDIVAPGVNVQSTYPGSTYASLNGTSMATPHVAGAAVLVKQKNPSWSNVRIRNHLKNTATSLGSTNLYGSGLVNAEAATR

SEQ ID NO: 64201 - protein, 380 aa, Unidentified
VRSKKLWIVASTALLISVAFSSSIASAAEEAKEKYLIGFNEQEAVSEFVEQVEANDEVAILSEEEEVEIELLHEFETIPVLSVELSPEDVDALELDPAISYIEEDAEVTTMAQSVPWGISRVQAPAAHNRRLTGRGVKVAVLDTGISTHPDLRIRGGASFVPGEPSTQDGNGHGTHVAGTIAALNNSIGVLGVAPSAELYAVKVLGASGGGAISSIAQGLEWAGNNGMHVANLSLGSPSPSATLEQAVNSATSRGVLVVAASGNSGAGSISYPARYANAMAVGATDQNNNRASFSQYGAGLDIVAPGVNVQSTYPGSTYASLNGTSMATPHVAGAAVLVKQKNPSWSNVRIRNHLKNTATSLGSTNLYGSGLVNAEAATR

SEQ ID NO: 64202 - protein, 380 aa, Unidentified
VRSKKLWIVASTALLISVAFSSSIASAAEEAKEKYLIGFNEQEAVSEFVEQVEANDEVAILSEEEEVEIELLHEFETIPVLSVELSPEDVDALELDPAISYIEEDAEVTTMAQSVPWGISRVQAPAAHNRRLTGSGVKVAVLDTGISTHPDLNIRGGASFVPGEPSTQDGNGHGTHVAGTIAALNNRIGVLGVAPSAELYAVKVLGASGGGAISSIAQGLEWAGNNGMHVANLSLGSPSPSATLEQAVNSATSRGVLVVAASGNSGAGSISYPARYANAMAVGAADQNNNRASFSQYGAGLDIVAPGVNVQSTYPGSTYASLNGTSMATPHVAGAAVLVKQKNPSWSNVRIRNHLKNTATSLGSTNLYGSGLVNAEAATR

SEQ ID NO: 64203 - protein, 380 aa, Unidentified
VRSKKLWIVASTALLISVAFSSSIASAAEEAKEKYLIGFNEQEAVSEFVEQVEANDEVAILSEEEEVEIELLHEFETIPVLSVELSPEDVDALELDPAISYIEEDAEVTTMAQSVPWGISRVQAPAAHRRGLWGRGVKVAVLDTGISTHPDLNIRGGASFVPGEPSTQDGNGHGTHVAGTIAALDNSIGVLGVAPSAELYAVKVLGASGAGSVSSIAQGLEWAGNNGMHVANLSLGSPSPSATLEQAVNSATSRGVLVVAASGNSGAGSISYPARYANAMAVGATDQDNNRASFSQYGAGLDIVAPGVNVQSTYPQSTYASLNGTSMATPHVAGAAALVKQKNPSWSNVQIRNRLKNTATSLGSTNLYGSGLVNAEAATR

SEQ ID NO: 64204 - protein, 380 aa, Unidentified
VRSKKLWIVASTALLISVAFSSSIASAAEEAKEKYLIGFNEQEAVSEFVEQVEANDEVAILSEEEEVEIELLHEFETIPVLSVELSPEDVDALELDPAISYIEEDAEVTTMAQSVPWGISRVQAPAAHRRRLTGRGVKVAVLDTGISTHPDLNIRGGASFVPGEPSTQDGNGHGTHVAGTIAALDNSIGVLGVAPSAELYAVKVLGASGSGSVSSIAQGLEWAGANGMHVANLSLGSPSPSATLEQAVNSATSRGVLVVAASGNSGAGSISYPARYANAMAVGATDQDNNRASFSQYGAGLDIVAPGVNVQSTYPGSAYASLNGTSMATPHVAGAAALVKQKNPSWSNVQIRNRLKNTATSLGSTNLYGSGLVNAEAATR

SEQ ID NO: 64205 - protein, 380 aa, Unidentified
VRSKKLWIVASTALLISVAFSSSIASAAEEAKEKYLIGFNEQEAVSEFVEQVEANDEVAILSEEEEVEIELLHEFETIPVLSVELSPEDVDALELDPAISYIEEDAEVTTMAQSVPWGISRVQAPAAHRRGLTGSGVKVAVLDTGISTHPDLDIRGGASFVPGEPSTQDGNGHGTHVAGTIAALNNRIGVLGVAPSAELYAVKVLGASGGGAISSIAQGLEWAGNNGMHVANLSLGSPSPSATLEQAVNSATSRGVLVVAASGNSGAGSISYPARYANAMAVGATDQNNNRASFSQYGAGLDIVAPGVNVQSTYPGSTYASLNGTSMATPHVAGAAVLVKQKNPSWSNVRIRNHLKNTATSLGSTNLYGSGLVNAEAATR

SEQ ID NO: 64206 - protein, 380 aa, Unidentified
VRSKKLWIVASTALLISVAFSSSIASAAEEAKEKYLIGFNEQEAVSEFVEQVEANDEVAILSEEEEVEIELLHEFETIPVLSVELSPEDVDALELDPAISYIEEDAEVTTMAQSVPWGISRVQAPAAHNRGLTGSGVKVAVLDTGISTHPDLNITGGASFVPGEPSTQDGNGHGTHVAGTIAALDNRIGVLGVAPSAELYAVKVLGASGGGAISSIAQGLEWAGNNGMHVANLSLGSPSPSATLEQAVNSATSRGVLVVAASGNSGAGSISYPARYANAMAVGATDQNNNRASFSQYGAGLDIVAPGVNVQSTYPGSTYASLNGTSMATPHVAGAAVLVKQKNPSWSNVRIRNHLKNTATSLGSTNLYGSGLVNAEAATR

SEQ ID NO: 64207 - protein, 380 aa, Unidentified
VRSKKLWIVASTALLISVAFSSSIASAAEEAKEKYLIGFNEQEAVSEFVEQVEANDEVAILSEEEEVEIELLHEFETIPVLSVELSPEDVDALELDPAISYIEEDAEVTTMAQSVPWGISRVQAPAAHRRGLWGRGVKVAVLDTGISTHPDLNIRGGASFVPGEPSTQDGNGHGTHVAGTIAALDNSIGVLGVAPSAELYAVKVLGASGAGSVSSIAQGLEWAGNNGMHVANLSLGSPSPSATLEQAVNSATSRGVLVVAASGNSGAGSISYPARYANAMAVGATDQNNNRASFSQYGAGLDIVAPGVNVQSTYPQSAYASLNGTSMATPHVAGAAALVKQKNPSWSNVQIRNRLKNTATSLGSTNLYGSGLVNAEAATR

SEQ ID NO: 64208 - protein, 380 aa, Unidentified
VRSKKLWIVASTALLISVAFSSSIASAAEEAKEKYLIGFNEQEAVSEFVEQVEANDEVAILSEEEEVEIELLHEFETIPVLSVELSPEDVDALELDPAISYIEEDAEVTTMAQSVPWGISRVQAPAAHNRGLTGSGVKVAVLDTGISTHPDLNIRGGASFVPGEPSTQDGNGHGTHVAGTIAALNNSIGVLGVAPSAELYAVKVLGASGGGAISSIAQGLEWAGNNGMHVANLSLGSPSPSATLEQAVNSATSRGVLVVAASGNSGADSISYPARYANAMAVGATDQNNNRASFSQYGAGLDIVAPGVNVQSTYPGSTYASLNGTSMATPHVAGAAVLVKQKNPSWSNVRIRDHLKNRATSLGSTNLYGSGLVNAEAATR

SEQ ID NO: 64209 - protein, 380 aa, Unidentified
VRSKKLWIVASTALLISVAFSSSIASAAEEAKEKYLIGFNEQEAVSEFVEQVEANDEVAILSEEEEVEIELLHEFETIPVLSVELSPEDVDALELDPAISYIEEDAEVTTMAQSVPWGISRVQAPAAHNRGLTGSGVKVAVLDTGISTHPDLNIRGGASFVPGEPSTQDGNGHGTHVAGTIAALNNSIGVLGVAPSAELYAVKVLGASGSGGISSIAQGLEWAGNNGMHVANLSLGSPSPSATLEQAVNSATSRGVLVVAASGNSGEGSISYPARYANAMAVGATDQNNNRADFSQYGAGLDIVAPGVNVQSTYPGSTYASLNGTSMATPHVAGAAVLVKQKNPSWSNVRIRDRLKNTATSLGSTNLYGSGLVNAEAATR

SEQ ID NO: 64210 - protein, 380 aa, Unidentified
VRSKKLWIVASTALLISVAFSSSIASAAEEAKEKYLIGFNEQEAVSEFVEQVEANDEVAILSEEEEVEIELLHEFETIPVLSVELSPEDVDALELDPAISYIEEDAEVTTMAQSVPWGISRVQAPAAHRRGLTGRGVKVAVLDTGISTHPDLNIRGGASFVPGEPSTQDGNGHGTHVAGTIAALDNSIGVLGVAPSAELYAVKVLGASGSGSVSSIAQGLEWAGANGMHVANLSLGSPSPSATLEQAVNSATSRGVLVVAASGNSGAGSISYPARYANAMAVGATDQDNNRASFSQYGAGLDIVAPGVNVQSTYPGSAYFSLNGTSMATPHVAGAAALVKQKNPSWSNVQIRNRLKNTATSLGSTNLYGSGLVNAEAATR

SEQ ID NO: 64211 - protein, 380 aa, Unidentified
VRSKKLWIVASTALLISVAFSSSIASAAEEAKEKYLIGFNEQEAVSEFVEQVEANDEVAILSEEEEVEIELLHEFETIPVLSVELSPEDVDALELDPAISYIEEDAEVTTMAQSVPWGISRVQAPAAHNRGLTGRGVKVAVLDTGISTHPDLRIRGGASFVPGEPSTQDGNGHGTHVAGTIAALDNSIGVLGVAPSAELYAVKVLGASGGGAISSIAQGLEWAGNNGMHVANLSLGSPSPSATLEQAVNSATSRGVLVVAASGNSGAGSISYPARYANAMAVGATDQNNNRASFSQYGAGLDIVAPGVNVQSTYPGSTYASLNGTSMATPHVAGAAVLVKQKNPSWSNVRIRNHLKNTATSLGSTNLYGSGLVNAEAATR

SEQ ID NO: 64212 - protein, 380 aa, Unidentified
VRSKKLWIVASTALLISVAFSSSIASAAEEAKEKYLIGFNEQEAVSEFVEQVEANDEVAILSEEEEVEIELLHEFETIPVLSVELSPEDVDALELDPAISYIEEDAEVTTMAQSVPWGISRVQAPAAHRRGLTGRGVKVAVLDTGISTHPDLNIRGGASFVPGEPSTQDGNGHGTHVAGTIAALDNSIGVLGVAPSAELYAVKVLGASGAGSVSSIAQGLEWAGNNGMHVANLSLGSPSPSATLEQAVNSATSRGVLVVAASGNSGAGSISYPARYANAMAVGATDQNNNRASFSQYGAGLDLVAPGVNVQSTYPQSAYASLNGTSMATPHVAGAAALVKQKNPSWSNVQIRNRLKNTATSLGSTNLYGSGLVNAEAATR

SEQ ID NO: 64213 - protein, 380 aa, Unidentified
VRSKKLWIVASTALLISVAFSSSIASAAEEAKEKYLIGFNEQEAVSEFVEQVEANDEVAILSEEEEVEIELLHEFETIPVLSVELSPEDVDALELDPAISYIEEDAEVTTMAQSVPWGISRVQAPAAHRRGLWGRGVKVAVLDTGISTHPDLNIRGGASFVPGEPSTQDGNGHGTHVAGTIAALDNSIGVLGVAPSAELYAVKVLGASGSGSVSSIAQGLEWAGNNGMHVANLSLGSPSPSATLEQAVNSATSRGVLVVAASGNSGAGSISYPARYANAMAVGATDQDNNRASFSQYGAGLDIVAPGVNVQSTYPGSAYFSLNGTSMATPHVAGAAALVKQKNPSWSNVQIRNRLKNTATSLGSTNLYGSGLVNAEAATR

SEQ ID NO: 64214 - protein, 380 aa, Unidentified
VRSKKLWIVASTALLISVAFSSSIASAAEEAKEKYLIGFNEQEAVSEFVEQVEANDEVAILSEEEEVEIELLHEFETIPVLSVELSPEDVDALELDPAISYIEEDAEVTTMAQSVPWGISRVQAPAAHNRGLTGSGVKVAVLDTGISTHPDLNIRGGASFVPGEPSTQDGNGHGTHVAGTIAALNNSIGVLGVAPSAELYAVKVLGASGGGAISSIAQGLEWAGNNGMHVANLSLGSPSPSATLEQAVNSATSRGVLVVAASGNSGEGSISYPARYANAMAVGATDQNNNRASFSQYGAGLDIVAPGVNVQSTYPGSTYASLNGTSMATPHVAGAAVLVKQKRPSWSNVRIRDHLKNTATSLGSTNLYGSGLVNAEAATR

SEQ ID NO: 64215 - protein, 380 aa, Unidentified
VRSKKLWIVASTALLISVAFSSSIASAAEEAKEKYLIGFNEQEAVSEFVEQVEANDEVAILSEEEEVEIELLHEFETIPVLSVELSPEDVDALELDPAISYIEEDAEVTTMAQSVPWGISRVQAPAAHRRGLTGRGVKVAVLDTGISTHPDLNIRGGASFVPGEPSTQDGNGHGTHVAGTIAALDNSIGVLGVAPSAELYAVKVLGASGSGSVSSIAQGLEWAGANGMHVANLSLGSPSPSATLEQAVNSATSRGVLVVAASGNSGAGSISYPARYANAMAVGATDQDNNRASFSQYGAGLDIVAPGVNVQSTYPQSTYFSLNGTSMATPHVAGAAALVKQKNPSWSNVQIRNRLKNTATSLGSTNLYGSGLVNAEAATR

SEQ ID NO: 64216 - protein, 380 aa, Unidentified
VRSKKLWIVASTALLISVAFSSSIASAAEEAKEKYLIGFNEQEAVSEFVEQVEANDEVAILSEEEEVEIELLHEFETIPVLSVELSPEDVDALELDPAISYIEEDAEVTTMAQSVPWGISRVQAPAAHNRGLTGSGVKVAVLDTGISTHPDLNIRGGASFVPGEPSTQDGNGHGTHVAGTIAALNNSIGVLGVAPSAELYAVKVLGASGGGAISSIAQGLEWAGNNGMHVANLSLGSPSPSATLEQAVNSATSRGVLVVAASGNSGAGSISYPARYANAMAVGATDQNNNRADFSQYGAGLDIVAPGVNVQSTYPGSTYASLNGTSMATPHVAGAAVLVKQKNPSWSNVRIRDRLKNTATSLGSTNLYGSGLVNAEAATR

SEQ ID NO: 64217 - protein, 380 aa, Unidentified
VRSKKLWIVASTALLISVAFSSSIASAAEEAKEKYLIGFNEQEAVSEFVEQVEANDEVAILSEEEEVEIELLHEFETIPVLSVELSPEDVDALELDPAISYIEEDAEVTTMAQSVPWGISRVQAPAAHRRGLTGRGVKVAVLDTGISTHPDLNIRGGASFVPGEPSTQDGNGHGTHVAGTIAALDNSIGVLGVAPSAELYAVKVLGASGSGSVSSIAQGLEWAGANGMHVANLSLGSPSPSATLEQAVNSATSRGVLVVAASGNSGAGSISYPARYANAMAVGATDQDNNRASFSQYGAGLDLVAPGVNVQSTYPQSTYASLNGTSMATPHVAGAAALVKQKNPSWSNVQIRNRLKNTATSLGSTNLYGSGLVNAEAATR

SEQ ID NO: 64218 - protein, 380 aa, Unidentified
VRSKKLWIVASTALLISVAFSSSIASAAEEAKEKYLIGFNEQEAVSEFVEQVEANDEVAILSEEEEVEIELLHEFETIPVLSVELSPEDVDALELDPAISYIEEDAEVTTMAQSVPWGISRVQAPAAHRRGLTGSGVKVAVLDTGISTHPDLRIRGGASFVPGEPSTQDGNGHGTHVAGTIAALNNRIGVLGVAPSAELYAVKVLGASGGGAISSIAQGLEWAGNNGMHVANLSLGSPSPSATLEQAVNSATSRGVLVVAASGNSGAGSISYPARYANAMAVGATDQNNNRASFSQYGAGLDIVAPGVNVQSTYPGSTYASLNGTSMATPHVAGAAVLVKQKNPSWSNVRIRNHLKNTATSLGSTNLYGSGLVNAEAATR

SEQ ID NO: 64219 - protein, 380 aa, Unidentified
VRSKKLWIVASTALLISVAFSSSIASAAEEAKEKYLIGFNEQEAVSEFVEQVEANDEVAILSEEEEVEIELLHEFETIPVLSVELSPEDVDALELDPAISYIEEDAEVTTMAQSVPWGISRVQAPAAHNRGLTGSGVKVAVLDTGISTHPDLDIRGGASFVPGEPSTQDGNGHGTHVAGTIAALDNRIGVLGVAPSAELYAVKVLGASGGGAISSIAQGLEWAGNNGMHVANLSLGSPSPSATLEQAVNSATSRGVLVVAASGNSGAGSISYPARYANAMAVGATDQNNNRASFSQYGAGLDIVAPGVNVQSTYPGSTYASLNGTSMATPHVAGAAVLVKQKNPSWSNVRIRNHLKNTATSLGSTNLYGSGLVNAEAATR

SEQ ID NO: 64220 - protein, 380 aa, Unidentified
VRSKKLWIVASTALLISVAFSSSIASAAEEAKEKYLIGFNEQEAVSEFVEQVEANDEVAILSEEEEVEIELLHEFETIPVLSVELSPEDVDALELDPAISYIEEDAEVTTMAQSVPWGISRVQAPAAHNRGLTGSGVKVAVLDTGISTHPDLRIRGGASFVPGEPSTQDGNGHGTHVAGTIAALNNRIGVLGVAPSAELYAVKVLGASGGGAISSIAQGLEWAGNNGMHVANLSLGSPSPSATLEQAVNSATSRGVLVVAASGNSGAGSISYPARYANAMAVGATDQNNNRASFSQYGAGLDIVAPGVNVQSTYPGSTYASLNGTSMATPHVAGAAVLVKQKNPSWSNVRIRNHLKNTATSLGSTNLYGSGLVRAEAATR

SEQ ID NO: 64221 - protein, 380 aa, Unidentified
VRSKKLWIVASTALLISVAFSSSIASAAEEAKEKYLIGFNEQEAVSEFVEQVEANDEVAILSEEEEVEIELLHEFETIPVLSVELSPEDVDALELDPAISYIEEDAEVTTMAQSVPWGISRVQAPAAHRRGLTGRGVKVAVLDTGISTHPDLNIRGGASFVPGEPSTQDGNGHGTHVAGTIAALDNSIGVLGVAPSAELYAVKVLGASGAGSVSSIAQGLEWAGANGMHVANLSLGSPSPSATLEQAVNSATSRGVLVVAASGNSGAGSISYPARYANAMAVGATDQNNNRASFSQYGAGLDIVAPGVNVQSTYPQSTYFSLNGTSMATPHVAGAAALVKQKNPSWSNVQIRNRLKNTATSLGSTNLYGSGLVNAEAATR

SEQ ID NO: 64222 - protein, 380 aa, Unidentified
VRSKKLWIVASTALLISVAFSSSIASAAEEAKEKYLIGFNEQEAVSEFVEQVEANDEVAILSEEEEVEIELLHEFETIPVLSVELSPEDVDALELDPAISYIEEDAEVTTMAQSVPWGISRVQAPAAHNRGLTGSGVKVAVLDTGISTHPDLDITGGASFVPGEPSTQDGNGHGTHVAGTIAALNNRIGVLGVAPSAELYAVKVLGASGGGAISSIAQGLEWAGNNGMHVANLSLGSPSPSATLEQAVNSATSRGVLVVAASGNSGAGSISYPARYANAMAVGATDQNNNRASFSQYGAGLDIVAPGVNVQSTYPGSTYASLNGTSMATPHVAGAAVLVKQKNPSWSNVRIRNHLKNTATSLGSTNLYGSGLVNAEAATR

SEQ ID NO: 64223 - protein, 380 aa, Unidentified
VRSKKLWIVASTALLISVAFSSSIASAAEEAKEKYLIGFNEQEAVSEFVEQVEANDEVAILSEEEEVEIELLHEFETIPVLSVELSPEDVDALELDPAISYIEEDAEVTTMAQSVPWGISRVQAPAAHNRGLTGSGVKVAVLDTGISTHPDLNIRGGASFVPGEPSTQDGNGHGTHVAGTIAALNNSIGVLGVAPSAELYAVKVLGASGGGAISSIAQGLEWAGNNGMHVANLSLGSPSPSATLEQAVNSATSRGVLVVAASGNSGAESISYPARYANAMAVGATDQNNNRASFSQYGAGLDIVAPGVNVQSTYPGSTYASLNGTSMATPHVAGAAVLVKQKNPSWSNVRIRDHLKNTATSLGSTNLYGSGLVNAFAATR

SEQ ID NO: 64224 - protein, 380 aa, Unidentified
VRSKKLWIVASTALLISVAFSSSIASAAEEAKEKYLIGFNEQEAVSEFVEQVEANDEVAILSEEEEVEIELLHEFETIPVLSVELSPEDVDALELDPAISYIEEDAEVTTMAQSVPWGISRVQAPAAHRRGLTGRGVKVAVLDTGISTHPDLNIRGGASFVPGEPSTQDGNGHGTHVAGTIAALDNSIGVLGVAPSAELYAVKVLGASGSGSVSSIAQGLEWAGNNGMHVANLSLGSPSPSATLEQAVNSATSRGVLVVAASGNSGAGSISYPARYANAMAVGATDQDNNRASFSQYGAGLDIVAPGVNVQSTYPQSAYFSLNGTSMATPHVAGAAALVKQKNPSWSNVQIRNRLKNTATSLGSTNLYGSGLVNAEAATR

SEQ ID NO: 64225 - protein, 380 aa, Unidentified
VRSKKLWIVASTALLISVAFSSSIASAAEEAKEKYLIGFNEQEAVSEFVEQVEANDEVAILSEEEEVEIELLHEFETIPVLSVELSPEDVDALELDPAISYIEEDAEVTTMAQSVPWGISRVQAPAAHNRGLTGSGVKVAVLDTGISTHPDLNIRGGASFVPGEPSTQDGNGHGTHVAGTIAALNNSIGVLGVAPSAELYAVKVLGASGGGSISSIAQGLEWAGNNGMHVANLSLGSPSPSATLEQAVNSATSRGVLVVAASGNSGEGSISYPARYANAMAVGATDQNNNRADFSQYGAGLDIVAPGVNVQSTYPGSTYASLNGTSMATPHVAGAAVLVKQKNPSWSNVRIRDRLKNTATSLGSTNLYGSGLVNAEAATR

SEQ ID NO: 64226 - protein, 380 aa, Unidentified
VRSKKLWIVASTALLISVAFSSSIASAAEEAKEKYLIGFNEQEAVSEFVEQVEANDEVAILSEEEEVEIELLHEFETIPVLSVELSPEDVDALELDPAISYIEEDAEVTTMAQSVPWGISRVQAPAAHNRGLTGSGVKVAVLDTGISTHPDLNIRGGASFVPGEPSTQDGNGHGTHVAGTIAALNNSIGVLGVAPSAELYAVKVLGASGGGAISSIAQGLEWAGNNGMHVANLSLGSPSPSATLEQAVNSATSRGVLVVAASGNSGADSISYPARYANAMAVGATDQNNNRASFSQYGAGLDIVAPGVNVQSTYPGSTYASLNGTSMATPHVAGAAVLVKQKRPSWSNVRIRDHLKNTATSLGSTNLYGSGLVNAEAATR

SEQ ID NO: 64227 - protein, 380 aa, Unidentified
VRSKKLWIVASTALLISVAFSSSIASAAEEAKEKYLIGFNEQEAVSEFVEQVEANDEVAILSEEEEVEIELLHEFETIPVLSVELSPEDVDALELDPAISYIEEDAEVTTMAQSVPWGISRVQAPAAHRRGLWGRGVKVAVLDTGISTHPDLNIRGGASFVPGEPSTQDGNGHGTHVAGTIAALDNSIGVLGVAPSAELYAVKVLGASGSGSVSSIAQGLEWAGNNGMHVANLSLGSPSPSATLEQAVNSATSRGVLVVAASGNSGAGSISYPARYANAMAVGATDQNNNRASFSQYGAGLDLVAPGVNVQSTYPGSAYFSLNGTSMATPHVAGAAALVKQKNPSWSNVQIRNRLKNTATSLGSTNLYGSGLVNAEAATR

SEQ ID NO: 64228 - protein, 380 aa, Unidentified
VRSKKLWIVASTALLISVAFSSSIASAAEEAKEKYLIGFNEQEAVSEFVEQVEANDEVAILSEEEEVEIELLHEFETIPVLSVELSPEDVDALELDPAISYIEEDAEVTTMAQSVPWGISRVQAPAAHRRGLTGRGVKVAVLDTGISTHPDLNIRGGASFVPGEPSTQDGNGHGTHVAGTIAALDNSIGVLGVAPSAELYAVKVLGASGAGSVSSIAQGLEWAGANGMHVANLSLGSPSPSATLEQAVNSATSRGVLVVAASGNSGAGSISYPARYANAMAVGATDQDNNRASFSQYGAGLDLVAPGVNVQSTYPGSTYASLNGTSMATPHVAGAAALVKQKNPSWSNVQIRNRLKNTATSLGSTNLYGSGLVNAEAATR

SEQ ID NO: 64229 - protein, 380 aa, Unidentified
VRSKKLWIVASTALLISVAFSSSIASAAEEAKEKYLIGFNEQEAVSEFVEQVEANDEVAILSEEEEVEIELLHEFETIPVLSVELSPEDVDALELDPAISYIEEDAEVTTMAQSVPWGISRVQAPAAHNRGLTGSGVKVAVLDTGISTHPDLNIRGGASFVPGEPSTQDGNGHGTHVAGTIAALNNSIGVLGVAPSAELYAVKVLGASGGGAISSIAQGLEWAGNNGMHVANLSLGSPSPSATLEQAVNSATSRGVLVVAASGNSGEGSISYPARYANAMAVGATDQNNNRADFSQYGAGLDIVAPGVNVQSTYPGSTYASLNGTSMATPHVAGAAVLVKQKNPSWSNVRIRDHLKNTATSLGSTNLYGSGLVNAEAATR

SEQ ID NO: 64230 - protein, 380 aa, Unidentified
VRSKKLWIVASTALLISVAFSSSIASAAEEAKEKYLIGFNEQEAVSEFVEQVEANDEVAILSEEEEVEIELLHEFETIPVLSVELSPEDVDALELDPAISYIEEDAEVTTMAQSVPWGISRVQAPAAHRRGLTGSGVKVAVLDTGISTHPDLRIRGGASFVPGEPSTQDGNGHGTHVAGTIAALNNSIGVLGVAPSAELYAVKVLGASGGGAISSIAQGLEWAGNNGMHVANLSLGSPSPSATLEQAVNSATSRGVLVVAASGNSGAGSISYPARYANAMAVGATDQNNNRASFSQYGAGLDIVAPGVNVQSTYPGSTYASLNGTSMATPHVAGAAVLVKQKNPSWSNVRIRNHLKNTATSLGSTNLYGSGLVRAEAATR

SEQ ID NO: 64231 - protein, 380 aa, Unidentified
VRSKKLWIVASTALLISVAFSSSIASAAEEAKEKYLIGFNEQEAVSEFVEQVEANDEVAILSEEEEVEIELLHEFETIPVLSVELSPEDVDALELDPAISYIEEDAEVTTMAQSVPWGISRVQAPAAHNRRLTGSGVKVAVLDTGISTHPDLNIRGGASFVPGEPSTQDGNGHGTHVAGTIAALNNSIGVLGVAPSAELYAVKVLGASGGGAISSIAQGLEWAGNNGMHVANLSLGSPSPSATLEQAVNSATSRGVLVVAASGNSGAGSISYPARYANAMAVGATDQDNNRASFSQYGAGLDIVAPGVNVQSTYPQSTYASLNGTSMATPHVAGAAVLVKQKNPSWSNVRIRNHLKNTATSLGSTNLYGSGLVNAEAATR

SEQ ID NO: 64232 - protein, 380 aa, Unidentified
VRSKKLWIVASTALLISVAFSSSIASAAEEAKEKYLIGFNEQEAVSEFVEQVEANDEVAILSEEEEVEIELLHEFETIPVLSVELSPEDVDALELDPAISYIEEDAEVTTMAQSVPWGISRVQAPAAHNRRLTGRGVKVAVLDTGISTHPDLNIRGGASFVPGEPSTQDGNGHGTHVAGTIAALNNSIGVLGVAPSAELYAVKVLGASGGGAISSIAQGLEWAGNNGMHVANLSLGSPSPSATLEQAVNSATSRGVLVVAASGNSGAGSISYPARYANAMAVGATDQNNNRASFSQYGAGLDIVAPGVNVQSTYPGSTYASLNGTSMATPHVAGAAVLVKQKNPSWSNVRIRNHLKNTATSLGSTNLYGSGLVRAEAATR

SEQ ID NO: 64233 - protein, 380 aa, Unidentified
VRSKKLWIVASTALLISVAFSSSIASAAEEAKEKYLIGFNEQEAVSEFVEQVEANDEVAILSEEEEVEIELLHEFETIPVLSVELSPEDVDALELDPAISYIEEDAEVTTMAQSVPWGISRVQAPAAHNRGLTGSGVKVAVLDTGISTHPDLRIRGGASFVPGEPSTQDGNGHGTHVAGTIAALDNSIGVLGVAPSAELYAVKVLGASGGGAISSIAQGLEWAGNNGMHVANLSLGSPSPSATLEQAVNSATSRGVLVVAASGNSGAGSISYPARYANAMAVGATDQNNNRASFSQYGAGLDIVAPGVNVQSTYPGSTYASLNGTSMATPHVAGAAVLVKQKNPSWSNVRIRNRLKNTATSLGSTNLYGSGLVNAEAATR

SEQ ID NO: 64234 - protein, 380 aa, Unidentified
VRSKKLWIVASTALLISVAFSSSIASAAEEAKEKYLIGFNEQEAVSEFVEQVEANDEVAILSEEEEVEIELLHEFETIPVLSVELSPEDVDALELDPAISYIEEDAEVTTMAQSVPWGISRVQAPAAHRRRLTGRGVKVAVLDTGISTHPDLNIRGGASFVPGEPSTQDGNGHGTHVAGTIAALDNSIGVLGVAPSAELYAVKVLGASGAGSVSSIAQGLEWAGNNGMHVANLSLGSPSPSATLEQAVNSATSRGVLVVAASGNSGAGSISYPARYANAMAVGATDQDNNRASFSQYGAGLDIVAPGVNVQSTYPQSTYASLNGTSMATPHVAGAAALVKQKNPSWSNVQIRNRLKNTATSLGSTNLYGSGLVNAEAATR

SEQ ID NO: 64235 - protein, 380 aa, Unidentified
VRSKKLWIVASTALLISVAFSSSIASAAEEAKEKYLIGFNEQEAVSEFVEQVEANDEVAILSEEEEVEIELLHEFETIPVLSVELSPEDVDALELDPAISYIEEDAEVTTMAQSVPWGISRVQAPAAHNRGLTGSGVKVAVLDTGISTHPDLDIRGGASFVPGEPSTQDGNGHGTHVAGTIAALDNSIGVLGVAPSAELYAVKVLGASGGGAISSIAQGLEWAGNNGMHVANLSLGSPSPSATLEQAVNSATSRGVLVVAASGNSGAGSISYPARYANAMAVGATDQNNNRASFSQYGAGLDIVAPGVNVQSTYPGSTYASLNGTSMATPHVAGAAVLVKQKNPSWSNVRIRNHLKNTATSLGSTNLYGSGLVRAEAATR

SEQ ID NO: 64236 - protein, 380 aa, Unidentified
VRSKKLWIVASTALLISVAFSSSIASAAEEAKEKYLIGFNEQEAVSEFVEQVEANDEVAILSEEEEVEIELLHEFETIPVLSVELSPEDVDALELDPAISYIEEDAEVTTMAQSVPWGISRVQAPAAHRRGLTGRGVKVAVLDTGISTHPDLNIRGGASFVPGEPSTQDGNGHGTHVAGTIAALDNSIGVLGVAPSAELYAVKVLGASGAGSVSSIAQGLEWAGANGMHVANLSLGSPSPSATLEQAVNSATSRGVLVVAASGNSGAGSISYPARYANAMAVGATDQNNNRASFSQYGAGLDLVAPGVNVQSTYPGSAYASLNGTSMATPHVAGAAALVKQKNPSWSNVQIRNRLKNTATSLGSTNLYGSGLVNAEAATR

SEQ ID NO: 64237 - protein, 380 aa, Unidentified
VRSKKLWIVASTALLISVAFSSSIASAAEEAKEKYLIGFNEQEAVSEFVEQVEANDEVAILSEEEEVEIELLHEFETIPVLSVELSPEDVDALELDPAISYIEEDAEVTTMAQSVPWGISRVQAPAAHRRGLTGRGVKVAVLDTGISTHPDLNIRGGASFVPGEPSTQDGNGHGTHVAGTIAALDNSIGVLGVAPSAELYAVKVLGASGAGSVSSIAQGLEWAGANGMHVANLSLGSPSPSATLEQAVNSATSRGVLVVAASGNSGAGSISYPARYANAMAVGATDQDNNRASFSQYGAGLDIVAPGVNVQSTYPGSTYFSLNGTSMATPHVAGAAALVKQKNPSWSNVQIRNRLKNTATSLGSTNLYGSGLVNAEAATR

SEQ ID NO: 64238 - protein, 380 aa, Unidentified
VRSKKLWIVASTALLISVAFSSSIASAAEEAKEKYLIGFNEQEAVSEFVEQVEANDEVAILSEEEEVEIELLHEFETIPVLSVELSPEDVDALELDPAISYIEEDAEVTTMAQSVPWGISRVQAPAAHRRGLTGSGVKVAVLDTGISTHPDLRIRGGASFVPGEPSTQDGNGHGTHVAGTIAALNNSIGVLGVAPSAELYAVKVLGASGGGAISSIAQGLEWAGNNGMHVANLSLGSPSPSATLEQAVNSATSRGVLVVAASGNSGAGSISYPARYANAMAVGATDQNNNRASFSQYGAGLDIVAPGVNVQSTYPGSTYASLNGTSMATPHVAGAAVLVKQKNPSWSNVRIRNRLKNTATSLGSTNLYGSGLVNAEAATR

SEQ ID NO: 64239 - protein, 380 aa, Unidentified
VRSKKLWIVASTALLISVAFSSSIASAAEEAKEKYLIGFNEQEAVSEFVEQVEANDEVAILSEEEEVEIELLHEFETIPVLSVELSPEDVDALELDPAISYIEEDAEVTTMAQSVPWGISRVQAPAAHRRGLWGRGVKVAVLDTGISTHPDLNIRGGASFVPGEPSTQDGNGHGTHVAGTIAALDNSIGVLGVAPSAELYAVKVLGASGAGSVSSIAQGLEWAGNNGMHVANLSLGSPSPSATLEQAVNSATSRGVLVVAASGNSGAGSISYPARYANAMAVGATDQNNNRASFSQYGAGLDLVAPGVNVQSTYPQSTYASLNGTSMATPHVAGAAALVKQKNPSWSNVQIRNRLKNTATSLGSTNLYGSGLVNAEAATR

SEQ ID NO: 64240 - protein, 380 aa, Unidentified
VRSKKLWIVASTALLISVAFSSSIASAAEEAKEKYLIGFNEQEAVSEFVEQVEANDEVAILSEEEEVEIELLHEFETIPVLSVELSPEDVDALELDPAISYIEEDAEVTTMAQSVPWGISRVQAPAAHNRGLTGSGVKVAVLDTGISTHPDLNIRGGASFVPGEPSTQDGNGHGTHVAGTIAALNNSIGVLGVAPSAELYAVKVLGASGSGAISSIAQGLEWAGNNGMHVANLSLGSPSPSATLEQAVNSATSRGVLVVAASGNSGEGSISYPARYANAMAVGATDQNNNRADFSQYGAGLDIVAPGVNVQSTYPGSTYASLNGTSMATPHVAGAAVLVKQKNPSWSNVRIRDRLKNTATSLGSTNLYGSGLVNAEAATR

SEQ ID NO: 64241 - protein, 380 aa, Unidentified
VRSKKLWIVASTALLISVAFSSSIASAAEEAKEKYLIGFNEQEAVSEFVEQVEANDEVAILSEEEEVEIELLHEFETIPVLSVELSPEDVDALELDPAISYIEEDAEVTTMAQSVPWGISRVQAPAAHNRRLTGSGVKVAVLDTGISTHPDLDIRGGASFVPGEPSTQDGNGHGTHVAGTIAALNNSIGVLGVAPSAELYAVKVLGASGGGAISSIAQGLEWAGNNGMHVANLSLGSPSPSATLEQAVNSATSRGVLVVAASGNSGAGSISYPARYANAMAVGATDQNNNRASFSQYGAGLDIVAPGVNVQSTYPGSTYASLNGTSMATPHVAGAAVLVKQKNPSWSNVRIRNRLKNTATSLGSTNLYGSGLVNAEAATR

SEQ ID NO: 64242 - protein, 380 aa, Unidentified
VRSKKLWIVASTALLISVAFSSSIASAAEEAKEKYLIGFNEQEAVSEFVEQVEANDEVAILSEEEEVEIELLHEFETIPVLSVELSPEDVDALELDPAISYIEEDAEVTTMAQSVPWGISRVQAPAAHRRGLTGRGVKVAVLDTGISTHPDLNIRGGASFVPGEPSTQDGNGHGTHVAGTIAALDNSIGVLGVAPSAELYAVKVLGASGAGSVSSIAQGLEWAGNNGMHVANLSLGSPSPSATLEQAVNSATSRGVLVVAASGNSGAGSISYPARYANAMAVGATDQDNNRASFSQYGAGLDLVAPGVNVQSTYPGSAYASLNGTSMATPHVAGAAALVKQKNPSWSNVQIRNRLKNTATSLGSTNLYGSGLVNAEAATR

SEQ ID NO: 64243 - protein, 380 aa, Unidentified
VRSKKLWIVASTALLISVAFSSSIASAAEEAKEKYLIGFNEQEAVSEFVEQVEANDEVAILSEEEEVEIELLHEFETIPVLSVELSPEDVDALELDPAISYIEEDAEVTTMAQSVPWGISRVQAPAAHRRRLTGSGVKVAVLDTGISTHPDLNIRGGASFVPGEPSTQDGNGHGTHVAGTIAALNNSIGVLGVAPSAELYAVKVLGASGGGAISSIAQGLEWAGNNGMHVANLSLGSPSPSATLEQAVNSATSRGVLVVAASGNSGAGSISYPARYANAMAVGATDQNNNRASFSQYGAGLDIVAPGVNVQSTYPGSTYASLNGTSMATPHVAGAAVLVKQKNPSWSNVRIRNRLKNTATSLGSTNLYGSGLVNAEAATR

SEQ ID NO: 64244 - protein, 380 aa, Unidentified
VRSKKLWIVASTALLISVAFSSSIASAAEEAKEKYLIGFNEQEAVSEFVEQVEANDEVAILSEEEEVEIELLHEFETIPVLSVELSPEDVDALELDPAISYIEEDAEVTTMAQSVPWGISRVQAPAAHRRRLTGRGVKVAVLDTGISTHPDLNIRGGASFVPGEPSTQDGNGHGTHVAGTIAALDNSIGVLGVAPSAELYAVKVLGASGAGSVSSIAQGLEWAGNNGMHVANLSLGSPSPSATLEQAVNSATSRGVLVVAASGNSGAGSISYPARYANAMAVGATDQDNNRASFSQYGAGLDIVAPGVNVQSTYPGSAYASLNGTSMATPHVAGAAALVKQKNPSWSNVQIRNRLKNTATSLGSTNLYGSGLVNAEAATR

SEQ ID NO: 64245 - protein, 380 aa, Unidentified
VRSKKLWIVASTALLISVAFSSSIASAAEEAKEKYLIGFNEQEAVSEFVEQVEANDEVAILSEEEEVEIELLHEFETIPVLSVELSPEDVDALELDPAISYIEEDAEVTTMAQSVPWGISRVQAPAAHRRGLTGRGVKVAVLDTGISTHPDLNIRGGASFVPGEPSTQDGNGHGTHVAGTIAALDNSIGVLGVAPSAELYAVKVLGASGSGSVSSIAQGLEWAGANGMHVANLSLGSPSPSATLEQAVNSATSRGVLVVAASGNSGAGSISYPARYANAMAVGATDQNNNRASFSQYGAGLDLVAPGVNVQSTHPGSAYASLNGTSMATPHVAGAAALVKQKNPSWSNVQIRNRLKNTATSLGSTNLYGSGLVNAEAATR

SEQ ID NO: 64246 - protein, 380 aa, Unidentified
VRSKKLWIVASTALLISVAFSSSIASAAEEAKEKYLIGFNEQEAVSEFVEQVEANDEVAILSEEEEVEIELLHEFETIPVLSVELSPEDVDALELDPAISYIEEDAEVTTMAQSVPWGISRVQAPAAHRRGLWGRGVKVAVLDTGISTHPDLNIRGGASFVPGEPSTQDGNGHGTHVAGTIAALDNSIGVLGVAPSAELYAVKVLGASGSGSVSSIAQGLEWAGANGMHVANLSLGSPSPSATLEQAVNSATSRGVLVVAASGNSGAGSISYPARYANAMAVGATDQDNNRASFSQYGAGLDIVAPGVNVQSTYPGSAYASLNGTSMATPHVAGAAALVKQKNPSWSNVQIRNRLKNTATSLGSTNLYGSGLVNAEAATR

SEQ ID NO: 64247 - protein, 380 aa, Unidentified
VRSKKLWIVASTALLISVAFSSSIASAAEEAKEKYLIGFNEQEAVSEFVEQVEANDEVAILSEEEEVEIELLHEFETIPVLSVELSPEDVDALELDPAISYIEEDAEVTTMAQSVPWGISRVQAPAAHRRGLWGRGVKVAVLDTGISTHPDLNIRGGASFVPGEPSTQDGNGHGTHVAGTIAALDNSIGVLGVAPSAELYAVKVLGASGSGSVSSIAQGLEWAGNNGMHVANLSLGSPSPSATLEQAVNSATSRGVLVVAASGNSGAGSISYPARYANAMAVGATDQNNNRASFSQYGAGLDLVAPGVNVQSTYPQSTYFSLNGTSMATPHVAGAAALVKQKNPSWSNVQIRNRLKNTATSLGSTNLYGSGLVNAEAATR

SEQ ID NO: 64248 - protein, 380 aa, Unidentified
VRSKKLWIVASTALLISVAFSSSIASAAEEAKEKYLIGFNEQEAVSEFVEQVEANDEVAILSEEEEVEIELLHEFETIPVLSVELSPEDVDALELDPAISYIEEDAEVTTMAQSVPWGISRVQAPAAHNRGLTGSGVKVAVLDTGISTHPDLNIRGGASFVPGEPSTQDGNGHGTHVAGTIAALNNSIGVLGVAPSAELYAVKVLGASGGGAISSIAQGLEWAGNNGMHVANLSLGSPSPSATLEQAVNSATSRGVLVVAASGNSGEGSISYPARYANAMAVGATDQNNNRADFSQYGAGLDIVAPGVNVQSTYPGSTYASLNGTSSATPHVAGAAVLVKQKNPSWSNVRIRDRLKNTATSLGSTNLYGSGLVNAEAATR

SEQ ID NO: 64249 - protein, 380 aa, Unidentified
VRSKKLWIVASTALLISVAFSSSIASAAEEAKEKYLIGFNEQEAVSEFVEQVEANDEVAILSEEEEVEIELLHEFETIPVLSVELSPEDVDALELDPAISYIEEDAEVTTMAQSVPWGISRVQAPAAHRRRLTGRGVKVAVLDTGISTHPDLNIRGGASFVPGEPSTQDGNGHGTHVAGTIAALDNSIGVLGVAPSAELYAVKVLGASGSGSVSSIAQGLEWAGNNGMHVANLSLGSPSPSATLEQAVNSATSRGVLVVAASGNSGAGSISYPARYANAMAVGATDQDNNRASFSQYGAGLDLVAPGVNVQSTYPGSTYFSLNGTSMATPHVAGAAALVKQKNPSWSNVQIRNRLKNTATSLGSTNLYGSGLVNAEAATR

SEQ ID NO: 64250 - protein, 380 aa, Unidentified
VRSKKLWIVASTALLISVAFSSSIASAAEEAKEKYLIGFNEQEAVSEFVEQVEANDEVAILSEEEEVEIELLHEFETIPVLSVELSPEDVDALELDPAISYIEEDAEVTTMAQSVPWGISRVQAPAAHRRRLWGRGVKVAVLDTGISTHPDLNIRGGASFVPGEPSTQDGNGHGTHVAGTIAALDNSIGVLGVAPSAELYAVKVLGASGSGSVSSIAQGLEWAGANGMHVANLSLGSPSPSATLEQAVNSATSRGVLVVAASGNSGAGSISYPARYANAMAVGATDQNNNRASFSQYGAGLDLVAPGVNVQSTYPGSTYASLNGTSMATPHVAGAAALVKQKNPSWSNVQIRNRLKNTATSLGSTNLYGSGLVNAEAATR

SEQ ID NO: 64251 - protein, 380 aa, Unidentified
VRSKKLWIVASTALLISVAFSSSIASAAEEAKEKYLIGFNEQEAVSEFVEQVEANDEVAILSEEEEVEIELLHEFETIPVLSVELSPEDVDALELDPAISYIEEDAEVTTMAQSVPWGISRVQAPAAHNRGLTGRGVKVAVLDTGISTHPDLNITGGASFVPGEPSTQDGNGHGTHVAGTIAALNNSIGVLGVAPSAELYAVKVLGASGGGAISSIAQGLEWAGNNGMHVANLSLGSPSPSATLEQAVNSATSRGVLVVAASGNSGAGSISYPARYANAMAVGATDQNNNRASFSQYGAGLDIVAPGVNVQSTYPGSTYASLNGTSMATPHVAGAAVLVKQKNPSWSNVRIRNHLKNTATSLGSTNLYGSGLVRAEAATR

SEQ ID NO: 64252 - protein, 380 aa, Unidentified
VRSKKLWIVASTALLISVAFSSSIASAAEEAKEKYLIGFNEQEAVSEFVEQVEANDEVAILSEEEEVEIELLHEFETIPVLSVELSPEDVDALELDPAISYIEEDAEVTTMAQSVPWGISRVQAPAAHRRGLTGRGVKVAVLDTGISTHPDLNIRGGASFVPGEPSTQDGNGHGTHVAGTIAALDNSIGVLGVAPSAELYAVKVLGASGAGSVSSIAQGLEWAGANGMHVANLSLGSPSPSATLEQAVNSATSRGVLVVAASGNSGAGSISYPARYANAMAVGATDQNNNRASFSQYGAGLDIVAPGVNVQSTYPGSAYFSLNGTSMATPHVAGAAALVKQKNPSWSNVQIRNRLKNTATSLGSTNLYGSGLVNAEAATR

SEQ ID NO: 64253 - protein, 380 aa, Unidentified
VRSKKLWIVASTALLISVAFSSSIASAAEEAKEKYLIGFNEQEAVSEFVEQVEANDEVAILSEEEEVEIELLHEFETIPVLSVELSPEDVDALELDPAISYIEEDAEVTTMAQSVPWGISRVQAPAAHRRGLWGRGVKVAVLDTGISTHPDLNIRGGASFVPGEPSTQDGNGHGTHVAGTIAALDNSIGVLGVAPSAELYAVKVLGASGSGSVSSIAQGLEWAGANGMHVANLSLGSPSPSATLEQAVNSATSRGVLVVAASGNSGAGSISYPARYANAMAVGATDQDNNRASFSQYGAGLDIVAPGVNVQSTYPGSTYFSLNGTSMATPHVAGAAALVKQKNPSWSNVQIRNRLKNTATSLGSTNLYGSGLVNAEAATR

SEQ ID NO: 64254 - protein, 380 aa, Unidentified
VRSKKLWIVASTALLISVAFSSSIASAAEEAKEKYLIGFNEQEAVSEFVEQVEANDEVAILSEEEEVEIELLHEFETIPVLSVELSPEDVDALELDPAISYIEEDAEVTTMAQSVPWGISRVQAPAAHNRGLTGSGVKVAVLDTGISTHPDLNITGGASFVPGEPSTQDGNGHGTHVAGTIAALNNRIGVLGVAPSAELYAVKVLGASGGGAISSIAQGLEWAGNNGMHVANLSLGSPSPSATLEQAVNSATSRGVLVVAASGNSGAGSISYPARYANAMAVGATDQNNNRASFSQYGAGLDIVAPGVNVQSTYPGSTYASLNGTSMATPHVAGAAVLVKQKNPSWSNVRIRNRLKNTATSLGSTNLYGSGLVNAEAATR

SEQ ID NO: 64255 - protein, 380 aa, Unidentified
VRSKKLWIVASTALLISVAFSSSIASAAEEAKEKYLIGFNEQEAVSEFVEQVEANDEVAILSEEEEVEIELLHEFETIPVLSVELSPEDVDALELDPAISYIEEDAEVTTMAQSVPWGISRVQAPAAHNRGLTGSGVKVAVLDTGISTHPDLNIRGGASFVPGEPSTQDGNGHGTHVAGTIAALNNSIGVLGVAPSAELYAVKVLGASGGGAISSIAQGLEWAGANGMHVANLSLGSPSPSATLEQAVNSATSRGVLVVAASGNSGAGSISYPARYANAMAVGATDQNNNRASFSQYGAGLDIVAPGVNVQSTYPGSAYASLNGTSMATPHVAGAAVLVKQKNPSWSNVRIRNHLKNTATSLGSTNLYGSGLVRAEAATR

SEQ ID NO: 64256 - protein, 380 aa, Unidentified
VRSKKLWIVASTALLISVAFSSSIASAAEEAKEKYLIGFNEQEAVSEFVEQVEANDEVAILSEEEEVEIELLHEFETIPVLSVELSPEDVDALELDPAISYIEEDAEVTTMAQSVPWGISRVQAPAAHNRGLTGRGVKVAVLDTGISTHPDLDIRGGASFVPGEPSTQDGNGHGTHVAGTIAALNNSIGVLGVAPSAELYAVKVLGASGGGAISSIAQGLEWAGNNGMHVANLSLGSPSPSATLEQAVNSATSRGVLVVAASGNSGAGSISYPARYANAMAVGATDQNNNRASFSQYGAGLDIVAPGVNVQSTYPGSTYASLNGTSMATPHVAGAAVLVKQKNPSWSNVRIRNRLKNTATSLGSTNLYGSGLVNAEAATR

SEQ ID NO: 64257 - protein, 380 aa, Unidentified
VRSKKLWIVASTALLISVAFSSSIASAAEEAKEKYLIGFNEQEAVSEFVEQVEANDEVAILSEEEEVEIELLHEFETIPVLSVELSPEDVDALELDPAISYIEEDAEVTTMAQSVPWGISRVQAPAAHRRGLWGRGVKVAVLDTGISTHPDLNIRGGASFVPGEPSTQDGNGHGTHVAGTIAALDNSIGVLGVAPSAELYAVKVLGASGSGSVSSIAQGLEWAGANGMHVANLSLGSPSPSATLEQAVNSATSRGVLVVAASGNSGAGSISYPARYANAMAVGATDQNNNRASFSQYGAGLDIVAPGVNVQSTYPQSAYASLNGTSMATPHVAGAAALVKQKNPSWSNVQIRNRLKNTATSLGSTNLYGSGLVNAEAATR

SEQ ID NO: 64258 - protein, 380 aa, Unidentified
VRSKKLWIVASTALLISVAFSSSIASAAEEAKEKYLIGFNEQEAVSEFVEQVEANDEVAILSEEEEVEIELLHEFETIPVLSVELSPEDVDALELDPAISYIEEDAEVTTMAQSVPWGISRVQAPAAHRRGLTGSGVKVAVLDTGISTHPDLRITGGASFVPGEPSTQDGNGHGTHVAGTIAALNNSIGVLGVAPSAELYAVKVLGASGGGAISSIAQGLEWAGNNGMHVANLSLGSPSPSATLEQAVNSATSRGVLVVAASGNSGAGSISYPARYANAMAVGATDQNNNRASFSQYGAGLDIVAPGVNVQSTYPGSTYASLNGTSMATPHVAGAAVLVKQKNPSWSNVRIRNHLKNTATSLGSTNLYGSGLVNAEAATR

SEQ ID NO: 64259 - protein, 380 aa, Unidentified
VRSKKLWIVASTALLISVAFSSSIASAAEEAKEKYLIGFNEQEAVSEFVEQVEANDEVAILSEEEEVEIELLHEFETIPVLSVELSPEDVDALELDPAISYIEEDAEVTTMAQSVPWGISRVQAPAAHRRRLWGRGVKVAVLDTGISTHPDLNIRGGASFVPGEPSTQDGNGHGTHVAGTIAALDNSIGVLGVAPSAELYAVKVLGASGSGSVSSIAQGLEWAGNNGMHVANLSLGSPSPSATLEQAVNSATSRGVLVVAASGNSGAGSISYPARYANAMAVGATDQDNNRASFSQYGAGLDIVAPGVNVQSTYPQSTYASLNGTSMATPHVAGAAALVKQKNPSWSNVQIRNRLKNTATSLGSTNLYGSGLVNAEAATR

SEQ ID NO: 64260 - protein, 380 aa, Unidentified
VRSKKLWIVASTALLISVAFSSSIASAAEEAKEKYLIGFNEQEAVSEFVEQVEANDEVAILSEEEEVEIELLHEFETIPVLSVELSPEDVDALELDPAISYIEEDAEVTTMAQSVPWGISRVQAPAAHNRGLTGSGVKVAVLDTGISTHPDLNIRGGASFVPGEPSTQDGNGHGTHVAGTIAALNNSIGVLGVAPSAELYAVKVLGASGGGALSSIAQGLEWAGNNGMHVANLSLGSPSPSATLEQAVNSATSRGVLVVAASGNSGADSISYPARYANAMAVGATDQNNNRASFSQYGAGLDIVAPGVNVQSTYPGSTYASLNGTSMATPHVAGAAVLVKHKNPSWSNVQIRDHLKKTATSLGSTNLYGSGLVNAEAATR

SEQ ID NO: 64261 - protein, 380 aa, Unidentified
VRSKKLWIVASTALLISVAFSSSIASAAEEAKEKYLIGFNEQEAVSEFVEQVEANDEVAILSEEEEVEIELLHEFETIPVLSVELSPEDVDALELDPAISYIEEDAEVTTMAQSVPWGISRVQAPAAHRRGLTGRGVKVAVLDTGISTHPDLNIRGGASFVPGEPSTQDGNGHGTHVAGTIAALDNSIGVLGVAPSAELYAVKVLGASGSGSVSSIAQGLEWAGNNGMHVANLSLGSPSPSATLEQAVNSATSRGVLVVAASGNSGAGSISYPARYANAMAVGATDQDNNRASFSQYGAGLDLVAPGVNVQSTYPQSAYASLNGTSMATPHVAGAAALVKQKNPSWSNVQIRNRLKNTATSLGSTNLYGSGLVNAEAATR

SEQ ID NO: 64262 - protein, 380 aa, Unidentified
VRSKKLWIVASTALLISVAFSSSIASAAEEAKEKYLIGFNEQEAVSEFVEQVEANDEVAILSEEEEVEIELLHEFETIPVLSVELSPEDVDALELDPAISYIEEDAEVTTMAQSVPWGISRVQAPAAHNRRLTGSGVKVAVLDTGISTHPDLNITGGASFVPGEPSTQDGNGHGTHVAGTIAALDNSIGVLGVAPSAELYAVKVLGASGGGAISSIAQGLEWAGNNGMHVANLSLGSPSPSATLEQAVNSATSRGVLVVAASGNSGAGSISYPARYANAMAVGATDQNNNRASFSQYGAGLDIVAPGVNVQSTYPGSTYASLNGTSMATPHVAGAAVLVKQKNPSWSNVRIRNHLKNTATSLGSTNLYGSGLVNAEAATR

SEQ ID NO: 64263 - protein, 380 aa, Unidentified
VRSKKLWIVASTALLISVAFSSSIASAAEEAKEKYLIGFNEQEAVSEFVEQVEANDEVAILSEEEEVEIELLHEFETIPVLSVELSPEDVDALELDPAISYIEEDAEVTTMAQSVPWGISRVQAPAAHNRGLTGRGVKVAVLDTGISTHPDLDIRGGASFVPGEPSTQDGNGHGTHVAGTIAALNNSIGVLGVAPSAELYAVKVLGASGGGAISSIAQGLEWAGNNGMHVANLSLGSPSPSATLEQAVNSATSRGVLVVAASGNSGAGSISYPARYANAMAVGATDQNNNRASFSQYGAGLDIVAPGVNVQSTYPGSTYASLNGTSMATPHVAGAAVLVKQKNPSWSNVRIRNHLKNTATSLGSTNLYGSGLVRAEAATR

SEQ ID NO: 64264 - protein, 380 aa, Unidentified
VRSKKLWIVASTALLISVAFSSSIASAAEEAKEKYLIGFNEQEAVSEFVEQVEANDEVAILSEEEEVEIELLHEFETIPVLSVELSPEDVDALELDPAISYIEEDAEVTTMAQSVPWGISRVQAPAAHNRGLTGSGVKVAVLDTGISTHPDLDITGGASFVPGEPSTQDGNGHGTHVAGTIAALNNSIGVLGVAPSAELYAVKVLGASGGGAISSIAQGLEWAGNNGMHVANLSLGSPSPSATLEQAVNSATSRGVLVVAASGNSGAGSISYPARYANAMAVGATDQNNNRASFSQYGAGLDIVAPGVNVQSTYPGSTYASLNGTSMATPHVAGAAVLVKQKNPSWSNVRIRNHLKNTATSLGSTNLYGSGLVRAEAATR

SEQ ID NO: 64265 - protein, 380 aa, Unidentified
VRSKKLWIVASTALLISVAFSSSIASAAEEAKEKYLIGFNEQEAVSEFVEQVEANDEVAILSEEEEVEIELLHEFETIPVLSVELSPEDVDALELDPAISYIEEDAEVTTMAQSVPWGISRVQAPAAHNRGLTGSGVKVAVLDTGISTHPDLNITGGASFVPGEPSTQDGNGHGTHVAGTIAALNNRIGVLGVAPSAELYAVKVLGASGGGAISSIAQGLEWAGNNGMHVANLSLGSPSPSATLEQAVNSATSRGVLVVAASGNSGAGSISYPARYANAMAVGATDQNNNRASFSQYGAGLDIVAPGVNVQSTYPGSTYASLNGTSMATPHVAGAAVLVKQKNPSWSNVRIRNHLKNTATSLGSTNLYGSGLVRAEAATR

SEQ ID NO: 64266 - protein, 380 aa, Unidentified
VRSKKLWIVASTALLISVAFSSSIASAAEEAKEKYLIGFNEQEAVSEFVEQVEANDEVAILSEEEEVEIELLHEFETIPVLSVELSPEDVDALELDPAISYIEEDAEVTTMAQSVPWGISRVQAPAAHRRGLWGRGVKVAVLDTGISTHPDLNIRGGASFVPGEPSTQDGNGHGTHVAGTIAALDNSIGVLGVAPSAELYAVKVLGASGAGSVSSIAQGLEWAGANGMHVANLSLGSPSPSATLEQAVNSATSRGVLVVAASGNSGAGSISYPARYANAMAVGATDQDNNRASFSQYGAGLDIVAPGVNVQSTYPGSTYASLNGTSMATPHVAGAAALVKQKNPSWSNVQIRNRLKNTATSLGSTNLYGSGLVNAEAATR

SEQ ID NO: 64267 - protein, 380 aa, Unidentified
VRSKKLWIVASTALLISVAFSSSIASAAEEAKEKYLIGFNEQEAVSEFVEQVEANDEVAILSEEEEVEIELLHEFETIPVLSVELSPEDVDALELDPAISYIEEDAEVTTMAQSVPWGISRVQAPAAHRRGLTGRGVKVAVLDTGISTHPDLNIRGGASFVPGEPSTQDGNGHGTHVAGTIAALDNSIGVLGVAPSAELYAVKVLGASGAGSVSSIAQGLEWAGNNGMHVANLSLGSPSPSATLEQAVNSATSRGVLVVAASGNSGAGSISYPARYANAMAVGATDQNNNRASFSQYGAGLDLVAPGVNVQSTYPQSTYVSLNGTSMATPHVAGAAALVKQKNPSWSNVQIRNRLKNTATSLGSTNLYGSGLVNAEAATR

SEQ ID NO: 64268 - protein, 380 aa, Unidentified
VRSKKLWIVASTALLISVAFSSSIASAAEEAKEKYLIGFNEQEAVSEFVEQVEANDEVAILSEEEEVEIELLHEFETIPVLSVELSPEDVDALELDPAISYIEEDAEVTTMAQSVPWGISRVQAPAAHRRGLTGRGVKVAVLDTGISTHPDLNIRGGASFVPGEPSTQDGNGHGTHVAGTIAALDNSIGVLGVAPSAELYAVKVLGASGAGSVSSIAQGLEWAGNNGMHVANLSLGSPSPSATLEQAVNSATSRGVLVVAASGNSGAGSISYPARYANAMAVGATDQNNNRASFSQYGAGLDIVAPGVNVQSTYPQSAYFSLNGTSMATPHVAGAAALVKQKNPSWSNVQIRNRLKNTATSLGSTNLYGSGLVNAEAATR

SEQ ID NO: 64269 - protein, 380 aa, Unidentified
VRSKKLWIVASTALLISVAFSSSIASAAEEAKEKYLIGFNEQEAVSEFVEQVEANDEVAILSEEEEVEIELLHEFETIPVLSVELSPEDVDALELDPAISYIEEDAEVTTMAQSVPWGISRVQAPAAHRRGLTGRGVKVAVLDTGISTHPDLNIRGGASFVPGEPSTQDGNGHGTHVAGTIAALDNSIGVLGVAPSAELYAVKVLGASGSGSVSSIAQGLEWAGANGMHVANLSLGSPSPSATLEQAVNSATSRGVLVVAASGNSGAGSISYPARYANAMAVGATDQNNNRASFSQYGAGLDIVAPGVNVQSTYPQSAYFSLNGTSMATPHVAGAAALVKQKNPSWSNVQIRNRLKNTATSLGSTNLYGSGLVNAEAATR

SEQ ID NO: 64270 - protein, 380 aa, Unidentified
VRSKKLWIVASTALLISVAFSSSIASAAEEAKEKYLIGFNEQEAVSEFVEQVEANDEVAILSEEEEVEIELLHEFETIPVLSVELSPEDVDALELDPAISYIEEDAEVTTMAQSVPWGISRVQAPAAHRRRLTGRGVKVAVLDTGISTHPDLNIRGGASFVPGEPSTQDGNGHGTHVAGTIAALDNSIGVLGVAPSAELYAVKVLGASGSGSVSSIAQGLEWAGANGMHVANLSLGSPSPSATLEQAVNSATSRGVLVVAASGNSGAGSISYPARYANAMAVGATDQNNNRASFSQYGAGLDIVAPGVNVQSTYPQSTYFSLNGTSMATPHVAGAAALVKQKNPSWSNVQIRNRLKNTATSLGSTNLYGSGLVNAEAATR

SEQ ID NO: 64271 - protein, 380 aa, Unidentified
VRSKKLWIVASTALLISVAFSSSIASAAEEAKEKYLIGFNEQEAVSEFVEQVEANDEVAILSEEEEVEIELLHEFETIPVLSVELSPEDVDALELDPAISYIEEDAEVTTMAQSVPWGISRVQAPAAHRRGLTGRGVKVAVLDTGISTHPDLNIRGGASFVPGEPSTQDGNGHGTHVAGTIAALDNSIGVLGVAPSAELYAVKVLGASGSGSVSSIAQGLEWAGAIGMHVANLSLGSPSPSATLEQAVNSATSRGVLVVAASGNSGAGSISYPARYANAMAVGATDQDNNRASFSQYGAGLDIVAPGVNVQSTYPGSAYASLNGTSMATPHVAGAAALVKQKNPSWSNVQIRNRLKNTATSLGSTNLYGSGLVNAEAATR

SEQ ID NO: 64272 - protein, 380 aa, Unidentified
VRSKKLWIVASTALLISVAFSSSIASAAEEAKEKYLIGFNEQEAVSEFVEQVEANDEVAILSEEEEVEIELLHEFETIPVLSVELSPEDVDALELDPAISYIEEDAEVTTMAQSVPWGISRVQAPAAHRRGLWGRGVKVAVLDTGISTHPDLNIRGGASFVPGEPSTQDGNGHGTHVAGTIAALDNSIGVLGVAPSAELYAVKVLGASGSGSVSSIAQGLEWAGANGMHVANLSLGSPSPSATLEQAVNSATSRGVLVVAASGNSGAGSISYPARYANAMAVGATDQNNNRASFSQYGAGLDLVAPGVNVQSTYPGSTYFSLNGTSMATPHVAGAAALVKQKNPSWSNVQIRNRLKNTATSLGSTNLYGSGLVNAEAATR

SEQ ID NO: 64273 - protein, 380 aa, Unidentified
VRSKKLWIVASTALLISVAFSSSIASAAEEAKEKYLIGFNEQEAVSEFVEQVEANDEVAILSEEEEVEIELLHEFETIPVLSVELSPEDVDALELDPAISYIEEDAEVTTMAQSVPWGISRVQAPAAHRRGLWGRGVKVAVLDTGISTHPDLNIRGGASFVPGEPSTQDGNGHGTHVAGTIAALDNSIGVLGVAPSAELYAVKVLGASGSGSVSSIAQGLEWAGNNGMHVANLSLGSPSPSATLEQAVNSATSRGVLVVAASGNSGAGSISYPARYANAMAVGATDQDNNRASFSQYGAGLDLVAPGVNVQSTYPGSTYFSLNGTSMATPHVAGAAALVKQKNPSWSNVQIRNRLKNTATSLGSTNLYGSGLVNAEAATR

SEQ ID NO: 64274 - protein, 380 aa, Unidentified
VRSKKLWIVASTALLISVAFSSSIASAAEEAKEKYLIGFNEQEAVSEFVEQVEANDEVAILSEEEEVEIELLHEFETIPVLSVELSPEDVDALELDPAISYIEEDAEVTTMAQSVPWGISRVQAPAAHRRGLTGRGVKVAVLDTGISTHPDLNIRGGASFVPGEPSTQDGNGHGTHVAGTIAALDNSIGVLGVAPSAELYAVKVLGASGSGSVSSIAQGLEWAGNNGMHVANLSLGSPSPSATLEQAVNSATSRGVLVVAASGNSGAGSISYPARYANAMAVGATDQNNNRASFSQYGAGLDMVAPGVNVQSTYPQSAYFSLNGTSMATPHVAGAAALVKQKNPSWSNVQIRNRLKNTATSLGSTNLYGSGLVNAEAATR

SEQ ID NO: 64275 - protein, 380 aa, Unidentified
VRSKKLWIVASTALLISVAFSSSIASAAEEAKEKYLIGFNEQEAVSEFVEQVEANDEVAILSEEEEVEIELLHEFETIPVLSVELSPEDVDALELDPAISYIEEDAEVTTMAQSVPWGISRVQAPAAHNRGLTGSGVKVAVLDTGISTHPDLRITGGASFVPGEPSTQDGNGHGTHVAGTIAALNNSIGVLGVAPSAELYAVKVLGASGGGAISSIAQGLEWAGNNGMHVANLSLGSPSPSATLEQAVNSATSRGVLVVAASGNSGAGSISYPARYANAMAVGATDQNNNRASFSQYGAGLDIVAPGVNVQSTYPGSTYASLNGTSMATPHVAGAAVLVKQKNPSWSNVRIRNHLKNTATSLGSTNLYGSGLVRAEAATR

SEQ ID NO: 64276 - protein, 380 aa, Unidentified
VRSKKLWIVASTALLISVAFSSSIASAAEEAKEKYLIGFNEQEAVSEFVEQVEANDEVAILSEEEEVEIELLHEFETIPVLSVELSPEDVDALELDPAISYIEEDAEVTTMAQSVPWGISRVQAPAAHNRGLTGRGVKVAVLDTGISTHPDLNIRGGASFVPGEPSTQDGNGHGTHVAGTIAALNNSIGVLGVAPSAELYAVKVLGASGGGAISSIAQGLEWAGNNGMHVANLSLGSPSPSATLEQAVNSATSRGVLVVAASGNSGAGSISYPARYANAMAVGATDQNNNRASFSQYGAGLDIVAPGVNVQSTYPGSTYASLNGTSMATPHVAGAAVLVKQKNPSWSNVRIRDRLKNTATSLGSTNLYGSGLVNAEAATR

SEQ ID NO: 64277 - protein, 380 aa, Unidentified
VRSKKLWIVASTALLISVAFSSSIASAAEEAKEKYLIGFNEQEAVSEFVEQVEANDEVAILSEEEEVEIELLHEFETIPVLSVELSPEDVDALELDPAISYIEEDAEVTTMAQSVPWGISRVQAPAAHRRRLTGRGVKVAVLDTGISTHPDLNIRGGASFVPGEPSTQDGNGHGTHVAGTIAALDNSIGVLGVAPSAELYAVKVLGASGSGSVSSIAQGLEWAGNNGMHVANLSLGSPSPSATLEQAVNSATSRGVLVVAASGNSGAGSISYPARYANAMAVGATDQDNNRASFSQYGAGLDIVAPGVNVQSTYPQSAYASLNGTSMATPHVAGAAALVKQKNPSWSNVQIRNRLKNTATSLGSTNLYGSGLVNAEAATR

SEQ ID NO: 64278 - protein, 380 aa, Unidentified
VRSKKLWIVASTALLISVAFSSSIASAAEEAKEKYLIGFNEQEAVSEFVEQVEANDEVAILSEEEEVEIELLHEFETIPVLSVELSPEDVDALELDPAISYIEEDAEVTTMAQSVPWGISRVQAPAAHRRGLWGRGVKVAVLDTGISTHPDLNIRGGASFVPGEPSTQDGNGHGTHVAGTIAALDNSIGVLGVAPSAELYAVKVLGASGAGSVSSIAQGLEWAGNNGMHVANLSLGSPSPSATLEQAVNSATSRGVLVVAASGNSGAGSISYPARYANAMAVGATDQDNNRASFSQYGAGLDLVAPGVNVQSTYPGSTYASLNGTSMATPHVAGAAALVKQKNPSWSNVQIRNRLKNTATSLGSTNLYGSGLVNAEAATR

SEQ ID NO: 64279 - protein, 380 aa, Unidentified
VRSKKLWIVASTALLISVAFSSSIASAAEEAKEKYLIGFNEQEAVSEFVEQVEANDEVAILSEEEEVEIELLHEFETIPVLSVELSPEDVDALELDPAISYIEEDAEVTTMAQSVPWGISRVQAPAAHNRGLTGSGVKVAVLDTGISTHPDLDIRGGASFVPGEPSTQDGNGHGTHVAGTIAALDNSIGVLGVAPSAELYAVKVLGASGGGAISSIAQGLEWAGNNGMHVANLSLGSPSPSATLEQAVNSATSRGVLVVAASGNSGAGSISYPARYANAMAVGATDQNNNRASFSQYGAGLDIVAPGVNVQSTYPGSTYASLNGTSMATPHVAGAAVLVKQKNPSWSNVRIRNRLKNTATSLGSTNLYGSGLVNAEAATR

SEQ ID NO: 64280 - protein, 380 aa, Unidentified
VRSKKLWIVASTALLISVAFSSSIASAAEEAKEKYLIGFNEQEAVSEFVEQVEANDEVAILSEEEEVEIELLHEFETIPVLSVELSPEDVDALELDPAISYIEEDAEVTTMAQSVPWGISRVQAPAAHRRRLTGSGVKVAVLDTGISTHPDLNIRGGASFVPGEPSTQDGNGHGTHVAGTIAALDNSIGVLGVAPSAELYAVKVLGASGGGAISSIAQGLEWAGNNGMHVANLSLGSPSPSATLEQAVNSATSRGVLVVAASGNSGAGSISYPARYANAMAVGATDQNNNRASFSQYGAGLDIVAPGVNVQSTYPGSTYASLNGTSMATPHVAGAAVLVKQKNPSWSNVRIRNHLKNTATSLGSTNLYGSGLVNAEAATR

SEQ ID NO: 64281 - protein, 380 aa, Unidentified
VRSKKLWIVASTALLISVAFSSSIASAAEEAKEKYLIGFNEQEAVSEFVEQVEANDEVAILSEEEEVEIELLHEFETIPVLSVELSPEDVDALELDPAISYIEEDAEVTTMAQSVPWGISRVQAPAAHNRGLTGSGVKVAVLDTGISTHPDLRIRGGASFVPGEPSTQDGNGHGTHVAGTIAALNNSIGVLGVAPSAELYAVKVLGASGGGAISSIAQGLEWAGNNGMHVANLSLGSPSPSATLEQAVNSATSRGVLVLAASGNSGAGSISYPARYANAMAVGATDQNNNRASFSQYGAGLDIVAPGVNVQSTYPGSTYASLNGTSMATPHVAGAAVLVKQKNPSWSNVRIRNHLKNTATSLGSTNLYGSGLVRAEAATR

SEQ ID NO: 64282 - protein, 380 aa, Unidentified
VRSKKLWIVASTALLISVAFSSSIASAAEEAKEKYLIGFNEQEAVSEFVEQVEANDEVAILSEEEEVEIELLHEFETIPVLSVELSPEDVDALELDPAISYIEEDAEVTTMAQSVPWGISRVQAPAAHRRGLTGRGVKVAVLDTGISTHPDLNIRGGASFVPGEPSTQDGNGHGTHVAGTIAALDNSIGVLGVAPSAELYAVKVLGASGSGSVSSIAQGLEWAGNNGMHVANLSLGSPSPSATLEQAVNSATSRGVLVVAASGNSGAGSISYPARYANAMAVGATDQDNNRASFSQYGAGLDLVAPGVNVQSTYPGSAYFSLNGTSMATPHVAGAAALVKQKNPSWSNVQIRNRLKNTATSLGSTNLYGSGLVNAEAATR

SEQ ID NO: 64283 - protein, 380 aa, Unidentified
VRSKKLWIVASTALLISVAFSSSIASAAEEAKEKYLIGFNEQEAVSEFVEQVEANDEVAILSEEEEVEIELLHEFETIPVLSVELSPEDVDALELDPAISYIEEDAEVTTMAQSVPWGISRVQAPAAHRRGLWGRGVKVAVLDTGISTHPDLNIRGGASFVPGEPSTQDGNGHGTHVAGTIAALDNSIGVLGVAPSAELYAVKVLGASGAGSVSSIAQGLEWAGANGMHVANLSLGSPSPSATLEQAVNSATSRGVLVVAASGNSGAGSISYPARYANAMAVGATDQNNNRASFSQYGAGLDIVAPGVNVQSTYPGSTYFSLNGTSMATPHVAGAAALVKQKNPSWSNVQIRNRLKNTATSLGSTNLYGSGLVNAEAATR

SEQ ID NO: 64284 - protein, 380 aa, Unidentified
VRSKKLWIVASTALLISVAFSSSIASAAEEAKEKYLIGFNEQEAVSEFVEQVEANDEVAILSEEEEVEIELLHEFETIPVLSVELSPEDVDALELDPAISYIEEDAEVTTMAQSVPWGISRVQAPAAHRRGLTGSGVKVAVLDTGISTHPDLNITGGASFVPGEPSTQDGNGHGTHVAGTIAALNNSIGVLGVAPSAELYAVKVLGASGGGAISSIAQGLEWAGNNGMHVANLSLGSPSPSATLEQAVNSATSRGVLVVAASGNSGAGSISYPARYANAMAVGATDQNNNRASFSQYGAGLDIVAPGVNVQSTYPGSTYASLNGTSMATPHVAGAAVLVKQKNPSWSNVRIRNHLKNTATSLGSTNLYGSGLVRAEAATR

SEQ ID NO: 64285 - protein, 380 aa, Unidentified
VRSKKLWIVASTALLISVAFSSSIASAAEEAKEKYLIGFNEQEAVSEFVEQVEANDEVAILSEEEEVEIELLHEFETIPVLSVELSPEDVDALELDPAISYIEEDAEVTTMAQSVPWGISRVQAPAAHRRGLWGRGVKVAVLDTGISTHPDLNIRGGASFVPGEPSTQDGNGHGTHVAGTIAALDNSIGVLGVAPSAELYAVKVLGASGSGSVSSIAQGLEWAGANGMHVANLSLGSPSPSATLEQAVNSATSRGVLVVAASGNSGAGSISYPARYANAMAVGATDQNNNRASFSQYGAGLDLVAPGVNVQSTYPGSAYASLNGTSMATPHVAGAAALVKQKNPSWSNVQIRNRLKNTATSLGSTNLYGSGLVNAEAATR

SEQ ID NO: 64286 - protein, 380 aa, Unidentified
VRSKKLWIVASTALLISVAFSSSIASAAEEAKEKYLIGFNEQEAVSEFVEQVEANDEVAILSEEEEVEIELLHEFETIPVLSVELSPEDVDALELDPAISYIEEDAEVTTMAQSVPWGISRVQAPAAHNRGLTGSGVKVAVLDTGISTHPDLNITGGASFVPGEPSTQDGNGHGTHVAGTIAALDNSIGVLGVAPSAELYAVKVLGASGGGAISSIAQGLEWAGNNGMHVANLSLGSPSPSATLEQAVNSATSRGVLVVAASGNSGAGSISYPARYANAMAVGATDQNNNRASFSQYGAGLDIVAPGVNVQSTYPGSTYASLNGTSMATPHVAGAAVLVKQKNPSWSNVRIRNRLKNTATSLGSTNLYGSGLVNAEAATR

SEQ ID NO: 64287 - protein, 380 aa, Unidentified
VRSKKLWIVASTALLISVAFSSSIASAAEEAKEKYLIGFNEQEAVSEFVEQVEANDEVAILSEEEEVEIELLHEFETIPVLSVELSPEDVDALELDPAISYIEEDAEVTTMAQSVPWGISRVQAPAAHRRGLTGRGVKVAVLDTGISTHPDLNIRGGASFVPGEPSTQDGNGHGTHVAGTIAALDNSIGVLGVAPSAELYAVKVLGASGSGSVSSIAQGLEWAGANGMHVANLSLGSPSPSATLEQAVNSATSRGVLVVAASGNSGAGSISYPARYANAMAVGATDQDNNRASFSQYGAGLDIVAPGVNVQSTYPQSAYASLNGTSMATPHVAGAAALVKQKNPSWSNVQIRNRLKNTATSLGSTNLYGSGLVNAEAATR

SEQ ID NO: 64288 - protein, 380 aa, Unidentified
VRSKKLWIVASTALLISVAFSSSIASAAEEAKEKYLIGFNEQEAVSEFVEQVEANDEVAILSEEEEVEIELLHEFETIPVLSVELSPEDVDALELDPAISYIEEDAEVTTMAQSVPWGISRVQAPAAHRRGLWGRGVKVAVLDTGISTHPDLNIRGGASFVPGEPSTQDGNGHGTHVAGTIAALDNSIGVLGVAPSAELYAVKVLGASGSGSVSSIAQGLEWAGNNGMHVANLSLGSPSPSATLEQAVNSATSRGVLVVAASGNSGAGSISYPARYANAMAVGATDQDNNRASFSQYGAGLDLVAPGVNVQSTYPQSTYASLNGTSMATPHVAGAAALVKQKNPSWSNVQIRNRLKNTATSLGSTNLYGSGLVNAEAATR

SEQ ID NO: 64289 - protein, 380 aa, Unidentified
VRSKKLWIVASTALLISVAFSSSIASAAEEAKEKYLIGFNEQEAVSEFVEQVEANDEVAILSEEEEVEIELLHEFETIPVLSVELSPEDVDALELDPAISYIEEDAEVTTMAQSVPWGISRVQAPAAHNRGLTGSGVKVAVLDTGISTHPDLRIRGGASFVPGEPSTQDGNGHGTHVAGTIAALNNSIGVLGVAPDAELYAVKVLGASGGGAISSIAQGLEWAGNNGMHVANLSLGSPSPSATLEQAVNSATSRGVLVVAASGNSGAGSISYPARYANAMAVGATDQNNNRASFSQYGAGLDIVAPGVNVQSTYPGSTYASLNGTSMATPHVAGAAVLVKQKNPSWSNVRIRNHLKNTATSLGSTNLYGSGLVRAEAATR

SEQ ID NO: 64290 - protein, 380 aa, Unidentified
VRSKKLWIVASTALLISVAFSSSIASAAEEAKEKYLIGFNEQEAVSEFVEQVEANDEVAILSEEEEVEIELLHEFETIPVLSVELSPEDVDALELDPAISYIEEDAEVTTMAQSVPWGISRVQAPAAHRRRLTGRGVKVAVLDTGISTHPDLNIRGGASFVPGEPSTQDGNGHGTHVAGTIAALDNSIGVLGVAPSAELYAVKVLGASGAGSVSSIAQGLEWAGANGMHVANLSLGSPSPSATLEQAVNSATSRGVLVVAASGNSGAGSISYPARYANAMAVGATDQNNNRASFSQYGAGLDIVAPGVNVQSTYPGSAYASLNGTSMATPHVAGAAALVKQKNPSWSNVQIRNRLKNTATSLGSTNLYGSGLVNAEAATR

SEQ ID NO: 64291 - protein, 380 aa, Unidentified
VRSKKLWIVASTALLISVAFSSSIASAAEEAKEKYLIGFNEQEAVSEFVEQVEANDEVAILSEEEEVEIELLHEFETIPVLSVELSPEDVDALELDPAISYIEEDAEVTTMAQSVPWGISRVQAPAAHNRRLTGSGVKVAVLDTGISTHPDLNIRGGASFVPGEPSTQDGNGHGTHVAGTIAALNNSIGVLGVAPSAELYAVKVLGASGGGAISSIAQGLEWAGANGMHVANLSLGSPSPSATLEQAVNSATSRGVLVVAASGNSGAGSISYPARYANAMAVGATDQNNNRASFSQYGAGLDIVAPGVNVQSTYPGSTYFSLNGTSMATPHVAGAAVLVKQKNPSWSNVRIRNHLKNTATSLGSTNLYGSGLVNAEAATR

SEQ ID NO: 64292 - protein, 380 aa, Unidentified
VRSKKLWIVASTALLISVAFSSSIASAAEEAKEKYLIGFNEQEAVSEFVEQVEANDEVAILSEEEEVEIELLHEFETIPVLSVELSPEDVDALELDPAISYIEEDAEVTTMAQSVPWGISRVQAPAAHRRRLWGRGVKVAVLDTGISTHPDLNIRGGASFVPGEPSTQDGNGHGTHVAGTIAALDNSIGVLGVAPSAELYAVKVLGASGAGSVSSIAQGLEWAGANGMHVANLSLGSPSPSATLEQAVNSATSRGVLVVAASGNSGAGSISYPARYANAMAVGATDQNNNRASFSQYGAGLDIVAPGVNVQSTYPGSTYASLNGTSMATPHVAGAAALVKQKNPSWSNVQIRNRLKNTATSLGSTNLYGSGLVNAEAATR

SEQ ID NO: 64293 - protein, 380 aa, Unidentified
VRSKKLWIVASTALLISVAFSSSIASAAEEAKEKYLIGFNEQEAVSEFVEQVEANDEVAILSEEEEVEIELLHEFETIPVLSVELSPEDVDALELDPAISYIEEDAEVTTMAQSVPWGISRVQAPAAHRRRLWGRGVKVAVLDTGISTHPDLNIRGGASFVPGEPSTQDGNGHGTHVAGTIAALDNSIGVLGVAPSAELYAVKVLGASGAGSVSSIAQGLEWAGNNGMHVANLSLGSPSPSATLEQAVNSATSRGVLVVAASGNSGAGSISYPARYANAMAVGATDQNNNRASFSQYGAGLDIVAPGVNVQSTYPGSTYFSLNGTSMATPHVAGAAALVKQKNPSWSNVQIRNRLKNTATSLGSTNLYGSGLVNAEAATR

SEQ ID NO: 64294 - protein, 380 aa, Unidentified
VRSKKLWIVASTALLISVAFSSSIASAAEEAKEKYLIGFNEQEAVSEFVEQVEANDEVAILSEEEEVEIELLHEFETIPVLSVELSPEDVDALELDPAISYIEEDAEVTTMAQSVPWGISRVQAPAAHRRGLWGRGVKVAVLDTGISTHPDLNIRGGASFVPGEPSTQDGNGHGTHVAGTIAALDNSIGVLGVAPSAELYAVKVLGASGSGSVSSIAQGLEWAGANGMHVANLSLGSPSPSATLEQAVNSATSRGVLVVAASGNSGAGSISYPARYANAMAVGATDQNNNRASFSQYGAGLDIVAPGVNVQSTYPGSAYFSLNGTSMATPHVAGAAALVKQKNPSWSNVQIRNRLKNTATSLGSTNLYGSGLVNAEAATR

SEQ ID NO: 64295 - protein, 380 aa, Unidentified
VRSKKLWIVASTALLISVAFSSSIASAAEEAKEKYLIGFNEQEAVSEFVEQVEANDEVAILSEEEEVEIELLHEFETIPVLSVELSPEDVDALELDPAISYIEEDAEVTTMAQSVPWGISRVQAPAAHNRGLTGSGVKVAVLDTGISTHPDLNIRGGASFVPGEPSTQDGNGHGTHVAGTIAALDNRIGVLGVAPSAELYAVKVLGASGGGAISSIAQGLEWAGNNGMHVANLSLGSPSPSATLEQAVNSATSRGVLVVAASGNSGAGSISYPARYANAMAVGATDQNNNRASFSQYGAGLDIVAPGVNVQSTYPGSTYASLNGTSMATPHVAGAAVLVKQKNPSWSNVRIRNHLKNTATSLGSTNLYGSGLVRAEAATR

SEQ ID NO: 64296 - protein, 380 aa, Unidentified
VRSKKLWIVASTALLISVAFSSSIASAAEEAKEKYLIGFNEQEAVSEFVEQVEANDEVAILSEEEEVEIELLHEFETIPVLSVELSPEDVDALELDPAISYIEEDAEVTTMAQSVPWGISRVQAPAAHNRGLTGSGVKVAVLDTGISTHPDLNIRGGASFVPGEPSTQDGNGHGTHVAGTIAALNNSIGVLGVAPSAELYAVKVLGASGGGAISSIAQGLEWAGNNGMHVANLSLGSPSPSATLEQAVNSATSRGVLVVAASGNSGEGSISYPARYANAMAVGATDQNNNRASFSQYGAGLDIVAPGVNVQSTYPGSTYASLNGTSMATPHVAGAAVLVKQKNPSWSNVRIRDRLKNTATSLGSTNLYGSGLVNAEAATR

SEQ ID NO: 64297 - protein, 380 aa, Unidentified
VRSKKLWIVASTALLISVAFSSSIASAAEEAKEKYLIGFNEQEAVSEFVEQVEANDEVAILSEEEEVEIELLHEFETIPVLSVELSPEDVDALELDPAISYIEEDAEVTTMAQSVPWGISRVQAPAAHNRGLTGSGVKVAVLDTGISTHPDLRITGGASFVPGEPSTQDGNGHGTHVAGTIAALNNSIGVLGVAPSAELYAVKVLGASGGGAISSIAQGLEWAGNNGMHVANLSLGSPSPSATLEQAVNSATSRGVLVVAASGNSGAGSISYPARYANAMAVGATDQNNNRASFSQYGAGLDIVAPGVNVQSTYPGSTYASLNGTSMATPHVAGAAVLVKQKNPSWSNVRIRNRLKNTATSLGSTNLYGSGLVNAEAATR

SEQ ID NO: 64298 - protein, 380 aa, Unidentified
VRSKKLWIVASTALLISVAFSSSIASAAEEAKEKYLIGFNEQEAVSEFVEQVEANDEVAILSEEEEVEIELLHEFETIPVLSVELSPEDVDALELDPAISYIEEDAEVTTMAQSVPWGISRVQAPAAHNRGLTGSGVKVAVLDTGISTHPDLDIRGGASFVPGEPSTQDGNGHGTHVAGTIAALNNRIGVLGVAPSAELYAVKVLGASGGGAISSIAQGLEWAGNNGMHVANLSLGSPSPSATLEQAVNSATSRGVLVVAASGNSGAGSISYPARYANAMAVGATDQNNNRASFSQYGAGLDIVAPGVNVQSTYPGSTYASLNGTSMATPHVAGAAVLVKQKNPSWSNVRIRNRLKNTATSLGSTNLYGSGLVNAEAATR

SEQ ID NO: 64299 - protein, 380 aa, Unidentified
VRSKKLWIVASTALLISVAFSSSIASAAEEAKEKYLIGFNEQEAVSEFVEQVEANDEVAILSEEEEVEIELLHEFETIPVLSVELSPEDVDALELDPAISYIEEDAEVTTMAQSVPWGISRVQAPAAHNRGLTGSGVKVAVLDTGISTHPDLNIRGGASFVPGEPSTQDGNGHGTHVAGTIAALNNSIGVLGVAPSAELYAVKVLGASGGGAVSSIAQGLEWAGNNGMHVANLSLGSPSPSATLEQAVNSATSRGVLVVAASGNSGADSISYPARYANAMAVGATDQNNNRASFSQYGAGLDIVAPGVNVQSTYPGSTYASLNGTSMATPHVAGAAVLVKHKNPSWSNVRIRDHLKKTATSLGSTNLYGSGLVNAEAATR

SEQ ID NO: 64300 - protein, 380 aa, Unidentified
VRSKKLWIVASTALLISVAFSSSIASAAEEAKEKYLIGFNEQEAVSEFVEQVEANDEVAILSEEEEVEIELLHEFETIPVLSVELSPEDVDALELDPAISYIEEDAEVTTMAQSVPWGISRVQAPAAHNRGLTGSGVKVAVLDTGISTHPDLNIRGGASFVPGEPSTQDGNGHGTHVAGTIAALNNSIGVLGVAPSAELYAVKVLGASGGGAISSIARGLEWAGNNGMHVANLSLGSPSPSATLEQAVNSATSRGVLVVAASGNSGAGSISYPARYANAMAVGATDQNNNRASFSQYGAGLDIVAPGVNVQSTYPGPTYASLNGTSMATPHVAGAAVLVKQKNPSWSNVRIRNHLKNTATSLGSTNLYGSGLVNAVAATR

SEQ ID NO: 64301 - protein, 380 aa, Unidentified
VRSKKLWIVASTALLISVAFSSSIASAAEEAKEKYLIGFNEQEAVSEFVEQVEANDEVAILSEEEEVEIELLHEFETIPVLSVELSPEDVDALELDPAISYIEEDAEVTTMAQSVPWGISRVQAPAAHNRRLTGSGVKVAVLDTGISTHPDLNIRGGASFVPGEPSTQDGNGHGTHVAGTIAALNNRIGVLGVAPSAELYAVKVLGASGGGAISSIAQGLEWAGNNGMHVANLSLGSPSPSATLEQAVNSATSRGVLVVAASGNSGAGSISYPARYANAMAVGATDQNNNRASFSQYGAGLDIVAPGVNVQSTYPGSTYFSLNGTSMATPHVAGAAVLVKQKNPSWSNVRIRNHLKNTATSLGSTNLYGSGLVNAEAATR

SEQ ID NO: 64302 - protein, 380 aa, Unidentified
VRSKKLWIVASTALLISVAFSSSIASAAEEAKEKYLIGFNEQEAVSEFVEQVEANDEVAILSEEEEVEIELLHEFETIPVLSVELSPEDVDALELDPAISYIEEDAEVTTMAQSVPWGISRVQAPAAHRRGLTGRGVKVAVLDTGISTHPDLNIRGGASFVPGEPSTQDGNGHGTHVAGTIAALDNSIGVLGVAPSAELYAVKVLGASGAGSVSSIAQGLEWAGNNGMHVANLSLGSPSPSATLEQAVNSATSRGVLVVAASGNSGAGSISYPARYANAMAVGATDQNNNRASFSQYGAGLAIVAPGVNVQSTYPGSAYFSLNGTSMATPHVAGAAALVKQKNPSWSNVQIRNRLKNTATSLGSTNLYGSGLVNAEAATR

SEQ ID NO: 64303 - protein, 380 aa, Unidentified
VRSKKLWIVASTALLISVAFSSSIASAAEEAKEKYLIGFNEQEAVSEFVEQVEANDEVAILSEEEEVEIELLHEFETIPVLSVELSPEDVDALELDPAISYIEEDAEVTTMAQSVPWGISRVQAPAAHNRGLTGSGVRVAVLDTGISTHPDLRIRGGASFVPGEPSTQDGNGHGTHVAGTIAALNNSIGVLGVAPSAELYAVKVLGASGGGAISSIAQGLEWAGNNGMHVANLSLGSPSPSATLEQAVNSATSRGVLVVAASGNSGAGSISYPARYANAMAVGATDQNNNRASFSQYGAGLDIVAPGVNVQSTYPGSTYASLNGTSMATPHVAGAAVLVKQKNPSWSNVRIRNHLKNTATSLGSTNLYGSGLVRAEAATR

SEQ ID NO: 64304 - protein, 380 aa, Unidentified
VRSKKLWIVASTALLISVAFSSSIASAAEEAKEKYLIGFNEQEAVSEFVEQVEANDEVAILSEEEEVEIELLHEFETIPVLSVELSPEDVDALELDPAISYIEEDAEVTTMAQSVPWGISRVQAPAAHNRGLTGSGVKVAVLDTGISTHPDLNIRGGASFVPGEPSTQDGNGHGTHVAGTIAALNNSIGVLGVAPSAELYAVKVLGASGGGALSSIAQGLEWAGNNGMHVANLSLGSPSPSATLEQAVNSATSRGVLVVAASGNSGADSISYPARYANAMAVGATDQNNNRASFSQYGAGLDIVAPGVNVQSTYPGSTYASLNGTSMATPHVAGAAVLVKHKNPSWSNVRIRDHLKNTATSLGSTNLYGSGLVNAEAATR

SEQ ID NO: 64305 - protein, 380 aa, Unidentified
VRSKKLWIVASTALLISVAFSSSIASAAEEAKEKYLIGFNEQEAVSEFVEQVEANDEVAILSEEEEVEIELLHEFETIPVLSVELSPEDVDALELDPAISYIEEDAEVTTMAQSVPWGISRVQAPAAHNRGLTGSGVKVAVLDTGISTHPDLRIRGGASFVPGEPSTQDGNGHGTHVAGTIAALNNRIGVLGVAPSAELYAVKVLGASGGGAISSIAQGLEWAGNNGMHVANLSLGSPSPSATLEQAVNSATSRGVLVVAASGNSGAGSISYPARYANAMAVGATDQNNNRASFSQYGAGLDIVAPGVNVQSTYPGSTYASENGTSMATPHVAGAAVLVKQKNPSWSNVRIRNHLKNTATSLGSTNLYGSGLVNAEAATR

SEQ ID NO: 64306 - protein, 380 aa, Unidentified
VRSKKLWIVASTALLISVAFSSSIASAAEEAKEKYLIGFNEQEAVSEFVEQVEANDEVAILSEEEEVEIELLHEFETIPVLSVELSPEDVDALELDPAISYIEEDAEVTTMAQSVPWGISRVQAPAAHNRGLTGSGVKVAVLDTGISTHPDLNIRGGASFVPGEPSTQDGNGHGTHVAGTIAALNNSIGVLGVAPSAELYAVKVLGASGGGALSSIAQGLEWAGNNGMHVANLSLGSPSPSATLEQAVNSATSRGVLVVAASGNSGADSISYPARYANAMAVGATDQNNNRASFSQYGAGLDIVAPGVNVQSTYPGSTYASLNGTSMATPHVAGAAVLVKQKNPSWSNVRIRDHLKKTATSLGSTNLYGSGLVNAEAATR

SEQ ID NO: 64307 - protein, 380 aa, Unidentified
VRSKKLWIVASTALLISVAFSSSIASAAEEAKEKYLIGFNEQEAVSEFVEQVEANDEVAILSEEEEVEIELLHEFETIPVLSVELSPEDVDALELDPAISYIEEDAEVTTMAQSVPWGISRVQAPAAHNRRLTGSGVKVAVLDTGISTHPDLNIRGGASFVPGEPSTQDGNGHGTHVAGTIAALNNSIGVLGVAPSAELYAVKVLGASGGGAISSIAQGLEWAGNNGMHVANLSLGSPSPSATLEQAVNSATSRGVLVVAASGNSGAGSISYPARYANAMAVGATDQNNNRASFSQYGAGLDIVAPGVNVQSTYPGSAYFSLNGTSMATPHVAGAAVLVKQKNPSWSNVRIRNHLKNTATSLGSTNLYGSGLVNAEAATR

SEQ ID NO: 64308 - protein, 380 aa, Unidentified
VRSKKLWIVASTALLISVAFSSSIASAAEEAKEKYLIGFNEQEAVSEFVEQVEANDEVAILSEEEEVEIELLHEFETIPVLSVELSPEDVDALELDPAISYIEEDAEVTTMAQSVPWGISRVQAPAAHRRGLWGRGVKVAVLDTGISTHPDLNIRGGASFVPGEPSTQDGNGHGTHVAGTIAALDNSIGVLGVAPSAELYAVKVLGASGAGSVSSIAQGLEWAGNNGMHVANLSLGSPSPSATLEQAVNSATSRGVLVVAASGNSGAGSISYPARYANAMAVGATDQNNNRASFSQYGAGLDIVAPGVNVQSTYPGSAYFSLNGTSMATPHVAGAAALVKQKNPSWSNVQIRNRLKNTATSLGSTNLYGSGLVNAEAATR

SEQ ID NO: 64309 - protein, 380 aa, Unidentified
VRSKKLWIVASTALLISVAFSSSIASAAEEAKEKYLIGFNEQEAVSEFVEQVEANDEVAILSEEEEVEIELLHEFETIPVLSVELSPEDVDALELDPAISYIEEDAEVTTMAQSVPWGISRVQAPAAHRRRLTGRGVKVAVLDTGISTHPDLNIRGGASFVPGEPSTQDGNGHGTHVAGTIAALDNSIGVLGVAPSAELYAVKVLGASGAGSVSSIAQGLEWAGNNGMHVANLSLGSPSPSATLEQAVNSATSRGVLVVAASGNSGAGSISYPARYANAMAVGATDQDNNRASFSQYGAGLDLVAPGVNVQSTYPGSTYASLNGTSMATPHVAGAAALVKQKNPSWSNVQIRNRLKNTATSLGSTNLYGSGLVNAEAATR

SEQ ID NO: 64310 - protein, 380 aa, Unidentified
VRSKKLWIVASTALLISVAFSSSIASAAEEAKEKYLIGFNEQEAVSEFVEQVEANDEVAILSEEEEVEIELLHEFETIPVLSVELSPEDVDALELDPAISYIEEDAEVTTMAQSVPWGISRVQAPAAHRRGLWGRGVKVAVLDTGISTHPDLNIRGGASFVPGEPSTQDGNGHGTHVAGTIAALDNSIGVLGVAPSAELYAVKVLGASGAGSVSSIAQGLEWAGANGMHVANLSLGSPSPSATLEQAVNSATSRGVLVVAASGNSGAGSISYPARYANAMAVGATDQNNNRASFSQYGAGLDLVAPGVNVQSTYPGSTYASLNGTSMATPHVAGAAALVKQKNPSWSNVQIRNRLKNTATSLGSTNLYGSGLVNAEAATR

SEQ ID NO: 64311 - protein, 380 aa, Unidentified
VRSKKLWIVASTALLISVAFSSSIASAAEEAKEKYLIGFNEQEAVSEFVEQVEANDEVAILSEEEEVEIELLHEFETIPVLSVELSPEDVDALELDPAISYIEEDAEVTTMAQSVPWGISRVQAPAAHNRKLTASGVKVAVLDTGISTHPDLWIRGGASFVPGEPSTQDGNGHGTHVAGTIAALNNSIGVLGVAPSAELYAVKVLGASGSGSVSSIAQGLEWAGNNRMHVANLSLGIESPSATLEQAVNSATSRGVLVVAASGNSGADSISYPARYANAMAVGATDQNNNRADFSQYGAGLDIVAPGVNVQSTYPGSTYASLNGTSMATPHVAGAAALVKQKNPSWSNVQIRNHLKNTATSLGSTNLYGSGLVNAEAATR

SEQ ID NO: 64312 - protein, 380 aa, Unidentified
VRSKKLWIVASTALLISVAFSSSIASAAEEAKEKYLIGFNEQEAVSEFVEQVEANDEVAILSEEEEVEIELLHEFETIPVLSVELSPEDVDALELDPAISYIEEDAEVTTMAQSVPWGISRVQAPAAHRRGLTGRGVKVAVLDTGISTHPDLNIRGGASFVPGEPSTQDGNGHGTHVAGTIAALDNSIGVLGVAPSAELYAVKVLGASGAGSVSSIAQGLEWAGANGMHVANLSLGSPSPSATLEQAVNSATSRGVLVVAASGNSGAGSISYPARYANAMAVGATDQDNNRASFSQYGAGLDIVAPGVNVQSTYPGSAYASLNGTSMATPHVAGAAALVKQKNPSWSNVQIRNRLKNTATSLGSTNLYGSGLVNAEAATR

SEQ ID NO: 64313 - protein, 380 aa, Unidentified
VRSKKLWIVASTALLISVAFSSSIASAAEEAKEKYLIGFNEQEAVSEFVEQVEANDEVAILSEEEEVEIELLHEFETIPVLSVELSPEDVDALELDPAISYIEEDAEVTTMAQSVPWGISRVQAPAAHNRGLTGSGVKVAVLDTGISTHPDLNIRGGASFVPGEPSTQDGNGHGTHVAGTIAALNNSIGVLGVAPSAELYAVKVLGASGGGSISSIAQGLEWAGNNGMHVANLSLGSPSPSATLEQAVNSATSRGVLVVAASGNSGADSISYPARYANAMAVGATDQNNNRASFSQYGAGLDIVAPGVNVQSTYPGSTYASLNGTSMATPHVAGAAVLVKHKNPSWSNVRIRDHLKKTATSLGSTNLYGSGLVNAEAATR

SEQ ID NO: 64314 - protein, 380 aa, Unidentified
VRSKKLWIVASTALLISVAFSSSIASAAEEAKEKYLIGFNEQEAVSEFVEQVEANDEVAILSEEEEVEIELLHEFETIPVLSVELSPEDVDALELDPAISYIEEDAEVTTMAQSVPWGISRVQAPAAHRRGLTGRGVKVAVLDTGISTHPDLNIRGGASFVPGEPSTQDGNGHGTHVAGTIAALDNSIGVLGVAPSAELYAVKVLGASGAGSVSSIAQGLEWAGNNGMHVANLSLGSPSPSATLEQAVNSATSRGVLVVAASGNSGAGSISYPARYANAMAVGATDQNNNRASFSQYGAGLDLVAPGVNVQSTYPQSTYFSLNGTSMATPHVAGAAALVKQKNPSWSNVQIRNRLKNTATSLGSTNLYGSGLVNAEAATR

SEQ ID NO: 64315 - protein, 380 aa, Unidentified
VRSKKLWIVASTALLISVAFSSSIASAAEEAKEKYLIGFNEQEAVSEFVEQVEANDEVAILSEEEEVEIELLHEFETIPVLSVELSPEDVDALELDPAISYIEEDAEVTTMAQSVPWGISRVQAPAAHRRGLWGRGVKVAVLDTGISTHPDLNIRGGASFVPGEPSTQDGNGHGTHVAGTIAALDNSIGVLGVAPSAELYAVKVLGASGAGSVSSIAQGLEWAGANGMHVANLSLGSPSPSATLEQAVNSATSRGVLVVAASGNSGAGSISYPARYANAMAVGATDQNNNRASFSQYGAGLDIVAPGVNVQSTYPQSTYASLNGTSMATPHVAGAAALVKQKNPSWSNVQIRNRLKNTATSLGSTNLYGSGLVNAEAATR

SEQ ID NO: 64316 - protein, 380 aa, Unidentified
VRSKKLWIVASTALLISVAFSSSIASAAEEAKEKYLIGFNEQEAVSEFVEQVEANDEVAILSEEEEVEIELLHEFETIPVLSVELSPEDVDALELDPAISYIEEDAEVTTMAQSVPWGISRVQAPAAHRRGLTGSGVKVAVLDTGISTHPDLNITGGASFVPGEPSTQDGNGHGTHVAGTIAALDNSIGVLGVAPSAELYAVKVLGASGGGAISSIAQGLEWAGNNGMHVANLSLGSPSPSATLEQAVNSATSRGVLVVAASGNSGAGSISYPARYANAMAVGATDQNNNRASFSQYGAGLDIVAPGVNVQSTYPGSTYASLNGTSMATPHVAGAAVLVKQKNPSWSNVRIRNHLKNTATSLGSTNLYGSGLVNAEAATR

SEQ ID NO: 64317 - protein, 380 aa, Unidentified
VRSKKLWIVASTALLISVAFSSSIASAAEEAKEKYLIGFNEQEAVSEFVEQVEANDEVAILSEEEEVEIELLHEFETIPVLSVELSPEDVDALELDPAISYIEEDAEVTTMAQSVPWGISRVQAPAAHNRGLTGSGVKVAVLDTGISTHPDLNIRGGASFVPGEPSTQDGNGHGTHVAGTIAALNNSIGVLGVAPSAELYAVKVLGASGGGAISSIAQGLEWAGNNGMHVANLSLGSPSPSATLEQAVNSATSRGVIVVAASGNSGAESISYPARYANAMAVGATDQNNNRASFSQYGAGLDIVAPGVNVQSTYPGSTYASLNGTSMATPHVAGAAVLVKQKNPSWSNVRIRDHLKNTATSLGSTNLYGSGLVNAEAATR

SEQ ID NO: 64318 - protein, 380 aa, Unidentified
VRSKKLWIVASTALLISVAFSSSIASAAEEAKEKYLIGFNEQEAVSEFVEQVEANDEVAILSEEEEVEIELLHEFETIPVLSVELSPEDVDALELDPAISYIEEDAEVTTMAQSVPWGISRVQAPAAHNRGLTGSGVKVAVLDTGISTHPDLRIRGGASFVPGEPSTQDGNGHGTHVAGTIAALDNSIGVLGVAPSAELYAVKVLGASGGGAISSIAQGLEWAGNNGMHVANLSLGSPSPSATLEQAVNSATSRGVLVVAASGNSGAGSISYPARYANAMAVGATDQNNNRASFSQYGAGLDIVAPGVNVQSTYPGSTYASLNGTSMATPHVAGAAVLVKQKNPSWSNVRIRNHLKNTATSLGSTNLYGSGLVRAEAATR

SEQ ID NO: 64319 - protein, 380 aa, Unidentified
VRSKKLWIVASTALLISVAFSSSIASAAEEAKEKYLIGFNEQEAVSEFVEQVEANDEVAILSEEEEVEIELLHEFETIPVLSVELSPEDVDALELDPAISYIEEDAEVTTMAQSVPWGISRVQAPAAHRRGLTGRGVKVAVLDTGISTHPDLNIRGGASFVPGEPSTQDGNGHGTHVAGTIAALDNSIGVLGVAPSAELYAVKVLGASGAGSVSSIAQGLEWAGANGMHVANLSLGSPSPSATLEQAVNSATSRGVLVVAASGNSGAGSISYPARYANAMAVGATDQNNNRASFSQYGAGLDLVAPGVNVQSTYPQSTYASLNGTSMATPHVAGAAALVKQKNPSWSNVQIRNRLKNTATSLGSTNLYGSGLVNAEAATR

SEQ ID NO: 64320 - protein, 380 aa, Unidentified
VRSKKLWIVASTALLISVAFSSSIASAAEEAKEKYLIGFNEQEAVSEFVEQVEANDEVAILSEEEEVEIELLHEFETIPVLSVELSPEDVDALELDPAISYIEEDAEVTTMAQSVPWGISRVQAPAAHNRRLTGRGVKVAVLDTGISIHPDLRITGGASFVPGEPSTQDGNGHGTHVAGTIAALDNSIGVLGVAPSAELYAVKVLGASGSGSVSSIAQGLEWAGNNGMHVANLSLGSPSPSATLEQAVNSATSRGVLVVAASGNSGAGSISYPARYANAMAVGATDQNNNRASFSQYGAGLDIVAPGVNVQSTYPGSTYASLNGTSMATPHVAGAAALVKQKNPSWRNVQIRNRLKNTATSLGSTNLYGSGLVNAEAATR

SEQ ID NO: 64321 - protein, 380 aa, Unidentified
VRSKKLWIVASTALLISVAFSSSIASAAEEAKEKYLIGFNEQEAVSEFVEQVEANDEVAILSEEEEVEIELLHEFETIPVLSVELSPEDVDALELDPAISYIEEDAEVTTMAQSVPWGISRVQAPAAHNRRLTGRGVKVAVLDTGISTHPDLNITGGASFVPGEPSTQDGNGHGTHVAGTIAALNNSIGVLGVAPSAELYAVKVLGASGGGAISSIAQGLEWAGNNGMHVANLSLGSPSPSATLEQAVNSATSRGVLVVAASGNSGAGSISYPARYANAMAVGATDQNNNRASFSQYGAGLDIVAPGVNVQSTYPGSTYASLNGTSMATPHVAGAAVLVKQKNPSWSNVRIRNHLKNTATSLGSTNLYGSGLVNAEAATR

SEQ ID NO: 64322 - protein, 380 aa, Unidentified
VRSKKLWIVASTALLISVAFSSSIASAAEEAKEKYLIGFNEQEAVSEFVEQVEANDEVAILSEEEEVEIELLHEFETIPVLSVELSPEDVDALELDPAISYIEEDAEVTTMAQSVPWGISRVQAPAAHNRGLTGSGVKVAVLDTGISTHPDLNIRGGASFVPGEPSTQDGNGHGTHVAGTIAALNNSIGVLGVAPSAELYAVKVLGASGGGAISSIAQGLEWAGNNGMHVANLSLGSPSPSATLEQAVNSATSRGVLVVAASGNSGAGSISYPARYANAMAVGATDQNNNRADFSQYGAGLDIVAPGVNVQSTYPGSTYASLNGTSMATPHVAGAAVLVKQKRPSWSNVRIRDHLKNTATSLGSTNLYGSGLVNAEAATR

SEQ ID NO: 64323 - protein, 380 aa, Unidentified
VRSKKLWIVASTALLISVAFSSSIASAAEEAKEKYLIGFNEQEAVSEFVEQVEANDEVAILSEEEEVEIELLHEFETIPVLSVELSPEDVDALELDPAISYIEEDAEVTTMAQSVPWGISRVQAPAAHNRRLWGSGVKVAVLDTGISTHPDLNIRGGASFVPGEPSTQDGNGHGTHVAGTIAALNNSIGVLGVAPSAELYAVKVLGASGGGAISSIAQGLEWAGNNGMHVANLSLGSPSPSATLEQAVNSATSRGVLVVAASGNSGAGSISYPARYANAMAVGATDQDNNRASFSQYGAGLDIVAPGVNVQSTYPGSTYASLNGTSMATPHVAGAAVLVKQKNPSWSNVRIRNHLKNTATSLGSTNLYGSGLVNAEAATR

SEQ ID NO: 64324 - protein, 380 aa, Unidentified
VRSKKLWIVASTALLISVAFSSSIASAAEEAKEKYLIGFNEQEAVSEFVEQVEANDEVAILSEEEEVEIELLHEFETIPVLSVELSPEDVDALELDPAISYIEEDAEVTTMAQSVPWGISRVQAPAAHRRGLTGRGVKVAVLDTGISTHPDLDIRGGASFVPGEPSTQDGNGHGTHVAGTIAALNNSIGVLGVAPSAELYAVKVLGASGGGAISSIAQGLEWAGNNGMHVANLSLGSPSPSATLEQAVNSATSRGVLVVAASGNSGAGSISYPARYANAMAVGATDQNNNRASFSQYGAGLDIVAPGVNVQSTYPGSTYASLNGTSMATPHVAGAAVLVKQKNPSWSNVRIRNHLKNTATSLGSTNLYGSGLVNAEAATR

SEQ ID NO: 64325 - protein, 380 aa, Unidentified
VRSKKLWIVASTALLISVAFSSSIASAAEEAKEKYLIGFNEQEAVSEFVEQVEANDEVAILSEEEEVEIELLHEFETIPVLSVELSPEDVDALELDPAISYIEEDAEVTTMAQSVPWGISRVQAPAAHRRGLTGRGVKVAVLDTGISTHPDLNIRGGASFVPGEPSTQDGNGHGTHVAGTIAALDNSIGVLGVAPSAELYAVKVLGASGAGSVSSIAQGLEWAGNNGMHVANLSLGSPSPSATLEQAVNSATSRGVLVVAASGNSGAGSISYPARYANAMAVGATDQDNNRASFSQYGAGLDLVAPGVNVQSTYPGSTYFSLNGTSMATPHVAGAAALVKQKNPSWSNVQIRNRLKNTATSLGSTNLYGSGLVNAEAATR

SEQ ID NO: 64326 - protein, 380 aa, Unidentified
VRSKKLWIVASTALLISVAFSSSIASAAEEAKEKYLIGFNEQEAVSEFVEQVEANDEVAILSEEEEVEIELLHEFETIPVLSVELSPEDVDALELDPAISYIEEDAEVTTMAQSVPWGISRVQAPAAHNRRLTGSGVKVAVLDTGISTHPDLNIRGGASFVPGEPSTQDGNGHGTHVAGTIAALDNSIGVLGVAPSAELYAVKVLGASGGGAISSIAQGLEWAGNNGMHVANLSLGSPSPSATLEQAVNSATSRGVLVVAASGNSGAGSISYPARYANAMAVGATDQNNNRASFSQYGAGLDIVAPGVNVQSTYPGSTYASLNGTSMATPHVAGAAVLVKQKNPSWSNVRIRNHLKNTATSLGSTNLYGSGLVRAEAATR

SEQ ID NO: 64327 - protein, 380 aa, Unidentified
VRSKKLWIVASTALLISVAFSSSIASAAEEAKEKYLIGFNEQEAVSEFVEQVEANDEVAILSEEEEVEIELLHEFETIPVLSVELSPEDVDALELDPAISYIEEDAEVTTMAQSVPWGISRVQAPAAHRRRLWGRGVKVAVLDTGISTHPDLNIRGGASFVPGEPSTQDGNGHGTHVAGTIAALDNSIGVLGVAPSAELYAVKVLGASGAGSVSSIAQGLEWAGNNGMHVANLSLGSPSPSATLEQAVNSATSRGVLVVAASGNSGAGSISYPARYANAMAVGATDQDNNRASFSQYGAGLDIVAPGVNVQSTYPGSTYASLNGTSMATPHVAGAAALVKQKNPSWSNVQIRNRLKNTATSLGSTNLYGSGLVNAEAATR

SEQ ID NO: 64328 - protein, 380 aa, Unidentified
VRSKKLWIVASTALLISVAFSSSIASAAEEAKEKYLIGFNEQEAVSEFVEQVEANDEVAILSEEEEVEIELLHEFETIPVLSVELSPEDVDALELDPAISYIEEDAEVTTMAQSVPWGISRVQAPAAHNRGLTGSGVKVAVLDTGISTHPDLNIRGGASFVPGEPSTQDGNGHGTHVAGTIAALNNSIGVLGVAPSAELYAVKVLGASGAGALSSIAQGLEWAGNNGMHVANLSLGSPSPSATLEQAVNSATSRGVLVVAASGNSGAESISYPARYANAMAVGATDQNNNRASFSQYGAGLDIVAPGVNVQSTYPGSTYASLNGTSMATPHVAGAAVLVKQKNPSWSNVRIRDRLKNTATSLGSTNLYGSGLVNAEAATR

SEQ ID NO: 64329 - protein, 380 aa, Unidentified
VRSKKLWIVASTALLISVAFSSSIASAAEEAKEKYLIGFNEQEAVSEFVEQVEANDEVAILSEEEEVEIELLHEFETIPVLSVELSPEDVDALELDPAISYIEEDAEVTTMAQSVPWGISRVQAPAAHRRGLTGSGVKVAVLDTGISTHPDLNIRGGASFVPGEPSTQDGNGHGTHVAGTIAALDNSIGVLGVAPSAELYAVKVLGASGGGAISSIAQGLEWAGNNGMHVANLSLGSPSPSATLEQAVNSATSRGVLVVAASGNSGAGSISYPARYANAMAVGATDQNNNRASFSQYGAGLDIVAPGVNVQSTYPGSTYASLNGTSMATPHVAGAAVLVKQKNPSWSNVRIRNRLKNTATSLGSTNLYGSGLVNAEAATR

SEQ ID NO: 64330 - protein, 380 aa, Unidentified
VRSKKLWIVASTALLISVAFSSSIASAAEEAKEKYLIGFNEQEAVSEFVEQVEANDEVAILSEEEEVEIELLHEFETIPVLSVELSPEDVDALELDPAISYIEEDAEVTTMAQSVPWGISRVQAPAAHRRGLTGRGVKVAVLDTGISTHPDLNIRGGASFVPGEPSTQDGNGHGTHVAGTIAALDNSIGVLGVAPSAELYAVKVLGASGAGSVSSIAQGLEWAGNNGMHVANLSLGSPSPSATLEQAVNSATSRGVLVVAASGNSGAGSISYPARYANAMAVGATDQDNNRASFSQYGAGLDIVAPGVNVQSTYPGSAYFSLNGTSMATPHVAGAAALVKQKNPSWSNVQIRNRLKNTATSLGSTNLYGSGLVNAEAATR

SEQ ID NO: 64331 - protein, 380 aa, Unidentified
VRSKKLWIVASTALLISVAFSSSIASAAEEAKEKYLIGFNEQEAVSEFVEQVEANDEVAILSEEEEVEIELLHEFETIPVLSVELSPEDVDALELDPAISYIEEDAEVTTMAQSVPWGISRVQAPAAHNRGLTGSGVKVAVLDTGISTHPDLNITGGASFVPGEPSTQDGNGHGTHVAGTIAALDNSIGVLGVAPSAELYAVKVLGASGGGAISSIAQGLEWAGNNGMHVANLSLGSPSPSATLEQAVNSATSRGVLVVAASGNSGAGSISYPARYANAMAVGATDQNNNRASFSQYGAGLDIVAPGVNVQSTYPGSTYASLNGTSMATPHVAGAAVLVKQKNPSWSNVRIRNHLKNTATSLGSTNLYGSGLVRAEAATR

SEQ ID NO: 64332 - protein, 380 aa, Unidentified
VRSKKLWIVASTALLISVAFSSSIASAAEEAKEKYLIGFNEQEAVSEFVEQVEANDEVAILSEEEEVEIELLHEFETIPVLSVELSPEDVDALELDPAISYIEEDAEVTTMAQSVPWGISRVQAPAAHRRGLTGRGVKVAVLDTGISTHPDLNIRGGASFVPGEPSTQDGNGHGTHVAGTIAALDNSIGVLGVAPSAELYAVKVLGASGSGSVSSIAQGLEWAGANGMHVANLSLGSPSPSATLEQAVNSATSRGVLVVAASGNSGAGSISYPARYANAMAVGATDQNNNRASFSQYGAGLDLVAPGVNVQSTYPGSTYFSLNGTSMATPHVAGAAALVKQKNPSWSNVQIRNRLKNTATSLGSTNLYGSGLGNAEAATR

SEQ ID NO: 64333 - protein, 380 aa, Unidentified
VRSKKLWIVASTALLISVAFSSSIASAAEEAKEKYLIGFNEQEAVSEFVEQVEANDEVAILSEEEEVEIELLHEFETIPVLSVELSPEDVDALELDPAISYIEEDAEVTTMAQSVPWGISRVQAPAAHNRRLTGSGVKVAVLDTGISTHPDLNIRGGASFVPGEPSTQDGNGHGTHVAGTIAALNNSIGVLGVAPSAELYAVKVLGASGGGAISSIAQGLEWAGANGMHVANLSLGSPSPSATLEQAVNSATSRGVLVVAASGNSGAGSISYPARYANAMAVGATDQNNNRASFSQYGAGLDIVAPGVNVQSTYPQSTYASLNGTSMATPHVAGAAVLVKQKNPSWSNVRIRNHLKNTATSLGSTNLYGSGLVNAEAATR

SEQ ID NO: 64334 - protein, 380 aa, Unidentified
VRSKKLWIVASTALLISVAFSSSIASAAEEAKEKYLIGFNEQEAVSEFVEQVEANDEVAILSEEEEVEIELLHEFETIPVLSVELSPEDVDALELDPAISYIEEDAEVTTMAQSVPWGISRVQAPAAHNRRLTGRGVKVAVLDTGISTHPDLNIRGGASFVPGEPSTQDGNGHGTHVAGTIAALDNSIGVLGVAPSAELYAVKVLGASGGGAISSIAQGLEWAGNNGMHVANLSLGSPSPSATLEQAVNSATSRGVLVVAASGNSGAGSISYPARYANAMAVGATDQNNNRASFSQYGAGLDIVAPGVNVQSTYPGSTYASLNGTSMATPHVAGAAVLVKQKNPSWSNVRIRNHLKNTATSLGSTNLYGSGLVNAEAATR

SEQ ID NO: 64335 - protein, 380 aa, Unidentified
VRSKKLWIVASTALLISVAFSSSIASAAEEAKEKYLIGFNEQEAVSEFVEQVEANDEVAILSEEEEVEIELLHEFETIPVLSVELSPEDVDALELDPAISYIEEDAEVTTMAQSVPWGISRVQAPAAHRRRLWGRGVKVAVLDTGISTHPDLNIRGGASFVPGEPSTQDGNGHGTHVAGTIAALDNSIGVLGVAPSAELYAVKVLGASGSGSVSSIAQGLEWAGNNGMHVANLSLGSPSPSATLEQAVNSATSRGVLVVAASGNSGAGSISYPARYANAMAVGATDQNNNRASFSQYGAGLDLVAPGVNVQSTYPGSAYASLNGTSMATPHVAGAAALVKQKNPSWSNVQIRNRLKNTATSLGSTNLYGSGLVNAEAATR

SEQ ID NO: 64336 - protein, 380 aa, Unidentified
VRSKKLWIVASTALLISVAFSSSIASAAEEAKEKYLIGFNEQEAVSEFVEQVEANDEVAILSEEEEVEIELLHEFETIPVLSVELSPEDVDALELDPAISYIEEDAEVTTMAQSVPWGISRVQAPAAHRRGLWGRGVKVAVLDTGISTHPDLNIRGGASFVPGEPSTQDGNGHGTHVAGTIAALDNSIGVLGVAPSAELYAVKVLGASGSGSVSSIAQGLEWAGANGMHVANLSLGSPSPSATLEQAVNSATSRGVLVVAASGNSGAGSISYPARYANAMAVGATDQDNNRASFSQYGAGLDIVAPGVNVQSTYPQSTYASLNGTSMATPHVAGAAALVKQKNPSWSNVQIRNRLKNTATSLGSTNLYGSGLVNAEAATR

SEQ ID NO: 64337 - protein, 380 aa, Unidentified
VRSKKLWIVASTALLISVAFSSSIASAAEEAKEKYLIGFNEQEAVSEFVEQVEANDEVAILSEEEEVEIELLHEFETIPVLSVELSPEDVDALELDPAISYIEEDAEVTTMAQSVPWGISRVQAPAAHRRGLWGRGVKVAVLDTGISTHPDLNIRGGASFVPGEPSTQDGNGHGTHVAGTIAALDNSIGVLGVAPSAELYAVKVLGASGAGSVSSIAQGLEWAGNNGMHVANLSLGSPSPSATLEQAVNSATSRGVLVVAASGNSGAGSISYPARYANAMAVGATDQNNNRASFSQYGAGLDLVAPGVNVQSTYPGSTYFSLNGTSMATPHVAGAAALVKQKNPSWSNVQIRNRLKNTATSLGSTNLYGSGLVNAEAATR

SEQ ID NO: 64338 - protein, 380 aa, Unidentified
VRSKKLWIVASTALLISVAFSSSIASAAEEAKEKYLIGFNEQEAVSEFVEQVEANDEVAILSEEEEVEIELLHEFETIPVLSVELSPEDVDALELDPAISYIEEDAEVTTMAQSVPWGISRVQAPAAHNRGLTGRGVKVAVLDTGISTHPDLNIRGGASFVPGEPSTQDGNGHGTHVAGTIAALNNSIGVLGVAPSAELYAVKVLGASGGGAISSIAQGLEWAGNNGMHVANLSLGSPSPSATLEQAVNSATSRGVIVVAASGNSGAGSISYPARYANAMAVGATDQNNNRASFSQYGAGLDIVAPGVNVQSTYPGSTYASLNGTSMATPHVAGAAVLVKQKNPSWSNVRIRDHLKNTATSLGSTNLYGSGLVNAEAATR

SEQ ID NO: 64339 - protein, 380 aa, Unidentified
VRSKKLWIVASTALLISVAFSSSIASAAEEAKEKYLIGFNEQEAVSEFVEQVEANDEVAILSEEEEVEIELLHEFETIPVLSVELSPEDVDALELDPAISYIEEDAEVTTMAQSVPWGISRVQAPAAHRRGLWGRGVKVAVLDTGISTHPDLNIRGGASFVPGEPSTQDGNGHGTHVAGTIAALDNSIGVLGVAPSAELYAVKVLGASGSGSVSSIAQGLEWAGNNGMHVANLSLGSPSPSATLEQAVNSATSRGVLVVAASGNSGAGSISYPARYANAMAVGATDQNNNRASFSQYGAGLDLVAPGVNVQSTYPQSAYASLNGTSMATPHVAGAAALVKQKNPSWSNVQIRNRLKNTATSLGSTNLYGSGLVNAEAATR

SEQ ID NO: 64340 - protein, 380 aa, Unidentified
VRSKKLWIVASTALLISVAFSSSIASAAEEAKEKYLIGFNEQEAVSEFVEQVEANDEVAILSEEEEVEIELLHEFETIPVLSVELSPEDVDALELDPAISYIEEDAEVTTMAQSVPWGISRVQAPAAHNRRLTGSGVKVAVLDTGISTHPDLDIRGGASFVPGEPSTQDGNGHGTHVAGTIAALNNSIGVLGVAPSAELYAVKVLGASGGGAISSIAQGLEWAGNNGMHVANLSLGSPSPSATLEQAVNSATSRGVLVVAASGNSGAGSISYPARYANAMAVGATDQNNNRASFSQYGAGLDIVAPGVNVQSTYPGSTYASLNGTSMATPHVAGAAVLVKQKNPSWSNVRIRNHLKNTATSLGSTNLYGSGLVRAEAATR

SEQ ID NO: 64341 - protein, 380 aa, Unidentified
VRSKKLWIVASTALLISVAFSSSIASAAEEAKEKYLIGFNEQEAVSEFVEQVEANDEVAILSEEEEVEIELLHEFETIPVLSVELSPEDVDALELDPAISYIEEDAEVTTMAQSVPWGISRVQAPAAHNRRLTGSGVKVAVLDTGISTHPDLNIRGGASFVPGEPSTQDGNGHGTHVAGTIAALNNSIGVLGVAPSAELYAVKVLGASGAGAISSIAQGLEWAGNNGMHVANLSLGSPSPSATLEQAVNSATSRGVLVVAASGNSGAGSISYPARYANAMAVGATDQNNNRASFSQYGAGLDIVAPGVNVQSTYPGSAYFSLNGTSMATPHVAGAAVLVKQKNPSWSNVRIRNHLKNTATSLGSTNLYGSGLVNAEAATR

SEQ ID NO: 64342 - protein, 380 aa, Unidentified
VRSKKLWIVASTALLISVAFSSSIASAAEEAKEKYLIGFNEQEAVSEFVEQVEANDEVAILSEEEEVEIELLHEFETIPVLSVELSPEDVDALELDPAISYIEEDAEVTTMAQSVPWGISRVQAPAAHNRRLWGSGVKVAVLDTGISTHPDLNIRGGASFVPGEPSTQDGNGHGTHVAGTIAALNNSIGVLGVAPSAELYAVKVLGASGAGAISSIAQGLEWAGNNGMHVANLSLGSPSPSATLEQAVNSATSRGVLVVAASGNSGAGSISYPARYANAMAVGATDQNNNRASFSQYGAGLDIVAPGVNVQSTYPGSTYFSLNGTSMATPHVAGAAVLVKQKNPSWSNVRIRNHLKNTATSLGSTNLYGSGLVNAEAATR

SEQ ID NO: 64343 - protein, 380 aa, Unidentified
VRSKKLWIVASTALLISVAFSSSIASAAEEAKEKYLIGFNEQEAVSEFVEQVEANDEVAILSEEEEVEIELLHEFETIPVLSVELSPEDVDALELDPAISYIEEDAEVTTMAQSVPWGISRVQAPAAHRRGLWGRGVKVAVLDTGISTHPDLNIRGGASFVPGEPSTQDGNGHGTHVAGTIAALDNSIGVLGVAPSAELYAVKVLGASGSGSVSSIAQGLEWAGNNGMHVANLSLGSPSPSATLEQAVNSATSRGVLVVAASGNSGAGSISYPARYANAMAVGATDQDNNRASFSQYGAGLDIVAPGVNVQSTYPQSTYFSLNGTSMATPHVAGAAALVKQKNPSWSNVQIRNRLKNTATSLGSTNLYGSGLVNAEAATR

SEQ ID NO: 64344 - protein, 380 aa, Unidentified
VRSKKLWIVASTALLISVAFSSSIASAAEEAKEKYLIGFNEQEAVSEFVEQVEANDEVAILSEEEEVEIELLHEFETIPVLSVELSPEDVDALELDPAISYIEEDAEVTTMAQSVPWGISRVQAPAAHRRGLWGRGVKVAVLDTGISTHPDLNIRGGASFVPGEPSTQDGNGHGTHVAGTIAALDNSIGVLGVAPSAELYAVKVLGASGAGSVSSIAQGLEWAGNNGMHVANLSLGSPSPSATLEQAVNSATSRGVLVVAASGNSGAGSISYPARYANAMAVGATDQNNNRASFSQYGAGLDIVAPGVNVQSTYPQSTYFSLNGTSMATPHVAGAAALVKQKNPSWSNVQIRNRLKNTATSLGSTNLYGSGLVNAEAATR

SEQ ID NO: 64345 - protein, 380 aa, Unidentified
VRSKKLWIVASTALLISVAFSSSIASAAEEAKEKYLIGFNEQEAVSEFVEQVEANDEVAILSEEEEVEIELLHEFETIPVLSVELSPEDVDALELDPAISYIEEDAEVTTMAQSVPWGISRVQAPAAHNRRLWGSGVKVAVLDTGISTHPDLNIRGGASFVPGEPSTQDGNGHGTHVAGTIAALNNSIGVLGVAPSAELYAVKVLGASGSGAVSSIAQGLEWAGNNGMHVANLSLGSPSPSATLEQAVNSATSRGVLVVAASGNSGAGSISYPARYANAMAVGATDQNNNRASFSQYGAGLDIVAPGVNVQSTYPQSAYFSLNGTSMATPHVAGAAVLVKQKNPSWSNVRIRNHLKNTATSLGSTNLYGSGLVNAEAATR

SEQ ID NO: 64346 - protein, 380 aa, Unidentified
VRSKKLWIVASTALLISVAFSSSIASAAEEAKEKYLIGFNEQEAVSEFVEQVEANDEVAILSEEEEVEIELLHEFETIPVLSVELSPEDVDALELDPAISYIEEDAEVTTMAQSVPWGISRVQAPAAHRRGLKGSGVKVAVLDTGISTHPDLDIRGGASFVPGEPSTQDGNGHGTHVAGTIAALNNSIGVLGVAPSAELYAVKVLGASGGGAISSIAQGLEWAGNNGMHVANLSLGSPSPSATLEQAVNSATSRGVLVVAASGNSGAGSISYPARYANAMAVGATDQNNNRASFSQYGAGLDIVAPGVNVQSTYPGSTYASLNGTSMATPHVAGAAVLVKQKNPSWSNVRIRNHLKNTATSLGSTNLYGSGLVNAEAATR

SEQ ID NO: 64347 - protein, 380 aa, Unidentified
VRSKKLWIVASTALLISVAFSSSIASAAEEAKEKYLIGFNEQEAVSEFVEQVEANDEVAILSEEEEVEIELLHEFETIPVLSVELSPEDVDALELDPAISYIEEDAEVTTMAQSVPWGISRVQAPAAHNRRLTGSGVKVAVLDTGISTHPDLNIRGGASFVPGEPSTQDGNGHGTHVAGTIAALNNSIGVLGVAPSAELYAVKVLGASGAGAISSIAQGLEWAGANGMHVANLSLGSPSPSATLEQAVNSATSRGVLVVAASGNSGAGSISYPARYANAMAVGATDQDNNRASFSQYGAGLDIVAPGVNVQSTYPGSTYASLNGTSMATPHVAGAAVLVKQKNPSWSNVRIRNHLKNTATSLGSTNLYGSGLVNAEAATR

SEQ ID NO: 64348 - protein, 380 aa, Unidentified
VRSKKLWIVASTALLISVAFSSSIASAAEEAKEKYLIGFNEQEAVSEFVEQVEANDEVAILSEEEEVEIELLHEFETIPVLSVELSPEDVDALELDPAISYIEEDAEVTTMAQSVPWGISRVQAPAAHNRRLTGSGVKVAVLDTGISTHPDLNIRGGASFVPGEPSTQDGNGHGTHVAGTIAALNNRIGVLGVAPSAELYAVKVLGASGGGAISSIAQGLEWAGANGMHVANLSLGSPSPSATLEQAVNSATSRGVLVVAASGNSGAGSISYPARYANAMAVGATDQNNNRASFSQYGAGLDIVAPGVNVQSTYPGSTYASLNGTSMATPHVAGAAVLVKQKNPSWSNVRIRNHLKNTATSLGSTNLYGSGLVNAEAATR

SEQ ID NO: 64349 - protein, 380 aa, Unidentified
VRSKKLWIVASTALLISVAFSSSIASAAEEAKEKYLIGFNEQEAVSEFVEQVEANDEVAILSEEEEVEIELLHEFETIPVLSVELSPEDVDALELDPAISYIEEDAEVTTMAQSVPWGISRVQAPAAHNRGLTGSGVKVAVLDTGISTHPDLNIRGGASFVPGEPSTQDGNGHGTHVAGTIAALNNSIGVLGVAPSAELYAVKVLGASGGGAISSIAQGLEWAGNNGMHVANLSLGSPSPSATLEQAVNSATSRGVLVVAASGNSGADSISYPARYANAMAVGATDQNNNRASFSQYGAGLDIVAPGVNVQSTYPGSTYASLNGTSMATPHVAGAAVLVKQKNPSWSNVRIRDHLKNTATSLGSTNLYGSGLVNAFAATR

SEQ ID NO: 64350 - protein, 380 aa, Unidentified
VRSKKLWIVASTALLISVAFSSSIASAAEEAKEKYLIGFNEQEAVSEFVEQVEANDEVAILSEEEEVEIELLHEFETIPVLSVELSPEDVDALELDPAISYIEEDAEVTTMAQSVPWGISRVQAPAAHRRGLWGRGVKVAVLDTGISTHPDLNIRGGASFVPGEPSTQDGNGHGTHVAGTIAALDNSIGVLGVAPSAELYAVKVLGASGAGSVSSIAQGLEWAGANGMHVANLSLGSPSPSATLEQAVNSATSRGVLVVAASGNSGAGSISYPARYANAMAVGATDQNNNRASFSQYGAGLDIVAPGVNVQSTYPGSTYASLNGTSMATPHVAGAAVLVKQKNPSWSNVRIRNHLKNTATSLGSTNLYGSGLVNAEAATR

SEQ ID NO: 64351 - protein, 380 aa, Unidentified
VRSKKLWIVASTALLISVAFSSSIASAAEEAKEKYLIGFNEQEAVSEFVEQVEANDEVAILSEEEEVEIELLHEFETIPVLSVELSPEDVDALELDPAISYIEEDAEVTTMAQSVPWGISRVQAPAAHRRGLTGSGVKVAVLDTGISTHPDLDIRGGASFVPGEPSTQDGNGHGTHVAGTIAALNNSIGVLGVAPSAELYAVKVLGASGGGAISSIAQGLEWAGNNGMHVANLSLGSPSPSATLEQAVNSATSRGVLVVAASGNSGAGSISYPARYANAMAVGATDQNNNRASFSQYGAGLDIVAPGVNVQSTYPGSTYASLNGTSMATPHVAGAAVLVKQKNPSWSNVRIRNHLKNTATSLGSTNLYGSGLVRAEAATR

SEQ ID NO: 64352 - protein, 380 aa, Unidentified
VRSKKLWIVASTALLISVAFSSSIASAAEEAKEKYLIGFNEQEAVSEFVEQVEANDEVAILSEEEEVEIELLHEFETIPVLSVELSPEDVDALELDPAISYIEEDAEVTTMAQSVPWGISRVQAPAAHNRGLTGSGVKVAVLDTGISTHPDLNIRGGASFVPGEPSTQDGNGHGTHVAGTIAALNNSIGVLGVAPSAELYAVKVLGASGGGAISSIAQGLEWAGNNGMHVANLSLGNESPSATLEQAVNSATSRGVLVVAASGNSGAGSISYPARYANAMAVGATDQNNNRASFSQYGAGLDIVAPGVNVQSTYPGSTYASLNGTSMATPHVAGAAVLVKQKNPSWSNVRIRDHLKNTATSLGSTNLYGSGLVNAEAATR

SEQ ID NO: 64353 - protein, 380 aa, Unidentified
VRSKKLWIVASTALLISVAFSSSIASAAEEAKEKYLIGFNEQEAVSEFVEQVEANDEVAILSEEEEVEIELLHEFETIPVLSVELSPEDVDALELDPAISYIEEDAEVTTMAQSVPWGISRVQAPAAHNRGLTGSGVKVAVLDTGISTHPDLNIRGGASFVPGEPSTQDGNGHGTHVAGTIAALDNSIGVLGVAPSAELYAVKVLGASGGGAISSIAQGLEWAGNNGMHVANLSLGSPSPSATLEQAVNSATSRGVLVVAASGNSGADSISYPARYANAMAVGATDQNNNRASFSQYGAGLDIVAPGVNVQSTYPGSTYASLNGTSMATPHVAGAAVLVKQKNPSWSNVRIRDHLKNTATSLGSTNLYGSGLVNAEAATR

SEQ ID NO: 64354 - protein, 380 aa, Unidentified
VRSKKLWIVASTALLISVAFSSSIASAAEEAKEKYLIGFNEQEAVSEFVEQVEANDEVAILSEEEEVEIELLHEFETIPVLSVELSPEDVDALELDPAISYIEEDAEVTTMAQSVPWGISRVQAPAAHNRRLWGSGVKVAVLDTGISTHPDLNIRGGASFVPGEPSTQDGNGHGTHVAGTIAALNNSIGVLGVAPSAELYAVKVLGASGAGAISSIAQGLEWAGNNGMHVANLSLGSPSPSATLEQAVNSATSRGVLVVAASGNSGAGSISYPARYANAMAVGATDQNNNRASFSQYGAGLDIVAPGVNVQSTYPQSTYASLNGTSMATPHVAGAAVLVKQKNPSWSNVRIRNHLKNTATSLGSTNLYGSGLVNAEAATR

SEQ ID NO: 64355 - protein, 380 aa, Unidentified
VRSKKLWIVASTALLISVAFSSSIASAAEEAKEKYLIGFNEQEAVSEFVEQVEANDEVAILSEEEEVEIELLHEFETIPVLSVELSPEDVDALELDPAISYIEEDAEVTTMAQSVPWGISRVQAPAAHNRRLWGSGVKVAVLDTGISTHPDLNIRGGASFVPGEPSTQDGNGHGTHVAGTIAALNNRIGVLGVAPSAELYAVKVLGASGAGAISSIAQGLEWAGNNGMHVANLSLGSPSPSATLEQAVNSATSRGVLVVAASGNSGAGSISYPARYANAMAVGATDQNNNRASFSQYGAGLDIVAPGVNVQSTYPGSTYASLNGTSMATPHVAGAAVLVKQKNPSWSNVRIRNHLKNTATSLGSTNLYGSGLVNAEAATR

SEQ ID NO: 64356 - protein, 380 aa, Unidentified
VRSKKLWIVASTALLISVAFSSSIASAAEEAKEKYLIGFNEQEAVSEFVEQVEANDEVAILSEEEEVEIELLHEFETIPVLSVELSPEDVDALELDPAISYIEEDAEVTTMAQSVPWGISRVQAPAAHRRGLTGRGVKVAVLDTGISTHPDLNIRGGASFVPGEPSTQDGNGHGTHVAGTIAALDNSIGVLGVAPSAELYAVKVLGASGSGSVSSIAQGLEWAGANGMHVANLSLGSPSPSATLEQAVNSATSRGVLVVAASGNSGAGSISYPARYANAMAVGATDQDNNRASFSQYGAGLDLVAPGVNVQSTYPGSTYFSLNGTSMATPHVAGAAALVKQKNPSWSNVQIRNRLKNTATSLGSTNLYGSGLVNAEAATR

SEQ ID NO: 64357 - protein, 380 aa, Unidentified
VRSKKLWIVASTALLISVAFSSSIASAAEEAKEKYLIGFNEQEAVSEFVEQVEANDEVAILSEEEEVEIELLHEFETIPVLSVELSPEDVDALELDPAISYIEEDAEVTTMAQSVPWGISRVQAPAAHRRRLTGRGVKVAVLDTGISTHPDLNIRGGASFVPGEPSTQDGNGHGTHVAGTIAALDNSIGVLGVAPSAELYAVKVLGASGSGSVSSIAQGLEWAGNNGMHVANLSLGSPSPSATLEQAVNSATSRGVLVVAASGNSGAGSISYPARYANAMAVGATDQNNNRASFSQYGAGLDIVAPGVNVQSTYPQSAYFSLNGTSMATPHVAGAAALVKQKNPSWSNVQIRNRLKNTATSLGSTNLYGSGLVNAEAATR

SEQ ID NO: 64358 - protein, 380 aa, Unidentified
VRSKKLWIVASTALLISVAFSSSIASAAEEAKEKYLIGFNEQEAVSEFVEQVEANDEVAILSEEEEVEIELLHEFETIPVLSVELSPEDVDALELDPAISYIEEDAEVTTMAQSVPWGISRVQAPAAHRRGLTGSGVKVAVLDTGISTHPDLNIRGGASFVPGEPSTQDGNGHGTHVAGTIAALNNRIGVLGVAPSAELYAVKVLGASGGGAISSIAQGLEWAGNNGMHVANLSLGSPSPSATLEQAVNSATSRGVLVVAASGNSGAGSISYPARYANAMAVGATDQNNNRASFSQYGAGLDIVAPGVNVQSTYPGSTYASLNGTSMATPHVAGAAVLVKQKNPSWSNVRIRNHLKNTATSLGSTNLYGSGLVRAEAATR

SEQ ID NO: 64359 - protein, 380 aa, Unidentified
VRSKKLWIVASTALLISVAFSSSIASAAEEAKEKYLIGFNEQEAVSEFVEQVEANDEVAILSEEEEVEIELLHEFETIPVLSVELSPEDVDALELDPAISYIEEDAEVTTMAQSVPWGISRVQAPAAHNRGLTGSGVKVAVLDTGISTHPDLRIRGGASFVPGEPSTQDGNGHGTHVAGTIAALDNSIGVLGVAPSAELYAVKVLGASGGGAISSIAQGLEWAGNNGMHVANLSLGSPSPSATLEQAVNSATSRGVLVVAASGNSGAGSISYPARYANAMAVGATDQNNNRASFSQYGAGLDIVAPGVNVQSTYPGSTYASENGTSMATPHVAGAAVLVKQKNPSWSNVRIRNHLKNTATSLGSTNLYGSGLVNAEAATR

SEQ ID NO: 64360 - protein, 380 aa, Unidentified
VRSKKLWIVASTALLISVAFSSSIASAAEEAKEKYLIGFNEQEAVSEFVEQVEANDEVAILSEEEEVEIELLHEFETIPVLSVELSPEDVDALELDPAISYIEEDAEVTTMAQSVPWGISRVQAPAAHRRGLWGRGVKVAVLDTGISTHPDLNIRGGASFVPGEPSTQDGNGHGTHVAGTIAALDNSIGVLGVAPSAELYAVKVLGASGSGSVSSIAQGLEWAGANGMHVANLSLGSPSPSATLEQAVNSATSRGVLVVAASGNSGAGSISYPARYANAMAVGATDQDNNRASFSQYGAGLDLVAPGVNVQSTYPGSTYASLNGTSMATPHVAGAAALVKQKNPSWSNVQIRNRLKNTATSLGSTNLYGSGLVNAEAATR

SEQ ID NO: 64361 - protein, 380 aa, Unidentified
VRSKKLWIVASTALLISVAFSSSIASAAEEAKEKYLIGFNEQEAVSEFVEQVEANDEVAILSEEEEVEIELLHEFETIPVLSVELSPEDVDALELDPAISYIEEDAEVTTMAQSVPWGISRVQAPAAHRRGLTGSGVKVAVLDTGISTHPDLNIRGGASFVPGEPSTQDGNGHGTHVAGTIAALDNRIGVLGVAPSAELYAVKVLGASGGGAISSIAQGLEWAGNNGMHVANLSLGSPSPSATLEQAVNSATSRGVLVVAASGNSGAGSISYPARYANAMAVGATDQNNNRASFSQYGAGLDIVAPGVNVQSTYPGSTYASLNGTSMATPHVAGAAVLVKQKNPSWSNVRIRNHLKNTATSLGSTNLYGSGLVNAEAATR

SEQ ID NO: 64362 - protein, 380 aa, Unidentified
VRSKKLWIVASTALLISVAFSSSIASAAEEAKEKYLIGFNEQEAVSEFVEQVEANDEVAILSEEEEVEIELLHEFETIPVLSVELSPEDVDALELDPAISYIEEDAEVTTMAQSVPWGISRVQAPAAHRRGLTGRGVKVAVLDTGISTHPDLNIRGGASFVPGEPSTQDGNGHGTHVAGTIAALDNSIGVLGVAPSAELYAVKVLGASGSGSVSSIAQGLEWAGANGMHVANLSLGSPSPSATLEQAVNSATSRGVLVVAASGNSGAGSISYPARYANAMAVGATDQNNNRASFSQYGAGLDLVAPGVNVQSTYPQSAYASLNGTSMATPHVAGAAALVKQKNPSWSNVQIRNRLKNTATSLGSTNLYGSGLVNAEAATR

SEQ ID NO: 64363 - protein, 380 aa, Unidentified
VRSKKLWIVASTALLISVAFSSSIASAAEEAKEKYLIGFNEQEAVSEFVEQVEANDEVAILSEEEEVEIELLHEFETIPVLSVELSPEDVDALELDPAISYIEEDAEVTTMAQSVPWGISRVQAPAAHRRRLTGRGVKVAVLDTGISTHPDLNIRGGASFVPGEPSTQDGNGHGTHVAGTIAALDNSIGVLGVAPSAELYAVKVLGASGAGSVSSIAQGLEWAGANGMHVANLSLGSPSPSATLEQAVNSATSRGVLVVAASGNSGAGSISYPARYANAMAVGATDQDNNRASFSQYGAGLDIVAPGVNVQSTYPGSTYASLNGTSMATPHVAGAAALVKQKNPSWSNVQIRNRLKNTATSLGSTNLYGSGLVNAEAATR

SEQ ID NO: 64364 - protein, 380 aa, Unidentified
VRSKKLWIVASTALLISVAFSSSIASAAEEAKEKYLIGFNEQEAVSEFVEQVEANDEVAILSEEEEVEIELLHEFETIPVLSVELSPEDVDALELDPAISYIEEDAEVTTMAQSVPWGISRVQAPAAHRRGLTGSGVKVAVLDTGISTHPDLDITGGASFVPGEPSTQDGNGHGTHVAGTIAALNNSIGVLGVAPSAELYAVKVLGASGGGAISSIAQGLEWAGNNGMHVANLSLGSPSPSATLEQAVNSATSRGVLVVAASGNSGAGSISYPARYANAMAVGATDQNNNRASFSQYGAGLDIVAPGVNVQSTYPGSTYASLNGTSMATPHVAGAAVLVKQKNPSWSNVRIRNHLKNTATSLGSTNLYGSGLVNAEAATR

SEQ ID NO: 64365 - protein, 379 aa, Unidentified
VRSKKLWIVASTALLISVAFSSSIASAAEEAKEKYLIGFNEQEAVSEFVEQVEANDEVAILSEEEEVEIELLHEFETIPVLSVELSPEDVDALELDPAISYIEEDAEVTTMAQSVPWGISRVQAPAAHNRGLTGSGVKVAVLDTGISTHPDLDIRGGASFVPGEPSTQDGNGHGTHVAGTIAALNNRIGVLGVAPSAELYAVKVLGASGGGAISSIAQGLEWAGNNGMHVANLSLGSPSPSATLEQAVNSATSRGVLVVAASGNSGAGSISYPARYANAMAVGATDQNNNRASFSQYGAGLDIVAPGVNVQSTYPGSTYASLNGTSMATPHVAGAAVLVKQKNPSWSNVRIRNHLKNTATSLGSTNLYGSGLVRAEAAT

SEQ ID NO: 64366 - protein, 379 aa, Unidentified
VRSKKLWIVASTALLISVAFSSSIASAAEEAKEKYLIGFNEQEAVSEFVEQVEANDEVAILSEEEEVEIELLHEFETIPVLSVELSPEDVDALELDPAISYIEEDAEVTTMAQSVPWGISRVQAPAAHRRGLWGRGVKVAVLDTGISTHPDLNIRGGASFVPGEPSTQDGNGHGTHVAGTIAALDNSIGVLGVAPSAELYAVKVLGASGAGSVSSIAQGLEWAGNNGMHVANLSLGSPSPSATLEQAVNSATSRGVLVVAASGNSGAGSISYPARYANAMAVGATDQNNNRASFSQYGAGLDLVAPGVNVQSTYPGSTYFSLNGTSMATPHVAGAAALVKQKNPSWSNVQIRNRLKNTATSLGSTNLYGSGLVNAEAAT

SEQ ID NO: 64367 - protein, 262 aa, Unidentified
LGKIVASTALLISVAFSSSIASAAEEAKEKYLIGFNEQEAVSEFVEQVEANDEVAILSEEEEVEIELLHEFETIPVLSVELSPEDVDALELDPAISYIEEDAEVTTMAQSVPWGISRVQAPAAHNRGLTGSGVKVAVLDTGISTHPDLNIRGGASFVPGEPSTQDGNGHGTHVAGTIAALNNSIGVLGVAPSAELYAVKVLGASGSGSVSSIAQGLEWAGNNGMHVANLSLGSPSPSATLEQAVNSATCLAEGSLVLDAATG

SEQ ID NO: 64368 - protein, 274 aa, Bacillus licheniformis
AQVVPYGIPLIKADKVQAQGFKGANVKVAVLDTGIQASHPDLNVVGGASFVAGEAYNTDGNGHGTHVSGTVAALDNNIGVLGVAPSVSLYAVKVLNSSSSASYSGIVSGIEWATTNGMDVINISLGSPSGSTAMKQAVDNAYARGVVVVAAAGNSGSSGNTNTIQYPAKYDSVIAVGAVDSNSQRASFSSVGAELEVMAPGVGVYSTYPPNTYATLSGTSMASPHVAGAAALILSKHPNLSGSQVRNRLSSTATYLGPSFYYGKGLINVEAAAQ

SEQ ID NO: 64369 - protein, 274 aa, Bacillus clausii
AQTVPYGIPLIKADKVQAQGFKGANVKVAVLDTGIQASHPDLNVVGGASFVAGEAYNTDGNGHGTHVSGTVAALDNNIGVLGVAPSVSLYAVKVLNSFGLGTISGIVSGIEWATTNGMDVINMSLGSPSGSTAMKQAVDNAYARGVVVVAAAGNSGSSGNTNTIQYPAKYDSVIAVGAVDSNSQRASFSSVGPELEVMAPGVGVYSTYPTNTYKTLSGTSMASPHVAGAAALILSKHPNLSASQVRNRLSSTATYLGPSFYYGKGLINVEAAAQ

SEQ ID NO: 64370 - protein, 274 aa, Bacillus clausii
AQTVPYGIPLIKADKVQAQGFKGANVKVAVLDTGIQASHPDLNVVGGASFVAGEAYNTDGNGHGTHVSGTVAALDNNIGVLGVAPSVSLYAVKVLNSFGLGTISGIVSGIEWATTNGMDVINMSLGSPSGSTAMKQAVDNAYARGVVVVAAAGNEGSSGNTNTIRYPAKYDSVIAVGAVDSNSQRASFSSVGAELEVMAPGVGVYSTYPTNTYKTLSGTSMASPHVAGAAALILSKHPNLSASQVRNRLSSTATYLGPSFYYGKGLINVEAAAQ

SEQ ID NO: 64371 - protein, 274 aa, Bacillus clausii
AQTVPYGIPLIKADKVQAQGFKGANVKVAVLDTGIQASHPDLNVVGGASFVAGEAYNTDGNGHGTHVSGTVAALDNNIGVLGVAPSVSLYAVKVLNSFGLGTISGIVSGIEWATTNGMDVINMSLGSPSGSTAMKQAVDNAYARGVVVVAAAGNEGSSGNTNTIRYPAKYDSVIAVGAVDSNSQRASFSSVGPELEVMAPGVGVYSTYPTNTYATLSGTSMASPHVAGAAALILSKHPNLSASQVRNRLSSTATYLGPSFYYGKGLINVEAAAQ

SEQ ID NO: 64372 - protein, 274 aa, Bacillus clausii
AQTVPYGIPLIKADKVQAQGFKGANVKVAVLDTGIQASHPDLNVVGGASFVAGEAYNTDGNGHGTHVSGTVAALDNNIGVLGVAPSVSLYAVKVLNSFGLGTISGIVSGIEWATTNGMDVINMSLGSPSGSTAMKQAVDNAYARGVVVVAAAGNSGSSGNTNTIRYPAKYDSVIAVGAVDSNSQRASFSSVGPELEVMAPGVGVYSTYPTNTYKTLSGTSMASPHVAGAAALILSKHPNLSASQVRNRLSSTATYLGPSFYYGKGLINVEAAAQ

SEQ ID NO: 64373 - protein, 222 aa, Unidentified
AQSVPWGISRVQAPAAHNRGLTGSGVKVAVLDTGISTHPDLNIRGGASFVPGEPSTQDGNGHGTHVAGTIAALNNSIGVLGVAPSAELYAVKVLGASGSGSVSSIAQGLEWAGNNGMHVANLSLGSPSPSATLEQAVNSATSRGVLVVAASGNSGAGSISYPARYANAMAVGATDQNNNRASFSQYGAGLDIVAPGVNVQSTYPGCSWTNARAVTRRGFVHV

SEQ ID NO: 64374 - protein, 221 aa, Unidentified
AQSVPWGISRVQAPAAHNRGLTGSGVKVAVLDTGISTHPDLNIRGGASFVPGEPSTQDGNGHGTHVAGTIAALNNSIGVLGVAPSAELYAVKVLGASGSGSVSSIAQGLEWAGNNGMHVANLSLGSPSPSATLEQAVNSATSRGVLVVAASGNSGAGSISYPARYANAMAVGATDQNNNRASFSQYGAGLDIVAPGVNVQSTYPGCFPAGTVVSGPSAEAA

SEQ ID NO: 64375 - protein, 219 aa, Unidentified
AQSVPWGISRVQAPAAHNRGLTGSGVKVAVLDTGISTHPDLNIRGGASFVPGEPSTQDGNGHGTHVAGTIAALNNSIGVLGVAPSAELYAVKVLGASGSGSVSSIAQGLEWAGNNGMHVANLSLGSPSPSATLEQAVNSATSRGVLVVAASGNSGAGSISYPARYANAMAVGATDQNNNRASFSQYGAGLDIVAPGVNVQSTYPGCVHGDTRVTLADGH

SEQ ID NO: 64376 - protein, 269 aa, Unidentified
AQSVPWGISRVQAPAAHNRGLAGGGVKVAVLDTGISTHPDLNIRGGASFVPGEPSTQDGNGHGTHVAGTIAALDNNIGVLGVAPSAELYAVKVLGASGNGAISSIANGLEWAGNNGMHVANLSLGAPSPSATLEQAVNSATSRGVLVVAASGNSGADSISYPARYANAMAVGATDQNNNRADFSQYGAGLDIVAPGVNVQSTYPGSTYASLNGTSMATPHVAGAAVLVKQKNPSWSNVRIRDHLKNTATSLGSTNLYGSGLVNAFAATR

SEQ ID NO: 64377 - protein, 269 aa, Unidentified
AQSVPWGISRVQAPAAHNRGLAGSGVKVAVLDTGISTHPDLNIRGGASFVPGEPSTQDGNGHGTHVAGTIAALDNNIGVLGVAPSAELYAVKVLAASGGGAISSIAQGLEWAGNNGMHVANLSLGAPSPSATLEQAVNSATSRGVLVVAASGNSGADSISYPARYANAMAVGATDQNNNRADFSQYGAGLDIVAPGVNVQSTYPGSTYASQNGTSMATPHVAGAAVLVKQKNPSWSNVRIRDHLKNTATSLGSTNLYGSGLVNAFAATR

SEQ ID NO: 64378 - protein, 269 aa, Unidentified
AQSVPWGISRVQAPAAHNRGSAGGGVKVAVLDTGISTHPDLNIRGGASFVPGEPSTQDGNGHGTHVAGTIAALDNSIGVLGVAPSAELYAVKVLGASGQGAISSIAQGLEWAGNNGMHVANLSLGAPSPSATLEQAVNSATSRGVLVVAASGNSGADSISYPARYANAMAVGATDQNNNRADFSQYGAGLDIVAPGVNVQSTYPGSTYASQNGTSMATPHVAGAAVLVKQKNPSWSNVRIRDHLKNTATSLGSTNLYGSGLVNAFAATR

SEQ ID NO: 64379 - protein, 269 aa, Unidentified
AQSVPWGISRVQAPAAHNRGLAGRGVKVAVLDTGISTHPDLNIRGGASFVPGEPSTQDGNGHGTHVAGTIAALDNSIGVLGVAPSAELYAVKVLGASGGGAISSVAQGLEWAGNNGMHVANLSLGSESPSATLEQAVNSATSRGVLVVAASGNSGADSISYPARYANAMAVGATDQNNNRADFSQYGAGLDIVAPGVNVQSTYPGSTYASLNGTSMATPHVAGAAVLVKQKNPSWSNVRIRDHLKNTATSLGSTNLYGSGLVNVFAATR

SEQ ID NO: 64380 - protein, 269 aa, Unidentified
AQSVPWGIERVQAPAAHNRGLTGSGVKVAVLDTGISTHPDLRIRGGHSFVPGEPSTQDGNGHGTHVAGTIAALDNSIGVLGVAPSAELYAVKVLGASGSGSVSSIAQGLEWAGNHGMDVANLSLGSPSPSATLEQAVNSATSRGVLVVAASGNSGEPEISYPARYANAMAVGATDQNNNRASFSQYGPGLDIVAPGVNVLSTWPGSTYASLNGTSMATPHVAGAAALVKQKHPSWSNVQIRNHLKNTATSLGDTNEYGSGLVNAEAATR

SEQ ID NO: 64381 - protein, 269 aa, Unidentified
AQSVPWGISRVQAPAAHNRGLAGSGVKVAVLDTGISTHPDLNIRGGASFVPGEPSTQDGNGHGTHVAGTIAALNNSIGVLGVAPSAELYAVKVLAASGQGAISSIAQGLEWAGNNGMHVANVSLGAESPSATLEQAVNSATSRGVLVVAASGNSGADSISYPARYANAMAVGATDQNNNRADFSQYGAGLDIVAPGVNVQSTYPGSTYASQNGTSMATPHVAGAAVLVKQKNPSWSNVRIRDHLKNTATSLGSTNLYGSGLVNAFAATR

SEQ ID NO: 64382 - protein, 269 aa, Unidentified
AQSVPWGISRVQAPAAHNRGLAGRGVKVAVLDTGISTHPDLNIRGGASFVPGEPSTQDGNGHGTHVAGTIAALDNSIGVLGVAPSAELYAVKVLGASGGGAISSIAQGLEWAGNNGMHVANLSLGSESPSATLEQAVNSATSRGVLVVAASGNSGADSISYPARYANAMAVGATDQNNNRADFSQYGAGLDIVAPGVNVQSTYPGSTYASLNGTSMATPHVAGAAVLVKQKYPSWSNVRIRDHLKNTATSLGSTNLYGSGLVNVFAATR

SEQ ID NO: 64383 - protein, 269 aa, Unidentified
AQSVPWGISRVQAPAAHNRGLAGRGVKVAVLDTGISTHPDLNIRGGASFVPGEPSTQDGNGHGTHVAGTIAALDNSIGVLGVAPSAELYAVKVLGASGGGAISSIAQGLEWAGNNGMHVANLSLGSESPSATLEQAVNSATSRGVLVVAASGNSGADSISYPARYANAMAVGATDQNNNRADFSQYGAGLDIVAPGVNVQSTYPGSTYASLNGTSMATPHVAGAAVLVKQKYPSWSNVRIRDHLKNTATSLGSTNLYGSGLVNAFVATR

SEQ ID NO: 64384 - protein, 269 aa, Unidentified
AQSVPWGISRVQAPAAHNRGLAGGGVKVAVLDTGISTHPDLNIRGGASFVPGEPSTQDGNGHGTHVAGTIAALDNSIGVLGVAPSAELYAVKVLSASGNGAISSIAQGLEWAGNNGMHVANLSLGAPSPSATLEQAVNSATSRGVLVVAASGNSGADSISYPARYANAMAVGATDQNNNRADFSQYGAGLDIVAPGVNVQSTYPGSTYASQNGTSMATPHVAGAAVLVKQKNPSWSNVRIRDHLKNTATSLGSTNLYGSGLVNAFAATR

SEQ ID NO: 64385 - protein, 269 aa, Unidentified
AQSVPWGISRVQAPAAHNRGLAGRGVKVAVLDTGISTHPDLNIRGGASFVPGEPSTQDGNGHGTHVAGTIAALDNSIGVLGVAPSAELYAVKVLGASGGGAISSIAQGLEWAGNNGMHVANLSLGSESPSATLEQAVNSATSRGVLVVAASGNSGADSISYPARYANAMAVGATDQNNNRADFSQYGAGLDIVAPGVNVQSTYPGSTYASLNGTSMATPHVAGAAVLVKQKNPSWSNVRIRDHLKNTATSLGSTNLYGSGLVNVFVATR

SEQ ID NO: 64386 - protein, 269 aa, Unidentified
AQSVPWGIERVQAPAAHNRGLTGSGVKVAVLDTGISTHPDLRIRGGASFVPGEPSTQDGNGHGTHVAGTIAALDNSIGVLGVAPSAELYAVKVLGASGSGSVSSIAQGLEWAGNNGMDVANLSLGSPSPSATLEQAVNSATSRGVLVVAASGNSGEPEISYPARYANAMAVGATDQNNNRASFSQYGPGLDIVAPGVDILSTWPGGTYAVLNGTSMATPHVAGAAALVKQKNPSWSNVQIRNHLKNTATSLGSTNEYGSGLVNAEAATR

SEQ ID NO: 64387 - protein, 269 aa, Unidentified
AQSVPWGISRVQAPAAHNRGLAGGGVKVAVLDTGISTHPDLNIRGGASFVPGEPSTQDGNGHGTHVAGTIAALSNNIGVLGVAPSAELYAVKVLAASGNGAISSIAQGLEWAGNNGMHVANLSLGAPSPSATLEQAVNSATSRGVLVVAASGNSGADSISYPARYANAMAVGATDQNNNRADFSQYGAGLDIVAPGVNVQSTYPGSTYASLNGTSMATPHVAGAAVLVKQKNPSWSNVRIRDHLKNTATSLGSTNLYGSGLVNAFAATR

SEQ ID NO: 64388 - protein, 269 aa, Unidentified
AQSVPWGISRVQAPAAHNRGLAGGGVKVAVLDTGISTHPDLNIRGGASFVPGEPSTQDGNGHGTHVAGTIAALDNNIGVLGVAPSAELYAVKVLGASGNGAISSIAQGLEWAGNNGMHVANLSLGAPSPSATLEQAVNSATSRGVLVVAASGNSGADSISYPARYANAMAVGATDQNNNRADFSQYGAGLDIVAPGVNVQSTYPGSTYASQNGTSMATPHVAGAAVLVKQKNPSWSNVRIRDHLKNTATSLGSTNLYGSGLVNAFAATR

SEQ ID NO: 64389 - protein, 269 aa, Unidentified
AQSVPWGISRVQAPAAHNRGLAGGGVKVAVLDTGISTHPDLNIRGGASFVPGEPSTQDGNGHGTHVAGTIAALDNNIGVLGVAPSAELYAVKVLSASGQGAISSIAQGLEWAGNNGMHVANLSLGSPSPSATLEQAVNSATSRGVLVVAASGNSGADSISYPARYANAMAVGATDQNNNRADFSQYGAGLDIVAPGVNVQSTYPGSTYASQNGTSMATPHVAGAAVLVKQKNPSWSNVRIRDHLKNTATSLGSTNLYGSGLVNAFAATR

SEQ ID NO: 64390 - protein, 269 aa, Unidentified
AQSVPWGISRVQAPAAHNRGLAGGGVKVAVLDTGISTHPDLNIRGGASFVPGEPSTQDGNGHGTHVAGTIAALDNNIGVLGVAPSAELYAVKVLSASGNGAISSIANGLEWAGNNGMHVANLSLGSPSPSATLEQAVNSATSRGVLVVAASGNSGADSISYPARYANAMAVGATDQNNNRADFSQYGAGLDIVAPGVNVQSTYPGSTYASLNGTSMATPHVAGAAVLVKQKNPSWSNVRIRDHLKNTATSLGSTNLYGSGLVNAFAATR

SEQ ID NO: 64391 - protein, 269 aa, Bacillus clausii
AQSVPWGIERVQAPAAHNRGLTGSGVKVAVLDTGISTHPDLRIRGGASFVPGEPSTQDGNGHGTHVAGTIAALDNSIGVLGVAPSAELYAVKVLGAFGLGTISSIAQGLEWAGNNGMHVANLSLGSPSPSATLEQAVNSATSRGVLVVAASGNSGAGSIRYPARYANAMAVGATDQNNNRASFSQYGAGLDIVAPGVNILSTWPGSTYKSLNGTSMATPHVAGAAALVKQKNPSWSNVQIRNHLKNTATSLGDTWEYGSGLVNAEAATR

SEQ ID NO: 64392 - protein, 269 aa, Unidentified
AQSVPWGISRVQAPAAHNRGLAGGGVKVAVLDTGISTHPDLNIRGGASFVPGEPSTQDGNGHGTHVAGTIAALNNNIGVLGVAPSAELYAVKVLAASGNGAISSIAGGLEWAGNNGMHVANLSLGSPSPSATLEQAVNSATSRGVLVVAASGNSGADSISYPARYANAMAVGATDQNNNRADFSQYGAGLDIVAPGVNVQSTYPGSTYASQNGTSMATPHVAGAAVLVKQKNPSWSNVRIRDHLKNTATSLGSTNLYGSGLVNAFAATR

SEQ ID NO: 64393 - protein, 269 aa, Unidentified
AQSVPWGISRVQAPAAHNRGLAGRGVKVAVLDTGISTHPDLRIRGGASFVPGEPSTQDGNGHGTHVAGTIAALDNSIGVLGVAPSAELYAVKVLGASGGGAISSIAQGLEWAGNNGMHVANLSLGSESPSATLEQAVNSATSRGVLVVAASGNSGEESISYPARYANAMAVGATDQNNNRADFSQYGAGLDIVAPGVNVQSTYPGSTYASLNGTSMATPHVAGAAVLVKQKNPSWSNVRIRDHLKNTATSLGSTNLYGSGLVNAFAATR

SEQ ID NO: 64394 - protein, 269 aa, Unidentified
AQSVPWGIERVQAPAAHNRGLTGSGVKVAVLDTGISTHPDLRIRGGHSFVPGEPSTQDGNGHGTHVAGTIAALDNSIGVLGVAPSAELYAVKVLGASGSGSVSSIAQGLEWAGNHGMHVANLSLGSPSPSATLEQAVNSATSRGVLVVAASGNSGAGSISYPARYANAMAVGATDQNNNRASFSQYGPELDIVAPGVDILSTWPGGTYAVLNGTSMATPHVAGAAALVKQKHPSWSNVQIRNHLKNTATSLGSTNEYGSGLVNAEAATR

SEQ ID NO: 64395 - protein, 269 aa, Unidentified
AQSVPWGISRVQAPAAHNRGLAGGGVKVAVLDTGISTHPDLNIRGGASFVPGEPSTQDGNGHGTHVAGTIAALDNSIGVLGVAPSAELYAVKVLSASGGGAISSIAQGLEWAGNNGMHVANLSLGAPSPSATLEQAVNSATSRGVLVVAASGNSGADSISYPARYANAMAVGATDQNNNRADFSQYGAGLDIVAPGVNVQSTYPGSTYASQNGTSMATPHVAGAAVLVKQKNPSWSNVRIRDHLKNTATSLGSTNLYGSGLVNAFAATR

SEQ ID NO: 64396 - protein, 269 aa, Unidentified
AQSVPWGISRVQAPAAHNRGLAGSGVKVAVLDTGISTHPDLNIRGGASFVPGEPSTQDGNGHGTHVAGTIAALDDNIGVLGVAPSAELYAVKVLSASGNGAISSIAQGLEWAGNNGMHVANLSLGAPSPSATLEQAVNSATSRGVLVVAASGNSGADSISYPARYANAMAVGATDQNNNRADFSQYGAGLDIVAPGVNVQSTYPGSTYASLNGTSMATPHVAGAAVLVKQKNPSWSNVRIRDHLKNTATSLGSTNLYGSGLVNAFAATR

SEQ ID NO: 64397 - protein, 269 aa, Unidentified
AQSVPWGISRVQAPAAHNRGLAGSGVKVAVLDTGISTHPDLRIRGGASFVPGEPSTQDGNGHGTHVAGTIAALDNSIGVLGVAPSAELYAVKVLGASGGGAISSIAQGLEWAGNNGMHVANLSLGSESPSATLEQAVNSATSRGVLVVAASGNSGEESISYPARYANAMAVGATDQNNNRADFSQYGAGLDIVAPGVNVQSTYPGSTYASLNGTSMATPHVAGAAVLVKQKNPSWSNVRIRDHLKNTATSLGSTNLYGSGLVNAFVATR

SEQ ID NO: 64398 - protein, 271 aa, Unidentified
AQSVPWGISRVQAPAAHNRGLTGSGVRVAVLDTGIDSTHPDLNIRGGASFVPGEPSTQDGNGHGTHVAGTIAALDNSIGVLGVAPNAELYAVKVLNAXSGGGSXSSIAQGLEWAGNNGMDVASLSLGSPSPSATLEQAVNSATSRGVLVVAASGNSGAGSISXPAXYANAMAVGATDQNNNRASFSQYGAGLDIVAPGVNVESTYPGSTYASLSGTSXASPHVAGAAALVLQKNPSWSNVQIRNHLKNTATSLGSTNLYGSGLVNAEAAAR

SEQ ID NO: 64399 - protein, 269 aa, Unidentified
AQSVPWGISRVQAPAAHNRGLAGGGVKVAVLDTGISTHPDLNIRGGASFVPGEPSTQDGNGHGTHVAGTIAALNNNIGVLGVAPSAELYAVKVLAASGQGAISSIAQGLEWAGNNGMHVANLSLGAPSPSATLEQAVNSATSRGVLVVAASGNSGADSISYPARYANAMAVGATDQNNNRADFSQYGAGLDIVAPGVNVQSTYPGSTYASQNGTSMATPHVAGAAVLVKQKNPSWSNVRIRDHLKNTATSLGSTNLYGSGLVNAFAATR

SEQ ID NO: 64400 - protein, 269 aa, Unidentified
AQSVPWGISRVQAPAAHNRGLAGRGVKVAVLDTGISTHPDLNIRGGASFVPGEPSTQDGNGHGTHVAGTIAALDNSIGVLGVAPSAELYAVKVLGASGGGAISSIAQGLEWAGNNGMHVANLSLGSESPSATLEQAVNSATSRGVLVVAASGNSGADSISYPARYANAMAVGATDQNNNRADFSQYGAGLDIVAPGVNVQSTYPGSTYVSLNGTSMATPHVAGAAVLVKQKYPSWSNVRIRDHLKNTATSLGSTNLYGSGLVNAFAATR

SEQ ID NO: 64401 - protein, 269 aa, Unidentified
AQSVPWGISRVQAPAAHNRGLAGGGVKVAVLDTGISTHPDLNIRGGASFVPGEPSTQDGNGHGTHVAGTIAALNNNIGVLGVAPSAELYAVKVLAASGQGAISSIAGGLEWAGNNGMHVANLSLGAPSPSATLEQAVNSATSRGVLVVAASGNSGADSISYPARYANAMAVGATDQNNNRADFSQYGAGLDIVAPGVNVQSTYPGSTYASLNGTSMATPHVAGAAVLVKQKNPSWSNVRIRDHLKNTATSLGSTNLYGSGLVNAFAATR

SEQ ID NO: 64402 - protein, 269 aa, Unidentified
AQSVPWGISRVQAPAAHNRGLAGGGVKVAVLDTGISTHPDLNIRGGASFVPGEPSTQDGNGHGTHVAGTIAALNNNIGVLGVAPSAELYAVKVLGASGQGAISSIAQGLEWAGNNGMHVANLSLGAPSPSATLEQAVNSATSRGVLVVAASGNSGADSISYPARYANAMAVGATDQNNNRADFSQYGAGLDIVAPGVNVQSTYPGSAYASQNGTSMATPHVAGAAVLVKQKNPSWSNVRIRDHLKNTATSLGSTNLYGSGLVNAFAATR

SEQ ID NO: 64403 - protein, 269 aa, Unidentified
AQSVPWGISRVQAPAAHNRGLAGGGVKVAVLDTGISTHPDLNIRGGASFVPGEPSTQDGNGHGTHVAGTIAALNNNIGVLGVAPSAELYAVKVLSASGQGAISSIAGGLEWAGNNGMHVANLSLGSPSPSATLEQAVNSATSRGVLVVAASGNSGADSISYPARYANAMAVGATDQNNNRADFSQYGAGLDIVAPGVNVQSTYPGSTYASQNGTSMATPHVAGAAVLVKQKNPSWSNVRIRDHLKNTATSLGSTNLYGSGLVNAFAATR

SEQ ID NO: 64404 - protein, 269 aa, Unidentified
AQSVPWGISRVQAPAAHNRGLAGGGVKVAVLDTGISTHPDLNIRGGASFVPGEPSTQDGNGHGTHVAGTIAALDNSIGVLGVAPSAELYAVKVLAASGNGAISSIAGGLEWAGNNGMHVANLSLGSPSPSATLEQAVNSATSRGVLVVAASGNSGADSISYPARYANAMAVGATDQNNNRADFSQYGAGLDIVAPGVNVQSTYPGSTYASQNGTSMATPHVAGAAVLVKQKNPSWSNVRIRDHLKNTATSLGSTNLYGSGLVNAFAATR

SEQ ID NO: 64405 - protein, 269 aa, Unidentified
AQSVPWGISRVQAPAAHNRGLAGRGVKVAVLDTGISTHPDLNIRGGASFVPGEPSTQDGNGHGTHVAGTIAALDNSIGVLGVAPSAELYAVKVLGASGGGAISSIAQGLEWAGNNGMHVANLSLGSPSPSATLEQAVNSATSRGVLVVAASGNSGADSISYPARYANAMAVGATDQNNNRADFSQYGAGLDIVAPGVNVQSTYPGSTYASLNGTSMATPHVAGAAVLVKQKYPSWSNVRIRDHLKNTATSLGSTNLYGSGLVNVFVATR

SEQ ID NO: 64406 - protein, 269 aa, Unidentified
AQSVPWGISRVQAPAAHNRGLAGRGVKVAVLDTGISTHPDLNIRGGASFVPGEPSTQDGNGHGTHVAGTIAALDNSIGVLGVAPSAELYAVKVLGASGGGAISSIAQGLEWAGNNGMHVANLSLGSPSPSATLEQAVNSATSRGVLVVAASGNSGADSISYPARYANAMAVGATDQNNNRADFSQYGAGLDIVAPGVNVQSTYPGSTYASLNGTSMATPHVAGAAVLVKQKNPSWSNVRIRDHLKNTATSLGSTNLYGSGLVDVFVATR

SEQ ID NO: 64407 - protein, 269 aa, Unidentified
AQSVPWGISRVQAPAAHNRGLAGGGVKVAVLDTGISTHPDLNIRGGASFVPGEPSTQDGNGHGTHVAGTIAALNNSIGVLGVAPSAELYAVKVLSASGNGAISSIAGGLEWAGNNGMHVANLSLGAPSPSATLEQAVNSATSRGVLVVAASGNSGADSISYPARYANAMAVGATDQNNNRADFSQYGAGLDIVAPGVNVQSTYPGSTYASQNGTSMATPHVAGAAVLVKQKNPSWSNVRIRDHLKNTATSLGSTNLYGSGLVNAFAATR

SEQ ID NO: 64408 - protein, 269 aa, Unidentified
AQSVPWGISRVQAPAAHNRGLAGGGVKVAVLDTGISTHPDLNIRGGASFVPGEPSTQDGNGHGTHVAGTIAALDNSIGVLGVAPSAELYAVKVLSASGNGAISSIANGLEWAGNNGMHVANLSLGAPSPSATLEQAVNSATSRGVLVVAASGNSGADSISYPARYANAMAVGATDQNNNRADFSQYGAGLDIVAPGVNVQSTYPGSTYASLNGTSMATPHVAGAAVLVKQKNPSWSNVRIRDHLKNTATSLGSTNLYGSGLVNAFAATR

SEQ ID NO: 64409 - protein, 269 aa, Unidentified
AQSVPWGISRVQAPAAHNRGLAGRGVKVAVLDTGISTHPDLNIRGGASFVPGEPSTQDGNGHGTHVAGTIAALDNSIGVLGVAPSAELYAVKVLGASGGGAISSVAQGLEWAGNNGMHVANLSLGSPSPSATLEQAVNSATSRGVLVVAASGNSGADSISYPARYANAMAVGATDQNNNRADFSQYGAGLDIVAPGVNVQSTYPGSTYASLNGTSMATPHVAGAAVLVKQKYPSWSNVRIRDHLKNTATSLGSTNLYGSGLVNVFAATR

SEQ ID NO: 64410 - protein, 269 aa, Unidentified
AQSVPWGISRVQAPAAHNRGLAGSGVKVAVLDTGISTHPDLNIRGGASFVPGEPSTQDGNGHGTHVAGTIAALNNSIGVLGVAPSAELYAVKVLAASGQGAISSIAQGLEWAGNNGMHVANVSIGAESPSATLEQAVNSATSRGVLVVAASGNSGADSISYPARYANAMAVGATDQNNNRADFSQYGAGLDIVAPGVNVQSTYPGSTYASLNGTSMATPHVAGAAVLVKQKNPSWSNVRIRDHLKNTATSLGSTNLYGSGLVNAFAATR

SEQ ID NO: 64411 - protein, 269 aa, Unidentified
AQSVPWGISRVQAPAAHNRGLAGGGVKVAVLDTGISTHPDLNIRGGASFVPGEPSTQDGNGHGTHVAGTIAALDNSIGVLGVAPSAELYAVKVLSASGQGAISSIAQGLEWAGNNGMHVANLSLGAPSPSATLEQAVNSATSRGVLVVAASGNSGADSISYPARYANAMAVGATDQNNNRADFSQYGAGLDIVAPGVNVQSTYPGSTYASQNGTSMATPHVAGAAVLVKQKNPSWSNVRIRDHLKNTATSLGSTNLYGSGLVNAFAATR

SEQ ID NO: 64412 - protein, 269 aa, Unidentified
AQSVPWGISRVQAPAAHNRGLAGGGVKVAVLDTGISTHPDLNIRGGASFVPGEPSTQDGNGHGTHVAGTIAALNNSIGVLGVAPSAELYAVKVLAASGGGAISSIAQGLEWAGNNGMHVANLSLGAPSPSATLEQAVNSATSRGVLVVAASGNSGADSISYPARYANAMAVGATDQNNNRADFSQYGAGLDIVAPGVNVQSTYPGSTYASQNGTSMATPHVAGAAVLVKQKNPSWSNVRIRDHLKNTATSLGSTNLYGSGLVNAFAAAR

SEQ ID NO: 64413 - protein, 269 aa, Unidentified
AQSVPWGISRVQAPAAHNRGLAGGGVKVAVLDTGISTHPDLNIRGGASFVPGEPSTQDGNGHGTHVAGTIAALDNNIGVLGVAPSAELYAVKVLGASGQGAISSIAQGLEWAGNNGMHVANLSLGAPSPSATLEQAVNSATSRGVLVVAASGNSGADSISYPARYANAMAVGATDQNNNRADFSQYGAGLDIVAPGVNVQSTYPGSTYASQNGTSMATPHVAGAAVLVKQKNPSWSNVRIRDHLKNTATSLGSTNLYGSGLVNAFAATR

SEQ ID NO: 64414 - protein, 269 aa, Unidentified
AQSVPWGISRVQAPAAHNRGLAGSGVKVAVLDTGISTHPDLNIRGGASFVPGEPSTQDGNGHGTHVAGTIAALDNNIGVLGVAPSAELYAVKVLSASGQGAISSIANGLEWAGNNGMHVANLSLGAPSPSATLEQAVNSATSRGVLVVAASGNSGADSISYPARYANAMAVGATDQNNNRADFSQYGAGLDIVAPGVNVQSTYPGSTYASLNGTSMATPHVAGAAVLVKQKNPSWSNVRIRDHLKNTATSLGSTNLYGSGLVNAFAATR

SEQ ID NO: 64415 - protein, 269 aa, Unidentified
AQSVPWGISRVQAPAAHNRGLAGGGVKVAVLDTGISTHPDLNIRGGASFVPGEPSTQDGNGHGTHVAGTIAALDNNIGVLGVAPSAELYAVKVLSASGNGAISSIAQGLEWAGNNGMHVANLSLGSPSPSATLEQAVNSATSRGVLVVAASGNSGADSISYPARYANAMAVGATDQNNNRADFSQYGAGLDIVAPGVNVQSTYPGSTYASQNGTSMATPHVAGAAVLVKQKNPSWSNVRIRDHLKNTATSLGSTNLYGSGLVNAFAATR

SEQ ID NO: 64416 - protein, 269 aa, Unidentified
AQSVPWGISRVQAPAAHNRGLAGSGVKVAVLDTGISTHPDLNIRGGASFVPGEPSTQDGNGHGTHVAGTIAALDNNIGVLGVAPSAELYAVKVLSASGNGAISSIAQGLEWAGNNGMHVANLSLGAPSPSATLEQAVNSATSRGVLVVAASGNSGADSISYPARYANAMAVGATDQNNNRADFSQYGAGLDIVAPGVNVQSTYPGSTYASQNGTSMATPHVAGAAVLVKQKNPSWSNVRIRDHLKNTATSLGSTNLYGSGLVNAFAATR

SEQ ID NO: 64417 - protein, 269 aa, Unidentified
AQSVPWGISRVQAPAAHNRGLAGSGVKVAVLDTGISTHPDLNIRGGASFVPGEPSTQDGNGHGTHVAGTIAALNNSIGVLGVAPSAELYAVKVLAASGNGAISSIAQGLEWAGNNGMHVANVSLGASSPSATLEQAVNSATSRGVLVVAASGNSGADSISYPARYANAMAVGATDQNNNRADFSQYGAGLDIVAPGVNVQSTYPGSTYASQNGTSMATPHVAGAAVLVKQKNPSWSNVRIRDHLKNTATSLGSTNLYGSGLVNAFAATR

SEQ ID NO: 64418 - protein, 269 aa, Unidentified
AQSVPWGISRVQAPAAHNRGLAGGGVKVAVLDTGISTHPDLNIRGGASFVPGEPSTQDGNGHGTHVAGTIAALNNSIGVLGVAPSAELYAVKVLAASGGGAISSIAGGLEWAGNNGMHVANLSLGAPSPSATLEQAVNSATSRGVLVVAASGNSGADSISYPARYANAMAVGATDQNNNRADFSQYGAGLDIVAPGVNVQSTYPGSTYASQNGTSMATPHVAGAAVLVKQKNPSWSNVRIRDHLKNTATSLGSTNLYGSGLVNAFAATR

SEQ ID NO: 64419 - protein, 269 aa, Unidentified
AQSVPWGISRVQAPAAHNRGLAGGGVKVAVLDTGISTHPDLNIRGGASFVPGEPSTQDGNGHGTHVAGTIAALDNSIGVLGVAPSAELYAVKVLAASGQGAISSIAGGLEWAGNNGMHVANLSLGSPSPSATLEQAVNSATSRGVLVVAASGNSGADSISYPARYANAMAVGATDQNNNRADFSQYGAGLDIVAPGVNVQSTYPGSTYASQNGTSMATPHVAGAAVLVKQKNPSWSNVRIRDHLKNTATSLGSTNLYGSGLVNAFAATR

SEQ ID NO: 64420 - protein, 269 aa, Unidentified
AQSVPWGISRVQAPAAHNRGLAGGGVKVAVLDTGISTHPDLNIRGGASFVPGEPSTQDGNGHGTHVAGTIAALDNNIGVLGVAPSAELYAVKVLAASGNGAISSIAQGLEWAGNNGMHVANLSLGAPSPSATLEQAVNSATSRGVLVVAASGNSGADSISYPARYANAMAVGATDQNNNRADFSQYGAGLDIVAPGVNVQSTYPGSTYASLNGTSMATPHVAGAAVLVKQKNPSWSNVRIRDHLKNTATSLGSTNLYGSGLVNAFAATR

SEQ ID NO: 64421 - protein, 269 aa, Unidentified
AQSVPWGISRVQAPAAHNRGLAGSGVKVAVLDTGISTHPDLNIRGGASFVPGEPSTQDGNGHGTHVAGTIAALDNSIGVLGVAPSAELYAVKVLGASGGGAISSVAQGLEWAGNNGMHVANLSLGSESPSATLEQAVNSATSRGVLVVAASGNSGADSISYPARYANAMAVGATDQNNNRADFSQYGAGLDIVAPGVNVQSTYPGSTYASLNGTSMATPHVAGAAVLVKQKYPSWSNVRIRDHLKNTATSLGSTNLYGSGLVNVFAATR

SEQ ID NO: 64422 - protein, 269 aa, Unidentified
AQSVPWGISRVQAPAAHNRGLAGSGVKVAVLDTGISTHPDLNIRGGASFVPGEPSTQDGNGHGTHVAGTIAALDNSIGVLGVAPSAELYAVKVLGASGGGAISSVAQGLEWAGNNGMHVASLSLGSESPSATLEQAVNSATSRGVLVVAASGNSGADSISYPARYANAMAVGATDQNNNRADFSQYGAGLDIVAPGVNVQSTYPGSTYASLNGTSMATPHVAGAAVLVKQKNPSWSNVRIRDHLKNTATSLGSTNLYGSGLVNAFVATR

SEQ ID NO: 64423 - protein, 269 aa, Unidentified
AQSVPWGISRVQAPAAHNRGLAGGGVKVAVLDTGISTHPDLNIRGGASFVPGEPSTQDGNGHGTHVAGTIAALNNSIGVLGVAPSAELYAVKVLAASGQGAISSIANGLEWAGNNGMHVANLSLGAPSPSATLEQAVNSATSRGVLVVAASGNSGADSISYPARYANAMAVGATDQNNNRADFSQYGAGLDIVAPGVNVQSTYPGSTYASQNGTSMATPHVAGAAVLVKQKNPSWSNVRIRDHLKNTATSLGSTNLYGSGLVNAFAATR

SEQ ID NO: 64424 - protein, 269 aa, Unidentified
AQSVPWGISRVQAPAAHNRGLAGGGVKVAVLDTGISTHPDLNIRGGASFVPGEPSTQDGNGHGTHVAGTIAALNNNIGVLGVAPSAELYAVKVLSASGGGAISSIAQGLEWAGNNGMHVANLSLGAPSPSATLEQAVNSATSRGVLVVAASGNSGADSISYPARYANAMAVGATDQNNNRADFSQYGAGLDIVAPGVNVQSTYPGSTYASQNGTSMATPHVAGAAVLVKQKNPSWSNVRIRDHLKNTATSLGSTNLYGSGLVNAFAATR

SEQ ID NO: 64425 - protein, 269 aa, Unidentified
AQSVPWGISRVQAPAAHNRGLAGGGVKVAVLDTGISTHPDLNIRGGASFVPGEPSTQDGNGHGTHVAGTIAALDNNIGVLGVAPSAELYAVKVLAASGGGAISSIAQGLEWAGNNGMHVANLSLGAPSPSATLEQAVNSATSRGVLVVAASGNSGADSISYPARYANAMAVGATDQNNNRADFSQYGAGLDIVAPGVNVQSTYPGSTYASLNGTSMATPHVAGAAVLVKQKNPSWSNVRIRDHLKNTATSLGSTNLYGSGLVNAFAATR

SEQ ID NO: 64426 - protein, 269 aa, Unidentified
AQSVPWGISRVQAPAAHNRGLAGGGVKVAVLDTGISTHPDLNIRGGASFVPGEPSTQDGNGHGTHVAGTIAALDNNIGVLGVAPSAELYAVKVLSASGQGAISSIAQGLEWAGNNGMHVANLSLGAPSPSATLEQAVNSATSRGVLVVAASGNSGADSISYPARYANAMAVGATDQNNNRADFSQYGAGLDIVAPGVNVQSTYPGSTYASLNGTSMATPHVAGAAVLVKQKNPSWSNVRIRDHLKNTATSLGSTNLYGSGLVNAFAATR

SEQ ID NO: 64427 - protein, 269 aa, Unidentified
AQSVPWGISRVQAPAAHNRGLAGRGVKVAVLDTGISTHPDLNIRGGASFVPGEPSTQDGNGHGTHVAGTIAALDNSIGVLGVAPSAELYAVKVLGASGGGAISSVAQGLEWAGNNGMHVANLSLGSPSPSATLEQAVNSATSRGVLVVAASGNSGADSISYPARYANAMAVGATDQNNNRADFSQYGAGLDIVAPGVNVQSTYPGSTYASLNGTSMATPHVAGAAVLVKQKYPSWSNVRIRDHLKNTATSLGSTNLYGSGLVNAFVATR

SEQ ID NO: 64428 - protein, 269 aa, Unidentified
AQSVPWGISRVQAPAAHNRGLAGGGVKVAVLDTGISTHPDLNIRGGASFVPGEPSTQDGNGHGTHVAGTIAALDNNIGVLGVAPSAELYAVKVLAASGQGAISSIAQGLEWAGNNGMHVANLSLGAPSPSATLEQAVNSATSRGVLVVAASGNSGADSISYPARYANAMAVGATDQNNNRADFSQYGAGLDIVAPGVNVQSTYPGSTYASLNGTSMATPHVAGAAVLVKQKNPSWSNVRIRDHLKNTATSLGSTNLYGSGLVNAFAATR

SEQ ID NO: 64429 - protein, 271 aa, Unidentified
AQSVPWGISRVQAPAAHNRGLTGSGVRVAVLDTGIDSTHPDLNIRGGASFVPGEPSTQDGNGHGTHVAGTIAALDNSIGVLGVAPNAELYAVKVLNASGXGGSXSSIAQGLEWAGNNGMDVASLSLGSPSPSATLEQAVNSATSRGVLVVAASGNSGAGSISXPAXYANAMAVGATDQNNNRASFSQYGAGLDIVAPGVNVESTYPGSTYASLSGTSXASPHVAGAAALVLQKNPSWSNVQIRNHLKNTATSLGSTNLYGSGLVNAEAAAR

SEQ ID NO: 64430 - protein, 269 aa, Unidentified
AQSVPWGISRVQAPAAHNRGLAGGGVKVAVLDTGISTHPDLNIRGGASFVPGEPSTQDGNGHGTHVAGTIAALNNNIGVLGVAPSAELYAVKVLAASGNGAISSIAQGLEWAGNNGMHVANLSLGAPSPSATLEQAVNSATSRGVLVVAASGNSGADSISYPARYANAMAVGATDQNNNRADFSQYGAGLDIVAPGVNVQSTYPGSTYASQNGTSMATPHVAGAAVLVKQKNPSWSNVRIRDHLKNTATSLGSTNLYGSGLVNAFAATR

SEQ ID NO: 64431 - protein, 269 aa, Unidentified
AQSVPWGISRVQAPAAHNRGLAGRGVKVAVLDTGISTHPDLNIRGGASFVPGEPSTQDGNGHGTHVAGTIAALNNSIGVLGVAPSAELYAVKVLGASGGGAISSVAQGLEWAGNNGMHVANLSLGSESPSATLEQAVNSATSRGVLVVAASGNSGADSISYPARYANAMAVGATDQNNNRADFSQYGAGLDIVAPGVNVQSTYPGSTYASLNGTSMATPHVAGAAVLVKQKYPSWSNVRIRDHLKNTATSLGSTNLYGSGLVNAFVATR

SEQ ID NO: 64432 - protein, 269 aa, Unidentified
AQSVPWGIERVQAPAAHNRGLTGSGVKVAVLDTGISTHPDLRIRGGASFVPGEPSTQDGNGHGTHVAGTIAALDNSIGVLGVAPSAELHAVKVLGASGSGSVSSIAQGLEWAGNHGMHVANLSLGSPSPSATLEQAVNSATSRGVLVVAASGNSGAGSISYPARYANAMAVGATDQNNNRASFSQYGPELDIVAPGVDILSTWPGGTYAVLNGTSMATPHVAGAAALVKQKHPSWSNVQIRNHLKNTATSLGSTNEYGSGLVNAEAATR

SEQ ID NO: 64433 - protein, 269 aa, Unidentified
AQSVPWGISRVQAPAAHNRGLAGGGVKVAVLDTGISTHPDLNIRGGASFVPGEPSTQDGNGHGTHVAGTIAALNNNIGVLGVAPSAELYAVKVLGASGNGAISSIANGLEWAGNNGMHVANLSLGAPSPSATLEQAVNSATSRGVLVVAASGNSGADSISYPARYANAMAVGATDQNNNRADFSQYGAGLDIVAPGVNVQSTYPGSTYASQNGTSMATPHVAGAAVLVKQKNPSWSNVRIRDHLKNTATSLGSTNLYGSGLVNAFAATR

SEQ ID NO: 64434 - protein, 269 aa, Unidentified
AQSVPWGISRVQAPAAHNRGLAGSGVKVAVLDTGISTHPDLNIRGGASFVPGEPSTQDGNGHGTHVAGTIAALNNSIGVLGVAPSAELYAVKVLGASGGGAISSVAQGLEWAGNNGMHVANLSLGSESPSATLEQAVNSATSRGVLVVAASGNSGADSISYPARYANAMAVGATDQNNNRADFSQYGAGLDIVAPGVNVQSTYPGSTYASLNGTSMATPHVAGAAVLVKQKYPSWSNVRIRDHLKNTATSLGSTNLYGSGLVNVFVATR

SEQ ID NO: 64435 - protein, 269 aa, Unidentified
AQSVPWGISRVQAPAAHNRGLAGRGVKVAVLDTGISTHPDLRIRGGASFVPGEPSTQDGNGHGTHVAGTIAALDNSIGVLGVAPSAELYAVKVLGASGGGAISSIAQGLEWAGNNGMHVANLSLGSESPSATLEQAVNSATSRGVLVVAASGNSGEGSISYPARYANAMAVGATDQNNNRADFSQYGAGLDIVAPGVNVQSTYPGSTYASLNGTSMATPHVAGAAVLVKQKNPSWSNVRIRDHLKNTATSLGSTNLYGSGLVNAFVATR

SEQ ID NO: 64436 - protein, 269 aa, Bacillus clausii
AQSVPWGIERVQAPAAHNRGLTGSGVKVAVLDTGISTHPDLRIRGGASFVPGEPSTQDGNGHGTHVAGTIAALDNSIGVLGVAPSAELYAVKVLGAFGLGTISSIAQGLEWAGNNGMHVANLSLGSPSPSATLEQAVNSATSRGVLVVAASGNEGAGSIRYPARYANAMAVGATDQNNNRASFSQYGAGLDIVAPGVNILSTWPGSTYASLNGTSMATPHVAGAAALVKQKNPSWSNVQIRNHLKNTATSLGDTWEYGSGLVNAEAATR

SEQ ID NO: 64437 - protein, 269 aa, Unidentified
AQSVPWGISRVQAPAAHNRGLAGSGVKVAVLDTGISTHPDLNIRGGASFVPGEPSTQDGNGHGTHVAGTIAALDNNIGVLGVAPSAELYAVKVLAASGQGAISSIAQGLEWAGNNGMHVANLSLGAPSPSATLEQAVNSATSRGVLVVAASGNSGADSISYPARYANAMAVGATDQNNNRADFSQYGAGLDIVAPGVNVQSTYPGSTYASQNGTSMATPHVAGAAVLVKQKNPSWSNVRIRDHLKNTATSLGSTNLYGSGLVNAFAATR

SEQ ID NO: 64438 - protein, 269 aa, Unidentified
AQSVPWGISRVQAPAAHNRGLAGRGVKVAVLDTGISTHPDLNIRGGASFVPGEPSTQDGNGHGTHVAGTIAALNNSIGVLGVAPSAELYAVKVLGASGGGAISSIAQGLEWAGNNGMHVANLSLGSESPSATLEQAVNSATSRGVLVVAASGNSGADSISYPARYANAMAVGATDQNNNRADFSQYGAGLDIVAPGVNVQSTYPGSTYASLNGTSMATPHVAGAAVLVKQKYPSWSNVRIRDHLKNTATSLGSTNLYGSGLVNVFVATR

SEQ ID NO: 64439 - protein, 269 aa, Unidentified
AQSVPWGISRVQAPAAHNRGLAGGGVKVAVLDTGISTHPDLNIRGGASFVPGEPSTQDGNGHGTHVAGTIAALDNNIGVLGVAPSAELYAVKVLAASGGGAISSIAQGLEWAGNNGMHVANLSLGSPSPSATLEQAVNSATSRGVLVVAASGNSGADSISYPARYANAMAVGATDQNNNRADFSQYGAGLDIVAPGVNVQSTYPGSTYASQNGTSMATPHVAGAAVLVKQKNPSWSNVRIRDHLKNTATSLGSTNLYGSGLVNAFAATR

SEQ ID NO: 64440 - protein, 269 aa, Unidentified
AQSVPWGISRVQAPAAHNRGLAGSGVKVAVLDTGISTHPDLNIRGGASFVPGEPSTQDGNGHGTHVAGTIAALDNSIGVLGVAPSAELYAVKVLAASGNGAISSIANGLEWAGNNGMHVANLSLGAPSPSATLEQAVNSATSRGVLVVAASGNSGADSISYPARYANAMAVGATDQNNNRADFSQYGAGLDIVAPGVNVQSTYPGSTYASQNGTSMATPHVAGAAVLVKQKNPSWSNVRIRDHLKNTATSLGSTNLYGSGLVNAFAATR

SEQ ID NO: 64441 - protein, 269 aa, Unidentified
AQSVPWGISRVQAPAAHNRGLAGSGVKVAVLDTGISTHPDLNIRGGASFVPGEPSTQDGNGHGTHVAGTIAALDNNIGVLGVAPSAELYAVKVLAASGNGAISSIAQGLEWAGNNGMHVANLSLGAPSPSATLEQAVNSATSRGVLVVAASGNSGADSISYPARYANAMAVGATDQNNNRADFSQYGAGLDIVAPGVNVQSTYPGSTYASQNGTSMATPHVAGAAVLVKQKNPSWSNVRIRDHLKNTATSLGSTNLYGSGLVNAFAATR

SEQ ID NO: 64442 - protein, 269 aa, Unidentified
AQSVPWGISRVQAPAAHNRGLAGSGVKVAVLDTGISTHPDLNIRGGASFVPGEPSTQDGNGHGTHVAGTIAALDNSIGVLGVAPSAELYAVKVLSASGNGAISSIAGGLEWAGNNGMHVANLSLGAPSPSATLEQAVNSATSRGVLVVAASGNSGADSISYPARYANAMAVGATDQNNNRADFSQYGAGLDIVAPGVNVQSTYPGSTYASQNGTSMATPHVAGAAVLVKQKNPSWSNVRIRDHLKNTATSLGSTNLYGSGLVNAFAATR

SEQ ID NO: 64443 - protein, 269 aa, Bacillus clausii
AQSVPWGIERVQAPAAHNRGLTGSGVKVAVLDTGISTHPDLRIRGGASFVPGEPSTQDGNGHGTHVAGTIAALDNSIGVLGVAPSAELYAVKVLGAFGLGTISSIAQGLEWAGNNGMHVANLSLISPSPSATLEQAVNSATSRGVLVVAASGNSGAGSISYPARYANAMAVGATDQNNNRASFSQYGAGLDIVAPGVNILSTWPGSTYKSLNGTSMATPHVAGAAALVKQKNPSWSNVQIRNHLKNTATSLGDTWEYGSGLVNAEAATR

SEQ ID NO: 64444 - protein, 269 aa, Unidentified
AQSVPWGISRVQAPAAHNRGLAGGGVKVAVLDTGISTHPDLNIRGGASFVPGEPSTQDGNGHGTHVAGTIAALNNSIGVLGVAPSAELYAVKVLSASGQGAISSIANGLEWAGNNGMHVANLSLGAPSPSATLEQAVNSATSRGVLVVAASGNSGADSISYPARYANAMAVGATDQNNNRADFSQYGAGLDIVAPGVNVQSTYPGSTYASQNGTSMATPHVAGAAVLVKQKNPSWSNVRIRDHLKNTATSLGSTNLYGSGLVNAFAATR

SEQ ID NO: 64445 - protein, 269 aa, Unidentified
AQSVPWGISRVQAPAAHNRGLAGGGVKVAVLDTGISTHPDLNIRGGASFVPGEPSTQDGNGHGTHVAGTIAALDNSIGVLGVAPSAELYAVKVLAASGNGAISSIAQGLEWAGNNGMHVANLSLGAPSPSATLEQAVNSATSRGVLVVAASGNSGADSISYPARYANAMAVGATDQNNNRADFSQYGAGLDIVAPGVNVQSTYPGSTYASQNGTSMATPHVAGAAVLVKQKNPSWSNVRIRDHLKNTATSLGSTNLYGSGLVNAFAATR

SEQ ID NO: 64446 - protein, 269 aa, Unidentified
AQSVPWGISRVQAPAAHNRGLAGRGVKVAVLDTGISTHPDLRIRGGASFVPGEPSTQDGNGHGTHVAGTIAALDNPIGVLGVAPSAELYAVKVLGASGGGAISSIAQGLEWAGNNGMHVANLSLGSESPSATLEQAVNSATSRGVLVVAASGNSGAESISYPARYANAMAVGATDQNNNRADFSQYGAGLDIVAPGVNVQSTYPGSTYASLNGTSMATPHVAGAAVLVKQKNPSWSNVRIRDHLKNTATSLGSTNLYGSGLVNAFAATR

SEQ ID NO: 64447 - protein, 269 aa, Unidentified
AQSVPWGISRVQAPAAHNRGLAGSGVKVAVLDTGISTHPDLNIRGGASFVPGEPSTQDGNGHGTHVAGTIAALDNSIGVLGVAPSAELYAVKVLGASGGGAISSIAQGLEWAGNNGMHVANLSLGSESPSATLEQAVNSATSRGVLVVAASGNSGADSISYPARYANAMAVGATDQNNNRADFSQYGAGLDIVAPGVNVQSTYPGSTYASLNGTSMATPHVAGAAVLVKQKYPSWSNVRIRDHLKNTATSLGSTNLYGSGLVNVFVATR

SEQ ID NO: 64448 - protein, 269 aa, Unidentified
AQSVPWGISRVQAPAAHNRGLAGSGVKVAVLDTGISTHPDLNIRGGASFVPGEPSTQDGNGHGTHVAGTIAALNNSIGVLGVAPSAELYAVKVLAASGNGAISSIAQGLEWAGNNGMHVANVSLGAESPSATLEQAVNSATSRGVLVVAASGNSGADSISYPARYANAMAVGATDQNNNRADFSQYGAGLDIVAPGVNVQSTYPGSTYASQNGTSMATPHVAGAAVLVKQKNPSWSNVRIRDHLKNTATSLGSTNLYGSGLVNAFAATR

SEQ ID NO: 64449 - protein, 269 aa, Unidentified
AQSVPWGISRVQAPAAHNRGLAGRGVKVAVLDTGISTHPDLNIRGGASFVPGEPSTQDGNGHGTHVAGTIAALNNSIGVLGVAPSAELYAVKVLGASGGGAISSVAQGLEWAGNNGMHVANLSLGSESPSATLEQAVNSATSRGVLVVAASGNSGADSISYPARYANAMAVGATDQNNNRADFSQYGAGLDIVAPGVNVQSTYPGSTYASLNGTSMATPHVAGAAVLVKQKYPSWSNVRIRDHLKNTATSLGSTNLYGSGLVNVFAATR

SEQ ID NO: 64450 - protein, 269 aa, Unidentified
AQSVPWGISRVQAPAAHNRGLAGGGVKVAVLDTGISTHPDLNIRGGASFVPGEPSTQDGNGHGTHVAGTIAALDNSIGVLGVAPSAELYAVKVLAASGGGAISSIAGGLEWAGNNGMHVANLSLGSPSPSATLEQAVNSATSRGVLVVAASGNSGADSISYPARYANAMAVGATDQNNNRADFSQYGAGLDIVAPGVNVQSTYPGSTYASQNGTSMATPHVAGAAVLVKQKNPSWSNVRIRDHLKNTATSLGSTNLYGSGLVNAFAATR

SEQ ID NO: 64451 - protein, 269 aa, Unidentified
AQSVPWGISRVQAPAAHNRGLAGSGVKVAVLDTGISTHPDLNIRGGASFVPGEPSTQDGNGHGTHVAGTIAALDNNIGVLGVAPSAELYAVKVLSASGNGAISSIAGGLEWAGNNGMHVANLSLGAPSPSATLEQAVNSATSRGVLVVAASGNSGADSISYPARYANAMAVGATDQNNNRADFSQYGAGLDIVAPGVNVQSTYPGSTYASLNGTSMATPHVAGAAVLVKQKNPSWSNVRIRDHLKNTATSLGSTNLYGSGLVNAFAATR

SEQ ID NO: 64452 - protein, 269 aa, Unidentified
AQSVPWGISRVQAPAAHNRGLAGGGVKVAVLDTGISTHPDLNIRGGASFVPGEPSTQDGNGHGTHVAGTIAALDNNIGVLGVAPSAELYAVKVLAASGQGAISSIANGLEWAGNNGMHVANLSLGSPSPSATLEQAVNSATSRGVLVVAASGNSGADSISYPARYANAMAVGATDQNNNRADFSQYGAGLDIVAPGVNVQSTYPGSTYASLNGTSMATPHVAGAAVLVKQKNPSWSNVRIRDHLKNTATSLGSTNLYGSGLVNAFAATR

SEQ ID NO: 64453 - protein, 380 aa, Unidentified
VRSKKLWIVASTALLISVAFSSSIASAAEEAKEKYLIGFNEQEAVSEFVEQVEANDEVAILSEEEEVEIELLHEFETIPVLSVELSPEDVDALELDPAISYIEEDAEVTTMAQSVPWGISRVQAPAAHNRGLTGSGVKVAVLDTGISTHPDLNIRGGASFVPGEPSTQDGNGHGTHVAGTIAALNNSIGVLGVAPSAELYAVKVLGASGGGAISSIAQGLEWAGNNGMHVANLSLGSESPSATLEQAVNSATSRGVLVVAASGNSGAGSISYPARYANAMAVGATDQNNNRADFSQYGAGLDIVAPGVNVQSTYPGSTYASLNGTSMATPHVAGAAVLVKQKNPSWSNVRIRDRLKNTATSLGSTNLYGSGLVNAEAATR

SEQ ID NO: 64454 - protein, 380 aa, Unidentified
VRSKKLWIVASTALLISVAFSSSIASAAEEAKEKYLIGFNEQEAVSEFVEQVEANDEVAILSEEEEVEIELLHEFETIPVLSVELSPEDVDALELDPAISYIEEDAEVTTMAQSVPWGISRVQAPAAHRRGLTGRGVKVAVLDTGISTHPDLNIRGGASFVPGEPSTQDGNGHGTHVAGTIAALDNSIGVLGVAPSAELYAVKVLGASGSGSVSSIAQGLEWAGANGMHVANLSLGSPSPSATLEQAVNSATSRGVLVVAASGNSGAGSISYPARYANAMAVGATDQDNNRASFSQYGAGLDLVAPGVNVQSTYPQSAYASLNGTSMATPHVAGAAALVKQKNPSWSNVQIRNRLKNTATSLGSTNLYGSGLVNAEAATR

SEQ ID NO: 64455 - protein, 380 aa, Unidentified
VRSKKLWIVASTALLISVAFSSSIASAAEEAKEKYLIGFNEQEAVSEFVEQVEANDEVAILSEEEEVEIELLHEFETIPVLSVELSPEDVDALELDPAISYIEEDAEVTTMAQSVPWGISRVQAPAAHNRGLTGSGVKVAVLDTGISTHPDLNIRGGASFVPGEPSTQDGEGHGTHVAGTIAALNNSIGVLGVAPSAELYAVKVLGASGGGAISSIAQGLEWAGNNGMHVANLSLGSPSPSATLEQAVNSATSRGVLVVAASGNSGADSISYPARYANAMAVGATDQNNNRASFSQYGAGLDIVAPGVNVQSTYPGSTYASLNGTSMATPHVAGAAVLVKQKNPSWSNVRIRDHLKNTATSLGSTNLYGSGLVNAFAATR

SEQ ID NO: 64456 - protein, 380 aa, Unidentified
VRSKKLWIVASTALLISVAFSSSIASAAEEAKEKYLIGFNEQEAVSEFVEQVEANDEVAILSEEEEVEIELLHEFETIPVLSVELSPEDVDALELDPAISYIEEDAEVTTMAQSVPWGISRVQAPAAHNRRLTGSGVKVAVLDTGISTHPDLNIRGGASFVPGEPSTQDGNGHGTHVAGTIAALNNRIGVLGVAPSAELYAVKVLGASGGGAISSIAQGLEWAGANGMHVANLSLGSPSPSATLEQAVNSATSRGVLVVAASGNSGAGSISYPARYANAMAVGATDQNNNRASFSQYGAGLDIVAPGVNVQSTYPQSTYASLNGTSMATPHVAGAAVLVKQKNPSWSNVRIRNHLKNTATSLGSTNLYGSGLVNAEAATR

SEQ ID NO: 64457 - protein, 380 aa, Unidentified
VRSKKLWIVASTALLISVAFSSSIASAAEEAKEKYLIGFNEQEAVSEFVEQVEANDEVAILSEEEEVEIELLHEFETIPVLSVELSPEDVDALELDPAISYIEEDAEVTTMAQSVPWGISRVQAPAAHNRGLTGRGVKVAVLDTGISTHPDLNIRGGASFVPGEPSTQDGNGHGTHVAGTIAALNNSIGVLGVAPSAELYAVKVLGASGGGAISSIAQGLEWAGNNGMHVANLSLGSESPSATLEQAVNSATSRGVLVVAASGNSGAGSISYPARYANAMAVGATDQNNNRADFSQYGAGLDIVAPGVNVQSTYPGSTYASLNGTSMATPHVAGAAVLVKQKNPSWSNVRIRDHLKNTATSLGSTNLYGSGLVNAEAATR

SEQ ID NO: 64458 - protein, 380 aa, Unidentified
VRSKKLWIVASTALLISVAFSSSIASAAEEAKEKYLIGFNEQEAVSEFVEQVEANDEVAILSEEEEVEIELLHEFETIPVLSVELSPEDVDALELDPAISYIEEDAEVTTMAQSVPWGISRVQAPAAHNRGLTGSGVKVAVLDTGISTHPDLDIRGGASFVPGEPSTQDGNGHGTHVAGTIAALNNRIGVLGVAPSAELYAVKVLGASGGGAISSIAQGLEWAGNNGMHVANLSLGSPSPSATLEQAVNSATSRGVLVVAASGNSGAGSISYPARYANAMAVGATDQNNNRASFSQYGAGLDIVAPGVNVQSTYPGSTYASLNGTSMATPHVAGAAVLVKQKNPSWSNVRIRNHLKNTATSLGSTNLYGSGLVRAEVATR

SEQ ID NO: 64459 - protein, 380 aa, Unidentified
VRSKKLWIVASTALLISVAFSSSIASAAEEAKEKYLIGFNEQEAVSEFVEQVEANDEVAILSEEEEVEIELLHEFETIPVLSVELSPEDVDALELDPAISYIEEDAEVTTMAQSVPWGISRVQAPAAHNRRLWGSGVKVAVLDTGISTHPDLNIRGGASFVPGEPSTQDGNGHGTHVAGTIAALNNSIGVLGVAPSAELYAVKVLGASGAGAISSIAQGLEWAGNNGMHVANLSLGSPSPSATLEQAVNSATSRGVLVVAASGNSGAGSISYPARYANAMAVGATDQNNNRASFSQYGAGLDIVAPGVNVQSTYPQSTYFSLNGTSMATPHVAGAAVLVKQKNPSWSNVRIRNHLKNTATSLGSTNLYGSGLVNAEAATR

SEQ ID NO: 64460 - protein, 380 aa, Unidentified
VRSKKLWIVASTALLISVAFSSSIASAAEEAKEKYLIGFNEQEAVSEFVEQVEANDEVAILSEEEEVEIELLHEFETIPVLSVELSPEDVDALELDPAISYIEEDAEVTTMAQSVPWGISRVQAPAAHRRRLWGRGVKVAVLDTGISTHPDLNIRGGASFVPGEPSTQDGNGHGTHVAGTIAALDNSIGVLGVAPSAELYAVKVLGASGAGSVSSIAQGLEWAGNNGMHVANLSLGSPSPSATLEQAVNSATSRGVLVVAASGNSGAGSISYPARYANAMAVGATDQNNNRASFSQYGAGLDLVAPGVNVQSTYPGSTYFSLNGTSMATPHVAGAAALVKQKNPSWSNVQIRNRLKNTATSLGSTNLYGSGLVNAEAATR

SEQ ID NO: 64461 - protein, 380 aa, Unidentified
VRSKKLWIVASTALLISVAFSSSIASAAEEAKEKYLIGFNEQEAVSEFVEQVEANDEVAILSEEEEVEIELLHEFETIPVLSVELSPEDVDALELDPAISYIEEDAEVTTMAQSVPWGISRVQAPAAHNRRLTGSGVKVAVLDTGISTHPDLNIRGGASFVPGEPSTQDGNGHGTHVAGTIAALNNSIGVLGVAPSAELYAVKVLGASGGGAISSIAQGLEWAGNNGMHVANLSLGSPSPSATLEQAVNSATSRGVLVVAASGNSGAGSISYPARYANAMAVGATDQNNNRASFSQYGAGLDIVAPGVNVQSTYPQSAYFSLNGTSMATPHVAGAAVLVKQKNPSWSNVRIRNHLKNTATSLGSTNLYGSGLVNAEAATR

SEQ ID NO: 64462 - protein, 380 aa, Unidentified
VRSKKLWIVASTALLISVAFSSSIASAAEEAKEKYLIGFNEQEAVSEFVEQVEANDEVAILSEEEEVEIELLHEFETIPVLSVELSPEDVDALELDPAISYIEEDAEVTTMAQSVPWGISRVQAPAAHNRGLTGRGVKVAVLDTGISTHPDLRIRGGASFVPGEPSTQDGNGHGTHVAGTIAALDNSIGVLGVAPSAELYAVKVLGASGGGAISSIAQGLEWAGNNGMHVANLSLGSPSPSATLEQAVNSATSRGVLVVAASGNSGAGSISYPARYANAMAVGATDQNNNRASFSQYGAGLDIVAPGVNVQSTYPGSTYASLNGTSMATPHVAGAAVLVKQKNPSWSNVRIRNHLKNTATSLGSTNLYGSGLVRAEAATR

SEQ ID NO: 64463 - protein, 380 aa, Unidentified
VRSKKLWIVASTALLISVAFSSSIASAAEEAKEKYLIGFNEQEAVSEFVEQVEANDEVAILSEEEEVEIELLHEFETIPVLSVELSPEDVDALELDPAISYIEEDAEVTTMAQSVPWGISRVQAPAAHRRRLWGRGVKVAVLDTGISTHPDLNIRGGASFVPGEPSTQDGNGHGTHVAGTIAALDNSIGVLGVAPSAELYAVKVLGASGAGSVSSIAQGLEWAGANGMHVANLSLGSPSPSATLEQAVNSATSRGVLVVAASGNSGAGSISYPARYANAMAVGATDQNNNRASFSQYGAGLDIVAPGVNVQSTYPQSTYASLNGTSMATPHVAGAAALVKQKNPSWSNVQIRNRLKNTATSLGSTNLYGSGLVNAEAATR

SEQ ID NO: 64464 - protein, 380 aa, Unidentified
VRSKKLWIVASTALLISVAFSSSIASAAEEAKEKYLIGFNEQEAVSEFVEQVEANDEVAILSEEEEVEIELLHEFETIPVLSVELSPEDVDALELDPAISYIEEDAEVTTMAQSVPWGISRVQAPAAHNRGLTGRGVKVAVLDTGISTHPDLNIRGGASFVPGEPSTQDGNGHGTHVAGTIAALDNRIGVLGVAPSAELYAVKVLGASGGGAISSIAQGLEWAGNNGMHVANLSLGSPSPSATLEQAVNSATSRGVLVVAASGNSGAGSISYPARYANAMAVGATDQNNNRASFSQYGAGLDIVAPGVNVQSTYPGSTYASLNGTSMATPHVAGAAVLVKQKNPSWSNVRIRNHLKNTATSLGSTNLYGSGLVRAEAATR

SEQ ID NO: 64465 - protein, 380 aa, Unidentified
VRSKKLWIVASTALLISVAFSSSIASAAEEAKEKYLIGFNEQEAVSEFVEQVEANDEVAILSEEEEVEIELLHEFETIPVLSVELSPEDVDALELDPAISYIEEDAEVTTMAQSMPWGISRVQAPAAHRRGLTGRGVKVAVLDTGISTHPDLNIRGGASFVPGEPSTQDGNGHGTHVAGTIAALDNSIGVLGVAPSAELYAVKVLGASGSGSVSSIAQGLEWAGANGMHVANLSLGSPSPSATLEQAVNSATSRGVLVVAASGNSGAGSISYPARYANAMAVGATDQNNNRASFSQYGAGLDLVAPGVNVQSTYPQSAYASLNGTSMATPHVAGAAALVKQKNPSWSNVQIRNRLKNTATSLGSTNLYGSGLVNAEAATR

SEQ ID NO: 64466 - protein, 380 aa, Unidentified
VRSKKLWIVASTALLISVAFSSSIASAAEEAKEKYLIGFNEQEAVSEFVEQVEANDEVAILSEEEEVEIELLHEFETIPVLSVELSPEDVDALELDPAISYIEEDAEVTTMAQSVPWGISRVQAPAAHRRGLTGRGVKVAVLDTGISTHPDLNIRGGASFVPGEPSTQDGNGHGTHVAGTIAALDNSIGVLGVAPSAELYAVKVLGASGAGSVSSIAQGLEWAGANGMHVANLSLGSPSPSATLEQAVNSATSRGVLVVAASGNSGAGSISYPARYANAMAVGATDQDNNRASFSQYGAGLDLVAPGVNVQSTYPGSAYASLNGTSMATPHVAGAAALVKQKNPSWSNVQIRNRLKNTATSLGSTNLYGSGLVNAEAATR

SEQ ID NO: 64467 - protein, 380 aa, Unidentified
VRSKKLWIVASTALLISVAFSSSIASAAEEAKEKYLIGFNEQEAVSEFVEQVEANDEVAILSEEEEVEIELLHEFETIPVLSVELSPEDVDALELDPAISYIEEDAEVTTMAQSVPWGISRVQAPAAHRRGLTGRGVKVAVLDTGISTHPDLNIRGGASFVPGEPSTQDGNGHGTHVAGTIAALDNSIGVLGVAPSAELYAVKVLGASGAGSVSSIAQGLEWAGANGMHVANLSLGSPSPSATLEQAVNSATSRGVLVVAASGNSGAGSISYPARYANAMAVGATDQDNNRASFSQYGAGLDIVAPGVNVQSTYPQSAYASLNGTSMATPHVAGAAALVKQKNPSWSNVQIRNRLKNTATSLGSTNLYGSGLVNAEAATR

SEQ ID NO: 64468 - protein, 380 aa, Unidentified
VRSKKLWIVASTALLISVAFSSSIASAAEEAKEKYLIGFNEQEAVSEFVEQVEANDEVAILSEEEEVEIELLHEFETIPVLSVELSPEDVDALELDPAISYIEEDAEVTTMAQSVPWGISRVQAPAAHRRRLWGRGVKVAVLDTGISTHPDLNIRGGASFVPGEPSTQDGNGHGTHVAGTIAALDNSIGVLGVAPSAELYAVKVLGASGAGSVSSIAQGLEWAGANGMHVANLSLGSPSPSATLEQAVNSATSRGVLVVAASGNSGAGSISYPARYANAMAVGATDQNNNRASFSQYGAGLDIVAPGVNVQSTYPGSAYASLNGTSMATPHVAGAAALVKQKNPSWSNVQIRNRLKNTATSLGSTNLYGSGLVNAEAATR

SEQ ID NO: 64469 - protein, 380 aa, Unidentified
VRSKKLWIVASTALLISVAFSSSIASAAEEAKEKYLIGFNEQEAVSEFVEQVEANDEVAILSEEEEVEIELLHEFETIPVLSVELSPEDVDALELDPAISYIEEDAEVTTMAQSVPWGISRVQAPAAHRRRLTGRGVKVAVLDTGISTHPDLNIRGGASFVPGEPSTQDGNGHGTHVAGTIAALDNSIGVLGVAPSAELYAVKVLGASGSGSVSSIAQGLEWAGANGMHVANLSLGSPSPSATLEQAVNSATSRGVLVVAASGNSGAGSISYPARYANAMAVGATDQNNNRASFSQYGAGLDLVAPGVNVQSTYPQSTYFSLNGTSMATPHVAGAAALVKQKNPSWSNVRIRNHLKNTATSLGSTNLYGSGLVNAEAATR

SEQ ID NO: 64470 - protein, 380 aa, Unidentified
VRSKKLWIVASTALLISVAFSSSIASAAEEAKEKYLIGFNEQEAVSEFVEQVEANDEVAILSEEEEVEIELLHEFETIPVLSVELSPEDVDALELDPAISYIEEDAEVTTMAQSVPWGISRVQAPAAHRRGLWGRGVKVAVLDTGISTHPDLNIRGGASFVPGEPSTQDGNGHGTHVAGTIAALDNSIGVLGVAPSAELYAVKVLGASGAGSVSSIAQGLEWAGNNGMHVANLSLGSPSPSATLEQAVNSATSRGVLVVAASGNSGAGSISYPARYANAMAVGATDQDNNRASFSQYGAGLDLVAPGVNVQSTYPGSAYASLNGTSMATPHVAGAAALVKQKNPSWSNVQIRNRLKNTATSLGSTNLYGSGLVNAEAATR

SEQ ID NO: 64471 - protein, 380 aa, Unidentified
VRSKKLWIVASTALLISVAFSSSIASAAEEAKEKYLIGFNEQEAVSEFVEQVEANDEVAILSEEEEVEIELLHEFETIPVLSVELSPEDVDALELDPAISYIEEDAEVTTMAQSVPWGISRVQAPAAHRRGLTGSGVKVAVLDTGISTHPDLNIRGGASFVPGEPSTQDGNGHGTHVAGTIAALDNRIGVLGVAPSAELYAVKVLGASGGGAISSIAQGLEWAGNNGMHVANLSLGSPSPSATLEQAVNSATSRGVLVVAASGNSGAGSISYPARYANAMAVGATDQNNNRASFSQYGAGLDIVAPGVNVQSTYPGSTYASENGTSMATPHVAGAAVLVKQKNPSWSNVRIRNHLKNTATSLGSTNLYGSGLVNAEAATR

SEQ ID NO: 64472 - protein, 380 aa, Unidentified
VRSKKLWIVASTALLISVAFSSSIASAAEEAKEKYLIGFNEQEAVSEFVEQVEANDEVAILSEEEEVEIELLHEFETIPVLSVELSPEDVDALELDPAISYIEEDAEVTTMAQSVPWGISRVQAPAAHRRRLTGSGVKVAVLDTGISTHPDLDIRGGASFVPGEPSTQDGNGHGTHVAGTIAALDNSIGVLGVAPSAELYAVKVLGASGGGAISSIAQGLEWAGNNGMHVANLSLGSPSPSATLEQAVNSATSRGVLVVAASGNSGAGSISYPARYANAMAVGATDQNNNRASFSQYGAGLDIVAPGVNVQSTYPGSTYASLNGTSMATPHVAGAAVLVKQKNPSWSNVRIRNHLKNTATSLGSTNLYGSGLVNAEAATR

SEQ ID NO: 64473 - protein, 380 aa, Unidentified
VRSKKLWIVASTALLISVAFSSSIASAAEEAKEKYLIGFNEQEAVSEFVEQVEANDEVAILSEEEEVEIELLHEFETIPVLSVELSPEDVDALELDPAISYIEEDAEVTTMAQSVPWGISRVQAPAAHRRGLWGRGVKVAVLDTGISTHPDLNIRGGASFVPGEPSTQDGNGHGTHVAGTIAALDNSIGVLGVAPSAELYAVKVLGASGAGSVSSIAQGLEWAGANGMHVANLSLGSPSPSATLEQAVNSATSRGVLVVAASGNSGAGSISYPARYANAMAVGATDQNNNRASFSQYGAGLDLVAPGVNVQSTYPQSTYASLNGTSMATPHVAGAAALVKQKNPSWSNVQIRNRLKNTATSLGSTNLYGSGLVNAEAATR

SEQ ID NO: 64474 - protein, 380 aa, Unidentified
VRSKKLWIVASTALLISVAFSSSIASAAEEAKEKYLIGFNEQEAVSEFVEQVEANDEVAILSEEEEVEIELLHEFETIPVLSVELSPEDVDALELDPAISYIEEDAEVTTMAQSVPWGISRVQAPAAHRRRLWGRGVKVAVLDTGISTHPDLNIRGGASFVPGEPSTQDGNGHGTHVAGTIAALDNSIGVLGVAPSAELYAVKVLGASGSGSVSSIAQGLEWAGANGMHVANLSLGSPSPSATLEQAVNSATSRGVLVVAASGNSGAGSISYPARYANAMAVGATDQDNNRASFSQYGAGLDIVAPGVNVQSTYPGSAYASLNGTSMATPHVAGAAALVKQKNPSWSNVQIRNRLKNTATSLGSTNLYGSGLVNAEAATR

SEQ ID NO: 64475 - protein, 380 aa, Unidentified
VRSKKLWIVASTALLISVAFSSSIASAAEEAKEKYLIGFNEQEAVSEFVEQVEANDEVAILSEEEEVEIELLHEFETIPVLSVELSPEDVDALELDPAISYIEEDAEVTTMAQSVPWGISRVQAPAAHNRGLAGSGVKVAVLDTGISTHPDLNIRGGASFVPGEPSTQDGNGHGTHVAGTIAALNNSIGVLGVAPSAELYAVKVLGASGGGAISSIAQGLEWAGNNGMHVANLSLGSESPSATLEQAVNSATSRGVLVVAASGNSGAGSISYPARYANAMAVGATDQNNNRASFSQYGAGLDIVAPGVNVQSTYPGSTYASLNGTSMATPHVAGAAVLVKQKRPSWSNVRIRDHLKNTATSLGSTNLYGSGLVNAEAATR

SEQ ID NO: 64476 - protein, 380 aa, Unidentified
VRSKKLWIVASTALLISVAFSSSIASAAEEAKEKYLIGFNEQEAVSEFVEQVEANDEVAILSEEEEVEIELLHEFETIPVLSVELSPEDVDALELDPAISYIEEDAEVTTMAQSVPWGISRVQAPAAHRRRLWGRGVKVAVLDTGISTHPDLNIRGGASFVPGEPSTQDGNGHGTHVAGTIAALDNSIGVLGVAPSAELYAVKVLGASGSGSVSSIAQGLEWAGNNGMHVANLSLGSPSPSATLEQAVNSATSRGVLVVAASGNSGAGSISYPARYANAMAVGATDQNNNRASFSQYGAGLDLVAPGVNVQSTYPQSTYFSLNGTSMATPHVAGAAALVKQKNPSWSNVQIRNRLKNTATSLGSTNLYGSGLVNAEAATR

SEQ ID NO: 64477 - protein, 380 aa, Unidentified
VRSKKLWIVASTALLISVAFSSSIASAAEEAKEKYLIGFNEQEAVSEFVEQVEANDEVAILSEEEEVEIELLHEFETIPVLSVELSPEDVDALELDPAISYIEEDAEVTTMAQSVPWGISRVQAPAAHNRGLTGRGVKVAVLDTGISTHPDLNIRGGASFVPGEPSTQDGNGHGTHVAGTIAALNNSIGVLGVAPSAELYAVKVLGASGGGAISSIAQGLEWAGNNGMHVANLSLGSPSPSATLEQAVNSATSRGVLVVAASGNSGEGSISYPARYANAMAVGATDQNNNRASFSQYGAGLDIVAPGVNVQSTYPGSTYASLNGTSMATPHVAGAAVLVKQKNPSWSNVRIRDRLKNTATSLGSTNLYGSGLVNAEAATR

SEQ ID NO: 64478 - protein, 380 aa, Unidentified
VRSKKLWIVASTALLISVAFSSSIASAAEEAKEKYLIGFNEQEAVSEFVEQVEANDEVAILSEEEEVEIELLHEFETIPVLSVELSPEDVDALELDPAISYIEEDAEVTTMAQSVPWGISRVQAPAAHRRGLWGRGVKVAVLDTGISTHPDLNIRGGASFVPGEPSTQDGNGHGTHVAGTIAALDNSIGVLGVAPSAELYAVKVLGASGSGSVSSIAQGLEWAGANGMHVANLSLGSPSPSATLEQAVNSATSRGVLVVAASGNSGAGSISYPARYANAMAVGATDQNNNRASFSQYGAGLDLVAPGVNVQSTYPQSTYFSLNGTSMATPHVAGAAALVKQKNPSWSNVQIRNRLKNTATSLGSTNLYGSGLVNAEAATR

SEQ ID NO: 64479 - protein, 380 aa, Unidentified
VRSKKLWIVASTALLISVAFSSSIASAAEEAKEKYLIGFNEQEAVSEFVEQVEANDEVAILSEEEEVEIELLHEFETIPVLSVELSPEDVDALELDPAISYIEEDAEVTTMAQSVPWGISRVQAPAAHNRRLTGRGVKVAVLDTGISTHPDLDIRGGASFVPGEPSTQDGNGHGTHVAGTIAALNNRIGVLGVAPSAELYAVKVLGASGGGAISSIAQGLEWAGNNGMHVANLSLGSPSPSATLEQAVNSATSRGVLVVAASGNSGAGSISYPARYANAMAVGATDQNNNRASFSQYGAGLDIVAPGVNVQSTYPGSTYASLNGTSMATPHVAGAAVLVKQKNPSWSNVRIRNHLKNTATSLGSTNLYGSGLVNAEAATR

SEQ ID NO: 64480 - protein, 380 aa, Unidentified
VRSKKLWIVASTALLISVAFSSSIASAAEEAKEKYLIGFNEQEAVSEFVEQVEANDEVAILSEEEEVEIELLHEFETIPVLSVELSPEDVDALELDPAISYIEEDAEVTTMAQSVPWGISRVQAPAAHNRGLTGSGVKVAVLDTGISTHPDLNIRGGASFVPGEPSTQDGNGHGTHVAGTIAALNNSIGVLGVAPSAELYAVKVLGASGGGAISSIAQGLEWAGNNGMHVANLSLGSPSPSATLEQAVNSATSRGVLVVAASGNSGEESISYPARYANAMAVGATDQNNNRASFSQYGAGLDIVAPGVNVQSTYPGSTYASLNGTSMATPHVAGAAVLVKQKNPSWSNVRIRDRLKNTATSLGSTNLYGSGLVNAEAATR

SEQ ID NO: 64481 - protein, 380 aa, Unidentified
VRSKKLWIVASTALLISVAFSSSIASAAEEAKEKYLIGFNEQEAVSEFVEQVEANDEVAILSEEEEVEIELLHEFETIPVLSVELSPEDVDALELDPAISYIEEDAEVTTMAQSVPWGISRVQAPAAHNRGLTGSGVKVAVLDTGISTHPDLNIRGGASFVPGEPSTQDGNGHGTHVAGTIAALNNSIGVLGVAPSAELYAVKVLGASGGGAISSIAQGLEWAGNNGMHVANLSLGSESPSATLEQAVNSATSRGVLVVAASGNSGAESISYPARYANAMAVGATDQNNNRASFSQYGAGLDIVAPGVNVQSTYPGSTYASLNGTSMATPHVAGAAVLVKQKNPSWSNVRIRDRLKNTATSLGSTNLYGSGLVNAEAATR

SEQ ID NO: 64482 - protein, 380 aa, Unidentified
VRSKKLWIVASTALLISVAFSSSIASAAEEAKEKYLIGFNEQEAVSEFVEQVEANDEVAILSEEEEVEIELLHEFETIPVLSVELSPEDVDALELDPAISYIEEDAEVTTMAQSVPWGISRVQAPAAHRRGLTGSGVKVAVLDTGISTHPDLDIRGGASFVPGEPSTQDGNGHGTHVAGTIAALNNRIGVLGVAPSAELYAVKVLGASGGGAISSIAQGLEWAGNNGMHVANLSLGSPSPSATLEQAVNSATSRGVLVVAASGNSGAGSISYPARYANAMAVGATDQNNNRASFSQYGAGLDIVAPGVNVQSTYPGSTYASENGTSMATPHVAGAAVLVKQKNPSWSNVRIRNHLKNTATSLGSTNLYGSGLVNAEAATR

SEQ ID NO: 64483 - protein, 380 aa, Unidentified
VRSKKLWIVASTALLISVAFSSSIASAAEEAKEKYLIGFNEQEAVSEFVEQVEANDEVAILSEEEEVEIELLHEFETIPVLSVELSPEDVDALELDPAISYIEEDAEVTTMAQSVPWGISRVQAPAAHNRGLTGSGVKVAVLDTGISTHPDLNIRGGASFVPGEPSTQDGNGHGTHVAGTIAALNNSIGVLGVAPSAELYAVKVLGASGGGAISSIAQGLEWAGNNGMHVANLSLGSPSPSATLEQAVNSATSRGVLVVAASGNSGEGSISYPARYANAMAVGATDQNNNRADFSQYGAGLDIVAPGVNVQSTYPGSTYASLNGTSQATPHVAGAAVLVKQKNPSWSNVRIRDRLKNTATSLGSTNLYGSGLVNAEAATR

SEQ ID NO: 64484 - protein, 380 aa, Unidentified
VRSKKLWIVASTALLISVAFSSSIASAAEEAKEKYLIGFNEQEAVSEFVEQVEANDEVAILSEEEEVEIELLHEFETIPVLSVELSPEDVDALELDPAISYIEEDAEVTTMAQSVPWGISRVQAPAAHNRGLTGSGVKVAVLDTGISTHPDLNIRGGASFVPGEPSTQDGNGHGTHVAGTIAALNNSIGVLGVAPSAELYAVKVLGASGGGGISSIAQGLEWAGNNGMHVANLSLGSPSPSATLEQAVNSATSRGVLVVAASGNSGEGSISYPARYANAMAVGATDQNNNRADFSQYGAGLDIVAPGVNVQSTYPGSTYASLNGTSMATPHVAGAAVLVKQKNPSWSNVRIRDRLKNTATSLGSTNLYGSGLVNAEAATR

SEQ ID NO: 64485 - protein, 380 aa, Unidentified
VRSKKLWIVASTALLISVAFSSSIASAAEEAKEKYLIGFNEQEAVSEFVEQVEANDEVAILSEEEEVEIELLHEFETIPVLSVELSPEDVDALELDPAISYIEEDAEVTTMAQSVPWGISRVQAPAAHRRRLWGRGVKVAVLDTGISTHPDLNIRGGASFVPGEPSTQDGNGHGTHVAGTIAALDNSIGVLGVAPSAELYAVKVLGASGSGSVSSIAQGLEWAGANGMHVANLSLGSPSPSATLEQAVNSATSRGVLVVAASGNSGAGSISYPARYANAMAVGATDQDNNRASFSQYGAGLDIVAPGVNVQSTYPGSTYFSLNGTSMATPHVAGAAALVKQKNPSWSNVQIRNRLKNTATSLGSTNLYGSGLVNAEAATR

SEQ ID NO: 64486 - protein, 380 aa, Unidentified
VRSKKLWIVASTALLISVAFSSSIASAAEEAKEKYLIGFNEQEAVSEFVEQVEANDEVAILSEEEEVEIELLHEFETIPVLSVELSPEDVDALELDPAISYIEEDAEVTTMAQSVPWGISRVQAPAAHRRGLTGRGVKVAVLDTGISTHPDLNIRGGASFVPGEPSTQDGNGHGTHVAGTIAALDNSIGVLGVAPSAELYAVKVLGASGAGSVSSIAQGLEWAGANGMHVANLSLGSPSPSATLEQAVNSATSRGVLVVAASGNSGAGSISYPARYANAMAVGATDQDNNRASFSQYGAGLDIVAPGVNVQSTYPQSTYFSLNGTSMATPHVAGAAALVKQKNPSWSNVQIRNRLKNTATSLGSTNLYGSGLVNAEAATR

SEQ ID NO: 64487 - protein, 380 aa, Unidentified
VRSKKLWIVASTALLISVAFSSSIASAAEEAKEKYLIGFNEQEAVSEFVEQVEANDEVAILSEEEEVEIELLHEFETIPVLSVELSPEDVDALELDPAISYIEEDAEVTTMAQSVPWGISRVQAPAAHNRGLAGRGVKVAVLDTGISTHPDLNIRGGASFVPGEPSTQDGNGHGTHVAGTIAALNNSIGVLGVAPSAELYAVKVLGASGSGAISSIAQGLEWAGNNGMHVANLSLGIPSPSATLEQAVNSATSRGVLVVAASGNSGADSISYPARYANAMAVGATDQNNNRADFSQYGAGLDIVAPGVNVQSTYPGSTYASLNGTSMATPHVAGAAVLVKQKNPSWSNVQIRDHLKNTATSLGSTNLYGSGLVNAEAATR

SEQ ID NO: 64488 - protein, 380 aa, Unidentified
VRSKKLWIVASTALLISVAFSSSIASAAEEAKEKYLIGFNEQEAVSEFVEQVEANDEVAILSEEEEVEIELLHEFETIPVLSVELSPEDVDALELDPAISYIEEDAEVTTMAQSVPWGISRVQAPAAHRRGLWGRGVKVAVLDTGISTHPDLNIRGGASFVPGEPSTQDGNGHGTHVAGTIAALDNSIGVLGVAPSAELYAVKVLGASGSGSVSSIAQGLEWAGANGMHVANLSLGSPSPSATLEQAVNSATSRGVLVVAASGNSGAGSISYPARYANAMAVGATDQDNNRASFSQYGAGLDIVAPGVNVQSTYPQSAYASLNGTSMATPHVAGAAALVKQKNPSWSNVQIRNRLKNTATSLGSTNLYGSGLVNAEAATR

SEQ ID NO: 64489 - protein, 380 aa, Unidentified
VRSKKLWIVASTALLISVAFSSSIASAAEEAKEKYLIGFNEQEAVSEFVEQVEANDEVAILSEEEEVEIELLHEFETIPVLSVELSPEDVDALELDPAISYIEEDAEVTTMAQSVPWGISRVQAPAAHRRGLWGRGVKVAVLDTGISTHPDLNIRGGASFVPGEPSTQDGNGHGTHVAGTIAALDNSIGVLGVAPSAELYAVKVLGASGSGSVSSIAQGLEWAGANGMHVANLSLGSPSPSATLEQAVNSATSRGVLVVAASGNSGAGSISYPARYANAMAVGATDQNNNRASFSQYGAGLDLVAPGVNVQSTYPGSTYFSLNGTSMATPHVAGAAALVKQKNPSWSNVQIRNRLKNTATSLGSTNLYGSGLVHAEAATR

SEQ ID NO: 64490 - protein, 380 aa, Unidentified
VRSKKLWIVASTALLISVAFSSSIASAAEEAKEKYLIGFNEQEAVSEFVEQVEANDEVAILSEEEEVEIELLHEFETIPVLSVELSPEDVDALELDPAISYIEEDAEVTTMAQSVPWGISRVQAPAAHRRGLTGSGVKVAVLDTGISTHPDLDIRGGASFVPGEPSTQDGNGHGTHVAGTIAALNNRIGVLGVAPSAELYAVKVLGASGGGAISSIAQGLEWAGNNGMHVANLSLGSPSPSATLEQAVNSATSRGVLVVAASGNSGAGSISYPARYANAMAVGATDQNNNRASFSQYGAGLDIVAPGVNVQSTYPGSTYASLNGTSMATPHVAGAAVLVKQKNPSWSNVRIRNRLKNTATSLGSTNLYGSGLVNAEAATR

SEQ ID NO: 64491 - protein, 380 aa, Unidentified
VRSKKLWIVASTALLISVAFSSSIASAAEEAKEKYLIGFNEQEAVSEFVEQVEANDEVAILSEEEEVEIELLHEFETIPVLSVELSPEDVDALELDPAISYIEEDAEVTTMAQSVPWGISRVQAPAAHNRGLTGRGVKVAVLDTGISTHPDLNIRGGASFVPGEPSTQDGNGHGTHVAGTIAALDNRIGVLGVAPSAELYAVKVLGASGGGAISSIAQGLEWAGNNGMHVANLSLGSPSPSATLEQAVNSATSRGVLVVAASGNSGAGSISYPARYANAMAVGATDQNNNRASFSQYGAGLDIVAPGVNVQSTYPGSTYASLNGTSMATPHVAGAAVLVKQKNPSWSNVRIRNRLKNTATSLGSTNLYGSGLVNAEAATR

SEQ ID NO: 64492 - protein, 380 aa, Unidentified
VRSKKLWIVASTALLISVAFSSSIASAAEEAKEKYLIGFNEQEAVSEFVEQVEANDEVAILSEEEEVEIELLHEFETIPVLSVELSPEDVDALELDPAISYIEEDAEVTTMAQSVPWGISRVQAPAAHRRGLWGRGVKVAVLDTGISTHPDLNIRGGASFVPGEPSTQDGNGHGTHVAGTIAALDNSIGVLGVAPSAELYAVKVLGASGSGSVSSIAQGLEWAGNNGMHVANLSLGSPSPSATLEQAVNSATSRGVLVVAASGNSGAGSISYPARYANAMAVGATDQDNNRASFSQYGAGLDLVAPGVNVQSTYPQSAYASLNGTSMATPHVAGAAALVKQKNPSWSNVQIRNRLKNTATSLGSTNLYGSGLVNAEAATR

SEQ ID NO: 64493 - protein, 380 aa, Unidentified
VRSKKLWIVASTALLISVAFSSSIASAAEEAKEKYLIGFNEQEAVSEFVEQVEANDEVAILSEEEEVEIELLHEFETIPVLSVELSPEDVDALELDPAISYIEEDAEVTTMAQSVPWGISRVQAPAAHRRRLTGRGVKVAVLDTGISTHPDLNIRGGASFVPGEPSTQDGNGHGTHVAGTIAALDNSIGVLGVAPSAELYAVKVLGASGSGSVSSIAQGLEWAGNNGMHVANLSLGSPSPSATLEQAVNSATSRGVLVVAASGNSGAGSISYPARYANAMAVGATDQDNNRASFSQYGAGLDIVAPGVNVQSTYPQSAYFSLNGTSMATPHVAGAAALVKQKNPSWSNVQIRNRLKNTATSLGSTNLYGSGLVNAEAATR

SEQ ID NO: 64494 - protein, 380 aa, Unidentified
VRSKKLWIVASTALLISVAFSSSIASAAEEAKEKYLIGFNEQEAVSEFVEQVEANDEVAILSEEEEVEIELLHEFETIPVLSVELSPEDVDALELDPAISYIEEDAEVTTMAQSVPWGISRVQAPAAHNRGLTGRGVKVAVLDTGISTHPDLNIRGGASFVPGEPSTQDGNGHGTHVAGTIAALNNSIGVLGVAPSAELYAVKVLGASGGGAISSIAQGLEWAGNNGMHVANLSLGSPSPSATLEQAVNSATSRGVLVVAASGNSGAESISYPARYANAMAVGATDQNNNRADFSQYGAGLDIVAPGVNVQSTYPGSTYASLNGTSMATPHVAGAAVLVKQKNPSWSNVRIRDHLKNTATSLGSTNLYGSGLVNAEAATR

SEQ ID NO: 64495 - protein, 380 aa, Unidentified
VRSKKLWIVASTALLISVAFSSSIASAAEEAKEKYLIGFNEQEAVSEFVEQVEANDEVAILSEEEEVEIELLHEFETIPVLSVELSPEDVDALELDPAISYIEEDAEVTTMAQSVPWGISRVQAPAAHRRRLTGSGVKVAVLDTGISTHPDLDIRGGASFVPGEPSTQDGNGHGTHVAGTIAALNNRIGVLGVAPSAELYAVKVLGASGGGAISSIAQGLEWAGNNGMHVANLSLGSPSPSATLEQAVNSATSRGVLVVAASGNSGAGSISYPARYANAMAVGATDQNNNRASFSQYGAGLDIVAPGVNVQSTYPGSTYASLNGTSMATPHVAGAAVLVKQKNPSWSNVRIRNHLKNTATSLGSTNLYGSGLVNAEAATR

SEQ ID NO: 64496 - protein, 380 aa, Unidentified
VRSKKLWIVASTALLISVAFSSSIASAAEEAKEKYLIGFNEQEAVSEFVEQVEANDEVAILSEEEEVEIELLHEFETIPVLSVELSPEDVDALELDPAISYIEEDAEVTTMAQSVPWGISRVQAPAAHNRRLTGSGVKVAVLDTGISTHPDLNIRGGASFVPGEPSTQDGNGHGTHVAGTIAALNNSIGVLGVAPSAELYAVKVLGASGAGAISSIAQGLEWAGANGMHVANLSLGSPSPSATLEQAVNSATSRGVLVVAASGNSGAGSISYPARYANAMAVGATDQDNNRASFSQYGAGLDIVAPGVNVQSTYPGSTYFSLNGTSMATPHVAGAAVLVKQKNPSWSNVRIRNHLKNTATSLGSTNLYGSGLVNAEAATR

SEQ ID NO: 64497 - protein, 380 aa, Unidentified
VRSKKLWIVASTALLISVAFSSSIASAAEEAKEKYLIGFNEQEAVSEFVEQVEANDEVAILSEEEEVEIELLHEFETIPVLSVELSPEDVDALELDPAISYIEEDAEVTTMAQSVPWGISRVQAPAAHNRGLTGSGVKVAVLDTGISTHPDLRITGGASFVPGEPSTQDGNGHGTHVAGTIAALNNRIGVLGVAPSAELYAVKVLGASGGGAISSIAQGLEWAGNNGMHVANLSLGSPSPSATLEQAVNSATSRGVLVVAASGNSGAGSISYPARYANAMAVGATDQNNNRASFSQYGAGLDIVAPGVNVQSTYPGSTYASLSGTSMATPHVAGAAVLVKQKNPSWSNVRIRNHLKNTATSLGSTNLYGSGLVNAEAATR

SEQ ID NO: 64498 - protein, 380 aa, Unidentified
VRSKKLWIVASTALLISVAFSSSIASAAEEAKEKYLIGFNEQEAVSEFVEQVEANDEVAILSEEEEVEIELLHEFETIPVLSVELSPEDVDALELDPAISYIEEDAEVTTMAQSVPWGISRVQAPAAHRRGLTGRGVKVAVLDTGISTHPDLNIRGGASFVPGEPSTQDGNGHGTHVAGTIAALDNSIGVLGVAPSAELYAVKVLGASGAGSVSSIAQGLEWAGNNGMHVANLSLGSPSPSATLEQAVNSATSRGVLVVAASGNSGAGSISYPARYANAMAVGATDQDNNRASFSQYGAGLDLVAPGVNVQSTYPGSAYFSLNGTSMATPHVAGAAALVKQKNPSWSNVQIRNRLKNTATSLGSTNLYGSGLVNAEAATR

SEQ ID NO: 64499 - protein, 380 aa, Unidentified
VRSKKLWIVASTALLISVAFSSSIASAAEEAKEKYLIGFNEQEAVSEFVEQVEANDEVAILSEEEEVEIELLHEFETIPVLSVELSPEDVDALELDPAISYIEEDAEVTTMAQSVPWGISRVQAPAAHRRRLWGRGVKVAVLDTGISTHPDLNIRGGASFVPGEPSTQDGNGHGTHVAGTIAALDNSIGVLGVAPSAELYAVKVLGASGSGSVSSIAQGLEWAGNNGMHVANLSLGSPSPSATLEQAVNSATSRGVLVVAASGNSGAGSISYPARYANAMAVGATDQDNNRASFSQYGAGLDIVAPGVNVQSTYPQSAYASLNGTSMATPHVAGAAALVKQKNPSWSNVQIRNRLKNTATSLGSTNLYGSGLVNAEAATR

SEQ ID NO: 64500 - protein, 380 aa, Unidentified
VRSKKLWIVASTALLISVAFSSSIASAAEEAKEKYLIGFNEQEAVSEFVEQVEANDEVAILSEEEEVEIELLHEFETIPVLSVELSPEDVDALELDPAISYIEEDAEVTTMAQSVPWGISRVQAPAAHRRRLTGRGVKVAVLDTGISTHPDLNIRGGASFVPGEPSTQDGNGHGTHVAGTIAALDNSIGVLGVAPSAELYAVKVLGASGAGSVSSIAQGLEWAGANGMHVANLSLGSPSPSATLEQAVNSATSRGVLVVAASGNSGAGSISYPARYANAMAVGATDQDNNRASFSQYGAGLDIVAPGVNVQSTYPGSAYASLNGTSMATPHVAGAAALVKQKNPSWSNVQIRNRLKNTATSLGSTNLYGSGLVNAEAATR

SEQ ID NO: 64501 - protein, 380 aa, Unidentified
VRSKKLWIVASTALLISVAFSSSIASAAEEAKEKYLIGFNEQEAVSEFVEQVEANDEVAILSEEEEVEIELLHEFETIPVLSVELSPEDVDALELDPAISYIEEDAEVTTMAQSVPWGISRVQAPAAHNRGLTGSGVKVAVLDTGISTHPDLNIRGGASFVPGEPSTQDGNGHGTHVAGTIAALNNSIGVLGVAPSAELYAVKVLGASGGGAISSIAQGLEWAGNNGMHVANLSLGSPSPSATLEQAVNSATSRGVLVVAASGNSGEGSISYPARYANAMAVGATDQNNNRADFSQYGAGLDIVAPGVNVQSTYPGSTYASLNGTSMATPHVAGAAVLVKQKNPSWSNVRIRDRLKNTATSLGSTNLYGSGLVNAEAATR

SEQ ID NO: 64502 - protein, 380 aa, Unidentified
VRSKKLWIVASTALLISVAFSSSIASAAEEAKEKYLIGFNEQEAVSEFVEQVEANDEVAILSEEEEVEIELLHEFETIPVLSVELSPEDVDALELDPAISYIEEDAEVTTMAQSVPWGISRVQAPAAHNRRLWGSGVKVAVLDTGISTHPDLNIRGGASFVPGEPSTQDGNGHGTHVAGTIAALNNSIGVLGVAPSAELYAVKVLGASGAGAISSIAQGLEWAGNNGMHVANLSLGSPSPSATLEQAVNSATSRGVLVVAASGNSGAGSISYPARYANAMAVGATDQNNNRASFSQYGAGLDIVAPGVNVQSTYPQSAYASLNGTSMATPHVAGAAVLVKQKNPSWSNVRIRNHLKNTATSLGSTNLYGSGLVNAEAATR

SEQ ID NO: 64503 - protein, 380 aa, Unidentified
VRSKKLWIVASTALLISVAFSSSIASAAEEAKEKYLIGFNEQEAVSEFVEQVEANDEVAILSEEEEVEIELLHEFETIPVLSVELSPEDVDALELDPAISYIEEDAEVTTMAQSVPWGISRVQAPAAHNRGLTGRGVKVAVLDTGISTHPDLNIRGGASFVPGEPSTQDGNGHGTHVAGTIAALNNSIGVLGVAPSAELYAVKVLGASGGGAISSIAQGLEWAGNNGMHVANLSLGNPSPSATLEQAVNSATSRGVLVVAASGNSGEGSISYPARYANAMAVGATDQNNNRASFSQYGAGLDIVAPGVNVQSTYPGSTYASLNGTSMATPHVAGAAVLVKQKNPSWSNVRIRDHLKNTATSLGSTNLYGSGLVNAEAATR

SEQ ID NO: 64504 - protein, 380 aa, Unidentified
VRSKKLWIVASTALLISVAFSSSIASAAEEAKEKYLIGFNEQEAVSEFVEQVEANDEVAILSEEEEVEIELLHEFETIPVLSVELSPEDVDALELDPAISYIEEDAEVTTMAQSVPWGISRVQAPAAHRRRLTGRGVKVAVLDTGISTHPDLNIRGGASFVPGEPSTQDGNGHGTHVAGTIAALDNSIGVLGVAPSAELYAVKVLGASGSGSVSSIAQGLEWAGANGMHVANLSLGSPSPSATLEQAVNSATSRGVLVVAASGNSGAGSISYPARYANAMAVGATDQNNNRASFSQYGAGLDIVAPGVNVQSTYPQSAYFSLNGTSMATPHVAGAAALVKQKNPSWSNVQIRNRLKNTATSLGSTNLYGSGLVNAEAATR

SEQ ID NO: 64505 - protein, 380 aa, Unidentified
VRSKKLWIVASTALLISVAFSSSIASAAEEAKEKYLIGFNEQEAVSEFVEQVEANDEVAILSEEEEVEIELLHEFETIPVLSVELSPEDVDALELDPAISYIEEDAEVTTMAQSVPWGISRVQAPAAHRRGLTGRGVKVAVLDTGISTHPDLDIRGGASFVPGEPSTQDGNGHGTHVAGTIAALDNSIGVLGVAPSAELYAVKVLGASGGGAISSIAQGLEWAGNNGMHVANLSLGSPSPSATLEQAVNSATSRGVLVVAASGNSGAGSISYPARYANAMAVGATDQNNNRASFSQYGAGLDIVAPGVNVQSTYPGSTYASLNGTSMATPHVAGAAVLVKQKNPSWSNVRIRNHLKNTATSLGSTNLYGSGLVNAEAATR

SEQ ID NO: 64506 - protein, 380 aa, Unidentified
VRSKKLWIVASTALLISVAFSSSIASAAEEAKEKYLIGFNEQEAVSEFVEQVEANDEVAILSEEEEVEIELLHEFETIPVLSVELSPEDVDALELDPAISYIEEDAEVTTMAQSVPWGISRVQAPAAHNRGLTGRGVKVAVLDTGISTHPDLNIRGGASFVPGEPSTQDGNGHGTHVAGTIAALNNSIGVLGVAPSAELYAVKVLGASGGGAISSIAQGLEWAGNNGMHVANLSLGNESPSATLEQAVNSATSRGVLVVAASGNSGAGSISYPARYANAMAVGATDQNNNRASFSQYGAGLDIVAPGVNVQSTYPGSTYASLNGTSMATPHVAGAAVLVKQKNPSWSNVRIRDHLKNTATSLGSTNLYGSGLVNAEAATR

SEQ ID NO: 64507 - protein, 380 aa, Unidentified
VRSKKLWIVASTALLISVAFSSSIASAAEEAKEKYLIGFNEQEAVSEFVEQVEANDEVAILSEEEEVEIELLHEFETIPVLSVELSPEDVDALELDPAISYIEEDAEVTTMAQSVPWGISRVQAPAAHRRRLTGRGVKVAVLDTGISTHPDLNIRGGASFVPGEPSTQDGNGHGTHVAGTIAALDNSIGVLGVAPSAELYAVKVLGASGAGSVSSIAQGLEWAGANGMHVANLSLGSPSPSATLEQAVNSATSRGVLVVAASGNSGAGSISYPARYANAMAVGATDQNNNRASFSQYGAGLDLVAPGVNVQSTYPGSTYFSLNGTSMATPHVAGAAALVKQKNPSWSNVQIRNRLKNTATSLGSTNLYGSGLVNAEAATR

SEQ ID NO: 64508 - protein, 380 aa, Unidentified
VRSKKLWIVASTALLISVAFSSSIASAAEEAKEKYLIGFNEQEAVSEFVEQVEANDEVAILSEEEEVEIELLHEFETIPVLSVELSPEDVDALELDPAISYIEEDAEVTTMAQSVPWGISRVQAPAAHRRRLTGRGVKVAVLDTGISTHPDLNIRGGASFVPGEPSTQDGNGHGTHVAGTIAALDNSIGVLGVAPSAELYAVKVLGASGSGSVSSIAQGLEWAGANGMHVANLSLGSPSPSATLEQAVNSATSRGVLVVAASGNSGAGSISYPARYANAMAVGATDQDNNRASFSQYGAGLDLVAPGVNVQSTYPQSTYASLNGTSMATPHVAGAAALVKQKNPSWSNVQIRNRLKNTATSLGSTNLYGSGLVNAEAATR

SEQ ID NO: 64509 - protein, 380 aa, Unidentified
VRSKKLWIVASTALLISVAFSSSIASAAEEAKEKYLIGFNEQEAVSEFVEQVEANDEVAILSEEEEVEIELLHEFETIPVLSVELSPEDVDALELDPAISYIEEDAEVTTMAQSVPWGISRVQAPAAHNRGLTGSGVKVAVLDTGISTHPDLNIRGGASFVPGEPSTQDGNGHGTHVAGTIAALNNSIGVLGVAPSAELYAVKVLGASGGGAISSIAQGLEWAGNNGMHVANLSLGSESPSATLEQAVNSATSRGVLVVAASGNSGAGSISYPARYANAMAVGATDQNNNRADFSQYGAGLDIVAPGVNVQSTYPGSTYASLNGTSMATPHVAGAAVLVKQKRPSWSNVRIRDHLKNTATSLGSTNLYGSGLVNAEAATR

SEQ ID NO: 64510 - protein, 380 aa, Unidentified
VRSKKLWIVASTALLISVAFSSSIASAAEEAKEKYLIGFNEQEAVSEFVEQVEANDEVAILSEEEEVEIELLHEFETIPVLSVELSPEDVDALELDPAISYIEEDAEVTTMAQSVPWGISRVQAPAAHNRGLTGSGVKVAVLDTGISTHPDLRITGGASFVPGEPSTQDGNGHGTHVAGTIAALDNSIGVLGVAPSAELYAVKVLGASGGGAISSIAQGLEWAGNNGMHVANLSLGSPSPSATLEQAVNSATSRGVLVVAASGNSGAGSISYPARYANAMAVGATDQNNNRASFSQYGAGLDIVAPGVNVQSTYPGSTYASLNGTSMATPHVAGAAVLVKQKNPSWSNVRIRNHLKNTATSLGSTNLYGSGLVRAEAATR

SEQ ID NO: 64511 - protein, 380 aa, Unidentified
VRSKKLWIVASTALLISVAFSSSIASAAEEAKEKYLIGFNEQEAVSEFVEQVEANDEVAILSEEEEVEIELLHEFETIPVLSVELSPEDVDALELDPAISYIEEDAEVTTMAQSVPWGISRVQAPAAHRRGLTGRGVKVAVLDTGISTHPDLNIRGGASFVPGEPSTQDGNGHGTHVAGTIAALDNSIGVLGVAPSAELYAVKVLGASGAGSVSSIAQGLEWAGANGMHVANLSLGSPSPSATLEQAVNSATSRGVLVVAASGNSGAGSISYPARYANAMAVGATDQDNNRASFSQYGAGLDLVAPGVNVQSTYPQSTYASLNGTSMATPHVAGAAALVKQKNPSWSNVQIRNRLKNTATSLGSTNLYGSGLVNAEAATR

SEQ ID NO: 64512 - protein, 380 aa, Unidentified
VRSKKLWIVASTALLISVAFSSSIASAAEEAKEKYLIGFNEQEAVSEFVEQVEANDEVAILSEEEEVEIELLHEFETIPVLSVELSPEDVDALELDPAISYIEEDAEVTTMAQSVPWGISRVQAPAAHRRRLTGRGVKVAVLDTGISTHPDLNIRGGASFVPGEPSTQDGNGHGTHVAGTIAALDNSIGVLGVAPSAELYAVKVLGASGAGSVSSIAQGLEWAGANGMHVANLSLGSPSPSATLEQAVNSATSRGVLVVAASGNSGAGSISYPARYANAMAVGATDQNNNRASFSQYGAGLDIVAPGVNVQSTYPQSAYASLNGTSMATPHVAGAAALVKQKNPSWSNVQIRNRLKNTATSLGSTNLYGSGLVNAEAATR

SEQ ID NO: 64513 - protein, 380 aa, Unidentified
VRSKKLWIVASTALLISVAFSSSIASAAEEAKEKYLIGFNEQEAVSEFVEQVEANDEVAILSEEEEVEIELLHEFETIPVLSVELSPEDVDALELDPAISYIEEDAEVTTMAQSVPWGISRVQAPAAHRRGLTGRGVKVAVLDTGISTHPDLNIRGGASFVPGEPSTQDGNGHGTHVAGTIAALDNSIGVLGVAPSAELYAVKVLGASGAGSVSSIAQGLEWAGANGMHVANLSLGSPSPSATLEQAVNSATSRGVLVVAASGNSGAGSISYPARYANAMAVGATDQNNNRASFSQYGAGLDLVAPGVNVQSTYPQSTYFSLNGTSMATPHVAGAAALVKQKNPSWSNVQIRNRLKNTATSLGSTNLYGSGLVNAEAATR

SEQ ID NO: 64514 - protein, 380 aa, Unidentified
VRSKKLWIVASTALLISVAFSSSIASAAEEAKEKYLIGFNEQEAVSEFVEQVEANDEVAILSEEEEVEIELLHEFETIPVLSVELSPEDVDALELDPAISYIEEDAEVTTMAQSVPWGISRVQAPAAHNRGLTGSGVKVAVLDTGISTHPDLNIRGGASFVPGEPSTQDGNGHGTHVAGTIAALNNSIGVLGVAPSAELYAVKVLGASGGGAISSIAQGLEWAGNNGMHVANLSLGSESPSATLEQAVNSATSRGVIVVAASGNSGAGSISYPARYANAMAVGATDQNNNRADFSQYGAGLDIVAPGVNVQSTYPGSTYASLNGTSMATPHVAGAAVLVKQKNPSWSNVRIRDHLKNTATSLGSTNLYGSGLVNAEAATR

SEQ ID NO: 64515 - protein, 380 aa, Unidentified
VRSKKLWIVASTALLISVAFSSSIASAAEEAKEKYLIGFNEQEAVSEFVEQVEANDEVAILSEEEEVEIELLHEFETIPVLSVELSPEDVDALELDPAISYIEEDAEVTTMAQSVPWGISRVQAPAAHNRRLTGSGVKVAVLDTGISTHPDLNIRGGASFVPGEPSTQDGNGHGTHVAGTIAALNNSIGVLGVAPSAELYAVKVLGASGAGAISSIAQGLEWAGANGMHVANLSLGSPSPSATLEQAVNSATSRGVLVVAASGNSGAGSISYPARYANAMAVGATDQDNNRASFSQYGAGLDIVAPGVNVQSTYPQSTYASLNGTSMATPHVAGAAVLVKQKNPSWSNVRIRNHLKNTATSLGSTNLYGSGLVNAEAATR

SEQ ID NO: 64516 - protein, 380 aa, Unidentified
VRSKKLWIVASTALLISVAFSSSIASAAEEAKEKYLIGFNEQEAVSEFVEQVEANDEVAILSEEEEVEIELLHEFETIPVLSVELSPEDVDALELDPAISYIEEDAEVTTMAQSVPWGISRVQAPAAHRRGLTGRGVKVAVLDTGISTHPDLNIRGGASFVPGEPSTQDGNGHGTHVAGTIAALDNSIGVLGVAVSAELYAVKVLGASGAGSVSSIAQGLEWAGNNGMHVANLSLGSPSPSATLEQAVNSATSRGVLVVAASGNSGAGSISYPARYANAMAVGATDQDNNRASFSQYGAGLDLVAPGVNVQSTYPQSTYASLNGTSMATPHVAGAAALVKQKNPSWSNVQIRNRLKNTATSLGSTNLYGSGLVNAEAATR

SEQ ID NO: 64517 - protein, 380 aa, Unidentified
VRSKKLWIVASTALLISVAFSSSIASAAEEAKEKYLIGFNEQEAVSEFVEQVEANDEVAILSEEEEVEIELLHEFETIPVLSVELSPEDVDALELDPAISYIEEDAEVTTMAQSVPWGISRVQAPAAHRRGLTGSGVKVAVLDTGISTHPDLDIRGGASFVPGEPSTQDGNGHGTHVAGTIAALDNSIGVLGVAPSAELYAVKVLGASGGGAISSIAQGLEWAGNNGMHVANLSLGSPSPSATLEQAVNSATSRGVLVVAASGNSGAGSISYPARYANAMAVGATDQNNNRASFSQYGAGLDIVAPGVNVQSTYPGSTYASLNGTSMATPHVAGAAVLVKQKNPSWSNVRIRNRLKNTATSLGSTNLYGSGLVNAEAATR

SEQ ID NO: 64518 - protein, 380 aa, Unidentified
VRSKKLWIVASTALLISVAFSSSIASAAEEAKEKYLIGFNEQEAVSEFVEQVEANDEVAILSEEEEVEIELLHEFETIPVLSVELSPEDVDALELDPAISYIEEDAEVTTMAQSVPWGISRVQAPAAHRRGLTGSGVKVAVLDTGISTHPDLNITGGASFVPGEPSTQDGNGHGTHVAGTIAALDNRIGVLGVAPSAELYAVKVLGASGGGAISSIAQGLEWAGNNGMHVANLSLGSPSPSATLEQAVNSATSRGVLVVAASGNSGAGSISYPARYANAMAVGATDQNNNRASFSQYGAGLDIVAPGVNVQSTYPGSTYASLNGTSMATPHVAGAAVLVKQKNPSWSNVRIRNHLKNTATSLGSTNLYGSGLVNAEAATR

SEQ ID NO: 64519 - protein, 380 aa, Unidentified
VRSKKLWIVASTALLISVAFSSSIASAAEEAKEKYLIGFNEQEAVSEFVEQVEANDEVAILSEEEEVEIELLHEFETIPVLSVELSPEDVDALELDPAISYIEEDAEVTTMAQSVPWGISRVQAPAAHNRRLWGSGVKVAVLDTGISTHPDLNIRGGASFVPGEPSTQDGNGHGTHVAGTIAALNNRIGVLGVAPSAELYAVKVLGASGAGAISSIAQGLEWAGNNGMHVANLSLGSPSPSATLEQAVNSATSRGVLVVAASGNSGAGSISYPARYANAMAVGATDQNNNRASFSQYGAGLDLVAPGVNVQSTYPGSTYASLNGTSMATPHVAGAAVLVKQKNPSWSNVRIRNHLKNTATSLGSTNLYGSGLVNAEAATR

SEQ ID NO: 64520 - protein, 380 aa, Unidentified
VRSKKLWIVASTALLISVAFSSSIASAAEEAKEKYLIGFNEQEAVSEFVEQVEANDEVAILSEEEEVEIELLHEFETIPVLSVELSPEDVDALELDPAISYIEEDAEVTTMAQSVPWGISRVQAPAAHRRGLTGRGVKVAVLDTGISTHPDLNIRGGASFVPGEPSTQDGNGHGTHVAGTIAALDNSIGVLGVAPSAELYAVKVLGASGAGSVSSIAQGLEWAGNNGMHVANLSLGSPSPSATLEQAVNSATSRGVLVVAASGNSGAGSISYPARYANAMAVGATDQDNNRASFSQYGAGLDLVAPGVNVQSTYPQSTYFSLNGTSMATPHVAGAAALVKQKNPSWSNVQIRNRLKNTATSLGSTNLYGSGLVNAEAATR

SEQ ID NO: 64521 - protein, 380 aa, Unidentified
VRSKKLWIVASTALLISVAFSSSIASAAEEAKEKYLIGFNEQEAVSEFVEQVEANDEVAILSEEEEVEIELLHEFETIPVLSVELSPEDVDALELDPAISYIEEDAEVTTMAQSVPWGISRVQAPAAHRRGLTGRGVKVAVLDTGISTHPDLNIRGGASFVPGEPSTQDGNGHGTHVAGTIAALDNSIGVLGVAPSAELYAVKVLGASGAGSVSSIAQGLEWAGNNGMHVANLSLGSPSPSATLEQAVNSATSRGVLVVAASGNSGAGSISYPARYANAMAVGATDQDNNRASFSQYGAGLDLVAPGVNVQSTYPQSAYASLNGTSMATPHVAGAAALVKQKNPSWSNVQIRNRLKNTATSLGSTNLYGSGLVNAEAATR

SEQ ID NO: 64522 - protein, 380 aa, Unidentified
VRSKKLWIVASTALLISVAFSSSIASAAEEAKEKYLIGFNEQEAVSEFVEQVEANDEVAILSEEEEVEIELLHEFETIPVLSVELSPEDVDALELDPAISYIEEDAEVTTMAQSVPWGISRVQAPAAHRRRLWGRGVKVAVLDTGISTHPDLNIRGGASFVPGEPSTQDGNGHGTHVAGTIAALDNSIGVLGVAPSAELYAVKVLGASGSGSVSSIAQGLEWAGANGMHVANLSLGSPSPSATLEQAVNSATSRGVLVVAASGNSGAGSISYPARYANAMAVGATDQDNNRASFSQYGAGLDIVAPGVNVQSTYPQSTYASLNGTSMATPHVAGAAALVKQKNPSWSNVQIRNRLKNTATSLGSTNLYGSGLVNAEAATR

SEQ ID NO: 64523 - protein, 380 aa, Unidentified
VRSKKLWIVASTALLISVAFSSSIASAAEEAKEKYLIGFNEQEAVSEFVEQVEANDEVAILSEEEEVEIELLHEFETIPVLSVELSPEDVDALELDPAISYIEEDAEVTTMAQSVPWGISRVQAPAAHRRGLWGRGVKVAVLDTGISTHPDLNIRGGASFVPGEPSTQDGNGHGTHVAGTIAALDNSIGVLGVAPSAELYAVKVLGASGAGSVSSIAQGLEWAGNNGMHVANLSLGSPSPSATLEQAVNSATSRGVLVVAASGNSGAGSISYPARYANAMAVGATDQNNNRASFSQYGAGLDLVAPGVNVQSTYPQSTYFSLNGTSMATPHVAGAAALVKQKNPSWSNVQIRNRLKNTATSLGSTNLYGSGLVNAEAATR

SEQ ID NO: 64524 - protein, 380 aa, Unidentified
VRSKKLWIVASTALLISVAFSSSIASAAEEAKEKYLIGFNEQEAVSEFVEQVEANDEVAILSEEEEVEIELLHEFETIPVLSVELSPEDVDALELDPAISYIEEDAEVTTMAQSVPWGISRVQAPAAHNRGLTGSGVKVAVLDTGISTHPDLNIRGGASFVPGEPSTQDGNGHGTHVAGTIAALNNSIGVLGVAPSAELYAVKVLGASGAGAISSIAQGLEWAGNNGMHVANLSLGSPSPSATLEQAVNSATSRGVLVVAASGNSGEGSISYPARYANAMAVGATDQNNNRADFSQYGAGLDIVAPGVNVQSTYPGSTYASLNGTSMATPHVAGAAVLVKQKNPSWSNVRIRDRLKNTATSLGSTNLYGSGLVNAEAATR

SEQ ID NO: 64525 - protein, 380 aa, Unidentified
VRSKKLWIVASTALLISVAFSSSIASAAEEAKEKYLIGFNEQEAVSEFVEQVEANDEVAILSEEEEVEIELLHEFETIPVLSVELSPEDVDALELDPAISYIEEDAEVTTMAQSVPWGISRVQAPAAHRRRLTGSGVKVAVLDTGISTHPDLDIRGGASFVPGEPSTQDGNGHGTHVAGTIAALNNSIGVLGVAPSAELYAVKVLGASGGGAISSIAQGLEWAGNNGMHVANLSLGSPSPSATLEQAVNSATSRGVLVVAASGNSGAGSISYPARYANAMAVGATDQNNNRASFSQYGAGLDIVAPGVNVQSTYPGSTYASENGTSMATPHVAGAAVLVKQKNPSWSNVRIRNHLKNTATSLGSTNLYGSGLVNAEAATR

SEQ ID NO: 64526 - protein, 380 aa, Unidentified
VRSKKLWIVASTALLISVAFSSSIASAAEEAKEKYLIGFNEQEAVSEFVEQVEANDEVAILSEEEEVEIELLHEFETIPVLSVELSPEDVDALELDPAISYIEEDAEVTTMAQSVPWGISRVQAPAAHRRGLTGRGVKVAVLDTGISTHPDLNIRGGASFVPGEPSTQDGNGHGTHVAGTIAALDNSIGVLGVAPSAELYAVKVLGASGAGSVSSIAQGLEWAGNNGMHVANLSLGSPSPSATLEQAVNSATSRGVLVVAASGNSGAGSISYPARYANAMAVGATDQDNNRASFSQYGAGLDIVAPGVNVQSTYPQSAYFSLNGTSMATPHVAGAAALVKQKNPSWSNVQIRNRLKNTATSLGSTNLYGSGLVNAEAATR

SEQ ID NO: 64527 - protein, 380 aa, Unidentified
VRSKKLWIVASTALLISVAFSSSIASAAEEAKEKYLIGFNEQEAVSEFVEQVEANDEVAILSEEEEVEIELLHEFETIPVLSVELSPEDVDALELDPAISYIEEDAEVTTMAQSVPWGISRVQAPAAHRRGLTGRGVKVAVLDTGISTHPDLNIRGGASFVPGEPSTQDGNGHGTHVAGTIAALDNSIGVLGVAPSAELYAVKVLGASGSGSVSSIAQGLEWAGANGMHVANLSLGSPSPSATLEQAVNSATSRGVLVVAASGNSGAGSISYPARYANAMAVGATDQNNNRASFSQYGAGLDLVAPGVNVQSTYPQSAYFSLNGTSMATPHVAGAAALVKQKNPSWSNVQIRNRLKNTATSLGSTNLYGSGLVNAEAATR

SEQ ID NO: 64528 - protein, 380 aa, Unidentified
VRSKKLWIVASTALLISVAFSSSIASAAEEAKEKYLIGFNEQEAVSEFVEQVEANDEVAILSEEEEVEIELLHEFETIPVLSVELSPEDVDALELDPAISYIEEDAEVTTMAQSVPWGISRVQAPAAHNRGLTGSGVKVAVLDTGISTHPDLRIRGGASFVPGEPSTQDGNGHGTHVAGTIAALDNRIGVLGVAPSAELYAVKVLGASGGGAISSIAQGLEWAGNNGMHVANLSLGSPSPSATLEQAVNSATSRGVLVVAASGNSGAGSISYPARYANAMAVGATDQNNNRASFSQYGAGLDIVAPGVNVQSTYPGSTYASENGTSMATPHVAGAAVLVKQKNPSWSNVRIRNHLKNTATSLGSTNLYGSGLVNAEAATR

SEQ ID NO: 64529 - protein, 380 aa, Unidentified
VRSKKLWIVASTALLISVAFSSSIASAAEEAKEKYLIGFNEQEAVSEFVEQVEANDEVAILSEEEEVEIELLHEFETIPVLSVELSPEDVDALELDPAISYIEEDAEVTTMAQSVPWGISRVQAPAAHNRGLTGSGVKVAVLDTGISTHPDLNIRGGASFVPGEPSTQDGNGHGTHVAGTIAALNNSIGVLGVAPSAELYAVKVLGASGGGAISSIAQGLEWAGNNGMHVANLSLGNESPSATLEQAVNSATSRGVLVVAASGNSGAGSISYPARYANAMAVGATDQNNNRASFSQYGAGLDIVAPGVNVQSTYPGSTYASLNGTSMATPHVAGAAVLVKQKRPSWSNVRIRDHLKNTATSLGSTNLYGSGLVNAEAATR

SEQ ID NO: 64530 - protein, 380 aa, Unidentified
VRSKKLWIVASTALLISVAFSSSIASAAEEAKEKYLIGFNEQEAVSEFVEQVEANDEVAILSEEEEVEIELLHEFETIPVLSVELSPEDVDALELDPAISYIEEDAEVTTMAQSVPWGISRVQAPAAHNRGLTGSGVKVAVLDTGISTHPDLNIRGGASFVPGEPSTQDGNGHGTHVAGTIAALNNSIGVLGVAPSAELYAVKVLGASGAGALSSIAQGLEWAGNNGMHVANLSLGSPSPSATLEQAVNSATSRGVLVVAASGNSGEGSISYPARYANAMAVGATDQNNNRADFSQYGAGLDIVAPGVNVQSTYPGSTYASLNGTSMATPHVAGAAVLVKQKNPSWSNVRIRDRLKNTATSLGSTNLYGSGLVNAEAATR

SEQ ID NO: 64531 - protein, 380 aa, Unidentified
VRSKKLWIVASTALLISVAFSSSIASAAEEAKEKYLIGFNEQEAVSEFVEQVEANDEVAILSEEEEVEIELLHEFETIPVLSVELSPEDVDALELDPAISYIEEDAEVTTMAQSVPWGISRVQAPAAHRRGLWGRGVKVAVLDTGISTHPDLNIRGGASFVPGEPSTQDGNGHGTHVAGTIAALDNSIGVLGVAPSAELYAVKVLGASGAGSVSSIAQGLEWAGTNGMHVANLSLGSPSPSATLEQAVNSATSRGVLVVAASGNSGAGSISYPARYANAMAVGATDQNNNRASFSQYGAGLDLVAPGVNVQSTYPGSTYFSLNGTSMATPHVAGAAALVKQKNPSWSNVQIRNRLKNTATSLGSTNLYGSGLVNAEAATR

SEQ ID NO: 64532 - protein, 380 aa, Unidentified
VRSKKLWIVASTALLISVAFSSSIASAAEEAKEKYLIGFNEQEAVSEFVEQVEANDEVAILSEEEEVEIELLHEFETIPVLSVELSPEDVDALELDPAISYIEEDAEVTTMAQSVPWGISRVQAPAAHNRGLTGSGVKVAVLDTGISTHPDLDITGGASFVPGEPSTQDGNGHGTHVAGTIAALDNRIGVLGVAPSAELYAVKVLGASGGGAISSIAQGLEWAGNNGMHVANLSLGSPSPSATLEQAVNSATSRGVLVVAASGNSGAGSISYPARYANAMAVGATDQNNNRASFSQYGAGLDIVAPGVNVQSTYPGSTYASLNGTSMATPHVAGAAVLVKQKNPSWSNVRIRNHLKNTATSLGSTNLYGSGLVNAEAATR

SEQ ID NO: 64533 - protein, 380 aa, Unidentified
VRSKKLWIVASTALLISVAFSSSIASAAEEAKEKYLIGFNEQEAVSEFVEQVEANDEVAILSEEEEVEIELLHEFETIPVLSVELSPEDVDALELDPAISYIEEDAEVTTMAQSVPWGISRVQAPAAHRRGLTGRGVKVAVLDTGISTHPDLDIRGGASFVPGEPSTQDGNGHGTHVAGTIAALNNSIGVLGVAPSAELYAVKVLGASGGGAISSIAQGLEWAGNNGMHVANLSLGSPSPSATLEQAVNSATSRGVLVVAASGNSGAGSISYPARYANAMAVGATDQNNNRASFSQYGAGLDIVAPGVNVQSTYPGSTYASLNGTSMATPHVAGAAVLVKQKNPSWSNVRIRNHLKNTATSLGSTNLYGSGLVRAEAATR

SEQ ID NO: 64534 - protein, 380 aa, Unidentified
VRSKKLWIVASTALLISVAFSSSIASAAEEAKEKYLIGFNEQEAVSEFVEQVEANDEVAILSEEEEVEIELLHEFETIPVLSVELSPEDVDALELDPAISYIEEDAEVTTMAQSVPWGISRVQAPAAHRRRLTGSGVKVAVLDTGISTHPDLDIRGGASFVPGEPSTQDGNGHGTHVAGTIAALNNSIGVLGVAPSAELYAVKVLGASGGGAISSIAQGLEWAGNNGMHVANLSLGSPSPSATLEQAVNSATSRGVLVVAASGNSGAGSISYPARYANAMAVGATDQNNNRASFSQYGAGLDIVAPGVNVQSTYPGSTYASLNGTSMATPHVAGAAVLVKQKNPSWSNVRIRNHLKNTATSLGSTNLYGSGLVRAEAATR

SEQ ID NO: 64535 - protein, 380 aa, Unidentified
VRSKKLWIVASTALLISVAFSSSIASAAEEAKEKYLIGFNEQEAVSEFVEQVEANDEVAILSEEEEVEIELLHEFETIPVLSVELSPEDVDALELDPAISYIEEDAEVTTMAQSVPWGISRVQAPAAHRRGLWGRGVKVAVLDTGISTHPDLNIRGGASFVPGEPSTQDGNGHGTHVAGTIAALDNSIGVLGVAPSAELYAVKVLGASGAGSVSSIAQGLEWAGANGMHVANLSLGSPSPSATLEQAVNSATSRGVLVVAASGNSGAGSISYPARYANAMAVGATDQNNNRASFSQYGAGLDIVAPGVNVQSTYPGSAYFSLNGTSMATPHVAGAAALVKQKNPSWSNVQIRNRLKNTATSLGSTNLYGSGLVNAEAATR

SEQ ID NO: 64536 - protein, 380 aa, Unidentified
VRSKKLWIVASTALLISVAFSSSIASAAEEAKEKYLIGFNEQEAVSEFVEQVEANDEVAILSEEEEVEIELLHEFETIPVLSVELSPEDVDALELDPAISYIEEDAEVTTMAQSVPWGISRVQAPAAHRRRLWGRGVKVAVLDTGISTHPDLNIRGGASFVPGEPSTQDGNGHGTHVAGTIAALDNSIGVLGVAPSAELYAVKVLGASGSGSVSSIAQGLEWAGNNGMHVANLSLGSPSPSATLEQAVNSATSRGVLVVAASGNSGAGSISYPARYANAMAVGATDQDNNRASFSQYGAGLDLVAPGVNVQSTYPQSTYASLNGTSMATPHVAGAAALVKQKNPSWSNVQIRNRLKNTATSLGSTNLYGSGLVNAEAATR

SEQ ID NO: 64537 - protein, 380 aa, Unidentified
VRSKKLWIVASTALLISVAFSSSIASAAEEAKEKYLIGFNEQEAVSEFVEQVEANDEVAILSEEEEVEIELLHEFETIPVLSVELSPEDVDALELDPAISYIEEDAEVTTMAQSVPWGISRVQAPAAHRRRLTGRGVKVAVLDTGISTHPDLNIRGGASFVPGEPSTQDGNGHGTHVAGTIAALDNSIGVLGVAPSAELYAVKVLGASGSGSVSSIAQGLEWAGANGMHVANLSLGSPSPSATLEQAVNSATSRGVLVVAASGNSGAGSISYPARYANAMAVGATDQDNNRASFSQYGAGLDIVAPGVNVQSTYPGSAYFSLNGTSMATPHVAGAAALVKQKNPSWSNVQIRNRLKNTATSLGSTNLYGSGLVNAEAATR

SEQ ID NO: 64538 - protein, 380 aa, Unidentified
VRSKKLWIVASTALLISVAFSSSIASAAEEAKEKYLIGFNEQEAVSEFVEQVEANDEVAILSEEEEVEIELLHEFETIPVLSVELSPEDVDALELDPAISYIEEDAEVTTMAQSVPWGISRVQAPAAHNRGLAGSGVKVAVLDTGISTHPDLNIRGGASFVPGEPSTQDGNGHGTHVAGTIAALNNSIGVLGVAPSAELYAVKVLGASGGGAISSIAQGLEWAGNNGMHVANLSLGNPSPSATLEQAVNSATSRGVLVVAASGNSGAESISYPARYANAMAVGATDQNNNRASFSQYGAGLDIVAPGVNVQSTYPGSTYASLNGTSMATPHVAGAAVLVKQKNPSWSNVRIRDHLKNTATSLGSTNLYGSGLVNAEAATR

SEQ ID NO: 64539 - protein, 380 aa, Unidentified
VRSKKLWIVASTALLISVAFSSSIASAAEEAKEKYLIGFNEQEAVSEFVEQVEANDEVAILSEEEEVEIELLHEFETIPVLSVELSPEDVDALELDPAISYIEEDAEVTTMAQSVPWGISRVQAPAAHRRGLTGSGVKVAVLDTGISTHPDLRITGGASFVPGEPSTQDGNGHGTHVAGTIAALDNSIGVLGVAPSAELYAVKVLGASGGGAISSIAQGLEWAGNNGMHVANLSLGSPSPSATLEQAVNSATSRGVLVVAASGNSGAGSISYPARYANAMAVGATDQNNNRASFSQYGAGLDIVAPGVNVQSTYPGSTYASLNGTSMATPHVAGAAVLVKQKNPSWSNVRIRNHLKNTATSLGSTNLYGSGLVNAEAATR

SEQ ID NO: 64540 - protein, 380 aa, Unidentified
VRSKKLWIVASTALLISVAFSSSIASAAEEAKEKYLIGFNEQEAVSEFVEQVEANDEVAILSEEEEVEIELLHEFETIPVLSVELSPEDVDALELDPAISYIEEDAEVTTMAQSVPWGISRVQAPAAHRRGLWGRGVKVAVLDTGISTHPDLNIRGGASFVPGEPSTQDGNGHGTHVAGTIAALDNSIGVLGVAPSAELYAVKVLGASGSGSVSSIAQGLEWAGANGMHVANLSLGSPSPSATLEQAVNSATSRGVLVVAASGNSGAGSISYPARYANAMAVGATDQNNNRASFSQYGAGLDLVAPGVNVQSTYPQSAYASLNGTSMATPHVAGAAALVKQKNPSWSNVQIRNRLKNTATSLGSTNLYGSGLVNAEAATR

SEQ ID NO: 64541 - protein, 380 aa, Unidentified
VRSKKLWIVASTALLISVAFSSSIASAAEEAKEKYLIGFNEQEAVSEFVEQVEANDEVAILSEEEEVEIELLHEFETIPVLSVELSPEDVDALELDPAISYIEEDAEVTTMAQSVPWGISRVQAPAAHRRRLTGSGVKVAVLDTGISTHPDLNIRGGASFVPGEPSTQDGNGHGTHVAGTIAALDNSIGVLGVAPSAELYAVKVLGASGGGAISSIAQGLEWAGNNGMHVANLSLGSPSPSATLEQAVNSATSRGVLVVAASGNSGAGSISYPARYANAMAVGATDQNNNRASFSQYGAGLDIVAPGVNVQSTYPGSTYASLNGTSMATPHVAGAAVLVKQKNPSWSNVRIRNRLKNTATSLGSTNLYGSGLVNAEAATR

SEQ ID NO: 64542 - protein, 380 aa, Unidentified
VRSKKLWIVASTALLISVAFSSSIASAAEEAKEKYLIGFNEQEAVSEFVEQVEANDEVAILSEEEEVEIELLHEFETIPVLSVELSPEDVDALELDPAISYIEEDAEVTTMAQSVPWGISRVQAPAAHRRGLTGRGVKVAVLDTGISTHPDLNIRGGASFVPGEPSTQDGNGHGTHVAGTIAALDNSIGVLGVAPSAELYAVKVLGASGSGSVSSIAQGLEWAGNNGMHVANLSLGSPSPSATLEQAVNSATSRGVLVVAASGNSGAGSISYPARYANAMAVGATDQDNNRASFSQYGAGLDLVAPGVNVQSTYPQSAYFSLNGTSMATPHVAGAAALVKQKNPSWSNVQIRNRLKNTATSLGSTNLYGSGLVNAEAATR

SEQ ID NO: 64543 - protein, 380 aa, Unidentified
VRSKKLWIVASTALLISVAFSSSIASAAEEAKEKYLIGFNEQEAVSEFVEQVEANDEVAILSEEEEVEIELLHEFETIPVLSVELSPEDVDALELDPAISYIEEDAEVTTMAQSVPWGISRVQAPAAHRRGLWGRGVKVAVLDTGISTHPDLNIRGGASFVPGEPSTQDGNGHGTHVAGTIAALDNSIGVLGVAPSAELYAVKVLGASGAGSVSSIAQGLEWAGNNGMHVANLSLGSPSPSATLEQAVNSATSRGVLVVAASGNSGAGSISYPARYANAMAVGATDQNNNRASFSQYGAGLDLVAPGVNVQSTYPGSAYFSLNGTSMATPHVAGAAALVKQKNPSWSNVQIRNRLKNTATSLGSTNLYGSGLVNAEAATR

SEQ ID NO: 64544 - protein, 380 aa, Unidentified
VRSKKLWIVASTALLISVAFSSSIASAAEEAKEKYLIGFNEQEAVSEFVEQVEANDEVAILSEEEEVEIELLHEFETIPVLSVELSPEDVDALELDPAISYIEEDAEVTTMAQSVPWGISRVQAPAAHNRRLTGSGVKVAVLDTGISTHPDLNIRGGASFVPGEPSTQDGNGHGTHVAGTIAALNNRIGVLGVAPSAELYAVKVLGASGAGAISSIAQGLEWAGNNGMHVANLSLGSPSPSATLEQAVNSATSRGVLVVAASGNSGAGSISYPARYANAMAVGATDQDNNRASFSQYGAGLDIVAPGVNVQSTYPGSTYFSLNGTSMATPHVAGAAVLVKQKNPSWSNVRIRNHLKNTATSLGSTNLYGSGLVNAEAATR

SEQ ID NO: 64545 - protein, 380 aa, Unidentified
VRSKKLWIVASTALLISVAFSSSIASAAEEAKEKYLIGFNEQEAVSEFVEQVEANDEVAILSEEEEVEIELLHEFETIPVLSVELSPEDVDALELDPAISYIEEDAEVTTMAQSVPWGISRVQAPAAHNRGLAGSGVKVAVLDTGISTHPDLNIRGGASFVPGEPSTQDGNGHGTHVAGTIAALNNSIGVLGVAPSAELYAVKVLGASGGGAISSIAQGLEWAGNNGMHVANLSLGSPSPSATLEQAVNSATSRGVLVVAASGNSGEGSISYPARYANAMAVGATDQNNNRADFSQYGAGLDIVAPGVNVQSTYPGSTYASLNGTSMATPHVAGAAVLVKQKNPSWSNVRIRDHLKNTATSLGSTNLYGSGLVNAEAATR

SEQ ID NO: 64546 - protein, 380 aa, Unidentified
VRSKKLWIVASTALLISVAFSSSIASAAEEAKEKYLIGFNEQEAVSEFVEQVEANDEVAILSEEEEVEIELLHEFETIPVLSVELSPEDVDALELDPAISYIEEDAEVTTMAQSVPWGISRVQAPAAHNRGLTGSGVKVAVLDTGISTHPDLRIRGGASFVPGEPSTQDGNGHGTHVAGTIAALDNRIGVLGVAPSAELYAVKVLGASGGGAISSIAQGLEWAGNNGMHVANLSLGSPSPSATLEQAVNSATSRGVLVVAASGNSGAGSISYPARYANAMAVGATDQNNNRASFSQYGAGLDIVAPGVNVQSTYPGSTYASLNGTSMATPHVAGAAVLVKQKNPSWSNVRIRNHLKNTATSLGSTNLYGSGLVRAEAATR

SEQ ID NO: 64547 - protein, 380 aa, Unidentified
VRSKKLWIVASTALLISVAFSSSIASAAEEAKEKYLIGFNEQEAVSEFVEQVEANDEVAILSEEEEVEIELLHEFETIPVLSVELSPEDVDALELDPAISYIEEDAEVTTMAQSVPWGISRVQAPAAHRRRLTGRGVKVAVLDTGISTHPDLNIRGGASFVPGEPSTQDGNGHGTHVAGTIAALDNSIGVLGVAPSAELYAVKVLGASGAGSVSSIAQGLEWAGNNGMHVANLSLGSPSPSATLEQAVNSATSRGVLVVAASGNSGAGSISYPARYANAMAVGATDQNNNRASFSQYGAGLDIVAPGVNVQSTYPQSTYFSLNGTSMATPHVAGAAALVKQKNPSWSNVQIRNRLKNTATSLGSTNLYGSGLVDAEAATR

SEQ ID NO: 64548 - protein, 380 aa, Unidentified
VRSKKLWIVASTALLISVAFSSSIASAAEEAKEKYLIGFNEQEAVSEFVEQVEANDEVAILSEEEEVEIELLHEFETIPVLSVELSPEDVDALELDPAISYIEEDAEVTTMAQSVPWGISRVQAPAAHNRGLTGSGVKVAVLDTGISTHPDLRIRGGASFVPGEPSTQDGNGHGTHVAGTIAALDNSIGVLGVAPSAELYAVKVLGASGGGTISSIAQGLEWAGNNGMHVANLSLGSPSPSATLEQAVNSATSRGVLVVAASGNSGAGSISYPARYANAMAVGATDQNNNRASFSQYGAGLDIVAPGVNVQSTYPGSTYASLNGTSMATPHVAGAAVLVKQKNPSWSNVRIRNRLKNTATSLGSTNLYGSGLVRAEAATR

SEQ ID NO: 64549 - protein, 380 aa, Unidentified
VRSKKLWIVASTALLISVAFSSSIASAAEEAKEKYLIGFNEQEAVSEFVEQVEANDEVAILSEEEEVEIELLHEFETIPVLSVELSPEDVDALELDPAISYIEEDAEVTTMAQSVPWGISRVQAPAAHNRGLTGSGVKVAVLDTGISTHPDLRITGGASFVPGEPSTQDGNGHGTHVAGTIAALDNRIGVLGVAPSAELYAVKVLGASGGGAISSIAQGLEWAGNNGMHVANLSLGSPSPSATLEQAVNSATSRGVLVVAASGNSGAGSISYPARYANAMAVGATDQNNNRASFSQYGAGLDIVAPGVNVQSTYPGSTYASLNGTSMATPHVAGAAVLVKQKNPSWSNVRIRNHLKNTATSLGSTNLYGSGLVNAEAATR

SEQ ID NO: 64550 - protein, 380 aa, Unidentified
VRSKKLWIVASTALLISVAFSSSIASAAEEAKEKYLIGFNEQEAVSEFVEQVEANDEVAILSEEEEVEIELLHEFETIPVLSVELSPEDVDALELDPAISYIEEDAEVTTMAQSVPWGISRVQAPAAHRRRLTGRGVKVAVLDTGISTHPDLNIRGGASFVPGEPSTQDGNGHGTHVAGTIAALDNSIGVLGVAPSAELYAVKVLGASGAGSVSSIAQGLEWAGNNGMHVANLSLGSPSPSATLEQAVNSATSRGVLVVAASGNSGAGSISYPARYANAMAVGATDQDNNRASFSQYGAGLDIVAPGVNVQSTYPQSTYFSLNGTSMATPHVAGAAALVKQKNPSWSNVQIRNRLKNTATSLGSTNLYGSGLVNAEAATR

SEQ ID NO: 64551 - protein, 380 aa, Unidentified
VRSKKLWIVASTALLISVAFSSSIASAAEEAKEKYLIGFNEQEAVSEFVEQVEANDEVAILSEEEEVEIELLHEFETIPVLSVELSPEDVDALELDPAISYIEEDAEVTTMAQSVPWGISRVQAPAAHNRGLTGSGVKVAVLDTGISTHPDLNIRGGASFVPGEPSTQDGNGHGTHVAGTIAALDNSIGVLGVAPSAELYAVKVLGASGGGAISSIAQGLEWAGNNGMHVANLSLGSPSPSATLEQAVNSATSRGVLVVAASGNSGEGSISYPARYANAMAVGATDQNNNRADFSQYGAGLDIVAPGVNVQSTYPGSTYASLNGTSSATPHVAGAAVLVKQKNPSWSNVRIRDRLKNTATSLGSTNLYGSGLVNAEAATR

SEQ ID NO: 64552 - protein, 380 aa, Unidentified
VRSKKLWIVASTALLISVAFSSSIASAAEEAKEKYLIGFNEQEAVSEFVEQVEANDEVAILSEEEEVEIELLHEFETIPVLSVELSPEDVDALELDPAISYIEEDAEVTTMAQSVPWGISRVQAPAAHNRGLTGSGVRVAVLDTGISTHPDLRITGGASFVPGEPSTQDGNGHGTHVAGTIAALDNSIGVLGVAPSAELYAVKVLGASGGGAISSIAQGLEWAGNNGMHVANLSLGSPSPSATLEQAVNSATSRGVLVVAASGNSGAGSISYPARYANAMAVGATDQNNNRASFSQYGAGLDIVAPGVNVQSTYPGSTYASLNGTSMATPHVAGAAVLVKQKNPSWSNVRIRNHLKNTATSLGSTNLYGSGLVNAEAATR

SEQ ID NO: 64553 - protein, 380 aa, Unidentified
VRSKKLWIVASTALLISVAFSSSIASAAEEAKEKYLIGFNEQEAVSEFVEQVEANDEVAILSEEEEVEIELLHEFETIPVLSVELSPEDVDALELDPAISYIEEDAEVTTMAQSVPWGISRVQAPAAHRRGLWGRGVKVAVLDTGISTHPDLNIRGGASFVPGEPSTQDGNGHGTHVAGTIAALDNSIGVLGVAPSAELYAVKVLGASGAGSVSSIAQGLEWAGANGMHVANLSLGSPSPSATLEQAVNSATSRGVLVVAASGNSGAGSISYPARYANAMAVGATDQDNNRASFSQYGAGLDIVAPGVNVQSTYPGSTYFSLNGTSMATPHVAGAAALVKQKNPSWSNVQIRNRLKNTATSLGSTNLYGSGLVNAEAATR

SEQ ID NO: 64554 - protein, 380 aa, Unidentified
VRSKKLWIVASTALLISVAFSSSIASAAEEAKEKYLIGFNEQEAVSEFVEQVEANDEVAILSEEEEVEIELLHEFETIPVLSVELSPEDVDALELDPAISYIEEDAEVTTMAQSVPWGISRVQAPAAHRRGLTGSGVKVAVLDTGISTHPDLDITGGASFVPGEPSTQDGNGHGTHVAGTIAALDNSIGVLGVAPSAELYAVKVLGASGGGAISSIAQGLEWAGNNGMHVANLSLGSPSPSATLEQAVNSATSRGVLVVAASGNSGAGSISYPARYANAMAVGATDQNNNRASFSQYGAGLDIVAPGVNVQSTYPGSTYASLNGTSMATPHVAGAAVLVKQKNPSWSNVRIRNHLKNTATSLGSTNLYGSGLVNAEAATR

SEQ ID NO: 64555 - protein, 380 aa, Unidentified
VRSKKLWIVASTALLISVAFSSSIASAAEEAKEKYLIGFNEQEAVSEFVEQVEANDEVAILSEEEEVEIELLHEFETIPVLSVELSPEDVDALELDPAISYIEEDAEVTTMAQSVPWGISRVQAPAAHNRGLTGSGVKVAVLDTGISTHPDLRITGGASFVPGEPSTQDGNGHGTHVAGTIAALNNRIGVLGVAPSAELYAVKVLGASGGGAISSIAQGLEWAGNNGMHVANLSLGSPSPSATLEQAVNSATSRGVLVVAASGNSGAGSISYPARYANAMAVGATDQNNNRASFSQYGAGLDIVAPGVNVQSTYPGSTYASLNGTSMATPHVAGAAVLVKQKNPSWSNVRIRNHLKNTATSLGSTNLYGSGLVRAEAATR

SEQ ID NO: 64556 - protein, 380 aa, Unidentified
VRSKKLWIVASTALLISVAFSSSIASAAEEAKEKYLIGFNEQEAVSEFVEQVEANDEVAILSEEEEVEIELLHEFETIPVLSVELSPEDVDALELDPAISYIEEDAEVTTMAQSVPWGISRVQAPAAHRRGLRGRGVKVAVLDTGISTHPDLNIRGGASFVPGEPSTQDGNGHGTHVAGTIAALDNSIGVLGVAPSAELYAVKVLGASGAGSVSSIAQGLEWAGANGMHVANLSLGSPSPSATLEQAVNSATSRGVLVVAASGNSGAGSISYPARYANAMAVGATDQDNNRASFSQYGAGLDIVAPGVNVQSTYPQSTYASLNGTSMATPHVAGAAALVKQKNPSWSNVQIRNRLKNTATSLGSTNLYGSGLVNAEAATR

SEQ ID NO: 64557 - protein, 380 aa, Unidentified
VRSKKLWIVASTALLISVAFSSSIASAAEEAKEKYLIGFNEQEAVSEFVEQVEANDEVAILSEEEEVEIELLHEFETIPVLSVELSPEDVDALELDPAISYIEEDAEVTTMAQSVPWGISRVQAPAAHNRGLTGSGVKVAVLDTGISTHPDLNITGGASFVPGEPSTQDGNGHGTHVAGTIAALDNRIGVLGVAPSAELYAVKVLGASGGGAISSIAQGLEWAGNNGMHVANLSLGSPSPSATLEQAVNSATSRGVLVVAASGNSGAGSISYPARYANAMAVGATDQNNNRASFSQYGAGLDIVAPGVNVQSTYPGSTYASLNGTSMATPHVAGAAVLVKQKNPSWSNVRIRNRLKNTATSLGSTNLYGSGLVNAEAATR

SEQ ID NO: 64558 - protein, 380 aa, Unidentified
VRSKKLWIVASTALLISVAFSSSIASAAEEAKEKYLIGFNEQEAVSEFVEQVEANDEVAILSEEEEVEIELLHEFETIPVLSVELSPEDVDALELDPAISYIEEDAEVTTMAQSVPWGISRVQAPAAHNRGLTGRGVKVAVLDTGISTHPDLNIRGGASFVPGEPSTQDGNGHGTHVAGTIAALNNSIGVLGVAPSAELYAVKVLGASGGGAISSIAQGLEWAGNNGMHVANLSLGSPSPSATLEQAVNSATSRGVLVVAASGNSGEESISYPARYANAMAVGATDQNNNRASFSQYGAGLDIVAPGVNVQSTYPGSTYASLNGTSMATPHVAGAAVLVKQKNPSWSNVRIRDHLKNTATSLGSTNLYGSGLVNAEAATR

SEQ ID NO: 64559 - protein, 380 aa, Unidentified
VRSKKLWIVASTALLISVAFSSSIASAAEEAKEKYLIGFNEQEAVSEFVEQVEANDEVAILSEEEEVEIELLHEFETIPVLSVELSPEDVDALELDPAISYIEEDAEVTTMAQSVPWGISRVQAPAAHNRGLTGRGVKVAVLDTGISTHPDLNITGGASFVPGEPSTQDGNGHGTHVAGTIAALDNSIGVLGVAPSAELYAVKVLGASGGGAISSIAQGLEWAGNNGMHVANLSLGSPSPSATLEQAVNSATSRGVLVVAASGNSGAGSISYPARYANAMAVGATDQNNNRASFSQYGAGLDIVAPGVNVQSTYPGSTYASLNGTSMATPHVAGAAVLVKQKNPSWSNVRIRNRLKNTATSLGSTNLYGSGLVNAEAATR

SEQ ID NO: 64560 - protein, 380 aa, Unidentified
VRSKKLWIVASTALLISVAFSSSIASAAEEAKEKYLIGFNEQEAVSEFVEQVEANDEVAILSEEEEVEIELLHEFETIPVLSVELSPEDVDALELDPAISYIEEDAEVTTMAQSVPWGISRVQAPAAHNRRLWGSGVKVAVLDTGISTHPDLNIRGGASFVPGEPSTQDGNGHGTHVAGTIAALNNSIGVLGVAPSAELYAVKVLGASGAGSVSSIAQGLEWAGANGMHVANLSLGSPSPSATLEQAVNSATSRGVLVVAASGNSGAGSISYPARYANAMAVGATDQNNNRASFSQYGAGLDLVAPGVNVQSTYPQSAYFSLNGTSMATPHVAGAAALVKQKNPSWSNVQIRNRLKNTATSLGSTNLYGSGLVNAEAATR

SEQ ID NO: 64561 - protein, 380 aa, Unidentified
VRSKKLWIVASTALLISVAFSSSIASAAEEAKEKYLIGFNEQEAVSEFVEQVEANDEVAILSEEEEVEIELLHEFETIPVLSVELSPEDVDALELDPAISYIEEDAEVTTMAQSVPWGISRVQAPAAHNRGLTGSGVKVAVLDTGISTHPDLDIRGGASFVPGEPSTQDGNGHGTHVAGTIAALDNRIGVLGVAPSAELYAVKVLGASGGGAISSIAQGLEWAGNNGMHVANLSLGSPSPSATLEQAVNSATSRGVLVVAASGNSGAGSISYPARYANAMAVGATDQNNNRASFSQYGAGLDIVAPGVNVQSTYPGSTYASLNGTSMATPHVAGAAVLVKQKNPSWSNVRIRNHLKNTATSLGSTNLYGSGLVRAEAATR

SEQ ID NO: 64562 - protein, 380 aa, Unidentified
VRSKKLWIVASTALLISVAFSSSIASAAEEAKEKYLIGFNEQEAVSEFVEQVEANDEVAILSEEEEVEIELLHEFETIPVLSVELSPEDVDALELDPAISYIEEDAEVTTMAQSVPWGISRVQAPAAHNRGLAGRGVKVAVLDTGISTHPDLNIRGGASFVPGEPSTQDGNGHGTHVAGTIAALNNSIGVLGVAPSAELYAVKVLGASGSGAISSIAQGLEWAGNNGMHVANLSLGSPSPSATLEQAVNSATSRGVLVVAASGNSGADSISYPARYANAMAVGATDQNNNRADFSQYGAGLDIVAPGVNVQSTYPGSTYASDNGTSMATPHVAGAAVLVKQKNPSWSNVQIRDHLKNTATSLGSTNLYGSGLVNAEAATR

SEQ ID NO: 64563 - protein, 380 aa, Unidentified
VRSKKLWIVASTALLISVAFSSSIASAAEEAKEKYLIGFNEQEAVSEFVEQVEANDEVAILSEEEEVEIELLHEFETIPVLSVELSPEDVDALELDPAISYIEEDAEVTTMAQSVPWGISRVQAPAAHRRGLTGSGVKVAVLDTGISTHPDLRIRGGASFVPGEPSTQDGNGHGTHVAGTIAALDNSIGVLGVAPSAELYAVKVLGASGGGAISSIAQGLEWAGNNGMHVANLSLGSPSPSATLEQAVNSATSRGVLVVAASGNSGAGSISYPARYANAMAVGATDQNNNRASFSQYGAGLDIVAPGVNVQSTYPGSTYASLNGTSMATPHVAGAAVLVKQKNPSWSNVRIRNHLKNTATSLGSTNLYGSGLVRAEAATR

SEQ ID NO: 64564 - protein, 380 aa, Unidentified
VRSKKLWIVASTALLISVAFSSSIASAAEEAKEKYLIGFNEQEAVSEFVEQVEANDEVAILSEEEEVEIELLHEFETIPVLSVELSPEDVDALELDPAISYIEEDAEVTTMAQSVPWGISRVQAPAAHRRGLWGRGVKVAVLDTGISTHPDLNIRGGASFVPGEPSTQDGNGHGTHVAGTIAALDNSIGVLGVAPSAELYAVKVLGASGAGSVSSIAQGLEWAGANGMHVANLSLGSPSPSATLEQAVNSATSRGVLVVAASGNSGAGSISYPARYANAMAVGATDQNNNRASFSQYGAGLDIVAPGVNVQSTYPQSAYASLNGTSMATPHVAGAAALVKQKNPSWSNVQIRNRLKNTATSLGSTNLYGSGLVNAEAATR

SEQ ID NO: 64565 - protein, 380 aa, Unidentified
VRSKKLWIVASTALLISVAFSSSIASAAEEAKEKYLIGFNEQEAVSEFVEQVEANDEVAILSEEEEVEIELLHEFETIPVLSVELSPEDVDALELDPAISYIEEDAEVTTMAQSVPWGISRVQAPAAHNRGLTGSGVKVAVLDTGISTHPDLDITGGASFVPGEPSTQDGNGHGTHVAGTIAALNNRIGVLGVAPSAELYAVKVLGASGGGAISSIAQGLEWAGNNGMHVANLSLGSPSPSATLEQAVNSATSRGVLVVAASGNSGAGSISYPARYANAMAVGATDQNNNRASFSQYGAGLDIVAPGVNVQSTYPGSTYASLNGTSMATPHVAGAAVLVKQKNPSWSNVRIRNHLKNTATSLGSTNLYGSGLVRAEAATR

SEQ ID NO: 64566 - protein, 380 aa, Unidentified
VRSKKLWIVASTALLISVAFSSSIASAAEEAKEKYLIGFNEQEAVSEFVEQVEANDEVAILSEEEEVEIELLHEFETIPVLSVELSPEDVDALELDPAISYIEEDAEVTTMAQSVPWGISRVQAPAAHRRGLWGRGVKVAVLDTGISTHPDLNIRGGASFVPGEPSTQDGNGHGTHVAGTIAALDNSIGVLGVAPSAELYAVKVLGASGSGSVSSIAQGLEWAGNNGMHVANLSLGSPSPSATLEQAVNSATSRGVLVVAASGNSGAGSISYPARYANAMAVGATDQDNNRASFSQYGAGLDLVAPGVNVQSTYPGSAYFSLNGTSMATPHVAGAAALVKQKNPSWSNVQIRNRLKNTATSLGSTNLYGSGLVNAEAATR

SEQ ID NO: 64567 - protein, 380 aa, Unidentified
VRSKKLWIVASTALLISVAFSSSIASAAEEAKEKYLIGFNEQEAVSEFVEQVEANDEVAILSEEEEVEIELLHEFETIPVLSVELSPEDVDALELDPAISYIEEDAEVTTMAQSVPWGISRVQAPAAHNRRLTGSGVKVAVLDTGISTHPDLNIRGGASFVPGEPSTQDGNGHGTHVAGTIAALNNSIGVLGVAPSAELYAVKVLGASGGGAISSIAQGLEWAGANGMHVANLSLGSPSPSATLEQAVNSATSRGVLVVAASGNSGAGSISYPARYANAMAVGATDQDNNRASFSQYGAGLDIVAPGVNVQSTYPGSAYASLNGTSMATPHVAGAAVLVKQKNPSWSNVRIRNHLKNTATSLGSTNLYGSGLVNAEAATR

SEQ ID NO: 64568 - protein, 380 aa, Unidentified
VRSKKLWIVASTALLISVAFSSSIASAAEEAKEKYLIGFNEQEAVSEFVEQVEANDEVAILSEEEEVEIELLHEFETIPVLSVELSPEDVDALELDPAISYIEEDAEVTTMAQSVPWGISRVQAPAAHRRRLTGRGVKVAVLDTGISTHPDLNIRGGASFVPGEPSTQDGNGHGTHVAGTIAALDNSIGVLGVAPSAELYAVKVLGASGAGSVSSIAQGLEWAGNNGMHVANLSLGSPSPSATLEQAVNSATSRGVLVVAASGNSGAGSISYPARYANAMAVGATDQNNNRASFSQYGAGLDLVAPGVNVQSTYPGSAYFSLNGTSMATPHVAGAAALVKQKNPSWSNVQIRNRLKNTATSLGSTNLYGSGLVNAEAATR

SEQ ID NO: 64569 - protein, 380 aa, Unidentified
VRSKKLWIVASTALLISVAFSSSIASAAEEAKEKYLIGFNEQEAVSEFVEQVEANDEVAILSEEEEVEIELLHEFETIPVLSVELSPEDVDALELDPAISYIEEDAEVTTMAQSVPWGISRVQAPAAHRRRLTGSGVKVAVLDTGISTHPDLRIRGGASFVPGEPSTQDGNGHGTHVAGTIAALNNSIGVLGVAPSAELYAVKVLGASGGGAISSIAQGLEWAGNNGMHVANLSLGSPSPSATLEQAVNSATSRGVLVVAASGNSGAGSISYPARYANAMAVGATDQNNNRASFSQYGAGLDIVAPGVNVQSTYPGSTYASENGTSMATPHVAGAAVLVKQKNPSWSNVRIRNHLKNTATSLGSTNLYGSGLVNAEAATR

SEQ ID NO: 64570 - protein, 380 aa, Unidentified
VRSKKLWIVASTALLISVAFSSSIASAAEEAKEKYLIGFNEQEAVSEFVEQVEANDEVAILSEEEEVEIELLHEFETIPVLSVELSPEDVDALELDPAISYIEEDAEVTTMAQSVPWGISRVQAPAAHRRGLTGRGVKVAVLDTGISTHPDLNIRGGASFVPGEPSTQDGNGHGTHVAGTIAALDNSIGVLGVAPSAELYAVKVLGASGSGSVSSIAQGLEWAGANGMHVANLSLGSPSPSATLEQAVNSATSRGVLVVAASGNSGAGSISYPARYANAMAVGATDQDNNRASFSQYGAGLDLVAPGVNVQSTYPQSTYFSLNGTSMATPHVAGAAALVKQKNPSWSNVQIRNRLKNTATSLGSTNLYGSGLVNAEAATR

SEQ ID NO: 64571 - protein, 380 aa, Unidentified
VRSKKLWIVASTALLISVAFSSSIASAAEEAKEKYLIGFNEQEAVSEFVEQVEANDEVAILSEEEEVEIELLHEFETIPVLSVELSPEDVDALELDPAISYIEEDAEVTTMAQSVPWGISRVQAPAAHNRGLTGSGVKVAVLDTGISTHPDLNIRGGASFVPGEPSTQDGEGHGTHVAGTIAALNNSIGVLGVAPSAELYAVKVLGASGGGAISSIAQGLEWAGNNGMHVANLSLGSPSPSATLEQAVNSATSRGVLVVAASGNSGADSISYPARYANAMAVGATDQNNNRASFSQYGAGLDIVAPGVNVQSTYPGSTYASLNGTSMATPHVAGAAVLVKQKNPSWSNVRIRDRLKNTATSLGSTNLYGSGLVNAEAATR

SEQ ID NO: 64572 - protein, 380 aa, Unidentified
VRSKKLWIVASTALLISVAFSSSIASAAEEAKEKYLIGFNEQEAVSEFVEQVEANDEVAILSEEEEVEIELLHEFETIPVLSVELSPEDVDALELDPAISYIEEDAEVTTMAQSVPWGISRVQAPAAHRRGLWGRGVKVAVLDTGISTHPDLNIRGGASFVPGEPSTQDGNGHGTHVAGTIAALDNSIGVLGVAPSAELYAVKVLGASGAGSVSSIAQGLEWAGNNGMHVANLSLGSPSPSATLEQAVNSATSRGVLVVAASGNSGAGSISYPARYANAMAVGATDQDNNRASFSQYGAGLDIVAPGVNVQSTYPQSTYFSLNGTSMATPHVAGAAALVKQKNPSWSNVQIRNRLKNTATSLGSTNLYGSGLVNAEAATR

SEQ ID NO: 64573 - protein, 380 aa, Unidentified
VRSKKLWIVASTALLISVAFSSSIASAAEEAKEKYLIGFNEQEAVSEFVEQVEANDEVAILSEEEEVEIELLHEFETIPVLSVELSPEDVDALELDPAISYIEEDAEVTTMAQSVPWGISRVQAPAAHNRRLWGSGVKVAVLDTGISTHPDLNIRGGASFVPGEPSTQDGNGHGTHVAGTIAALNNRIGVLGVAPSAELYAVKVLGASGAGAISSIAQGLEWAGANGMHVANLSLGSPSPSATLEQAVNSATSRGVLVVAASGNSGAGSISYPARYANAMAVGATDQDNNRASFSQYGAGLDIVAPGVNVQSTYPGSTYASLNGTSMATPHVAGAAVLVKQKNPSWSNVQIRNHLKNTATSLGSTNLYGSGLVNAEAATR

SEQ ID NO: 64574 - protein, 380 aa, Unidentified
VRSKKLWIVASTALLISVAFSSSIASAAEEAKEKYLIGFNEQEAVSEFVEQVEANDEVAILSEEEEVEIELLHEFETIPVLSVELSPEDVDALELDPAISYIEEDAEVTTMAQSVPWGISRVQAPAAHRRGLTGSGVKVAVLDTGISTHPDLDIRGGASFVPGEPSTQDGNGHGTHVAGTIAALDNSIGVLGVAPSAELYAVKVLGASGGGAISSIAQGLEWAGNNGMHVANLSLGSPSPSATLEQAVNSATSRGVLVVAASGNSGAGSISYPARYANAMAVGATDQNNNRASFSQYGAGLDIVAPGVNVQSTYPGSTYASLNGTSMATPHVAGAAVLVKQKNPSWSNVRIRNHLKNTATSLGSTNLYGSGLVRAEAATR

SEQ ID NO: 64575 - protein, 380 aa, Unidentified
VRSKKLWIVASTALLISVAFSSSIASAAEEAKEKYLIGFNEQEAVSEFVEQVEANDEVAILSEEEEVEIELLHEFETIPVLSVELSPEDVDALELDPAISYIEEDAEVTTMAQSVPWGISRVQAPAAHRRGLTGSGVKVAVLDTGISTHPDLDITGGASFVPGEPSTQDGNGHGTHVAGTIAALNNRIGVLGVAPSAELYAVKVLGASGGGAISSIAQGLEWAGNNGMHVANLSLGSPSPSATLEQAVNSATSRGVLVVAASGNSGAGSISYPARYANAMAVGATDQNNNRASFSQYGAGLDIVAPGVNVQSTYPGSTYASLNGTSMATPHVAGAAVLVKQKNPSWSNVRIRNHLKNTATSLGSTNLYGSGLVNAEAATR

SEQ ID NO: 64576 - protein, 380 aa, Unidentified
VRSKKLWIVASTALLISVAFSSSIASAAEEAKEKYLIGFNEQEAVSEFVEQVEANDEVAILSEEEEVEIELLHEFETIPVLSVELSPEDVDALELDPAISYIEEDAEVTTMAQSVPWGISRVQAPAAHRRRLTGRGVKVAVLDTGISTHPDLNIRGGASFVPGEPSTQDGNGHGTHVAGTIAALDNSIGVLGVAPSAELYAVKVLGASGAGSVSSIAQGLEWAGNNGMHVANLSLGSPSPSATLEQAVNSATSRGVLVVAASGNSGAGSISYPARYANAMAVGATDQDNNRASFSQYGAGLDLVAPGVNVQSTYPQSTYASLNGTSMATPHVAGAAALVKQKNPSWSNVQIRNRLKNTATSLGSTNLYGSGLVNAEAATR

SEQ ID NO: 64577 - protein, 380 aa, Unidentified
VRSKKLWIVASTALLISVAFSSSIASAAEEAKEKYLIGFNEQEAVSEFVEQVEANDEVAILSEEEEVEIELLHEFETIPVLSVELSPEDVDALELDPAISYIEEDAEVTTMAQSVPWGISRVQAPAAHRRRLWGRGVKVAVLDTGISTHPDLNIRGGASFVPGEPSTQDGNGHGTHVAGTIAALDNSIGVLGVAPSAELYAVKVLGASGAGSVSSIAQGLEWAGNNGMHVANLSLGSPSPSATLEQAVNSATSRGVLVVAASGNSGAGSISYPARYANAMAVGATDQNNNRASFSQYGAGLDIVAPGVNVQSTYPQSAYASLNGTSMATPHVAGAAALVKQKNPSWSNVQIRNRLKNTATSLGSTNLYGSGLVNAEAATR

SEQ ID NO: 64578 - protein, 380 aa, Unidentified
VRSKKLWIVASTALLISVAFSSSIASAAEEAKEKYLIGFNEQEAVSEFVEQVEANDEVAILSEEEEVEIELLHEFETIPVLSVELSPEDVDALELDPAISYIEEDAEVTTMAQSVPWGISRVQAPAAHNRGLTGSGVKVAVLDTGISTHPDLRIRGGASFVPGEPSTQDGNGHGTHVAGTIAALDNRIGVLGVAPSAELYAVKVLGASGGGAISSIAQGLEWAGNNGMHVANLSLGSPSPSATLEQAVNSATSRGVLVVAASGNSGAGSISYPARYANAMAVGATDQNNNRASFSQYGAGLDIVAPGVNVQSTYPGSTYASLNGTSMATPHVAGAAVLVKQKNPSWSNVRIRNRLKNTATSLGSTNLYGSGLVNAEAATR

SEQ ID NO: 64579 - protein, 380 aa, Unidentified
VRSKKLWIVASTALLISVAFSSSIASAAEEAKEKYLIGFNEQEAVSEFVEQVEANDEVAILSEEEEVEIELLHEFETIPVLSVELSPEDVDALELDPAISYIEEDAEVTTMAQSVPWGISRVQAPAAHNRRLTGRGVKVAVLDTGISTHPDLNIRGGASFVPGEPSTQDGNGHGTHVAGTIAALNNSIGVLGVAPSAELYAVKVLGASGGGAISSIAQGLEWAGNNGMHVANLSLGSPSPSATLEQAVNSATSRGVLVVAASGNSGAGSISYPARYANAMAVGATDQNNNRASFSQYGAGLDIVAPGVNVQSTYPGSTYASENGTSMATPHVAGAAVLVKQKNPSWSNVRIRNRLKNTATSLGSTNLYGSGLVNAEAATR

SEQ ID NO: 64580 - protein, 380 aa, Unidentified
VRSKKLWIVASTALLISVAFSSSIASAAEEAKEKYLIGFNEQEAVSEFVEQVEANDEVAILSEEEEVEIELLHEFETIPVLSVELSPEDVDALELDPAISYIEEDAEVTTMAQSVPWGISRVQAPAAHNRGLTGSGVKVAVLDTGISTHPDLRITGGASFVPGEPSTQDGNGHGTHVAGTIAALNNRIGVLGVAPSAELYAVKVLGASGGGAISSIAQGLEWAGNNGMHVANLSLGSPSPSATLEQAVNSATSRGVLVVAASGNSGAGSISYPARYANAMAVGATDQNNNRASFSQYGAGLDIVAPGVNVQSTYPGSTYASENGTSMATPHVAGAAVLVKQKNPSWSNVRIRNHLKNTATSLGSTNLYGSGLVNAEAATR

SEQ ID NO: 64581 - protein, 380 aa, Unidentified
VRSKKLWIVASTALLISVAFSSSIASAAEEAKEKYLIGFNEQEAVSEFVEQVEANDEVAILSEEEEVEIELLHEFETIPVLSVELSPEDVDALELDPAISYIEEDAEVTTMAQSVPWGISRVQAPAAHRRGLWGRGVKVAVLDTGISTHPDLNIRGGASFVPGEPSTQDGNGHGTHVAGTIAALDNSIGVLGVAPSAELYAVKVLGASGSGSVSSIAQGLEWAGANGMHVANLSLGSPSPSATLEQAVNSATSRGVLVVAASGNSGAGSISYPARYANAMAVGATDQDNNRASFSQYGAGLDIVAPGVNVQSTYPGSAYFSLNGTSMATPHVAGAAALVKQKNPSWSNVQIRNRLKNTATSLGSTNLYGSGLVNAEAATR

SEQ ID NO: 64582 - protein, 380 aa, Unidentified
VRSKKLWIVASTALLISVAFSSSIASAAEEAKEKYLIGFNEQEAVSEFVEQVEANDEVAILSEEEEVEIELLHEFETIPVLSVELSPEDVDALELDPAISYIEEDAEVTTMAQSVPWGISRVQAPAAHNRGLTGSGVKVAVLDTGISTHPDLNIRGGASFVPGEPSTQDGNGHGTHVAGTIAALNNSIGVLGVAPSAELYAVKVLGASGGGAISSIAQGLEWAGNNGMHVANLSLGSPSPSATLEQAVNSATSRGVLVVAASGNSGADSISYPARYANAMAVGATDQNNNRASFSQYGAGLDIVAPGVNVQSTYPGSTYASLNGTSMATPHVAGAAVLVKHKNPSWSNVRIRDHLKKTATSLGSTNLYGSGLVNAEAATR

SEQ ID NO: 64583 - protein, 380 aa, Unidentified
VRSKKLWIVASTALLISVAFSSSIASAAEEAKEKYLIGFNEQEAVSEFVEQVEANDEVAILSEEEEVEIELLHEFETIPVLSVELSPEDVDALELDPAISYIEEDAEVTTMAQSVPWGISRVQAPAAHRRGLTGRGVKVAVLDTGISTHPDLNIRGGASFVPGEPSTQDGNGHGTHVAGTIAALDNSIGVLGVAPSAELYAVKVLGASGAGSVSSIAQGLEWAGANGMHVANLSLGSPSPSATLEQAVNSATSRGVLVVAASGNSGAGSISYPARYANAMAVGATDQNNNRASFSQYGAGLDIVAPGVNVQSTYPQSAYFSLNGTSMATPHVAGAAALVKQKNPSWSNVQIRNRLKNTATSLGSTNLYGSGLVNAEAATR

SEQ ID NO: 64584 - protein, 380 aa, Unidentified
VRSKKLWIVASTALLISVAFSSSIASAAEEAKEKYLIGFNEQEAVSEFVEQVEANDEVAILSEEEEVEIELLHEFETIPVLSVELSPEDVDALELDPAISYIEEDAEVTTMAQSVPWGISRVQAPAAHRRGLWGRGVKVAVLDTGISTHPDLNIRGGASFVPGEPSTQDGNGHGTHVAGTIAALDNSIGVLGVAPSAELYAVKVLGASGAGSVSSIAQGLEWAGANGMHVANLSLGSPSPSATLEQAVNSATSRGVLVVAASGNSGAGSISYPARYANAMAVGATDQNNNRASFSQYGAGLDLVAPGVNVQSTYPGSAYASLNGTSMATPHVAGAAALVKQKNPSWSNVQIRNRLKNTATSLGSTNLYGSGLVNAEAATR

SEQ ID NO: 64585 - protein, 380 aa, Unidentified
VRSKKLWIVASTALLISVAFSSSIASAAEEAKEKYLIGFNEQEAVSEFVEQVEANDEVAILSEEEEVEIELLHEFETIPVLSVELSPEDVDALELDPAISYIEEDAEVTTMAQSVPWGISRVQAPAAHRRRLTGRGVKVAVLDTGISTHPDLNIRGGASFVPGEPSTQDGNGHGTHVAGTIAALDNSIGVLGVAPSAELYAVKVLGASGSGSVSSIAQGLEWAGANGMHVANLSLGSPSPSATLEQAVNSATSRGVLVVAASGNSGAGSISYPARYANAMAVGATDQDNNRASFSQYGAGLDIVAPGVNVQSTYPQSTYFSLNGTSMATPHVAGAAALVKQKNPSWSNVQIRNRLKNTATSLGSTNLYGSGLVNAEAATR

SEQ ID NO: 64586 - protein, 380 aa, Unidentified
VRSKKLWIVASTALLISVAFSSSIASAAEEAKEKYLIGFNEQEAVSEFVEQVEANDEVAILSEEEEVEIELLHEFETIPVLSVELSPEDVDALELDPAISYIEEDAEVTTMAQSVPWGISRVQAPAAHNRGLTGSGVKVAVLDTGISTHPDLNITGGASFVPGEPSTQDGNGHGTHVAGTIAALDNRIGVLGVAPSAELYAVKVLGASGGGAISSIAQGLEWAGNNGMHVANLSLGSPSPSATLEQAVNSATSRGVLVVAASGNSGAGSISYPARYANAMAVGATDQNNNRASFSQYGAGLDIVAPGVNVQSTYPGSTYASLNGTSMATPHVAGAAVLVKQKNPSWSNVRIRNHLKNTATSLGSTNLYGSGLVRAEAATR

SEQ ID NO: 64587 - protein, 380 aa, Unidentified
VRSKKLWIVASTALLISVAFSSSIASAAEEAKEKYLIGFNEQEAVSEFVEQVEANDEVAILSEEEEVEIELLHEFETIPVLSVELSPEDVDALELDPAISYIEEDAEVTTMAQSVPWGISRVQAPAAHRRGLTGRGVKVAVLDTGISTHPDLNIRGGASFVPGEPSTQDGNGHGTHVAGTIAALDNSIGVLGVAPSAELYAVKVLGASGAGSVSSIAQGLEWAGNNGMHVANLSLGSPSPSATLEQAVNSATSRGVLVVAASGNSGAGSISYPARYANAMAVGATDQNNNRASFSQYGAGLDIVAPGVNVQSTYPQSAYFSLNGTSMATPHVAGAAALVKQKNPSWSNVQIRNRLKNTATSLGSTNLYGSGLVNVEAATR

SEQ ID NO: 64588 - protein, 380 aa, Unidentified
VRSKKLWIVASTALLISVAFSSSIASAAEEAKEKYLIGFNEQEAVSEFVEQVEANDEVAILSEEEEVEIELLHEFETIPVLSVELSPEDVDALELDPAISYIEEDAEVTTMAQSVPWGISRVQAPAAHRRGLTGRGVKVAVLDTGISTHPDLNIRGGASFVPGEPSTQDGNGHGTHVAGTIAALDNSIGVLGVAPSAELYAVKVLGASGAGSVSSIAQGLEWAGANGMHVANLSLGSPSPSATLEQAVNSATSRGVLVVAASGNSGAGSISYPARYANAMAVGATDQNNNRASFSQYGAGLDIVAPGVNVQSTYPQSAYASLNGTSMATPHVAGAAALVKQDNPSWSNVQIRNRLKNTATSLGSTNLYGSGLVNAEAATR

SEQ ID NO: 64589 - protein, 380 aa, Unidentified
VRSKKLWIVASTALLISVAFSSSIASAAEEAKEKYLIGFNEQEAVSEFVEQVEANDEVAILSEEEEVEIELLHEFETIPVLSVELSPEDVDALELDPAISYIEEDAEVTTMAQSVPWGISRVQAPAAHNRRLTGRGVKVAVLDTGISTHPDLNITGGASFVPGEPSTQDGNGHGTHVAGTIAALDNSIGVLGVAPSAELYAVKVLGASGGGAISSIAQGLEWAGNNGMHVANLSLGSPSPSATLEQAVNSATSRGVLVVAASGNSGAGSISYPARYANAMAVGATDQNNNRASFSQYGAGLDIVAPGVNVQSTYPGSTYASLNGTSMATPHVAGAAVLVKQKNPSWSNVRIRNHLKNTATSLGSTNLYGSGLVNAEAATR

SEQ ID NO: 64590 - protein, 380 aa, Unidentified
VRSKKLWIVASTALLISVAFSSSIASAAEEAKEKYLIGFNEQEAVSEFVEQVEANDEVAILSEEEEVEIELLHEFETIPVLSVELSPEDVDALELDPAISYIEEDAEVTTMAQSVPWGISRVQAPAAHNRRLTGSGVKVAVLDTGISTHPDLNIRGGASFVPGEPSTQDGNGHGTHVAGTIAALNNSIGVLGVAPSAELYAVKVLGASGAGAISSIAQGLEWAGANGMHVANLSLGSPSPSATLEQAVNSATSRGVLVVAASGNSGAGSISYPARYANAMAVGATDQDNNRASFSQYGAGLDIVAPGVNVQSTYPGSAYASLNGTSMATPHVAGAAVLVKQKNPSWSNVRIRNHLKNTATSLGSTNLYGSGLVNAEAATR

SEQ ID NO: 64591 - protein, 380 aa, Unidentified
VRSKKLWIVASTALLISVAFSSSIASAAEEAKEKYLIGFNEQEAVSEFVEQVEANDEVAILSEEEEVEIELLHEFETIPVLSVELSPEDVDALELDPAISYIEEDAEVTTMAQSVPWGISRVQAPAAHRRGLTGRGVKVAVLDTGISTHPDLNIRGGASFVPGEPSTQDGNGHGTHVAGTIAALDNSIGVLGVAPSAELYAVKVLGASGAGSVSSIAQGLEWAGANGMHVANLSLGSPSPSATLEQAVNSATSRGVLVVAASGNSGAGSISYPARYANAMAVGATDQDNNRASFSQYGAGLDIVAPGVNVQSTYPGSAYFSLNGTSMATPHVAGAAALVKQKNPSWSNVQIRNRLKNTATSLGSTNLYGSGLVNAEAATR

SEQ ID NO: 64592 - protein, 380 aa, Unidentified
VRSKKLWIVASTALLISVAFSSSIASAAEEAKEKYLIGFNEQEAVSEFVEQVEANDEVAILSEEEEVEIELLHEFETIPVLSVELSPEDVDALELDPAISYIEEDAEVTTMAQSVPWGISRVQAPAAHRRGLTGRGVKVAVLDTGISTHPDLNIRGGASFVPGEPSTQDGNGHGTHVAGTIAALDNSIGVLGVAPSAELYAVKVLGASGAGSVSSIAQGLEWAGANGMHVANLSLGSPSPSATLEQAVNSATSRGVLVVAASGNSGAGSISYPARYANAMAVGATDQNNNRASFSQYGAGLDLVAPGVNVQSTYPQSAYASLNGTSMATPHVAGAAALVKQKNPSWSNVQIRNRLKNTATSLGSTNLYGSGLVNAEAATR

SEQ ID NO: 64593 - protein, 380 aa, Unidentified
VRSKKLWIVASTALLISVAFSSSIASAAEEAKEKYLIGFNEQEAVSEFVEQVEANDEVAILSEEEEVEIELLHEFETIPVLSVELSPEDVDALELDPAISYIEEDAEVTTMAQSVPWGISRVQAPAAHNRRLWGSGVKVAVLDTGISTHPDLNIRGGASFVPGEPSTQDGNGHGTHVAGTIAALNNSIGVLGVAPSAELYAVKVLGASGAGAISSIAQGLEWAGANGMHVANLSLGSPSPSATLEQAVNSATSRGVLVVAASGNSGAGSISYPARYANAMAVGATDQDNNRASFSQYGAGLDIVAPGVNVQSTYPGSTYASLNGTSMATPHVAGAAVLVKQKNPSWSNVRIRNHLKNTATSLGSTNLYGSGLVNAEAATR

SEQ ID NO: 64594 - protein, 380 aa, Unidentified
VRSKKLWIVASTALLISVAFSSSIASAAEEAKEKYLIGFNEQEAVSEFVEQVEANDEVAILSEEEEVEIELLHEFETIPVLSVELSPEDVDALELDPAISYIEEDAEVTTMAQSVPWGISRVQAPAAHNRGLTGRGVKVAVLDTGISTHPDLNITGGASFVPGEPSTQDGNGHGTHVAGTIAALDNSIGVLGVAPSAELYAVKVLGASGGGAISSIAQGLEWAGNNGMHVANLSLGSPSPSATLEQAVNSATSRGVLVVAASGNSGAGSISYPARYANAMAVGATDQNNNRASFSQYGAGLDIVAPGVNVQSTYPGSTYASLNGTSMATPHVAGAAVLVKQKNPSWSNVRIRNHLKNTATSLGSTNLYGSGLVRAEAATR

SEQ ID NO: 64595 - protein, 380 aa, Unidentified
VRSKKLWIVASTALLISVAFSSSIASAAEEAKEKYLIGFNEQEAVSEFVEQVEANDEVAILSEEEEVEIELLHEFETIPVLSVELSPEDVDALELDPAISYIEEDAEVTTMAQSVPWGISRVQAPAAHNRGLAGSGVKVAVLDTGISTHPDLNIRGGASFVPGEPSTQDGNGHGTHVAGTIAALNNSIGVLGVAPSAELYAVKVLGASGGGAISSIAQGLEWAGNNGMHVANLSLGSPSPSATLEQAVNSATSRGVLVVAASGNSGADSISYPARYANAMAVGATDQNNNRASFSQYGAGLDIVAPGVNVQSTYPGSTYASLNGTSMATPHVAGAAVLVKQKNPSWSNVRIRDHLKNTATSLGSTNLYGSGLVNAFAATR

SEQ ID NO: 64596 - protein, 380 aa, Unidentified
VRSKKLWIVASTALLISVAFSSSIASAAEEAKEKYLIGFNEQEAVSEFVEQVEANDEVAILSEEEEVEIELLHEFETIPVLSVELSPEDVDALELDPAISYIEEDAEVTTMAQSVPWGISRVQAPAAHRRRLWGRGVKVAVLDTGISTHPDLNIRGGASFVPGEPSTQDGNGHGTHVAGTIAALDNSIGVLGVAPSAELYAVKVLGASGAGSVSSIAQGLEWAGANGMHVANLSLGSPSPSATLEQAVNSATSRGVLVVAASGNSGAGSISYPARYANAMAVGATDQNNNRASFSQYGAGLDLVAPGVNVQSTYPGSTYASLNGTSMATPHVAGAAALVKQKNPSWSNVQIRNRLKNTATSLGSTNLYGSGLVNAEAATR

SEQ ID NO: 64597 - protein, 380 aa, Unidentified
VRSKKLWIVASTALLISVAFSSSIASAAEEAKEKYLIGFNEQEAVSEFVEQVEANDEVAILSEEEEVEIELLHEFETIPVLSVELSPEDVDALELDPAISYIEEDAEVTTMAQSVPWGISRVQAPAAHNRRLWGSGVKVAVLDTGISTHPDLNIRGGASFVPGEPSTQDGNGHGTHVAGTIAALNNSIGVLGVAPSAELYAVKVLGASGGGAISSIAQGLEWAGANGMHVANLSLGSPSPSATLEQAVNSATSRGVLVVAASGNSGAGSISYPARYANAMAVGATDQDNNRASFSQYGAGLDIVAPGVNVQSTYPGSTYASLNGTSMATPHVAGAAVLVKQKNPSWSNVRIRNHLKNTATSLGSTNLYGSGLVNAEAATR

SEQ ID NO: 64598 - protein, 380 aa, Unidentified
VRSKKLWIVASTALLISVAFSSSIASAAEEAKEKYLIGFNEQEAVSEFVEQVEANDEVAILSEEEEVEIELLHEFETIPVLSVELSPEDVDALELDPAISYIEEDAEVTTMAQSVPWGISRVQAPAAHRRGLWGRGVKVAVLDTGISTHPDLNIRGGASFVPGEPSTQDGNGHGTHVAGTIAALDNSIGVLGVAPSAELYAVKVLGASGSGSVSSIAQGLEWAGANGMHVANLSLGSPSPSATLEQAVNSATSRGVLVVAASGNSGAGSISYPARYANAMAVGATDQNNNRASFSQYGAGLDLVAPGVNVQSTYPGSAYFSLNGTSMATPHVAGAAALVKQKNPSWSNVQIRNRLKNTATSLGSTNLYGSGLVNAEAATR

SEQ ID NO: 64599 - protein, 380 aa, Unidentified
VRSKKLWIVASTALLISVAFSSSIASAAEEAKEKYLIGFNEQEAVSEFVEQVEANDEVAILSEEEEVEIELLHEFETIPVLSVELSPEDVDALELDPAISYIEEDAEVTTMAQSVPWGISRVQAPAAHRRGLWGRGVKVAVLDTGISTHPDLNIRGGASFVPGEPSTQDGNGHGTHVAGTIAALDNSIGVLGVAPSAELYAVKVLGASGAGSVSSIAQGLEWAGANGMHVANLSLGSPSPSATLEQAVNSATSRGVLVVAASGNSGAGSISYPARYANAMAVGATDQDNNRASFSQYGAGLDIVAPGVNVQSTYPGSAYASLNGTSMATPHVAGAAALVKQKNPSWSNVQIRNRLKNTATSLGSTNLYGSGLVNAEAATR

SEQ ID NO: 64600 - protein, 380 aa, Unidentified
VRSKKLWIVASTALLISVAFSSSIASAAEEAKEKYLIGFNEQEAVSEFVEQVEANDEVAILSEEEEVEIELLHEFETIPVLSVELSPEDVDALELDPAISYIEEDAEVTTMAQSVPWGISRVQAPAAHNRGLTGRGVKVAVLDTGISTHPDLDIRGGASFVPGEPSTQDGNGHGTHVAGTIAALDNSIGVLGVAPSAELYAVKVLGASGGGAISSIAQGLEWAGNNGMHVANLSLGSPSPSATLEQAVNSATSRGVLVVAASGNSGAGSISYPARYANAMAVGATDQNNNRASFSQYGAGLDIVAPGVNVQSTYPGSTYASLNGTSMATPHVAGAAVLVKQKNPSWSNVRIRNHLKNTATSLGSTNLYGSGLVRAEAATR

SEQ ID NO: 64601 - protein, 380 aa, Unidentified
VRSKKLWIVASTALLISVAFSSSIASAAEEAKEKYLIGFNEQEAVSEFVEQVEANDEVAILSEEEEVEIELLHEFETIPVLSVELSPEDVDALELDPAISYIEEDAEVTTMAQSVPWGISRVQAPAAHNRGLAGRGVKVAVLDTGISTHPDLNIRGGASFVPGEPSTQDGNGHGTHVAGTIAALNNSIGVLGVAPSAELYAVKVLGASGGGAISSIAQGLEWAGNNGMHVANLSLGSESPSATLEQAVNSATSRGVLVVAASGNSGAGSISYPARYANAMAVGATDQNNNRASFSQYGAGLDIVAPGVNVQSTYPGSTYASLNGTSMATPHVAGAAVLVKQKNPSWSNVRIRDHLKNTATSLGSTNLYGSGLVNAEAATR

SEQ ID NO: 64602 - protein, 380 aa, Unidentified
VRSKKLWIVASTALLISVAFSSSIASAAEEAKEKYLIGFNEQEAVSEFVEQVEANDEVAILSEEEEVEIELLHEFETIPVLSVELSPEDVDALELDPAISYIEEDAEVTTMAQSVPWGISRVQAPAAHNRGLTGSGVKVAVLDTGISTHPDLNIRGGASFVPGEPSTQDGNGHGTHVAGTIAALNNSIGVLGVAPSAELYAVKVLGASGGGAISSIAQGLEWAGNNGMHVANLSLGSESPSATLEQAVNSATSRGVLVVAASGNSGAESISYPARYANAMAVGATDQNNNRASFSQYGAGLDIVAPGVNVQSTYPGSTYASLNGTSMATPHVAGAAVLVKQKRPSWSNVRIRDHLKNTATSLGSTNLYGSGLVNAEAATR

SEQ ID NO: 64603 - protein, 380 aa, Unidentified
VRSKKLWIVASTALLISVAFSSSIASAAEEAKEKYLIGFNEQEAVSEFVEQVEANDEVAILSEEEEVEIELLHEFETIPVLSVELSPEDVDALELDPAISYIEEDAEVTTMAQSVPWGISRVQAPAAHRRRLTGRGVKVAVLDTGISTHPDLNIRGGASFVPGEPSTQDGNGHGTHVAGTIAALDNSIGVLGVAPSAELYAVKVLGASGSGSVSSIAQGLEWAGNNGMHVANLSLGSPSPSATLEQAVNSATSRGVLVVAASGNSGAGSISYPARYANAMAVGATDQDNNRASFSQYGAGLDLVAPGVNVQSTYPQSTYFSLNGTSMATPHVAGAAALVKQKNPSWSNVQIRNRLKNTATSLGSTNLYGSGLVNAEAATR

SEQ ID NO: 64604 - protein, 380 aa, Unidentified
VRSKKLWIVASTALLISVAFSSSIASAAEEAKEKYLIGFNEQEAVSEFVEQVEANDEVAILSEEEEVEIELLHEFETIPVLSVELSPEDVDALELDPAISYIEEDAEVTTMAQSVPWGISRVQAPAAHRRRLWGRGVKVAVLDTGISTHPDLNIRGGASFVPGEPSTQDGNGHGTHVAGTIAALDNSIGVLGVAPSAELYAVKVLGASGAGSVSSIAQGLEWAGNNGMHVANLSLGSPSPSATLEQAVNSATSRGVLVVAASGNSGAGSISYPARYANAMAVGATDQDNNRASFSQYGAGLDIVAPGVNVQSTYPGSTYFSLNGTSMATPHVAGAAALVKQKNPSWSNVQIRNRLKNTATSLGSTNLYGSGLVNAEAATR

SEQ ID NO: 64605 - protein, 380 aa, Unidentified
VRSKKLWIVASTALLISVAFSSSIASAAEEAKEKYLIGFNEQEAVSEFVEQVEANDEVAILSEEEEVEIELLHEFETIPVLSVELSPEDVDALELDPAISYIEEDAEVTTMAQSVPWGISRVQAPAAHNRGLTGRGVKVAVLDTGISTHPDLRIRGGASFVPGEPSTQDGNGHGTHVAGTIAALNNRIGVLGVAPSAELYAVKVLGASGGGAISSIAQGLEWAGNNGMHVANLSLGSPSPSATLEQAVNSATSRGVLVVAASGNSGAGSISYPARYANAMAVGATDQNNNRASFSQYGAGLDIVAPGVNVQSTYPGSTYASENGTSMATPHVAGAAVLVKQKNPSWSNVRIRNHLKNTATSLGSTNLYGSGLVNAEAATR

SEQ ID NO: 64606 - protein, 380 aa, Unidentified
VRSKKLWIVASTALLISVAFSSSIASAAEEAKEKYLIGFNEQEAVSEFVEQVEANDEVAILSEEEEVEIELLHEFETIPVLSVELSPEDVDALELDPAISYIEEDAEVTTMAQSVPWGISRVQAPAAHRRGLWGRGVKVAVLDTGISTHPDLNIRGGASFVPGEPSTQDGNGHGTHVAGTIAALDNSIGVLGVAPSAELYAVKVLGASGSGSVSSIAQGLEWAGNNGMHVANLSLGSPSPSATLEQAVNSATSRGVLVVAASGNSGAGSISYPARYANAMAVGATDQDNNRASFSQYGAGLDIVAPGVNVQSTYPQSAYFSLNGTSMATPHVAGAAALVKQKNPSWSNVQIRNRLKNTATSLGSTNLYGSGLVNAEAATR

SEQ ID NO: 64607 - protein, 380 aa, Unidentified
VRSKKLWIVASTALLISVAFSSSIASAAEEAKEKYLIGFNEQEAVSEFVEQVEANDEVAILSEEEEVEIELLHEFETIPVLSVELSPEDVDALELDPAISYIEEDAEVTTMAQSVPWGISRVQAPAAHNRRLTGSGVKVAVLDTGISTHPDLRITGGASFVPGEPSTQDGNGHGTHVAGTIAALNNRIGVLGVAPSAELYAVKVLGASGGGAISSIAQGLEWAGNNGMHVANLSLGSPSPSATLEQAVNSATSRGVLVVAASGNSGAGSISYPARYANAMAVGATDQNNNRASFSQYGAGLDIVAPGVNVQSTYPGSTYASLNGTSMATPHVAGAAVLVKQKNPSWSNVRIRNHLKNTATSLGSTNLYGSGLVNAEAATR

SEQ ID NO: 64608 - protein, 380 aa, Unidentified
VRSKKLWIVASTALLISVAFSSSIASAAEEAKEKYLIGFNEQEAVSEFVEQVEANDEVAILSEEEEVEIELLHEFETIPVLSVELSPEDVDALELDPAISYIEEDAEVTTMAQSVPWGISRVQAPAAHRRGLWGRGVKVAVLDTGISTHPDLNIRGGASFVPGEPSTQDGNGHGTHVAGTIAALDNSIGVLGVAPSAELYAVKVLGASGAGSVSSIAQGLEWAGNNGMHVANLSLGSPSPSATLEQAVNSATSRGVLVVAASGNSGAGSISYPARYANAMAVGATDQDNNRASFSQYGAGLDLVAPGVNVQSTYPQSTYASLNGTSMATPHVAGAAALVKQKNPSWSNVQIRNRLKNTATSLGSTNLYGSGLVNAEAATR

SEQ ID NO: 64609 - protein, 380 aa, Unidentified
VRSKKLWIVASTALLISVAFSSSIASAAEEAKEKYLIGFNEQEAVSEFVEQVEANDEVAILSEEEEVEIELLHEFETIPVLSVELSPEDVDALELDPAISYIEEDAEVTTMAQSVPWGISRVQAPAAHRRRLTGRGVKVAVLDTGISTHPDLNIRGGASFVPGEPSTQDGNGHGTHVAGTIAALDNSIGVLGVAPSAELYAVKVLGASGAGSVSSIAQGLEWAGANGMHVANLSLGSPSPSATLEQAVNSATSRGVLVVAASGNSGAGSISYPARYANAMAVGATDQDNNRASFSQYGAGLDIVAPGVNVQSTYPQSTYASLNGTSMATPHVAGAAALVKQKNPSWSNVQIRNRLKNTATSLGSTNLYGSGLVNAEAATR

SEQ ID NO: 64610 - protein, 380 aa, Unidentified
VRSKKLWIVASTALLISVAFSSSIASAAEEAKEKYLIGFNEQEAVSEFVEQVEANDEVAILSEEEEVEIELLHEFETIPVLSVELSPEDVDALELDPAISYIEEDAEVTTMAQSVPWGISRVQAPAAHNRRLTGSGVKVAVLDTGISTHPDLNIRGGASFVPGEPSTQDGNGHGTHVAGTIAALNNRIGVLGVAPSAELYAVKVLGASGAGAISSIAQGLEWAGANGMHVANLSLGSPSPSATLEQAVNSATSRGVLVVAASGNSGAGSISYPARYANAMAVGATDQDNNRASFSQYGAGLDIVAPGVNVQSTYPGSTYASLNGTSMATPHVAGAAVLVKQKNPSWSNVRIRNHLKNTATSLGSTNLYGSGLVNAEAATR

SEQ ID NO: 64611 - protein, 380 aa, Unidentified
VRSKKLWIVASTALLISVAFSSSIASAAEEAKEKYLIGFNEQEAVSEFVEQVEANDEVAILSEEEEVEIELLHEFETIPVLSVELSPEDVDALELDPAISYIEEDAEVTTMAQSVPWGISRVQAPAAHNRRLWGSGVKVAVLDTGISTHPDLNIRGGASFVPGEPSTQDGNGHGTHVAGTIAALNNSIGVLGVAPSAELYAVKVLGASGAGAISSIAQGLEWAGANGMHVANLSLGSPSPSATLEQAVNSATSRGVLVVAASGNSGAGSISYPARYANAMAVGATDQNNNRASFSQYGAGLDIVAPGVNVQSTYPQSTYASLNGTSMATPHVAGAAVLVKQKNPSWSNVRIRNHLKNTATSLGSTNLYGSGLVNAEAATR

SEQ ID NO: 64612 - protein, 380 aa, Unidentified
VRSKKLWIVASTALLISVAFSSSIASAAEEAKEKYLIGFNEQEAVSEFVEQVEANDEVAILSEEEEVEIELLHEFETIPVLSVELSPEDVDALELDPAISYIEEDAEVTTMAQSVPWGISRVQAPAAHRRRLWGRGVKVAVLDTGISTHPDLNIRGGASFVPGEPSTQDGNGHGTHVAGTIAALDNSIGVLGVAPSAELYAVKVLGASGSGSVSSIAQGLEWAGANGMHVANLSLGSPSPSATLEQAVNSATSRGVLVVAASGNSGAGSISYPARYANAMAVGATDQDNNRASFSQYGAGLDLVAPGVNVQSTYPGSTYASLNGTSMATPHVAGAAALVKQKNPSWSNVQIRNRLKNTATSLGSTNLYGSGLVNAEAATR

SEQ ID NO: 64613 - protein, 380 aa, Unidentified
VRSKKLWIVASTALLISVAFSSSIASAAEEAKEKYLIGFNEQEAVSEFVEQVEANDEVAILSEEEEVEIELLHEFETIPVLSVELSPEDVDALELDPAISYIEEDAEVTTMAQSVPWGISRVQAPAAHRRRLTGRGVKVAVLDTGISTHPDLNIRGGASFVPGEPSTQDGNGHGTHVAGTIAALDNSIGVLGVAPSAELYAVKVLGASGAGSVSSIAQGLEWAGANGMHVANLSLGSPSPSATLEQAVNSATSRGVLVVAASGNSGAGSISYPARYANAMAVGATDQDNNRASFSQYGAGLDLVAPGVNVQSTYPGSTYASLNGTSMATPHVAGAAALVKQKNPSWSNVQIRNRLKNTATSLGSTNLYGSGLVNAEAATR

SEQ ID NO: 64614 - protein, 380 aa, Unidentified
VRSKKLWIVASTALLISVAFSSSIASAAEEAKEKYLIGFNEQEAVSEFVEQVEANDEVAILSEEEEVEIELLHEFETIPVLSVELSPEDVDALELDPAISYIEEDAEVTTMAQSVPWGISRVQAPAAHRRGLWGRGVKVAVLDTGISTHPDLNIRGGASFVPGEPSTQDGNGHGTHVAGTIAALDNSIGVLGVAPSAELYAVKVLGASGSGSVSSIAQGLEWAGANGMHVANLSLGSPSPSATLEQAVNSATSRGVLVVAASGNSGAGSISYPARYANAMAVGATDQNNNRASFSQYGAGLDIVAPGVNVQSTYPQSAYFSLNGTSMATPHVAGAAALVKQKNPSWSNVQIRNRLKNTATSLGSTNLYGSGLVNAEAATR

SEQ ID NO: 64615 - protein, 380 aa, Unidentified
VRSKKLWIVASTALLISVAFSSSIASAAEEAKEKYLIGFNEQEAVSEFVEQVEANDEVAILSEEEEVEIELLHEFETIPVLSVELSPEDVDALELDPAISYIEEDAEVTTMAQSVPWGISRVQAPAAHRRGLTGSGVKVAVLDTGISTHPDLNITGGASFVPGEPSTQDGNGHGTHVAGTIAALDNSIGVLGVAPSAELYAVKVLGASGGGAISSIAQGLEWAGNNGMHVANLSLGSPSPSATLEQAVNSATSRGVLVVAASGNSGAGSISYPARYANAMAVGATDQNNNRASFSQYGAGLDIVAPGVNVQSTYPGSTYASLNGTSMATPHVAGAAVLVKQKNPSWSNVRIRNHLKNTATSLGSTNLYGSGLVRAEAATR

SEQ ID NO: 64616 - protein, 380 aa, Unidentified
VRSKKLWIVASTALLISVAFSSSIASAAEEAKEKYLIGFNEQEAVSEFVEQVEANDEVAILSEEEEVEIELLHEFETIPVLSVELSPEDVDALELDPAISYIEEDAEVTTMAQSVPWGISRVQAPAAHNRGLTGSGVKVAVLDTGISTHPDLNIRGGASFVPGEPSTQDGNGHGTHVAGTIAALNNSIGVLGVAPSAELYAVKVLGASGGGALSSIAQGLEWAGNNGMHVANLSLGSPSPSATLEQAVNSATSRGVLVVAASGNSGEGSISYPARYANAMAVGATDQNNNRADFSQYGAGLDIVAPGVNVQSTYPGSTYASLNGTSMATPHVAGAAVLVKQKNPSWSNVRIRDRLKNTATSLGSTNLYGSGLVNAEAATR

SEQ ID NO: 64617 - protein, 380 aa, Unidentified
VRSKKLWIVASTALLISVAFSSSIASAAEEAKEKYLIGFNEQEAVSEFVEQVEANDEVAILSEEEEVEIELLHEFETIPVLSVELSPEDVDALELDPAISYIEEDAEVTTMAQSVPWGISRVQAPAAHNRRLTGSGVKVAVLDTGISTHPDLNIRGGASFVPGEPSTQDGNGHGTHVAGTIAALNNRIGVLGVAPSAELYAVKVLGASGGGAISSIAQGLEWAGANGMHVANLSLGSPSPSATLEQAVNSATSRGVLVVAASGNSGAGSISYPARYANAMAVGATDQDNNRASFSQYGAGLDIVAPGVNVQSTYPGSTYASLNGTSMATPHVAGAAVLVKQKNPSWSNVRIRNHLKNTATSLGSTNLYGSGLVNAEAATR

SEQ ID NO: 64618 - protein, 380 aa, Unidentified
VRSKKLWIVASTALLISVAFSSSIASAAEEAKEKYLIGFNEQEAVSEFVEQVEANDEVAILSEEEEVEIELLHEFETIPVLSVELSPEDVDALELDPAISYIEEDAEVTTMAQSVPWGISRVQAPAAHRRRLWGRGVKVAVLDTGISTHPDLNIRGGASFVPGEPSTQDGNGHGTHVAGTIAALDNSIGVLGVAPSAELYAVKVLGASGAGSVSSIAQGLEWAGNNGMHVANLSLGSPSPSATLEQAVNSATSRGVLVVAASGNSGAGSISYPARYANAMAVGATDQNNNRASFSQYGAGLDIVAPGVNVQSTYPQSTYFSLNGTSMATPHVAGAAALVKQKNPSWSNVQIRNRLKNTATSLGSTNLYGSGLVNAEAATR

SEQ ID NO: 64619 - protein, 380 aa, Unidentified
VRSKKLWIVASTALLISVAFSSSIASAAEEAKEKYLIGFNEQEAVSEFVEQVEANDEVAILSEEEEVEIELLHEFETIPVLSVELSPEDVDALELDPAISYIEEDAEVTTMAQSVPWGISRVQAPAAHNRGLTGRGVKVAVLDTGISTHPDLNIRGGASFVPGEPSTQDGNGHGTHVAGTIAALNNSIGVLGVAPSAELYAVKVLGASGGGAISSIAQGLEWAGNNGMHVANLSLGSPSPSATLEQAVNSATSRGVIVVAASGNSGEGSISYPARYANAMAVGATDQNNNRASFSQYGAGLDIVAPGVNVQSTYPGSTYASLNGTSMATPHVAGAAVLVKQKNPSWSNVRIRDHLKNTATSLGSTNLYGSGLVNAEAATR

SEQ ID NO: 64620 - protein, 380 aa, Unidentified
VRSKKLWIVASTALLISVAFSSSIASAAEEAKEKYLIGFNEQEAVSEFVEQVEANDEVAILSEEEEVEIELLHEFETIPVLSVELSPEDVDALELDPAISYIEEDAEVTTMAQSVSWGISRVQAPAAHRRGLWGRGVKVAVLDTGISTHPDLNIRGGASFVPGEPSTQDGNGHGTHVAGTIAALDNSIGVLGVAPSAELYAVKVLGASGAGSVSSIAQGLEWAGNNGMHVANLSLGSPSPSATLEQAVNSATSRGVLVVAASGNSGAGSISYPARYANAMAVGATDQNNNRASFSQYGAGLDIVAPGVNVQSTYPGSAYFSLNGTSMATPHVAGAAALVKQKNPSWSNVQIRNRLKNTATSLGSTNLYGSGLVNAEAATR

SEQ ID NO: 64621 - protein, 380 aa, Unidentified
VRSKKLWIVASTALLISVAFSSSIASAAEEAKEKYLIGFNEQEAVSEFVEQVEANDEVAILSEEEEVEIELLHEFETIPVLSVELSPEDVDALELDPAISYIEEDAEVTTMAQSVPWGISRVQAPAAHRRGLWGRGVKVAVLDTGISTHPDLNIRGGASFVPGEPSTQDGNGHGTHVAGTIAALDNSIGVLGVAPSAELYAVKVLGASGAGSVSSIAQGLEWAGNNGMHVANLSLGSPSPSATLEQAVNSATSRGVLVVAASGNSGAGSISYPARYANAMAVGATDQDNNRASFSQYGAGLDLVAPGVNVQSTHPGSTYASLNGTSMATPHVAGAAALVKQKNPSWSNVQIRNRLKNTATSLGSTNLYGSGLVNAEAATR

SEQ ID NO: 64622 - protein, 380 aa, Unidentified
VRSKKLWIVASTALLISVAFSSSIASAAEEAKEKYLIGFNEQEAVSEFVEQVEANDEVAILSEEEEVEIELLHEFETIPVLSVELSPEDVDALELDPAISYIEEDAEVTTMAQSVPWGISRVQAPAAHNRGLTGSGVKVAVLDTGISTHPDLNIRGGASFVPGEPSTQDGNGHGTHVAGTIAALNNSIGVLGVAPRAELYAVKVLGASGGGAISSIARGLEWAGNNGMHVANLSLGSPSPSATLEQAVNSATSRGVLVVAASGNSGAGSISYPARYANAMAVGATDQNNNRASFSQYGAGLDIVAPGVNVQSTYPGPTYASLNGTSMATPHVAGAAVLVKQKNPSWSNVRIRNHLKNTATSLGSTNLYGSGLVNAVAATR

SEQ ID NO: 64623 - protein, 380 aa, Unidentified
VRSKKLWIVASTALLISVAFSSSIASAAEEAKEKYLIGFNEQEAVSEFVEQVEANDEVAILSEEEEVEIELLHEFETIPVLSVELSPEDVDALELDPAISYIEEDAEVTTMAQSVPWGISRVQAPAAHRRGLTGSGVKVAVLDTGISTHPDLDIRGGASFVPGEPSTQDGNGHGTHVAGTIAALDNRIGVLGVAPSAELYAVKVLGASGGGAISSIAQGLEWAGNNGMHVANLSLGSPSPSATLEQAVNSATSRGVLVVAASGNSGAGSISYPARYANAMAVGATDQNNNRASFSQYGAGLDIVAPGVNVQSTYPGSTYASLNGTSMATPHVAGAAVLVKQKNPSWSNVRIRNHLKNTATSLGSTNLYGSGLVNAEAATR

SEQ ID NO: 64624 - protein, 380 aa, Unidentified
VRSKKLWIVASTALLISVAFSSSIASAAEEAKEKYLIGFNEQEAVSEFVEQVEANDEVAILSEEEEVEIELLHEFETIPVLSVELSPEDVDALELDPAISYIEEDAEVTTMAQSVPWGISRVQAPAAHRRGLWGRGVKVAVLDTGISTHPDLNIRGGASFVPGEPSTQDGNGHGTHVAGTIAALDNSIGVLGVAPSAELYAVKVLGASGAGSVSSIAQGLEWAGANGMHVANLSLGSPSPSATLEQAVNSATSRGVLVVAASGNSGAGSISYPARYANAMAVGATDQDNNRASFSQYGAGLDLVAPGVNVQSTYPGSTYFSLNGTSMATPHVAGAAALVKQKNPSWSNVQIRNHLKNTATSLGSTNLYGSGLVNAEAATR

SEQ ID NO: 64625 - protein, 380 aa, Unidentified
VRSKKLWIVASTALLISVAFSSSIASAAEEAKEKYLIGFNEQEAVSEFVEQVEANDEVAILSEEEEVEIELLHEFETIPVLSVELSPEDVDALELDPAISYIEEDAEVTTMAQSVPWGISRVQAPAAHRRRLTGRGVKVAVLDTGISTHPDLNIRGGASFVPGEPSTQDGNGHGTHVAGTIAALDNSIGVLGVAPSAELYAVKVLGASGSGSVSSIAQGLEWAGANGMHVANLSLGSPSPSATLEQAVNSATSRGVLVVAASGNSGAGSISYPARYANAMAVGATDQDNNRASFSQYGAGLDLVAPGVNVQSTYPGSTYFSLNGTSMATPHVAGAAALVKQKNPSWSNVQIRNRLKNTATSLGSTNLYGSGLVNAEAATR

SEQ ID NO: 64626 - protein, 380 aa, Unidentified
VRSKKLWIVASTALLISVAFSSSIASAAEEAKEKYLIGFNEQEAVSEFVEQVEANDEVAILSEEEEVEIELLHEFETIPVLSVELSPEDVDALELDPAISYIEEDAEVTTMAQSVPWGISRVQAPAAHRRGLWGRGVKVAVLDTGISTHPDLNIRGGASFVPGEPSTQDGNGHGTHVAGTIAALDNSIGVLGVAPSAELYAVKVLGASGSGSVSSIAQGLEWAGANGMHVANLSLGSPSPSATLEQAVNSATSRGVLVVAASGNSGAGSISYPARYANAMAVGATDQDNNRASFSQYGAGLDLVAPGVNVQSTYPGSTYFSLNGTSMATPHVAGAAALVKQKNPSWSNVQIRNRLKNTATSLGSTNLYGSGLVNAEAATR

SEQ ID NO: 64627 - protein, 380 aa, Unidentified
VRSKKLWIVASTALLISVAFSSSIASAAEEAKEKYLIGFNEQEAVSEFVEQVEANDEVAILSEEEEVEIELLHEFETIPVLSVELSPEDVDALELDPAISYIEEDAEVTTMAQSVPWGISRVQAPAAHNRGLAGSGVKVAVLDTGISTHPDLNIRGGASFVPGEPSTQDGNGHGTHVAGTIAALNNSIGVLGVAPSAELYAVKVLGASGGGAISSIAQGLEWAGNNGMHVANLSLGSPSPSATLEQAVNSATSRGVIVVAASGNSGAGSISYPARYANAMAVGATDQNNNRADFSQYGAGLDIVAPGVNVQSTYPGSTYASLNGTSMATPHVAGAAVLVKQKNPSWSNVRIRDHLKNTATSLGSTNLYGSGLVNAEAATR

SEQ ID NO: 64628 - protein, 380 aa, Unidentified
VRSKKLWIVASTALLISVAFSSSIASAAEEAKEKYLIGFNEQEAVSEFVEQVEANDEVAILSEEEEVEIELLHEFETIPVLSVELSPEDVDALELDPAISYIEEDAEVTTMAQSVPWGISRVQAPAAHRRRLTGRGVKVAVLDTGISTHPDLNIRGGASFVPGEPSTQDGNGHGTHVAGTIAALDNSIGVLGVAPSAELYAVKVLGASGSGSVSSIAQGLEWAGANGMHVANLSLGSPSPSATLEQAVNSATSRGVLVVAASGNSGAGSISYPARYANAMAVGATDQDNNRASFSQYGAGLDIVAPGVNVQSTYPGSTYFSLNGTSMATPHVAGAAALVKQKNPSWSNVQIRNRLKNTATSLGSTNLDGSGLVNAEAATR

SEQ ID NO: 64629 - protein, 380 aa, Unidentified
VRSKKLWIVASTALLISVAFSSSIASAAEEAKEKYLIGFNEQEAVSEFVEQVEANDEVAILSEEEEVEIELLHEFETIPVLSVELSPEDVDALELDPAISYIEEDAEVTTMAQSVPWGISRVQAPAAHRRGLWGRGVKVAVLDTGISTHPDLNIRGGASFVPGEPSTQDGNGHGTHVAGTIAALDNSIGVLGVAPSAELYAVKVLGASGAGSVSSIAQGLEWAGANGMHVANLSLGSPSPSATLEQAVNSATSRGVLVVAASGNSGAGSISYPARYANAMAVGATDQNNNRASFSQYGAGLDLVAPGVNVQSTYPGSTYFSLNGTSMATPHVAGAAALVKQKNPSWSNVQIRNRLKNTATSLGSTNLYGSGLVNAEAATR

SEQ ID NO: 64630 - protein, 380 aa, Unidentified
VRSKKLWIVASTALLISVAFSSSIASAAEEAKEKYLIGFNEQEAVSEFVEQVEANDEVAILSEEEEVEIELLHEFETIPVLSVELSPEDVDALELDPAISYIEEDAEVTTMAQSVPWGISRVQAPAAHRRRLWGRGVKVAVLDTGISTHPDLNIRGGASFVPGEPSTQDGNGHGTHVAGTIAALDNSIGVLGVAPSAELYAVKVLGASGSGSVSSIAQGLEWAGANGMHVANLSLGSPSPSATLEQAVNSATSRGVLVVAASGNSGAGSISYPARYANAMAVGATDQNNNRASFSQYGAGLDIVAPGVNVQSTYPQSAYASLNGTSMATPHVAGAAALVKQKNPSWSNVQIRNRLKNTATSLGSTNLYGSGLVNAEAATR

SEQ ID NO: 64631 - protein, 380 aa, Unidentified
VRSKKLWIVASTALLISVAFSSSIASAAEEAKEKYLIGFNEQEAVSEFVEQVEANDEVAILSEEEEVEIELLHEFETIPVLSVELSPEDVDALELDPAISYIEEDAEVTTMAQSVPWGISRVQAPAAHRRGLTGSGVKVAVLDTGISTHPDLDITGGASFVPGEPSTQDGNGHGTHVAGTIAALNNSIGVLGVAPSAELYAVKVLGASGGGAISSIAQGLEWAGNNGMHVANLSLGSPSPSATLEQAVNSATSRGVLVVAASGNSGAGSISYPARYANAMAVGATDQNNNRASFSQYGAGLDIVAPGVNVQSTYPGSTYASLNGTSMATPHVAGAAVLVKQKNPSWSNVRIRNHLKNTATSLGSTNLYGSGLVRAEAATR

SEQ ID NO: 64632 - protein, 380 aa, Unidentified
VRSKKLWIVASTALLISVAFSSSIASAAEEAKEKYLIGFNEQEAVSEFVEQVEANDEVAILSEEEEVEIELLHEFETIPVLSVELSPEDVDALELDPAISYIEEDAEVTTMAQSVPWGISRVQAPAAHRRRLTGRGVKVAVLDTGISTHPDLNIRGGASFVPGEPSTQDGNGHGTHVAGTIAALDNSIGVLGVAPSAELYAVKVLGASGSGSVSSIAQGLEWAGANGMHVANLSLGSPSPSATLEQAVNSATSRGVLVVAASGNSGAGSISYPARYANAMAVGATDQDNNRASFSQYGAGLDIVAPGVNVQSTYPQSAYASLNGTSMATPHVAGAAALVKQKNPSWSNVQIRNRLKNTATSLGSTNLYGSGLVNAEAATR

SEQ ID NO: 64633 - protein, 380 aa, Unidentified
VRSKKLWIVASTALLISVAFSSSIASAAEEAKEKYLIGFNEQEAVSEFVEQVEANDEVAILSEEEEVEIELLHEFETIPVLSVELSPEDVDALELDPAISYIEEDAEVTTMAQSVPWGISRVQAPAAHRRRLTGRGVKVAVLDTGISTHPDLNIRGGASFVPGEPSTQDGNGHGTHVAGTIAALDNSIGVLGVAPSAELYAVKVLGASGAGSVSSIAQGLEWAGANGMHVANLSLGSPSPSATLEQAVNSATSRGVLVVAASGNSGAGSISYPARYANAMAVGATDQNNNRASFSQYGAGLDIVAPGVNVQSTYPGSAYFSLNGTSMATPHVAGAAALVKQKNPSWSNVQIRNRLKNTATSLGSTNLYGSGLVNAEAATR

SEQ ID NO: 64634 - protein, 380 aa, Unidentified
VRSKKLWIVASTALLISVAFSSSIASAAEEAKEKYLIGFNEQEAVSEFVEQVEANDEVAILSEEEEVEIELLHEFETIPVLSVELSPEDVDALELDPAISYIEEDAEVTTMAQSVPWGISRVQAPAAHRRGLWGRGVKVAVLDTGISTHPDLNIRGGASFVPGEPSTQDGNGHGTHVAGTIAALDNSIGVLGVAPSAELYAVKVLGASGAGSVSSIAQGLEWAGANGMHVANLSLGSPSPSATLEQAVNSATSRGVLVVAASGNSGAGSISYPARYANAMAVGATDQDNNRASFSQYGAGLDLVAPGVNVQSTYPGSTYASLNGTSMATPHVAGAAALVKQKNPSWSNVQIRNRLKNTATSLGSTNLYGSGLVNAEAATR

SEQ ID NO: 64635 - protein, 380 aa, Unidentified
VRSKKLWIVASTALLISVAFSSSIASAAEEAKEKYLIGFNEQEAVSEFVEQVEANDEVAILSEEEEVEIELLHEFETIPVLSVELSPEDVDALELDPAISYIEEDAEVTTMAQSVPWGISRVQAPAAHRRGLTGRGVKVAVLDTGISTHPDLNIRGGASFVPGEPSTQDGNGHGTHVAGTIAALDNSIGVLGVAPSAELYAVKVLGASGSGSVSSIAQGLEWAGANGMHVANLSLGSPSPSATLEQAVNSATSRGVLVVAASGNSGAGSISYPARYANAMAVGATDQDNNRASFSQYGAGLDIVAPGVNVQSTYPQSAYFSLNGTSMATPHVAGAAALVKQKNPSWSNVQIRNRLKNTATSLGSTNLYGSGLVNAEAATR

SEQ ID NO: 64636 - protein, 380 aa, Unidentified
VRSKKLWIVASTALLISVAFSSSIASAAEEAKEKYLIGFNEQEAVSEFVEQVEANDEVAILSEEEEVEIELLHEFETIPVLSVELSPEDVDALELDPAISYIEEDAEVTTMAQSVPWGISRVQAPAAHRRRLTGSGVKVAVLDTGISTHPDLNITGGASFVPGEPSTQDGNGHGTHVAGTIAALNNSIGVLGVAPSAELYAVKVLGASGGGAISSIAQGLEWAGNNGMHVANLSLGSPSPSATLEQAVNSATSRGVLVVAASGNSGAGSISYPARYANAMAVGATDQNNNRASFSQYGAGLDIVAPGVNVQSTYPGSTYASLNGTSMATPHVAGAAVLVKQKNPSWSNVRIRNRLKNTATSLGSTNLYGSGLVNAEAATR

SEQ ID NO: 64637 - protein, 380 aa, Unidentified
VRSKKLWIVASTALLISVAFSSSIASAAEEAKEKYLIGFNEQEAVSEFVEQVEANDEVAILSEEEEVEIELLHEFETIPVLSVELSPEDVDALELDPAISYIEEDAEVTTMAQSVPWGISRVQAPAAHRRGLWGRGVKVAVLDTGISTHPDLNIRGGASFVPGEPSTQDGNGHGTHVAGTIAALDNSIGVLGVAPSAELYAVKVLGASGSGSVSSIAQGLEWAGANGMHVANLSLGSPSPSATLEQAVNSATSRGVLVVAASGNSGAGSISYPARYANAMAVGATDQDNNRASFSQYGAGLDIVAPGVNVQSTYPQSTYFSLNGTSMATPHVAGAAALVKQKNPSWSNVQIRNRLKNTATSLGSTNLYGSGLVNAEAATR

SEQ ID NO: 64638 - protein, 380 aa, Unidentified
VRSKKLWIVASTALLISVAFSSSIASAAEEAKEKYLIGFNEQEAVSEFVEQVEANDEVAILSEEEEVEIELLHEFETIPVLSVELSPEDVDALELDPAISYIEEDAEVTTMAQSVPWGISRVQAPAAHRRGLWGRGVKVAVLDTGISTHPDLNIRGGASFVPGEPSTQDGNGHGTHVAGTIAALDNSIGVLGVAPSAELYAVKVLGASGAGSVSSIAQGLEWAGNNGMHVANLSLGSPSPSATLEQAVNSATSRGVLVVAASGNSGAGSISYPARYANAMAVGATDQDNNRASFSQYGAGLDLVAPGVNVQSTYPGSTYFSLNGTSMATPHVAGAAALVKQKNPSWSNVQIRNRLKNTATSLGSTNLYGSGLVNAEAATR

SEQ ID NO: 64639 - protein, 380 aa, Unidentified
VRSKKLWIVASTALLISVAFSSSIASAAEEAKEKYLIGFNEQEAVSEFVEQVEANDEVAILSEEEEVEIELLHEFETIPVLSVELSPEDVDALELDPAISYIEEDAEVTTMAQSVPWGISRVQAPAAHNRRLTGSGVKVAVLDTGISTHPDLRIRGGASFVPGEPSTQDGNGHGTHVAGTIAALDNSIGVLGVAPSAELYAVKVLGASGGGAISSIAQGLEWAGNNGMHVANLSLGSPSPSATLEQAVNSATSRGVLVVAASGNSGAGSISYPARYANAMAVGATDQNNNRASFSQYGAGLDIVAPGVNVQSTYPGSTYASLNGTSMATPHVAGAAVLVKQKNPSWSNVRIRNHLKNTATSLGSTNLYGSGLVRAEAATR

SEQ ID NO: 64640 - protein, 380 aa, Unidentified
VRSKKLWIVASTALLISVAFSSSIASAAEEAKEKYLIGFNEQEAVSEFVEQVEANDEVAILSEEEEVEIELLHEFETIPVLSVELSPEDVDALELDPAISYIEEDAEVTTMAQSVPWGISRVQAPAAHNRGLTGRGVKVAVLDTGISTHPDLRIRGGASFVPGEPSTQDGNGHGTHVAGTIAALDNRIGVLGVAPSAELYAVKVLGASGGGAISSIAQGLEWAGNNGMHVANLSLGSPSPSATLEQAVNSATSRGVLVVAASGNSGAGSISYPARYANAMAVGATDQNNNRASFSQYGAGLDIVAPGVNVQSTYPGSTYASLNGTSMATPHVAGAAVLVKQKNPSWSNVRIRNHLKNTATSLGSTNLYGSGLVNAEAATR

SEQ ID NO: 64641 - protein, 380 aa, Unidentified
VRSKKLWIVASTALLISVAFSSSIASAAEEAKEKYLIGFNEQEAVSEFVEQVEANDEVAILSEEEEVEIELLHEFETIPVLSVELSPEDVDALELDPAISYIEEDAEVTTMAQSVPWGISRVQAPAAHRRGLWGRGVKVAVLDTGISTHPDLNIRGGASFVPGEPSTQDGNGHGTHVAGTIAALDNSIGVLGVAPSAELYAVKVLGASGSGSVSSIAQGLEWAGANGMHVANLSLGSPSPSATLEQAVNSATSRGVLVVAASGNSGAGSISYPARYANAMAVGATDQDNNRASFSQYGAGLDLVAPGVNVQSTYPQSTYASLNGTSMATPHVAGAAALVKQKNPSWSNVQIRNRLKNTATSLGSTNLYGSGLVNAEAATR

SEQ ID NO: 64642 - protein, 380 aa, Unidentified
VRSKKLWIVASTALLISVAFSSSIASAAEEAKEKYLIGFNEQEAVSEFVEQVEANDEVAILSEEEEVEIELLHEFETIPVLSVELSPEDVDALELDPAISYIEEDAEVTTMAQSVPWGISRVQAPAAHRRRLTGRGVKVAVLDTGISTHPDLNIRGGASFVPGEPSTQDGNGHGTHVAGTIAALDNSIGVLGVAPSAELYAVKVLGASGAGSVSSIAQGLEWAGNNGMHVANLSLGSPSPSATLEQAVNSATSRGVLVVAASGNSGAGSISYPARYANAMAVGATDQDNNRASFSQYGAGLDLVAPGVNVQSTYPGSTYFSLNGTSMATPHVAGAAALVKQKNPSWSNVQIRNRLKNTATSLGSTNLYGSGLVNAEAATR

SEQ ID NO: 64643 - protein, 380 aa, Unidentified
VRSKKLWIVASTALLISVAFSSSIASAAEEAKEKYLIGFNEQEAVSEFVEQVEANDEVAILSEEEEVEIELLHEFETIPVLSVELSPEDVDALELDPAISYIEEDAEVTTMAQSVPWGISRVQAPAAHRRGLTGRGVKVAVLDTGISTHPDLNIRGGASFVPGEPSTQDGNGHGTHVAGTIAALDNSIGVLGVAPSAELYAVKVLGASGAGSVSSIAQGLEWAGANGMHVANLSLGSPSPSATLEQAVNSATSRGVLVVAASGNSGAGSISYPARYANAMAVGATDQNNNRASFSQYGAGLDLVAPGVNVQSTYPGSAYFSLNGTSMATPHVAGAAALVKQKNPSWSNVQIRNRLKNTATSLGSTNLYGSGLVNAEAATR

SEQ ID NO: 64644 - protein, 380 aa, Unidentified
VRSKKLWIVASTALLISVAFSSSIASAAEEAKEKYLIGFNEQEAVSEFVEQVEANDEVAILSEEEEVEIELLHEFETIPVLSVELSPEDVDALELDPAISYIEEDAEVTTMAQSVPWGISRVQAPAAHNRGLTGRGVKVAVLDTGISTHPDLNIRGGASFVPGEPSTQDGNGHGTHVAGTIAALNNSIGVLGVAPSAELYAVKVLGASGGGAISSIAQGLEWAGNNGMHVANLSLGSESPSATLEQAVNSATSRGVLVVAASGNSGAESISYPARYANAMAVGATDQNNNRASFSQYGAGLDIVAPGVNVQSTYPGSTYASLNGTSMATPHVAGAAVLVKQKNPSWSNVRIRDHLKNTATSLGSTNLYGSGLVNAEAATR

SEQ ID NO: 64645 - protein, 380 aa, Unidentified
VRSKKLWIVASTALLISVAFSSSIASAAEEAKEKYLIGFNEQEAVSEFVEQVEANDEVAILSEEEEVEIELLHEFETIPVLSVELSPEDVDALELDPAISYIEEDAEVTTMAQSVPWGISRVQAPAAHRRRLWGRGVKVAVLDTGISTHPDLNIRGGASFVPGEPSTQDGNGHGTHVAGTIAALDNSIGVLGVAPSAELYAVKVLGASGAGSVSSIAQGLEWAGANGMHVANLSLGSPSPSATLEQAVNSATSRGVLVVAASGNSGAGSISYPARYANAMAVGATDQDNNRASFSQYGAGLDIVAPGVNVQSTYPGSTYASLNGTSMATPHVAGAAALVKQKNPSWSNVQIRNRLKNTATSLGSTNLYGSGLVNAEAATR

SEQ ID NO: 64646 - protein, 380 aa, Unidentified
VRSKKLWIVASTALLISVAFSSSIASAAEEAKEKYLIGFNEQEAVSEFVEQVEANDEVAILSEEEEVEIELLHEFETIPVLSVELSPEDVDALELDPAISYIEEDAEVTTMAQSVPWGISRVQAPAAHNRRLWGSGVKVAVLDTGISTHPDLNIRGGASFVPGEPSTQDGNGHGTHVAGTIAALNNSIGVLGVAPSAELYAVKVLGASGGGAISSIAQGLEWAGNNGMHVANLSLGSPSPSATLEQAVNSATSRGVLVVAASGNSGAGSISYPARYANAMAVGATDQDNNRASFSQYGAGLDIVAPGVNVQSTYPGSTYFSLNGTSMATPHVAGAAVLVKQKNPSWSNVRIRNHLKNTATSLGSTNLYGSGLVNAEAATR

SEQ ID NO: 64647 - protein, 380 aa, Unidentified
VRSKKLWIVASTALLISVAFSSSIASAAEEAKEKYLIGFNEQEAVSEFVEQVEANDEVAILSEEEEVEIELLHEFETIPVLSVELSPEDVDALELDPAISYIEEDAEVTTMAQSVPWGISRVQAPAAHNRRLTGSGVKVAVLDTGISTHPDLNIRGGASFVPGEPSTQDGNGHGTHVAGTIAALNNSIGVLGVAPSAELYAVKVLGASGGGAISSIAQGLEWAGANGMHVANLSLGSPSPSATLEQAVNSATSRGVLVVAASGNSGAGSISYPARYANAMAVGATDQDNNRASFSQYGAGLDIVAPGVNVQSTYPQSTYASLNGTSMATPHVAGAAVLVKQKNPSWSNVRIRNHLKNTATSLGSTNLYGSGLVNAEAATR

SEQ ID NO: 64648 - protein, 380 aa, Unidentified
VRSKKLWIVASTALLISVAFSSSIASAAEEAKEKYLIGFNEQEAVSEFVEQVEANDEVAILSEEEEVEIELLHEFETIPVLSVELSPEDVDALELDPAISYIEEDAEVTTMAQSVPWGISRVQAPAAHRRRLTGRGVKVAVLDTGISTHPDLNIRGGASFVPGEPSTQDGNGHGTHVAGTIAALDNSIGVLGVAPSAELYAVKVLGASGAGSVSSIAQGLEWAGNNGMHVANLSLGSPSPSATLEQAVNSATSRGVLVVAASGNSGAGSISYPARYANAMAVGATDQDNNRASFSQYGAGLDLVAPGVNVQSTYPGSAYASLNGTSMATPHVAGAAALVKQKNPSWSNVQIRNRLKNTATSLGSTNLYGSGLVNAEAATR

SEQ ID NO: 64649 - protein, 380 aa, Unidentified
VRSKKLWIVASTALLISVAFSSSIASAAEEAKEKYLIGFNEQEAVSEFVEQVEANDEVAILSEEEEVEIELLHEFETIPVLSVELSPEDVDALELDPAISYIEEDAEVTTMAQSVPWGISRVQAPAAHNRRLTGSGVKVAVLDTGISTHPDLDITGGASFVPGEPSTQDGNGHGTHVAGTIAALNNRIGVLGVAPSAELYAVKVLGASGGGAISSIAQGLEWAGNNGMHVANLSLGSPSPSATLEQAVNSATSRGVLVVAASGNSGAGSISYPARYANAMAVGATDQNNNRASFSQYGAGLDIVAPGVNVQSTYPGSTYASLNGTSMATPHVAGAAVLVKQKNPSWSNVRIRNHLKNTATSLGSTNLYGSGLVNAEAATR

SEQ ID NO: 64650 - protein, 380 aa, Unidentified
VRSKKLWIVASTALLISVAFSSSIASAAEEAKEKYLIGFNEQEAVSEFVEQVEANDEVAILSEEEEVEIELLHEFETIPVLSVELSPEDVDALELDPAISYIEEDAEVTTMAQSVPWGISRVQAPAAHRRGLTGRGVKVAVLDTGISTHPDLNIRGGASFVPGEPSTQDGNGHGTHVAGTIAALDNSIGVLGVAPSAELYAVKVLGASGAGSVSSIAQGLEWAGANGMHVANLSLGSPSPSATLEQAVNSATSRGVLVVAASGNSGAGSISYPARYANAMAVGATDQDNNRASFSQYGAGLDLVAPGVNVQSTYPGSTYFSLNGTSMATPHVAGAAALVKQKNPSWSNVQIRNRLKNTATSLGSTNLYGSGLVNAEAATR

SEQ ID NO: 64651 - protein, 380 aa, Unidentified
VRSKKLWIVASTALLISVAFSSSIASAAEEAKEKYLIGFNEQEAVSEFVEQVEANDEVAILSEEEEVEIELLHEFETIPVLSVELSPEDVDALELDPAISYIEEDAEVTTMAQSVPWGISRVQAPAAHRRGLWGRGVKVAVLDTGISTHPDLNIRGGASFVPGEPSTQDGNGHGTHVAGTIAALDNSIGVLGVAPSAELYAVKVLGASGAGSVSSIAQGLEWAGNNGMHVANLSLGSPSPSATLEQAVNSATSRGVLVVAASGNSGAGSISYPARYANAMAVGATDQDNNRASFSQYGAGLDIVAPGVNVQSTYPGSAYFSLNGTSMATPHVAGAAALVKQKNPSWSNVQIRNRLKNTATSLGSTNLYGSGLVNAEAATR

SEQ ID NO: 64652 - protein, 380 aa, Unidentified
VRSKKLWIVASTALLISVAFSSSIASAAEEAKEKYLIGFNEQEAVSEFVEQVEANDEVAILSEEEEVEIELLHEFETIPVLSVELSPEDVDALELDPAISYIEEDAEVTTMAQSVPWGISRVQAPAAHNRRLTGSGVKVAVLDTGISTHPDLNIRGGASFVPGEPSTQDGNGHGTHVAGTIAALNNRIGVLGVAPSAELYAVKVLGASGAGAISSIAQGLEWAGNNGMHVANLSLGSPSPSATLEQAVNSATSRGVLVVAASGNSGAGSISYPARYANAMAVGATDQNNNRASFSQYGAGLDIVAPGVNVQSTYPQSAYASLNGTSMATPHVAGAAVLVKQKNPSWSNVRIRNHLKNTATSLGSTNLYGSGLVNAEAATR

SEQ ID NO: 64653 - protein, 380 aa, Unidentified
VRSKKLWIVASTALLISVAFSSSIASAAEEAKEKYLIGFNEQEAVSEFVEQVEANDEVAILSEEEEVEIELLHEFETIPVLSVELSPEDVDALELDPAISYIEEDAEVTTMAQSVPWGISRVQAPAAHRRRLTGRGVKVAVLDTGISTHPDLNIRGGASFVPGEPSTQDGNGHGTHVAGTIAALDNSIGVLGVAPSAELYAVKVLGASGAGSVSSIAQGLEWAGNNGMHVANLSLGSPSPSATLEQAVNSATSRGVLVVAASGNSGAGSISYPARYANAMAVGATDQDNNRASFSQYGAGLDIVAPGVNVQSTYPGSAYFSLNGTSMATPHVAGAAALVKQKNPSWSNVQIRNRLKNTATSLGSTNLYGSGLVNAEAATR

SEQ ID NO: 64654 - protein, 380 aa, Unidentified
VRSKKLWIVASTALLISVAFSSSIASAAEEAKEKYLIGFNEQEAVSEFVEQVEANDEVAILSEEEEVEIELLHEFETIPVLSVELSPEDVDALELDPAISYIEEDAEVTTMAQSVPWGISRVQAPAAHRRGLWGRGVKVAVLDTGISTHPDLNIRGGASFVPGEPSTQDGNGHGTHVAGTIAALDNSIGVLGVAPSAELYAVKVLGASGAGSVSSIAQGLEWAGNNGMHVANLSLGSPSPSATLEQAVNSATSRGVLVVAASGNSGAGSISYPARYANAMAVGATDQNNNRASFSQYGAGLDLVAPGVNVQSTYPQSAYASLNGTSMATPHVAGAAALVKQKNPSWSNVQIRNRLKNTATSLGSTNLYGSGLVNAEAATR

SEQ ID NO: 64655 - protein, 380 aa, Unidentified
VRSKKLWIVASTALLISVAFSSSIASAAEEAKEKYLIGFNEQEAVSEFVEQVEANDEVAILSEEEEVEIELLHEFETIPVLSVELSPEDVDALELDPAISYIEEDAEVTTMAQSVPWGISRVQAPAAHRRRLWGRGVKVAVLDTGISTHPDLNIRGGASFVPGEPSTQDGNGHGTHVAGTIAALDNSIGVLGVAPSAELYAVKVLGASGSGSVSSIAQGLEWAGNNGMHVANLSLGSPSPSATLEQAVNSATSRGVLVVAASGNSGAGSISYPARYANAMAVGATDQDNNRASFSQYGAGLDLVAPGVNVQSTYPGSTYFSLNGTSMATPHVAGAAALVKQKNPSWSNVQIRNRLKNTATSLGSTNLYGSGLVNAEAATR

SEQ ID NO: 64656 - protein, 380 aa, Unidentified
VRSKKLWIVASTALLISVAFSSSIASAAEEAKEKYLIGFNEQEAVSEFVEQVEANDEVAILSEEEEVEIELLHEFETIPVLSVELSPEDVDALELDPAISYIEEDAEVTTMAQSVPWGISRVQAPAAHRRGLWGRGVKVAVLDTGISTHPDLNIRGGASFVPGEPSTQDGNGHGTHVAGTIAALDNSIGVLGVAPSAELYAVKVLGASGAGSVSSIAQGLEWAGANGMHVANLSLGSPSPSATLEQAVNSATSRGVLVVAASGNSGAGSISYPARYANAMAVGATDQDNNRASFSQYGAGLDIVAPGVNVQSTYPQSTYASLNGTSMATPHVAGAAALVKQKNPSWSNVQIRNRLKNTATSLGSTNLYGSGLVNAEAATR

SEQ ID NO: 64657 - protein, 380 aa, Unidentified
VRSKKLWIVASTALLISVAFSSSIASAAEEAKEKYLIGFNEQEAVSEFVEQVEANDEVAILSEEEEVEIELLHEFETIPVLSVELSPEDVDALELDPAISYIEEDAEVTTMAQSVPWGISRVQAPAAHNRRLTGSGVKVAVLDTGISTHPDLDIRGGASFVPGEPSTQDGNGHGTHVAGTIAALNNRIGVLGVAPSAELYAVKVLGASGGGAISSIAQGLEWAGNNGMHVANLSLGSPSPSATLEQAVNSATSRGVLVVAASGNSGAGSISYPARYANAMAVGATDQNNNRASFSQYGAGLDIVAPGVNVQSTYPGSTYASLNGTSMATPHVAGAAVLVKQKNPSWSNVRIRNRLKNTATSLGSTNLYGSGLVNAEAATR

SEQ ID NO: 64658 - protein, 380 aa, Unidentified
VRSKKLWIVASTALLISVAFSSSIASAAEEAKEKYLIGFNEQEAVSEFVEQVEANDEVAILSEEEEVEIELLHEFETIPVLSVELSPEDVDALELDPAISYIEEDAEVTTMAQSVPWGISRVQAPAAHRRGLTGRGVKVAVLDTGISTHPDLNIRGGASFVPGEPSTQDGNGHGTHVAGTIAALDNSIGVLGVAPSAELYAVKVLGASGSGSVSSIAQGLEWAGANGMHVANLSLGSPSPSATLEQAVNSATSRGVLVVAASGNSGAGSISYPARYANAMAVGATDQDNNRASFSQYGAGLDLVAPGVNVQSTYPGSAYFSLNGTSMATPHVAGAAALVKQKNPSWSNVQIRNRLKNTATSLGSTNLYGSGLVNAEAATR

SEQ ID NO: 64659 - protein, 380 aa, Unidentified
VRSKKLWIVASTALLISVAFSSSIASAAEEAKEKYLIGFNEQEAVSEFVEQVEANDEVAILSEEEEVEIELLHEFETIPVLSVELSPEDVDALELDPAISYIEEDAEVTTMAQSVPWGISRVQAPAAHRRGLWGRGVKVAVLDTGISTHPDLNIRGGASFVPGEPSTQDGNGHGTHVAGTIAALDNSIGVLGVAPSAELYAVKVLGASGSGSVSSIAQGLEWAGNNGMHVANLSLGSPSPSATLEQAVNSATSRGVLVVAASGNSGAGSISYPARYANAMAVGATDQDNNRASFSQYGAGLDLVAPGVNVQSTYPQSTYFSLNGTSMATPHVAGAAALVKQKNPSWSNVQIRNRLKNTATSLGSTNLYGSGLVNAEAATR

SEQ ID NO: 64660 - protein, 380 aa, Unidentified
VRSKKLWIVASTALLISVAFSSSIASAAEEAKEKYLIGFNEQEAVSEFVEQVEANDEVAILSEEEEVEIELLHEFETIPVLSVELSPEDVDALELDPAISYIEEDAEVTTMAQSVPWGISRVQAPAAHRRGLWGRGVKVAVLDTGISTHPDLNIRGGASFVPGEPSTQDGNGHGTHVAGTIAALDNSIGVLGVAPSAELYAVKVLGASGSGSVSSIAQGLEWAGANGMHVANLSLGSPSPSATLEQAVNSATSRGVLVVAASGNSGAGSISYPARYANAMAVGATDQDNNRASFSQYGAGLDIVAPGVNVQSTYPQSAYASLNGTSMATPHVAGAAALVKQKNPSWSNVRIRNHLKNTATSLGSTNLYGSGLVNAEAATR

SEQ ID NO: 64661 - protein, 380 aa, Unidentified
VRSKKLWIVASTALLISVAFSSSIASAAEEAKEKYLIGFNEQEAVSEFVEQVEANDEVAILSEEEEVEIELLHEFETIPVLSVELSPEDVDALELDPAISYIEEDAEVTTMAQSVPWGISRVQAPAAHNRGLTGRGVKVAVLDTGISTHPDLRITGGASFVPGEPSTQDGNGHGTHVAGTIAALDNSIGVLGVAPSAELYAVKVLGASGGGAISSIAQGLEWAGNNGMHVANLSLGSPSPSATLEQAVNSATSRGVLVVAASGNSGAGSISYPARYANAMAVGATDQNNNRASFSQYGAGLDIVAPGVNVQSTYPGSTYASLNGTSMATPHVAGAAVLVKQKNPSWSNVRIRNHLKNTATSLGSTNLYGSGLVNAEAATR

SEQ ID NO: 64662 - protein, 380 aa, Unidentified
VRSKKLWIVASTALLISVAFSSSIASAAEEAKEKYLIGFNEQEAVSEFVEQVEANDEVAILSEEEEVEIELLHEFETIPVLSVELSPEDVDALELDPAISYIEEDAEVTTMAQSVPWGISRVQAPAAHNRRLWGSGVKVAVLDTGISTHPDLNIRGGASFVPGEPSTQDGNGHGTHVAGTIAALNNRIGVLGVAPSAELYAVKVLGASGGGAISSIAQGLEWAGANGMHVANLSLGSPSPSATLEQAVNSATSRGVLVVAASGNSGAGSISYPARYANAMAVGATDQNNNRASFSQYGAGLDIVAPGVNVQSTYPGSTYASLNGTSMATPHVAGAAVLVKQKNPSWSNVRIRNHLKNTATSLGSTNLYGSGLVNAEAATR

SEQ ID NO: 64663 - protein, 380 aa, Unidentified
VRSKKLWIVASTALLISVAFSSSIASAAEEAKEKYLIGFNEQEAVSEFVEQVEANDEVAILSEEEEVEIELLHEFETIPVLSVELSPEDVDALELDPAISYIEEDAEVTTMAQSVPWGISRVQAPAAHNRGLAGSGVKVAVLDTGISTHPDLNIRGGASFVPGEPSTQDGNGHGTHVAGTIAALNNSIGVLGVAPSAELYAVKVLGASGGGAISSIAQGLEWAGNNGMHVANLSLGSPSPSATLEQAVNSATSRGVLVVAASGNSGADSISYPARYANAMAVGATDQNNNRASFSQYGAGLDIVAPGVNVQSTYPGSTYASLNGTSMATPHVAGAAVLVKQKNPSWSNVRIRDRLKNTATSLGSTNLYGSGLVNAEAATR

SEQ ID NO: 64664 - protein, 380 aa, Unidentified
VRSKKLWIVASTALLISVAFSSSIASAAEEAKEKYLIGFNEQEAVSEFVEQVEANDEVAILSEEEEVEIELLHEFETIPVLSVELSPEDVDALELDPAISYIEEDAEVTTMAQSVPWGISRVQAPAAHNRRLTGSGVKVAVLDTGISTHPDLNITGGASFVPGEPSTQDGNGHGTHVAGTIAALDNSIGVLGVAPSAELYAVKVLGASGGGAISSIAQGLEWAGNNGMHVANLSLGSPSPSATLEQAVNSATSRGVLVVAASGNSGAGSISYPARYANAMAVGATDQNNNRASFSQYGAGLDIVAPGVNVQSTYPGSTYASLNGTSMATPHVAGAAVLVKQKNPSWSNVRIRNRLKNTATSLGSTNLYGSGLVNAEAATR

SEQ ID NO: 64665 - protein, 380 aa, Unidentified
VRSKKLWIVASTALLISVAFSSSIASAAEEAKEKYLIGFNEQEAVSEFVEQVEANDEVAILSEEEEVEIELLHEFETIPVLSVELSPEDVDALELDPAISYIEEDAEVTTMAQSVPWGISRVQAPAAHRRGLWGRGVKVAVLDTGISTHPDLNIRGGASFVPGEPSTQDGNGHGTHVAGTIAALDNSIGVLGVAPSAELYAVKVLGASGAGSVSSIAQGLEWAGNNGMHVANLSLGSPSPSATLEQAVNSATSRGVLVVAASGNSGAGSISYPARYANAMAVGATDQDNNRASFSQYGAGLDIVAPGVNVQSTYPQSAYASLNGTSMATPHVAGAAALVKQKNPSWSNVQIRNRLKNTATSLGSTNLYGSGLVNAEAATR

SEQ ID NO: 64666 - protein, 380 aa, Unidentified
VRSKKLWIVASTALLISVAFSSSIASAAEEAKEKYLIGFNEQEAVSEFVEQVEANDEVAILSEEEEVEIELLHEFETIPVLSVELSPEDVDALELDPAISYIEEDAEVTTMAQSVPWGISRVQAPAAHRRRLTGSGVKVAVLDTGISTHPDLDIRGGASFVPGEPSTQDGNGHGTHVAGTIAALNNSIGVLGVAPSAELYAVKVLGASGGGAISSIAQGLEWAGNNGMHVANLSLGSPSPSATLEQAVNSATSRGVLVVAASGNSGAGSISYPARYANAMAVGATDQNNNRASFSQYGAGLDIVAPGVNVQSTYPGSTYASLNGTSMATPHVAGAAVLVKQKNPSWSNVRIRNRLKNTATSLGSTNLYGSGLVNAEAATR

SEQ ID NO: 64667 - protein, 379 aa, Unidentified
VRSKKLWIVASTALLISVAFSSSIASAAEEAKEKYLIGFNEQEAVSEFVEQVEANDEVAILSEEEEVEIELLHEFETIPVLSVELSPEDVDALELDPAISYIEEDAEVTTMAQSVPWGISRVQAPAAHRRRLTGRGVKVAVLDTGISTHPDLNIRGGASFVPGEPSTQDGNGHGTHVAGTIAALDNSIGVLGVAPSAELYAVKVLGASGAGSVSSIAQGLEWAGANGMHVANLSLGSPSPSATLEQAVNSATSRGVLVVAASGNSGAGSISYPARYANAMAVGATDQDNNRASFSQYGAGLDIVAPGVNVQSTYPQSTYASLNGTSMATPHVAGAAALVKQKNPSWSNVQIRNRLKNTATSLGSTNLYGSGLVNAEAAT

SEQ ID NO: 64668 - protein, 274 aa, Bacillus clausii
AQTVPYGIPLIKADKVQAQGFKGANVKVAVLDTGIQASHPDLNVVGGASFVAGEAYNTDGNGHGTHVSGTVAALDNNIGVLGVAPSVSLYAVKVLNSFGLGTISGIVSGIEWATTNGMDVINMSLGSPSGSTAMKQAVDNAYARGVVVVAAAGNEGSSGNTNTIRYPAKYDSVIAVGAVDSNSQRASFSSVGPELEVMAPGVGVYSTYPTNTYKTLSGTSMASPHVAGAAALILSKHPNLSASQVRNRLSSTATYLGPSFYYGKGLINVEAAAQ

SEQ ID NO: 64669 - protein, 226 aa, Unidentified
AQSVPWGISRVQAPAAHNRGLTGSGVKVAVLDTGISTHPDLNIRGGASFVPGEPSTQDGNGHGTHVAGTIAALNNSIGVLGVAPSAELYAVKVLGASGSGSVSSIAQGLEWAGNNGMHVANLSLGSPSPSATLEQAVNSATSRGVLVVAASGNSGAGSISYPARYANAMAVGATDQNNNRASFSQYGAGLDIVAPGVNVQSTYPGCLASDTLVRTSEGDKPVAEVA

SEQ ID NO: 64670 - protein, 224 aa, Unidentified
AQSVPWGISRVQAPAAHNRGLTGSGVKVAVLDTGISTHPDLNIRGGASFVPGEPSTQDGNGHGTHVAGTIAALNNSIGVLGVAPSAELYAVKVLGASGSGSVSSIAQGLEWAGNNGMHVANLSLGSPSPSATLEQAVNSATSRGVLVVAASGNSGAGSISYPARYANAMAVGATDQNNNRASFSQYGAGLDIVAPGVNVQSTYPGCMHYDTLVTLADGTQEKIG

SEQ ID NO: 64671 - protein, 269 aa, Unidentified
AQSVPWGISRVQAPAAHNRGLAGRGVKVAVLDTGISTHPDLNIRGGASFVPGEPSTQDGNGHGTHVAGTIAALDNSIGVLGVAPSAELYAVKVLGASGGGAISSIAQGLEWAGNNGMHVANLSLGSESPSATLEQAVNSATSRGVLVVAASGNSGADSISYPARYANAMAVGATDQNNNRADFSQYGAGLDIVAPGVNVQSTYPGSTYASLNGTSMATPHVAGAAVLVKQKYPSWSNVRIRDHLKNTATSLGSTNLYGSGLVNVFVATR

SEQ ID NO: 64672 - protein, 269 aa, Unidentified
AQSVPWGISRVQAPAAHNRGLAGGGVKVAVLDTGISTHPDLNIRGGASFVPGEPSTQDGNGHGTHVAGTIAALDNNIGVLGVAPSAELYAVKVLSASGQGAISSIAQGLEWAGNNGMHVANLSLGAPSPSATLEQAVNSATSRGVLVVAASGNSGADSISYPARYANAMAVGATDQNNNRADFSQYGAGLDIVAPGVNVQSTYPGSTYASQNGTSMATPHVAGAAVLVKQKNPSWSNVRIRDHLKNTATSLGSTNLYGSGLVNAFAATR

SEQ ID NO: 64673 - protein, 269 aa, Unidentified
AQSVPWGIERVQAPAAHNRGLTGSGVKVAVLDTGISTHPDLRIRGGHSFVPGEPSTQDGNGHGTHVAGTIAALDNSIGVLGVAPSAELYAVKVLGASGSGSVSSIAQGLEWAGNHGMHVANLSLGSPSPSATLEQAVNSATSRGVLVVAASGNSGAGSISYPARYANAMAVGATDQNNNRASFSQYGPGLDIVAPGVDILSTWPGGTYAVLNGTSMATPHVAGAAALVKQKHPSWSNVQIRNHLKNTATDLGSANEYGSGLVNAEAATR

SEQ ID NO: 64674 - protein, 269 aa, Unidentified
AQSVPWGISRVQAPAAHNRGLAGGGVKVAVLDTGISTHPDLNIRGGASFVPGEPSTQDGNGHGTHVAGTIAALDNNIGVLGVAPSAELYAVKVLAASGQGAISSIAQGLEWAGNNGMHVANLSLGAPSPSATLEQAVNSATSRGVLVVAASGNSGADSISYPARYANAMAVGATDQNNNRADFSQYGAGLDIVAPGVNVQSTYPGSTYASQNGTSMATPHVAGAAVLVKQKNPSWSNVRIRDHLKNTATSLGSTNLYGSGLVNAFAATR

SEQ ID NO: 64675 - protein, 269 aa, Bacillus clausii
AQTVPWGIERVQAPAAHNRGLTGSGVKVAVLDTGISTHPDLRIRGGASFVPGEPSTQDGNGHGTHVAGTIAALDNSIGVLGVAPSAELYAVKVLGAFGLGTISSIAQGLEWAGNNGMHVANLSLGSPSPSATLEQAVNSATSRGVLVVAASGNSGAGSISYPARYANAMAVGATDQNNNRASFSQYGPGLDIVAPGVNILSTWPGSTYKSLNGTSMATPHVAGAAALVKQKNPSWSNVQIRNHLKNTATSLGDTWEYGSGLVNAEAATR

SEQ ID NO: 64676 - protein, 269 aa, Unidentified
AQSVPWGISRVQAPAAHNRGLAGGGVKVAVLDTGISTHPDLNIRGGASFVPGEPSTQDGNGHGTHVAGTIAALDNNIGVLGVAPSAELYAVKVLAASGQGAISSIAGGLEWAGNNGMHVANLSLGSPSPSATLEQAVNSATSRGVLVVAASGNSGADSISYPARYANAMAVGATDQNNNRADFSQYGAGLDIVAPGVNVQSTYPGSTYASQNGTSMATPHVAGAAVLVKQKNPSWSNVRIRDHLKNTATSLGSTNLYGSGLVNAFAATR

SEQ ID NO: 64677 - protein, 269 aa, Unidentified
AQSVPWGISRVQAPAAHNRGLAGGGVKVAVLDTGISTHPDLNIRGGASFVPGEPSTQDGNGHGTHVAGTIAALDNSIGVLGVAPSAELYAVKVLSASGQGAISSIANGLEWAGNNGMHVANLSLGAPSPSATLEQAVNSATSRGVLVVAASGNSGADSISYPARYANAMAVGATDQNNNRADFSQYGAGLDIVAPGVNVQSTYPGSTYASQNGTSMATPHVAGAAVLVKQKNPSWSNVRIRDHLKNTATSLGSTNLYGSGLVNAFAATR

SEQ ID NO: 64678 - protein, 269 aa, Unidentified
AQSVPWGISRVQAPAAHNRGLAGGGVKVAVLDTGISTHPDLNIRGGASFVPGEPSTQDGNGHGTHVAGTIAALNNNIGVLGVAPSAELYAVKVLSASGNGAISSIANGLEWAGNNGMHVANLSLGAPSPSATLEQAVNSATSRGVLVVAASGNSGADSISYPARYANAMAVGATDQNNNRADFSQYGAGLDIVAPGVNVQSTYPGSTYASQNGTSMATPHVAGAAVLVKQKNPSWSNVRIRDHLKNTATSLGSTNLYGSGLVNAFAATR

SEQ ID NO: 64679 - protein, 269 aa, Unidentified
AQSVPWGISRVQAPAAHNRGLAGRSVKVAVLDTGISTHPDLNIRGGASFVPGEPSTKDGNGHGTHVAGTIAALDNSIGVLGVAPSAELYAVKVLGASGGGAISSIAQGLEWAGNNGMHVANLSLGSESPSATLEQAVNSATSRGVLVVAASGNSGEESISYPARYANAMAVGATDQNNNRADFSQYGAGLDIVAPGVNVQSTYPGSTYASLNGTSMATPHVAGAAVLVKQKNPSWSNVRIRDHLKNTATSLGSTNLYGSGLVNAFAATR

SEQ ID NO: 64680 - protein, 269 aa, Bacillus clausii
AQTVPWGIERVQAPAAHNRGLTGSGVKVAVLDTGISTHPDLRIRGGASFVPGEPSTQDGNGHGTHVAGTIAALDNSIGVLGVAPSAELYAVKVLGAFGLGTISSIAQGLEWAGNNGMHVANLSLISPSPSATLEQAVNSATSRGVLVVAASGNSGAGSISYPARYANAMAVGATDQNNNRASFSQYGAGLDIVAPGVNILSTWPGSTYKSLNGTSMATPHVAGAAALVKQKNPSWSNVQIRNHLKNTATSLGDTWEYGSGLVNAEAATR

SEQ ID NO: 64681 - protein, 269 aa, Bacillus clausii
AQSVPWGIERVQAPAAHNRGLTGSGVKVAVLDTGISTHPDLRIRGGASFVPGEPSTQDGNGHGTHVAGTIAALDNSIGVLGVAPSAELYAVKVLGAFGLGTISSIAQGLEWAGNNGMHVANLSLISPSPSATLEQAVNSATSRGVLVVAASGNSGAGSISYPARYANAMAVGATDQNNNRASFSQYGPGLDIVAPGVNILSTWPGSTYKSLNGTSMATPHVAGAAALVKQKNPSWSNVQIRNHLKNTATSLGDTWEYGSGLVNAEAATR

SEQ ID NO: 64682 - protein, 269 aa, Unidentified
AQSVPWGISRVQAPAAHNRGLAGGGVKVAVLDTGISTHPDLNIRGGASFVPGEPSTQDGNGHGTHVAGTIAALNNNIGVLGVAPSAELYAVKVLAASGNGAISSIAGGLEWAGNNGMHVANLSLGAPSPSATLEQAVNSATSRGVLVVAASGNSGADSISYPARYANAMAVGATDQNNNRADFSQYGAGLDIVAPGVNVQSTYPGSTYASQNGTSMATPHVAGAAVLVKQKNPSWSNVRIRDHLKNTATSLGSTNLYGSGLVNAFAATR

SEQ ID NO: 64683 - protein, 269 aa, Unidentified
AQSVPWGISRVQAPAAHNRGLAGGGVKVAVLDTGISTHPDLNIRGGASFVPGEPSTQDGNGHGTHVAGTIAALDNNIGVLGVAPSAELYAVKVLAASGGGAISSIAQGLEWAGNNGMHVANLSLGSESPSATLEQAVNSATSRGVLVVAASGNSGADSISYPARYANAMAVGATDQNNNRADFSQYGAGLDIVAPGVNVQSTYPGSTYASQNGTSMATPHVAGAAVLVKQKNPSWSNVRIRDHLKNTATSLGSTNLYGSGLVNAFAATR

SEQ ID NO: 64684 - protein, 269 aa, Unidentified
AQSVPWGISRVQAPAAHNRGLAGRGVKVAVLDTGISTHPDLNIRGGASFVPGEPSTQDGNGHGTHVAGTIAALDNSTGVLGVAPSAELYAVKVLGASGGGAISSIAQGLEWAGNNGMHVANLSLGSPSPSATLEQAVNSATSRGVLVVAASGNSGADSISYPARYANAMAVGATDQNNNRADFSQYGAGLDIVAPGVNVQSTYPGSTYASLNGTSMATPHVAGAAVLVKQKYPSWSNVRIRDHLKNTATSLGSTNLYGSGLVNVFVATR

SEQ ID NO: 64685 - protein, 269 aa, Unidentified
AQSVPWGISRVQAPAAHNRGLAGRGVKVAVLDTGISTHPDLRIRGGASFVPGEPSTQDGNGHGTHVAGTIAALDNSIGVLGVAPSAELYAVKVLGASGGGAISSIAQGLEWAGNNGMHVANLSLGSESPSATLEQAVNSATSRGVLVVAASGNSGEESISYPARYANAMAVGATDQNNNRADFSQYGAGLDIVAPGVNVQSTYPGSTYASLNGTSMATPHVAGAAVLVKQKNPSWSNVRIRDHLKNTATSLGSTNLYGSGLVNAFVATR

SEQ ID NO: 64686 - protein, 269 aa, Unidentified
AQSVPWGISRVQAPAAHNRGLAGSGVKVAVLDTGISTHPDLNIRGGASFVPGEPSTQDGNGHGTHVAGTIAALDNSIGVLGVAPSAELYAVKVLGASGGGAISSVAQGLEWAGNNGMHVASLSLGSESPSATLEQAVNSATSRGVLVVAASGNSGADSISYPARYANAMAVGATDQNNNRADFSQYGAGLDIVAPGVNVQSTYPGSTYASLNGTSMATPHVAGAAVLVKQKYPSWSNVRIRDHLKNTATSLGSTNLYGSGLVNVFAATR

SEQ ID NO: 64687 - protein, 269 aa, Unidentified
AQSVPWGIERVQAPAAHNRGLTGSGVKVAVLDTGISTHPDLRIRGGASFVPGEPSTQDGNGHGTHVAGTIAALDNSIGVLGVAPSAELYAVKVLGASGSGSVSSIAQGLEWAGNNGMHVANLSLGSPSPSATLEHAVNHATSHGVLVVAASGNSGADEISYPARYANAMAVGATDQNNNRASFSQYGPGLDIVAPGVDILSTWPGGTYAVLNGTSMATPHVAGAAALVKQKNPSWSNVQIRNHLKNTATSLGSTNEYGSGLVNAEAATR

SEQ ID NO: 64688 - protein, 269 aa, Unidentified
AQSVPWGISRVQAPAAHNRGLAGGGVKVAVLDTGISTHPDLNIRGGASFVPGEPSTQDGNGHGTHVAGTIAALNNNIGVLGVAPSAELYAVKVLAASGNGAISSIANGLEWAGNNGMHVANLSLGAPSPSATLEQAVNSATSRGVLVVAASGNSGADSISYPARYANAMAVGATDQNNNRADFSQYGAGLDIVAPGVNVQSTYPGSTYASQNGTSMATPHVAGAAVLVKQKNPSWSNVRIRDHLKNTATSLGSTNLYGSGLVNAFAATR

SEQ ID NO: 64689 - protein, 269 aa, Unidentified
AQSVPWGIERVQAPAAHNRGLTGSGVKVAVLDTGISTHPDLRIRGGHSFVPGEPSTQDGNGHGTHVAGTIAALDNSIGVLGVAPSAELYAVKVLGASGSGSVSSIAQGLEWAGNHGMHVANLSLGSPSPSATLEQAVNSATSRGVLVVAASGNSGADEISYPARYANAMAVGATDQNNNRASFSQYGPGLDIVAPGVDILSTWPGGTYAVLNGTSMATPHVAGAAALVKQKHPSWSNVQIRNHLKNTATSLGSTNEYGSGLVNAEAATR

SEQ ID NO: 64690 - protein, 269 aa, Unidentified
AQSVPWGIERVQAPAAHNRHLHGHGVKVAVLDTGISTHPDLRIRGGASFVPGEPSTQDGNGHGTHVAGTIAALDNSIGVLGVAPSAELYAVKVLGASGSGSVSSIAQGLEWAGNNGMHVANLSLGSPSPSATLEQAVNSATSRGVLVVAASGNSGADEISYPARYANAMAVGATDQNNNRASFSQYGPGLDIVAPGVDILSTWPGGTYAVLNGTSMATPHVAGAAALVKQKNPSWSNVQIRNHLKNTATSLGSTNEYGSGLVNAEAATR

SEQ ID NO: 64691 - protein, 269 aa, Unidentified
AQSVPWGISRVQAPAAHNRGLAGGGVKVAVLDTGISTHPDLNIRGGASFVPGEPSTQDGNGHGTHVAGTIAALDNSIGVLGVAPSAELYAVKVLAASGQGAISSIANGLEWAGNNGMHVANLSLGAPSPSATLEQAVNSATSRGVLVVAASGNSGADSISYPARYANAMAVGATDQNNNRADFSQYGAGLDIVAPGVNVQSTYPGSTYASQNGTSMATPHVAGAAVLVKQKNPSWSNVRIRDHLKNTATSLGSTNLYGSGLVNAFAATR

SEQ ID NO: 64692 - protein, 269 aa, Unidentified
AQSVPWGISRVQAPAAHNRGLAGSGVKVAVLDTGISTHPDLNIRGGASFVPGEPSTQDGNGHGTHVAGTIAALDNSIGVLGVAPSAELYAVKVLGASGGGAISSVAQGLEWAGNNGMHVANLSLGSESPSATLEQAVNSATSRGVLVVAASGNSGADSISYPARYANAMAVGATDQNNNRADFSQYGAGLDIVAPGVNVQSTYPGSTYASLNGTSMATPHVAGAAVLVKQKYPSWSNVRIRDHLKNTATSLGSTNLYGSGLVNVFVATR

SEQ ID NO: 64693 - protein, 380 aa, Unidentified
VRSKKLWIVASTALLISVAFSSSIASAAEEAKEKYLIGFNEQEAVSEFVEQVEANDEVAILSEEEEVEIELLHEFETIPVLSVELSPEDVDALELDPAISYIEEDAEVTTMAQSVPWGISRVQAPAAHNRGLAGSGVKVAVLDTGISTHPDLNIRGGASFVPGEPSTQDGNGHGTHVAGTIAALNNSIGVLGVAPSAELYAVKVLGASGGGAISSIAQGLEWAGNNGMHVANLSLGNESPSATLEQAVNSATSRGVLVVAASGNSGAGSISYPARYANAMAVGATDQNNNRASFSQYGAGLDIVAPGVNVQSTYPGSTYASLNGTSMATPHVAGAAVLVKQKRPSWSNVRIRDHLKNTATSLGSTNLYGSGLVNAEAATR

SEQ ID NO: 64694 - protein, 380 aa, Unidentified
VRSKKLWIVASTALLISVAFSSSIASAAEEAKEKYLIGFNEQEAVSEFVEQVEANDEVAILSEEEEVEIELLHEFETIPVLSVELSPEDVDALELDPAISYIEEDAEVTTMAQSVPWGISRVQAPAAHRRGLWGRGVKVAVLDTGISTHPDLNIRGGASFVPGEPSTQDGNGHGTHVAGTIAALDNSIGVLGVAPSAELYAVKVLGASGAGSVSSIAQGLEWAGANGMHVANLSLGSPSPSATLEQAVNSATSRGVLVVAASGNSGAGSISYPARYANAMAVGATDQNNNRASFSQYGAGLDLVAPGVNVQSTYPGSAYFSLNGTSMATPHVAGAAALVKQKNPSWSNVQIRNRLKNTATSLGSTNLYGSGLVNAEAATR

SEQ ID NO: 64695 - protein, 380 aa, Unidentified
VRSKKLWIVASTALLISVAFSSSIASAAEEAKEKYLIGFNEQEAVSEFVEQVEANDEVAILSEEEEVEIELLHEFETIPVLSVELSPEDVDALELDPAISYIEEDAEVTTMAQSVPWGISRVQAPAAHRRRLTGRGVKVAVLDTGISTHPDLNIRGGASFVPGEPSTQDGNGHGTHVAGTIAALDNSIGVLGVAPSAELYAVKVLGASGAGSVSSIAQGLEWTGNNGMHVANLSLGSPSPSATLEQAVNSATSRGVLVVAASGNSGAGSISYPARYANAMAVGATDQNNNRASFSQYGAGLDLVAPGVNVQSTYPQSTYFSLNGTSMATPHVAGAAALVKQKNPSWSNVQIRNRLKNTATSLGSTNLYGSGLVNAEAATR

SEQ ID NO: 64696 - protein, 380 aa, Unidentified
VRSKKLWIVASTALLISVAFSSSIASAAEEAKEKYLIGFNEQEAVSEFVEQVEANDEVAILSEEEEVEIELLHEFETIPVLSVELSPEDVDALELDPAISYIEEDAEVTTMAQSVPWGISRVQAPAAHNRGLAGSGVKVAVLDTGISTHPDLRIRGGASFVPGEPSTQDGNGHGTHVAGTIAALNNSIGVLGVAPSAELYAVKVLGASGSGAISSIAQGLEWAGNNGMHVANLSLGIPSPSATLEQAVNSATSRGVLVVAASGNSGADSISYPARYANAMAVGATDQNNNRADFSQYGAGLDIVAPGVNVQSTYPGSTYASLNGTSMATPHVAGAAVLVKQKNPSWSNVRIRDHLKNTATSLGSTNLYGSGLVNAEAATR

SEQ ID NO: 64697 - protein, 380 aa, Unidentified
VRSKKLWIVASTALLISVAFSSSIASAAEEAKEKYLIGFNEQEAVSEFVEQVEANDEVAILSEEEEVEIELLHEFETIPVLSVELSPEDVDALELDPAISYIEEDAEVTTMAQSVPWGISRVQAPAAHRRGLWGRGVKVAVLDTGISTHPDLNIRGGASFVPGEPSTQDGNGHGTHVAGTIAALDNSIGVLGVAPSAELYAVKVLGASGAGSVSSIAQGLEWAGANGMHVANLSLGSPSPSATLEQAVNSATSRGVLVVAASGNSGAGSISYPARYANAMAVGATDQNNNRASFSQYGAGLDLVAPGVNVQSTYPQSAYASLNGTSMATPHVAGAAALVKQKNPSWSNVQIRNRLKNTATSLGSTNLYGSGLVNAEAATR

SEQ ID NO: 64698 - protein, 380 aa, Unidentified
VRSKKLWIVASTALLISVAFSSSIASAAEEAKEKYLIGFNEQEAVSEFVEQVEANDEVAILSEEEEVEIELLHEFETIPVLSVELSPEDVDALELDPAISYIEEDAEVTTMAQSVPWGISRVQAPAAHNRGLAGSGVKVAVLDTGISTHPDLNIRGGASFVPGEPSTQDGNGHGTHVAGTIAALNNSIGVLGVAPSAELYAVKVLGASGGGAISSIAQGLEWAGNNGMHVANLSLGSPSPSATLEQAVNSATSRGVLVVAASGNSGAESISYPARYANAMAVGATDQNNNRADFSQYGAGLDIVAPGVNVQSTYPGSTYASLNGTSMATPHVAGAAVLVKQKRPSWSNVRIRDHLKNTATSLGSTNLYGSGLVNAEAATR

SEQ ID NO: 64699 - protein, 380 aa, Unidentified
VRSKKLWIVASTALLISVAFSSSIASAAEEAKEKYLIGFNEQEAVSEFVEQVEANDEVAILSEEEEVEIELLHEFETIPVLSVELSPEDVDALELDPAISYIEEDAEVTTMAQSVPWGISRVQAPAAHRRRLWGRGVKVAVLDTGISTHPDLNIRGGASFVPGEPSTQDGNGHGTHVAGTIAALDNSIGVLGVAPSAELYAVKVLGASGAGSVSSIAQGLEWAGANGMHVANLSLGSPSPSATLEQAVNSATSRGVLVVAASGNSGAGSISYPARYANAMAVGATDQNNNRASFSQYGAGLDLVAPGVNVQSTYPGSAYASLNGTSMATPHVAGAAALVKQKNPSWSNVQIRNRLKNTATSLGSTNLYGSGLVNAEAATR

SEQ ID NO: 64700 - protein, 380 aa, Unidentified
VRSKKLWIVASTALLISVAFSSSIASAAEEAKEKYLIGFNEQEAVSEFVEQVEANDEVAILSEEEEVEIELLHEFETIPVLSVELSPEDVDALELDPAISYIEEDAEVTTMAQSVPWGISRVQAPAAHRRGLTGSGVKVAVLDTGISTHPDLDIRGGASFVPGEPSTQDGNGHGTHVAGTIAALDNRIGVLGVAPSAELYAVKVLGASGGGAISSIAQGLEWAGNNGMHVANLSLGSPSPSATLEQAVNSATSRGVLVVAASGNSGAGSISYPARYANAMAVGATDQNNNRASFSQYGAGLDIVAPGVNVQSTYPGSTYASLNGTSMATPHVAGAAVLVKQKNPSWSNVRIRNHLKNTATSLGSTNLYGSGLVRAEAATR

SEQ ID NO: 64701 - protein, 380 aa, Unidentified
VRSKKLWIVASTALLISVAFSSSIASAAEEAKEKYLIGFNEQEAVSEFVEQVEANDEVAILSEEEEVEIELLHEFETIPVLSVELSPEDVDALELDPAISYIEEDAEVTTMAQSVPWGISRVQAPAAHNRGLAGSGVKVAVLDTGISTHPDLNIRGGASFVPGEPSTQDGNGHGTHVAGTIAALNNSIGVLGVAPSAELYAVKVLGASGGGAISSIAQGLEWAGNNGMHVANLSLGSESPSATLEQAVNSATSRGVLVVAASGNSGAESISYPARYANAMAVGATDQNNNRASFSQYGAGLDIVAPGVNVQSTYPGSTYASLNGTSMATPHVAGAAVLVKQKRPSWSNVRIRDHLKNTATSLGSTNLYGSGLVNAEAATR

SEQ ID NO: 64702 - protein, 380 aa, Unidentified
VRSKKLWIVASTALLISVAFSSSIASAAEEAKEKYLIGFNEQEAVSEFVEQVEANDEVAILSEEEEVEIELLHEFETIPVLSVELSPEDVDALELDPAISYIEEDAEVTTMAQSVPWGISRVQAPAAHRRGLTGSGVKVAVLDTGISTHPDLRITGGASFVPGEPSTQDGNGHGTHVAGTIAALTNSIGVLGVAPSAELYAVKVLGASGGGAISSIAQGLEWAGNNGMHVANLSLGSPSPSATLEQAVNSATSRGVLVVAASGNSGAGSISYPARYANAMAVGATDQNNNRASFSQYGAGLDIVAPGVNVQSTYPGSTYASLNGTSMATPHVAGAAVLVKQKNPSWSNVRIRNHLKNTATSLGSTNLYGSGLVNAEATTR

SEQ ID NO: 64703 - protein, 380 aa, Unidentified
VRSKKLWIVASTALLISVAFSSSIASAAEEAKEKYLIGFNEQEAVSEFVEQVEANDEVAILSEEEEVEIELLHEFETIPVLSVELSPEDVDALELDPAISYIEEDAEVTTMAQSVPWGISRVQAPAAHRRRLWGRGVKVAVLDTGISTHPDLNIRGGASFVPGEPSTQDGNGHGTHVAGTIAALDNSIGVLGVAPSAELYAVKVLGASGAGSVSSIAQGLEWAGNNGMHVANLSLGSPSPSATLEQAVNSATSRGVLVVAASGNSGAGSISYPARYANAMAVGATDQDNNRASFSQYGAGLDIVAPGVNVQSTYPQSTYFSLNGTSMATPHVAGAAALVKQKNPSWSNVQIRNRLKNTATSLGSTNLYGSGLVNAEAATR

SEQ ID NO: 64704 - protein, 380 aa, Unidentified
VRSKKLWIVASTALLISVAFSSSIASAAEEAKEKYLIGFNEQEAVSEFVEQVEANDEVAILSEEEEVEIELLHEFETIPVLSVELSPEDVDALELDPAISYIEEDAEVTTMAQSVPWGISRVQAPAAHNRRLWGSGVKVAVLDTGISTHPDLNIRGGASFVPGEPSTQDGNGHGTHVAGTIAALNNSIGVLGVAPSAELYAVKVLGASGGGAISSIAQGLEWAGNNGMHVANLSLGSPSPSATLEQAVNSATSRGVLVVAASGNSGAGSISYPARYANAMAVGATDQNNNRASFSQYGAGLDLVAPGVNVQSTYPQSAYASLNGTSMATPHVAGAAVLVKQKNPSWSNVRIRNHLKNTATSLGSTNLYGSGLVNAEAATR

SEQ ID NO: 64705 - protein, 380 aa, Unidentified
VRSKKLWIVASTALLISVAFSSSIASAAEEAKEKYLIGFNEQEAVSEFVEQVEANDEVAILSEEEEVEIELLHEFETIPVLSVELSPEDVDALELDPAISYIEEDAEVTTMAQSVPWGISRVQAPAAHRRRLTGRGVKVAVLDTGISTHPDLNIRGGASFVPGEPSTQDGNGHGTHVAGTIAALDNSIGVLGVAPSAELYAVKVLGASGAGSVSSIAQGLEWAGNNGMHVANLSLGSPSPSATLEQAVNSATSRGVLVVAASGNSGAGSISYPARYANAMAVGATDQDNNRASFSQYGAGLDIVAPGVNVQSTYPQSAYFSLNGTSMATPHVAGAAALVKQKNPSWSNVQIRNRLKNTATSLGSTNLYGSGLVNAEAATR

SEQ ID NO: 64706 - protein, 380 aa, Unidentified
VRSKKLWIVASTALLISVAFSSSIASAAEEAKEKYLIGFNEQEAVSEFVEQVEANDEVAILSEEEEVEIELLHEFETIPVLSVELSPEDVDALELDPAISYIEEDAEVTTMAQSVPWGISRVQAPAAHNRRLWGSGVKVAVLDTGISTHPDLNIRGGASFVPGEPSTQDGNGHGTHVAGTIAALNNSIGVLGVAPSAELYAVKVLGASGGGAISSIAQGLEWAGANGMHVANLSLGSPSPSATLEQAVNSATSRGVLVVAASGNSGAGSISYPARYANAMAVGATDQDNNRASFSQYGAGLDLVAPGVNVQSTYPGSTYASLNGTSMATPHVAGAAVLVKQKNPSWSNVRIRNHLKNTATSLGSTNLYGSGLVNAEAATR

SEQ ID NO: 64707 - protein, 380 aa, Unidentified
VRSKKLWIVASTALLISVAFSSSIASAAEEAKEKYLIGFNEQEAVSEFVEQVEANDEVAILSEEEEVEIELLHEFETIPVLSVELSPEDVDALELDPAISYIEEDAEVTTMAQSVPWGISRVQAPAAHRRRLWGRGVKVAVLDTGISTHPDLNIRGGASFVPGEPSTQDGNGHGTHVAGTIAALDNSIGVLGVAPSAELYAVKVLGASGAGSVSSIAQGLEWAGANGMHVANLSLGSPSPSATLEQAVNSATSRGVLVVAASGNSGAGSISYPARYANAMAVGATDQDNNRASFSQYGAGLDIVAPGVNVQSTYPQSTYASLNGTSMATPHVAGAAALVKQKNPSWSNVQIRNRLKNTATSLGSTNLYGSGLVNAEAATR

SEQ ID NO: 64708 - protein, 380 aa, Unidentified
VRSKKLWIVASTALLISVAFSSSIASAAEEAKEKYLIGFNEQEAVSEFVEQVEANDEVAILSEEEEVEIELLHEFETIPVLSVELSPEDVDALELDPAISYIEEDAEVTTMAQSVPWGISRVQAPAAHRRGLWGRGVKVAVLDTGISTHPDLNIRGGASFVPGEPSTQDGNGHGTHVAGTIAALDNSIGVLGVAPSAELYAVKVLGASGAGSVSSIAQGLEWAGNNGMHVANLSLGSPSPSATLEQAVNSATSRGVLVVAASGNSGAGSISYPARYANAMAVGATDQDNNRASFSQYGAGLDLVAPGVNVQSTYPQSAYASLNGTSMATPHVAGAAALVKQKNPSWSNVQIRNRLKNTATSLGSTNLYGSGLVNAEAATR

SEQ ID NO: 64709 - protein, 380 aa, Unidentified
VRSKKLWIVASTALLISVAFSSSIASAAEEAKEKYLIGFNEQEAVSEFVEQVEANDEVAILSEEEEVEIELLHEFETIPVLSVELSPEDVDALELDPAISYIEEDAEVTTMAQSVPWGISRVQAPAAHRRGLWGRGVKVAVLDTGISTHPDLNIRGGASFVPGEPSTQDGNGHGTHVAGTIAALDNSIGVLGVAPSAELYAVKVLGASGAGSVSSIAQGLEWAGANGMHVANLSLGSPSPSATLEQAVNSATSRGVLVVAASGNSGAGSISYPARYANAMAVGATDQNNNRASFSQYGAGLDIVAPGVNVQSTYPQSAYFSLNGTSMATPHVAGAAALVKQKNPSWSNVQIRNRLKNTATSLGSTNLYGSGLVNAEAATR

SEQ ID NO: 64710 - protein, 380 aa, Unidentified
VRSKKLWIVASTALLISVAFSSSIASAAEEAKEKYLIGFNEQEAVSEFVEQVEANDEVAILSEEEEVEIELLHEFETIPVLSVELSPEDVDALELDPAISYIEEDAEVTTMAQSVPWGISRVQAPAAHRRRLWGRGVKVAVLDTGISTHPDLNIRGGASFVPGEPSTQDGNGHGTHVAGTIAALDNSIGVLGVAPSAELYAVKVLGASGAGSVSSIAQGLEWAGANGMHVANLSLGSPSPSATLEQAVNSATSRGVLVVAASGNSGAGSISYPARYANAMAVGATDQDNNRASFSQYGAGLDIVAPGVNVQSTYPGSAYASLNGTSMATPHVAGAAALVKQKNPSWSNVQIRNRLKNTATSLGSTNLYGSGLVNAEAATR

SEQ ID NO: 64711 - protein, 380 aa, Unidentified
VRSKKLWIVASTALLISVAFSSSIASAAEEAKEKYLIGFNEQEAVSEFVEQVEANDEVAILSEEEEVEIELLHEFETIPVLSVELSPEDVDALELDPAISYIEEDAEVTTMAQSVPWGISRVQAPAAHNRRLWGSGVKVAVLDTGISTHPDLNIRGGASFVPGEPSTQDGNGHGTHVAGTIAALNNSIGVLGVAPSAELYAVKVLGASGAGAISSIAQGLEWAGANGMHVANLSLGSPSPSATLEQAVNSATSRGVLVVAASGNSGAGSISYPARYANAMAVGATDQDNNRASFSQYGAGLDIVAPGVNVQSTYPGSTYFSLNGTSMATPHVAGAAVLVKQKNPSWSNVRIRNHLKNTATSLGSTNLYGSGLVNAEAATR

SEQ ID NO: 64712 - protein, 380 aa, Unidentified
VRSKKLWIVASTALLISVAFSSSIASAAEEAKEKYLIGFNEQEAVSEFVEQVEANDEVAILSEEEEVEIELLHEFETIPVLSVELSPEDVDALELDPAISYIEEDAEVTTMAQSVPWGISRVQAPAAHRRRLWGRGVKVAVLDTGISTHPDLNIRGGASFVPGEPSTQDGNGHGTHVAGTIAALDNSIGVLGVAPSAELYAVKVLGASGSGSVSSIAQGLEWAGANGMHVANLSLGSPSPSATLEQAVNSATSRGVLVVAASGNSGAGSISYPARYANAMAVGATDQDNNRASFSQYGAGLDLVAPGVNVQSTYPQSTYASLNGTSMATPHVAGAAALVKQKNPSWSNVQIRNRLKNTATSLGSTNLYGSGLVNAEAATR

SEQ ID NO: 64713 - protein, 380 aa, Unidentified
VRSKKLWIVASTALLISVAFSSSIASAAEEAKEKYLIGFNEQEAVSEFVEQVEANDEVAILSEEEEVEIELLHEFETIPVLSVELSPEDVDALELDPAISYIEEDAEVTTMAQSVPWGISRVQAPAAHNRGLTGSGVKVAVLDTGISTHPDLNIRGGASFVPGEPSTQDGNGHGTHVAGTIAALNNSIGVLGVAPSAELYAVKVLGASGGGAISSIAQGLEWAGNNGMHVANLSLGNESPSATLEQAVNSATSRGVLVVAASGNSGEGSISYPARYANAMAVGATDQNNNRASFSQYGAGLDIVAPGVNVQSTYPGSTYASLNGTSMATPHVAGAAVLVKQKNPSWSNVRIRDRLKNTATSLGSTNLYGSGLVNAEAATR

SEQ ID NO: 64714 - protein, 380 aa, Unidentified
VRSKKLWIVASTALLISVAFSSSIASAAEEAKEKYLIGFNEQEAVSEFVEQVEANDEVAILSEEEEVEIELLHEFETIPVLSVELSPEDVDALELDPAISYIEEDAEVTTMAQSVPWGISRVQAPAAHRRGLWGRGVKVAVLDTGISTHPDLNIRGGASFVPGEPSTQDGNGHGTHVAGTIAALDNSIGVLGVAPSAELYAVKVLGASGSGSVSSIAQGLEWAGANGMHVANLSLGSPSPSATLEQAVNSATSRGVLVVAASGNSGAGSISYPARYANAMAVGATDQDNNRASFSQYGAGLDLVAPGVNVQSTYPQSTYFSLNGTSMATPHVAGAAALVKQKNPSWSNVQIRNRLKNTATSLGSTNLYGSGLVNAEAATR

SEQ ID NO: 64715 - protein, 380 aa, Unidentified
VRSKKLWIVASTALLISVAFSSSIASAAEEAKEKYLIGFNEQEAVSEFVEQVEANDEVAILSEEEEVEIELLHEFETIPVLSVELSPEDVDALELDPAISYIEEDAEVTTMAQSVPWGISRVQAPAAHRRRLTGRGVKVAVLDTGISTHPDLNIRGGASFVPGEPSTQDGNGHGTHAAGTIAALDNSIGVLGVAPSAELYAVKVLGASGAGSVSSIAQGLEWAGANGMHVANLSLGSPSPSATLEQAVNSATSRGVLVVAASGNSGAGSISYPARYANAMAVGATDQNNNRASFSQYGAGLDIVAPGVNVQSTYPGSAYFSLNGTSMATPHVAGAAALVKQKNPSWSNVQIRNRLKNTATSLGSTNLYGSGLVNAEAATR

SEQ ID NO: 64716 - protein, 380 aa, Unidentified
VRSKKLWIVASTALLISVAFSSSIASAAEEAKEKYLIGFNEQEAVSEFVEQVEANDEVAILSEEEEVEIELLHEFETIPVLSVELSPEDVDALELDPAISYIEEDAEVTTMAQSVPWGISRVQAPAAHNRGLAGSGVKVAVLDTGISTHPDLNIRGGASFVPGEPSTQDGNGHGTHVAGTIAALNNSIGVLGVAPSAELYAVKVLGASGGGAISSIAQGLEWAGNNGMHVANLSLGSESPSATLEQAVNSATSRGVLVVAASGNSGEGSISYPARYANAMAVGATDQNNNRASFSQYGAGLDIVAPGVNVQSTYPGSTYASLNGTSMATPHVAGAAVLVKQKNPSWSNVRIRDRLKNTATSLGSTNLYGSGLVNAEAATR

SEQ ID NO: 64717 - protein, 380 aa, Unidentified
VRSKKLWIVASTALLISVAFSSSIASAAEEAKEKYLIGFNEQEAVSEFVEQVEANDEVAILSEEEEVEIELLHEFETIPVLSVELSPEDVDALELDPAISYIEEDAEVTTMAQSVPWGISRVQAPAAHRRGLTGRGVKVAVLDTGISTHPDLNIRGGASFVPGEPSTQDGNGHGTHVAGTIAALDNSIGVLGVAPSAELYAVKVLGASGAGSVSSIAQGLEWAGANGMHVANLSLGSPSPSATLEQAVNSATSRGVLVVAASGNSGAGSISYPARYANAMAVGATDQDNNRASFSQYGAGLDLVAPGVNVQSTYPGSAYFSLNGTSMATPHVAGAAALVKQKNPSWSNVQIRNRLKNTATSLGSTNLYGSGLVNAEAATR

SEQ ID NO: 64718 - protein, 380 aa, Unidentified
VRSKKLWIVASTALLISVAFSSSIASAAEEAKEKYLIGFNEQEAVSEFVEQVEANDEVAILSEEEEVEIELLHEFETIPVLSVELSPEDVDALELDPAISYIEEDAEVTTMAQSVPWGISRVQAPAAHNRRLWGSGVKVAVLDTGISTHPDLNIRGGASFVPGEPSTQDGNGHGTHVAGTIAALNNSIGVLGVAPSAELYAVKVLGASGGGAISSIAQGLEWAGNNGMHVANLSLGSPSPSATLEQAVNSATSRGVLVVAASGNSGAGSISYPARYANAMAVGATDQNNNRASFSQYGAGLDIVAPGVNVQSTYPQSAYFSLNGTSMATPHVAGAAVLVKQKNPSWSNVRIRNHLKNTATSLGSTNLYGSGLVNAEAATR

SEQ ID NO: 64719 - protein, 380 aa, Unidentified
VRSKKLWIVASTALLISVAFSSSIASAAEEAKEKYLIGFNEQEAVSEFVEQVEANDEVAILSEEEEVEIELLHEFETIPVLSVELSPEDVDALELDPAISYIEEDAEVTTMAQSVPWGISRVQAPAAHNRGLTGSGVKVAVLDTGISTHPDLNIRGGASFVPGEPSTQDGNGHGTHVAGTIAALNNSIGVLGVAPSAELYAVKVLGASGGGAISSIAQGLEWAGNNGMHVANLSLGNESPSATLEQAVNSATSRGVLVVAASGNSGEGSISYPARYANAMAVGATDQNNNRASFSQYGAGLDIVAPGVNVQSTYPGSTYASLNGTSMATPHVAGAAVLVKQKRPSWSNVRIRDHLKNTATSLGSTNLYGSGLVNAEAATR

SEQ ID NO: 64720 - protein, 380 aa, Unidentified
VRSKKLWIVASTALLISVAFSSSIASAAEEAKEKYLIGFNEQEAVSEFVEQVEANDEVAILSEEEEVEIELLHEFETIPVLSVELSPEDVDALELDPAISYIEEDAEVTTMAQSVPWGISRVQAPAAHNRGLAGRGVKVAVLDTGISTHPDLNIRGGASFVPGEPSTQDGNGHGTHVAGTIAALNNSIGVLGVAPSAELYAVKVLGASGSGAISSIAQGLEWAGNNGMHVANLSLGSESPSATLEQAVNSATSRGVLVVAASGNSGADSISYPARYANAMAVGATDQNNNRADFSQYGAGLDIVAPGVNVQSTYPGSTYASLNGTSMATPHVAGAAVLVKQKNPSWSNVQIRDHLKNTATSLGSTNLYGSGLVNAFAATR

SEQ ID NO: 64721 - protein, 380 aa, Unidentified
VRSKKLWIVASTALLISVAFSSSIASAAEEAKEKYLIGFNEQEAVSEFVEQVEANDEVAILSEEEEVEIELLHEFETIPVLSVELSPEDVDALELDPAISYIEEDAEVTTMAQSVPWGISRVQAPAAHRRRLWGRGVKVAVLDTGISTHPDLNIRGGASFVPGEPSTQDGNGHGTHVAGTIAALDNSIGVLGVAPSAELYAVKVLGASGAGSVSSIAQGLEWAGNNGMHVANLSLGSPSPSATLEQAVNSATSRGVLVVAASGNSGAGSISYPARYANAMAVGATDQDNNRASFSQYGAGLDIVAPGVNVQSTYPGSAYFSLNGTSMATPHVAGAAALVKQKNPSWSNVQIRNRLKNTATSLGSTNLYGSGLVNAEAATR

SEQ ID NO: 64722 - protein, 380 aa, Unidentified
VRSKKLWIVASTALLISVAFSSSIASAAEEAKEKYLIGFNEQEAVSEFVEQVEANDEVAILSEEEEVEIELLHEFETIPVLSVELSPEDVDALELDPAISYIEEDAEVTTMAQSVPWGISRVQAPAAHNRGLTGRGVKVAVLDTGISTHPDLNIRGGASFVPGEPSTQDGNGHGTHVAGTIAALNNSIGVLGVAPSAELYAVKVLGASGGGAISSIAQGLEWAGNNGMHVANLSLGNESPSATLEQAVNSATSRGVLVVAASGNSGAGSISYPARYANAMAVGATDQNNNRADFSQYGAGLDIVAPGVNVQSTYPGSTYASLNGTSMATPHVAGAAVLVKQKNPSWSNVRIRDHLKNTATSLGSTNLYGSGLVNAEAATR

SEQ ID NO: 64723 - protein, 380 aa, Unidentified
VRSKKLWIVASTALLISVAFSSSIASAAEEAKEKYLIGFNEQEAVSEFVEQVEANDEVAILSEEEEVEIELLHEFETIPVLSVELSPEDVDALELDPAISYIEEDAEVTTMAQSVPWGISRVQAPAAHNRRLWGSGVKVAVLDTGISTHPDLNIRGGASFVPGEPSTQDGNGHGTHVAGTIAALNNSIGVLGVAPSAELYAVKVLGASGAGAISSIAQGLEWAGANGMHVANLSLGSPSPSATLEQAVNSATSRGVLVVAASGNSGAGSISYPARYANAMAVGATDQDNNRASFSQYGAGLDIVAPGVNVQSTYPQSTYASLNGTSMATPHVAGAAVLVKQKNPSWSNVRIRNHLKNTATSLGSTNLYGSGLVNAEAATR

SEQ ID NO: 64724 - protein, 380 aa, Unidentified
VRSKKLWIVASTALLISVAFSSSIASAAEEAKEKYLIGFNEQEAVSEFVEQVEANDEVAILSEEEEVEIELLHEFETIPVLSVELSPEDVDALELDPAISYIEEDAEVTTMAQSVPWGISRVQAPAAHNRRLWGSGVKVAVLDTGISTHPDLNIRGGASFVPGEPSTQDGNGHGTHVAGTIAALNNSIGVLGVAPSAELYAVKVLGASGGGAISSIAQGLEWAGANGMHVANLSLGSPSPSATLEQAVNSATSRGVLVVAASGNSGAGSISYPARYANAMAVGATDQDNNRASFSQYGAGLDIVAPGVNVQSTYPGSAYASLNGTSMATPHVAGAAVLVKQKNPSWSNVRIRNHLKNTATSLGSTNLYGSGLVNAEAATR

SEQ ID NO: 64725 - protein, 380 aa, Unidentified
VRSKKLWIVASTALLISVAFSSSIASAAEEAKEKYLIGFNEQEAVSEFVEQVEANDEVAILSEEEEVEIELLHEFETIPVLSVELSPEDVDALELDPAISYIEEDAEVTTMAQSVPWGISRVQAPAAHRRGLTGRGVKVAVLDTGISTHPDLNIRGGASFVPGEPSTQDGNGHGTHVAGTIAALDNSIGVLGVAPSIELYAVKVLGASGAGSVSSIAQGLEWAGANGMHVANLSLGSPSPSATLEQAVNSATSRGVLVVAASGNSGAGSISYPARYANAMAVGATDQNNNRASFSQYGAGLDLVAPGVNVQSTYPQSTYFSLNGTSMATPHVAGAAALVKQKNPSWSNVQIRNRLKNTATSLGSTNLYGSGLVNAEAATR

SEQ ID NO: 64726 - protein, 380 aa, Unidentified
VRSKKLWIVASTALLISVAFSSSIASAAEEAKEKYLIGFNEQEAVSEFVEQVEANDEVAILSEEEEVEIELLHEFETIPVLSVELSPEDVDALELDPAISYIEEDAEVTTMAQSVPWGISRVQAPAAHNRGLTGSGVKVAVLDTGISTHPDLNIRGGASFVPGEPSTQDGNGHGTHVAGTIAALNNSIGVLGVAPSAELYAVKVLGASGAGAISSIAQGLEWAGNNGMHVANLSLGSPSPSATLEQAVNSATSRGVLVVAASGNSGEGSISYPARYANAMAVGATDQNNNRADFSQYGAGLDIVAPGVNVQSTYPGSTYASENGTSMATPHVAGAAVLVKQKNPSWSNVRIRDRLKNTATSLGSTNLYGSGLVNAEAATR

SEQ ID NO: 64727 - protein, 380 aa, Unidentified
VRSKKLWIVASTALLISVAFSSSIASAAEEAKEKYLIGFNEQEAVSEFVEQVEANDEVAILSEEEEVEIELLHEFETIPVLSVELSPEDVDALELDPAISYIEEDAEVTTMAQSVPWGISRVQAPAAHRRRLTGRGVKVAVLDTGISTHPDLNIRGGASFVPGEPSTQDGNGHGTHVAGTIAALDNSIGVLGVAPSAELYAVKVLGASGAGSVSSIAQGLEWAGNNGMHVANLSLGSPSPSATLEQAVNSATSRGVLVVAASGNSGAGSISYPARYANAEAVGATDQDNNRASFSQYGAGLDIVAPGVNVQSTYPQSTYFSLNGTSMATPHVAGAAALVKQKNPSWSNVQIRNRLKNTATSLGSTNLYGSGLVNAEAATR

SEQ ID NO: 64728 - protein, 380 aa, Unidentified
VRSKKLWIVASTALLISVAFSSSIASAAEEAKEKYLIGFNEQEAVSEFVEQVEANDEVAILSEEEEVEIELLHEFETIPVLSVELSPEDVDALELDPAISYIEEDAEVTTMAQSVPWGISRVQAPAAHNRGLAGSGVKVAVLDTGISTHPDLNIRGGASFVPGEPSTQDGNGHGTHVAGTIAALDNSIGVLGVAPSAELYAVKVLGASGGGAISSIAQGLEWAGNNGMHVANLSLGSPSPSATLEQAVNSATSRGVLVVAASGNSGADSISYPARYANAMAVGATDQNNNRASFSQYGAGLDIVAPGVNVQSTYPGSTYASLNGTSMATPHVAGAAVLVKQKNPSWSNVRIRDHLKNTATSLGSTNLYGSGLVNAFAATR

SEQ ID NO: 64729 - protein, 380 aa, Unidentified
VRSKKLWIVASTALLISVAFSSSIASAAEEAKEKYLIGFNEQEAVSEFVEQVEANDEVAILSEEEEVEIELLHEFETIPVLSVELSPEDVDALELDPAISYIEEDAEVTTMAQSVPWGISRVQAPAAHNRGLTGSGVKVAVLDTGISTHPDLNIRGGASFVPGEPSTQDGNGHGTHVAGTIAALNNSIGVLGVAPSAELYAVKVLGASGGGAISSIAQGLEWAGNNGMHVANLSLGSESPSATLEQAVNSATSRGVLVVAASGNSGEGSISYPARYANAMAVGATDQNNNRADFSQYGAGLDIVAPGVNVQSTYPGSTYASLNGTSMATPHVAGAAVLVKQKNPSWSNVRIRDRLKNTATSLGSTNLYGSGLVNAEAATR

SEQ ID NO: 64730 - protein, 380 aa, Unidentified
VRSKKLWIVASTALLISVAFSSSIASAAEEAKEKYLIGFNEQEAVSEFVEQVEANDEVAILSEEEEVEIELLHEFETIPVLSVELSPEDVDALELDPAISYIEEDAEVTTMAQSVPWGISRVQAPAAHNRGLAGSGVKVAVLDTGISTHPDLNIRGGASFVPGEPSTQDGNGHGTHVAGTIAALNNSIGVLGVAPSAELYAVKVLGASGGGAISSIAQGLEWAGNNGMHVANLSLGSESPSATLEQAVNSATSRGVLVVAASGNSGAESISYPARYANAMAVGATDQNNNRASFSQYGAGLDIVAPGVNVQSTYPGSTYASLNGTSMATPHVAGAAVLVKQKNPSWSNVRIRDRLKNTATSLGSTNLYGSGLVNAEAATR

SEQ ID NO: 64731 - protein, 380 aa, Unidentified
VRSKKLWIVASTALLISVAFSSSIASAAEEAKEKYLIGFNEQEAVSEFVEQVEANDEVAILSEEEEVEIELLHEFETIPVLSVELSPEDVDALELDPAISYIEEDAEVTTMAQSVPWGISRVQAPAAHNRGLTGRGVKVAVLDTGISTHPDLRITGGASFVPGEPSTQDGNGHGTHVAGTIAALDNRIGVLGVAPSAELYAVKVLGASGGGAISSIAQGLEWAGNNGMHVANLSLGSPSPSATLEQAVNSATSRGVLVVAASGNSGAGSISYPARYANAMAVGATDQNNNRASFSQYGAGLDIVAPGVNVQSTYPGSTYASLNGTSMATPHVAGAAVLVKQKNPSWSNVRIRNHLKNTATSLGSTNLYGSGLVNAEAATR

SEQ ID NO: 64732 - protein, 380 aa, Unidentified
VRSKKLWIVASTALLISVAFSSSIASAAEEAKEKYLIGFNEQEAVSEFVEQVEANDEVAILSEEEEVEIELLHEFETIPVLSVELSPEDVDALELDPAISYIEEDAEVTTMAQSVPWGISRVQAPAAHNRGLTGSGVKVAVLDTGISTHPDLNIRGGASFVPGEPSTQDGNGHGTHVAGTIAALNNSIGVLGVAPSAELYAVKVLGASGGGAISSIAQGLEWAGNNGMHVANLSLGSESPSATLEQAVNSATSRGVLVVAASGNSGEESISYPARYANAMAVGATDQNNNRASFSQYGAGLDIVAPGVNVQSTYPGSTYASLNGTSMATPHVAGAAVLVKQKRPSWSNVRIRDHLKNTATSLGSTNLYGSGLVNAEAATR

SEQ ID NO: 64733 - protein, 380 aa, Unidentified
VRSKKLWIVASTALLISVAFSSSIASAAEEAKEKYLIGFNEQEAVSEFVEQVEANDEVAILSEEEEVEIELLHEFETIPVLSVELSPEDVDALELDPAISYIEEDAEVTTMAQSVPWGISRVQAPAAHNRGLAGSGVKVAVLDTGISTHPDLRIRGGASFVPGEPSTQDGNGHGTHVAGTIAALNNSIGVLGVAPSAELYAVKVLGASGSGAISSIAQGLEWAGNNGMHVANLSLGSESPSATLEQAVNSATSRGVLVVAASGNSGADSISYPARYANAMAVGATDQNNNRADFSQYGAGLDIVAPGVNVQSTYPGSTYASLNGTSMATPHVAGAAVLVKQKNPSWSNVRIRDHLKNTATSLGSTNLYGSGLVNAEAATR

SEQ ID NO: 64734 - protein, 380 aa, Unidentified
VRSKKLWIVASTALLISVAFSSSIASAAEEAKEKYLIGFNEQEAVSEFVEQVEANDEVAILSEEEEVEIELLHEFETIPVLSVELSPEDVDALELDPAISYIEEDAEVTTMAQSVPWGISRVQAPAAHNRGLTGSGVKVAVLDTGISTHPDLRITGGASFVPGEPSTQDGNGHGTHVAGTIAALDNRIGVLGVAPSAELYAVKVLGASGGGAISSIAQGLEWAGNNGMHVANLSLGSPSPSATLEQAVNSATSRGVLVVAASGNSGAGSISYPARYANAMAVGATDQNNNRASFSQYGAGLDIVAPGVNVQSTYPGSTYASLNGTSMATPHVAGAAVLIKQKNPSWSNVRIRNHLKNTATSLGSTNLYGSGLVNAEAATR

SEQ ID NO: 64735 - protein, 380 aa, Unidentified
VRSKKLWIVASTALLISVAFSSSIASAAEEAKEKYLIGFNEQEAVSEFVEQVEANDEVAILSEEEEVEIELLHEFETIPVLSVELSPEDVDALELDPAISYIEEDAEVTTMAQSVPWGISRVQAPAAHNRGLTGSGVKVAVLDTGISTHPDLNIRGGASFVPGEPSTQDGNGHGTHVAGTIAALNNSIGVLGVAPSAELYAVKVLGASGAGAISSIAQGLEWAGNNGMHVANLSLGSPSPSATLEQAVNSATSRGVLVVAASGNSGEGSISYPARYANAMAVGATDQNNNRADFSQYGAGLDIVAPGVNVQSTYPGSTYASLNGTSMATPHVAGAAVLVKQKNPSWSNVRIRDRLKNTATSLGSTNLYGSGLVNAFAATR

SEQ ID NO: 64736 - protein, 380 aa, Unidentified
VRSKKLWIVASTALLISVAFSSSIASAAEEAKEKYLIGFNEQEAVSEFVEQVEANDEVAILSEEEEVEIELLHEFETIPVLSVELSPEDVDALELDPAISYIEEDAEVTTMAQSVPWGISRVQAPAAHRRGLTGRGVKVAVLDTGISTHPDLNIRGGASFVPGEPSTQDGNGHGTHVAGTIAALDNSIGVLGVAPSAELYAVKVLGASGSGSVSSIAQGLEWAGANGMHVANLSLGSPSPSATLEQAVNSATSRGVLVVAASGNSGAGSISYPARYANAMAVGATDQDNNRASFSQYGAGLDLVAPGVNVQSTYPQSAYFSLNGTSMATPHVAGAAALVKQKNPSWSNVQIRNRLKNTATSLGSTNLYGSGLVNAEAATR

SEQ ID NO: 64737 - protein, 380 aa, Unidentified
VRSKKLWIVASTALLISVAFSSSIASAAEEAKEKYLIGFNEQEAVSEFVEQVEANDEVAILSEEEEVEIELLHEFETIPVLSVELSPEDVDALELDPAISYIEEDAEVTTMAQSVPWGISRVQAPAAHRRGLWGRGVKVAVLDTGISTHPDLNIRGGASFVPGEPSTQDGNGHGTHVAGTIAALDNSIGVLGVAPSAELYAVKVLGASGAGSVSSIAQGLEWAGNNGMHVANLSLGSPSPSATLEQAVNSATSRGVLVVAASGNSGAGSISYPARYANAMAVGATDQDNNRASFSQYGAGLDIVAPGVNVQSTYPQSAYFSLNGTSMATPHVAGAAALVKQKNPSWSNVQIRNRLKNTATSLGSTNLYGSGLVNAEAATR

SEQ ID NO: 64738 - protein, 380 aa, Unidentified
VRSKKLWIVASTALLISVAFSSSIASAAEEAKEKYLIGFNEQEAVSEFVEQVEANDEVAILSEEEEVEIELLHEFETIPVLSVELSPEDVDALELDPAISYIEEDAEVTTMAQSVPWGISRVQAPAAHRRRLWGRGVKVAVLDTGISTHPDLNIRGGASFVPGEPSTQDGNGHGTHVAGTIAALDNSIGVLGVAPSAELYAVKVLGASGAGSVSSIAQGLEWAGNNGMHVANLSLGSPSPSATLEQAVNSATSRGVLVVAASGNSGAGSISYPARYANAMAVGATDQNNNRASFSQYGAGLDLVAPGVNVQSTYPQSAYASLNGTSMATPHVAGAAALVKQKNPSWSNVQIRNRLKNTATSLGSTNLYGSGLVNAEAATR

SEQ ID NO: 64739 - protein, 380 aa, Unidentified
VRSKKLWIVASTALLISVAFSSSIASAAEEAKEKYLIGFNEQEAVSEFVEQVEANDEVAILSEEEEVEIELLHEFETIPVLSVELSPEDVDALELDPAISYIEEDAEVTTMAQSVPWGISRVQAPAAHNRGLAGSGVKVAVLDTGISTHPDLNIRGGASFVPGEPSTQDGNGHGTHVAGTIAALNNSIGVLGVAPSAELYAVKVLGASGGGAISSIAQGLEWAGNNGMHVANLSLGSESPSATLEQAVNSATSRGVLVVAASGNSGEGSISYPARYANAMAVGATDQNNNRASFSQYGAGLDIVAPGVNVQSTYPGSTYASLNGTSMATPHVAGAAVLVKQKRPSWSNVRIRDHLKNTATSLGSTNLYGSGLVNAEAATR

SEQ ID NO: 64740 - protein, 380 aa, Unidentified
VRSKKLWIVASTALLISVAFSSSIASAAEEAKEKYLIGFNEQEAVSEFVEQVEANDEVAILSEEEEVEIELLHEFETIPVLSVELSPEDVDALELDPAISYIEEDAEVTTMAQSVPWGISRVQAPAAHRRRLTGRGVKVAVLDTGISTHPDLNIRGGASFVPGEPSTQDGNGHGTHVAGTIAALDNSIGVLGVAPSAELYAVKVLGASGAGSVSSIAQGLEWAGNNGMHVANLSLGSPSPSATLEQAVNSATSRGVLVVAASGNSGAGSISYPARYANAMAVGATDQDNNRASFSQYGAGLDLVAPGVNVQSTYPQSAYASLNGTSMATPHVAGAAALVKQKNPSWSNVQIRNRLKNTATSLGSTNLYGSGLVNAEAATR

SEQ ID NO: 64741 - protein, 380 aa, Unidentified
VRSKKLWIVASTALLISVAFSSSIASAAEEAKEKYLIGFNEQEAVSEFVEQVEANDEVAILSEEEEVEIELLHEFETIPVLSVELSPEDVDALELDPAISYIEEDAEVTTMAQSVPWGISRVQAPAAHNRRLWGSGVKVAVLDTGISTHPDLNIRGGASFVPGEPSTQDGNGHGTHVAGTIAALNNSIGVLGVAPSAELYAVKVLGASGGGAISSIAQGLEWAGANGMHVANLSLGSPSPSATLEQAVNSATSRGVLVVAASGNSGAGSISYPARYANAMAVGATDQDNNRASFSQYGAGLDIVAPGVNVQSTYPGSTYFSLNGTSMATPHVAGAAVLVKQKNPSWSNVRIRNHLKNTATSLGSTNLYGSGLVNAEAATR

SEQ ID NO: 64742 - protein, 380 aa, Unidentified
VRSKKLWIVASTALLISVAFSSSIASAAEEAKEKYLIGFNEQEAVSEFVEQVEANDEVAILSEEEEVEIELLHEFETIPVLSVELSPEDVDALELDPAISYIEEDAEVTTMAQSVPWGISRVQAPAAHNRGLTGRGVKVAVLDTGISTHPDLNITGGASFVPGEPSTQDGNGHGTHVAGTIAALDNRIGVLGVAPSAELYAVKVLGASGGGAISSIAQGLEWAGNNGMHVANLSLGSPSPSATLEQAVNSATSRGVLVVAASGNSGAGSISYPARYANAMAVGATDQNNNRASFSQYGAGLDIVAPGVNVQSTYPGSTYASLNGTSMATPHVAGAAVLVKQKNPSWSNVRIRNHLKNTATSLGSTNLYGSGLVRAEAATR

SEQ ID NO: 64743 - protein, 380 aa, Unidentified
VRSKKLWIVASTALLISVAFSSSIASAAEEAKEKYLIGFNEQEAVSEFVEQVEANDEVAILSEEEEVEIELLHEFETIPVLSVELSPEDVDALELDPAISYIEEDAEVTTMAQSVPWGISRVQAPAAHRRRLTGRGVKVAVLDTGISTHPDLNITGGASFVPGEPSTQDGNGHGTHVAGTIAALDNSIGVLGVAPSAELYAVKVLGASGGGAISSIAQGLEWAGNNGMHVANLSLGSPSPSATLEQAVNSATSRGVLVVAASGNSGAGSISYPARYANAMAVGATDQNNNRASFSQYGAGLDIVAPGVNVQSTYPGSTYASLNGTSMATPHVAGAAVLVKQKNPSWSNVRIRNHLKNTATSLGSTNLYGSGLVNAEAATR

SEQ ID NO: 64744 - protein, 380 aa, Unidentified
VRSKKLWIVASTALLISVAFSSSIASAAEEAKEKYLIGFNEQEAVSEFVEQVEANDEVAILSEEEEVEIELLHEFETIPVLSVELSPEDVDALELDPAISYIEEDAEVTTMAQSVPWGISRVQAPAAHNRRLWGSGVKVAVLDTGISTHPDLNIRGGASFVPGEPSTQDGNGHGTHVAGTIAALNNSIGVLGVAPSAELYAVKVLGASGAGAISSIAQGLEWAGNNGMHVANLSLGSPSPSATLEQAVNSATSRGVLVVAASGNSGAGSISYPARYANAMAVGATDQDNNRASFSQYGAGLDLVAPGVNVQSTYPGSTYFSLNGTSMATPHVAGAAVLVKQKNPSWSNVRIRNHLKNTATSLGSTNLYGSGLVNAEAATR

SEQ ID NO: 64745 - protein, 380 aa, Unidentified
VRSKKLWIVASTALLISVAFSSSIASAAEEAKEKYLIGFNEQEAVSEFVEQVEANDEVAILSEEEEVEIELLHEFETIPVLSVELSPEDVDALELDPAISYIEEDAEVTTMAQSVPWGISRVQAPAAHNRRLWGSGVKVAVLDTGISTHPDLNIRGGASFVPGEPSTQDGNGHGTHVAGTIAALNNSIGVLGVAPSAELYAVKVLGASGAGAISSIAQGLEWAGNNGMHVANLSLGSPSPSATLEQAVNSATSRGVLVVAASGNSGAGSISYPARYANAMAVGATDQDNNRASFSQYGAGLDIVAPGVNVQSTYPGSAYFSLNGTSMATPHVAGAAVLVKQKNPSWSNVRIRNHLKNTATSLGSTNLYGSGLVNAEAATR

SEQ ID NO: 64746 - protein, 380 aa, Unidentified
VRSKKLWIVASTALLISVAFSSSIASAAEEAKEKYLIGFNEQEAVSEFVEQVEANDEVAILSEEEEVEIELLHEFETIPVLSVELSPEDVDALELDPAISYIEEDAEVTTMAQSVPWGISRVQAPAAHNRGLAGRGVKVAVLDTGISTHPDLNIRGGASFVPGEPSTQDGNGHGTHVAGTIAALNNSIGVLGVAPSAELYAVKVLGASGGGAISSIAQGLEWAGNNGMHVANLSLGSPSPSATLEQAVNSATSRGVLVVAASGNSGAGSISYPARYANAMAVGATDQNNNRADFSQYGAGLDIVAPGVNVQSTYPGSTYASLNGTSMATPHVAGAAVLVKQKNPSWSNVRIRDRLKNTATSLGSTNLYGSGLVNAEAATR

SEQ ID NO: 64747 - protein, 380 aa, Unidentified
VRSKKLWIVASTALLISVAFSSSIASAAEEAKEKYLIGFNEQEAVSEFVEQVEANDEVAILSEEEEVEIELLHEFETIPVLSVELSPEDVDALELDPAISYIEEDAEVTTMAQSVPWGISRTQAPAAHNRRLWGSGVKVAVLDTGISTHPDLNIRGGASFVPGEPSTQDGNGHGTHVAGTIAALNNSIGVLGVAPSAELYAVKVLGASGGGAISSIAQGLEWAGNNGMHVANLSLGSPSPSATLEQAVNSATSRGVLVVAASGNSGAGSISYPARYANAMAVGATDQNNNRASFSQYGAGLDIVAPGVNVQSTYPGSAYFSLNGTSMATPHVAGAAVLVKQKNPSWSNVRIRNHLKNTATSLGSTNLYGSGLVNAEAATR

SEQ ID NO: 64748 - protein, 380 aa, Unidentified
VRSKKLWIVASTALLISVAFSSSIASAAEEAKEKYLIGFNEQEAVSEFVEQVEANDEVAILSEEEEVEIELLHEFETIPVLSVELSPEDVDALELDPAISYIEEDAEVTTMAQSVPWGISRVQAPAAHNRGLTGRGVKVAVLDTGISTHPDLNIRGGASFVPGEPSTQDGNGHGTHVAGTIAALNNSIGVLGVAPSAELYAVKVLGASGGGAISSIAQGLEWAGNNGMHVANLSLGSESPSATLEQAVNSATSRGVLVVAASGNSGAGSISYPARYANAMAVGATDQNNNRADFSQYGAGLDIVAPGVNVQSTYPGSTYASLNGTSMATPHVAGAAVLVKQKNPSWSNVRIRDRLKNTATSLGSTNLYGSGLVNAEAATR

SEQ ID NO: 64749 - protein, 380 aa, Unidentified
VRSKKLWIVASTALLISVAFSSSIASAAEEAKEKYLIGFNEQEAVSEFVEQVEANDEVAILSEEEEVEIELLHEFETIPVLSVELSPEDVDALELDPAISYIEEDAEVTTMAQSVPWGISRVQAPAAHNRGLAGSGVKVAVLDTGISTHPDLNIRGGASFVPGEPSTQDGNGHGTHVAGTIAALNNSIGVLGVAPSAELYAVKVLGASGSGAISSIAQGLEWAGNNGMHVANLSLGSPSPSATLEQAVNSATSRGVLVVAASGNSGADSISYPARYANAMAVGATDQNNNRADFSQYGAGLDIVAPGVNVQSTYPGSTYASDNGTSMATPHVAGAAVLVKQKNPSWSNVRIRDHLKNTATSLGSTNLYGSGLVNAFAATR

SEQ ID NO: 64750 - protein, 380 aa, Unidentified
VRSKKLWIVASTALLISVAFSSSIASAAEEAKEKYLIGFNEQEAVSEFVEQVEANDEVAILSEEEEVEIELLHEFETIPVLSVELSPEDVDALELDPAISYIEEDAEVTTMAQSVPWGISRVQAPAAHNRGLAGSGVKVAVLDTGISTHPDLNIRGGASFVPGEPSTQDGNGHGTHVAGTIAALNNSIGVLGVAPSAELYAVKVLGASGGGAISSIAQGLEWAGNNGMHVANLSLGSPSPSATLEQAVNSATSRGVLVVAASGNSGADSISYPARYANAMAVGATDQNNNRASFSQYGAGLDIVAPGVNVQSTYPGSTYASENGTSMATPHVAGAAVLVKQKNPSWSNVRIRDHLKNTATSLGSTNLYGSGLVNAFAATR

SEQ ID NO: 64751 - protein, 380 aa, Unidentified
VRSKKLWIVASTALLISVAFSSSIASAAEEAKEKYLIGFNEQEAVSEFVEQVEANDEVAILSEEEEVEIELLHEFETIPVLSVELSPEDVDALELDPAISYIEEDAEVTTMAQSVPWGISRVQAPAAHRRGLTGSGVKVAVLDTGISTHPDLRITGGASFVPGEPSTQDGNGHGTHVAGTIAALDNSIGVLGVAPSAELYAVKVLGASGGGAISSIAQGLEWAGNNGMHVANLSLGSPSPSATLEQAVNSATSRGVLVVAASGNSGAGSISYPARYANAMAVGATDQNNNRASFSQYGAGLDIVAPGVNVQSTYPGSTYASLNGTSMATPHVAGAAVLVKQKNPSWSNVRIRNHLKNTATSLGSTNLYGSGLVRAEAATR

SEQ ID NO: 64752 - protein, 380 aa, Unidentified
VRSKKLWIVASTALLISVAFSSSIASAAEEAKEKYLIGFNEQEAVSEFVEQVEANDEVAILSEEEEVEIELLHEFETIPVLSVELSPEDVDALELDPAISYIEEDAEVTTMAQSVPWGISRVQAPAAHNRGLAGSGVKVAVLDTGISTHPDLNIRGGASFVPGEPSTQDGNGHGTHVAGTIAALNNSIGVLGVAPSAELYAVKVLGASGGGAISSIAQGLEWAGNNGMHVANLSLGSESPSATLEQAVNSATSRGVLVVAASGNSGAGSISYPARYANAMAVGATDQNNNRADFSQYGAGLDIVAPGVNVQSTYPGSTYASLNGTSMATPHVAGAAVLVKQKRPSWSNVRIRDHLKNTATSLGSTNLYGSGLVNAEAATR

SEQ ID NO: 64753 - protein, 380 aa, Unidentified
VRSKKLWIVASTALLISVAFSSSIASAAEEAKEKYLIGFNEQEAVSEFVEQVEANDEVAILSEEEEVEIELLHEFETIPVLSVELSPEDVDALELDPAISYIEEDAEVTTMAQSVPWGISRVQAPAAHNRGLTGSGVKVAVLDTGISTHPDLNIRGGASFVPGEPSTQDGNGHGTHVAGTIAALNNSIGVLGVAPSAELYAVKVLGASGGGAISSIAQGLEWAGNNGMHVANLSLGNESPSATLEQAVNSATSRGVLVVAASGNSGAGSISYPARYANAMAVGATDQNNNRADFSQYGAGLDIVAPGVNVQSTYPGSTYASLNGTSMATPHVAGAAVLVKQKNPSWSNVRIRDRLKNTATSLGSTNLYGSGLVNAEAATR

SEQ ID NO: 64754 - protein, 380 aa, Unidentified
VRSKKLWIVASTALLISVAFSSSIASAAEEAKEKYLIGFNEQEAVSEFVEQVEANDEVAILSEEEEVEIELLHEFETIPVLSVELSPEDVDALELDPAISYIEEDAEVTTMAQSVPWGISRVQAPAAHRRGLWGRGVKVAVLDTGISTHPDLNIRGGASFVPGEPSTQDGNGHGTHVAGTIAALDNSIGVLGVAPSAELYAVKVLGASGAGSVSSIAQGLEWAGNNGMHVANLSLGSPSPSATLEQAVNSATSRGVLVVAASGNSGAGSISYPARYANAMAVGATDQNNNRASFSQYGAGLDLVAPGVNVQSTYPQSAYFSLNGTSMATPHVAGAAALVKQKNPSWSNVQIRNRLKNTATSLGSTNLYGSGLVNAEAATR

SEQ ID NO: 64755 - protein, 380 aa, Unidentified
VRSKKLWIVASTALLISVAFSSSIASAAEEAKEKYLIGFNEQEAVSEFVEQVEANDEVAILSEEEEVEIELLHEFETIPVLSVELSPEDVDALELDPAISYIEEDAEVTTMAQSVPWGISRVQAPAAHRRGLTGSGVKVAVLDTGISTHPDLDIRGGASFVPGEPSTQDGNGHGTHVAGTIAALDNRIGVLGVAPSAELYAVKVLGASGGGAISSIAQGLEWAGNNGMHVANLSLGSPSPSATLEQAVNSATSRGVLVVAASGNSGAGSISYPARYANAMAVGATDQNNNRASFSQYGAGLDIVAPGVNVQSTYPGSTYASLNGTSMATPHVAGAAVLVKQKNPSWSNVRIRNRLKNTATSLGSTNLYGSGLVNAEAATR

SEQ ID NO: 64756 - protein, 380 aa, Unidentified
VRSKKLWIVASTALLISVAFSSSIASAAEEAKEKYLIGFNEQEAVSEFVEQVEANDEVAILSEEEEVEIELLHEFETIPVLSVELSPEDVDALELDPAISYIEEDAEVTTMAQSVPWGISRVQAPAAHNRRLWGSGVKVAVLDTGISTHPDLNIRGGASFVPGEPSTQDGNGHGTHVAGTIAALNNSIGVLGVAPSAELYAVKVLGASGAGAISSIAQGLEWAGNNGMHVANLSLGSPSPSATLEQAVNSATSRGVLVVAASGNSGAGSISYPARYANAMAVGATDQNNNRASFSQYGAGLDLVAPGVNVQSTYPQSTYFSLNGTSMATPHVAGAAVLVKQKNPSWSNVRIRNHLKNTATSLGSTNLYGSGLVNAEAATR

SEQ ID NO: 64757 - protein, 380 aa, Unidentified
VRSKKLWIVASTALLISVAFSSSIASAAEEAKEKYLIGFNEQEAVSEFVEQVEANDEVAILSEEEEVEIELLHEFETIPVLSVELSPEDVDALELDPAISYIEEDAEVTTMAQSVPWGISRVQAPAAHNRGLAGSGVKVAVLDTGISTHPDLNIRGGASFVPGEPSTQDGEGHGTHVAGTIAALNNSIGVLGVAPSAELYAVKVLGASGSGAISSIAQGLEWAGNNRMHVANLSLGSPSPSATLEQAVNSATSRGVLVVAASGNSGADSISYPARYANAMAVGATDQNNNRADFSQYGAGLDIVAPGVNVQSTYPGSTYASLNGTSMATPHVAGAAVLVKQKNPSWSNVRIRDHLKNTATSLGSTNLYGSGLVNAEAATR

SEQ ID NO: 64758 - protein, 380 aa, Unidentified
VRSKKLWIVASTALLISVAFSSSIASAAEEAKEKYLIGFNEQEAVSEFVEQVEANDEVAILSEEEEVEIELLHEFETIPVLSVELSPEDVDALELDPAISYIEEDAEVTTMAQSVPWGISRVQAPAAHRRGLWGRGVKVAVLDTGISTHPDLNIRGGASFVPGEPSTQDGNGHGTHVAGTIAALDNSIGVLGVAPSAELYAVKVLGASGAGSVSSIAQGLEWAGANGMHVANLSLGSPSPSATLEQAVNSATSRGVLVVAASGNSGAGSISYPARYANAMAVGATDQDNNRASFSQYGAGLDIVAPGVNVQSTYPQSAYASLNGTSMATPHVAGAAALVKQKNPSWSNVQIRNRLKNTATSLGSTNLYGSGLVNAEAATR

SEQ ID NO: 64759 - protein, 380 aa, Unidentified
VRSKKLWIVASTALLISVAFSSSIASAAEEAKEKYLIGFNEQEAVSEFVEQVEANDEVAILSEEEEVEIELLHEFETIPVLSVELSPEDVDALELDPAISYIEEDAEVTTMAQSVPWGISRVQAPAAHNRGLTGSGVKVAVLDTGISTHPDLNIRGGASFVPGEPSTQDGNGHGTHVAGTIAALDNSIGVLGVAPSAELYAVKVLGASGAGAISSIAQGLEWAGNNGMHVANLSLGSPSPSATLEQAVNSATSRGVLVVAASGNSGEGSISYPARYANAMAVGATDQNNNRADFSQYGAGLDIVAPGVNVQSTYPGSTYASLNGTSMATPHVAGAAVLVKQKNPSWSNVRIRDRLKNTATSLGSTNLYGSGLVNAEAATR

SEQ ID NO: 64760 - protein, 380 aa, Unidentified
VRSKKLWIVASTALLISVAFSSSIASAAEEAKEKYLIGFNEQEAVSEFVEQVEANDEVAILSEEEEVEIELLHEFETIPVLSVELSPEDVDALELDPAISYIEEDAEVTTMAQSVPWGISRVQAPAAHRRGLTGSGVKVAVLDTGISTHPDLDITGGASFVPGEPSTQDGNGHGTHVAGTIAALDNRIGVLGVAPSAELYAVKVLGASGGGAISSIAQGLEWAGNNGMHVANLSLGSPSPSATLEQAVNSATSRGVLVVAASGNSGAGSISYPARYANAMAVGATDQNNNRASFSQYGAGLDIVAPGVNVQSTYPGSTYASLNGTSMATPHVAGAAVLVKQKNPSWSNVRIRNHLKNTATSLGSTNLYGSGLVNAEAATR

SEQ ID NO: 64761 - protein, 380 aa, Unidentified
VRSKKLWIVASTALLISVAFSSSIASAAEEAKEKYLIGFNEQEAVSEFVEQVEANDEVAILSEEEEVEIELLHEFETIPVLSVELSPEDVDALELDPAISYIEEDAEVTTMAQSVPWGISRVQAPAAHRRGLTGRGVKVAVLDTGISTHPDLNIRGGASFVPGEPSTQDGNGHGTHVAGTIAALDNSIGVLGVAPSAELYAVKVLGASGAGSVSSIAQGLEWAGNNGMHVANLSLGSPSPSATLEQAVNSATSRGVLVVAASGNSGAGSISYPARYANAMAVGATDQDNNRASFSQYGAGLDLVAPGVNVQSTYPQSAYFSLNGTSMATPHVAGAAALVKQKNPSWSNVQIRNRLKNTATSLGSTNLYGSGLVNAEAATR

SEQ ID NO: 64762 - protein, 380 aa, Unidentified
VRSKKLWIVASTALLISVAFSSSIASAAEEAKEKYLIGFNEQEAVSEFVEQVEANDEVAILSEEEEVEIELLHEFETIPVLSVELSPEDVDALELDPAISYIEEDAEVTTMAQSVPWGISRVQAPAAHNRRLWGSGVKVAVLDTGISTHPDLNIRGGASFVPGEPSTQDGNGHGTHVAGTIAALNNSIGVLGVAPSAELYAVKVLGASGAGAISSIAQGLEWAGANGMHVANLSLGSPSPSATLEQAVNSATSRGVLVVAASGNSGAGSISYPARYANAMAVGATDQDNNRASFSQYGAGLDIVAPGVNVQSTYPGSAYASLNGTSMATPHVAGAAVLVKQKNPSWSNVRIRNHLKNTATSLGSTNLYGSGLVNAEAATR

SEQ ID NO: 64763 - protein, 380 aa, Unidentified
VRSKKLWIVASTALLISVAFSSSIASAAEEAKEKYLIGFNEQEAVSEFVEQVEANDEVAILSEEEEVEIELLHEFETIPVLSVELSPEDVDALELDPAISYIEEDAEVTTMAQSVPWGISRVQAPAAHRRRLTGRGVKVAVLDTGISTHPDLNIRGGASFVPGEPSTQDGNGHGTHVAGTIAALDNSIGVLGVAPSAELYAVKVLGASGSGSVSSIAQGLEWAGANGMHVANLSLGSPSPSATLEQAVNSATSRGVLVVAASGNSGAGSISYPARYANAMAVGATDQNNNRASFSQYGAGLDLVAPGVNVQSTYPQSTYFSLNGTSMATPHVAGAAALVKQKNPSWSNVQIRNRLKNTATSLGSTNLYGSGLVSAEAATR

SEQ ID NO: 64764 - protein, 380 aa, Unidentified
VRSKKLWIVASTALLISVAFSSSIASAAEEAKEKYLIGFNEQEAVSEFVEQVEANDEVAILSEEEEVEIELLHEFETIPVLSVELSPEDVDALELDPAISYIEEDAEVTTMAQSVPWGISRVQAPAAHRRRLTGRGVKVAVLDTGISTHPDLNIRGGASFVPGEPSTQDGNGHGTHVAGTIAALDNSIGVLGVAPSAELYAVKVLGASGAGSVSSIAQGLEWAGANGMHVANLSLGSPSPSATLEQAVNSATSRGVLVVAASGNSGAGSISYPARYANAMAVGATDQDNNRASFSQYGAGLDIVAPGVNVQSTYPQSAYASLNGTSMATPHVAGAAALVKQKNPSWSNVQIRNRLKNTATSLGSTNLYGSGLVNAEAATR

SEQ ID NO: 64765 - protein, 380 aa, Unidentified
VRSKKLWIVASTALLISVAFSSSIASAAEEAKEKYLIGFNEQEAVSEFVEQVEANDEVAILSEEEEVEIELLHEFETIPVLSVELSPEDVDALELDPAISYIEEDAEVTTMAQSVPWGISRVQAPAAHRRGLWGRGVKVAVLDTGISTHPDLNIRGGASFVPGEPSTQDGNGHGTHVAGTIAALDNSIGVLGVAPSAELYAVKVLGASGAGSVSSIAQGLEWAGANGMHVANLSLGSPSPSATLEQAVNSATSRGVLVVAASGNSGAGSISYPARYANAMAVGATDQNNNRASFSQYGAGLDIVAPGVNVQSTYPGSAYFSLNGTSMATPHVAGAAALVKQKNPSWSNVQIRNRLKNTATSLGSTNLYGSGIVNAEAATR

SEQ ID NO: 64766 - protein, 380 aa, Unidentified
VRSKKLWIVASTALLISVAFSSSIASAAEEAKEKYLIGFNEQEAVSEFVEQVEANDEVAILSEEEEVEIELLHEFETIPVLSVELSPEDVDALELDPAISYIEEDAEVTTMAQSVPWGISRVQAPAAHNRRLTGSGVKVAVLDTGISTHPDLNIRGGASFVPGEPSTQDGNGHGTHVAGTIAALNNRIGVLGVAPSAELYAVKVLGASGGGAISSIAQGLEWAGNNGMHVANLSLGSPSPSATLEQAVNSATSRGVLVVAASGNSGAGSISYPARYANAMAVGATDQNNNRASFSQYGAGLDIVAPGVNVQSTYPQSAYFSLNGTSMATPHVAGAAVLVKQKNPSWSNVRIRNHLKNTATSLGSTNLYGSGLVNAEAATR

SEQ ID NO: 64767 - protein, 380 aa, Unidentified
VRSKKLWIVASTALLISVAFSSSIASAAEEAKEKYLIGFNEQEAVSEFVEQVEANDEVAILSEEEEVEIELLHEFETIPVLSVELSPEDVDALELDPAISYIEEDAEVTTMAQSVPWGISRVQAPAAHNRGLAGSGVKVAVLDTGISTHPDLRIRGGASFVPGEPSTQDGNGHGTHVAGTIAALNNSIGVLGVAPSAELYAVKVLGASGGGAISSIAQGLEWAGNNGMHVANLSLGSPSPSATLEQAVNSATSRGVLVVAASGNSGADSISYPARYANAMAVGATDQNNNRASFSQYGAGLDIVAPGVNVQSTYPGSTYASLNGTSMATPHVAGAAVLVKQKNPSWSNVRIRDHLKNTATSLGSTNLYGSGLVNAFAATR

SEQ ID NO: 64768 - protein, 380 aa, Unidentified
VRSKKLWIVASTALLISVAFSSSIASAAEEAKEKYLIGFNEQEAVSEFVEQVEANDEVAILSEEEEVEIELLHEFETIPVLSVELSPEDVDALELDPAISYIEEDAEVTTMAQSVPWGISRVQAPAAHRRGLTGRGVKVAVLDTGISTHPDLNIRGGASFVPGEPSTQDGNGHGTHVAGTIAALDNSIGVLGVAPSAELYAVKVLGASGAGSVSSIAQGLEWAGANGMHVANLSLGSPSPSATLEQAVNSATSRGVLVVAASGNSGAGSISYPARYANAMAVGATDQDNNRASFSQYGAGLDIVAPGVNVQSTYPQSAYFSLNGTSMATPHVAGAAALVKQKNPSWSNVQIRNRLKNTATSLGSTNLYGSGLVNAEAATR

SEQ ID NO: 64769 - protein, 380 aa, Unidentified
VRSKKLWIVASTALLISVAFSSSIASAAEEAKEKYLIGFNEQEAVSEFVEQVEANDEVAILSEEEEVEIELLHEFETIPVLSVELSPEDVDALELDPAISYIEEDAEVTTMAQSVPWGISRVQAPAAHRRGLWGRGVKVAVLDTGISTHPDLNIRGGASFVPGEPSTQDGNGHGTHVAGTIAALDNSIGVLGVAPSAELYAVKVLGASGSGSVSSIAQGLEWAGANGMHVANLSLGSPSPSATLEQAVNSATSRGVLVVAASGNSGAGSISYPARYANAMAVGATDQNNNRASFSQYGAGLDLVAPGVNVQSTYPQSAYFSLNGTSMATPHVAGAAALVKQKNPSWSNVQIRNRLKNTATSLGSTNLYGSGLVNAEAATR

SEQ ID NO: 64770 - protein, 380 aa, Unidentified
VRSKKLWIVASTALLISVAFSSSIASAAEEAKEKYLIGFNEQEAVSEFVEQVEANDEVAILSEEEEVEIELLHEFETIPVLSVELSPEDVDALELDPAISYIEEDAEVTTMAQSVPWGISRVQAPAAHNHRLWGSGVKVAVLDTGISTHPDLNIRGGASFVPGEPSTQDGNGHGTHVAGTIAALNNRIGVLGVAPSAELYAVKVLGASGGGAISSIAQGLEWAGNNGMHVANLSLGSPSPSATLEQAVNSATSRGVLVVAASGNSGAGSISYPARYANAMAVGATDQNNNRASFSQYGAGLDIVAPGVNVQSTYPQSTYASLNGTSMATPHVAGAAVLVKQKNPSWSNVRIRNHLKNTATSLGSTNLYGSGLVNAEAATR

SEQ ID NO: 64771 - protein, 380 aa, Unidentified
VRSKKLWIVASTALLISVAFSSSIASAAEEAKEKYLIGFNEQEAVSEFVEQVEANDEVAILSEEEEVEIELLHEFETIPVLSVELSPEDVDALELDPAISYIEEDAEVTTMAQSVPWGISRVQAPAAHNRGLTGRGVKVAVLDTGISTHPDLNIRGGASFVPGEPSTQDGNGHGTHVAGTIAALNNSIGVLGVAPSAELYAVKVLGASGGGAISSIAQGLEWAGNNGMHVANLSLGNPSPSATLEQAVNSATSRGVLVVAASGNSGAESISYPARYANAMAVGATDQNNNRADFSQYGAGLDIVAPGVNVQSTYPGSTYASLNGTSMATPHVAGAAVLVKQKNPSWSNVRIRDHLKNTATSLGSTNLYGSGLVNAEAATR

SEQ ID NO: 64772 - protein, 380 aa, Unidentified
VRSKKLWIVASTALLISVAFSSSIASAAEEAKEKYLIGFNEQEAVSEFVEQVEANDEVAILSEEEEVEIELLHEFETIPVLSVELSPEDVDALELDPAISYIEEDAEVTTMAQSVPWGISRVQAPAAHNRGLTGSGVRVAVLDTGISTHPDLNITGGASFVPGEPSTQDGNGHGTHVAGTIAALDNRIGVLGVAPSAELYAVKVLGASGGGAISSIAQGLEWAGNNGMHVANLSLGSPSPSATLEQAVNSATSRGVLVVAASGNSGAGSISYPARYANAMAVGATDQNNNRASFSQYGAGLDIVAPGVNVQSTYPGSTYASLNGTSMATPHVAGAAVLVKQKNPSWSNVRIRNHLKNTATSLGSTNLYGSGLVRAEAATR

SEQ ID NO: 64773 - protein, 380 aa, Unidentified
VRSKKLWIVASTALLISVAFSSSIASAAEEAKEKYLIGFNEQEAVSEFVEQVEANDEVAILSEEEEVEIELLHEFETIPVLSVELSPEDVDALELDPAISYIEEDAEVTTMAQSVPWGISRVQAPAAHNRGLTGRGVKVAVLDTGISTHPDLNIRGGASFVPGEPSTQDGNGHGTHVAGTIAALNNSIGVLGVAPSAELYAVKVLGASGGGAISSIAQGLEWAGNNGMHVANLSLGSPSPSATLEQAVNSATSRGVLVVAASGNSGEESISYPARYANAMAVGATDQNNNRADFSQYGAGLDIVAPGVNVQSTYPGSTYASLNGTSMATPHVAGAAVLVKQKNPSWSNVRIRDHLKNTATSLGSTNLYGSGLVNAEAATR

SEQ ID NO: 64774 - protein, 380 aa, Unidentified
VRSKKLWIVASTALLISVAFSSSIASAAEEAKEKYLIGFNEQEAVSEFVEQVEANDEVAILSEEEEVEIELLHEFETIPVLSVELSPEDVDALELDPAISYIEEDAEVTTMAQSVPWGISRVQAPAAHNRRLWGSGVKVAVLDTGISTHPDLNIRGGASFVPGEPSTQDGNGHGTHVAGTIAALNNRIGVLGVAPSAELYAVKVLGASGAGAISSIAQGLEWAGANGMHVANLSLGSPSPSATLEQAVNSATSRGVLVVAASGNSGAGSISYPARYANAMAVGATDQDNNRASFSQYGAGLDIVAPGVNVQSTYPGSTYASLNGTSMATPHVAGAAVLVKQKNPSWSNVRIRNHLKNTATSLGSTNLYGSGLVNAEAATR

SEQ ID NO: 64775 - protein, 380 aa, Unidentified
VRSKKLWIVASTALLISVAFSSSIASAAEEAKEKYLIGFNEQEAVSEFVEQVEANDEVAILSEEEEVEIELLHEFETIPVLSVELSPEDVDALELDPAISYIEEDAEVTTMAQSVPWGISRVQAPAAHNRGLAGRGVKVAVLDTGISTHPDLNIRGGASFVPGEPSTQDGNGHGTHVAGTIAALNNSIGVLGVAPSAELYAVKVLGASGSGAISSIAQGLEWAGNNGMHVANLSLGSPSPSATLEQAVNSATSRGVLVVAASGNSGADSISYPARYANAMAVGATDQNNNRADFSQYGAGLDIVAPGVNVQSTYPGSTYASDNGTSMATPHVAGAAVLVKQKNPSWSNVQIRDHLKNTATSLGSTNLYGSGLVNAFAATR

SEQ ID NO: 64776 - protein, 380 aa, Unidentified
VRSKKLWIVASTALLISVAFSSSIASAAEEAKEKYLIGFNEQEAVSEFVEQVEANDEVAILSEEEEVEIELLHEFETIPVLSVELSPEDVDALELDPAISYIEEDAEVTTMAQSVPWGISRVQAPAAHNRRLTGSGVKVAVLDTGISTHPDLNIRGGASFVPGEPSTQDGNGHGTHVAGTIAALNNSIGVLGVAPSAELYAVKVLGASGGGAISSIAQGLEWAGANGMHVANLSLGSPSPSATLEQAVNSATSRGVLVVAASGNSGAGSISYPARYANAMAVGATDQDNNRASFSQYGAGLDIVAPGVNVQSTYPQSTYFSLNGTSMATPHVAGAAVLVKQKNPSWSNVRIRNHLKNTATSLGSTNLYGSGLVNAEAATR

SEQ ID NO: 64777 - protein, 380 aa, Unidentified
VRSKKLWIVASTALLISVAFSSSIASAAEEAKEKYLIGFNEQEAVSEFVEQVEANDEVAILSEEEEVEIELLHEFETIPVLSVELSPEDVDALELDPAISYIEEDAEVTTMAQSVPWGISRVQAPAAHNRGLAGSGVKVAVLDTGISTHPDLNIRGGASFVPGEPSTQDGNGHGTHVAGTIAALNNSIGVLGVAPSAELYAVKVLGASGGGAISSIAQGLEWAGNNGMHVANLSLGSPSPSATLEQAVNSATSRGVLVVAASGNSGEESISYPARYANAMAVGATDQNNNRASFSQYGAGLDIVAPGVNVQSTYPGSTYASLNGTSMATPHVAGAAVLVKQKRPSWSNVRIRDHLKNTATSLGSTNLYGSGLVNAEAATR

SEQ ID NO: 64778 - protein, 380 aa, Unidentified
VRSKKLWIVASTALLISVAFSSSIASAAEEAKEKYLIGFNEQEAVSEFVEQVEANDEVAILSEEEEVEIELLHEFETIPVLSVELSPEDVDALELDPAISYIEEDAEVTTMAQSVPWGISRVQAPAAHRRGLWGRGVKVAVLDTGISTHPDLNIRGGASFVPGEPSTQDGNGHGTHVAGTIAALDNSIGVLGVAPSAELYAVKVLGASGAGSVSSIAQGLEWAGANGMHVANLSLGSPSPSATLEQAVNSATSRGVLVVAASGNSGAGSISYPARYANAMAVGATDQDNNRASFSQYGAGLDLVAPGVNVQSTYPQSTYASLNGTSMATPHVAGAAALVKQKNPSWSNVQIRNRLKNTATSLGSTNLYGSGLVNAEAATR

SEQ ID NO: 64779 - protein, 380 aa, Unidentified
VRSKKLWIVASTALLISVAFSSSIASAAEEAKEKYLIGFNEQEAVSEFVEQVEANDEVAILSEEEEVEIELLHEFETIPVLSVELSPEDVDALELDPAISYIEEDAEVTTMAQSVPWGISRVQAPAAHNRGLTGRGVKVAVLDTGISTHPDLNIRGGASFVPGEPSTQDGNGHGTHVAGTIAALNNSIGVLGVAPSAELYAVKVLGASGGGAISSIAQGLEWAGNNGMHVANLSLGSPSPSATLEQAVNSATSRGVLVVAASGNSGAESISYPARYANAMAVGATDQNNNRADFSQYGAGLDIVAPGVNVQSTYPGSTYASLNGTSMATPHVAGAAVLVKQKNPSWSNVRIRDRLKNTATSLGSTNLYGSGLVNAEAATR

SEQ ID NO: 64780 - protein, 380 aa, Unidentified
VRSKKLWIVASTALLISVAFSSSIASAAEEAKEKYLIGFNEQEAVSEFVEQVEANDEVAILSEEEEVEIELLHEFETIPVLSVELSPEDVDALELDPAISYIEEDAEVTTMAQSVPWGISRVQAPAAHRRGLWGRGVKVAVLDTGISTHPDLNIRGGASFVPGEPSTQDGNGHGTHVAGTIAALDNSIGVLGVAPSAELYAVKVLGASGSGSVSSIAQGLEWAGANGMHVANLSLGSPSPSATLEQAVNSATSRGVLVVAASGNSGAGSISYPARYANAMAVGATDQDNNRASFSQYGAGLDLVAPGVNVQSTYPGSAYFSLNGTSMATPHVAGAAALVKQKNPSWSNVQIRNRLKNTATSLGSTNLYGSGLVNAEAATR

SEQ ID NO: 64781 - protein, 380 aa, Unidentified
VRSKKLWIVASTALLISVAFSSSIASAAEEAKEKYLIGFNEQEAVSEFVEQVEANDEVAILSEEEEVEIELLHEFETIPVLSVELSPEDVDALELDPAISYIEEDAEVTTMAQSVPWGISRVQAPAAHRRGLWGRGVKVAVLDTGISTHPDLNIRGGASFVPGEPSTQDGNGHGTHVAGTIAALDNSIGVLGVAPSAELYAVKVLGASGSGSVSSIAQGLEWAGANGMHVANLSLGSPSPSATLEQAVNSATSRGVLVVAASGNSGAGSISYPARYANAMAVGATDQDNNRASFSQYGAGLDLVAPGVNVQSTHPQSTYASLNGTSMATPHVAGAAALVKQKNPSWSNVQIRNRLKNTATSLGSTNLYGSGLVNAEAATR

SEQ ID NO: 64782 - protein, 380 aa, Unidentified
VRSKKLWIVASTALLISVAFSSSIASAAEEAKEKYLIGFNEQEAVSEFVEQVEANDEVAILSEEEEVEIELLHEFETIPVLSVELSPEDVDALELDPAISYIEEDAEVTTMAQSVPWGISRVQAPAAHRRRLWGRGVKVAVLDTGISTHPDLNIRGGASFVPGEPSTQDGNGHGTHVAGTIAALDNSIGVLGVAPSAELYAVKVLGASGAGSVSSIAQGLEWAGNNGMHVANLSLGSPSPSATLEQAVNSATSRGVLVVAASGNSGAGSISYPARYANAMAVGATDQNNNRASFSQYGAGLDIVAPGVNVQSTYPQSAYFSLNGTSMATPHVAGAAALVKQKNPSWSNVQIRNRLKNTATSLGSTNLYGSGLVNAEAATR

SEQ ID NO: 64783 - protein, 380 aa, Unidentified
VRSKKLWIVASTALLISVAFSSSIASAAEEAKEKYLIGFNEQEAVSEFVEQVEANDEVAILSEEEEVEIELLHEFETIPVLSVELSPEDVDALELDPAISYIEEDAEVTTMAQSVPWGISRVQAPAAHNRGLTGRGVKVAVLDTGISTHPDLNIRGGASFVPGEPSTQDGNGHGTHVAGTIAALNNSIGVLGVAPSAELYAVKVLGASGGGAISSIAQGLEWAGNNGMHVANLSLGSESPSATLEQAVNSATSRGVLVVAASGNSGAESISYPARYANAMAVGATDQNNNRASFSQYGAGLDIVAPGVNVQSTYPGSTYASLNGTSMATPHVAGAAVLVKQKRPSWSNVRIRDHLKNTATSLGSTNLYGSGLVNAEAATR

SEQ ID NO: 64784 - protein, 380 aa, Unidentified
VRSKKLWIVASTALLISVAFSSSIASAAEEAKEKYLIGFNEQEAVSEFVEQVEANDEVAILSEEEEVEIELLHEFETIPVLSVELSPEDVDALELDPAISYIEEDAEVTTMAQSVPWGISRVQAPAAHNRGLAGRGVKVAVLDTGISTHPDLNIRGGASFVPGEPSTQDGNGHGTHVAGTIAALNNSIGVLGVAPSAELYAVKVLGASGGGAISSIAQGLEWAGNNGMHVANLSLGSESPSATLEQAVNSATSRGVIVVAASGNSGAGSISYPARYANAMAVGATDQNNNRASFSQYGAGLDIVAPGVNVQSTYPGSTYASLNGTSMATPHVAGAAVLVKQKNPSWSNVRIRDHLKNTATSLGSTNLYGSGLVNAEAATR

SEQ ID NO: 64785 - protein, 380 aa, Unidentified
VRSKKLWIVASTALLISVAFSSSIASAAEEAKEKYLIGFNEQEAVSEFVEQVEANDEVAILSEEEEVEIELLHEFETIPVLSVELSPEDVDALELDPAISYIEEDAEVTTMAQSVPWGISRVQAPAAHRRRLWGRGVKVAVLDTGISTHPDLNIRGGASFVPGEPSTQDGNGHGTHVAGTIAALDNSIGVLGVAPSAELYAVKVLGASGSGSVSSIAQGLEWAGANGMHVANLSLGSPSPSATLEQAVNSATSRGVLVVAASGNSGAGSISYPARYANAMAVGATDQDNNRASFSQYGAGLDLVAPGVNVQSTYPGSAYASLNGTSMATPHVAGAAALVKQKNPSWSNVQIRNRLKNTATSLGSTNLYGSGLVNAEAATR

SEQ ID NO: 64786 - protein, 380 aa, Unidentified
VRSKKLWIVASTALLISVAFSSSIASAAEEAKEKYLIGFNEQEAVSEFVEQVEANDEVAILSEEEEVEIELLHEFETIPVLSVELSPEDVDALELDPAISYIEEDAEVTTMAQSVPWGISRVQAPAAHRRRLWGRGVKVAVLDTGISTHPDLNIRGGASFVPGEPSTQDGNGHGTHVAGTIAALDNSIGVLGVAPSAELYAVKVLGASGSGSVSSIAQGLEWAGANGMHVANLSLGSPSPSATLEQAVNSATSRGVLVVAASGNSGAGSISYPARYANAMAVGATDQNNNRASFSQYGAGLDLVAPGVNVQSTYPGSAYFSLNGTSMATPHVAGAAALVKQKNPSWSNVQIRNRLKNTATSLGSTNLYGSGLVNAEAATR

SEQ ID NO: 64787 - protein, 380 aa, Unidentified
VRSKKLWIVASTALLISVAFSSSIASAAEEAKEKYLIGFNEQEAVSEFVEQVEANDEVAILSEEEEVEIELLHEFETIPVLSVELSPEDVDALELDPAISYIEEDAEVTTMAQSVPWGISRVQAPAAHNRRLTGRGVKVAVLDTGISTHPDLDIRGGASFVPGEPSTQDGNGHGTHVAGTIAALDNRIGVLGVAPSAELYAVKVLGASGGGAISSIAQGLEWAGNNGMHVANLSLGSPSPSATLEQAVNSATSRGVLVVAASGNSGAGSISYPARYANAMAVGATDQNNNRASFSQYGAGLDIVAPGVNVQSTYPGSTYASLNGTSMATPHVAGAAVLVKQKNPSWSNVRIRNHLKNTATSLGSTNLYGSGLVNAEAATR

SEQ ID NO: 64788 - protein, 380 aa, Unidentified
VRSKKLWIVASTALLISVAFSSSIASAAEEAKEKYLIGFNEQEAVSEFVEQVEANDEVAILSEEEEVEIELLHEFETIPVLSVELSPEDVDALELDPAISYIEEDAEVTTMAQSVPWGISRVQAPAAHNRRLTGSGVKVAVLDTGISTHPDLNIRGGASFVPGEPSTQDGNGHGTHVAGTIAALNNSIGVLGVAPSAELYAVKVLGASGGGAISSIAQGLEWAGANGMHVANLSLGSPSPSATLEQAVNSATSRGVLVVAASGNSGAGSISYPARYANAMAVGATDQDNNRASFSQYGAGLDIVAPGVNVQSTYPQSAYASLNGTSMATPHVAGAAVLVKQKNPSWSNVRIRNHLKNTATSLGSTNLYGSGLVNAEAATR

SEQ ID NO: 64789 - protein, 380 aa, Unidentified
VRSKKLWIVASTALLISVAFSSSIASAAEEAKEKYLIGFNEQEAVSEFVEQVEANDEVAILSEEEEVEIELLHEFETIPVLSVELSPEDVDALELDPAISYIEEDAEVTTMAQSVPWGISRVQAPAAHNRGLAGRGVKVAVLDTGISTHPDLNIRGGASFVPGEPSTQDGNGHGTHVAGTIAALNNSIGVLGVAPSAELYAVKVLGASGDGAISSIAQGLEWAGNNGMHVANLSLGSPSPSATLEQAVNSATSRGVLVVAASGNSGADSISYPARYANAMAVGATDQNNNRADFSQYGAGLDIVAPGVNVQSTYPGSTYASLNGTSMATPHVAGAAVLVKQKNPSWSNVRIRDHLKNTATSLGSTNLYGSGLVNAEAATR

SEQ ID NO: 64790 - protein, 380 aa, Unidentified
VRSKKLWIVASTALLISVAFSSSIASAAEEAKEKYLIGFNEQEAVSEFVEQVEANDEVAILSEEEEVEIELLHEFETIPVLSVELSPEDVDALELDPAISYIEEDAEVTTMAQSVPWGISRVQAPAAHNRGLAGRGVKVAVLDTGISTHPDLNIRGGASFVPGEPSTQDGNGHGTHVAGTIAALNNSIGVLGVAPSAELYAVKVLGASGGGAISSIAQGLEWAGNNGMHVANLSLGSESPSATLEQAVNSATSRGVLVVAASGNSGEGSISYPARYANAMAVGATDQNNNRASFSQYGAGLDIVAPGVNVQSTYPGSTYASLNGTSMATPHVAGAAVLVKQKNPSWSNVRIRDHLKNTATSLGSTNLYGSGLVNAEAATR

SEQ ID NO: 64791 - protein, 380 aa, Unidentified
VRSKKLWIVASTALLISVAFSSSIASAAEEAKEKYLIGFNEQEAVSEFVEQVEANDEVAILSEEEEVEIELLHEFETIPVLSVELSPEDVDALELDPAISYIEEDAEVTTMAQSVPWGISRVQAPAAHNRRLWGSGVKVAVLDTGISTHPDLNIRGGASFVPGEPSTQDGNGHGTHVAGTIAALNNSIGVLGVAPSAELYAVKVLGASGAGAISSIAQGLEWAGANGMHVANLSLGSPSPSATLEQAVNSATSRGVLVVAASGNSGAGSISYPARYANAMAVGATDQNNNRASFSQYGAGLDIVAPGVNVQSTYPQSTYFSLNGTSMATPHVAGAAVLVKQKNPSWSNVRIRNHLKNTATSLGSTNLYGSGLVNAEAATR

SEQ ID NO: 64792 - protein, 380 aa, Unidentified
VRSKKLWIVASTALLISVAFSSSIASAAEEAKEKYLIGFNEQEAVSEFVEQVEANDEVAILSEEEEVEIELLHEFETIPVLSVELSPEDVDALELDPAISYIEEDAEVTTMAQSVPWGISRVQAPAAHNRRLTGSGVKVAVLDTGISTHPDLNITGGASFVPGEPSTQDGNGHGTHVAGTIAALDNRIGVLGVAPSAELYAVKVLGASGGGAISSIAQGLEWAGNNGMHVANLSLGSPSPSATLEQAVNSATSRGVLVVAASGNSGAGSISYPARYANAMAVGATDQNNNRASFSQYGAGLDIVAPGVNVQSTYPGSTYASLNGTSMATPHVAGAAVLVKQKNPSWSNVRIRNHLKNTATSLGSTNLYGSGLVRAEAATR

SEQ ID NO: 64793 - protein, 380 aa, Unidentified
VRSKKLWIVASTALLISVAFSSSIASAAEEAKEKYLIGFNEQEAVSEFVEQVEANDEVAILSEEEEVEIELLHEFETIPVLSVELSPEDVDALELDPAISYIEEDAEVTTMAQSVPWGISRVQAPAAHNRGLTGSGVKVAVLDTGISTHPDLNIRGGASFVPGEPSTQDGNGHGTHVAGTIAALNNSIGVLGVAPSAELYAVKVLGASGGGAISSIAQGLEWAGNNGMHVANLSLGSESPSATLEQAVNSATSRGVLVVAASGNSGEGSISYPARYANAMAVGATDQNNNRADFSQYGAGLDIVAPGVNVQSTYPGSTYASLNGTSMATPHVAGAAVLVKQKRPSWSNVRIRDHLKNTATSLGSTNLYGSGLVNAEAATR

SEQ ID NO: 64794 - protein, 380 aa, Unidentified
VRSKKLWIVASTALLISVAFSSSIASAAEEAKEKYLIGFNEQEAVSEFVEQVEANDEVAILSEEEEVEIELLHEFETIPVLSVELSPEDVDALELDPAISYIEEDAEVTTMAQSVPWGISRVQAPAAHNRRLTGSGVKVAVLDTGISTHPDLNITGGASFVPGEPSTQDGNGHGTHVAGTIAALDNRIGVLGVAPSAELYAVKVLGASGGGAISSIAQGLEWAGNNGMHVANLSLGSPSPSATLEQAVNSATSRGVLVVAASGNSGAGSISYPARYANAMAVGATDQNNNRASFSQYGAGLDIVAPGVNVQSTYPGSTYASLNGTSMATPHVAGAAVLVKQKNPSWSNVRIRNRLKNTATSLGSTNLYGSGLVNAEAATR

SEQ ID NO: 64795 - protein, 380 aa, Unidentified
VRSKKLWIVASTALLISVAFSSSIASAAEEAKEKYLIGFNEQEAVSEFVEQVEANDEVAILSEEEEVEIELLHEFETIPVLSVELSPEDVDALELDPAISYIEEDAEVTTMAQSVPWGISRVQAPAAHRRRLTGRGVKVAVLDTGISTHPDLNIRGGASFVPGEPSTQDGNGHGTHVAGTIAALDNSIGVLGVAPSAELYAVKVLGASGAGSVSSIAQGLEWAGANGMHVANLSLGSPSPSATLEQAVNSATSRGVLVVAASGNSGAGSISYPARYANAMAVGATDQNNNRASFSQYGAGLDIVAPGVNVQSTYPQSAYFSLNGTSMATPHVAGAAALVKQKNPSWSNVQIRNRLKNTATSLGSTNLYGSGLVNAEAATR

SEQ ID NO: 64796 - protein, 380 aa, Unidentified
VRSKKLWIVASTALLISVAFSSSIASAAEEAKEKYLIGFNEQEAVSEFVEQVEANDEVAILSEEEEVEIELLHEFETIPVLSVELSPEDVDALELDPAISYIEEDAEVTTMAQSVPWGISRVQAPAAHRRGLWGRGVKVAVLDTGISTHPDLNIRGGASFVPGEPSTQDGNGHGTHVAGTIAALDNSIGVLGVAPSAELYAVKVLGASGSGSVSSIAQGLEWAGANGMHVANLSLGSPSPSATLEQAVNSATSRGVLVVAASGNSGAGSISYPARYANAMAVGATDQDNNRASFSQYGAGLDLVAPGVNVQSTYPQSAYASLNGTSMATPHVAGAAALVKQKNPSWSNVQIRNRLKNTATSLGSTNLYGSGLVNAEAATR

SEQ ID NO: 64797 - protein, 380 aa, Unidentified
VRSKKLWIVASTALLISVAFSSSIASAAEEAKEKYLIGFNEQEAVSEFVEQVEANDEVAILSEEEEVEIELLHEFETIPVLSVELSPEDVDALELDPAISYIEEDAEVTTMAQSVPWGISRVQAPAAHNRRLTGSGVKVAVLDTGISTHPDLNIRGGASFVPGEPSTQDGNGHGTHVAGTIAALNNRIGVLGVAPSAELYAVKVLGASGAGAISSIAQGLEWAGANGMHVANLSLGSPSPSATLEQAVNSATSRGVLVVAASGNSGAGSISYPARYANAMAVGATDQDNNRASFSQYGAGLDIVAPGVNVQSTYPGSAYASLNGTSMATPHVAGAAVLVKQKNPSWSNVRIRNHLKNTATSLGSTNLYGSGLVNAEAATR

SEQ ID NO: 64798 - protein, 380 aa, Unidentified
VRSKKLWIVASTALLISVAFSSSIASAAEEAKEKYLIGFNEQEAVSEFVEQVEANDEVAILSEEEEVEIELLHEFETIPVLSVELSPEDVDALELDPAISYIEEDAEVTTMAQSVPWGISRVQAPAAHNRGLAGRGVKVAVLDTGISTHPDLNIRGGASFVPGEPSTQDGNGHGTHVAGTIAALNNSIGVLGVAPSAELYAVKVLGASGGGAISSIAQGLEWAGNNGMHVANLSLGNPSPSATLEQAVNSATSRGVLVVAASGNSGAGSISYPARYANAMAVGATDQNNNRADFSQYGAGLDIVAPGVNVQSTYPGSTYASLNGTSMATPHVAGAAVLVKQKNPSWSNVRIRDHLKNTATSLGSTNLYGSGLVNAEAATR

SEQ ID NO: 64799 - protein, 380 aa, Unidentified
VRSKKLWIVASTALLISVAFSSSIASAAEEAKEKYLIGFNEQEAVSEFVEQVEANDEVAILSEEEEVEIELLHEFETIPVLSVELSPEDVDALELDPAISYIEEDAEVTTMAQSVPWGISRVQAPAAHRRRLTGRGVKVAVLDTGISTHPDLNIRGGASFVPGEPSTQDGNGHGTHVAGTIAALDNSIGVLGVAPSAELYAVKVLGASGSGSVSSIAQGLEWAGANGMHVANLSLGSPSPSATLEQAVNSATSRGVLVVAASGNSGAGSISYPARYANAMAVGATDQDNNRASFSQYGAGLDLVAPGVNVQSTYPQSTYFSLNGTSMATPHVAGAAALVKQKNPSWSNVQIRNRLKNTATSLGSTNLYGSGLVNAEAATR

SEQ ID NO: 64800 - protein, 380 aa, Unidentified
VRSKKLWIVASTALLISVAFSSSIASAAEEAKEKYLIGFNEQEAVSEFVEQVEANDEVAILSEEEEVEIELLHEFETIPVLSVELSPEDVDALELDPAISYIEEDAEVTTMAQSVPWGISRVQAPAAHNRGLAGSGVKVAVLDTGISTHPDLRIRGGASFVPGEPSTQDGNGHGTHVAGTIAALNNSIGVLGVAPSAELYAVKVLGASGSGAISSIAQGLEWAGNNRMHVANLSLGSPSPSATLEQAVNSATSRGVLVVAASGNSGADSISYPARYANAMAVGATDQNNNRADFSQYGAGLDIVAPGVNVQSTYPGSTYASLNGTSMATPHVAGAAVLVKQKNPSWSNVQIRDHLKNTATSLGSTNLYGSGLVNAFAATR

SEQ ID NO: 64801 - protein, 380 aa, Unidentified
VRSKKLWIVASTALLISVAFSSSIASAAEEAKEKYLIGFNEQEAVSEFVEQVEANDEVAILSEEEEVEIELLHEFETIPVLSVELSPEDVDALELDPAISYIEEDAEVTTMAQSVPWGISRVQAPAAHNRGLAGRGVKVAVLDTGISTHPDLNIRGGASFVPGEPSTQDGNGHGTHVAGTIAALNNSIGVLGVAPSAELYAVKVLGASGSGAISSIAQGLEWAGNNRMHVANLSLGSPSPSATLEQAVNSATSRGVLVVAASGNSGADSISYPARYANAMAVGATDQNNNRADFSQYGAGLDIVAPGVNVQSTYPGSTYASDNGTSMATPHVAGAAVLVKQKNPSWSNVQIRDHLKNTATSLGSTNLYGSGLVNAEAATR

SEQ ID NO: 64802 - protein, 380 aa, Unidentified
VRSKKLWIVASTALLISVAFSSSIASAAEEAKEKYLIGFNEQEAVSEFVEQVEANDEVAILSEEEEVEIELLHEFETIPVLSVELSPEDVDALELDPAISYIEEDAEVTTMAQSVPWGISRVQAPAAHNRGLAGSGVKVAVLDTGISTHPDLNIRGGASFVPGEPSTQDGNGHGTHVAGTIAALNNSIGVLGVAPSAELYAVKVLGASGSGAISSIAQGLEWAGNNGMHVANLSLGIESPSATLEQAVNSATSRGVLVVAASGNSGADSISYPARYANAMAVGATDQNNNRADFSQYGAGLDIVAPGVNVQSTYPGSTYASLNGTSMATPHVAGAAVLVKQKNPSWSNVQIRDHLKNTATSLGSTNLYGSGLVNAFAATR

SEQ ID NO: 64803 - protein, 380 aa, Unidentified
VRSKKLWIVASTALLISVAFSSSIASAAEEAKEKYLIGFNEQEAVSEFVEQVEANDEVAILSEEEEVEIELLHEFETIPVLSVELSPEDVDALELDPAISYIEEDAEVTTMAQSVPWGISRVQAPAAHNRGLTGSGVKVAVLDTGISTHPDLNIRGGASFVPGEPSTQDGNGHGTHVAGTIAALNNSIGVLGVAPSAELYAVKVLGASGGGAISSIAQGLEWAGNNGMHVANLSLGSPSPSATLEQAVNSATSRGVLVVAASGNSGEGSISYPARYANAMAVGATDQDNNRADFSQYGAGLDIVAPGVNVQSTYPGSTYASLNGTSMATPHVAGAAVLVKQKNPSWSNVRIRDRLKNTATSLGSTNLYGSGLVNAEAATR

SEQ ID NO: 64804 - protein, 380 aa, Unidentified
VRSKKLWIVASTALLISVAFSSSIASAAEEAKEKYLIGFNEQEAVSEFVEQVEANDEVAILSEEEEVEIELLHEFETIPVLSVELSPEDVDALELDPAISYIEEDAEVTTMAQSVPWGISRVQAPAAHNRGLTGRGVKVAVLDTGISTHPDLNIRGGASFVPGEPSTQDGNGHGTHVAGTIAALNNSIGVLGVAPSAELYAVKVLGASGGGAISSIAQGLEWAGNNGMHVANLSLGSPSPSATLEQAVNSATSRGVLVVAASGNSGEGSISYPARYANAMAVGATDQNNNRADFSQYGAGLDIVAPGVNVQSTYPGSTYASLNGTSMATPHVAGAAVLVKQKRPSWSNVRIRDHLKNTATSLGSTNLYGSGLVNAEAATR

SEQ ID NO: 64805 - protein, 380 aa, Unidentified
VRSKKLWIVASTALLISVAFSSSIASAAEEAKEKYLIGFNEQEAVSEFVEQVEANDEVAILSEEEEVEIELLHEFETIPVLSVELSPEDVDALELDPAISYIEEDAEVTTMAQSVPWGISRVQAPAAHRRRLTGSGVKVAVLDTGISTHPDLDITGGASFVPGEPSTQDGNGHGTHVAGTIAALDNSIGVLGVAPSAELYAVKVLGASGGGAISSIAQGLEWAGNNGMHVANLSLGSPSPSATLEQAVNSATSRGVLVVAASGNSGAGSISYPARYANAMAVGATDQNNNRASFSQYGAGLDIVAPGVNVQSTYPGSTYASLNGTSMATPHVAGAAVLVKQKNPSWSNVRIRNHLKNTATSLGSTNLYGSGLVNAEAATR

SEQ ID NO: 64806 - protein, 380 aa, Unidentified
VRSKKLWIVASTALLISVAFSSSIASAAEEAKEKYLIGFNEQEAVSEFVEQVEANDEVAILSEEEEVEIELLHEFETIPVLSVELSPEDVDALELDPAISYIEEDAEVTTMAQSVPWGISRVQAPAAHRRRLTGRGVKVAVLDTGISTHPDLNIRGGASFVPGEPSTQDGNGHGTHVAGTIAALDNSIGVLGVAPSAELYAVKVLGASGSGSVSSIAQGLEWAGANGMHVANLSLGSPSPSATLEQAVNSATSRGVLVVAASGNSGAGSISYPARYANAMAVGATDQDNNRASFSQYGAGLDLVAPGVNVQSTYPQSAYASLNGTSMATPHVAGAAALVKQKNPSWSNVQIRNRLKNTATSLGSTNLYGSGLVNAEAATR

SEQ ID NO: 64807 - protein, 380 aa, Unidentified
VRSKKLWIVASTALLISVAFSSSIASAAEEAKEKYLIGFNEQEAVSEFVEQVEANDEVAILSEEEEVEIELLHEFETIPVLSVELSPEDVDALELDPAISYIEEDAEVTTMAQSVPWGISRVQAPAAHNRGLTGSGVKVAVLDTGISTHPDLRITGGASFVPGEPSTQDGNGHGTHVAGTIAALDNRIGVLGVAPSAELYAVKVLGASGGGAISSIAQGLEWAGNNGMHVANLSLGSPSPSATLEQAVNSATSRGVLVVAASGNSGAGSISYPARYANAMAVGATDQNNNRASFSQYGAGLDIVAPGVNVQSTYPGSTYASLNGTSMATPHVAGAAVLVKQKNPSWSNVRIRNHLKNTATSLGSTNLYGSGLVRAEAATR

SEQ ID NO: 64808 - protein, 380 aa, Unidentified
VRSKKLWIVASTALLISVAFSSSIASAAEEAKEKYLIGFNEQEAVSEFVEQVEANDEVAILSEEEEVEIELLHEFETIPVLSVELSPEDVDALELDPAISYIEEDAEVTTMAQSVPWGISRVQAPAAHRRRLWGRGVKVAVLDTGISTHPDLNIRGGASFVPGEPSTQDGNGHGTHVAGTIAALDNSIGVLGVAPSAELYAVKVLGASGSGSVSSIAQGLEWAGANGMHVANLSLGSPSPSATLEQAVNSATSRGVLVVAASGNSGAGSISYPARYANAMAVGATDQNNNRASFSQYGAGLDLVAPGVNVQSTYPQSTYFSLNGTSMATPHVAGAAALVKQKNPSWSNVQIRNRLKNTATSLGSTNLYGSGLVNAEAATR

SEQ ID NO: 64809 - protein, 380 aa, Unidentified
VRSKKLWIVASTALLISVAFSSSIASAAEEAKEKYLIGFNEQEAVSEFVEQVEANDEVAILSEEEEVEIELLHEFETIPVLSVELSPEDVDALELDPAISYIEEDAEVTTMAQSVPWGISRVQAPAAHRRGLTGRGVKVAVLDTGISTHPDLNIRGGASFVPGEPSTQDGNGHGTHVAGTIAALDNSIGVLGVAPSAELYAVKVLGASGAGSVSSIAQGLEWAGANGMHVANLSLGSPSPSATLEQAVNSATSRGVLVVAASGNSGAGSISYPARYANAMAVGATDQDNNRASFSQYGAGLDLVAPGVNVQSTYPQSAYASLNGTSMATPHVAGAAALVKQKNPSWSNVQIRNRLKNTATSLGSTNLYGSGLVNAEAATR

SEQ ID NO: 64810 - protein, 380 aa, Unidentified
VRSKKLWIVASTALLISVAFSSSIASAAEEAKEKYLIGFNEQEAVSEFVEQVEANDEVAILSEEEEVEIELLHEFETIPVLSVELSPEDVDALELDPAISYIEEDAEVTTMAQSVPWGISRVQAPAAHNRGLTGRGVKVAVLDTGISTHPDLNIRGGASFVPGEPSTQDGNGHGTHVAGTIAALNNSIGVLGVAPSAELYAVKVLGASGGGAISSIAQGLEWAGNNGMHVANLSLGSESPSATLEQAVNSATSRGVIVVAASGNSGEGSISYPARYANAMAVGATDQNNNRASFSQYGAGLDIVAPGVNVQSTYPGSTYASLNGTSMATPHVAGAAVLVKQKNPSWSNVRIRDHLKNTATSLGSTNLYGSGLVNAEAATR

SEQ ID NO: 64811 - protein, 380 aa, Unidentified
VRSKKLWIVASTALLISVAFSSSIASAAEEAKEKYLIGFNEQEAVSEFVEQVEANDEVAILSEEEEVEIELLHEFETIPVLSVELSPEDVDALELDPAISYIEEDAEVTTMAQSVPWGISRVQAPAAHNRGLTGRGVKVAVLDTGISTHPDLRITGGASFVPGEPSTQDGNGHGTHVAGTIAALNNRIGVLGVAPSAELYAVKVLGASGGGAISSIAQGLEWAGNNGMHVANLSLGSPSPSATLEQAVNSATSRGVLVVAASGNSGAGSISYPARYANAMAVGATDQNNNRASFSQYGAGLDIVAPGVNVQSTYPGSTYASENGTSMATPHVAGAAVLVKQKNPSWSNVRIRNHLKNTATSLGSTNLYGSGLVNAEAATR

SEQ ID NO: 64812 - protein, 380 aa, Unidentified
VRSKKLWIVASTALLISVAFSSSIASAAEEAKEKYLIGFNEQEAVSEFVEQVEANDEVAILSEEEEVEIELLHEFETIPVLSVELSPEDVDALELDPAISYIEEDAEVTTMAQSVPWGISRVQAPAAHKRGLTGSGVKVAVLDTGISTHPDLNIRGGASFVPGEPSTQDGNGHGTHVAGTIAALDNRIGVLGVAPSAELYAVKVLGASGGGAISSIAQGLEWAGNNGMHVANLSLGSPSPSATLEQAVNSATSRGVLVVAASGNSGAGSISYPARYANAMAVGATDQNNNRASFSQYGAGLDIVAPGVNVQSTYPGSTYASENGTSMATPHVAGAAVLVKQKNPSWSNVRIRNHLKNTATSLGSTNLYGSGLVRAEAATR

SEQ ID NO: 64813 - protein, 380 aa, Unidentified
VRSKKLWIVASTALLISVAFSSSIASAAEEAKEKYLIGFNEQEAVSEFVEQVEANDEVAILSEEEEVEIELLHEFETIPVLSVELSPEDVDALELDPAISYIEEDAEVTTMAQSVPWGISRVQAPAAHRRRLTGRGVKVAVLDTGISTHPDLNIRGGASFVPGEPSTQDGNGHGTHVAGTIAALDNSIGVLGVAPSAELYAVKVLGASGAGSVSSIAQGLEWAGANGMHVANLSLGSPSPSATLEQAVNSATSRGVLVVAASGNSGAGSISYPARYANAMAVGATDQDNNRASFSQYGAGLDLVAPGVNVQSTYPGSAYASLNGTSMATPHVAGAAALVKQKNPSWSNVQIRNRLKNTATSLGSTNLYGSGLVNAEAATR

SEQ ID NO: 64814 - protein, 380 aa, Unidentified
VRSKKLWIVASTALLISVAFSSSIASAAEEAKEKYLIGFNEQEAVSEFVEQVEANDEVAILSEEEEVEIELLHEFETIPVLSVELSPEDVDALELDPAISYIEEDAEVTTMAQSVPWGISRVQAPAAHRRRLTGRGVKVAVLDTGISTHPDLNIRGGASFVPGEPSTQDGNGHGTHVAGTIAALDNSIGVLGVAPSAELYAVKVLGASGAGSVSSIAQGLEWAGANGMHVANLSLGSPSPSATLEQAVNSATSRGVLVVAASGNSGAGSISYPARYANAMAVGATDQDNNRASFSQYGAGLDIVAPGVNVQSTYPQSTYFSLNGTSMATPHVAGAAALVKQKNPSWSNVQIRNRLKNTATSLGSTNLYGSGLVNAEAATR

SEQ ID NO: 64815 - protein, 380 aa, Unidentified
VRSKKLWIVASTALLISVAFSSSIASAAEEAKEKYLIGFNEQEAVSEFVEQVEANDEVAILSEEEEVEIELLHEFETIPVLSVELSPEDVDALELDPAISYIEEDAEVTTMAQSVPWGISRVQAPATHNRGLTGSGVKVAVLDTGISTHPDLRITGGASFVPGEPSTQDGNGHGTHVAGTIAALDNSIGVLGVAPSAELYAVKVLGASGGGAISSIAQGLEWAGNNGMHVANLSLGSPSPSATLEQAVNSATSRGVLVVAASGNSGAGSISYPARYANAMAVGATDQNNNRASFSQYGAGLDIVAPGVNVQSTYPGSTYASLNGTSMATPHVAGAAVLVKQKNPSWSNVRIRNHLKNTATSLGSTNLYGSGLVRAEAATR

SEQ ID NO: 64816 - protein, 380 aa, Unidentified
VRSKKLWIVASTALLISVAFSSSIASAAEEAKEKYLIGFNEQEAVSEFVEQVEANDEVAILSEEEEVEIELLHEFETIPVLSVELSPEDVDALELDPAISYIEEDAEVTTMAQSVPWGISRVQAPAAHNRRLWGSGVKVAVLDTGISTHPDLNIRGGASFVPGEPSTQDGNGHGTHVAGTIAALNNRIGVLGVAPSAELYAVKVLGASGGGAISSIAQGLEWAGANGMHVANLSLGSPSPSATLEQAVNSATSRGVLVVAASGNSGAGSISYPARYANAMAVGATDQDNNRASFSQYGAGLDIVAPGVNVQSTYPGSTYASLNGTSMATPHVAGAAVLVKQKNPSWSNVRIRNHLKNTATSLGSTNLYGSGLVNAEAATR

SEQ ID NO: 64817 - protein, 380 aa, Unidentified
VRSKKLWIVASTALLISVAFSSSIASAAEEAKEKYLIGFNEQEAVSEFVEQVEANDEVAILSEEEEVEIELLHEFETIPVLSVELSPEDVDALELDPAISYIEEDAEVTTMAQSVPWGISRVQAPAAHRRRLWGRGVKVAVLDTGISTHPDLNIRGGASFVPGEPSTQDGNGHGTHVAGTIAALDNSIGVLGVAPSAELYAVKVLGASGAGSVSSIAQGLEWAGANGMHVANLSLGSPSPSATLEQAVNSATSRGVLVVAASGNSGAGSISYPARYANAMAVGATDQDNNRASFSQYGAGLDLVAPGVNVQSTYPGSTYASLNGTSMATPHVAGAAALVKQKNPSWSNVQIRNRLKNTATSLGSTNLYGSGLVNAEAATR

SEQ ID NO: 64818 - protein, 380 aa, Unidentified
VRSKKLWIVASTALLISVAFSSSIASAAEEAKEKYLIGFNEQEAVSEFVEQVEANDEVAILSEEEEVEIELLHEFETIPVLSVELSPEDVDALELDPAISYIEEDAEVTTMAQSVPWGISRVQAPAAHNRRLWGSGVKVAVLDTGISTHPDLNIRGGASFVPGEPSTQDGNGHGTHVAGTIAALNNSIGVLGVAPSAELYAVKVLGASGAGAISSIAQGLEWAGANGMHVANLSLGSPSPSATLEQAVNSATSRGVLVVAASGNSGAGSISYPARYANAMAVGATDQDNNRASFSQYGAGLDIVAPGVNVQSTYPGSTYASLNGTSMATPHVAGAAVLVKQKNPSWSNVRIRNHLKNTATSLGSTNLYGSGLVNAEAAIR

SEQ ID NO: 64819 - protein, 380 aa, Unidentified
VRSKKLWIVASTALLISVAFSSSIASAAEEAKEKYLIGFNEQEAVSEFVEQVEANDEVAILSEEEEVEIELLHEFETIPVLSVELSPEDVDALELDPAISYIEEDAEVTTMAQSVPWGISRVQAPAAHNRGLTGSGVKVAVLDTGISTHPDLNIRGGASFVPGEPSTQDGNGHGTHVAGTIAALNNSIGVLGVAPSAELYAVKVLGASGGGAISSIAQGLEWAGNNGMHVANLSLGSESPSATLEQAVNSATSRGVLVVAASGNSGEESISYPARYANAMAVGATDQNNNRASFSQYGAGLDIVAPGVNVQSTYPGSTYASLNGTSMATPHVAGAAVLVKQKNPSWSNVRIRDRLKNTATSLGSTNLYGSGLVNAEAATR

SEQ ID NO: 64820 - protein, 380 aa, Unidentified
VRSKKLWIVASTALLISVAFSSSIASAAEEAKEKYLIGFNEQEAVSEFVEQVEANDEVAILSEEEEVEIELLHEFETIPVLSVELSPEDVDALELDPAISYIEEDAEVTTMAQSVPWGISRVQAPAAHNRRLTGSGVKVAVLDTGISTHPDLNIRGGASFVPGEPSTQDGNGHGTHVAGTIAALNNRIGVLGVAPSAELYAVKVLGASGAGAISSIAQGLEWAGANGMHVANLSLGSPSPSATLEQAVNSATSRGVLVVAASGNSGAGSISYPARYANAMAVGATDQDNNRASFSQYGAGLDIVAPGVNVQSTYPQSTYASLNGTSMATPHVAGAAVLVKQKNPSWSNVRIRNHLKNTATSLGSTNLYGSGLVNAEAATR

SEQ ID NO: 64821 - protein, 380 aa, Unidentified
VRSKKLWIVASTALLISVAFSSSIASAAEEAKEKYLIGFNEQEAVSEFVEQVEANDEVAILSEEEEVEIELLHEFETIPVLSVELSPEDVDALELDPAISYIEEDAEVTTMAQSVPWGISRVQAPAAHNRRLTGSGVKVAVLDTGISTHPDLNIRGGASFVPGEPSTQDGNGHGTHVAGTIAALNNSIGVLGVAPSAELYAVKVLGASGAGAISSIAQGLEWAGANGMHVANLSLGSPSPSATLEQAVNSATSRGVLVVAASGNSGAGSISYPARYANAMAVGATDQDNNRASFSQYGAGLDIVAPGVNVQSTYPQSTYASLNGTSMATPHVAGAAVLVKQKNPSWSNVRIRNHLKNTATSLGSTNLYGSGLVNAEAAIR

SEQ ID NO: 64822 - protein, 380 aa, Unidentified
VRSKKLWIVASTALLISVAFSSSIASAAEEAKEKYLIGFNEQEAVSEFVEQVEANDEVAILSEEEEVEIELLHEFETIPVLSVELSPEDVDALELDPAISYIEEDAEVTTMAQSVPWGISRVQAPAAHNRRLTGRGVKVAVLDTGISTHPDLNIRGGASFVPGEPSTQDGNGHGTHVAGTIAALDNRIGVLGVAPSAELYAVKVLGASGGGAISSIAQGLEWAGNNGMHVANLSLGSPSPSATLEQAVNSATSRGVLVVAASGNSGAGSISYPARYANAMAVGATDQNNNRASFSQYGAGLDIVAPGVNVQSTYPGSTYASLNGTSMATPHVAGAAVLVKQKNPSWSNVRIRNRLKNTATSLGSTNLYGSGLVNAEAATR

SEQ ID NO: 64823 - protein, 380 aa, Unidentified
VRSKKLWIVASTALLISVAFSSSIASAAEEAKEKYLIGFNEQEAVSEFVEQVEANDEVAILSEEEEVEIELLHEFETIPVLSVELSPEDVDALELDPAISYIEEDAEVTTMAQSVPWGISRVQAPAAHRRGLTGRGVKVAVLDTGISTHPDLNITGGASFVPGEPSTQDGNGHGTHVAGTIAALDNSIGVLGVAPSAELYAVKVLGASGGGAISSIAQGLEWAGNNGMHVANLSLGSPSPSATLEQAVNSATSRGVLVVAASGNSGAGSISYPARYANAMAVGATDQNNNRASFSQYGAGLDIVAPGVNVQSTYPGSTYASLNGTSMATPHVAGAAVLVKQKNPSWSNVRIRNRLKNTATSLGSTNLYGSGLVNAEAATR

SEQ ID NO: 64824 - protein, 380 aa, Unidentified
VRSKKLWIVASTALLISVAFSSSIASAAEEAKEKYLIGFNEQEAVSEFVEQVEANDEVAILSEEEEVEIELLHEFETIPVLSVELSPEDVDALELDPAISYIEEDAEVTTMAQSVPWGISRVQAPAAHNRGLTGRGVKVAVLDTGISTHPDLNIRGGASFVPGEPSTQDGNGHGTHVAGTIAALNNSIGVLGVAPSAELYAVKVLGASGGGAISSIAQGLEWAGNNGMHVANLSLGSPSPSATLEQAVNSATSRGVIVVAASGNSGEGSISYPARYANAMAVGATDQNNNRADFSQYGAGLDIVAPGVNVQSTYPGSTYASLNGTSMATPHVAGAAVLVKQKNPSWSNVRIRDHLKNTATSLGSTNLYGSGLVNAEAATR

SEQ ID NO: 64825 - protein, 380 aa, Unidentified
VRSKKLWIVASTALLISVAFSSSIASAAEEAKEKYLIGFNEQEAVSEFVEQVEANDEVAILSEEEEVEIELLHEFETIPVLSVELSPEDVDALELDPAISYIEEDAEVTTMAQSVPWGISRVQAPAAHRRRLTGSGVKVAVLDTGISTHPDLNITGGASFVPGEPSTQDGNGHGTHVAGTIAALDNSIGVLGVAPSAELYAVKVLGASGGGAISSIAQGLEWAGNNGMHVANLSLGSPSPSATLEQAVNSATSRGVLVVAASGNSGAGSISYPARYANAMAVGATDQNNNRASFSQYGAGLDIVAPGVNVQSTYPGSTYASLNGTSMATPHVAGAAVLVKQKNPSWSNVRIRNRLKNTATSLGSTNLYGSGLVNAEAATR

SEQ ID NO: 64826 - protein, 380 aa, Unidentified
VRSKKLWIVASTALLISVAFSSSIASAAEEAKEKYLIGFNEQEAVSEFVEQVEANDEVAILSEEEEVEIELLHEFETIPVLSVELSPEDVDALELDPAISYIEEDAEVTTMAQSVPWGISRVQAPAAHNRGLAGRGVKVAVLDTGISTHPDLNIRGGASFVPGEPSTQDGNGHGTHVAGTIAALNNSIGVLGVAPSAELYAVKVLGASGGGAISSIAQGLEWAGNNGMHVANLSLGSESPSATLEQAVNSATSRGVLVVAASGNSGAGSISYPARYANAMAVGATDQNNNRASFSQYGAGLDIVAPGVNVQSTYPGSTYASLNGTSMATPHVAGAAVLVKQKNPSWSNVRIRDRLKNTATSLGSTNLYGSGLVNAEAATR

SEQ ID NO: 64827 - protein, 380 aa, Unidentified
VRSKKLWIVASTALLISVAFSSSIASAAEEAKEKYLIGFNEQEAVSEFVEQVEANDEVAILSEEEEVEIELLHEFETIPVLSVELSPEDVDALELDPAISYIEEDAEVTTMAQSVPWGISRVQAPAAHRRRLTGRGVKVAVLDTGISTHPDLNIRGGASFVPGEPSTQDGNGHGTHVAGTIAALDNSIGVLGVAPSAELYAVKVLGASGAGSVSSIAQGLEWAGNNGMHVANLSLGSPSPSATLEQAVNSATSRGVLVVAASGNSGAGSISYPARYANAMAVGATDQDNNRASFSQYGAGLDLVAPGVNVQSTYPQSTYFSLNGTSMATPHVAGAAALVKQKNPSWSNVQIRNRLKNTATSLGSTNLYGSGLVNAEAATR

SEQ ID NO: 64828 - protein, 380 aa, Unidentified
VRSKKLWIVASTALLISVAFSSSIASAAEEAKEKYLIGFNEQEAVSEFVEQVEANDEVAILSEEEEVEIELLHEFETIPVLSVELSPEDVDALELDPAISYIEEDAEVTTMAQSVPWGISRVQAPAAHNRGLAGSGVKVAVLDTGISTHPDLNIRGGASFVPGEPSTQDGNGHGTHVAGTIAALNNSIGVLGVAPSAELYAVKVLGASGGGAISSIAQGLEWAGNNGMHVANLSLGSPSPSATLEQAVNSATSRGVLVVAASGNSGEESISYPARYANAMAVGATDQNNNRASFSQYGAGLDIVAPGVNVQSTYPGSTYASLNGTSMATPHVAGAAVLVKQKNPSWSNVRIRDRLKNTATSLGSTNLYGSGLVNAEAATR

SEQ ID NO: 64829 - protein, 380 aa, Unidentified
VRSKKLWIVASTALLISVAFSSSIASAAEEAKEKYLIGFNEQEAVSEFVEQVEANDEVAILSEEEEVEIELLHEFETIPVLSVELSPEDVDALELDPAISYIEEDAEVTTMAQSVPWGISRVQAPAAHNRGLAGRGVKVAVLDTGISTHPDLNIRGGASFVPGEPSTQDGNGHGTHVAGTIAALNNSIGVLGVAPSAELYAVKVLGASGGGAISSIAQGLEWAGNNGMHVANLSLGSPSPSATLEQAVNSATSRGVLVVAASGNSGEGSISYPARYANAMAVGATDQNNNRADFSQYGAGLDIVAPGVNVQSTYPGSTYASLNGTSMATPHVAGAAVLVKQKNPSWSNVRIRDHLKNTATSLGSTNLYGSGLVNAEAATR

SEQ ID NO: 64830 - protein, 380 aa, Unidentified
VRSKKLWIVASTALLISVAFSSSIASAAEEAKEKYLIGFNEQEAVSEFVEQVEANDEVAILSEEEEVEIELLHEFETIPVLSVELSPEDVDALELDPAISYIEEDAEVTTMAQSVPWGISRVQAPAAHRRGLTGRGVKVAVLDTGISTHPDLNIRGGASFVPGEPSTQDGNGHGTHVAGTIAALDNSIGVLGVAPSAELYAVKVLGASGAGSVSSIAQGLEWAGANGMHVANLSLGSPSPSATLEQAVNSATSRGVLVVAASGNSGAGSISYPARYANAMAVGATDQDNNRASFSQYGAGLDLVAPGVNVQSTYPGSAYASLNGTSMATPHVAGAAALVKQKNPSWSNVQIRNRLKNTATSLGSTNLYGSGLVSAEAATR

SEQ ID NO: 64831 - protein, 380 aa, Unidentified
VRSKKLWIVASTALLISVAFSSSIASAAEEAKEKYLIGFNEQEAVSEFVEQVEANDEVAILSEEEEVEIELLHEFETIPVLSVELSPEDVDALELDPAISYIEEDAEVTTMAQSVPWGISRVQAPAAHRRRLWGRGVKVAVLDTGISTHPDLNIRGGASFVPGEPSTQDGNGHGTHVAGTIAALDNSIGVLGVAPSAELYAVKVLGASGAGSVSSIAQGLEWAGNNGMHVANLSLGSPSPSATLEQAVNSATSRGVLVVAASGNSGAGSISYPARYANAMAVGATDQNNNRASFSQYGAGLDLVAPGVNVQSTYPQSTYFSLNGTSMATPHVAGAAALVKQKNPSWSNVQIRNRLKNTATSLGSTNLYGSGLVNAEAATR

SEQ ID NO: 64832 - protein, 380 aa, Unidentified
VRSKKLWIVASTALLISVAFSSSIASAAEEAKEKYLIGFNEQEAVSEFVEQVEANDEVAILSEEEEVEIELLHEFETIPVLSVELSPEDVDALELDPAISYIEEDAEYTTMAQSVPWGISRVQAPAAHNRGLTGSGVKVAVLDTGISTHPDLNIRGGASFVPGEPSTQDGNGHGTHVAGTIAALNNSIGVLGVAPSAELYAVKVLGASGGGAISSIAQGLEWAGNNGMHVANLSLGSPSPSATLEQAVNSATSRGVLVVAASGNSGADSISYPARYANAMAVGATDQNNNRASFSQYGAGLDIVAPGVNVQSTYPGSTYASLNGTSMATPHVAGAAVLVKHKNPSWSNVRIRDHLKKTATSLGSTNLYGSGLVNAEAATR

SEQ ID NO: 64833 - protein, 380 aa, Unidentified
VRSKKLWIVASTALLISVAFSSSIASAAEEAKEKYLIGFNEQEAVSEFVEQVEANDEVAILSEEEEVEIELLHEFETIPVLSVELSPEDVDALELDPAISYIEEDAEVTTMAQSVPWGISRVQAPAAHNRRLWGSGVKVAVLDTGISTHPDLNIRGGASFVPGEPSTQDGNGHGTHVAGTIAALNNSIGVLGVAPSAELYAVKVLGASGAGAISSIAQGLEWAGANGMHVANLSLGSPSPSATLEQAVNSATSRGVLVVAASGNSGAGSISYPARYANAMAVGATDQDNNRASFSQYGAGLDIVAPGVNVQSTYPGSTYASLNGTSMATPHVAGAAVLVKQKNPSWSNVRIRNHLKNTATSLGSTNLYGSGLVSAEAATR

SEQ ID NO: 64834 - protein, 380 aa, Unidentified
VRSKKLWIVASTALLISVAFSSSIASAAEEAKEKYLIGFNEQEAVSEFVEQVEANDEVAILSEEEEVEIELLHEFETIPVLSVELSPEDVDALELDPAISYIEEDAEVTTMAQSVPWGISRVQAPAAHRRGLTGSGVKVAVLDTGISTHPDLDITGGASFVPGEPSTQDGNGHGTHVAGTIAALNNRIGVLGVAPSAELYAVKVLGASGGGAISSIAQGLEWAGNNGMHVANLSLGSPSPSATLEQAVNSATSRGVLVVAASGNSGAGSISYPARYANAMAVGATDQNNNRASFSQYGAGLDIVAPGVNVQSTYPGSTYASLNGTSMATPHVAGAAVLVKQKNPSWSNVRIRNHLKNTATSLGSTNLYGSGLVNAEDATR

SEQ ID NO: 64835 - protein, 380 aa, Unidentified
VRSKKLWIVASTALLISVAFSSSIASAAEEAKEKYLIGFNEQEAVSEFVEQVEANDEVAILSEEEEVEIELLHEFETIPVLSVELSPEDVDALELDPAISYIEEDAEVTTMAQSVPWGISRVQAPAAHRRGLWGRGVKVAVLDTGISTHPDLNIRGGASFVPGEPSTQDGNGHGTHVAGTIAALDNSIGVLGVAPSAELYAVKVLGASGAGSVSSIAQGLEWAGANGMHVANLSLGSPSPSATLEQAVNSATSRGVLVVAASGNSGAGSISYPARYANAMAVGATDQDNNRASFSQYGAGLDIVAPGVNVQSTYPGSAYFSLNGTSMATPHVAGAAALVKQKNPSWSNVQIRNRLKNTATSLGSTNLYGSGLVNAEAATR

SEQ ID NO: 64836 - protein, 380 aa, Unidentified
VRSKKLWIVASTALLISVAFSSSIASAAEEAKEKYLIGFNEQEAVSEFVEQVEANDEVAILSEEEEVEIELLHEFETIPVLSVELSPEDVDALELDPAISYIEEDAEVTTMAQSVPWGISRVQAPAAHNRGLAGRGVKVAVLDTGISTHPDLNIRGGASFVPGEPSTQDGNGHGTHVAGTIAALNNSIGVLGVAPSAELYAVKVLGASGGGAISSIAQGLEWAGNNGMHVANLSLGSPSPSATLEQAVNSATSRGVLVVAASGNSGEGSISYPARYANAMAVGATDQNNNRASFSQYGAGLDIVAPGVNVQSTYPGSTYASLNGTSMATPHVAGAAVLVKQKRPSWSNVRIRDHLKNTATSLGSTNLYGSGLVNAEAATR

SEQ ID NO: 64837 - protein, 380 aa, Unidentified
VRSKKLWIVASTALLISVAFSSSIASAAEEAKEKYLIGFNEQEAVSEFVEQVEANDEVAILSEEEEVEIELLHEFETIPVLSVELSPEDVDALELDPAISYIEEDAEVTTMAQSVPWGISRVQAPAAHRRGLWGRGVKVAVLDTGISTHPDLNIRGGASFVPGEPSTQDGNGHGTHVAGTIAALDNSIGVLGVAPSAELYAVKVLGASGAGSVSSIAQGLEWAGANGMHVANLSLGSPSPSATLEQAVNSATSRGVLVVAASGNSGAGSISYPARYANAMAVGATDQDNNRASFSQYGAGLDLVAPGVNVQSTYPGSAYASLNGTSMATPHVAGAAALVKQKNPSWSNVQIRNRLKNTATSLGSTNLYGSGLVNAEAATR

SEQ ID NO: 64838 - protein, 380 aa, Unidentified
VRSKKLWIVASTALLISVAFSSSIASAAEEAKEKYLIGFNEQEAVSEFVEQVEANDEVAILSEEEEVEIELLHEFETIPVLSVELSPEDVDALELDPAISYIEEDAEVTTMAQSVPWGISRVQAPAAHNRGLAGRGVKVAVLDTGISTHPDLNIRGGASFVPGEPSTQDGNGHGTHVAGTIAALNNSIGVLGVAPSAELYAVKVLGASGGGAISSIAQGLEWAGNNGMHVANLSLGSPSPSATLEQAVNSATSRGVIVVAASGNSGEGSISYPARYANAMAVGATDQNNNRASFSQYGAGLDIVAPGVNVQSTYPGSTYASLNGTSMATPHVAGAAVLVKQKNPSWSNVRIRDHLKNTATSLGSTNLYGSGLVNAEAATR

SEQ ID NO: 64839 - protein, 380 aa, Unidentified
VRSKKLWIVASTALLISVAFSSSIASAAEEAKEKYLIGFNEQEAVSEFVEQVEANDEVAILSEEEEVEIELLHEFETIPVLSVELSPEDVDALELDPAISYIEEDAEVTTMAQSVPWGISRVQAPAAHNRGLTGRGVKVAVLDTGISTHPDLNIRGGASFVPGEPSTQDGNGHGTHVAGTIAALNNSIGVLGVAPSAELYAVKVLGASGGGAISSIAQGLEWAGNNGMHVANLSLGSESPSATLEQAVNSATSRGVLVVAASGNSGAGSISYPARYANAMAVGATDQNNNRADFSQYGAGLDIVAPGVNVQSTYPGSTYASLNGTSMATPHVAGAAVLVKQKRPSWSNVRIRDHLKNTATSLGSTNLYGSGLVNAEAATR

SEQ ID NO: 64840 - protein, 380 aa, Unidentified
VRSKKLWIVASTALLISVAFSSSIASAAEEAKEKYLIGFNEQEAVSEFVEQVEANDEVAILSEEEEVEIELLHEFETIPVLSVELSPEDVDALELDPAISYIEEDAEVTTMAQSVPWGISRVQAPAAHRRGLTGSGVKVAVLDTGISTHPDLRIRGGASFVPGEPSTQDGNGHGTHVAGTIAALDNRIGVLGVAPSAELYAVKVLGASGGGAISSIAQGLEWAGNNGMHVANLSLGSPSPSATLEQAVNSATSRGVLVVAASGNSGAGSISYPARYANAMAVGATDQNNNRASFSQYGAGLDIVAPGVNVQSTYPGSTYASLNGTSMATPHVAGAAVLVKQKNPSWSNVRIRNHLKNTATSLGSTNLYGSGLVRAEAATR

SEQ ID NO: 64841 - protein, 380 aa, Unidentified
VRSKKLWIVASTALLISVAFSSSIASAAEEAKEKYLIGFNEQEAVSEFVEQVEANDEVAILSEEEEVEIELLHEFETIPVLSVELSPEDVDALELDPAISYIEEDAEVTTMAQSVPWGISRVQAPAAHNRGLAGSGVKVAVLDTGISTHPDLNIRGGASFVPGEPSTQDGNGHGTHVAGTIAALNNSIGVLGVAPSAELYAVKVLGASGGGAISSIAQGLEWAGNNGMHVANLSLGSPSPSATLEQAVNSATSRGVLVVAASGNSGAESISYPARYANAMAVGATDQNNNRADFSQYGAGLDIVAPGVNVQSTYPGSTYASLNGTSMATPHVAGAAVLVKQKNPSWSNVRIRDRLKNTATSLGSTNLYGSGLVNAEAATR

SEQ ID NO: 64842 - protein, 380 aa, Unidentified
VRSKKLWIVASTALLISVAFSSSIASAAEEAKEKYLIGFNEQEAVSEFVEQVEANDEVAILSEEEEVEIELLHEFETIPVLSVELSPEDVDALELDPAISYIEEDAEVTTMAQSVPWGISRVQAPAAHRRGLWGRGVKVAVLDTGISTHPDLNIRGGASFVPGEPSTQDGNGHGTHVAGTIAALDNSIGVLGVAPSAELYAVKVLGASGAGSVSSIAQGLEWAGANGMHVANLSLGSPSPSATLEQAVNSATSRGVLVVAASGNSGAGSISYPARYANAMAVGATDQDNNRASFSQYGAGLDIVAPGVNVQSTYPQSTYFSLNGTSMATPHVAGAAALVKQKNPSWSNVQIRNRLKNTATSLGSTNLYGSGLVNAEAATR

SEQ ID NO: 64843 - protein, 380 aa, Unidentified
VRSKKLWIVASTALLISVAFSSSIASAAEEAKEKYLIGFNEQEAVSEFVEQVEANDEVAILSEEEEVEIELLHEFETIPVLSVELSPEDVDALELDPAISYIEEDAEVTTMAQSVPWGISRVQAPAAHNRGLTGRGVKVAVLDTGISTHPDLNIRGGASFVPGEPSTQDGNGHGTHVAGTIAALNNSIGVLGVAPSAELYAVKVLGASGGGAISSIAQGLEWAGNNGMHVANLSLGSESPSATLEQAVNSATSRGVIVVAASGNSGAGSISYPARYANAMAVGATDQNNNRADFSQYGAGLDIVAPGVNVQSTYPGSTYASLNGTSMATPHVAGAAVLVKQKNPSWSNVRIRDHLKNTATSLGSTNLYGSGLVNAEAATR

SEQ ID NO: 64844 - protein, 380 aa, Unidentified
VRSKKLWIVASTALLISVAFSSSIASAAEEAKEKYLIGFNEQEAVSEFVEQVEANDEVAILSEEEEVEIELLHEFETIPVLSVELSPEDVDALELDPAISYIEEDAEVTTMAQSVPWGISRVQAPAAHNRGLAGRGVKVAVLDTGISTHPDLNIRGGASFVPGEPSTQDGNGHGTHVAGTIAALNNSIGVLGVAPSAELYAVKVLGASGGGAISSIAQGLEWAGNNGMHVANLSLGSPSPSATLEQAVNSATSRGVLVVAASGNSGEGSISYPARYANAMAVGATDQNNNRASFSQYGAGLDIVAPGVNVQSTYPGSTYASLNGTSMATPHVAGAAVLVKQKNPSWSNVRIRDRLKNTATSLGSTNLYGSGLVNAEAATR

SEQ ID NO: 64845 - protein, 380 aa, Unidentified
VRSKKLWIVASTALLISVAFSSSIASAAEEAKEKYLIGFNEQEAVSEFVEQVEANDEVAILSEEEEVEIELLHEFETIPVLSVELSPEDVDALELDPAISYIEEDAEVTTMAQSVPWGISRVQAPAAHNRGLTGRGVKVAVLDTGISTHPDLNIRGGASFVPGEPSTQDGNGHGTHVAGTIAALNNSIGVLGVAPSAELYAVKVLGASGGGAISSIAQGLEWAGNNGMHVANLSLGSPSPSATLEQAVNSATSRGVLVVAASGNSGAESISYPARYANAMAVGATDQNNNRADFSQYGAGLDIVAPGVNVQSTYPGSTYASLNGTSMATPHVAGAAVLVKQKRPSWSNVRIRDHLKNTATSLGSTNLYGSGLVNAEAATR

SEQ ID NO: 64846 - protein, 380 aa, Unidentified
VRSKKLWIVASTALLISVAFSSSIASAAEEAKEKYLIGFNEQEAVSEFVEQVEANDEVAILSEEEEVEIELLHEFETIPVLSVELSPEDVDALELDPAISYIEEDAEVTTMAQSVPWGISRVQAPAAHNRRLTGSGVKVAVLDTGISTHPDLNIRGGASFVPGEPSTQDGNGHGTHVAGTIAALNNRIGVLGVAPSAELYAVKVLGASGGGAISSIAQGLEWAGANGMHVANLSLGSPSPSATLEQAVNSATSRGVLVVAASGNSGAGSISYPARYANAMAVGATDQDNNRASFSQYGAGLDIVAPGVNVQSTYPGSAYASLNGTSMATPHVAGAAVLVKQKNPSWSNVRIRNHLKNTATSLGSTNLYGSGLVNAEAATR

SEQ ID NO: 64847 - protein, 380 aa, Unidentified
VRSKKLWIVASTALLISVAFSSSIASAAEEAKEKYLIGFNEQEAVSEFVEQVEANDEVAILSEEEEVEIELLHEFETIPVLSVELSPEDVDALELDPAISYIEEDAEVTTMAQSVPWGISRVQAPAAHRRGLTGSGVKVAVLDTGISTHPDLDITGGASFVPGEPSTQDGNGHGTHVAGTIAALDNSIGVLGVAPSAELYAVKVLGASGGGAISSIAQGLEWAGNNGMHVANLSLGSPSPSATLEQAVNSATSRGVLVVAASGNSGAGSISYPARYANAMAVGATDQNNNRASFSQYGAGLDIVAPGVNVQSTYPGSTYASLNGTSMATPHVAGAAVLVKQKNPSWSNVRIRNHLKNTATSLGSTNLYGSGLVRAEAATR

SEQ ID NO: 64848 - protein, 380 aa, Unidentified
VRSKKLWIVASTALLISVAFSSSIASAAEEAKEKYLIGFNEQEAVSEFVEQVEANDEVAILSEEEEVEIELLHEFETIPVLSVELSPEDVDALELDPAISYIEEDAEVTTMAQSVPWGISRVQAPAAHNRGLAGSGVKVAVLDTGISTHPDLNIRGGASFVPGEPSTQDGNGHGTHVAGTIAALNNSIGVLGVAPSAELYAVKVLGASGSGAISSIAQGLEWAGNNRMHVANLSLGSPSPSATLEQAVNSATSRGVLVVAASGNSGADSISYPARYANAMAVGATDQNNNRADFSQYGAGLDIVAPGVNVQSTYPGSTYASDNGTSMATPHVAGAAVLVKQKNPSWSNVRIRDHLKNTATSLGSTNLYGSGLVNAEAATR

SEQ ID NO: 64849 - protein, 380 aa, Unidentified
VRSKKLWIVASTALLISVAFSSSIASAAEEAKEKYLIGFNEQEAVSEFVEQVEANDEVAILSEEEEVEIELLHEFETIPVLSVELSPEDVDALELDPAISYIEEDAEVTTMAQSVPWGISRVQAPAAHNRGLTGRGVKVAVLDTGISTHPDLNIRGGASFVPGEPSTQDGNGHGTHVAGTIAALNNSIGVLGVAPSAELYAVKVLGASGGGAISSIAQGLEWAGNNGMHVANLSLGSPSPSATLEQAVNSATSRGVLVVAASGNSGEGSISYPARYANAMAVGATDQNNNRADFSQYGAGLDIVAPGVNVQSTYPGSTYASLNGTSMATPHVAGAAVLVKQKNPSWSNVRIRDRLKNTATSLGSTNLYGSGLVNAEAATR

SEQ ID NO: 64850 - protein, 380 aa, Unidentified
VRSKKLWIVASTALLISVAFSSSIASAAEEAKEKYLIGFNEQEAVSEFVEQVEANDEVAILSEEEEVEIELLHEFETIPVLSVELSPEDVDALELDPAISYIEEDAEVTTMAQSVPWGISRVQAPAAHRRRLTGSGVKVAVLDTGISTHPDLRITGGASFVPGEPSTQDGNGHGTHVAGTIAALDNSIGVLGVAPSAELYAVKVLGASGGGAISSIAQGLEWAGNNGMHVANLSLGSPSPSATLEQAVNSATSRGVLVVAASGNSGAGSISYPARYANAMAVGATDQNNNRASFSQYGAGLDIVAPGVNVQSTYPGSTYASLNGTSMATPHVAGAAVLVKQKNPSWSNVRIRNHLKNTATSLGSTNLYGSGLVNAEAATR

SEQ ID NO: 64851 - protein, 380 aa, Unidentified
VRSKKLWIVASTALLISVAFSSSIASAAEEAKEKYLIGFNEQEAVSEFVEQVEANDEVAILSEEEEVEIELLHEFETIPVLSVELSPEDVDALELDPAISYIEEDAEVTTMAQSVPWGISRVQAPAAHNRGLTGSGVKVAVLDTGISTHPDLNIRGGASFVPGEPSTQDGNGHGTHVAGTIAALNNSIGVLGVAPSAELYAVKVLGASGGGAISSIAQGLEWAGNNGMHVANLSLGSPAPSATLEQAVNSATSRGVLVVAASGNSGEGSISYPARYANAMAVGATDQNNNRADFSQYGAGLDIVAPGVNVQSTYPGSTYASLNGTSMATPHVAGAAVLVKQKNPSWSNVRIRDRLKNTATSLGSTNLYGSGLVNAEAATR

SEQ ID NO: 64852 - protein, 380 aa, Unidentified
VRSKKLWIVASTALLISVAFSSSIASAAEEAKEKYLIGFNEQEAVSEFVEQVEANDEVAILSEEEEVEIELLHEFETIPVLSVELSPEDVDALELDPAISYIEEDAEVTTMAQSVPWGISRVQAPAAHNRGLAGRGVKVAVLDTGISTHPDLNIRGGASFVPGEPSTQDGNGHGTHVAGTIAALNNSIGVLGVAPSAELYAVKVLGASGGGAISSIAQGLEWAGNNGMHVANLSLGSESPSATLEQAVNSATSRGVLVVAASGNSGAGSISYPARYANAMAVGATDQNNNRADFSQYGAGLDIVAPGVNVQSTYPGSTYASLNGTSMATPHVAGAAVLVKQKNPSWSNVRIRDHLKNTATSLGSTNLYGSGLVNAEAATR

SEQ ID NO: 64853 - protein, 380 aa, Unidentified
VRSKKLWIVASTALLISVAFSSSIASAAEEAKEKYLIGFNEQEAVSEFVEQVEANDEVAILSEEEEVEIELLHEFETIPVLSVELSPEDVDALELDPAISYIEEDAEVTTMAQSVPWGISRVQAPAAHRRGLTGRGVKVAVFDTGISTHPDLNIRGGASFVPGEPSTQDGNGHGTHVAGTIAALDNSIGVLGVAPSAELYAVKVLGASGSGSVSSIAQGLEWAGANGMHVANLSLGSPSPSATLEQAVNSATSRGVLVVAASGNSGAGSISYPARYANAMAVGATDQDNNRASFSQYGAGLDIVAPGVNVQSTYPQSAYFSLNGTSMATPHVAGAAALVKQKNPSWSNVQIRNRLKNTATSLGSTNLYGSGLVNAEAATR

SEQ ID NO: 64854 - protein, 380 aa, Unidentified
VRSKKLWIVASTALLISVAFSSSIASAAEEAKEKYLIGFNEQEAVSEFVEQVEANDEVAILSEEEEVEIELLHEFETIPVLSVELSPEDVDALELDPAISYIEEDAEVTTMAQSVPWGISRVQAPAAHNRGLTGRGVKVAVLDTGISTHPDLRIRGGASFVPGEPSTQDGNGHGTHVAGTIAALDNRIGVLGVAPSAELYAVKVLGASGGGAISSIAQGLEWAGNNGMHVANLSLGSPSPSATLEQAVNSATSRGVLVVAASGNSGAGSISYPARYANAMAVGATDQNNNRASFSQYGAGLDIVAPGVNVQSTYPGSTYASLNGTSMATPHVAGAAVLVKQKNPSWSNVRIRNHLKNTATSLGSTNLYGSGLVRAEAATR

SEQ ID NO: 64855 - protein, 380 aa, Unidentified
VRSKKLWIVASTALLISVAFSSSIASAAEEAKEKYLIGFNEQEAVSEFVEQVEANDEVAILSEEEEVEIELLHEFETIPVLSVELSPEDVDALELDPAISYIEEDAEVTTMAQSVPWGISRVQAPAAHNRRLTGRGVKVAVLDTGISTHPDLDITGGASFVPGEPSTQDGNGHGTHVAGTIAALDNSIGVLGVAPSAELYAVKVLGASGGGAISSIAQGLEWAGNNGMHVANLSLGSPSPSATLEQAVNSATSRGVLVVAASGNSGAGSISYPARYANAMAVGATDQNNNRASFSQYGAGLDIVAPGVNVQSTYPGSTYASLNGTSMATPHVAGAAVLVKQKNPSWSNVRIRNHLKNTATSLGSTNLYGSGLVNAEAATR

SEQ ID NO: 64856 - protein, 380 aa, Unidentified
VRSKKLWIVASTALLISVAFSSSIASAAEEAKEKYLIGFNEQEAVSEFVEQVEANDEVAILSEEEEVEIELLHEFETIPVLSVELSPEDVDALELDPAISYIEEDAEVTTMAQSVPWGISRVQAPAAHNRRLTGSGVKVAVLDTGISTHPDLNIRGGASFVPGEPSTQDGNGHGTHVAGTIAALNNSIGVLGVAPSAELYAVKVLGASGAGAISSIAQGLEWAGANGMHVANLSLGSPSPSATLEQAVNSATSRGVLVVAASGNSGAGSISYPARYANAMAVGATDQDNNRASFSQYGAGLDIVAPGVNVQSTYPGSAYFSLNGTSMATPHVAGAAVLVKQKNPSWSNVRIRNHLKNTATSLGSTNLYGSGLVNAEAATR

SEQ ID NO: 64857 - protein, 380 aa, Unidentified
VRSKKLWIVASTALLISVAFSSSIASAAEEAKEKYLIGFNEQEAVSEFVEQVEANDEVAILSEEEEVEIELLHEFETIPVLSVELSPEDVDALELDPAISYIEEDAEVTTMAQSVPWGISRVQAPAAHRRGLTGSGVKVAVLDTGISTHPDLRITGGASFVPGEPSTQDGNGHGTHVAGTIAALNNRIGVLGVAPSAELYAVKVLGASGGGAISSIAQGLEWAGNNGMHVANLSLGSPSPSATLEQAVNSATSRGVLVVAASGNSGAGSISYPARYANAMAVGATDQNNNRASFSQYGAGLDIVAPGVNVQSTYPGSTYASENGTSMATPHVAGAAVLVKQKNPSWSNVRIRNHLKNTATSLGSTNLYGSGLVNAEAATR

SEQ ID NO: 64858 - protein, 380 aa, Unidentified
VRSKKLWIVASTALLISVAFSSSIASAAEEAKEKYLIGFNEQEAVSEFVEQVEANDEVAILSEEEEVEIELLHEFETIPVLSVELSPEDVDALELDPAISYIEEDAEVTTMAQSVPWGISRVQAPAAHRRRLTGSGVKVAVLDTGISTHPDLNITGGASFVPGEPSTQDGNGHGTHVAGTIAALDNRIGVLGVAPSAELYAVKVLGASGGGAISSIAQGLEWAGNNGMHVANLSLGSPSPSATLEQAVNSATSRGVLVVAASGNSGAGSISYPARYANAMAVGATDQNNNRASFSQYGAGLDIVAPGVNVQSTYPGSTYASLNGTSMATPHVAGAAVLVKQKNPSWSNVRIRNHLKNTATSLGSTNLYGSGLVNAEAATR

SEQ ID NO: 64859 - protein, 380 aa, Unidentified
VRSKKLWIVASTALLISVAFSSSIASAAEEAKEKYLIGFNEQEAVSEFVEQVEANDEVAILSEEEEVEIELLHEFETIPVLSVELSPEDVDALELDPAISYIEEDAEVTTMAQSVPWGISRVQAPAAHNRGLTGSGVKVAVLDTGISTHPDLNIRGGASFVPGEPSTQDGNGHGTHVAGTIAALNNSIGVLGVAPSAELYAVKVLGASGGGAISSIAQGLEWAGNNGMHVANLSLGSQSPSATLEQAVNSATSRGVLVVAASGNSGEGSISYPARYANAMAVGATDQNNNRADFSQYGAGLDIVAPGVNVQSTYPGSTYASLNGTSMATPHVAGAAVLVKQKNPSWSNVRIRDRLKNTATSLGSTNLYGSGLVNAEAATR

SEQ ID NO: 64860 - protein, 380 aa, Unidentified
VRSKKLWIVASTALLISVAFSSSIASAAEEAKEKYLIGFNEQEAVSEFVEQVEANDEVAILSEEEEVEIELLHEFETIPVLSVELSPEDVDALELDPAISYIEEDAEVTTMAQSVPWGISRVQAPAAHNRGLTGRGVKVAVLDTGISTHPDLNIRGGASFVPGEPSTQDGNGHGTHVAGTIAALNNSIGVLGVAPSAELYAVKVLGASGGGAISSIAQGLEWAGNNGMHVANLSLGSPSPSATLEQAVNSATSRGVLVVAASGNSGEESISYPARYANAMAVGATDQNNNRASFSQYGAGLDIVAPGVNVQSTYPGSTYASLNGTSMATPHVAGAAVLVKQKRPSWSNVRIRDHLKNTATSLGSTNLYGSGLVNAEAATR

SEQ ID NO: 64861 - protein, 380 aa, Unidentified
VRSKKLWIVASTALLISVAFSSSIASAAEEAKEKYLIGFNEQEAVSEFVEQVEANDEVAILSEEEEVEIELLHEFETIPVLSVELSPEDVDALELDPAISYIEEDAEVTTMAQSVPWGISRVQAPAAHNRGLAGSGVKVAVLDTGISTHPDLNIRGGASFVPGEPSTQDGNGHGTHVAGTIAALNNSIGVLGVAPSAELYAVKVLGASGGGAISSIAQGLEWAGNNGMHVANLSLGSPSPSATLEQAVNSATSRGVLVVAASGNSGADSISYPARYANAMAVGATDQNNNRADFSQYGAGLDIVAPGVNVQSTYPGSTYASLNGTSMATPHVAGAAVLVKQKNPSWSNVRIRDHLKNTATSLGSTNLYGSGLVNAFAATR

SEQ ID NO: 64862 - protein, 380 aa, Unidentified
VRSKKLWIVASTALLISVAFSSSIASAAEEAKEKYLIGFNEQEAVSEFVEQVEANDEVAILSEEEEVEIELLHEFETIPVLSVELSPEDVDALELDPAISYIEEDAEVTTMAQSVPWGISRVQAPAAHNRGLTGRGVKVAVLDTGISTHPDLNIRGGASFVPGEPSTQDGNGHGTHVAGTIAALNNSIGVLGVAPSAELYAVKVLGASGGGAISSIAQGLEWAGNNGMHVANLSLGSESPSATLEQAVNSATSRGVLVVAASGNSGEGSISYPARYANAMAVGATDQNNNRADFSQYGAGLDIVAPGVNVQSTYPGSTYASLNGTSMATPHVAGAAVLVKQKNPSWSNVRIRDHLKNTATSLGSTNLYGSGLVNAEAATR

SEQ ID NO: 64863 - protein, 380 aa, Unidentified
VRSKKLWIVASTALLISVAFSSSIASAAEEAKEKYLIGFNEQEAVSEFVEQVEANDEVAILSEEEEVEIELLHEFETIPVLSVELSPEDVDALELDPAISYIEEDAEVTTMAQSVPWGISRVQAPAAHNRRLTGRGVKVAVLDTGISTHPDLDIRGGASFVPGEPSTQDGNGHGTHVAGTIAALNNRIGVLGVAPSAELYAVKVLGASGGGAISSIAQGLEWAGNNGMHVANLSLGSPSPSATLEQAVNSATSRGVLVVAASGNSGAGSISYPARYANAMAVGATDQNNNRASFSQYGAGLDIVAPGVNVQSTYPGSTYASLNGTSMATPHVAGAAVLVKQKNPSWSNVRIRNRLKNTATSLGSTNLYGSGLVNAEAATR

SEQ ID NO: 64864 - protein, 380 aa, Unidentified
VRSKKLWIVASTALLISVAFSSSIASAAEEAKEKYLIGFNEQEAVSEFVEQVEANDEVAILSEEEEVEIELLHEFETIPVLSVELSPEDVDALELDPAISYIEEDAEVTTMAQSVPWGISRVQAPAAHRRGLTGRGVKVAVLDTGISTHPDLNITGGASFVPGEPSTQDGNGHGTHVAGTIAALDNSIGVLGVAPSAELYAVKVLGASGGGAISSIAQGLEWAGNNGMHVANLSLGSPSPSATLEQAVNSATSRGVLVVAASGNSGAGSISYPARYANAMAVGATDQNNNRASFSQYGAGLDIVAPGVNVQSTYPGSTYASLNGTSMATPHVAGAAVLVKQKNPSWSNVRIRNHLKNTATSLGSTNLYGSGLVRAEAATR

SEQ ID NO: 64865 - protein, 380 aa, Unidentified
VRSKKLWIVASTALLISVAFSSSIASAAEEAKEKYLIGFNEQEAVSEFVEQVEANDEVAILSEEEEVEIELLHEFETIPVLSVELSPEDVDALELDPAISYIEEDAEVTTMAQSVPWGISRVQAPAAHNRGLTGRGVKVAVLDTGISTHPDLNIRGGASFVPGEPSTQDGNGHGTHVAGTIAALNNSIGVLGVAPSAELYAVKVLGASGGGAISSIAQGLEWAGNNGMHVANLSLGSESPSATLEQAVNSATSRGVLVVAASGNSGEGSISYPARYANAMAVGATDQNNNRASFSQYGAGLDIVAPGVNVQSTYPGSTYASLNGTSMATPHVAGAAVLVKQKNPSWSNVRIRDRLKNTATSLGSTNLYGSGLVNAEAATR

SEQ ID NO: 64866 - protein, 380 aa, Unidentified
VRSKKLWIVASTALLISVAFSSSIASAAEEAKEKYLIGFNEQEAVSEFVEQVEANDEVAILSEEEEVEIELLHEFETIPVLSVELSPEDVDALELDPAISYIEEDAEVTTMAQSVPWGISRVQAPAAHNRRLWGSGVKVAVLDTGISTHPDLNIRGGASFVPGEPSTQDGNGHGTHVAGTIAALNNRIGVLGVAPSAELYAVKVLGASGGGAISSIAQGLEWAGNNGMHVANLSLGSPSPSATLEQAVNSATSRGVLVVAASGNSGAGSISYPARYANAMAVGATDQNNNRASFSQYGAGLDIVAPGVNVQSTYPQSAYASLNGTSMATPHVAGAAVLVKQKNPSWSNVRIRNHLKNTATSLGSTNLYGSGLVNAEAATR

SEQ ID NO: 64867 - protein, 380 aa, Unidentified
VRSKKLWIVASTALLISVAFSSSIASAAEEAKEKYLIGFNEQEAVSEFVEQVEANDEVAILSEEEEVEIELLHEFETIPVLSVELSPEDVDALELDPAISYIEEDAEVTTMAQSVPWGISRVQAPAAHNRGLTGSGVKVAVLDTGISTHPDLNIRGGASFVPGEPSTQDGNGHGTHVAGTIAALNNSIGVLGVAPSAELYAVKVLGASGGGAISSIAQGLEWAGNNGMHVANLSLGSPSPSATLEQAVNSATSRGVLVVAASGNSGEESISYPARYANAMAVGATDQNNNRADFSQYGAGLDIVAPGVNVQSTYPGSTYASLNGTSMATPHVAGAAVLVKQKRPSWSNVRIRDHLKNTATSLGSTNLYGSGLVNAEAATR

SEQ ID NO: 64868 - protein, 301 aa, Saccharomyces cerevisiae
LGKIVASTALLISVAFSSSIASAAEEAKEKYLIGFNEQEAVSEFVEQVEANDEVAILSEEEEVEIELLHEFETIPVLSVELSPEDVDALELDPAISYIEEDAEVTTMAQSVPWGISRVQAPAAHNRGLTGSGVKVAVLDTGISTHPDLNIRGGASFVPGEPSTQDGNGHGTHVAGTIAALNNSIGVLGVAPSAELYAVKVLGASGSGSVSSIAQGLEWAGNNGMHVANLSLGSPSPSATLEQAVNSATSRGVLVVAASGNSGAGSISYPARYANAMAVGATDQNNNRACFAKGTNVLMADG

SEQ ID NO: 64869 - protein, 313 aa, Unidentified
AEEAKEKYLIGFNEQEAVSEFVEQVEANDEVAILSEEEEVEIELLHEFETIPVLSVELSPEDVDALELDPAISYIEEDAEVTTMAQSVPWGISRVQAPAAHNRGLTGSGVKVAVLDTGISTHPDLNIRGGASFVPGEPSTQDGNGHGTHVAGTIAALNNSIGVLGVAPSAELYAVKVLGASGSGSVSSIAQGLEWAGNNGMHVANLSLGSPSPSATLEQAVNSATSRGVLVVAASGNSGAGSISYPARYANAMAVGATDQNNNRASFSQYGAGLDIVAPGVNVQSTYPGCLPARARVVDWCTGRVVRVGEIVR

SEQ ID NO: 64870 - protein, 326 aa, Unidentified
LGKIVASTALLISVAFSSSIASAAEEAKEKYLIGFNEQEAVSEFVEQVEANDEVAILSEEEEVEIELLHEFETIPVLSVELSPEDVDALELDPAISYIEEDAEVTTMAQSVPWGISRVQAPAAHNRGLTGSGVKVAVLDTGISTHPDLNIRGGASFVPGEPSTQDGNGHGTHVAGTIAALNNSIGVLGVAPSAELYAVKVLGASGSGSVSSIAQGLEWAGNNGMHVANLSLGSPSPSATLEQAVNSATSRGVLVVAASGNSGAGSISYPARYANAMAVGATDQNNNRASFSQYGAGLDIVAPGVNVQSTYPGCVTADTWVTTAEGP

SEQ ID NO: 64871 - protein, 380 aa, Unidentified
VRSKKLWIVASTALLISVAFSSSIASAAEEAKEKYLIGFNEQEAVSEFVEQVEANDEVAILSEEEEVEIELLHEFETIPVLSVELSPEDVDALELDPAISYIEEDAEVTTMAQSVPWGISRVQAPAAHRRRLTGSGVKVAVLDTGISTHPDLDITGGASFVPGEPSTQDGNGHGTHVAGTIAALDNSIGVLGVAPSAELYAVKVLGASGGGAISSIAQGLEWAGNNGMHVANLSLGSPSPSATLEQAVNSATSRGVLVVAASGNSGAGSISYPARYANAMAVGATDQNNNRASFSQYGAGLDIVAPGVNVQSTYPGSTYASLNGTSMATPHVAGAAVLVKQKNPSWSNVRIRNHLKNTATSLGSTNLYGSGLVRAEAATR

SEQ ID NO: 64872 - protein, 380 aa, Unidentified
VRSKKLWIVASTALLISVAFSSSIASAAEEAKEKYLIGFNEQEAVSEFVEQVEANDEVAILSEEEEVEIELLHEFETIPVLSVELSPEDVDALELDPAISYIEEDAEVTTMAQSVPWGISRVQAPAAHNRGLAGRGVKVAVLDTGISTHPDLNIRGGASFVPGEPSTQDGNGHGTHVAGTIAALNNSIGVLGVAPSAELYAVKVLGASGGGAISSIAQGLEWAGNNGMHVANLSLGNESPSATLEQAVNSATSRGVLVVAASGNSGEGSISYPARYANAMAVGATDQNNNRASFSQYGAGLDIVAPGVNVQSTYPGSTYASLNGTSMATPHVAGAAVLVKQKNPSWSNVRIRDHLKNTATSLGSTNLYGSGLVNAEAATR

SEQ ID NO: 64873 - protein, 380 aa, Unidentified
VRSKKLWIVASTALLISVAFSSSIASAAEEAKEKYLIGFNEQEAVSEFVEQVEANDEVAILSEEEEVEIELLHEFETIPVLSVELSPEDVDALELDPAISYIEEDAEVTTMAQSVPWGISRVQAPAAHNRRLWGSGVKVAVLDTGISTHPDLNIRGGASFVPGEPSTQDGNGHGTHVAGTIAALNNRIGVLGVAPSAELYAVKVLGASGAGAISSIAQGLEWAGANGMHVANLSLGSPSPSATLEQAVNSATSRGVLVVAASGNSGAGSISYPARYANAMAVGATDQDNNRASFSQYGAGLDIVAPGVNVQSTYPGSTYFSLNGTSMATPHVAGAAVLVKQKNPSWSNVRIRNHLKNTATSLGSTNLYGSGLVNAEAATR

SEQ ID NO: 64874 - protein, 380 aa, Unidentified
VRSKKLWIVASTALLISVAFSSSIASAAEEAKEKYLIGFNEQEAVSEFVEQVEANDEVAILSEEEEVEIELLHEFETIPVLSVELSPEDVDALELDPAISYIEEDAEVTTMAQSVPWGISRVQAPAAHRRRLTGSGVKVAVLDTGISTHPDLDIRGGASFVPGEPSTQDGNGHGTHVAGTIAALNNRIGVLGVAPSAELYAVKVLGASGGGAISSIAQGLEWAGNNGMHVANLSLGSPSPSATLEQAVNSATSRGVLVVAASGNSGAGSISYPARYANAMAVGATDQNNNRASFSQYGAGLDIVAPGVNVQSTYPGSTYASENGTSMATPHVAGAAVLVKQKNPSWSNVRIRNHLKNTATSLGSTNLYGSGLVNAEAETR

SEQ ID NO: 64875 - protein, 380 aa, Unidentified
VRSKKLWIVASTALLISVAFSSSIASAAEEAKEKYLIGFNEQEAVSEFVEQVEANDEVAILSEEEEVEIELLHEFETIPVLSVELSPEDVDALELDPAISYIEEDAEVTTMAQSVPWGISRVQAPAAHNRRLWGSGVKVAVLDTGISTHPDLNIRGGASFVPGEPSTQDGNGHGTHVAGTIAALNNSIGVLGVAPSAELYAVKVLGASGAGAISSIAQGLEWAGANGMHVANLSLGSPSPSATLEQAVNSATSRGVLVVAASGNSGAGSISYPARYANAMAVGATDQDNNRASFSQYGAGLDIVAPGVNVQSTYPQSAYASLNGTSMATPHVAGAAVLVKQKNPSWSNVRIRNHLKNTATSLGSTNLYGSGLVNAEAATR

SEQ ID NO: 64876 - protein, 380 aa, Unidentified
VRSKKLWIVASTALLISVAFSSSIASAAEEAKEKYLIGFNEQEAVSEFVEQVEANDEVAILSEEEEVEIELLHEFETIPVLSVELSPEDVDALELDPAISYIEEDAEVTTMAQSVPWGISRVQAPAAHRRRLWGRGVKVAVLDTGISTHPDLNIRGGASFVPGEPSTQDGNGHGTHVAGTIAALDNSIGVLGVAPSAELYAVKVLGASGAGSVSSIAQGLEWAGANGMHVANLSLGSPSPSATLEQAVNSATSRGVLVVAASGNSGAGSISYPARYANAMAVGATDQNNNRASFSQYGAGLDLVAPGVNVQSTYPGSAYFSLNGTSMATPHVAGAAALVKQKNPSWSNVQIRNRLKNTATSLGSTNLYGSGLVNAEAATR

SEQ ID NO: 64877 - protein, 380 aa, Unidentified
VRSKKLWIVASTALLISVAFSSSIASAAEEAKEKYLIGFNEQEAVSEFVEQVEANDEVAILSEEEEVEIELLHEFETIPVLSVELSPEDVDALELDPAISYIEEDAEVTTMAQSVPWGISRVQAPAAHNRGLAGSGVKVAVLDTGISTHPDLNIRGGASFVPGEPSTQDGNGHGTHVAGTIAALNNSIGVLGVAPSAELYAVKVLGASGGAAISSIAQGLEWAGNNGMHVANLSLGSPSPSATLEQAVNSATSRGVLVVAASGNSGADSISYPARYANAMAVGATDQNNNRADFSQYGAGLDIVAPGVNVQSTYPGSTYASLNGTSMATPHVAGAAVLVKQKNPSWSNVRIRDHLKNTATSLGSTNLYGSGLVNAFAATR

SEQ ID NO: 64878 - protein, 380 aa, Unidentified
VRSKKLWIVASTALLISVAFSSSIASAAEEAKEKYLIGFNEQEAVSEFVEQVEANDEVAILSEEEEVEIELLHEFETIPVLSVELSPEDVDALELDPAISYIEEDAEVTTMAQSVPWGISRVQAPAAHNRGLAGRGVKVAVLDTGISTHPDLRIRGGASFVPGEPSTQDGNGHGTHVAGTIAALNNSIGVLGVAPSAELYAVKVLGASGSGAISSIAQGLEWAGNNRMHVANLSLGSPSPSATLEQAVNSATSRGVLVVAASGNSGADSISYPARYANAMAVGATDQNNNRADFSQYGAGLDIVAPGVNVQSTYPGSTYASDNGTSMATPHVAGAAVLVKQKNPSWSNVQIRDHLKNTATSLGSTNLYGSGLVNAEAATR

SEQ ID NO: 64879 - protein, 380 aa, Unidentified
VRSKKLWIVASTALLISVAFSSSIASAAEEAKEKYLIGFNEQEAVSEFVEQVEANDEVAILSEEEEVEIELLHEFETIPVLSVELSPEDVDALELDPAISYIEEDAEVTTMAQSVPWGISRVQAPAAHRRRLWGRGVKVAVLDTGISTHPDLNIRGGASFVPGEPSTQDGNGHGTHVAGTIAALDNSIGVLGVAPSAELYAVKVLGASGAGSVSSIAQGLEWAGNNGMHVANLSLGSPSPSATLEQAVNSATSRGVLVVAASGNSGAGSISYPARYANAMAVGATDQDNNRASFSQYGAGLDLVAPGVNVQSTYPGSAYFSLNGTSMATPHVAGAAALVKQKNPSWSNVQIRNRLKNTATSLGSTNLYGSGLVNAEAATR

SEQ ID NO: 64880 - protein, 380 aa, Unidentified
VRSKKLWIVASTALLISVAFSSSIASAAEEAKEKYLIGFNEQEAVSEFVEQVEANDEVAILSEEEEVEIELLHEFETIPVLSVELSPEDVDALELDPAISYIEEDAEVTTMAQSVPWGISRVQAPAAHRRRLWGRGVKVAVLDTGISTHPDLNIRGGASFVPGEPSTQDGNGHGTHVAGTIAALDNSIGVLGVAPSAELYAVKVLGASGAGSVSSIAQGLEWAGNNGMHVANLSLGSPSPSATLEQAVNSATSRGVLVVAASGNSGAGSISYPARYANAMAVGATDQNNNRASFSQYGAGLDLVAPGVNVQSTYPQSAYFSLNGTSMATPHVAGAAALVKQKNPSWSNVQIRNRLKNTATSLGSTNLYGSGLVNAEAATR

SEQ ID NO: 64881 - protein, 380 aa, Unidentified
VRSKKLWIVASTALLISVAFSSSIASAAEEAKEKYLIGFNEQEAVSEFVEQVEANDEVAILSEEEEVEIELLHEFETIPVLSVELSPEDVDALELDPAISYIEEDAEVTTMAQSVPWGISRVQAPAAHNRGLTGRGVKVAVLDTGISTHPDLNIRGGASFVPGEPSTQDGNGHGTHVAGTIAALNNSIGVLGVAPSAELYAVKVLGASGGGAISSIAQGLEWAGNNGMHVANLSLGSPSPSATLEQAVNSATSRGVLVVAASGNSGEGSISYPARYANAMAVGATDQNNNRADFSQYGAGLDIVAPGVNVQSTYPGSTYASENGTSMATPHVAGAAVLVKQKNPSWSNVRIRDRLKNTATSLGSTNLYGSGLVNAEAATR

SEQ ID NO: 64882 - protein, 380 aa, Unidentified
VRSKKLWIVASTALLISVAFSSSIASAAEEAKEKYLIGFNEQEAVSEFVEQVEANDEVAILSEEEEVEIELLHEFETIPVLSVELSPEDVDALELDPAISYIEEDAEVTTMAQSVPWGISRVQAPAAHNRGLAGSGVKVAVLDTGISTHPDLNIRGGASFVPGEPSTQDGNGHGTHVAGTIAALNNSIGVLGVAPSAELYAVKVLGASGSGAISSIAQGLEWAGNNRMHVANLSLGSPSPSATLEQAVNSATSRGVLVVAASGNSGADSISYPARYANAMAVGATDQNNNRADFSQYGAGLDIVAPGVNVQSTYPGSTYASDNGTSMATPHVAGAAVLVKQKNPSWSNVRIRDHLKNTATSLGSTNLYGSGLVNAFAATR

SEQ ID NO: 64883 - protein, 380 aa, Unidentified
VRSKKLWIVASTALLISVAFSSSIASAAEEAKEKYLIGFNEQEAVSEFVEQVEANDEVAILSEEEEVEIELLHEFETIPVLSVELSPEDVDALELDPAISYIEEDAEVTTMAQSVPWGISRVQAPAAHRRGLWGRGVKVAVLDTGISTHPDLNIRGGASFVPGEPSTQDGNGHGTHVAGTIAALDNSIGVLGVAPSAELYAVKVLGASGAGSVSSIAQGLEWAGANGMHVANLSLGSPSPSATLEQAVNSATSRGVLVVAASGNSGAGSISYPARYANAMAVGATDQNNNRASFSQYGAGLDLVAPGVNVQSTYPQSAYFSLNGTSMATPHVAGAAALVKQKNPSWSNVQIRNRLKNTATSLGSTNLYGSGLVNAEAATR

SEQ ID NO: 64884 - protein, 380 aa, Unidentified
VRSKKLWIVASTALLISVAFSSSIASAAEEAKEKYLIGFNEQEAVSEFVEQVEANDEVAILSEEEEVEIELLHEFETIPVLSVELSPEDVDALELDPAISYIEEDAEVTTMAQSVPWGISRVQAPAAHNRRLWGSGVKVAVLDTGISTHPDLNIRGGASFVPGEPSTQDGNGHGTHVAGTIAALNNRIGVLGVAPSAELYAVKVLGASGGGAISSIAQGLEWAGANGMHVANLSLGSPSPSATLEQAVNSATSRGVLVVAASGNSGAGSISYPARYANAMAVGATDQDNNRASFSQYGAGLDIVAPGVNVQSTYPQSTYASLNGTSMATPHVAGAAVLVKQKNPSWSNVRIRNHLKNTATSLGSTNLYGSGLVNAEAATR

SEQ ID NO: 64885 - protein, 380 aa, Unidentified
VRSKKLWIVASTALLISVAFSSSIASAAEEAKEKYLIGFNEQEAVSEFVEQVEANDEVAILSEEEEVEIELLHEFETIPVLSVELSPEDVDALELDPAISYIEEDAEVTTMAQSVPWGISRVQAPAAHNRGLTGRGVKVAVLDTGISTHPDLNIRGGASFVPGEPSTQDGNGHGTHVAGTIAALNNSIGVLGVAPSAELYAVKVLGASGGGAISSIAQGLEWAGNNGMHVANLSLGSESPSATLEQAVNSATSRGVIVVAASGNSGEGSISYPARYANAMAVGATDQNNNRADFSQYGAGLDIVAPGVNVQSTYPGSTYASLNGTSMATPHVAGAAVLVKQKNPSWSNVRIRDHLKNTATSLGSTNLYGSGLVNAEAATR

SEQ ID NO: 64886 - protein, 380 aa, Unidentified
VRSKKLWIVASTALLISVAFSSSIASAAEEAKEKYLIGFNEQEAVSEFVEQVEANDEVAILSEEEEVEIELLHEFETIPVLSVELSPEDVDALELDPAISYIEEDAEVTTMAQSVPWGISRVQAPAAHRRGLWGRGVKVAVLDTGISTHPDLNIRGGASFVPGEPSTQDGNGHGTHVAGTIAALDNSIGVLGVAPSAELYAVKVLGASGAGSVSSIAQGLEWAGANGMHVANLSLGSPSPSATLEQAVNSATSRGVLVVAASGNSGAGSISYPARYANAMAVGATDQDNNRASFSQYGAGLDLVAPGVNVQSTYPQSAYASLNGTSMATPHVAGAAALVKQKNPSWSNVQIRNRLKNTATSLGSTNLYGSGLVNAEAATR

SEQ ID NO: 64887 - protein, 380 aa, Unidentified
VRSKKLWIVASTALLISVAFSSSIASAAEEAKEKYLIGFNEQEAVSEFVEQVEANDEVAILSEEEEVEIELLHEFETIPVLSVELSPEDVDALELDPAISYIEEDAEVTTMAQSVPWGISRVQAPAAHRRRLWGRGVKVAVLDTGISTHPDLNIRGGASFVPGEPSTQDGNGHGTHVAGTIAALDNSIGVLGVAPSAELYAVKVLGASGSGSVSSIAQGLEWAGANGMHVANLSLGSPSPSATLEQAVNSATSRGVLVVAASGNSGAGSISYPARYANAMAVGATDQDNNRASFSQYGAGLDLVAPGVNVQSTYPQSTYFSLNGTSMATPHVAGAAALVKQKNPSWSNVQIRNRLKNTATSLGSTNLYGSGLVNAEAATR

SEQ ID NO: 64888 - protein, 380 aa, Unidentified
VRSKKLWIVASTALLISVAFSSSIASAAEEAKEKYLIGFNEQEAVSEFVEQVEANDEVAILSEEEEVEIELLHEFETIPVLSVELSPEDVDALELDPAISYIEEDAEVTTMAQSVPWGISRVQAPAAHNRGLAGRGVKVAVLDTGISTHPDLNIRGGASFVPGEPSTQDGNGHGTHVAGTIAALNNSIGVLGVAPSAELYAVKVLGASGSGAISSIAQGLEWAGNNRMHVANLSLGSESPSATLEQAVNSATSRGVLVVAASGNSGADSISYPARYANAMAVGATDQNNNRADFSQYGAGLDIVAPGVNVQSTYPGSTYASLNGTSMATPHVAGAAVLVKQKNPSWSNVQIRDHLKNTATSLGSTNLYGSGLVNAFAATR

SEQ ID NO: 64889 - protein, 380 aa, Unidentified
VRSKKLWIVASTALLISVAFSSSIASAAEEAKEKYLIGFNEQEAVSEFVEQVEANDEVAILSEEEEVEIELLHEFETIPVLSVELSPEDVDALELDPAISYIEEDAEVTTMAQSVPWGISRVQAPAAHNRGLTGRGVKVAVLDTGISTHPDLNIRGGASFVPGEPSTQDGNGHGTHVAGTIAALNNSIGVLGVAPSAELYAVKVLGASGGGAISSIAQGLEWAGNNGMHVANLSLGSESPSATLEQAVNSATSRGVLVVAASGNSGEGSISYPARYANAMAVGATDQNNNRADFSQYGAGLDIVAPGVNVQSTYPGSTYASLNGTSMATPHVAGAAVLVKQKNPSWSNVRIRDRLKNTATSLGSTNLYGSGLVNAEAATR

SEQ ID NO: 64890 - protein, 380 aa, Unidentified
VRSKKLWIVASTALLISVAFSSSIASAAEEAKEKYLIGFNEQEAVSEFVEQVEANDEVAILSEEEEVEIELLHEFETIPVLSVELSPEDVDALELDPAISYIEEDAEVTTMAQSVPWGISRVQAPAAHRRRLTGRGVKVAVLDTGISTHPDLNIRGGASFVPGEPSTQDGNGHGTHVAGTIAALDNSIGVLGVAPSAELYAVKVLGASGSGSVSSIAQGLEWAGANGMHVANLSLGSPSPSATLEQAVNSATSRGVLVVAASGNVGAGSISYPARYANAMAVGATDQDNNRASFSQYGAGLDIVAPGVNVQSTYPQSTYFSLNGTSMATPHVAGAAALVKQKNPSWSNVQIRNRLKNTATSLGSTNLYGSGLVSAEAATR

SEQ ID NO: 64891 - protein, 380 aa, Unidentified
VRSKKLWIVASTALLISVAFSSSIASAAEEAKEKYLIGFNEQEAVSEFVEQVEANDEVAILSEEEEVEIELLHEFETIPVLSVELSPEDVDALELDPAISYIEEDAEVTTMAQSVPWGISRVQAPAAHNRRLTGSGVKVAVLDTGISTHPDLNIRGGASFVPGEPSTQDGNGHGTHVAGTIAALNNSIGVLGVAPSAELYAVKVLGASGAGAISSIAQGLEWAGANGMHVANLSLGSPSPSATLEQAVNSATSRGVLVVAASGNSGAGSISYPARYANAMAVGATDQDNNRASFSQYGAGLDIVAPGVNVQSTYPQSAYFSLNGTSMATPHVAGAAVLVKQKNPSWSNVRIRNHLKNTATSLGSTNLYGSGLVNAEAATR

SEQ ID NO: 64892 - protein, 380 aa, Unidentified
VRSKKLWIVASTALLISVAFSSSIASAAEEAKEKYLIGFNEQEAVSEFVEQVEANDEVAILSEEEEVEIELLHEFETIPVLSVELSPEDVDALELDPAISYIEEDAEVTTMAQSVPWGISRVQAPAAHNRGLAGSGVKVAVLDTGISTHPDLRIRGGASFVPGEPSTQDGEGHGTHVAGTIAALNNSIGVLGVAPSAELYAVKVLGASGSGAISSIAQGLEWAGNNGMHVANLSLGSPSPSATLEQAVNSATSRGVLVVAASGNSGADSISYPARYANAMAVGATDQNNNRADFSQYGAGLDIVAPGVNVQSTYPGSTYASLNGTSMATPHVAGAAVLVKQKNPSWSNVRIRDHLKNTATSLGSTNLYGSGLVNAFAATR

SEQ ID NO: 64893 - protein, 380 aa, Unidentified
VRSKKLWIVASTALLISVAFSSSIASAAEEAKEKYLIGFNEQEAVSEFVEQVEANDEVAILSEEEEVEIELLHEFETIPVLSVELSPEDVDALELDPAISYIEEDAEVTTMAQSVPWGISRVQAPAAHNRGLAGSGVKVAVLDTGISTHPDLNIRGGASFVPGEPSTQDGNGHGTHVAGTIAALNNSIGVLGVAPSAELYAVKVLGASGGGAISSIAQGLEWAGNNGMHVANLSLGNESPSATLEQAVNSATSRGVLVVAASGNSGAGSISYPARYANAMAVGATDQNNNRADFSQYGAGLDIVAPGVNVQSTYPGSTYASLNGTSMATPHVAGAAVLVKQKRPSWSNVRIRDHLKNTATSLGSTNLYGSGLVNAEAATR

SEQ ID NO: 64894 - protein, 380 aa, Unidentified
VRSKKLWIVASTALLISVAFSSSIASAAEEAKEKYLIGFNEQEAVSEFVEQVEANDEVAILSEEEEVEIELLHEFETIPVLSVELSPEDVDALELDPAISYIEEDAEVTTMAQSVPWGISRVQAPAAHNRGLTGSGVKVAVLDTGISTHPDLNIRGGASFVPGEPSTQDGNGHGTHVAGTIAALNNSIGVLGVAPSAELYAVKVLGASGGGAISSIAQGLEWAGNNGMHVANLSLGSQSPSATLEQAVNSATSRGVLVVAASGNSGEGSISYPARYANAMAVGATDQNNNRADFSQYGAGLDIVAPGVNVQSTYPGSTYASENGTSMATPHVAGAAVLVKQKNPSWSNVRIRDRLKNTATSLGSTNLYGSGLVNAEAATR

SEQ ID NO: 64895 - protein, 380 aa, Unidentified
VRSKKLWIVASTALLISVAFSSSIASAAEEAKEKYLIGFNEQEAVSEFVEQVEANDEVAILSEEEEVEIELLHEFETIPVLSVELSPEDVDALELDPAISYIEEDAEVTTMAQSVPWGISRVQAPAAHNRRLWGSGVKVAVLDTGISTHPDLNIRGGASFVPGEPSTQDGNGHGTHVAGTIAALNNSIGVLGVAPSAELYAVKVLGASGAGAISSIAQGLEWAGANGMHVANLSLGSPSPSATLEQAVNSATSRGVLVVAASGNSGAGSISYPARYANAMAVGATDQNNNRASFSQYGAGLDIVAPGVNVQSTYPQSAYFSLNGTSMATPHVAGAAVLVKQKNPSWSNVRIRNHLKNTATSLGSTNLYGSGLVNAEAATR

SEQ ID NO: 64896 - protein, 380 aa, Unidentified
VRSKKLWIVASTALLISVAFSSSIASAAEEAKEKYLIGFNEQEAVSEFVEQVEANDEVAILSEEEEVEIELLHEFETIPVLSVELSPEDVDALELDPAISYIEEDAEVTTMAQSVPWGISRVQAPAAHRRRLWGRGVKVAVLDTGISTHPDLNIRGGASFVPGEPSTQDGNGHGTHVAGTIAALDNSIGVLGVAPSAELYAVKVLGASGSGSVSSIAQGLEWAGANGMHVANLSLGSPSPSATLEQAVNSATSRGVLVVAASGNSGAGSISYPARYANAMAVGATDQDNNRASFSQYGAGLDLVAPGVNVQSTYPGSAYFSLNGTSMATPHVAGAAALVKQKNPSWSNVQIRNRLKNTATSLGSTNLYGSGLVNAEAATR

SEQ ID NO: 64897 - protein, 380 aa, Unidentified
VRSKKLWIVASTALLISVAFSSSIASAAEEAKEKYLIGFNEQEAVSEFVEQVEANDEVAILSEEEEVEIELLHEFETIPVLSVELSPEDVDALELDPAISYIEEDAEVTTMAQSVPWGISRVQAPAAHNRGLAGSGVKVAVLDTGISTHPDLRIRGGASFVPGEPSTQDGNGHGTHVAGTIAALNNSIGVLGVAPSAELYAVKVLGASGSGAISSIAQGLEWAGNNGMHVANLSLGIESPSATLEQAVNSATSRGVLVVAASGNSGADSISYPARYANAMAVGATDQNNNRADFSQYGAGLDIVAPGVNVQSTYPGSTYASLNGTSMATPHVAGAAVLVKQKNPSWSNVRIRDHLKNTATSLGSTNLYGSGLVNAEAATR

SEQ ID NO: 64898 - protein, 380 aa, Unidentified
VRSKKLWIVASTALLISVAFSSSIASAAEEAKEKYLIGFNEQEAVSEFVEQVEANDEVAILSEEEEVEIELLHEFETIPVLSVELSPEDVDALELDPAISYIEEDAEVTTMAQSVPWGISRVQAPAAHNRRLWGSGVKVAVLDTGISTHPDLNIRGGASFVPGEPSTQDGNGHGTHVAGTIAALNNSIGVLGVAPSAELYAVKVLGASGGGAISSIAQGLEWAGANGMHVANLSLGSPSPSATLEQAVNSATSRGVLVVAASGNSGAGSISYPARYANAMAVGATDQDNNRASFSQYGAGLDIVAPGVNVQSTYPGSAYFSLNGTSMATPHVAGAAVLVKQKNPSWSNVRIRNHLKNTATSLGSTNLYGSGLVNAEAATR

SEQ ID NO: 64899 - protein, 380 aa, Unidentified
VRSKKLWIVASTALLISVAFSSSIASAAEEAKEKYLIGFNEQEAVSEFVEQVEANDEVAILSEEEEVEIELLHEFETIPVLSVELSPEDVDALELDPAISYIEEDAEVTTMAQSVPWGISRVQAPAAHNRGLAGRGVKVAVLDTGISTHPDLNIRGGASFVPGEPSTQDGNGHGTHVAGTIAALNNSIGVLGVAPSAELYAVKVLGASGGGAISSIAQGLEWAGNNGMHVANLSLGSESPSATLEQAVNSATSRGVLVVAASGNSGEGSISYPARYANAMAVGATDQNNNRASFSQYGAGLDIVAPGVNVQSTYPGSTYASLNGTSMATPHVAGAAVLVKQKNPSWSNVRIRDRLKNTATSLGSTNLYGSGLVNAEAATR

SEQ ID NO: 64900 - protein, 380 aa, Unidentified
VRSKKLWIVASTALLISVAFSSSIASAAEEAKEKYLIGFNEQEAVSEFVEQVEANDEVAILSEEEEVEIELLHEFETIPVLSVELSPEDVDALELDPAISYIEEDAEVTTMAQSVPWGISRVQAPAAHRRRLTGSGVKVAVLDTGISTHPDLDIRGGASFVPGEPSTQDGNGHGTHVAGTIAALDNRIGVLGVAPSAELYAVKVLGASGGGAISSIAQGLEWAGNNGMHVANLSLGSPSPSATLEQAVNSATSRGVLVVAASGNSGAGSISYPARYANAMAVGATDQNNNRASFSQYGAGLDIVAPGVNVQSTYPGSTYASENGTSMATPHVAGAAVLVKQKNPSWSNVRIRNHLKNTATSLGSTNLYGSGLVNAEAATR

SEQ ID NO: 64901 - protein, 380 aa, Unidentified
VRSKKLWIVASTALLISVAFSSSIASAAEEAKEKYLIGFNEQEAVSEFVEQVEANDEVAILSEEEEVEIELLHEFETIPVLSVELSPEDVDALELDPAISYIEEDAEVTTMAQSVPWGISRVQAPAAHNRGLAGRGVKVAVLDTGISTHPDLNIRGGASFVPGEPSTQDGNGHGTHVAGTIAALNNSIGVLGVAPSAELYAVKVLGASGGGAISSIAQGLEWAGNNGMHVANLSLGSPSPSATLEQAVNSATSRGVLVVAASGNSGEESISYPARYANAMAVGATDQNNNRADFSQYGAGLDIVAPGVNVQSTYPGSTYASLNGTSMATPHVAGAAVLVKQKNPSWSNVRIRDHLKNTATSLGSTNLYGSGLVNAEAATR

SEQ ID NO: 64902 - protein, 380 aa, Unidentified
VRSKKLWIVASTALLISVAFSSSIASAAEEAKEKYLIGFNEQEAVSEFVEQVEANDEVAILSEEEEVEIELLHEFETIPVLSVELSPEDVDALELDPAISYIEEDAEVTTMAQSVPWGISRVQAPAAHNRGLAGRGVKVAVLDTGISTHPDLNIRGGASFVPGEPSTQDGNGHGTHVAGTIAALNNSIGVLGVAPSAELYAVKVLGASGSGAISSIAQGLEWAGNNGMHVANLSLGSPSPSATLEQAVNSATSRGVLVVAASGNSGADSISYPARYANAMAVGATDQNNNRADFSQYGAGLDIVAPGVNVQSTYPGSTYASDNGTSMATPHVAGAAVLVKQKNPSWSNVRIRDHLKNTATSLGSTNLYGSGLVNAFAATR

SEQ ID NO: 64903 - protein, 380 aa, Unidentified
VRSKKLWIVASTALLISVAFSSSIASAAEEAKEKYLIGFNEQEAVSEFVEQVEANDEVAILSEEEEVEIELLHEFETIPVLSVELSPEDVDALELDPAISYIEEDAEVTTMAQSVPWGISRVQAPAAHNRGLTGSGVKVAVLDTGISTHPDLRIRGGASFVPGEPSTQDGNGHGTHVAGTIAALNNSIGVLGVAPSAELYAVKVLGASGAGAISSIAQGLEWAGNNGMHVANLSLGSPSPSATLEQAVNSATSRGVLVVAASGNSGEGSIDYPARYANAMAVGATDQNNNRADFSQYGAGLDIVAPGVNVQSTYPGSTYASLNGTSMATPHVAGAAVLVKQKNPSWSNVRIRDRLKNTATSLGSTNLYGSGLVNAEAATR

SEQ ID NO: 64904 - protein, 380 aa, Unidentified
VRSKKLWIVASTALLISVAFSSSIASAAEEAKEKYLIGFNEQEAVSEFVEQVEANDEVAILSEEEEVEIELLHEFETIPVLSVELSPEDVDALELDPAISYIEEDAEVTTMAQSVPWGISRVQAPAAHNRGLAGRGVKVAVLDTGISTHPDLNIRGGASFVPGEPSTQDGNGHGTHVAGTIAALNNSIGVLGVAPSAELYAVKVLGASGGGAISSIAQGLEWAGNNGMHVANLSLGNPSPSATLEQAVNSATSRGVLVVAASGNSGEGSISYPARYANAMAVGATDQNNNRADFSQYGAGLDIVAPGVNVQSTYPGSTYASLNGTSMATPHVAGAAVLVKQKNPSWSNVRIRDHLKNTATSLGSTNLYGSGLVNAEAATR

SEQ ID NO: 64905 - protein, 380 aa, Unidentified
VRSKKLWIVASTALLISVAFSSSIASAAEEAKEKYLIGFNEQEAVSEFVEQVEANDEVAILSEEEEVEIELLHEFETIPVLSVELSPEDVDALELDPAISYIEEDAEVTTMAQSVPWGISRVQAPAAHNRGLAGSGVKVAVLDTGISTHPDLNIRGGASFVPGEPSTQDGNGHGTHVAGTIAALNNSIGVLGVAPSAELYAVKVLGASGGGAISSIAQGLEWAGNNGMHVANLSLGSPSPSATLEQAVNSATSRGVLVVAASGNSGADSISYPARYANAMAVGATDQNNNRADFSQYGAGLDIVAPGVNVQSTYPGSTYASLNGTSMATPHVAGAAVLVKQKNPSWSNVRIRDRLKNTATSLGSTNLYGSGLVNAFAATR

SEQ ID NO: 64906 - protein, 380 aa, Unidentified
VRSKKLWIVASTALLISVAFSSSIASAAEEAKEKYLIGFNEQEAVSEFVEQVEANDEVAILSEEEEVEIELLHEFETIPVLSVELSPEDVDALELDPAISYIEEDAEVTTMAQSVPWGISRVQAPAAHRRRLWGRGVKVAVLDTGISTHPDLNIRGGASFVPGEPSTQDGNGHGTHVAGTIAALDNSIGVLGVAPSAELYAVKVLGASGAGSVSSIAQGLEWAGANGMHVANLSLGSPSPSATLEQAVNSATSRGVLVVAASGNSGAGSISYPARYANAMAVGATDQDNNRASFSQYGAGLDIVAPGVNVQSTYPQSTYFSLNGTSMATPHVAGAAALVKQKNPSWSNVQIRNRLKNTATSLGSTNLYGSGLVNAEAATR

SEQ ID NO: 64907 - protein, 380 aa, Unidentified
VRSKKLWIVASTALLISVAFSSSIASAAEEAKEKYLIGFNEQEAVSEFVEQVEANDEVAILSEEEEVEIELLHEFETIPVLSVELSPEDVDALELDPAISYIEEDAEVTTMAQSVPWGISRVQAPAAHNRGLAGSGVKVAVLDTGISTHPDLNIRGGASFVPGEPSTQDGNGHGTHVAGTIAALNNSIGVLGVAPSAELYAVKVLGASGSGAISSIAQGLEWAGNNRMHVANLSLGSESPSATLEQAVNSATSRGVLVVAASGNSGADSISYPARYANAMAVGATDQNNNRADFSQYGAGLDIVAPGVNVQSTYPGSTYASLNGTSMATPHVAGAAVLVKQKNPSWSNVRIRDHLKNTATSLGSTNLYGSGLVNAFAATR

SEQ ID NO: 64908 - protein, 380 aa, Unidentified
VRSKKLWIVASTALLISVAFSSSIASAAEEAKEKYLIGFNEQEAVSEFVEQVEANDEVAILSEEEEVEIELLHEFETIPVLSVELSPEDVDALELDPAISYIEEDAEVTTMAQSVPWGISRVQAPAAHNRGLAGSGVKVAVLDTGISTHPDLRIRGGASFVPGEPSTQDGNGHGTHVAGTIAALNNSIGVLGVAPSAELYAVKVLGASGSGAISSIAQGLEWAGNNRMHVANLSLGSESPSATLEQAVNSATSRGVLVVAASGNSGADSISYPARYANAMAVGATDQNNNRADFSQYGAGLDIVAPGVNVQSTYPGSTYASLNGTSMATPHVAGAAVLVKQKNPSWSNVRIRDHLKNTATSLGSTNLYGSGLVNAEAATR

SEQ ID NO: 64909 - protein, 380 aa, Unidentified
VRSKKLWIVASTALLISVAFSSSIASAAEEAKEKYLIGFNEQEAVSEFVEQVEANDEVAILSEEEEVEIELLHEFETIPVLSVELSPEDVDALELDPAISYIEEDAEVTTMAQSVPWGISRVQAPAAHNRGLAGSGVKVAVLDTGISTHPDLRIRGGASFVPGEPSTQDGNGHGTHVAGTIAALNNSIGVLGVAPSAELYAVKVLGASGDGAISSIAQGLEWAGNNRMHVANLSLGSESPSATLEQAVNSATSRGVLVVAASGNSGADSISYPARYANAMAVGATDQNNNRADFSQYGAGLDIVAPGVNVQSTYPGSTYASDNGTSMATPHVAGAAVLVKQKNPSWSNVQIRNHLKNTATSLGSTNLYGSGLVNAEAATR

SEQ ID NO: 64910 - protein, 380 aa, Unidentified
VRSKKLWIVASTALLISVAFSSSIASAAEEAKEKYLIGFNEQEAVSEFVEQVEANDEVAILSEEEEVEIELLHEFETIPVLSVELSPEDVDALELDPAISYIEEDAEVTTMAQSVPWGISRVQAPAAHRRGLWGRGVKVAVLDTGISTHPELNIRGGASFVPGEPSTQDGNGHGTHVAGTIAALDNSIGVLGVAPSAELYAVKVLGASGAGSVSSIAQGLEWAGNNGMHVANLSLGSPSPSATLEQAVNSATSRGVLVVAASGNSGAGTISYPARYANAMAVGATDQDNNRASFSQYGAGLDIVAPGVNVQSTYPQSAYASLNGTSMATPHVAGAAALVKQKNPSWSNVQIRNRLKNTATSLGSTNLYGSGLVNAEAATR

SEQ ID NO: 64911 - protein, 380 aa, Unidentified
VRSKKLWIVASTALLISVAFSSSIASAAEEAKEKYLIGFNEQEAVSEFVEQVEANDEVAILSEEEEVEIELLHEFETIPVLSVELSPEDVDALELDPAISYIEEDAEVTTMAQSVPWGISRVQAPAAHNRGLTGRGVKVAVLDTGISTHPDLNIRGGASFVPGEPSTQDGNGHGTHVAGTIAALNNSIGVLGVAPSAELYAVKVLGASGGGAISSIAQGLEWAGNNGMHVANLSLGLPSPSATLEQAVNSATSRGVLVVAASGNSGEGSISYPARYANAMAVGATDQNNNRADFSQYGAGLDIVAPGVNVQSTYPGSTYASLNGTSMATPHVAGAAVLVKQKNPSWSNVRIRDRLKNTATSLGSTNLYGSGLVNAEAATR

SEQ ID NO: 64912 - protein, 380 aa, Unidentified
VRSKKLWIVASTALLISVAFSSSIASAAEEAKEKYLIGFNEQEAVSEFVEQVEANDEVAILSEEEEVEIELLHEFETIPVLSVELSPEDVDALELDPAISYIEEDAEVTTMAQSVPWGISRVQAPAAHNRGLTGSGVKVAVLDTGISTHPDLNIRGGASFVPGEPSTQDGNGHGTHVAGTIAALDNSIGVLGVAPSAELYAVKVLGASGAGAISSIAQGLEWAGNNGMHVANLSLGSPSPSATLEQAVNSATSRGVLVVAASGNSGEGSISYPARYANAMAVGATDQNNNRADFSQYGAGLDIVAPGVNVQSTYPGSTYASLNGTSMATPHVAGAAVLVKQKNPSWSNVRIRDRLKNTATSLGSTNLYGSGLVNAFAATR

SEQ ID NO: 64913 - protein, 380 aa, Unidentified
VRSKKLWIVASTALLISVAFSSSIASAAEEAKEKYLIGFNEQEAVSEFVEQVEANDEVAILSEEEEVEIELLHEFETIPVLSVELSPEDVDALELDPAISYIEEDAEVTTMAQSVPWGISRVQAPAAHNRRLTGSGVKVAVLDTGISTHPDLNIRGGASFVPGEPSTQDGNGHGTHVAGTIAALNNRIGVLGVAPSAELYAVKVLGASGGGAISSIAQGLEWAGANGMHVANLSLGSPSPSATLEQAVNSATSRGVLVVAASGNSGAGSISYPARYANAMAVGATDQDNNRASFSQYGAGLDIVAPGVNVQSTYPQSAYFSLNGTSMATPHVAGAAVLVKQKNPSWSNVQIRNHLKNTATSLGSTNLYGSGLVNAEAATR

SEQ ID NO: 64914 - protein, 380 aa, Unidentified
VRSKKLWIVASTALLISVAFSSSIASAAEEAKEKYLIGFNEQEAVSEFVEQVEANDEVAILSEEEEVEIELLHEFETIPVLSVELSPEDVDALELDPAISYIEEDAEVTTMAQSVPWGISRVQAPASHNRGLTGRGVKVAVLDTGISTHPDLNIRGGASFVPGEPSTQDGNGHGTHVAGTIAALNNSIGVLGVAPSAELYAVKVLGASGGGAISSIAQGLEWAGNNGMHVANLSLGSPSPSATLEQAVNSATSRGVLVVAASGNSGEGSISYPARYANAMAVGATDQNNNRADFSQYGAGLDIVAPGVNVQSTYPGSTYASLNGTSMATPHVAGAAVLVKQKNPSWSNVRIRDRLKNTATSLGSTNLYGSGLVNAEAATR

SEQ ID NO: 64915 - protein, 380 aa, Unidentified
VRSKKLWIVASTALLISVAFSSSIASAAEEAKEKYLIGFNEQEAVSEFVEQVEANDEVAILSEEEEVEIELLHEFETIPVLSVELSPEDVDALELDPAISYIEEDAEVTTMAQSVPWGISRVQAPAAHNRRLWGSGVKVAVLDTGISTHPDLNIRGGASFVPGEPSTQDGNGHGTHVAGTIAALNNRIGVLGVAPSAELYAVKVLGASGGGAISSIAQGLEWAGANGMHVANLSLGSPSPSATLEQAVNSATSRGVLVVAASGNSGAGSISYPARYANAMAVGATDQNNNRASFSQYGAGLDIVAPGVNVQSTYPGSAYFSLNGTSMATPHVAGAAVLVKQKNPSWSNVRIRNHLKNTATSLGSTNLYGSGLVNAEAATR

SEQ ID NO: 64916 - protein, 380 aa, Unidentified
VRSKKLWIVASTALLISVAFSSSIASAAEEAKEKYLIGFNEQEAVSEFVEQVEANDEVAILSEEEEVEIELLHEFETIPVLSVELSPEDVDALELDPAISYIEEDAEVTTMAQSVPWGISRVQAPAAHNRRLTGSGVKVAVLDTGISTHPDLNIRGGASFVPGEPSTQDGNGHGTHVAGTIAALNNRIGVLGVAPSAELYAVKVLGASGAGAISSIAQGLEWAGANGMHVANLSLGSPSPSATLEQAVNSATSRGVLVVAASGNSGAGSISYPARYANAMAVGATDQDNNRASFSQYGAGLDLVAPGVNVQSTYPGSTYFSLNGTSMATPHVAGAAVLVKQKNPSWSNVRIRNHLKNTATSLGSTNLYGSGLVNAEAATR

SEQ ID NO: 64917 - protein, 380 aa, Unidentified
VRSKKLWIVASTALLISVAFSSSIASAAEEAKEKYLIGFNEQEAVSEFVEQVEANDEVAILSEEEEVEIELLHEFETIPVLSVELSPEDVDALELDPAISYIEEDAEVTTMAQSVPWGISRVQAPAAHNRGLTGSGVKVAVLDTGISTHPDLNIRGGASFVPGEPSTQDGNGHGTHVAGTIAALNNSIGVLGVAPSAELYAVKVLGASGAGAISSIAQGLEWAGNNGMHVANLSLGSPSPSATLEQAVNSATSRGVLVVAASGNSGEGSIDYPARYANAMAVGATDQNNNRADFSQYGAGLDIVAPGVNVQSTYPGSTYASLNGTSMATPHVAGAAVLVKQKNPSWSNVRIRDRLKNTATSLGSTNLYGSGLVNAFAATR

SEQ ID NO: 64918 - protein, 380 aa, Unidentified
VRSKKLWIVASTALLISVAFSSSIASAAEEAKEKYLIGFNEQEAVSEFVEQVEANDEVAILSEEEEVEIELLHEFETIPVLSVELSPEDVDALELDPAISYIEEDAEVTTMAQSVPWGISRVQAPAAHNRRLWGSGVKVAVLDTGISTHPDLNIRGGASFVPGEPSTQDGNGHGTHVAGTIAALNNSIGVLGVAPSAELYAVKVLGASGGGAISSIAQGLEWAGANGMHVANLSLGSPSPSATLEQAVNSATSRGVLVVAASGNSGAGSISYPARYANAMAVGATDQDNNRASFSQYGAGLDIVAPGVNVQSTYPQSAYASLNGTSMATPHVAGAAVLVKQKNPSWSNVRIRNHLKNTATSLGSTNLYGSGLVNAEAATR

SEQ ID NO: 64919 - protein, 380 aa, Unidentified
VRSKKLWIVASTALLISVAFSSSIASAAEEAKEKYLIGFNEQEAVSEFVEQVEANDEVAILSEEEEVEIELLHEFETIPVLSVELSPEDVDALELDPAISYIEEDAEVTTMAQSVPWGISRVQAPAAHNRGLAGSGVKVAVLDTGISTHPDLRIRGGASFVPGEPSTQDGNGHGTHVAGTIAALNNSIGVLGVAPSAELYAVKVLGASGSGAISSIAQGLEWAGNNRMHVANLSLGSPSPSATLEQAVNSATSRGVLVVAASGNSGADSISYPARYANAMAVGATDQNNNRADFSQYGAGLDIVAPGVNVQSTYPGSTYASDNGTSMATPHVAGAAVLVKQKNPSWSNVQIRDHLKNTATSLGSTNLYGSGLVNAFAATR

SEQ ID NO: 64920 - protein, 380 aa, Unidentified
VRSKKLWIVASTALLISVAFSSSIASAAEEAKEKYLIGFNEQEAVSEFVEQVEANDEVAILSEEEEVEIELLHEFETIPVLSVELSPEDVDALELDPAISYIEEDAEVTTMAQSVPWGISRVQAPAAHRRRLWGRGVKVAVLDTGISTHPDLNIRGGASFVPGEPSTQDGNGHGTHVAGTIAALDNSIGVLGVAPSAELYAVKVLGASGAGSVSSIAQGLEWAGANGMHVANLSLGSPSPSATLEQAVNSATSRGVLVVAASGNSGAGSISYPARYANAMAVGATDQNNNRASFSQYGAGLDLVAPGVNVQSTYPQSTYFSLNGTSMATPHVAGAAALVKQKNPSWSNVQIRNRLKNTATSLGSTNLYGSGLVNAEAATR

SEQ ID NO: 64921 - protein, 380 aa, Unidentified
VRSKKLWIVASTALLISVAFSSSIASAAEEAKEKYLIGFNEQEAVSEFVEQVEANDEVAILSEEEEVEIELLHEFETIPVLSVELSPEDVDALELDPAISYIEEDAEVTTMAQSVPWGISRVQAPAAHNRGLTGSGVKVAVLDTGISTHPDLNIRGGASFVPGEPSTQDGNGHGTHVAGTIAALNNSIGVLGVAPSAELYAVKVLGASGAGAISSIAQGLEWAGNNGMHVANLSLGSPSPSATLEQAVNSATSRGVLVVAASGNSGEGSISYPARYANAMAVGATDQNNNRADFSQYGAGLDIVAPGVNVQSTYPGSTYASENGTSMATPHVAGAAVLVKQKNPSWSNVRIRDRLKNTATSLGSTNLYGSGLVNAFAATR

SEQ ID NO: 64922 - protein, 380 aa, Unidentified
VRSKKLWIVASTALLISVAFSSSIASAAEEAKEKYLIGFNEQEAVSEFVEQVEANDEVAILSEEEEVEIELLHEFETIPVLSVELSPEDVDALELDPAISYIEEDAEVTTMAQSVPWGISRVQAPAAHRRGLWGRGVKVAVLDTGISTHPDLNIRGGASFVPGEPSTQDGNGHGTHVAGTIAALDNSIGVLGVAPSAELYAVKVLGASGSGSVSSIAQGLEWAGANGMHVANLSLGSPSPSATLEQAVNSATSRGVLVVAASGNSGAGSISYPARYANAMAVGATDQDNNRASFSQYGAGLDLVAPGVNVQSTVPQSAYASLNGTSMATPHVAGAAALVKQKNPSWSNVQIRNRLKNTATSLGSTNLYGSGLVNAEAATR

SEQ ID NO: 64923 - protein, 380 aa, Unidentified
VRSKKLWIVASTALLISVAFSSSIASAAEEAKEKYLIGFNEQEAVSEFVEQVEANDEVAILSEEEEVEIELLHEFETIPVLSVELSPEDVDALELDPAISYIEEDAEVTTMAQSVPWGISRVQAPAAHRRGLTGRGVKVAVLDTGISTHPDLNITGGASFVPGEPSTQDGNGHGTHVAGTIAALDNRIGVLGVAPSAELYAVKVLGASGGGAISSIAQGLEWAGNNGMHVANLSLGSPSPSATLEQAVNSATSRGVLVVAASGNSGAGSISYPARYANAMAVGATDQNNNRASFSQYGAGLDIVAPGVNVQSTYPGSTYASLNGTSMATPHVAGAAVLVKQKNPSWSNVRIRNHLKNTATSLGSTNLYGSGLVRAEAATR

SEQ ID NO: 64924 - protein, 380 aa, Unidentified
VRSKKLWIVASTALLISVAFSSSIASAAEEAKEKYLIGFNEQEAVSEFVEQVEANDEVAILSEEEEVEIELLHEFETIPVLSVELSPEDVDALELDPAISYIEEDAEVTTMAQSVPWGISRVQAPAAHNRGLAGSGVKVAVLDTGISTHPDLNIRGGASFVPGEPSTQDGNGHGTHVAGTIAALDNSIGVLGVAPSAELYAVKVLGASGGGAISSIAQGLEWAGNNGMHVANLSLGSPSPSATLEQAVNSATSRGVLVVAASGNSGADSISYPARYANAMAVGATDQNNNRASFSQYGAGLDIVAPGVNVQSTYPGSTYASLNGTSMATPHVAGAAVLVKQKNPSWSNVRIRDRLKNTATSLGSTNLYGSGLVNAFAATR

SEQ ID NO: 64925 - protein, 380 aa, Unidentified
VRSKKLWIVASTALLISVAFSSSIASAAEEAKEKYLIGFNEQEAVSEFVEQVEANDEVAILSEEEEVEIELLHEFETIPVLSVELSPEDVDALELDPAISYIEEDAEVTTMAQSVPWGISRVQAPAAHRRRLTGRGVKVAVLDTGISTHPDLDIRGGASFVPGEPSTQDGNGHGTHVAGTIAALDNRIGVLGVAPSAELYAVKVLGASGGGAISSIAQGLEWAGNNGMHVANLSLGSPSPSATLEQAVNSATSRGVLVVAASGNSGAGSISYPARYANAMAVGATDQNNNRASFSQYGAGLDIVAPGVNVQSTYPGSTYASLNGTSMATPHVAGAAVLVKQKNPSWSNVRIRNHLKNTATSLGSTNLYGSGLVNAEAATR

SEQ ID NO: 64926 - protein, 380 aa, Unidentified
VRSKKLWIVASTALLISVAFSSSIASAAEEAKEKYLIGFNEQEAVSEFVEQVEANDEVAILSEEEEVEIELLHEFETIPVLSVELSPEDVDALELDPAISYIEEDAEVTTMAQSVPWGISRVQAPAAHNRGLTGSGVKVAVLDTGISTHPDLNIRGGASFVPGEPSTQDGNGHGTHVAGTIAALNNSIGVLGVAPSAELYAVKVLGASGGGAISSIAQGLEWAGNNGMHVANLSLGSPSPSATLEQAVNSATSRGVLVVAASGNSGEGSIDYPARYANAMAVGATDQNNNRADFSQYGAGLDIVAPGVNVQSTYPGSTYASLNGTSMATPHVAGAAVLVKQKNPSWSNVRIRDRLKNTATSLGSTNLYGSGLVNAFAATR

SEQ ID NO: 64927 - protein, 380 aa, Unidentified
VRSKKLWIVASTALLISVAFSSSIASAAEEAKEKYLIGFNEQEAVSEFVEQVEANDEVAILSEEEEVEIELLHEFETIPVLSVELSPEDVDALELDPAISYIEEDAEVTTMAQSVPWGISRVQAPAAHNRGLAGSGVKVAVLDTGISTHPDLNIRGGASFVPGEPSTQDGNGHGTHVAGTIAALNNSIGVLGVAPSAELYAVKVLGASGGGAISSIAQGLEWAGNNGMHVANLSLGSESPSATLEQAVNSATSRGVLVVAASGNSGEESISYPARYANAMAVGATDQNNNRASFSQYGAGLDIVAPGVNVQSTYPGSTYASLNGTSMATPHVAGAAVLVKQKNPSWSNVRIRDRLKNTATSLGSTNLYGSGLVNAEAATR

SEQ ID NO: 64928 - protein, 380 aa, Unidentified
VRSKKLWIVASTALLISVAFSSSIASAAEEAKEKYLIGFNEQEAVSEFVEQVEANDEVAILSEEEEVEIELLHEFETIPVLSVELSPEDVDALELDPAISYIEEDAEVTTMAQSVPWGISRVQAPAAHNRGLTGRGVKVAVLDTGISTHPDLNIRGGASFVPGEPSTQDGNGHGTHVAGTIAALNNSIGVLGVAPSAELYAVKVLGASGGGAISSIAQGLEWAGNNGMHVANLSLGSESPSATLEQAVNSATSRGVLVVAASGNSGAESISYPARYANAMAVGATDQNNNRADFSQYGAGLDIVAPGVNVQSTYPGSTYASLNGTSMATPHVAGAAVLVKQKNPSWSNVRIRDRLKNTATSLGSTNLYGSGLVNAEAATR

SEQ ID NO: 64929 - protein, 380 aa, Unidentified
VRSKKLWIVASTALLISVAFSSSIASAAEEAKEKYLIGFNEQEAVSEFVEQVEANDEVAILSEEEEVEIELLHEFETIPVLSVELSPEDVDALELDPAISYIEEDAEVTTMAQSVPWGISRVQAPAAHNRGLTGRGVKVAVLDTGISTHPDLNIRGGASFVPGEPSTQDGNGHGTHVAGTIAALNNSIGVLGVAPSAELYAVKVLGASGGGAISSIAQGLEWAGNNGMHVANLSLGNPSPSATLEQAVNSATSRGVLVVAASGNSGEESISYPARYANAMAVGATDQNNNRADFSQYGAGLDIVAPGVNVQSTYPGSTYASLNGTSMATPHVAGAAVLVKQKNPSWSNVRIRDHLKNTATSLGSTNLYGSGLVNAEAATR

SEQ ID NO: 64930 - protein, 380 aa, Unidentified
VRSKKLWIVASTALLISVAFSSSIASAAEEAKEKYLIGFNEQEAVSEFVEQVEANDEVAILSEEEEVEIELLHEFETIPVLSVELSPEDVDALELDPAISYIEEDAEVTTMAQSVPWGISRVQAPAAHRRRLTGRGVKVAVLDTGISTHPDLNIRGGASFVPGEPSTQDGNGHGTHVAGTIAALDNSIGVLGVAPSAELYAVKVLGASGAGSVSSIAQGLEWAGANGMHVANLSLGSPSPSATLEQAVNSATSRGVLVVAASGNSGAGSISYPARYANAMAVGATDQDNNRASFSQYGAGLDLVAPGVNVQSTYPQSAYASLNGTSMATPHVAGAAALVKQKNPSWSNVQIRNRLKNTATSLGSTNLYGSGLVNAEAATR

SEQ ID NO: 64931 - protein, 380 aa, Unidentified
VRSKKLWIVASTALLISVAFSSSIASAAEEAKEKYLIGFNEQEAVSEFVEQVEANDEVAILSEEEEVEIELLHEFETIPVLSVELSPEDVDALELDPAISYIEEDAEVTTMAQSVPWGISRVQAPAAHNRGLAGRGVKVAVLDTGISTHPDLNIRGGASFVPGEPSTQDGNGHGTHVAGTIAALNNSIGVLGVAPSAELYAVKVLGASGSGAISSIAQGLEWAGNNRMHVANLSLGIESPSATLEQAVNSATSRGVLVVAASGNSGADSISYPARYANAMAVGATDQNNNRADFSQYGAGLDIVAPGVNVQSTYPGSTYASLNGTSMATPHVAGAAVLVKQKNPSWSNVQIRDHLKNTATSLGSTNLYGSGLVNAEAATR

SEQ ID NO: 64932 - protein, 380 aa, Unidentified
VRSKKLWIVASTALLISVAFSSSIASAAEEAKEKYLIGFNEQEAVSEFVEQVEANDEVAILSEEEEVEIELLHEFETIPVLSVELSPEDVDALELDPAISYIEEDAEVTTMAQSVPWGISRVQAPAAHNRGLAGRGVKVAVLDTGISTHPDLRIRGGASFVPGEPSTQDGNGHGTHVAGTIAALNNSIGVLGVAPSAELYAVKVLGASGSGAISSIAQGLEWAGNNGMHVANLSLGSPSPSATLEQAVNSATSRGVLVVAASGNSGADSISYPARYANAMAVGATDQNNNRADFSQYGAGLDIVAPGVNVQSTYPGSTYASDNGTSMATPHVAGAAVLVKQKNPSWSNVQIRDHLKNTATSLGSTNLYGSGLVNAFAATR

SEQ ID NO: 64933 - protein, 380 aa, Unidentified
VRSKKLWIVASTALLISVAFSSSIASAAEEAKEKYLIGFNEQEAVSEFVEQVEANDEVAILSEEEEVEIELLHEFETIPVLSVELSPEDVDALELDPAISYIEEDAEVTTMAQSVPWGISRVQAPAAHNRRLTGSGVKVAVLDTGISTHPDLNIRGGASFVPGEPSTQDGNGHGTHVAGTIAALNNSIGVLGVAPSAESYAVKVLGASGGGAISSIAQGLEWAGANGMHVANLSLGSPSPSATLEQAVNSATSRGVLVVAASGNSGAGSISYPARYANAMAVGATDQDNNRASFSQYGAGLDIVAPGVNVQSTYPGSAYFSLNGTSMATPHVAGAAVLVKQKNPSWSNVRIRNHLKNTATSLGSTNLYGSGLVNAEAATR

SEQ ID NO: 64934 - protein, 380 aa, Unidentified
VRSKKLWIVASTALLISVAFSSSIASAAEEAKEKYLIGFNEQEAVSEFVEQVEANDEVAILSEEEEVEIELLHEFETIPVLSVELSPEDVDALELDPAISYIEEDAEVTTMAQSVPWGISRVQAPAAHNRGLAGRGVKVAVLDTGISTHPDLNIRGGASFVPGEPSTQDGNGHGTHVAGTIAALNNSIGVLGVAPSAELYAVKVLGASGGGAISSIAQGLEWAGNNGMHVANLSLGSPSPSATLEQAVNSATSRGVIVVAASGNSGEGSISYPARYANAMAVGATDQNNNRADFSQYGAGLDIVAPGVNVQSTYPGSTYASLNGTSMATPHVAGAAVLVKQKNPSWSNVRIRDHLKNTATSLGSTNLYGSGLVNAEAATR

SEQ ID NO: 64935 - protein, 380 aa, Unidentified
VRSKKLWIVASTALLISVAFSSSIASAAEEAKEKYLIGFNEQEAVSEFVEQVEANDEVAILSEEEEVEIELLHEFETIPVLSVELSPEDVDALELDPAISYIEEDAEVTTMAQSVPWGISRVQAPAAHNRGLAGRGVKVAVLDTGISTHPDLNIRGGASFVPGEPSTQDGNGHGTHVAGTIAALNNSIGVLGVAPSAELYAVKVLGASGGGAISSIAQGLEWAGNNGMHVANLSLGNESPSATLEQAVNSATSRGVLVVAASGNSGAGSISYPARYANAMAVGATDQNNNRADFSQYGAGLDIVAPGVNVQSTYPGSTYASLNGTSMATPHVAGAAVLVKQKNPSWSNVRIRDHLKNTATSLGSTNLYGSGLVNAEAATR

SEQ ID NO: 64936 - protein, 380 aa, Unidentified
VRSKKLWIVASTALLISVAFSSSIASAAEEAKEKYLIGFNEQEAVSEFVEQVEANDEVAILSEEEEVEIELLHEFETIPVLSVELSPEDVDALELDPAISYIEEDAEVTTMAQSVPWGISRVQAPAAHNRGLAGSGVKVAVLDTGISTHPDLNIRGGASFVPGEPSTQDGNGHGTHVAGTIAALNNSIGVLGVAPSAELYAVKVLGASGGGAISSIAQGLEWAGNNGMHVANLSLGSESPSATLEQAVNSATSRGVLVVAASGNSGEGSISYPARYANAMAVGATDQNNNRADFSQYGAGLDIVAPGVNVQSTYPGSTYASLNGTSMATPHVAGAAVLVKQKNPSWSNVRIRDRLKNTATSLGSTNLYGSGLVNAEAATR

SEQ ID NO: 64937 - protein, 380 aa, Unidentified
VRSKKLWIVASTALLISVAFSSSIASAAEEAKEKYLIGFNEQEAVSEFVEQVEANDEVAILSEEEEVEIELLHEFETIPVLSVELSPEDVDALELDPAISYIEEDAEVTTMAQSVPWGISRVQAPAAHRRGLTGSGVKVAVLDTGISTHPDLDITGGASFVPGEPSTQDGNGHGTHVAGTIAALDNRIGVLGVAPSAELYAVKVLGASGGGAISSIAQGLEWAGNNGMHVANLSLGSPSPSATLEQAVNSATSRGVLVVAASGNSGAGSISYPARYANAMAVGATDQNNNRASFSQYGAGLDIVAPGVNVQSTYPGSTYASLNGTSMATPHVAGAAVLVKQKNPSWSNVRIRNHLKNTATSLGSTNLYGSGLVRAEAATR

SEQ ID NO: 64938 - protein, 380 aa, Unidentified
VRSKKLWIVASTALLISVAFSSSIASAAEEAKEKYLIGFNEQEAVSEFVEQVEANDEVAILSEEEEVEIELLHEFETIPVLSVELSPEDVDALELDPAISYIEEDAEVTTMAQSVPWGISRVQAPAAHRRRLTGRGVKVAVLDTGISTHPDLDIRGGASFVPGEPSTQDGNGHGTHVAGTIAALDNSIGVLGVAPSAELYAVKVLGASGGGAISSIAQGLEWAGNNGMHVANLSLGSPSPSATLEQAVNSATSRGVLVVAASGNSGAGSISYPARYANAMAVGATDQNNNRASFSQYGAGLDIVAPGVNVQSTYPGSTYASLNGTSMATPHVAGAAVLVKQKNPSWSNVRIRNHLKNTATSLGSTNLYGSGLVRAEAATR

SEQ ID NO: 64939 - protein, 380 aa, Unidentified
VRSKKLWIVASTALLISVAFSSSIASAAEEAKEKYLIGFNEQEAVSEFVEQVEANDEVAILSEEEEVEIELLHEFETIPVLSVELSPEDVDALELDPAISYIEEDAEVTTMAQSVPWGISRVQAPAAHNRGLTGSGVKVAVLDTGISTHPDLNIRGGASFVPGEPSTQDGNGHGTHVAGTIAALNNSIGVLGVAPSAELYAVKVLGASGGGAISSIAQGLEWAGNNGMHVANLSLGSQAPSATLEQAVNSATSRGVLVVAASGNSGEGSISYPARYANAMAVGATDQNNNRADFSQYGAGLDIVAPGVNVQSTYPGSTYASLNGTSMATPHVAGAAVLVKQKNPSWSNVRIRDRLKNTATSLGSTNLYGSGLVNAEAATR

SEQ ID NO: 64940 - protein, 380 aa, Unidentified
VRSKKLWIVASTALLISVAFSSSIASAAEEAKEKYLIGFNEQEAVSEFVEQVEANDEVAILSEEEEVEIELLHEFETIPVLSVELSPEDVDALELDPAISYIEEDAEVTTMAQSVPWGISRVQAPAAHNRGLTGSGVKVAVLDTGISTHPDLRIRGGASFVPGEPSTQDGNGHGTHVAGTIAALNNSIGVLGVAPSAELYAVKVLGASGAGAISSIAQGLEWAGNNGMHVANLSLGSPSPSATLEQAVNSATSRGVLVVAASGNSGEGSISYPARYANAMAVGATDQNNNRADFSQYGAGLDIVAPGVNVQSTYPGSTYASENGTSMATPHVAGAAVLVKQKNPSWSNVRIRDRLKNTATSLGSTNLYGSGLVNAEAATR

SEQ ID NO: 64941 - protein, 380 aa, Unidentified
VRSKKLWIVASTALLISVAFSSSIASAAEEAKEKYLIGFNEQEAVSEFVEQVEANDEVAILSEEEEVEIELLHEFETIPVLSVELSPEDVDALELDPAISYIEEDAEVTTMAQSVPWGISRVQAPAAHNRGLAGSGVKVAVLDTGISTHPDLRIRGGASFVPGEPSTQDGNGHGTHVAGTIAALNNSIGVLGVAPSAELYAVKVLGASGSGAISSIAQGLEWAGNNRMHVANLSLGIESPSATLEQAVNSATSRGVLVVAASGNSGADSISYPARYANAMAVGATDQNNNRADFSQYGAGLDIVAPGVNVQSTYPGSTYASLNGTSMATPHVAGAAVLVKQKNPSWSNVQIRDHLKNTATSLGSTNLYGSGLVNAEAATR

SEQ ID NO: 64942 - protein, 380 aa, Unidentified
VRSKKLWIVASTALLISVAFSSSIASAAEEAKEKYLIGFNEQEAVSEFVEQVEANDEVAILSEEEEVEIELLHEFETIPVLSVELSPEDVDALELDPAISYIEEDAEVTTMAQSVPWGISRVQAPAAHRRGLWGRGVKVAVLDTGISTHPDLNIRGGASFVPGEPSTQDGNGHGTHVAGTIAALDNSIGVLGVAPSAELYAVKVLGASGSGSVSSIAQGLEWAGANGMHVANLSLGSPSPSATLEQAVNSATSRGVLVVAASGNSGAGSISYPARYANAMAVGATDQDNNRASFSQYGAGLDLVAPGVNVQSTYPQSAYFSLNGTSMATPHVAGAAALVKQKNPSWSNVQIRNRLKNTATSLGSTNLYGSGLVNAEAATR

SEQ ID NO: 64943 - protein, 380 aa, Unidentified
VRSKKLWIVASTALLISVAFSSSIASAAEEAKEKYLIGFNEQEAVSEFVEQVEANDEVAILSEEEEVEIELLHEFETIPVLSVELSPEDVDALELDPAISYIEEDAEVTTMAQSVPWGISRVQAPAAHNRGLTGRGVKVAVLDTGISTHPDLNIRGGASFVPGEPSTQDGNGHGTHVAGTIAALNNSIGVLGVAPSAELYAVKVLGASGGGAISSIAQGLEWAGNNGMHVANLSLGSESPSATLEQAVNSATSRGVLVVAASGNSGAESISYPARYANAMAVGATDQNNNRADFSQYGAGLDIVAPGVNVQSTYPGSTYASLNGTSMATPHVAGAAVLVKQKRPSWSNVRIRDHLKNTATSLGSTNLYGSGLVNAEAATR

SEQ ID NO: 64944 - protein, 380 aa, Unidentified
VRSKKLWIVASTALLISVAFSSSIASAAEEAKEKYLIGFNEQEAVSEFVEQVEANDEVAILSEEEEVEIELLHEFETIPVLSVELSPEDVDALELDPAISYIEEDAEVTTMAQSVPWGISRVQAPAAHNRRLWGSGVKVAVLDTGISTHPDLNIRGGASFVPGEPSTQDGNGHGTHVAGTIAALNNRIGVLGVAPSAELYAVKVLGASGGGAISSIAQGLEWAGANGMHVANLSLGSPSPSATLEQAVNSATSRGVLVVAASGNSGAGSISYPARYANAMAVGATDQDNNRASFSQYGAGLDIVAPGVNVQSTYPGSTYFSLNGTSMATPHVAGAAVLVKQKNPSWSNVRIRNHLKNTATSLGSTNLYGSGLVNAEAATR

SEQ ID NO: 64945 - protein, 380 aa, Unidentified
VRSKKLWIVASTALLISVAFSSSIASAAEEAKEKYLIGFNEQEAVSEFVEQVEANDEVAILSEEEEVEIELLHEFETIPVLSVELSPEDVDALELDPAISYIEEDAEVTTMAQSVPWGISRVQAPAAHNRGLAGSGVKVAVLDTGISTHPDLNIRGGASFVPGEPSTQDGNGHGTHVAGTIAALNNSIGVLGVAPSAELYAVKVLGASGGGAISSIAQGLEWAGNNGMHVANLSLGSESPSATLEQAVNSATSRGVLVVAASGNSGAESISYPARYANAMAVGATDQNNNRADFSQYGAGLDIVAPGVNVQSTYPGSTYASLNGTSMATPHVAGAAVLVKQKNPSWSNVRIRDRLKNTATSLGSTNLYGSGLVNAEAATR

SEQ ID NO: 64946 - protein, 380 aa, Unidentified
VRSKKLWIVASTALLISVAFSSSIASAAEEAKEKYLIGFNEQEAVSEFVEQVEANDEVAILSEEEEVEIELLHEFETIPVLSVELSPEDVDALELDPAISYIEEDAEVTTMAQSVPWGISRVQAPAAHNRGLTGSGVKVAVLDTGISTHPDLNIRGGASFVPGEPSTQDGNGHGTHVAGTIAALNNSIGVLGVAPSAELYAVKVLGASGGGAISSIAQGLEWAGNNGMHVANLSLGSQSPSATLEQAVNSATSRGVLVVAASGNSGEGSISYPARYANAMAVGATDQDNNRADFSQYGAGLDIVAPGVNVQSTYPGSTYASLNGTSMATPHVAGAAVLVKQKNPSWSNVRIRDRLKNTATSLGSTNLYGSGLVNAEAATR

SEQ ID NO: 64947 - protein, 380 aa, Unidentified
VRSKKLWIVASTALLISVAFSSSIASAAEEAKEKYLIGFNEQEAVSEFVEQVEANDEVAILSEEEEVEIELLHEFETIPVLSVELSPEDVDALELDPAISYIEEDAEVTTMAQSVPWGISRVQAPAAHNRRLWGSGVKVAVLDTGISTHPDLNIRGGASFVPGEPSTQDGNGHGTHVAGTIAALNNRIGVLGVAPSAELYAVKVLGASGGGAISSIAQGLEWAGANGMHVANLSLGSPSPSATLEQAVNSATSRGVLVVAASGNSGAGSISYPARYANAMAVGATDQDNNRASFSQYGAGLDIVAPGVNVQSTYPGSAYASLNGTSMATPHVAGAAVLVKQKNPSWSNVRIRNHLKNTATSLGSTNLYGSGLVNAEAATR

SEQ ID NO: 64948 - protein, 380 aa, Unidentified
VRSKKLWIVASTALLISVAFSSSIASAAEEAKEKYLIGFNEQEAVSEFVEQVEANDEVAILSEEEEVEIELLHEFETIPVLSVELSPEDVDALELDPAISYIEEDAEVTTMAQSVPWGISRVQAPAAHNRGLTGRGVKVAVLDTGISTHPDLNIRGGASFVPGEPSTQDGNGHGTHVAGTIAALNNSIGVLGVAPSAELYAVKVLGASGGGAISSIAQGLEWAGNNGMHVANLSLGSESPSATLEQAVNSATSRGVLVVAASGNSGEESISYPARYANAMAVGATDQNNNRASFSQYGAGLDIVAPGVNVQSTYPGSTYASLNGTSMATPHVAGAAVLVKQKRPSWSNVRIRDHLKNTATSLGSTNLYGSGLVNAEAATR

SEQ ID NO: 64949 - protein, 380 aa, Unidentified
VRSKKLWIVASTALLISVAFSSSIASAAEEAKEKYLIGFNEQEAVSEFVEQVEANDEVAILSEEEEVEIELLHEFETIPVLSVELSPEDVDALELDPAISYIEEDAEVTTMAQSVPWGISRVQAPAAHNRRLTGSGVKVAVLDTGISTHPDLNIRGGASFVPGEPSTQDGNGHGTHVAGTIAALNNRIGVLGVAPSAELYAVKVLGASGAGAISSIAQGLEWAGANGMHVANLSLGSPSPSATLEQAVNSATSRGVLVVAASGNSGAGSISYPARYANAMAVGATDQDNNRASFSQYGAGLDIVAPGVNVQSTYPQSAYASLNGTSMATPHVAGAAVLVKQKNPSWSNVRIRNHLKNTATSLGSTNLYGSGLVNAEAATR

SEQ ID NO: 64950 - protein, 380 aa, Unidentified
VRSKKLWIVASTALLISVAFSSSIASAAEEAKEKYLIGFNEQEAVSEFVEQVEANDEVAILSEEEEVEIELLHEFETIPVLSVELSPEDVDALELDPAISYIEEDAEVTTMAQSVPWGISRVQAPAAHRRGLWGRGVKVAVLDTGISTHPDLNIRGGASFVPGEPSTQDGNGHGTHVAGTIAALDNSIGVLGVAPSAELYAVKVLGASGAGSVSSIAQGLEWAGANGMHVANLSLGSPSPSATLEQAVNSATSRGVLVVAASGNSGAGSISYPARYANAMAVGATDQDNNRASFSQYGAGLDIVAPGVNVQSTYPQSAYFSLNGTSMATPHVAGAAALVKQKNPSWSNVQIRNRLKNTATSLGSTNLYGSGLVNAEAATR

SEQ ID NO: 64951 - protein, 380 aa, Unidentified
VRSKKLWIVASTALLISVAFSSSIASAAEEAKEKYLIGFNEQEAVSEFVEQVEANDEVAILSEEEEVEIELLHEFETIPVLSVELSPEDVDALELDPAISYIEEDAEVTTMAQSVPWGISRVQAPAAHNRRLWGSGVKVAVLDTGISTHPDLNIRGGASFVPGEPSTQDGNGHGTHVAGTIAALNNSIGVLGVAPSAELYAVKVLGASGGGAISSIAQGLEWAGNNGMHVANLSLGSPSPSATLEQAVNSATSRGVLVVAASGNSGAGSISYPARYANAMAVGATDQDNNRASFSQYGAGLDLVAPGVNVQSTYPGSAYFSLNGTSMATPHVAGAAVLVKQKNPSWSNVRIRNHLKNTATSLGSTNLYGSGLVNAEAATR

SEQ ID NO: 64952 - protein, 380 aa, Unidentified
VRSKKLWIVASTALLISVAFSSSIASAAEEAKEKYLIGFNEQEAVSEFVEQVEANDEVAILSEEEEVEIELLHEFETIPVLSVELSPEDVDALELDPAISYIEEDAEVTTMAQSVPWGISRVQAPAAHNRRLWGSGVKVAVLDTGISTHPDLNIRGGASFVPGEPSTQDGNGHGTHVAGTIAALNNSIGVLGVAPSAELYAVKVLGASGGGAISSIAQGLEWAGANGMHVANLSLGSPSPSATLEQAVNSATSRGVLVVAASGNSGAGSISYPARYANAMAVGATDQDNNRASFSQYGAGLDIVAPGVNVQSTYPQSTYFSLNGTSMATPHVAGAAVLVKQKNPSWSNVRIRNHLKNTATSLGSTNLYGSGLVNAEAATR

SEQ ID NO: 64953 - protein, 380 aa, Unidentified
VRSKKLWIVASTALLISVAFSSSIASAAEEAKEKYLIGFNEQEAVSEFVEQVEANDEVAILSEEEEVEIELLHEFETIPVLSVELSPEDVDALELDPAISYIEEDAEVTTMAQSVPWGISRVQAPAAHNRRLWGSGVKVAVLDTGISTHPDLNIRGGASFVPGEPSTQDGNGHGTHVAGTIAALNNRIGVLGVAPSAELYAVKVLGASGAGAISSIAQGLEWAGANGMHVANLSLGSPSPSATLEQAVNSATSRGVLVVAASGNSGAGSISYPARYANAMAVGATDQDNNRASFSQYGAGLDIVAPGVNVQSTYPGSAYASLNGTSMATPHVAGAAVLVKQKNPSWSNVRIRNHLKNTATSLGSTNLYGSGLVNAEAATR

SEQ ID NO: 64954 - protein, 380 aa, Unidentified
VRSKKLWIVASTALLISVAFSSSIASAAEEAKEKYLIGFNEQEAVSEFVEQVEANDEVAILSEEEEVEIELLHEFETIPVLSVELSPEDVDALELDPAISYIEEDAEVTTMAQSVPWGISRVQAPAAHNRGLTGRGVKVAVLDTGISTHPDLNIRGGASFVPGEPSTQDGNGHGTHVAGTIAALNNSIGVLGVAPSAELYAVKVLGASGGGAISSIAQGLEWAGNNGMHVANLSLGSESPSATLEQAVNSATSRGVLVVAASGNSGEESISYPARYANAMAVGATDQNNNRASFSQYGAGLDIVAPGVNVQSTYPGSTYASLNGTSMATPHVAGAAVLVKQKNPSWSNVRIRDRLKNTATSLGSTNLYGSGLVNAEAATR

SEQ ID NO: 64955 - protein, 380 aa, Unidentified
VRSKKLWIVASTALLISVAFSSSIASAAEEAKEKYLIGFNEQEAVSEFVEQVEANDEVAILSEEEEVEIELLHEFETIPVLSVELSPEDVDALELDPAISYIEEDAEVTTMAQSVPWGISRVQAPAAHNRGLAGRGVKVAVLDTGISTHPDLRIRGGASFVPGEPSTQDGNGHGTHVAGTIAALNNSIGVLGVAPSAELYAVKVLGASGDGAISSIAQGLEWAGNNGMHVANLSLGSPSPSATLEQAVNSATSRGVLVVAASGNSGADSISYPARYANAMAVGATDQNNNRADFSQYGAGLDIVAPGVNVQSTYPGSTYASLNGTSMATPHVAGAAVLVKQKNPSWSNVRIRDHLKNTATSLGSTNLYGSGLVNAEAATR

SEQ ID NO: 64956 - protein, 380 aa, Unidentified
VRSKKLWIVASTALLISVAFSSSIASAAEEAKEKYLIGFNEQEAVSEFVEQVEANDEVAILSEEEEVEIELLHEFETIPVLSVELSPEDVDALELDPAISYIEEDAEVTTMAQSVPWGISRVQAPAAHNRGLTGRGVKVAVLDTGISTHPDLNIRGGASFVPGEPSTQDGNGHGTHVAGTIAALNNSIGVLGVAPSAELYAVKVLGASGGGAISSIAQGLEWAGNNGMHVANLSLGSPAPSATLEQAVNSATSRGVLVVAASGNSGEGSISYPARYANAMAVGATDQNNNRADFSQYGAGLDIVAPGVNVQSTYPGSTYASLNGTSMATPHVAGAAVLVKQKNPSWSNVRIRDRLKNTATSLGSTNLYGSGLVNAEAATR

SEQ ID NO: 64957 - protein, 380 aa, Unidentified
VRSKKLWIVASTALLISVAFSSSIASAAEEAKEKYLIGFNEQEAVSEFVEQVEANDEVAILSEEEEVEIELLHEFETIPVLSVELSPEDVDALELDPAISYIEEDAEVTTMAQSVPWGISRVQAPAAHNRRLWGSGVKVAVLDTGISTHPDLNIRGGASFVPGEPSTQDGNGHGTHVAGTIAALNNSIGVLGVAPSAELYAVKVLGASGGGAISSIAQGLEWAGANGMHVANLSLGSPSPSATLEQAVNSATSRGVLVVAASGNSGAGSISYPARYANAMAVGATDQDNNRASFSQYGAGLDIVAPGVNVQSTYPQSTYASLNGTSMATPHVAGAAVLVKQKNPSWSNVRIRNHLKNTATSLGSTNLSGSGLVNAEAATR

SEQ ID NO: 64958 - protein, 380 aa, Unidentified
VRSKKLWIVASTALLISVAFSSSIASAAEEAKEKYLIGFNEQEAVSEFVEQVEANDEVAILSEEEEVEIELLHEFETIPVLSVELSPEDVDALELDPAISYIEEDAEVTTMAQSVPWGISRVQAPAAHNRGLAGKGVKVAVLDTGISTHPDLNIRGGASFVPGEPSTQDGNGHGTHVAGTIAALNNSIGVLGVAPSAELYAVKVLGASGGGAISSIAQGLEWAGNNGMHVANLSLGNPSPSATLEQAVNSATSRGVLVVAASGNSGEESISYPARYANAMAVGATDQNNNRASFSQYGAGLDIVAPGVNVQSTYPGSTYASLNGTSMATPHVAGAAVLVKQKNPSWSNVRIRDHLKNTATSLGSTNLYGSGLVNAEAATR

SEQ ID NO: 64959 - protein, 380 aa, Unidentified
VRSKKLWIVASTALLISVAFSSSIASAAEEAKEKYLIGFNEQEAVSEFVEQVEANDEVAILSEEEEVEIELLHEFETIPVLSVELSPEDVDALELDPAISYIEEDAEVTTMAQSVPWGISRVQAPAAHRRRLWGRGVKVAVLDTGISTHPDLNIRGGASFVPGEPSTQDGNGHGTHVAGTIAALDNSIGVLGVAPSAELYAVKVLGASGSGSVSSIAQGLEWAGANGMHVANLSLGSPSPSATLEQAVNSATSRGVLVVAASGNSGAGSISYPARYANAMAVGATDQDNNRASFSQYGAGLDIVAPGVNVQSTYPQSAYFSLNGTSMATPHVAGAAALVKQKNPSWSNVQIRNRLKNTATSLGSTNLYGSGLVNAEAATR

SEQ ID NO: 64960 - protein, 380 aa, Unidentified
VRSKKLWIVASTALLISVAFSSSIASAAEEAKEKYLIGFNEQEAVSEFVEQVEANDEVAILSEEEEVEIELLHEFETIPVLSVELSPEDVDALELDPAISYIEEDAEVTTMAQSVPWGISRVQAPAAHNRRLWGSGVKVAVLDTGISTHPDLNIRGGASFVPGEPSTQDGNGHGTHVAGTIAALNNRIGVLGVAPSAELYAVKVLGASGAGAISSIAQGLEWAGSNGMHVANLSLGSPSPSATLEQAVNSATSRGVLVVAASGNSGAGSISYPARYANAMAVGATDQNNNRASFSQYGAGLDIVAPGVNVQSTYPGSAYFSLNGTSMATPHVAGAAVLVKQKNPSWSNVRIRNHLKNTATSLGSTNLYGSGLVNAEAATR

SEQ ID NO: 64961 - protein, 380 aa, Unidentified
VRSKKLWIVASTALLISVAFSSSIASAAEEAKEKYLIGFNEQEAVSEFVEQVEANDEVAILSEEEEVEIELLHEFETIPVLSVELSPEDVDALELDPAISYIEEDAEVTTMAQSVPWGISRVQAPAAHRRRLWGRGVKVAVLDTGISTHPDLNIRGGASFVPGEPSTQDGNGHGTHVAGTIAALDNSIGVLGVAPSAELYAVKVLGASGAGSVSSIAQGLEWAGANGMHVANLSLGSPSPSATLEQAVNSATSRGVLVVAASGNSGAGSISYPARYANAMAVGATDQDNNRASFSQYGAGLDLVAPGVNVQSTYPGSTYFSLNGTSMATPHVAGAAALVKQKNPSWSNVQIRNRLKNTATSLGSTNLYGSGLVNAEAATR

SEQ ID NO: 64962 - protein, 380 aa, Unidentified
VRSKKLWIVASTALLISVAFSSSIASAAEEAKEKYLIGFNEQEAVSEFVEQVEANDEVAILSEEEEVEIELLHEFETIPVLSVELSPEDVDALELDPAISYIEEDAEVTTMAQSVPWGISRVQAPAAHNRRLTGSGVKVAVLDTGISTHPDLNIRGGASFVPGEPSTQDGNGHGTHVAGTIAALNNRIGVLGVAPSAELYAVKVLGASGGGAISSIAQGLEWAGNNGMHVANLSLGSPSPSATLEQAVNSATSRGVLVVAASGNSGAGSISYPARYANAMAVGATDQDNNRASFSQYGAGLDIVAPGVNVQSTYPQSAYASLNGTSMATPHVAGAAVLVKQKNPSWSNVRIRNHLKNTATSLGSTNLYGSGLVNAGAATR

SEQ ID NO: 64963 - protein, 380 aa, Unidentified
VRSKKLWIVASTALLISVAFSSSIASAAEEAKEKYLIGFNEQEAVSEFVEQVEANDEVAILSEEEEVEIELLHEFETIPVLSVELSPEDVDALELDPAISYIEEDAEVTTMAQSVPWGISRVQAPAAHNRGLAGSGVKVAVLDTGISTHPDLNIRGGASFVPGEPSTQDGNGHGTHVAGTIAALNNSIGVLGVAPSAELYAVKVLGASGGGAISSIAQGLEWAGNNGMHVANLSLGNESPSATLEQAVNSATSRGVLVVAASGNSGEGSISYPARYANAMAVGATDQNNNRASFSQYGAGLDIVAPGVNVQSTYPGSTYASLNGTSMATPHVAGAAVLVKQKRPSWSNVRIRDHLKNTATSLGSTNLYGSGLVNAEAATR

SEQ ID NO: 64964 - protein, 380 aa, Unidentified
VRSKKLWIVASTALLISVAFSSSIASAAEEAKEKYLIGFNEQEAVSEFVEQVEANDEVAILSEEEEVEIELLHEFETIPVLSVELSPEDVDALELDPAISYIEEDAEVTTMAQSVPWGISRVQAPAARNRGLAGSGVKVAVLDTGISTHPDLNIRGGASFVPGEPSTQDGNGHGTHVAGTIAALDNSIGVLGVAPSAELYAVKVLGASGGGAISSIAQGLEWAGNNGMHVANLSLGSPSPSATLEQAVNSATSRGVLVVAASGNSGADSISYPARYANAMAVGATDQNNNRASFSQYGAGLDIVAPGVNVQSTYPGSTYASLNGTSMATPHVAGAAVLVKQKNPSWSNVRIRDHLKNTATSLGSTNLYGSGLVNAFAATR

SEQ ID NO: 64965 - protein, 380 aa, Unidentified
VRSKKLWIVASTALLISVAFSSSIASAAEEAKEKYLIGFNEQEAVSEFVEQVEANDEVAILSEEEEVEIELLHEFETIPVLSVELSPEDVDALELDPAISYIEEDAEVTTMAQSVPWGISRVQAPAAHNRGLAGSGVKVAVLDTGISTHPDLNIRGGASFVPGEPSTQDGNGHGTHVAGTIAALNNSIGVLGVAPSAELYAVKVLGASGGGAISSIAQGLEWAGNNGMHVANLSLGSPSPSATLEQAVNSATSRGVLVVAASGNSGEESISYPARYANAMAVGATDQNNNRADFSQYGAGLDIVAPGVNVQSTYPGSTYASLNGTSMATPHVAGAAVLVKQKNPSWSNVRIRDRLKNTATSLGSTNLYGSGLVNAEAATR

SEQ ID NO: 64966 - protein, 380 aa, Unidentified
VRSKKLWIVASTALLISVAFSSSIASAAEEAKEKYLIGFNEQEAVSEFVEQVEANDEVAILSEEEEVEIELLHEFETIPVLSVELSPEDVDALELDPAISYIEEDAEVTTMAQSVPWGISRVQAPAAHNRGLTGSGVKVAVLDTGISTHPDLNIRGGASFVPGEPSTQDGNGHGTHVAGTIAALNNSIGVLGVAPSAELYAVKVLGASGGGAISSIAQGLEWAGNNGMHVANLSLGLQSPSATLEQAVNSATSRGVLVVAASGNSGEGSISYPARYANAMAVGATDQNNNRADFSQYGAGLDIVAPGVNVQSTYPGSTYASLNGTSMATPHVAGAAVLVKQKNPSWSNVRIRDRLKNTATSLGSTNLYGSGLVNAEAATR

SEQ ID NO: 64967 - protein, 380 aa, Unidentified
VRSKKLWIVASTALLISVAFSSSIASAAEEAKEKYLIGFNEQEAVSEFVEQVEANDEVAILSEEEEVEIELLHEFETIPVLSVELSPEDVDALELDPAISYIEEDAEVTTMAQSVPWGISRVQAPAAHNRRLWGSGVKVAVLDTGISTHPDLNIRGGASFVPGEPSTQDGNGHGTHVAGTIAALNNSIGVLGVAPSAELYAVKVLGASGAGAISSIAQGLEWAGANGMHVANLSLGSPSPSATLEQAVNSATSRGVLVVAASGNSGAGSISYPARYANAMAVGATDQDNNRASFSQYGAGLDIVAPGVNVQSTYPQSTYFSLNGTSMATPHVAGAAVLVKQKNPSWSNVRIRNHLKNTATSLGSTNLYGSGLVNAEAATR

SEQ ID NO: 64968 - protein, 380 aa, Unidentified
VRSKKLWIVASTALLISVAFSSSIASAAEEAKEKYLIGFNEQEAVSEFVEQVEANDEVAILSEEEEVEIELLHEFETIPVLSVELSPEDVDALELDPAISYIEEDAEVTTMAQSVPWGISRVQAPAAHNRGLTGRGVKVAVLDTGISTHPDLNIRGGASFVPGEPSTQDGNGHGTHVAGTIAALNNSIGVLGVAPSAELYAVKVLGASGGGAISSIAQGLEWAGNNGMHVANLSLGSQSPSATLEQAVNSATSRGVLVVAASGNSGEGSISYPARYANAMAVGATDQNNNRADFSQYGAGLDIVAPGVNVQSTYPGSTYASLNGTSMATPHVAGAAVLVKQKNPSWSNVRIRDRLKNTATSLGSTNLYGSGLVNAEAATR

SEQ ID NO: 64969 - protein, 380 aa, Unidentified
VRSKKLWIVASTALLISVAFSSSIASAAEEAKEKYLIGFNEQEAVSEFVEQVEANDEVAILSEEEEVEIELLHEFETIPVLSVELSPEDVDALELDPAISYIEEDAEVTTMAQSVPWGISRVHAPAAHNRRLTGSGVKVAVLDTGISTHPDLNIRGGASFVPGEPSTQDGNGHGTHVAGTIAALNNRIGVLGVAPSAELYAVKVLGASGGGAISSIAQGLEWAGNNGMHVANLSLGSPSPSATLEQAVNSATSRGVLVVAASGNSGAGSISYPARYANAMAVGATDQNNNRASFSQYGAGLDLVAPGVNVQSTYPQSAYASLNGTSMATPHVAGAAVLVKQKNPSWSNVRIRNHLKNTATSLGSTNLYGSGLVNAEAATR

SEQ ID NO: 64970 - protein, 380 aa, Unidentified
VRSKKLWIVASTALLISVAFSSSIASAAEEAKEKYLIGFNEQEAVSEFVEQVEANDEVAILSEEEEVEIELLHEFETIPVLSVELSPEDVDALELDPAISYIEEDAEVTTMAQSVPWGISRVQAPAAHRRGLWGRGVKVAVLDTGISTHPDLNIRGGASFVPGEPSTQDGNGHGTHVAGTIAALDNSIGVLGVAPSAELYAVKVLGASGAGSVSSIAQGLEWAGANGMHVANLSLGSPSPSATLEQAVNSATSRGVLVVAASGNSGAGSISYPARYANAMAVGATDQDNNRASFSQYGAGLDIVAPGVNVQSTYPQSTYFSLNGTSMATPHVAGAAALVKQKNPSWSNVQIRNRLKNTATSLGSANLYGSGLVNAEAATR

SEQ ID NO: 64971 - protein, 380 aa, Unidentified
VRSKKLWIVASTALLISVAFSSSIASAAEEAKEKYLIGFNEQEAVSEFVEQVEANDEVAILSEEEEVEIELLHEFETIPVLSVELSPEDVDALELDPAISYIEEDAEVTTMAQSVPWGISRVQAPAAHRRRLTGRGVKVAVLDTGISTHPDLNIRGGASFVPGEPSTQDGNGHGTHVAGTIAALDNSIGVLGVAPSAELYAVKVLGASGAGSVSSIAQGLEWAGANGMHVANLSLGSPSPSATLEQAVNSATSRGVLVVAASGNSGAGSISYPARYANAMAVGATDQDNNRASFSQYGAGLDLVAPGVNVQSTYPQSTYFSLNGTSMATPHVAGAAALVKQKNPSWSNVQIRNRLKNTATSLGSTNLYGSGLVNAEAATR

SEQ ID NO: 64972 - protein, 380 aa, Unidentified
VRSKKLWIVASTALLISVAFSSSIASAAEEAKEKYLIGFNEQEAVSEFVEQVEANDEVAILSEEEEVEIELLHEFETIPVLSVELSPEDVDALELDPAISYIEEDAEVTTMAQSVPWGISRVQAPAAHNRGLTGRGVKVAVLDTGISTHPDLRIRGGASFVPGEPSTQDGNGHGTHVAGTIAALNNSIGVLGVAPSAELYAVKVLGASGAGAISSIAQGLEWAGNNGMHVANLSLGSPSPSATLEQAVNSATSRGVLVVAASGNSGEGSISYPARYANAMAVGATDQNNNRADFSQYGAGLDIVAPGVNVQSTYPGSTYASLNGTSMATPHVAGAAVLVKQKNPSWSNVRIRDRLKNTATSLGSTNLYGSGLVNAEAATR

SEQ ID NO: 64973 - protein, 380 aa, Unidentified
VRSKKLWIVASTALLISVAFSSSIASAAEEAKEKYLIGFNEQEAVSEFVEQVEANDEVAILSEEEEVEIELLHEFETIPVLSVELSPEDVDALELDPAISYIEEDAEVTTMAQSVPWGISRVQAPAAHNRRLWGSGVKVAVLDTGISTHPDLNIRGGASFVPGEPSTQDGNGHGTHVAGTIAALNNSIGVLGVAPSAELYAVKVLGASGAGAISSIAQGLEWAGNNGMHVANLSLGSPSPSATLEQAVNSATSRGVLVVAASGNSGAGSISYPARYANAMAVGATDQDNNRASFSQYGAGLDIVAPGVNVQSTYPQSAYFSLNGTSMATPHVAGAAVLVKQKNPSWSNVRIRNHLKNTATSLGSTNLYGSGLVNAEAATR

SEQ ID NO: 64974 - protein, 380 aa, Unidentified
VRSKKLWIVASTALLISVAFSSSIASAAEEAKEKYLIGFNEQEAVSEFVEQVEANDEVAILSEEEEVEIELLHEFETIPVLSVELSPEDVDALELDPAISYIEEDAEVTTMAQSVPWGISRVQAPAAHNRRLTGSGVKVAVLDTGISTHPDLNIRGGASFVPGEPSTQDGNGHGTHVAGTIAALNNSIGVLGVAPSAELYAVKVLGASGGGAISSIAQGLEWAGANGMHVANLSLGSPSPSATLEQAVNSATSRGVLVVAASGNSGAGSISYPARYANAMAVGATDQDNNRASFSQYGAGLDIVAPGVNVQSTYPQSAYFSLNGTSMATPHVAGAAVLVKQKNPSWSNVRIRNHLKNTATSLGSTNLYGSGLVNAEAATR

SEQ ID NO: 64975 - protein, 380 aa, Unidentified
VRSKKLWIVASTALLISVAFSSSIASAAEEAKEKYLIGFNEQEAVSEFVEQVEANDEVAILSEEEEVEIELLHEFETIPVLSVELSPEDVDALELDPAISYIEEDAEVTTMAQSVPWGISRVQAPAAHNRRLTGRGVKVAVLDTGISTHPDLDIRGGASFVPGEPSTQDGNGHGTHVAGTIAALDNRIGVLGVAPSAELYAVKVLGASGGGAISSIAQGLEWAGNNGMHVANLSLGSPSPSATLEQAVNSATSRGVLVVAASGNSGAGSISYPARYANAMAVGATDQNNNRASFSQYGAGLDIVAPGVNVQSTYPGSTYASLNGTSMATPHVAGAAVLVKQKNPSWSNVRIRNHLKNTATSLGSTNLYGSGLVRAEAATR

SEQ ID NO: 64976 - protein, 380 aa, Unidentified
VRSKKLWIVASTALLISVAFSSSIASAAEEAKEKYLIGFNEQEAVSEFVEQVEANDEVAILSEEEEVEIELLHEFETIPVLSVELSPEDVDALELDPAISYIEEDAEVTTMAQSVPWGISRVQAPAAHRRGLTGRGVKVAVLDTGISTHPDLNIRGGASFVPGEPSTQDGNGHGTHVAGTIAALDNSIGVLGVAPSAELYAVKVLGASGAGSVSSIAQGLEWAGANGMHVANLSLGSPSPSATLEQAVNSATSRGVLVVAASGNSGAGSISYPARYANAMAVGATDQDNNRASFSQYGAGLDLVAPGVNVQSTYPQSAYFSLNGTSMATPHVAGAAALVKQKNPSWSNVQIRNRLKNTATSLGSTNLYGSGLVNAEAATR

SEQ ID NO: 64977 - protein, 380 aa, Unidentified
VRSKKLWIVASTALLISVAFSSSIASAAEEAKEKYLIGFNEQEAVSEFVEQVEANDEVAILSEEEEVEIELLHEFETIPVLSVELSPEDVDALELDPAISYIEEDAEVTTMAQSVPWGISRVQAPAAHNRGLTGRGVKVAVLDTGISTHPDLNIRGGASFVPGEPSTQDGNGHGTHVAGTIAALNNSIGVLGVAPSAELYAVKVLGASGGGAISSIAQGLEWAGNNGMHVANLSLGNESPSATLEQAVNSATSRGVLVVAASGNSGEGSISYPARYANAMAVGATDQNNNRASFSQYGAGLDIVAPGVNVQSTYPGSTYASLNGTSMATPHVAGAAVLVKQKNPSWSNVRIRDRLKNTATSLGSTNLYGSGLVNAEAATR

SEQ ID NO: 64978 - protein, 380 aa, Unidentified
VRSKKLWIVASTALLISVAFSSSIASAAEEAKEKYLIGFNEQEAVSEFVEQVEANDEVAILSEEEEVEIELLHEFETIPVLSVELSPEDVDALELDPAISYIEEDAEVTTMAQSVPWGISRVQAPAAHNRGLAGSGVKVAVLDTGISTHPDLNIRGGASFVPGEPSTQDGNGHGTHVAGTIAALNNSIGVLGVAPSAELYAVKVLGASGGGAISSIAQGLEWAGNNGMHVANLSLGSESPSATLEQAVNSATSRGVLVVAASGNSGEESISYPARYANAMAVGATDQNNNRASFSQYGAGLDIVAPGVNVQSTYPGSTYASLNGTSMATPHVAGAAVLVKQKRPSWSNVRIRDHLKNTATSLGSTNLYGSGLVNAEAATR

SEQ ID NO: 64979 - protein, 380 aa, Unidentified
VRSKKLWIVASTALLISVAFSSSIASAAEEAKEKYLIGFNEQEAVSEFVEQVEANDEVAILSEEEEVEIELLHEFETIPVLSVELSPEDVDALELDPAISYIEEDAEVTTMAQSVPWGISRVQAPAAHNRGLTGRGVKVAVLDTGISTHPDLNIRGGASFVPGEPSTQDGNGHGTHVAGTIAALNNSIGVLGVAPSAELYAVKVLGASGGGAISSIAQGLEWAGNNGMHVANLSLGSPSPSATLEQAVNSATSRGVLVVAASGNSGEGSISYPARYANAMAVGATDQDNNRADFSQYGAGLDIVAPGVNVQSTYPGSTYASLNGTSMATPHVAGAAVLVKQKNPSWSNVRIRDRLKNTATSLGSTNLYGSGLVNAEAATR

SEQ ID NO: 64980 - protein, 380 aa, Unidentified
VRSKKLWIVASTALLISVAFSSSIASAAEEAKEKYLIGFNEQEAVSEFVEQVEANDEVAILSEEEEVEIELLHEFETIPVLSVELSPEDVDALELDPAISYIEEDAEVTTMAQSVPWGISRVQAPAAHRRRLTGRGVKVAVLDTGISTHPDLNITGGASFVPGEPSTQDGNGHGTHVAGTIAALDNSIGVLGVAPSAELYAVKVLGASGGGAISSIAQGLEWAGNNGMHVANLSLGSPSPSATLEQAVNSATSRGVLVVAASGNSGAGSISYPARYANAMAVGATDQNNNRASFSQYGAGLDIVAPGVNVQSTYPGSTYASLNGTSMATPHVAGAAVLVKQKNPSWSNVRIRNHLKNTATSLGSTNLYGSGLVRAEAATR

SEQ ID NO: 64981 - protein, 380 aa, Unidentified
VRSKKLWIVASTALLISVAFSSSIASAAEEAKEKYLIGFNEQEAVSEFVEQVEANDEVAILSEEEEVEIELLHEFETIPVLSVELSPEDVDALELDPAISYIEEDAEVTTMAQSVPWGISRVQAPAAHNRGLAGSGVKVAVLDTGISTHPDLNIRGGASFVPGEPSTQDGNGHGTHVAGTIAALDNSIGVLGVAPSAELYAVKVLGASGGGAISSIAQGLEWAGNNGMHVANLSLGSPSPSATLEQAVNSATSRGVLVVAASGNSGADSISYPARYANAMAVGATDQNNNRADFSQYGAGLDIVAPGVNVQSTYPGSTYASLNGTSMATPHVAGAAVLVKQKNPSWSNVRIRDHLKNTATSLGSTNLYGSGLVNAFAATR

SEQ ID NO: 64982 - protein, 380 aa, Unidentified
VRSKKLWIVASTALLISVAFSSSIASAAEEAKEKYLIGFNEQEAVSEFVEQVEANDEVAILSEEEEVEIELLHEFETIPVLSVELSPEDVDALELDPAISYIEEDAEVTTMAQSVPWGISRVQAPAAHNRGLAGRGVKVAVLDTGISTHPDLNIRGGASFVPGEPSTQDGNGHGTHVAGTIAALNNSIGVLGVAPSAELYAVKVLGASGGGAISSIAQGLEWAGNNGMHVANLSLGSESPSATLEQAVNSATSRGVLVVAASGNSGEESISYPARYANAMAVGATDQNNNRASFSQYGAGLDIVAPGVNVQSTYPGSTYASLNGTSMATPHVAGAAVLVKQKNPSWSNVRIRDHLKNTATSLGSTNLYGSGLVNAEAATR

SEQ ID NO: 64983 - protein, 380 aa, Unidentified
VRSKKLWIVASTALLISVAFSSSIASAAEEAKEKYLIGFNEQEAVSEFVEQVEANDEVAILSEEEEVEIELLHEFETIPVLSVELSPEDVDALELDPAISYIEEDAEVTTMAQSVPWGISRVQAPAAHNRGLAGRGVKVAVLDTGISTHPDLNIRGGASFVPGEPSTQDGNGHGTHVAGTIAALNNSIGVLGVAPSAELYAVKVLGASGDGAISSIAQGLEWAGNNRMHVANLSLGSPSPSATLEQAVNSATSRGVLVVAASGNSGADSISYPARYANAMAVGATDQNNNRADFSQYGAGLDIVAPGVNVQSTYPGSTYASLNGTSMATPHVAGAAVLVKQKNPSWSNVQIRDHLKNTATSLGSTNLYGSGLVNAFAATR

SEQ ID NO: 64984 - protein, 380 aa, Unidentified
VRSKKLWIVASTALLISVAFSSSIASAAEEAKEKYLIGFNEQEAVSEFVEQVEANDEVAILSEEEEVEIELLHEFETIPVLSVELSPEDVDALELDPAISYIEEDAEVTTMAQSVPWGISRVQAPAAHNRRLTGSGVKVAVLDTGISTHPDLNIRGGASFVPGEPSTQDGNGHGTHVAGTIAALNNRIGVLGVAPSAELYAVKVLGASGGGAISSIAQGLEWAGANGMHVANLSLGSPSVSATLEQAVNSATSRGVLVVAASGNSGAGSISYPARYANAMAVGATDQDNNRASFSQYGAGLDIVAPGVNVQSTYPGSAYASLNGTSMATPHVAGAAVLVKQKNPSWSNVRIRNHLKNTATSLGSTNLYGSGLVNAEAATR

SEQ ID NO: 64985 - protein, 315 aa, Unidentified
AEEAKEKYLIGFNEQEAVSEFVEQVEANDEVAILSEEEEVEIELLHEFETIPVLSVELSPEDVDALELDPAISYIEEDAEVTTMAQSVPWGISRVQAPAAHNRGLTGSGVKVAVLDTGISTHPDLNIRGGASFVPGEPSTQDGNGHGTHVAGTIAALNNSIGVLGVAPSAELYAVKVLGASGSGSVSSIAQGLEWAGNNGMHVANLSLGSPSPSATLEQAVNSATSRGVLVVAASGNSGAGSISYPARYANAMAVGATDQNNNRASFSQYGAGLDIVAPGVNVQSTYPGCVVAGTEVTDAETGAVVTVGELFESR

SEQ ID NO: 64986 - protein, 314 aa, Unidentified
AEEAKEKYLIGFNEQEAVSEFVEQVEANDEVAILSEEEEVEIELLHEFETIPVLSVELSPEDVDALELDPAISYIEEDAEVTTMAQSVPWGISRVQAPAAHNRGLTGSGVKVAVLDTGISTHPDLNIRGGASFVPGEPSTQDGNGHGTHVAGTIAALNNSIGVLGVAPSAELYAVKVLGASGSGSVSSIAQGLEWAGNNGMHVANLSLGSPSPSATLEQAVNSATSRGVLVVAASGNSGAGSISYPARYANAMAVGATDQNNNRASFSQYGAGLDIVAPGVNVQSTYPGCLSGSTKVIDAATGNLFSLKEIAAQ

SEQ ID NO: 64987 - protein, 269 aa, Synthetic construct
AQSVPWGISRVQAPAAQNRGLTGSGVRVAVLDTGISTSPDLNIRGGASFVPGDPSTQDGNGHGTHVAGTIAALNNSIGVLGVAPSAELFAVRVLGASGSGSVSSIAQGLEWAGNNGMNVANLSLGSPSPSATLEQAVNSATSRGVLVVAASGNSGAGSISFPARVANAMAVGATDQNNNRASFSQFGAGLDIVAPGVNVQSTFPGSTTASLNGTSMATPSVAGAAALVRQRNPSWSNVQIRNHLENTATSLGSTNLFGSGLVNAEAATR

SEQ ID NO: 64988 - protein, 269 aa, Bacillus clausii
AQTVPWGIERVQAPAAHNRGLTGSGVKVAVLDTGISTHPDLRIRGGASFVPGEPSTQDGNGHGTHVAGTIAALDNSIGVLGVAPSAELYAVKVLGAFGLGTISSIAQGLEWAGNNGMHVANLSLGSPSPSATLEQAVNSATSRGVLVVAASGNSGAGSISYPARYANAIAVGATDQNNNRASFSQYGPGLDIVAPGVNILSTWPGSTYKSLNGTSMATPHVAGAAALVKQKNPSWSNVQIRNHLKNTATSLGDTWEYGSGLVNAEAATR

SEQ ID NO: 64989 - protein, 269 aa, Bacillus clausii
AQTVPWGIERVQAPAAHNRGLTGSGVKVAVLDTGISTHPDLRIRGGASFVPGEPSTQDGNGHGTHVAGTIAALDNSIGVLGVAPSAELYAVKVLGAFGLGTISSIAQGLEWAGNNGMHVANLSLGSPSPSATLEQAVNSATSRGVLVVAASGNSGAGSISYPARYANAVAVGATDQNNNRASFSQYGPGLDIVAPGVNILSTWPGSTYKSLNGTSMATPHVAGAAALVKQKNPSWSNVQIRNHLKNTATSLGDTWEYGSGLVNAEAATR

SEQ ID NO: 64990 - protein, 269 aa, Unidentified
AQSVPWGIERVQAPAAHNRGLTGSGVKVAVLDTGISTHPDLRIRGGASFVPGEPSTQDGNGHGTHVAGTIAALDNSIGVLGVAPSAELYAVKVLGASGSGSVSSIAQGLEWAGNNGMHVANLSLGSPSPSATLEHAVNHATSHGVLVVAASGNSGEPEISYPARYANAMAVGATDQNNNRASFSQYGPGLDIVAPGVDILSTWPGGTYAVLNGTSMATPHVAGAAALVKQKNPSWSNVQIRNHLKNTATSLGSTNEYGSGLVNAEAATR

SEQ ID NO: 64991 - protein, 269 aa, Bacillus clausii
AQTVPWGIERVQAPAAHNRGLTGSGVKVAVLDTGISTHPDLRIRGGASFVPGEPSTQDGNGHGTHVAGTIAALDNSIGVLGVAPSAELYAVKVLGAFGLGTISSIAQGLEWAGNNGMHVANLSLISPSPSATLEQAVNSATSRGVLVVAASGNSGAGSISYPARYANAMAVGATDQNNNRASFSQYGPGLDIVAPGVNILSTWPGSTYKSLNGTSMATPHVAGAAALVKQKNPSWSNVQIRNHLKNTATSLGDTWEYGSGLVNAEAATR

SEQ ID NO: 64992 - protein, 269 aa, Bacillus clausii
AQTVPWGIERVQAPAAHNRGLTGSGVKVAVLDTGISTHPDLRIRGGASFVPGEPSTQDGNGHGTHVAGTIAALDNSIGVLGVAPSAELYAVKVLGAFGLGTISSIAQGLEWAGNNGMHVANLSLGSPSPSATLEQAVNSATSRGVLVVAASGNSGAGSISYPARYKNAMAVGATDQNNNRASFSQYGPGLDIVAPGVNILSTWPGSTYKSLNGTSMATPHVAGAAALVKQKNPSWSNVQIRNHLKNTATSLGDTWEYGSGLVNAEAATR

SEQ ID NO: 64993 - protein, 269 aa, Synthetic construct
AQSVPWGISRVQAPAAQNRGLTGSGVRVAVLDTGISTSPDLNIRGGASFVPGDPSTQDGNGHGTHVAGTIAALNNSIGVLGVAPSAELFAVRVLGASGSGSVSSIAQGLEWAGNNGMDVANLSLGSPSPSATLEQAVNSATSRGVLVVAASGNSGAGSISFPARVANAMAVGATDQNNNRASFSQFGAGLDIVAPGVNVQSTFPGSTTASLNGTSMATPSVAGAAALVRQRNPSWSNVQIRNHLENTATSLGSTNLFGSGLVNAEAATR

SEQ ID NO: 64994 - protein, 269 aa, Bacillus clausii
AQTVPWGIERVQAPAAHNRGLTGSGVKVAVLDTGISTHPDLRIRGGASFVPGEPSTQDGNGHGTHVAGTIAALDNSIGVLGVAPSAELYAVKVLGAFGLGTISSIAQGLEWAGNNGMHVANLSLGSPSPSATLEQAVNSATSRGVLVVAASGNSGAGSISYPARYANAAAVGATDQNNNRASFSQYGPGLDIVAPGVNILSTWPGSTYKSLNGTSMATPHVAGAAALVKQKNPSWSNVQIRNHLKNTATSLGDTWEYGSGLVNAEAATR

SEQ ID NO: 64995 - protein, 269 aa, Bacillus clausii
AQTVPWGIERVQAPAAHNRGLTGSGVKVAVLDTGISTHPDLRIRGGASFVPGEPSTQDGNGHGTHVAGTIAALDNSIGVLGVAPSAELYAVKVLGAFGLGTISSIAQGLEWAGNNGMHVANLSLGSPSPSATLEQAVNSATSRGVLVVAASGNSGAGYISYPARYANAMAVGATDQNNNRASFSQYGPGLDIVAPGVNILSTWPGSTYKSLNGTSMATPHVAGAAALVKQKNPSWSNVQIRNHLKNTATSLGDTWEYGSGLVNAEAATR

SEQ ID NO: 64996 - protein, 269 aa, Bacillus clausii
AQTVPWGIERVQAPAAHNRGLTGSGVKVAVLDTGISTHPDLRIRGGASFVPGEPSTQDGNGHGTHVAGTIAALDNSIGVLGVAPSAELYAVKVLGAFGLGTISSIAQGLEWAGNNGMHVANLSLGSPSPSATLEQAVNSATSRGVLVVAASGNSGAGSISYPARYANGMAVGATDQNNNRASFSQYGPGLDIVAPGVNILSTWPGSTYKSLNGTSMATPHVAGAAALVKQKNPSWSNVQIRNHLKNTATSLGDTWEYGSGLVNAEAATR

SEQ ID NO: 64997 - protein, 269 aa, Synthetic construct
AQSVPWGISRVQAPAAQNRGLTGSGVRVAVLDTGISTSPDLNIRGGASFVPGDPSTQDGNGHGTHVAGTIAALNNSIGVLGVAPSAELFAVRVLGASGSGSVSSIAQGLEWAGNNGMNVANLSLGSPSPSATLEQAVNSATSRGVLVVAASGNSGAGSISFPARVANAMAVGATDQNNNRASFSQFGAGLDIVAPGVNVQSTFPGSTTASLNGTSMATPSVAGAAALVLQRNPSWSNVQIRNHLENTATSLGSTNLFGSGLVNAEAATR

SEQ ID NO: 64998 - protein, 269 aa, Bacillus clausii
AQTVPWGIERVQAPAAHNRGLTGSGVKVAVLDTGISTHPDLRIRGGASFVPGEPSTQDGNGHGTHVAGTIAALDNSIGVLGVAPSAELYAVKVLGAFGLGTISSIAQGLEWAGNNGMHVANLSLGSPSPSATLEQAVNSATSRGVLVVAASGNSGAGWISYPARYANAMAVGATDQNNNRASFSQYGPGLDIVAPGVNILSTWPGSTYKSLNGTSMATPHVAGAAALVKQKNPSWSNVQIRNHLKNTATSLGDTWEYGSGLVNAEAATR

SEQ ID NO: 64999 - protein, 269 aa, Bacillus clausii
AQTVPWGIERVQAPAAHNRGLTGSGVKVAVLDTGISTHPDLRIRGGASFVPGEPSTQDGNGHGTHVAGTIAALDNSIGVLGVAPSAELYAVKVLGAFGLGTISSIAQGLEWAGNNGMHVANLSLGSPSPSATLEQAVNSATSRGVLVVAASGNSGAGVISYPARYANAMAVGATDQNNNRASFSQYGPGLDIVAPGVNILSTWPGSTYKSLNGTSMATPHVAGAAALVKQKNPSWSNVQIRNHLKNTATSLGDTWEYGSGLVNAEAATR

SEQ ID NO: 65000 - protein, 269 aa, Synthetic construct
AQSVPWGISRVQAPAAQNRGLTGSGVRVAVLDTGISTSPDLNIRGGASFVPGDPSTQDGNGHGTHVAGTIAALNNSIGVLGVAPSAELFAVRVLGASGSGSVSSIAQGLEWAGNNGMDVANLSLGSPSPSATLEQAVNSATSRGVLVVAASGNSGAGSISFPARVANAMAVGATDQNNNRASFSQFGAGLDIVAPGVNVQSTFPGSTTASLNGTSMATPSVAGAAALVLQRNPSWSNVQIRNHLENTATSLGSTNLFGSGLVNAEAATR

SEQ ID NO: 65001 - protein, 269 aa, Synthetic construct
AQSVPWGISRVQAPAAQNRGLTGSGVRVAVLDTGISTSPDLNIRGGASFVPGDPSTQDGNGHGTHVAGTIAALNNSIGVLGVAPSAELFAVRVLGASGSGSVSSIAQGLEWAGNNGMDVANLSLGSPSPSATLEQAVNSATSRGVLVVAASGNSGAGSISFPARVANAMAVGATDQNNNRASFSQFGAGLDIVAPGVNVQSTFPGSTTASLNGTSMATPSVAGAAALVRQRNPSWSNVQIRNHLNNTATSLGSTNLFGSGLVNAEAATR

SEQ ID NO: 65002 - protein, 269 aa, Synthetic construct
AQSVPWGISRVQAPAAQNRGLTGSGVRVAVLDTGISTSPDLNIRGGASFVPGDPSTQDGNGHGTHVAGTIAALNNSIGVLGVAPSAELFAVRVLGASGSGSVSSIAQGLEWAGNNGMNVANLSLGSPSPSATLEQAVNSATSRGVLVVAASGNSGAGSISFPARVANAMAVGATDQNNNRASFSQFGAGLDIVAPGVNVQSTFPGSTTASLNGTSMATPSVAGAAALVLQRNPSWSNVQIRNHLNNTATSLGSTNLFGSGLVNAEAATR

SEQ ID NO: 65003 - protein, 269 aa, Bacillus clausii
AQTVPWGIERVQAPAAHNRGLTGSGVKVAVLDTGISTHPDLRIRGGASFVPGEPSTQDGNGHGTHVAGTIAALDNSIGVLGVAPSAELYAVKVLGAFGLGTISSIAQGLEWAGNNGMHVANLSLGSPSPSATLEQAVNSATSRGVLVVAASGNSGAGSISYPARYANATAVGATDQNNNRASFSQYGPGLDIVAPGVNILSTWPGSTYKSLNGTSMATPHVAGAAALVKQKNPSWSNVQIRNHLKNTATSLGDTWEYGSGLVNAEAATR

SEQ ID NO: 65004 - protein, 269 aa, Unidentified
AQSVPWGIERVQAPAAHNRGLTGSGVKVAVLDTGISTHPDLRIRGGHSFVPGEPSTQDGNGHGTHVAGTIAALDNSIGVLGVAPSAELYAVKVLGASGSGSVSSIAQGLEWAGNHGMHVANLSLGSPSPSATLEQAVNSATSRGVLVVAASGNSGEPEISYPARYANAMAVGATDQNNNRASFSQYGPGLDIVAPGVDILSTWPGGTYAVLNGTSMATPHVAGAAALVKQKHPSWSNVQIRNHLKNTATSLGSTNEYGSGLVNAEAATR

SEQ ID NO: 65005 - protein, 269 aa, Bacillus clausii
AQTVPWGIERVQAPAAHNRGLTGSGVKVAVLDTGISTHPDLRIRGGASFVPGEPSTQDGNGHGTHVAGTIAALDNSIGVLGVAPSAELYAVKVLGAFGLGTISSIAQGLEWAGNNGMHVANLSLGSPSPSATLEQAVNSATSRGVLVVAASGNSGAGSISYPARYANAMSVGATDQNNNRASFSQYGPGLDIVAPGVNILSTWPGSTYKSLNGTSMATPHVAGAAALVKQKNPSWSNVQIRNHLKNTATSLGDTWEYGSGLVNAEAATR

SEQ ID NO: 65006 - protein, 269 aa, Unidentified
AQSVPWGIERVQAPAAHNRGLTGSGVKVAVLDTGISTHPDLRIRGGHSFVPGEPSTQDGNGHGTHVAGTIAALDNSIGVLGVAPSAELYAVKVLGASGSGSVSSIAQGLEWAGNHGMHVANLSLGSDSPSATLEQAVNSATSRGVLVVAASGNSGAGSISYPARYANAMAVGATDQNNNRASFSQYGPGLDIVAPGVDILSTWPGGTYAVLNGTSMATPHVAGAAALVKQKHPSWSNVQIRNHLKNTATDLGSANEYGSGLVNAEAATR

SEQ ID NO: 65007 - protein, 269 aa, Bacillus subtilis
AQSVPWGISRVQAPAAQNRGLTGSGVRVAVLDTGISTSPDLNIRGGASFVPGDPSTQDGNGHGTHVAGTIAALNNSIGVLGVAPSAELFAVRVLGASGSGSVSSIAQGLEWAGNNGMDVANLSLGSPSPSATLEQAVNSATSRGVLVVAASGNSGAGSISFPARVANAMAVGATDQNNNRASFSQFGAGLDIVAPGVNVQSTFPGSTTASLNGTSMATPSVAGAAALVLQRNPSWSNVQIRNHLNNTATSLGSTNLFGSGLVNAEAATR

SEQ ID NO: 65008 - protein, 269 aa, Bacillus clausii
AQTVPWGIERVQAPAAHNRGLTGSGVKVAVLDTGISTHPDLRIRGGASFVPGEPSTQDGNGHGTHVAGTIAALDNSIGVLGVAPSAELYAVKVLGAFGLGTISSIAQGLEWAGNNGMHVANLSLGSPSPSATLEQAVNSATSRGVLVVAASGNSGAGRISYPARYANAMAVGATDQNNNRASFSQYGPGLDIVAPGVNILSTWPGSTYKSLNGTSMATPHVAGAAALVKQKNPSWSNVQIRNHLKNTATSLGDTWEYGSGLVNAEAATR

SEQ ID NO: 65009 - protein, 269 aa, Synthetic construct
AQSVPWGISRVQAPAAQNRGLTGSGVRVAVLDTGISTSPDLNIRGGASFVPGDPSTQDGNGHGTHVAGTIAALNNSIGVLGVAPSAELFAVRVLGASGSGSVSSIAQGLEWAGNNGMNVANLSLGSPSPSATLEQAVNSATSRGVLVVAASGNSGAGSISFPARVANAMAVGATDQNNNRASFSQFGAGLDIVAPGVNVQSTFPGSTTASLNGTSMATPSVAGAAALVRQRNPSWSNVQIRNHLNNTATSLGSTNLFGSGLVNAEAATR

SEQ ID NO: 65010 - protein, 269 aa, Bacillus clausii
AQTVPWGIERVQAPAAHNRGLTGSGVKVAVLDTGISTHPDLRIRGGASFVPGEPSTQDGNGHGTHVAGTIAALDNSIGVLGVAPSAELYAVKVLGAFGLGTISSIAQGLEWAGNNGMHVANLSLGSPSPSATLEQAVNSATSRGVLVVAASGNSGAGSISYPARYANAYAVGATDQNNNRASFSQYGPGLDIVAPGVNILSTWPGSTYKSLNGTSMATPHVAGAAALVKQKNPSWSNVQIRNHLKNTATSLGDTWEYGSGLVNAEAATR

SEQ ID NO: 65011 - protein, 296 aa, Thermus thermophilus
AEEAKEKYLIGFNEQEAVSEFVEQVEANDEVAILSEEEEVEIELLHEFETIPVLSVELSPEDVDALELDPAISYIEEDAEVTTMAQSVPWGISRVQAPAAHNRGLTGSGVKVAVLDTGISTHPDLNIRGGASFVPGEPSTQDGNGHGTHVAGTIAALNNSIGVLGVAPSAELYAVKVLGASGSGSVSSIAQGLEWAGNNGMHVANLSLGSPSPSATLEQAVNSATSRGVLVVAASGNSGAGSISYPARYANAMAVGATDQNNNRACLAEGSLVLDAATGQRVPIEKVRPGMEVFSL

SEQ ID NO: 65012 - protein, 191 aa, Unidentified
LRVPPFANFVSEDLVVHNSGSGSVSSIAQGLEWAGNNGMHVANLSLGSPSPSATLEQAVNSATSRGVLVVAASGNSGAGSISYPARYANAMAVGATDQNNNRASFSQYGAGLDIVAPGVNVQSTYPGSTYASLNGTSMATPHVAGAAALVKQKNPSWSNVQIRNHLKNTATSLGSTNLYGSGLVNAEAATR

SEQ ID NO: 65013 - protein, 380 aa, Unidentified
VRSKKLWIVASTALLISVAFSSSIASAAEEAKEKYLIGFNEQEAVSEFVEQVEANDEVAILSEEEEVEIELLHEFETIPVLSVELSPEDVDALELDPAISYIEEDAEVTTMAQSVPWGISRVQAPAAHNRGLTGSGVKVAVLDTGISTHPDLNIRGGASFVPGEPSTQDGNGHGTHVAGTIAALDNSIGVLGVAPSAELYAVKVLGASGGGAISSIAQGLEWVGNNGMHVANLSLGSPSPSATLEQAVNSATSRGVLVVAASGNSGEGSISYPARYANAMAVGATDQNNNRADFSQYGAGLDIVAPGVNVQSTYPGSTYASLNGTSMATPHVAGAAVLVKQKNPSWSNVRIRDRLKNTATSLGSTNLYGSGLVNAFAATR

SEQ ID NO: 65014 - protein, 380 aa, Unidentified
VRSKKLWIVASTALLISVAFSSSIASAAEEAKEKYLIGFNEQEAVSEFVEQVEANDEVAILSEEEEVEIELLHEFETIPVLSVELSPEDVDALELDPAISYIEEDAEVTTMAQSVPWGISRVQAPAAHNRGLAGSGVKVAVLDTGISTHPDLRIRGGASFVPGEPSTQDGNGHGTHVAGTIAALDNSIGVLGVAPSAELYAVKVLGASGGGAISSIAQGLEWAGNNGMHVANLSLGSPSPSATLEQAVNSATSRGVLVVAASGNSGADSISYPARYANAMAVGATDQNNNRADFSQYGAGLDIVAPGVNVQSTYPGSTYASLNGTSMATPHVAGAAVLVKQKNPSWSNVRIRDHLKNTATSLGSTNLYGSGLVNAFAATR

SEQ ID NO: 65015 - protein, 380 aa, Unidentified
VRSKKLWIVASTALLISVAFSSSIASAAEEAKEKYLIGFNEQEAVSEFVEQVEANDEVAILSEEEEVEIELLHEFETIPVLSVELSPEDVDALELDPAISYIEEDAEVTTMAQSVPWGISRVQAPAARNRGLAGSGVKVAVLDTGISTHPDLNIRGGASFVPGEPSTQDGNGHGTHVAGTIAALDNSIGVLGVAPSAELYAVKVLGASGGGAISSIAQGLEWAGNNGMHVANLSLGSPSPSATLEQAVNSATSRGVLVVAASGNSGADSISYPARYANAMAVGATDQNNNRADFSQYGAGLDIVAPGVNVQSTYPGSTYASLNGTSMATPHVAGAAVLVKQKNPSWSNVRIRDHLKNTATSLGSTNLYGSGLVNAFAATR

SEQ ID NO: 65016 - protein, 380 aa, Unidentified
VRSKKLWIVASTALLISVAFSSSIASAAEEAKEKYLIGFNEQEAVSEFVEQVEANDEVAILSEEEEVEIELLHEFETIPVLSVELSPEDVDALELDPAISYIEEDAEVTTMAQSVPWGISRVQAPAAHNRGLAGSGVKVAVLDTGISTHPDLRIRGGASFVPGEPSTQDGNGHGTHVAGTIAALDNSIGVLGVAPSAELYAVKVLGASGGGAISSIAQGLEWAGNNGMHVANLSLGSPSPSATLEQAVNSATSRGVLVVAASGNSGADSISYPARYANAMAVGATDQNNNRASFSQYGAGLDIVAPGVNVQSTYPGSTYASLNGTSMATPHVAGAAVLVKQKNPSWSNVRIRDRLKNTATSLGSTNLYGSGLVNAFAATR

SEQ ID NO: 65017 - protein, 380 aa, Unidentified
VRSKKLWIVASTALLISVAFSSSIASAAEEAKEKYLIGFNEQEAVSEFVEQVEANDEVAILSEEEEVEIELLHEFETIPVLSVELSPEDVDALELDPAISYIEEDAEVTTMAQSVPWGISRVQAPAAHNRGLTGRGVKVAVLDTGISTHPDLNIRGGASFVPGEPSTQDGNGHGTHVAGTIAALNNSIGVLGVAPSAELYAVKVLGASGGGAISSIAQGLEWAGNNGMHVANLSLGLPSPSATLEQAVNSATSRGVLVVAASGNSGEGSISYPARYANAMAVGATDQDNNRADFSQYGAGLDIVAPGVNVQSTYPGSTYASLNGTSMATPHVAGAAVLVKQKNPSWSNVRIRDRLKNTATSLGSTNLYGSGLVNAEAATR

SEQ ID NO: 65018 - protein, 380 aa, Unidentified
VRSKKLWIVASTALLISVAFSSSIASAAEEAKEKYLIGFNEQEAVSEFVEQVEANDEVAILSEEEEVEIELLHEFETIPVLSVELSPEDVDALELDPAISYIEEDAEVTTMAQSVPWGISRVQAPAAHNRGLTGSGVKVAVLDTGISTHPDLNIRGGASFVPGEPSTQDGNGHGTHVAGTIAALDNSIGVLGVAPSAELYAVKVLGASGAGAISSIAQGLEWAGNNGMHVANLSLGSPSPSATLEQAVNSATSRGVLVVAASGNSGEGSISYPARYANAMAVGATDQNNNRADFSQYGAGLDIVAPGVNVQSTYPGSTYASENGTSMATPHVAGAAVLVKQKNPSWSNVRIRDRLKNTATSLGSTNLYGSGLVNAFAATR

SEQ ID NO: 65019 - protein, 380 aa, Unidentified
VRSKKLWIVASTALLISVAFSSSIASAAEEAKEKYLIGFNEQEAVSEFVEQVEANDEVAILSEEEEVEIELLHEFETIPVLSVELSPEDVDALELDPAISYIEEDAEVTTMAQSVPWGISRVQAPAAHNRGLAGRGVKVAVLDTGISTHPDLNIRGGASFVPGEPSTQDGNGHGTHVAGTIAALNNSIGVLGVAPSAELYAVKVLGASGGGAISSIAQGLEWAGNNGMHVANLSLGSESPSATLEQAVNSATSRGVLVVAASGNSGEESISYPARYANAMAVGATDQNNNRASFSQYGAGLDIVAPGVNVQSTYPGSTYASLNGTSMATPHVAGAAVLVKQKNPSWSNVRIRDRLKNTATSLGSTNLYGSGLVNAEAATR

SEQ ID NO: 65020 - protein, 380 aa, Unidentified
VRSKKLWIVASTALLISVAFSSSIASAAEEAKEKYLIGFNEQEAVSEFVEQVEANDEVAILSEEEEVEIELLHEFETIPVLSVELSPEDVDALELDPAISYIEEDAEVTTMAQSVPWGISRVQAPAAHNRGLTGRGVKVAVLDTGISTHPDLNIRGGASFVPGEPSTQDGNGHGTHVAGTIAALNNSIGVLGVAPSAELYAVKVLGASGGGAISSIAQGLEWAGNNGMHVANLSLGLQSPSATLEQAVNSATSRGVLVVAASGNSGEGSISYPARYANAMAVGATDQNNNRADFSQYGAGLDIVAPGVNVQSTYPGSTYASLNGTSMATPHVAGAAVLVKQKNPSWSNVRIRDRLKNTATSLGSTNLYGSGLVNAEAATR

SEQ ID NO: 65021 - protein, 380 aa, Unidentified
VRSKKLWIVASTALLISVAFSSSIASAAEEAKEKYLIGFNEQEAVSEFVEQVEANDEVAILSEEEEVEIELLHEFETIPVLSVELSPEDVDALELDPAISYIEEDAEVTTMAQSVPWGISRVQAPAAHNRRLWGSGVKVAVLDTGISTHPDLNIRGGASFVPGEPSTQDGNGHGTHVAGTIAALNNRIGVLGVAPSAELYAVKVLGASGAGAISSIAQGLEWAGANGMHVANLSLGSPSPSATLEQAVNSATSRGVLVVAASGNSGAGSISYPARYANAMAVGATDQDNNRASFSQYGAGLDIVAPGVNVQSTYPGSAYFSLNGTSMATPHVAGAAVLVKQKNPSWSNVRIRNHLKNTATSLGSTNLYGSGLVNAEAATR

SEQ ID NO: 65022 - protein, 380 aa, Unidentified
VRSKKLWIVASTALLISVAFSSSIASAAEEAKEKYLIGFNEQEAVSEFVEQVEANDEVAILSEEEEVEIELLHEFETIPVLSVELSPEDVDALELDPAISYIEEDAEVTTMAQSVPWGISRVQAPAAHNRGLTGSGVKVAVLDTGISTHPDLNIRGGASFVPGEPSTQDGNGHGTHVAGTIAALDNSIGVLGVAPSAELYAVKVLGASGGGAISSIAQGLEWAGNNGMHVANLSLGLPSPSATLEQAVNSATSRGVLVVAASGNSGEGSISYPARYANAMAVGATDQNNNRADFSQYGAGLDIVAPGVNVQSTYPGSTYASLNGTSMATPHVAGAAVLVKQKNPSWSNVRIRDRLKNTATSLGSTNLYGSGLVNAFAATR

SEQ ID NO: 65023 - protein, 380 aa, Unidentified
VRSKKLWIVASTALLISVAFSSSIASAAEEAKEKYLIGFNEQEAVSEFVEQVEANDEVAILSEEEEVEIELLHEFETIPVLSVELSPEDVDALELDPAISYIEEDAEVTTMAQSVPWGISRVQAPAAHNRGLAGSGVKVAVLDTGISTHPDLRIRGGASFVPGEPSTQDGNGHGTHVAGTIAALNNSIGVLGVAPSAELYAVKVLGASGGGAISSIAQGLEWAGNNGMHVANLSLGSPSPSATLEQAVNSATSRGVLVVAASGNSGADSISYPARYANAMAVGATDQNNNRADFSQYGAGLDIVAPGVNVQSTYPGSTYASENGTSMATPHVAGAAVLVKQKNPSWSNVRIRDHLKNTATSLGSTNLYGSGLVNAFAATR

SEQ ID NO: 65024 - protein, 380 aa, Unidentified
VRSKKLWIVASTALLISVAFSSSIASAAEEAKEKYLIGFNEQEAVSEFVEQVEANDEVAILSEEEEVEIELLHEFETIPVLSVELSPEDVDALELDPAISYIEEDAEVTTMAQSVPWGISRVQAPAAHNRGLAGRGVKVAVLDTGISTHPDLNIRGGASFVPGEPSTQDGNGHGTHVAGTIAALNNSIGVLGVAPSAELYAVKVLGASGGGAISSIAQGLEWAGNNGMHVANLSLGSPSPSATLEQAVNSATSRGVLVVAASGNSGEESISYPARYANAMAVGATDQNNNRADFSQYGAGLDIVAPGVNVQSTYPGSTYASLNGTSMATPHVAGAAVLVKQKNPSWSNVRIRDRLKNTATSLGSTNLYGSGLVNAEAATR

SEQ ID NO: 65025 - protein, 380 aa, Unidentified
VRSKKLWIVASTALLISVAFSSSIASAAEEAKEKYLIGFNEQEAVSEFVEQVEANDEVAILSEEEEVEIELLHEFETIPVLSVELSPEDVDALELDPAISYIEEDAEVTTMAQSVPWGISRVQAPAAHNRGLTGRGVKVAVLDTGISTHPDLNIRGGASFVPGEPSTQDGNGHGTHVAGTIAALNNSIGVLGVAPSAELYAVKVLGASGGGAISSIAQGLEWAGNNGMHVANLSLGSESPSATLEQAVNSATSRGVLVVAASGNSGEESISYPARYANAMAVGATDQNNNRADFSQYGAGLDIVAPGVNVQSTYPGSTYASLNGTSMATPHVAGAAVLVKQKNPSWSNVRIRDRLKNTATSLGSTNLYGSGLVNAEAATR

SEQ ID NO: 65026 - protein, 380 aa, Unidentified
VRSKKLWIVASTALLISVAFSSSIASAAEEAKEKYLIGFNEQEAVSEFVEQVEANDEVAILSEEEEVEIELLHEFETIPVLSVELSPEDVDALELDPAISYIEEDAEVTTMAQSVPWGISRVQAPAAHRRRLWGRGVKVAVLDTGISTHPDLNIRGGASFVPGEPSTQDGNGHGTHVAGTIAALDNSIGVLGVAPSAELYAVKVLGASGAGSVSSIAQGLEWAGANGMHVANLSLGSPSPSATLEQAVNSATSRGVLVVAASGNSGAGSISYPARYANAMAVGATDQDNNRASFSQYGAGLDLVAPGVNVQSTYPQSTYFSLNGTSMATPHVAGAAALVKQKNPSWSNVQIRNRLKNTATSLGSTNLYGSGLVNAEAATR

SEQ ID NO: 65027 - protein, 380 aa, Unidentified
VRSKKLWIVASTALLISVAFSSSIASAAEEAKEKYLIGFNEQEAVSEFVEQVEANDEVAILSEEEEVEIELLHEFETIPVLSVELSPEDVDALELDPAISYIEEDAEVTTMAQSVPWGISRVQAPAAHNRGLTGSGVKVAVLDTGISTHPDLNIRGGASFVPGEPSTQDGNGHGTHVAGTIAALDNSIGVLGVAPSAELYAVKVLGASGAGAISSIAQGLEWAGNNGMHVANLSLGSPSPSATLEQAVNSATSRGVLVVAASGNSGEGSIDYPARYANAMAVGATDQNNNRADFSQYGAGLDIVAPGVNVQSTYPGSTYASLNGTSMATPHVAGAAVLVKQKNPSWSNVRIRDRLKNTATSLGSTNLYGSGLVNAFAATR

SEQ ID NO: 65028 - protein, 380 aa, Unidentified
VRSKKLWIVASTALLISVAFSSSIASAAEEAKEKYLIGFNEQEAVSEFVEQVEANDEVAILSEEEEVEIELLHEFETIPVLSVELSPEDVDALELDPAISYIEEDAEVTTMAQSVPWGISRVQAPAAHNRRLWGSGVKVAVLDTGISTHPDLNIRGGASFVPGEPSTQDGNGHGTHVAGTIAALNNSIGVLGVAPSAELYAVKVLGASGGGAISSIAQGLEWAGANGMHVANLSLGSPSPSATLEQAVNSATSRGVLVVAASGNSGAGSISYPARYANAMAVGATDQDNNRASFSQYGAGLDIVAPGVNVQSTYPQSAYFSLNGTSMATPHVAGAAVLVKQKNPSWSNVRIRNHLKNTATSLGSTNLYGSGLVNAEAATR

SEQ ID NO: 65029 - protein, 380 aa, Unidentified
VRSKKLWIVASTALLISVAFSSSIASAAEEAKEKYLIGFNEQEAVSEFVEQVEANDEVAILSEEEEVEIELLHEFETIPVLSVELSPEDVDALELDPAISYIEEDAEVTTMAQSVPWGISRVQAPAAHNRGLTGSGVKVAVLDTGISTHPDLNIRGGASFVPGEPSTQDGNGHGTHVAGTIAALNNSIGVLGVAPSAELYAVKVLGASGGGAISSIAQGLEWAGNNGMHVANLSLGLPAPSATLEQAVNSATSRGVLVVAASGNSGEGSISYPARYANAMAVGATDQNNNRADFSQYGAGLDIVAPGVNVQSTYPGSTYASENGTSMATPHVAGAAVLVKQKNPSWSNVRIRDRLKNTATSLGSTNLYGSGLVNAEAATR

SEQ ID NO: 65030 - protein, 380 aa, Unidentified
VRSKKLWIVASTALLISVAFSSSIASAAEEAKEKYLIGFNEQEAVSEFVEQVEANDEVAILSEEEEVEIELLHEFETIPVLSVELSPEDVDALELDPAISYIEEDAEVTTMAQSVPWGISRVQAPAAHNRGLTGRGVKVAVLDTGISTHPDLNIRGGASFVPGEPSTQDGNGHGTHVAGTIAALNNSIGVLGVAPSAELYAVKVLGASGAGAISSIAQGLEWAGNNGMHVANLSLGSPSPSATLEQAVNSATSRGVLVVAASGNSGEGSIDYPARYANAMAVGATDQNNNRADFSQYGAGLDIVAPGVNVQSTYPGSTYASENGTSMATPHVAGAAVLVKQKNPSWSNVRIRDRLKNTATSLGSTNLYGSGLVNAEAATR

SEQ ID NO: 65031 - protein, 380 aa, Unidentified
VRSKKLWIVASTALLISVAFSSSIASAAEEAKEKYLIGFNEQEAVSEFVEQVEANDEVAILSEEEEVEIELLHEFETIPVLSVELSPEDVDALELDPAISYIEEDAEVTTMAQSVPWGISRVQAPAAHNRGLTGRGVKVAVLDTGISTHPDLNIRGGASFVPGEPSTQDGNGHGTHVAGTIAALNNSIGVLGVAPSAELYAVKVLGASGGGAISSIAQGLEWAGNNGMHVANLSLGLPAPSATLEQAVNSATSRGVLVVAASGNSGEGSISYPARYANAMAVGATDQNNNRADFSQYGAGLDIVAPGVNVQSTYPGSTYASLNGTSMATPHVAGAAVLVKQKNPSWSNVRIRDRLKNTATSLGSTNLYGSGLVNAEAATR

SEQ ID NO: 65032 - protein, 380 aa, Unidentified
VRSKKLWIVASTALLISVAFSSSIASAAEEAKEKYLIGFNEQEAVSEFVEQVEANDEVAILSEEEEVEIELLHEFETIPVLSVELSPEDVDALELDPAISYIEEDAEVTTMAQSVPWGISRVQAPAAHNRGLTGRGVKVAVLDTGISTHPDLNIRGGASFVPGEPSTQDGNGHGTHVAGTIAALNNSIGVLGVAPSAELYAVKVLGASGGGAISSIAQGLEWAGNNGMHVANLSLGSPAPSATLEQAVNSATSRGVLVVAASGNSGEGSISYPARYANAMAVGATDQNNNRADFSQYGAGLDIVAPGVNVQSTYPGSTYASENGTSMATPHVAGAAVLVKQKNPSWSNVRIRDRLKNTATSLGSTNLYGSGLVNAEAATR

SEQ ID NO: 65033 - protein, 380 aa, Unidentified
VRSKKLWIVASTALLISVAFSSSIASAAEEAKEKYLIGFNEQEAVSEFVEQVEANDEVAILSEEEEVEIELLHEFETIPVLSVELSPEDVDALELDPAISYIEEDAEVTTMAQSVPWGISRVQAPAAHNRGLAGRGVKVAVLDTGISTHPDLNIRGGASFVPGEPSTQDGNGHGTHVAGTIAALNNSIGVLGVAPSAELYAVKVLGASGGGAISSIAQGLEWAGNNGMHVANLSLGSESPSATLEQAVNSATSRGVLVVAASGNSGAESISYPARYANAMAVGATDQNNNRADFSQYGAGLDIVAPGVNVQSTYPGSTYASLNGTSMATPHVAGAAVLVKQKNPSWSNVRIRDRLKNTATSLGSTNLYGSGLVNAEAATR

SEQ ID NO: 65034 - protein, 380 aa, Unidentified
VRSKKLWIVASTALLISVAFSSSIASAAEEAKEKYLIGFNEQEAVSEFVEQVEANDEVAILSEEEEVEIELLHEFETIPVLSVELSPEDVDALELDPAISYIEEDAEVTTMAQSVPWGISRVQAPAAHNRRLTGSGVKVAVLDTGISTHPDLNIRGGASFVPGEPSTQDGNGHGTHVAGTIAALNNRIGVLGVAPSAELYAVKVLGASGAGAISSIAQGLEWAGANGMHVANLSLGSPSPSATLEQAVNSATSRGVLVVAASGNSGAGSISYPARYANAMAVGATDQDNNRASFSQYGAGLDIVAPGVNVQSTYPQSAYFSLNGTSMATPHVAGAAVLVKQKNPSWSNVRIRNHLKNTATSLGSTNLYGSGLVNAEAATR

SEQ ID NO: 65035 - protein, 380 aa, Unidentified
VRSKKLWIVASTALLISVAFSSSIASAAEEAKEKYLIGFNEQEAVSEFVEQVEANDEVAILSEEEEVEIELLHEFETIPVLSVELSPEDVDALELDPAISYIEEDAEVTTMAQSVPWGISRVQAPAAHNRRLTGSGVKVAVLDTGISTHPDLNIRGGASFVPGEPSTQDGNGHGTHVAGTIAALNNRIGVLGVAPSAELYAVKVLGASGGGAISSIAQGLEWAGANGMHVANLSLGSPSPSATLEQAVNSATSRGVLVVAASGNSGAGSISYPARYANAMAVGATDQDNNRASFSQYGAGLDIVAPGVNVQSTYPQSAYFSLNGTSMATPHVAGAAVLVKQKNPSWSNVRIRNHLKNTATSLGSTNLYGSGLVNAEAATR

SEQ ID NO: 65036 - protein, 380 aa, Unidentified
VRSKKLWIVASTALLISVAFSSSIASAAEEAKEKYLIGFNEQEAVSEFVEQVEANDEVAILSEEEEVEIELLHEFETIPVLSVELSPEDVDALELDPAISYIEEDAEVTTMAQSVPWGISRVQAPAAHNRRLWGSGVKVAVLDTGISTHPDLNIRGGASFVPGEPSTQDGNGHGTHVAGTIAALNNRIGVLGVAPSAELYAVKVLGASGAGAISSIAQGLEWAGNNGMHVANLSLGSPSPSATLEQAVNSATSRGVLVVAASGNSGAGSISYPARYANAMAVGATDQDNNRASFSQYGAGLDLVAPGVNVQSTYPGSAYFSLNGTSMATPHVAGAAVLVKQKNPSWSNVRIRNHLKNTATSLGSTNLYGSGLVNAEAATR

SEQ ID NO: 65037 - protein, 380 aa, Unidentified
VRSKKLWIVASTALLISVAFSSSIASAAEEAKEKYLIGFNEQEAVSEFVEQVEANDEVAILSEEEEVEIELLHEFETIPVLSVELSPEDVDALELDPAISYIEEDAEVTTMAQSVPWGISRVQAPAAHRRRLWGRGVKVAVLDTGISTHPDLNIRGGASFVPGEPSTQDGNGHGTHVAGTIAALDNSIGVLGVAPSAELYAVKVLGASGAGSVSSIAQGLEWAGANGMHVANLSLGSPSPSATLEQAVNSATSRGVLVVAASGNSGAGSISYPARYANAMAVGATDQDNNRASFSQYGAGLDLVAPGVNVQSTYPQSAYASLNGTSMATPHVAGAAALVKQKNPSWSNVQIRNRLKNTATSLGSTNLYGSGLVNAEAATR

SEQ ID NO: 65038 - protein, 380 aa, Unidentified
VRSKKLWIVASTALLISVAFSSSIASAAEEAKEKYLIGFNEQEAVSEFVEQVEANDEVAILSEEEEVEIELLHEFETIPVLSVELSPEDVDALELDPAISYIEEDAEVTTMAQSVPWGISRVQAPAAHNRGLTGSGVKVAVLDTGISTHPDLRIRGGASFVPGEPSTQDGNGHGTHVAGTIAALDNSIGVLGVAPSAELYAVKVLGASGAGAISSIAQGLEWAGNNGMHVANLSLGSPSPSATLEQAVNSATSRGVLVVAASGNSGEGSISYPARYANAMAVGATDQNNNRADFSQYGAGLDIVAPGVNVQSTYPGSTYASLNGTSMATPHVAGAAVLVKQKNPSWSNVRIRDRLKNTATSLGSTNLYGSGLVNAFAATR

SEQ ID NO: 65039 - protein, 380 aa, Unidentified
VRSKKLWIVASTALLISVAFSSSIASAAEEAKEKYLIGFNEQEAVSEFVEQVEANDEVAILSEEEEVEIELLHEFETIPVLSVELSPEDVDALELDPAISYIEEDAEVTTMAQSVPWGISRVQAPAAHNRGLTGRGVKVAVLDTGISTHPDLNIRGGASFVPGEPSTQDGNGHGTHVAGTIAALNNSIGVLGVAPSAELYAVKVLGASGGGAISSIAQGLEWAGNNGMHVANLSLGSQAPSATLEQAVNSATSRGVLVVAASGNSGEGSISYPARYANAMAVGATDQNNNRADFSQYGAGLDIVAPGVNVQSTYPGSTYASLNGTSMATPHVAGAAVLVKQKNPSWSNVRIRDRLKNTATSLGSTNLYGSGLVNAEAATR

SEQ ID NO: 65040 - protein, 380 aa, Unidentified
VRSKKLWIVASTALLISVAFSSSIASAAEEAKEKYLIGFNEQEAVSEFVEQVEANDEVAILSEEEEVEIELLHEFETIPVLSVELSPEDVDALELDPAISYIEEDAEVTTMAQSVPWGISRVQAPAAHNRGLTGSGVKVAVLDTGISTHPDLRIRGGASFVPGEPSTQDGNGHGTHVAGTIAALDNSIGVLGVAPSAELYAVKVLGASGAGAISSIAQGLEWAGNNGMHVANLSLGSPSPSATLEQAVNSATSRGVLVVAASGNSGEGSIDYPARYANAMAVGATDQNNNRADFSQYGAGLDIVAPGVNVQSTYPGSTYASLNGTSMATPHVAGAAVLVKQKNPSWSNVRIRDRLKNTATSLGSTNLYGSGLVNAEAATR

SEQ ID NO: 65041 - protein, 380 aa, Unidentified
VRSKKLWIVASTALLISVAFSSSIASAAEEAKEKYLIGFNEQEAVSEFVEQVEANDEVAILSEEEEVEIELLHEFETIPVLSVELSPEDVDALELDPAISYIEEDAEVTTMAQSVPWGISRVQAPAAHRRGLWGRGVKVAVLDTGISTHPDLNIRGGASFVPGEPSTQDGNGHGTHVAGTIAALDNSIGVLGVAPSAELYAVKVLGASGAGSVSSIAQGLEWAGANGMHVANLSLGSPSPSATLEQAVNSATSRGVLVVAASGNSGAGSISYPARYANAMAVGATDQDNNRASFSQYGAGLDLVAPGVNVQSTYPQSAYFSLNGTSMATPHVAGAAALVKQKNPSWSNVQIRNRLKNTATSLGSTNLYGSGLVNAEAATR

SEQ ID NO: 65042 - protein, 380 aa, Unidentified
VRSKKLWIVASTALLISVAFSSSIASAAEEAKEKYLIGFNEQEAVSEFVEQVEANDEVAILSEEEEVEIELLHEFETIPVLSVELSPEDVDALELDPAISYIEEDAEVTTMAQSVPWGISRVQAPAAHNRGLAGRGVKVAVLDTGISTHPDLNIRGGASFVPGEPSTQDGNGHGTHVAGTIAALNNSIGVLGVAPSAELYAVKVLGASGGGAISSIAQGLEWAGNNGMHVANLSLGSESPSATLEQAVNSATSRGVLVVAASGNSGEGSISYPARYANAMAVGATDQNNNRADFSQYGAGLDIVAPGVNVQSTYPGSTYASLNGTSMATPHVAGAAVLVKQKRPSWSNVRIRDHLKNTATSLGSTNLYGSGLVNAEAATR

SEQ ID NO: 65043 - protein, 380 aa, Unidentified
VRSKKLWIVASTALLISVAFSSSIASAAEEAKEKYLIGFNEQEAVSEFVEQVEANDEVAILSEEEEVEIELLHEFETIPVLSVELSPEDVDALELDPAISYIEEDAEVTTMAQSVPWGISRVQAPAAHNRRLWGSGVKVAVLDTGISTHPDLNIRGGASFVPGEPSTQDGNGHGTHVAGTIAALNNSIGVLGVAPSAELYAVKVLGASGAGAISSIAQGLEWAGANGMHVANLSLGSPSPSATLEQAVNSATSRGVLVVAASGNSGAGSISYPARYANAMAVGATDQDNNRASFSQYGAGLDIVAPGVNVQSTYPQSAYFSLNGTSMATPHVAGAAVLVKQKNPSWSNVRIRNHLKNTATSLGSTNLYGSGLVNAEAATR

SEQ ID NO: 65044 - protein, 380 aa, Unidentified
VRSKKLWIVASTALLISVAFSSSIASAAEEAKEKYLIGFNEQEAVSEFVEQVEANDEVAILSEEEEVEIELLHEFETIPVLSVELSPEDVDALELDPAISYIEEDAEVTTMAQSVPWGISRVQAPAAHNRGLAGRGVKVAVLDTGISTHPDLNIRGGASFVPGEPSTQDGNGHGTHVAGTIAALNNSIGVLGVAPSAELYAVKVLGASGDGAISSIAQGLEWAGNNRMHVANLSLGIPSPSATLEQAVNSATSRGVLVVAASGNSGADSISYPARYANAMAVGATDQNNNRADFSQYGAGLDIVAPGVNVQSTYPGSTYASLNGTSMATPHVAGAAVLVKQKNPSWSNVRIRDHLKNTATSLGSTNLYGSGLVNAEAATR

SEQ ID NO: 65045 - protein, 380 aa, Unidentified
VRSKKLWIVASTALLISVAFSSSIASAAEEAKEKYLIGFNEQEAVSEFVEQVEANDEVAILSEEEEVEIELLHEFETIPVLSVELSPEDVDALELDPAISYIEEDAEVTTMAQSVPWGISRVQAPAAHNRGLAGRGVKVAVLDTGISTHPDLNIRGGASFVPGEPSTQDGNGHGTHVAGTIAALNNSIGVLGVAPSAELYAVKVLGASGGGAISSIAQGLEWAGNNGMHVANLSLGSESPSATLEQAVNSATSRGVLVVAASGNSGEGSISYPARYANAMAVGATDQNNNRADFSQYGAGLDIVAPGVNVQSTYPGSTYASLNGTSMATPHVAGAAVLVKQKNPSWSNVRIRDRLKNTATSLGSTNLYGSGLVNAEAATR

SEQ ID NO: 65046 - protein, 380 aa, Unidentified
VRSKKLWIVASTALLISVAFSSSIASAAEEAKEKYLIGFNEQEAVSEFVEQVEANDEVAILSEEEEVEIELLHEFETIPVLSVELSPEDVDALELDPAISYIEEDAEVTTMAQSVPWGISRVQAPAAHNRGLAGRGVKVAVLDTGISTHPDLNIRGGASFVPGEPSTQDGNGHGTHVAGTIAALNNSIGVLGVAPSAELYAVKVLGASGDGAISSIAQGLEWAGNNRMHVANLSLGSESPSATLEQAVNSATSRGVLVVAASGNSGADSISYPARYANAMAVGATDQNNNRADFSQYGAGLDIVAPGVNVQSTYPGSTYASLNGTSMATPHVAGAAVLVKQKNPSWSNVRIRDHLKNTATSLGSTNLYGSGLVNAEAATR

SEQ ID NO: 65047 - protein, 380 aa, Unidentified
VRSKKLWIVASTALLISVAFSSSIASAAEEAKEKYLIGFNEQEAVSEFVEQVEANDEVAILSEEEEVEIELLHEFETIPVLSVELSPEDVDALELDPAISYIEEDAEVTTMAQSVPWGISRVQAPAAHNRGLTGRGVKVAVLDTGISTHPDLNIRGGASFVPGEPSTQDGNGHGTHVAGTIAALDNSIGVLGVAPSAELYAVKVLGASGGGAISSIAQGLEWAGNNGMHVANLSLGSPSPSATLEQAVNSATSRGVLVVAASGNSGEGSISYPARYANAMAVGATDQNNNRADFSQYGAGLDIVAPGVNVQSTYPGSTYASLNGTSMATPHVAGAAVLVKQKNPSWSNVRIRDRLKNTATSLGSTNLYGSGLVNAFAATR

SEQ ID NO: 65048 - protein, 380 aa, Unidentified
VRSKKLWIVASTALLISVAFSSSIASAAEEAKEKYLIGFNEQEAVSEFVEQVEANDEVAILSEEEEVEIELLHEFETIPVLSVELSPEDVDALELDPAISYIEEDAEVTTMAQSVPWGISRVQAPAAHNRGLAGSGVKVAVLDTGISTHPDLRIRGGASFVPGEPSTQDGNGHGTHVAGTIAALNNSIGVLGVAPSAELYAVKVLGASGDGAISSIAQGLEWAGNNRMHVANLSLGSESPSATLEQAVNSATSRGVLVVAASGNSGADSISYPARYANAMAVGATDQNNNRADFSQYGAGLDIVAPGVNVQSTYPGSTYASLNGTSMATPHVAGAAVLVKQKNPSWSNVQIRDHLKNTATSLGSTNLYGSGLVNAFAATR

SEQ ID NO: 65049 - protein, 380 aa, Unidentified
VRSKKLWIVASTALLISVAFSSSIASAAEEAKEKYLIGFNEQEAVSEFVEQVEANDEVAILSEEEEVEIELLHEFETIPVLSVELSPEDVDALELDPAISYIEEDAEVTTMAQSVPWGISRVQAPAAHRRRLWGRGVKVAVLDTGISTHPDLNIRGGASFVPGEPSTQDGNGHGTHVAGTIAALDNSIGVLGVAPSAELYAVKVLGASGAGSVSSIAQGLEWAGANGMHVANLSLGSPSPSATLEQAVNSATSRGVLVVAASGNSGAGSISYPARYANAMAVGATDQNNNRASFSQYGAGLDLVAPGVNVQSTYPQSAYFSLNGTSMATPHVAGAAALVKQKNPSWSNVQIRNRLKNTATSLGSTNLYGSGLVNAEAATR

SEQ ID NO: 65050 - protein, 380 aa, Unidentified
VRSKKLWIVASTALLISVAFSSSIASAAEEAKEKYLIGFNEQEAVSEFVEQVEANDEVAILSEEEEVEIELLHEFETIPVLSVELSPEDVDALELDPAISYIEEDAEVTTMAQSVPWGISRVQAPAAHNRGLTGSGVKVAVLDTGISTHPDLNIRGGASFVPGEPSTQDGNGHGTHVAGTIAALNNSIGVLGVAPSAELYAVKVLGASGGGAISSIAQGLEWAGNNGMHVANLSLGSPAPSATLEQAVNSATSRGVLVVAASGNSGEGSISYPARYANAMAVGATDQDNNRADFSQYGAGLDIVAPGVNVQSTYPGSTYASENGTSMATPHVAGAAVLVKQKNPSWSNVRIRDRLKNTATSLGSTNLYGSGLVNAEAATR

SEQ ID NO: 65051 - protein, 380 aa, Unidentified
VRSKKLWIVASTALLISVAFSSSIASAAEEAKEKYLIGFNEQEAVSEFVEQVEANDEVAILSEEEEVEIELLHEFETIPVLSVELSPEDVDALELDPAISYIEEDAEVTTMAQSVPWGISRVQAPAAHNRGLTGRGVKVAVLDTGISTHPDLNIRGGASFVPGEPSTQDGNGHGTHVAGTIAALNNSIGVLGVAPSAELYAVKVLGASGGGAISSIAQGLEWAGNNGMHVANLSLGSPAPSATLEQAVNSATSRGVLVVAASGNSGEGSISYPARYANAMAVGATDQDNNRADFSQYGAGLDIVAPGVNVQSTYPGSTYASLNGTSMATPHVAGAAVLVKQKNPSWSNVRIRDRLKNTATSLGSTNLYGSGLVNAEAATR

SEQ ID NO: 65052 - protein, 380 aa, Unidentified
VRSKKLWIVASTALLISVAFSSSIASAAEEAKEKYLIGFNEQEAVSEFVEQVEANDEVAILSEEEEVEIELLHEFETIPVLSVELSPEDVDALELDPAISYIEEDAEVTTMAQSVPWGISRVQAPAAHNRGLTGRGVKVAVLDTGISTHPDLNIRGGASFVPGEPSTQDGNGHGTHVAGTIAALNNSIGVLGVAPSAELYAVKVLGASGGGAISSIAQGLEWAGNNGMHVANLSLGSQSPSATLEQAVNSATSRGVLVVAASGNSGEGSISYPARYANAMAVGATDQDNNRADFSQYGAGLDIVAPGVNVQSTYPGSTYASLNGTSMATPHVAGAAVLVKQKNPSWSNVRIRDRLKNTATSLGSTNLYGSGLVNAEAATR

SEQ ID NO: 65053 - protein, 380 aa, Unidentified
VRSKKLWIVASTALLISVAFSSSIASAAEEAKEKYLIGFNEQEAVSEFVEQVEANDEVAILSEEEEVEIELLHEFETIPVLSVELSPEDVDALELDPAISYIEEDAEVTTMAQSVPWGISRVQAPAAHNRGLTGRGVKVAVLDTGISTHPDLNIRGGASFVPGEPSTQDGNGHGTHVAGTIAALNNSIGVLGVAPSAELYAVKVLGASGGGAISSIAQGLEWAGNNGMHVANLSLGSQSPSATLEQAVNSATSRGVLVVAASGNSGEGSISYPARYANAMAVGATDQNNNRADFSQYGAGLDIVAPGVNVQSTYPGSTYASENGTSMATPHVAGAAVLVKQKNPSWSNVRIRDRLKNTATSLGSTNLYGSGLVNAEAATR

SEQ ID NO: 65054 - protein, 380 aa, Unidentified
VRSKKLWIVASTALLISVAFSSSIASAAEEAKEKYLIGFNEQEAVSEFVEQVEANDEVAILSEEEEVEIELLHEFETIPVLSVELSPEDVDALELDPAISYIEEDAEVTTMAQSVPWGISRVQAPAAHNRGLTGRGVKVAVLDTGISTHPDLRIRGGASFVPGEPSTQDGNGHGTHVAGTIAALNNSIGVLGVAPSAELYAVKVLGASGAGAISSIAQGLEWAGNNGMHVANLSLGSPSPSATLEQAVNSATSRGVLVVAASGNSGEGSISYPARYANAMAVGATDQNNNRADFSQYGAGLDIVAPGVNVQSTYPGSTYASENGTSMATPHVAGAAVLVKQKNPSWSNVRIRDRLKNTATSLGSTNLYGSGLVNAEAATR

SEQ ID NO: 65055 - protein, 380 aa, Unidentified
VRSKKLWIVASTALLISVAFSSSIASAAEEAKEKYLIGFNEQEAVSEFVEQVEANDEVAILSEEEEVEIELLHEFETIPVLSVELSPEDVDALELDPAISYIEEDAEVTTMAQSVPWGISRVQAPAAHNRGLAGRGVKVAVLDTGISTHPDLNIRGGASFVPGEPSTQDGNGHGTHVAGTIAALNNSIGVLGVAPSAELYAVKVLGASGGGAISSIAQGLEWAGNNGMHVANLSLGSESPSATLEQAVNSATSRGVIVVAASGNSGEGSISYPARYANAMAVGATDQNNNRADFSQYGAGLDIVAPGVNVQSTYPGSTYASLNGTSMATPHVAGAAVLVKQKNPSWSNVRIRDHLKNTATSLGSTNLYGSGLVNAEAATR

SEQ ID NO: 65056 - protein, 380 aa, Unidentified
VRSKKLWIVASTALLISVAFSSSIASAAEEAKEKYLIGFNEQEAVSEFVEQVEANDEVAILSEEEEVEIELLHEFETIPVLSVELSPEDVDALELDPAISYIEEDAEVTTMAQSVPWGISRVQAPAAHNRRLTGSGVKVAVLDTGISTHPDLNIRGGASFVPGEPSTQDGNGHGTHVAGTIAALNNRIGVLGVAPSAELYAVKVLGASGAGAISSIAQGLEWAEANGMHVANLSLGSPSPSATLEQAVNSATSRGVLVVAASGNSGAGSISYPARYANAMAVGATDQDNNRASFSQYGAGLDIVAPGVNVQSTYPQSAYASLNGTSMATPHVAGAAVLVKQKNPSWSNVRIRNHLKNTATSLGSTNLYGSGLVNAEAATR

SEQ ID NO: 65057 - protein, 380 aa, Unidentified
VRSKKLWIVASTALLISVAFSSSIASAAEEAKEKYLIGFNEQEAVSEFVEQVEANDEVAILSEEEEVEIELLHEFETIPVLSVELSPEDVDALELDPAISYIEEDAEVTTMAQSVPWGISRVQAPAAHNRRLTGSGVKVAVLDTGISTHPDLNIRGGASFVPGEPSTQDGNGHGTHVAGTIAALNNSIGVLGVAPSAELYAVKVLGASGAGAISSIAQGLEWAGANGMHVANLSLGSPSPSATLEQAVNSATSRGVLVVAASGNSGAGSISYPARYANAMAVGATDQDNNRASFSQYGAGLDLVAPGVNVQSTYPQSAYFSLNGTSMATPHVAGAAVLVKQKNPSWSNVRIRNHLKNTATSLGSTNLYGSGLVNAEAATR

SEQ ID NO: 65058 - protein, 380 aa, Unidentified
VRSKKLWIVASTALLISVAFSSSIASAAEEAKEKYLIGFNEQEAVSEFVEQVEANDEVAILSEEEEVEIELLHEFETIPVLSVELSPEDVDALELDPAISYIEEDAEVTTMAQSVPWGISRVQAPAAHRRRLWGRGVKVAVLDTGISTHPDLNIRGGASFVPGEPSTQDGNGHGTHVAGTIAALDNSIGVLGVAPSAELYAVKVLGASGAGSVSSIAQGLEWAGANGMHVANLSLGSPSPSATLEQAVNSATSRGVLVVAASGNSGAGSISYPARYANAMAVGATDQDNNRASFSQYGAGLDIVAPGVNVQSTYPQSAYFSLNGTSMATPHVAGAAALVKQKNPSWSNVQIRNRLKNTATSLGSTNLYGSGLVNAEAATR

SEQ ID NO: 65059 - protein, 380 aa, Unidentified
VRSKKLWIVASTALLISVAFSSSIASAAEEAKEKYLIGFNEQEAVSEFVEQVEANDEVAILSEEEEVEIELLHEFETIPVLSVELSPEDVDALELDPAISYIEEDAEVTTMAQSVPWGISRVQAPAAHNRGLTGSGVKVAVLDTGISTHPDLNIRGGASFVPGEPSTQDGNGHGTHVAGTIAALDNSIGVLGVAPSAELYAVKVLGASGGGAISSIAQGLEWAGNNGMHVANLSLGSPSPSATLEQAVNSATSRGVLVVAASGNSGEGSIDYPARYANAMAVGATDQNNNRADFSQYGAGLDIVAPGVNVQSTYPGSTYASLNGTSMATPHVAGAAVLVKQKNPSWSNVRIRDRLKNTATSLGSTNLYGSGLVNAFAATR

SEQ ID NO: 65060 - protein, 380 aa, Unidentified
VRSKKLWIVASTALLISVAFSSSIASAAEEAKEKYLIGFNEQEAVSEFVEQVEANDEVAILSEEEEVEIELLHEFETIPVLSVELSPEDVDALELDPAISYIEEDAEVTTMAQSVPWGISRVQAPAAHNRGLAGSGVKVAVLDTGISTHPDLNIRGGASFVPGEPSTQDGNGHGTHVAGTIAALNNSIGVLGVAPSAELYAVKVLGASGDGAISSIAQGLEWAGNNRMHVANLSLGSPSPSATLEQAVNSATSRGVLVVAASGNSGADSISYPARYANAMAVGATDQNNNRADFSQYGAGLDIVAPGVNVQSTYPGSTYASDNGTSMATPHVAGAAVLVKQKNPSWSNVRIRDHLKNTATSLGSTNLYGSGLVNAFAATR

SEQ ID NO: 65061 - protein, 380 aa, Unidentified
VRSKKLWIVASTALLISVAFSSSIASAAEEAKEKYLIGFNEQEAVSEFVEQVEANDEVAILSEEEEVEIELLHEFETIPVLSVELSPEDVDALELDPAISYIEEDAEVTTMAQSVPWGISRVQAPAAHNRGLAGRGVKVAVLDTGISTHPDLNIRGGASFVPGEPSTQDGNGHGTHVAGTIAALNNSIGVLGVAPSAELYAVKVLGASGGGAISSIAQGLEWAGNNGMHVANLSLGSPSPSATLEQAVNSATSRGVLVVAASGNSGEESISYPARYANAMAVGATDQNNNRADFSQYGAGLDIVAPGVNVQSTYPGSTYASLNGTSMATPHVAGAAVLVKQKRPSWSNVRIRDHLKNTATSLGSTNLYGSGLVNAEAATR

SEQ ID NO: 65062 - protein, 281 aa, Unidentified
LATVASVEPAGEAPVYDLTEPVTHSLIANGLVAHNSGVKVAVLDTGISTHPDLNIRGGASFVPGEPSTQDGNGHGTHVAGTIAALNNSIGVLGVAPSAELYAVKVLGASGSGSVSSIAQGLEWAGNNGMHVANLSLGSPSPSATLEQAVNSATSRGVLVVAASGNSGAGSISYPARYANAMAVGATDQNNNRASFSQYGAGLDIVAPGVNVQSTYPGSTYASLNGTSMATPHVAGAAALVKQKNPSWSNVQIRNHLKNTATSLGSTNLYGSGLVNAEAATR

SEQ ID NO: 65063 - protein, 262 aa, Unidentified
LGKIVASTALLISVAFSSSIASAAEEAKEKYLIGFNEQEAVSEFVEQVEANDEVAILSEEEEVEIELLHEFETIPVLSVELSPEDVDALELDPAISYIEEDAEVTTMAQSVPWGISRVQAPAAHNRGLTGSGVKVAVLDTGISTHPDLNIRGGASFVPGEPSTQDGNGHGTHVAGTIAALNNSIGVLGVAPSAELYAVKVLGASGSGSVSSIAQGLEWAGNNGMHVANLSLGSPSPSATLEQAVNSATCFAKGTNVLMADGS

SEQ ID NO: 65064 - protein, 269 aa, Bacillus clausii
AQTVPWGIERVQAPAAHNRGLTGSGVKVAVLDTGISTHPDLRIRGGASFVPGEPSTQDGNGHGTHVAGTIAALDNSIGVLGVAPSAELYAVKVLGAFGLGTISSIAQGLEWAGNNGMHVANLSLGSPSPSATLEQAVNSATSRGVLVVAASGNSGAGSISYPARYANGIAVGATDQNNNRASFSQYGPGLDIVAPGVNILSTWPGSTYKSLNGTSMATPHVAGAAALVKQKNPSWSNVQIRNHLKNTATSLGDTWEYGSGLVNAEAATR

SEQ ID NO: 65065 - protein, 269 aa, Bacillus clausii
AQTVPWGIERVQAPAAHNRGLTGSGVKVAVLDTGISTHPDLRIRGGASFVPGEPSTQDGNGHGTHVAGTIAALDNSIGVLGVAPSAELYAVKVLGAFGLGTISSIAQGLEWAGNNGMHVANLSLGSPSPSATLEQAVNSATSRGVLVVAASGNSGAGWISYPARYANAIAVGATDQNNNRASFSQYGPGLDIVAPGVNILSTWPGSTYKSLNGTSMATPHVAGAAALVKQKNPSWSNVQIRNHLKNTATSLGDTWEYGSGLVNAEAATR

SEQ ID NO: 65066 - protein, 269 aa, Bacillus clausii
AQTVPWGIERVQAPAAHNRGLTGSGVKVAVLDTGISTHPDLRIRGGASFVPGEPSTQDGNGHGTHVAGTIAALDNSIGVLGVAPSAELYAVKVLGAFGLGTISSIAQGLEWAGNNGMHVANLSLGSPSPSATLEQAVNSATSRGVLVVAASGNSGAGSISYPARYANGMSVGATDQNNNRASFSQYGPGLDIVAPGVNILSTWPGSTYKSLNGTSMATPHVAGAAALVKQKNPSWSNVQIRNHLKNTATSLGDTWEYGSGLVNAEAATR

SEQ ID NO: 65067 - protein, 269 aa, Bacillus clausii
AQTVPWGIERVQAPAAHNRGLTGSGVKVAVLDTGISTHPDLRIRGGASFVPGEPSTQDGNGHGTHVAGTIAALDNSIGVLGVAPSAELYAVKVLGAFGLGTISSIAQGLEWAGNNGMHVANLSLGSPSPSATLEQAVNSATSRGVLVVAASGNSGAGWISYPARYANATAVGATDQNNNRASFSQYGPGLDIVAPGVNILSTWPGSTYKSLNGTSMATPHVAGAAALVKQKNPSWSNVQIRNHLKNTATSLGDTWEYGSGLVNAEAATR

SEQ ID NO: 65068 - protein, 269 aa, Bacillus clausii
AQTVPWGIERVQAPAAHNRGLTGSGVKVAVLDTGISTHPDLRIRGGASFVPGEPSTQDGNGHGTHVAGTIAALDNSIGVLGVAPSAELYAVKVLGAFGLGTISSIAQGLEWAGNNGMHVANLSLGSPSPSATLEQAVNSATSRGVLVVAASGNSGAGRISYPARYANAIAVGATDQNNNRASFSQYGPGLDIVAPGVNILSTWPGSTYKSLNGTSMATPHVAGAAALVKQKNPSWSNVQIRNHLKNTATSLGDTWEYGSGLVNAEAATR

SEQ ID NO: 65069 - protein, 269 aa, Bacillus clausii
AQTVPWGIERVQAPAAHNRGLTGSGVKVAVLDTGISTHPDLRIRGGASFVPGEPSTQDGNGHGTHVAGTIAALDNSIGVLGVAPSAELYAVKVLGAFGLGTISSIAQGLEWAGNNGMHVANLSLGSPSPSATLEQAVNSATSRGVLVVAASGNSGAGSISYPARYKNAIAVGATDQNNNRASFSQYGPGLDIVAPGVNILSTWPGSTYKSLNGTSMATPHVAGAAALVKQKNPSWSNVQIRNHLKNTATSLGDTWEYGSGLVNAEAATR

SEQ ID NO: 65070 - protein, 269 aa, Bacillus clausii
AQTVPWGIERVQAPAAHNRGLTGSGVKVAVLDTGISTHPDLRIRGGASFVPGEPSTQDGNGHGTHVAGTIAALDNSIGVLGVAPSAELYAVKVLGAFGLGTISSIAQGLEWAGNNGMHVANLSLGSPSPSATLEQAVNSATSRGVLVVAASGNSGAGRISYPARYANAAAVGATDQNNNRASFSQYGPGLDIVAPGVNILSTWPGSTYKSLNGTSMATPHVAGAAALVKQKNPSWSNVQIRNHLKNTATSLGDTWEYGSGLVNAEAATR

SEQ ID NO: 65071 - protein, 269 aa, Bacillus clausii
AQTVPWGIERVQAPAAHNRGLTGSGVKVAVLDTGISTHPDLRIRGGASFVPGEPSTQDGNGHGTHVAGTIAALDNSIGVLGVAPSAELYAVKVLGAFGLGTISSIAQGLEWAGNNGMHVANLSLGSPSPSATLEQAVNSATSRGVLVVAASGNSGAGRISYPARYANAVAVGATDQNNNRASFSQYGPGLDIVAPGVNILSTWPGSTYKSLNGTSMATPHVAGAAALVKQKNPSWSNVQIRNHLKNTATSLGDTWEYGSGLVNAEAATR

SEQ ID NO: 65072 - protein, 269 aa, Bacillus clausii
AQTVPWGIERVQAPAAHNRGLTGSGVKVAVLDTGISTHPDLRIRGGASFVPGEPSTQDGNGHGTHVAGTIAALDNSIGVLGVAPSAELYAVKVLGAFGLGTISSIAQGLEWAGNNGMHVANLSLGSPSPSATLEQAVNSATSRGVLVVAASGNSGAGYISYPARYANAVAVGATDQNNNRASFSQYGPGLDIVAPGVNILSTWPGSTYKSLNGTSMATPHVAGAAALVKQKNPSWSNVQIRNHLKNTATSLGDTWEYGSGLVNAEAATR

SEQ ID NO: 65073 - protein, 269 aa, Bacillus clausii
AQTVPWGIERVQAPAAHNRGLTGSGVKVAVLDTGISTHPDLRIRGGASFVPGEPSTQDGNGHGTHVAGTIAALDNSIGVLGVAPSAELYAVKVLGAFGLGTISSIAQGLEWAGNNGMHVANLSLGSPSPSATLEQAVNSATSRGVLVVAASGNSGAGLISYPARYANATAVGATDQNNNRASFSQYGPGLDIVAPGVNILSTWPGSTYKSLNGTSMATPHVAGAAALVKQKNPSWSNVQIRNHLKNTATSLGDTWEYGSGLVNAEAATR

SEQ ID NO: 65074 - protein, 269 aa, Bacillus clausii
AQTVPWGIERVQAPAAHNRGLTGSGVKVAVLDTGISTHPDLRIRGGASFVPGEPSTQDGNGHGTHVAGTIAALDNSIGVLGVAPSAELYAVKVLGAFGLGTISSIAQGLEWAGNNGMHVANLSLGSPSPSATLEQAVNSATSRGVLVVAASGNSGAGSISYPARYANAVSVGATDQNNNRASFSQYGPGLDIVAPGVNILSTWPGSTYKSLNGTSMATPHVAGAAALVKQKNPSWSNVQIRNHLKNTATSLGDTWEYGSGLVNAEAATR

SEQ ID NO: 65075 - protein, 269 aa, Bacillus clausii
AQTVPWGIERVQAPAAHNRGLTGSGVKVAVLDTGISTHPDLRIRGGASFVPGEPSTQDGNGHGTHVAGTIAALDNSIGVLGVAPSAELYAVKVLGAFGLGTISSIAQGLEWAGNNGMHVANLSLGSPSPSATLEQAVNSATSRGVLVVAASGNSGAGLISYPARYANAYAVGATDQNNNRASFSQYGPGLDIVAPGVNILSTWPGSTYKSLNGTSMATPHVAGAAALVKQKNPSWSNVQIRNHLKNTATSLGDTWEYGSGLVNAEAATR

SEQ ID NO: 65076 - protein, 269 aa, Bacillus clausii
AQTVPWGIERVQAPAAHNRGLTGSGVKVAVLDTGISTHPDLRIRGGASFVPGEPSTQDGNGHGTHVAGTIAALDNSIGVLGVAPSAELYAVKVLGAFGLGTISSIAQGLEWAGNNGMHVANLSLGSPSPSATLEQAVNSATSRGVLVVAASGNSGAGLISYPARYANAIAVGATDQNNNRASFSQYGPGLDIVAPGVNILSTWPGSTYKSLNGTSMATPHVAGAAALVKQKNPSWSNVQIRNHLKNTATSLGDTWEYGSGLVNAEAATR

SEQ ID NO: 65077 - protein, 269 aa, Bacillus clausii
AQTVPWGIERVQAPAAHNRGLTGSGVKVAVLDTGISTHPDLRIRGGASFVPGEPSTQDGNGHGTHVAGTIAALDNSIGVLGVAPSAELYAVKVLGAFGLGTISSIAQGLEWAGNNGMHVANLSLGSPSPSATLEQAVNSATSRGVLVVAASGNSGAGSISYPARYKNGMAVGATDQNNNRASFSQYGPGLDIVAPGVNILSTWPGSTYKSLNGTSMATPHVAGAAALVKQKNPSWSNVQIRNHLKNTATSLGDTWEYGSGLVNAEAATR

SEQ ID NO: 65078 - protein, 269 aa, Bacillus clausii
AQTVPWGIERVQAPAAHNRGLTGSGVKVAVLDTGISTHPDLRIRGGASFVPGEPSTQDGNGHGTHVAGTIAALDNSIGVLGVAPSAELYAVKVLGAFGLGTISSIAQGLEWAGNNGMHVANLSLGSPSPSATLEQAVNSATSRGVLVVAASGNSGAGWISYPARYANAVAVGATDQNNNRASFSQYGPGLDIVAPGVNILSTWPGSTYKSLNGTSMATPHVAGAAALVKQKNPSWSNVQIRNHLKNTATSLGDTWEYGSGLVNAEAATR

SEQ ID NO: 65079 - protein, 269 aa, Bacillus clausii
AQTVPWGIERVQAPAAHNRGLTGSGVKVAVLDTGISTHPDLRIRGGASFVPGEPSTQDGNGHGTHVAGTIAALDNSIGVLGVAPSAELYAVKVLGAFGLGTISSIAQGLEWAGNNGMHVANLSLGSPSPSATLEQAVNSATSRGVLVVAASGNSGAGWISYPARYANAAAVGATDQNNNRASFSQYGPGLDIVAPGVNILSTWPGSTYKSLNGTSMATPHVAGAAALVKQKNPSWSNVQIRNHLKNTATSLGDTWEYGSGLVNAEAATR

SEQ ID NO: 65080 - protein, 269 aa, Bacillus clausii
AQTVPWGIERVQAPAAHNRGLTGSGVKVAVLDTGISTHPDLRIRGGASFVPGEPSTQDGNGHGTHVAGTIAALDNSIGVLGVAPSAELYAVKVLGAFGLGTISSIAQGLEWAGNNGMHVANLSLGSPSPSATLEQAVNSATSRGVLVVAASGNSGAGSISYPARYANAYSVGATDQNNNRASFSQYGPGLDIVAPGVNILSTWPGSTYKSLNGTSMATPHVAGAAALVKQKNPSWSNVQIRNHLKNTATSLGDTWEYGSGLVNAEAATR

SEQ ID NO: 65081 - protein, 269 aa, Unidentified
AQSVPWGIERVQAPAAHNRGLTGSGVKVAVLDTGISTHPDLRIRGGHSFVPGEPSTQDGNGHGTHVAGTIAALDNSIGVLGVAPSAELYAVKVLGASGSGSVSSIAQGLEWAGNHGMDVANLSLGSPSPSATLEQAVNSATSRGVLVVAASGNSGEPEISYPARYANAMAVGATDQNNNRASFSQYGPGLDIVAPGVDILSTWPGGTYAVLNGTSMATPHVAGAAALVKQKHPSWSNVQIRNHLKNTATSLGSTNEYGSGLVNAEAATR

SEQ ID NO: 65082 - protein, 269 aa, Bacillus clausii
AQTVPWGIERVQAPAAHNRGLTGSGVKVAVLDTGISTHPDLRIRGGASFVPGEPSTQDGNGHGTHVAGTIAALDNSIGVLGVAPSAELYAVKVLGAFGLGTISSIAQGLEWAGNNGMHVANLSLGSPSPSATLEQAVNSATSRGVLVVAASGNSGAGSISYPARYANATSVGATDQNNNRASFSQYGPGLDIVAPGVNILSTWPGSTYKSLNGTSMATPHVAGAAALVKQKNPSWSNVQIRNHLKNTATSLGDTWEYGSGLVNAEAATR

SEQ ID NO: 65083 - protein, 269 aa, Bacillus clausii
AQTVPWGIERVQAPAAHNRGLTGSGVKVAVLDTGISTHPDLRIRGGASFVPGEPSTQDGNGHGTHVAGTIAALDNSIGVLGVAPSAELYAVKVLGAFGLGTISSIAQGLEWAGNNGMHVANLSLGSPSPSATLEQAVNSATSRGVLVVAASGNSGAGSISYPARYANGTAVGATDQNNNRASFSQYGPGLDIVAPGVNILSTWPGSTYKSLNGTSMATPHVAGAAALVKQKNPSWSNVQIRNHLKNTATSLGDTWEYGSGLVNAEAATR

SEQ ID NO: 65084 - protein, 269 aa, Bacillus clausii
AQTVPWGIERVQAPAAHNRGLTGSGVKVAVLDTGISTHPDLRIRGGASFVPGEPSTQDGNGHGTHVAGTIAALDNSIGVLGVAPSAELYAVKVLGAFGLGTISSIAQGLEWAGNNGMHVANLSLGSPSPSATLEQAVNSATSRGVLVVAASGNSGAGSISYPARYANGVAVGATDQNNNRASFSQYGPGLDIVAPGVNILSTWPGSTYKSLNGTSMATPHVAGAAALVKQKNPSWSNVQIRNHLKNTATSLGDTWEYGSGLVNAEAATR

SEQ ID NO: 65085 - protein, 269 aa, Unidentified
AQSVPWGISRVQAPAAHNRGVTGSGVKVAVLDTGISAHPDLNIRGGASFVTGEPTYQDGNGHGTHVAGTIAALNNSIGVLGVAPNAELYAVKVLAANGRGPVSSIAQGLEWAGNNGMDVANLSLGSPSPSATLEQAVNSATSRGVLVVAATGNSGTGSLDYPARYANAMAVGATDQNNNRASFSQYGAGLDIVAPGVNVQSTYPGSTYASFNGTSMATPHVVGVAALVKQKNPSWSNVQIRNHLKNTATSLGSTNLYGSGLVNAEAATR

SEQ ID NO: 65086 - protein, 269 aa, Bacillus clausii
AQTVPWGIERVQAPAAHNRGLTGSGVKVAVLDTGISTHPDLRIRGGASFVPGEPSTQDGNGHGTHVAGTIAALDNSIGVLGVAPSAELYAVKVLGAFGLGTISSIAQGLEWAGNNGMHVANLSLGSPSPSATLEQAVNSATSRGVLVVAASGNSGAGVISYPARYANATAVGATDQNNNRASFSQYGPGLDIVAPGVNILSTWPGSTYKSLNGTSMATPHVAGAAALVKQKNPSWSNVQIRNHLKNTATSLGDTWEYGSGLVNAEAATR

SEQ ID NO: 65087 - protein, 269 aa, Bacillus clausii
AQTVPWGIERVQAPAAHNRGLTGSGVKVAVLDTGISTHPDLRIRGGASFVPGEPSTQDGNGHGTHVAGTIAALDNSIGVLGVAPSAELYAVKVLGAFGLGTISSIAQGLEWAGNNGMHVANLSLGSPSPSATLEQAVNSATSRGVLVVAASGNSGAGRISYPARYANADAVGATDQNNNRASFSQYGPGLDIVAPGVNILSTWPGSTYKSLNGTSMATPHVAGAAALVKQKNPSWSNVQIRNHLKNTATSLGDTWEYGSGLVNAEAATR

SEQ ID NO: 65088 - protein, 269 aa, Bacillus clausii
AQTVPWGIERVQAPAAHNRGLTGSGVKVAVLDTGISTHPDLRIRGGASFVPGEPSTQDGNGHGTHVAGTIAALDNSIGVLGVAPSAELYAVKVLGAFGLGTISSIAQGLEWAGNNGMHVANLSLGSPSPSATLEQAVNSATSRGVLVVAASGNSGAGSISYPARYANAASVGATDQNNNRASFSQYGPGLDIVAPGVNILSTWPGSTYKSLNGTSMATPHVAGAAALVKQKNPSWSNVQIRNHLKNTATSLGDTWEYGSGLVNAEAATR

SEQ ID NO: 65089 - protein, 269 aa, Bacillus clausii
AQTVPWGIERVQAPAAHNRGLTGSGVKVAVLDTGISTHPDLRIRGGASFVPGEPSTQDGNGHGTHVAGTIAALDNSIGVLGVAPSAELYAVKVLGAFGLGTISSIAQGLEWAGNNGMHVANLSLGSPSPSATLEQAVNSATSRGVLVVAASGNSGAGYISYPARYANATAVGATDQNNNRASFSQYGPGLDIVAPGVNILSTWPGSTYKSLNGTSMATPHVAGAAALVKQKNPSWSNVQIRNHLKNTATSLGDTWEYGSGLVNAEAATR

SEQ ID NO: 65090 - protein, 269 aa, Bacillus clausii
AQTVPWGIERVQAPAAHNRGLTGSGVKVAVLDTGISTHPDLRIRGGASFVPGEPSTQDGNGHGTHVAGTIAALDNSIGVLGVAPSAELYAVKVLGAFGLGTISSIAQGLEWAGNNGMHVANLSLGSPSPSATLEQAVNSATSRGVLVVAASGNSGAGSISYPARYKNAAAVGATDQNNNRASFSQYGPGLDIVAPGVNILSTWPGSTYKSLNGTSMATPHVAGAAALVKQKNPSWSNVQIRNHLKNTATSLGDTWEYGSGLVNAEAATR

SEQ ID NO: 65091 - protein, 269 aa, Bacillus clausii
AQTVPWGIERVQAPAAHNRGLTGSGVKVAVLDTGISTHPDLRIRGGASFVPGEPSTQDGNGHGTHVAGTIAALDNSIGVLGVAPSAELYAVKVLGAFGLGTISSIAQGLEWAGNNGMHVANLSLGSPSPSATLEQAVNSATSRGVLVVAASGNSGAGSISYPARYKNATAVGATDQNNNRASFSQYGPGLDIVAPGVNILSTWPGSTYKSLNGTSMATPHVAGAAALVKQKNPSWSNVQIRNHLKNTATSLGDTWEYGSGLVNAEAATR

SEQ ID NO: 65092 - protein, 269 aa, Bacillus clausii
AQTVPWGIERVQAPAAHNRGLTGSGVKVAVLDTGISTHPDLRIRGGASFVPGEPSTQDGNGHGTHVAGTIAALDNSIGVLGVAPSAELYAVKVLGAFGLGTISSIAQGLEWAGNNGMHVANLSLGSPSPSATLEQAVNSATSRGVLVVAASGNSGAGSISYPARYKNADAVGATDQNNNRASFSQYGPGLDIVAPGVNILSTWPGSTYKSLNGTSMATPHVAGAAALVKQKNPSWSNVQIRNHLKNTATSLGDTWEYGSGLVNAEAATR

SEQ ID NO: 65093 - protein, 269 aa, Bacillus clausii
AQTVPWGIERVQAPAAHNRGLTGSGVKVAVLDTGISTHPDLRIRGGASFVPGEPSTQDGNGHGTHVAGTIAALDNSIGVLGVAPSAELYAVKVLGAFGLGTISSIAQGLEWAGNNGMHVANLSLGSPSPSATLEQAVNSATSRGVLVVAASGNSGAGRISYPARYANATAVGATDQNNNRASFSQYGPGLDIVAPGVNILSTWPGSTYKSLNGTSMATPHVAGAAALVKQKNPSWSNVQIRNHLKNTATSLGDTWEYGSGLVNAEAATR

SEQ ID NO: 65094 - protein, 269 aa, Bacillus clausii
AQTVPWGIERVQAPAAHNRGLTGSGVKVAVLDTGISTHPDLRIRGGASFVPGEPSTQDGNGHGTHVAGTIAALDNSIGVLGVAPSAELYAVKVLGAFGLGTISSIAQGLEWAGNNGMHVANLSLGSPSPSATLEQAVNSATSRGVLVVAASGNSGAGSISYPARYANVYAVGATDQNNNRASFSQYGPGLDIVAPGVNILSTWPGSTYKSLNGTSMATPHVAGAAALVKQKNPSWSNVQIRNHLKNTATSLGDTWEYGSGLVNAEAATR

SEQ ID NO: 65095 - protein, 269 aa, Bacillus clausii
AQTVPWGIERVQAPAAHNRGLTGSGVKVAVLDTGISTHPDLRIRGGASFVPGEPSTQDGNGHGTHVAGTIAALDNSIGVLGVAPSAELYAVKVLGAFGLGTISSIAQGLEWAGNNGMHVANLSLGSPSPSATLEQAVNSATSRGVLVVAASGNSGAGLISYPARYANAVAVGATDQNNNRASFSQYGPGLDIVAPGVNILSTWPGSTYKSLNGTSMATPHVAGAAALVKQKNPSWSNVQIRNHLKNTATSLGDTWEYGSGLVNAEAATR

SEQ ID NO: 65096 - protein, 269 aa, Bacillus clausii
AQTVPWGIERVQAPAAHNRGLTGSGVKVAVLDTGISTHPDLRIRGGASFVPGEPSTQDGNGHGTHVAGTIAALDNSIGVLGVAPSAELYAVKVLGAFGLGTISSIAQGLEWAGNNGMHVANLSLGSPSPSATLEQAVNSATSRGVLVVAASGNSGAGVISYPARYANAIAVGATDQNNNRASFSQYGPGLDIVAPGVNILSTWPGSTYKSLNGTSMATPHVAGAAALVKQKNPSWSNVQIRNHLKNTATSLGDTWEYGSGLVNAEAATR

SEQ ID NO: 65097 - protein, 269 aa, Bacillus clausii
AQTVPWGIERVQAPAAHNRGLTGSGVKVAVLDTGISTHPDLRIRGGASFVPGEPSTQDGNGHGTHVAGTIAALDNSIGVLGVAPSAELYAVKVLGAFGLGTISSIAQGLEWAGNNGMHVANLSLGSPSPSATLEQAVNSATSRGVLVVAASGNSGAGYISYPARYANAIAVGATDQNNNRASFSQYGPGLDIVAPGVNILSTWPGSTYKSLNGTSMATPHVAGAAALVKQKNPSWSNVQIRNHLKNTATSLGDTWEYGSGLVNAEAATR

SEQ ID NO: 65098 - protein, 269 aa, Bacillus clausii
AQTVPWGIERVQAPAAHNRGLTGSGVKVAVLDTGISTHPDLRIRGGASFVPGEPSTQDGNGHGTHVAGTIAALDNSIGVLGVAPSAELYAVKVLGAFGLGTISSIAQGLEWAGNNGMHVANLSLGSPSPSATLEQAVNSATSRGVLVVAASGNSGAGYISYPARYANAYAVGATDQNNNRASFSQYGPGLDIVAPGVNILSTWPGSTYKSLNGTSMATPHVAGAAALVKQKNPSWSNVQIRNHLKNTATSLGDTWEYGSGLVNAEAATR

SEQ ID NO: 65099 - protein, 269 aa, Bacillus clausii
AQTVPWGIERVQAPAAHNRGLTGSGVKVAVLDTGISTHPDLRIRGGASFVPGEPSTQDGNGHGTHVAGTIAALDNSIGVLGVAPSAELYAVKVLGAFGLGTISSIAQGLEWAGNNGMHVANLSLGSPSPSATLEQAVNSATSRGVLVVAASGNSGAGSISYPARYKNAVAVGATDQNNNRASFSQYGPGLDIVAPGVNILSTWPGSTYKSLNGTSMATPHVAGAAALVKQKNPSWSNVQIRNHLKNTATSLGDTWEYGSGLVNAEAATR

SEQ ID NO: 65100 - protein, 380 aa, Unidentified
VRSKKLWIVASTALLISVAFSSSIASAAEEAKEKYLIGFNEQEAVSEFVEQVEANDEVAILSEEEEVEIELLHEFETIPVLSVELSPEDVDALELDPAISYIEEDAEVTTMAQSVPWGISRVQAPAAHNRGLTGRGVKVAVLDTGISTHPDLNIRGGASFVPGEPSTQDGNGHGTHVAGTIAALDNSIGVLGVAPSAELYAVKVLGASGAGAISSIAQGLEWAGNNGMHVANLSLGSPSPSATLEQAVNSATSRGVLVVAASGNSGEGSIDYPARYANAMAVGATDQNNNRADFSQYGAGLDIVAPGVNVQSTYPGSTYASLNGTSMATPHVAGAAVLVKQKNPSWSNVRIRDRLKNTATSLGSTNLYGSGLVNAFAATR

SEQ ID NO: 65101 - protein, 380 aa, Unidentified
VRSKKLWIVASTALLISVAFSSSIASAAEEAKEKYLIGFNEQEAVSEFVEQVEANDEVAILSEEEEVEIELLHEFETIPVLSVELSPEDVDALELDPAISYIEEDAEVTTMAQSVPWGISRVQAPAAHNRGLTGSGVKVAVLDTGISTHPDLRIRGGASFVPGEPSTQDGNGHGTHVAGTIAALDNSIGVLGVAPSAELYAVKVLGASGAGAISSIAQGLEWAGNNGMHVANLSLGSPSPSATLEQAVNSATSRGVLVVAASGNSGEGSIDYPARYANAMAVGATDQNNNRADFSQYGAGLDIVAPGVNVQSTYPGSTYASLNGTSMATPHVAGAAVLVKQKNPSWSNVRIRDRLKNTATSLGSTNLYGSGLVNAFAATR

SEQ ID NO: 65102 - protein, 380 aa, Unidentified
VRSKKLWIVASTALLISVAFSSSIASAAEEAKEKYLIGFNEQEAVSEFVEQVEANDEVAILSEEEEVEIELLHEFETIPVLSVELSPEDVDALELDPAISYIEEDAEVTTMAQSVPWGISRVQAPAAHNRGLAGRGVKVAVLDTGISTHPDLNIRGGASFVPGEPSTQDGNGHGTHVAGTIAALNNSIGVLGVAPSAELYAVKVLGASGGGAISSIAQGLEWAGNNGMHVANLSLGSESPSATLEQAVNSATSRGVLVVAASGNSGEESISYPARYANAMAVGATDQNNNRADFSQYGAGLDIVAPGVNVQSTYPGSTYASLNGTSMATPHVAGAAVLVKQKNPSWSNVRIRDRLKNTATSLGSTNLYGSGLVNAEAATR

SEQ ID NO: 65103 - protein, 380 aa, Unidentified
VRSKKLWIVASTALLISVAFSSSIASAAEEAKEKYLIGFNEQEAVSEFVEQVEANDEVAILSEEEEVEIELLHEFETIPVLSVELSPEDVDALELDPAISYIEEDAEVTTMAQSVPWGISRVQAPAAHNRRLWGSGVKVAVLDTGISTHPDLNIRGGASFVPGEPSTQDGNGHGTHVAGTIAALNNSIGVLGVAPSAELYAVKVLGASGAGAISSIAQGLEWAGANGMHVANLSLGSPSPSATLEQAVNSATSRGVLVVAASGNSGAGSISYPARYANAMAVGATDQDNNRASFSQYGAGLDLVAPGVNVQSTYPQSAYFSLNGTSMATPHVAGAAVLVKQKNPSWSNVRIRNHLKNTATSLGSTNLYGSGLVNAEAATR

SEQ ID NO: 65104 - protein, 380 aa, Unidentified
VRSKKLWIVASTALLISVAFSSSIASAAEEAKEKYLIGFNEQEAVSEFVEQVEANDEVAILSEEEEVEIELLHEFETIPVLSVELSPEDVDALELDPAISYIEEDAEVTTMAQSVPWGISRVQAPAAHNRRLWGSGVKVAVLDTGISTHPDLNIRGGASFVPGEPSTQDGNGHGTHVAGTIAALNNRIGVLGVAPSAELYAVKVLGASGAGAISSIAQGLEWAGANGMHVANLSLGSPSPSATLEQAVNSATSRGVLVVAASGNSGAGSISYPARYANAMAVGATDQDNNRASFSQYGAGLDIVAPGVNVQSTYPQSAYFSLNGTSMATPHVAGAAVLVKQKNPSWSNVRIRNHLKNTATSLGSTNLYGSGLVNAEAATR

SEQ ID NO: 65105 - protein, 380 aa, Unidentified
VRSKKLWIVASTALLISVAFSSSIASAAEEAKEKYLIGFNEQEAVSEFVEQVEANDEVAILSEEEEVEIELLHEFETIPVLSVELSPEDVDALELDPAISYIEEDAEVTTMAQSVPWGISRVQAPAAHNRGLTGRGVKVAVLDTGISTHPDLNIRGGASFVPGEPSTQDGNGHGTHVAGTIAALNNSIGVLGVAPSAELYAVKVLGASGGGAISSIAQGLEWAGNNGMHVANLSLGLQSPSATLEQAVNSATSRGVLVVAASGNSGEGSISYPARYANAMAVGATDQDNNRADFSQYGAGLDIVAPGVNVQSTYPGSTYASLNGTSMATPHVAGAAVLVKQKNPSWSNVRIRDRLKNTATSLGSTNLYGSGLVNAEAATR

SEQ ID NO: 65106 - protein, 380 aa, Unidentified
VRSKKLWIVASTALLISVAFSSSIASAAEEAKEKYLIGFNEQEAVSEFVEQVEANDEVAILSEEEEVEIELLHEFETIPVLSVELSPEDVDALELDPAISYIEEDAEVTTMAQSVPWGISRVQAPAAHNRGLTGRGVKVAVLDTGISTHPDLNIRGGASFVPGEPSTQDGNGHGTHVAGTIAALNNSIGVLGVAPSAELYAVKVLGASGGGAISSIAQGLEWAGNNGMHVANLSLGLQSPSATLEQAVNSATSRGVLVVAASGNSGEGSISYPARYANAMAVGATDQNNNRADFSQYGAGLDIVAPGVNVQSTYPGSTYASLNGTSMATPHVAGAAVLVKQKNPSWSNVRIRDRLKNTATSLGSTNLYGSGLVNAGAATR

SEQ ID NO: 65107 - protein, 380 aa, Unidentified
VRSKKLWIVASTALLISVAFSSSIASAAEEAKEKYLIGFNEQEAVSEFVEQVEANDEVAILSEEEEVEIELLHEFETIPVLSVELSPEDVDALELDPAISYIEEDAEVTTMAQSVPWGISRVQAPAAHNRGLTGRGVKVAVLDTGISTHPDLRIRGGASFVPGEPSTQDGNGHGTHVAGTIAALDNSIGVLGVAPSAELYAVKVLGASGAGAISSIAQGLEWAGNNGMHVANLSLGSPSPSATLEQAVNSATSRGVLVVAASGNSGEGSISYPARYANAMAVGATDQNNNRADFSQYGAGLDIVAPGVNVQSTYPGSTYASENGTSMATPHVAGAAVLVKQKNPSWSNVRIRDRLKNTATSLGSTNLYGSGLVNAEAATR

SEQ ID NO: 65108 - protein, 380 aa, Unidentified
VRSKKLWIVASTALLISVAFSSSIASAAEEAKEKYLIGFNEQEAVSEFVEQVEANDEVAILSEEEEVEIELLHEFETIPVLSVELSPEDVDALELDPAISYIEEDAEVTTMAQSVPWGISRVQAPAAHNRGLTGRGVKVAVLDTGISTHPDLNIRGGASFVPGEPSTQDGNGHGTHVAGTIAALNNSIGVLGVAPSAELYAVKVLGASGGGAISSIAQGLEWAGNNGMHVANLSLGLQAPSATLEQAVNSATSRGVLVVAASGNSGEGSISYPARYANAMAVGATDQNNNRADFSQYGAGLDIVAPGVNVQSTYPGSTYASLNGTSMATPHVAGAAVLVKQKNPSWSNVRIRDRLKNTATSLGSTNLYGSGLVNAEAATR

SEQ ID NO: 65109 - protein, 380 aa, Unidentified
VRSKKLWIVASTALLISVAFSSSIASAAEEAKEKYLIGFNEQEAVSEFVEQVEANDEVAILSEEEEVEIELLHEFETIPVLSVELSPEDVDALELDPAISYIEEDAEVTTMAQSVPWGISRVQAPAAHNRGLTGSGVKVAVLDTGISTHPDLRIRGGASFVPGEPSTQDGNGHGTHVAGTIAALDNSIGVLGVAPSAELYAVKVLGASGAGAISSIAQGLEWAGNNGMHVANLSLGSPSPSATLEQAVNSATSRGVLVVAASGNSGEGSISYPARYANAMAVGATDQNNNRADFSQYGAGLDIVAPGVNVQSTYPGSTYASENGTSMATPHVAGAAVLVKQKNPSWSNVRIRDRLKNTATSLGSTNLYGSGLVNAFAATR

SEQ ID NO: 65110 - protein, 380 aa, Unidentified
VRSKKLWIVASTALLISVAFSSSIASAAEEAKEKYLIGFNEQEAVSEFVEQVEANDEVAILSEEEEVEIELLHEFETIPVLSVELSPEDVDALELDPAISYIEEDAEVTTMAQSVPWGISRVQAPAAHNRGLTGRGVKVAVLDTGISTHPDLNIRGGASFVPGEPSTQDGNGHGTHVAGTIAALNNSIGVLGVAPSAELYAVKVLGASGGGAISSIAQGLEWAGNNGMHVANLSLGSQAPSATLEQAVNSATSRGVLVVAASGNSGEGSISYPARYANAMAVGATDQDNNRADFSQYGAGLDIVAPGVNVQSTYPGSTYASLNGTSMATPHVAGAAVLVKQKNPSWSNVRIRDRLKNTATSLGSTNLYGSGLVNAEAATR

SEQ ID NO: 65111 - protein, 380 aa, Unidentified
VRSKKLWIVASTALLISVAFSSSIASAAEEAKEKYLIGFNEQEAVSEFVEQVEANDEVAILSEEEEVEIELLHEFETIPVLSVELSPEDVDALELDPAISYIEEDAEVTTMAQSVPWGISRVQAPAAHNRGLTGSGVKVAVLDTGISTHPDLRIRGGASFVPGEPSTQDGNGHGTHVAGTIAALDNSIGVLGVAPSAELYAVKVLGASGGGAISSIAQGLEWAGNNGMHVANLSLGSPSPSATLEQAVNSATSRGVLVVAASGNSGEGSIDYPARYANAMAVGATDQNNNRADFSQYGAGLDIVAPGVNVQSTYPGSTYASLNGTSMATPHVAGAAVLVKQKNPSWSNVRIRDRLKNTATSLGSTNLYGSGLVNAFAATR

SEQ ID NO: 65112 - protein, 380 aa, Unidentified
VRSKKLWIVASTALLISVAFSSSIASAAEEAKEKYLIGFNEQEAVSEFVEQVEANDEVAILSEEEEVEIELLHEFETIPVLSVELSPEDVDALELDPAISYIEEDAEVTTMAQSVPWGISRVQAPAAHNRRLWGSGVKVAVLDTGISTHPDLNIRGGASFVPGEPSTQDGNGHGTHVAGTIAALNNSIGVLGVAPSAELYAVKVLGASGGGAISSIAQGLEWAGANGMHVANLSLGSPSPSATLEQAVNSATSRGVLVVAASGNSGAGSISYPARYANAMAVGATDQDNNRASFSQYGAGLDLVAPGVNVQSTYPQSAYFSLNGTSMATPHVAGAAVLVKQKNPSWSNVRIRNHLKNTATSLGSTNLYGSGLVNAEAATR

SEQ ID NO: 65113 - protein, 380 aa, Unidentified
VRSKKLWIVASTALLISVAFSSSIASAAEEAKEKYLIGFNEQEAVSEFVEQVEANDEVAILSEEEEVEIELLHEFETIPVLSVELSPEDVDALELDPAISYIEEDAEVTTMAQSVPWGISRVQAPAAHNRGLAGRGVKVAVLDTGISTHPDLNIRGGASFVPGEPSTQDGNGHGTHVAGTIAALNNSIGVLGVAPSAELYAVKVLGASGGGAISSIAQGLEWAGNNGMHVANLSLGSESPSATLEQAVNSATSRGVLVVAASGNSGEESISYPARYANAMAVGATDQNNNRADFSQYGAGLDIVAPGVNVQSTYPGSTYASLNGTSMATPHVAGAAVLVKQKRPSWSNVRIRDHLKNTATSLGSTNLYGSGLVNAEAATR

SEQ ID NO: 65114 - protein, 380 aa, Unidentified
VRSKKLWIVASTALLISVAFSSSIASAAEEAKEKYLIGFNEQEAVSEFVEQVEANDEVAILSEEEEVEIELLHEFETIPVLSVELSPEDVDALELDPAISYIEEDAEVTTMAQSVPWGISRVQAPAAHNRGLAGRGVKVAVLDTGISTHPDLNIRGGASFVPGEPSTQDGNGHGTHVAGTIAALNNSIGVLGVAPSAELYAVKVLGASGGGAISSIAQGLEWAGNNGMHVANLSLGNESPSATLEQAVNSATSRGVLVVAASGNSGEGSISYPARYANAMAVGATDQNNNRADFSQYGAGLDIVAPGVNVQSTYPGSTYASLNGTSMATPHVAGAAVLVKQKNPSWSNVRIRDRLKNTATSLGSTNLYGSGLVNAEAATR

SEQ ID NO: 65115 - protein, 380 aa, Unidentified
VRSKKLWIVASTALLISVAFSSSIASAAEEAKEKYLIGFNEQEAVSEFVEQVEANDEVAILSEEEEVEIELLHEFETIPVLSVELSPEDVDALELDPAISYIEEDAEVTTMAQSVPWGISRVQAPAAHRRRLWGRGVKVAVLDTGISTHPDLNIRGGASFVPGEPSTQDGNGHGTHVAGTIAALDNSIGVLGVAPSAELYAVKVLGASGAGSVSSIAQGLEWAGANGMHVANLSLGSPSPSATLEQAVNSATSRGVLVVAASGNSGAGSISYPARYANAMAVGATDQDNNRASFSQYGAGLDLVAPGVNVQSTYPQSAYFSLNGTSMATPHVAGAAALVKQKNPSWSNVQIRNRLKNTATSLGSTNLYGSGLVNAEAATR

SEQ ID NO: 65116 - protein, 380 aa, Unidentified
VRSKKLWIVASTALLISVAFSSSIASAAEEAKEKYLIGFNEQEAVSEFVEQVEANDEVAILSEEEEVEIELLHEFETIPVLSVELSPEDVDALELDPAISYIEEDAEVTTMAQSVPWGISRVQAPAAHNRGLTGSGVKVAVLDTGISTHPDLRITGGASFVPGEPSTQDGNGHGTHVAGTIAALDNRIGVLGVAPSAELYAVKVLGASGGGAISSIAQGLEWAGNNGMHVANLSLGSPSPSATLEQAVNSATSRGVLVVAASGNSGAGSIFYPARYANAMPVGVTDQNTNRPSFSQYGPGLDIVAPGVNVQSTYPGSTYASLNGTSMATPHVAGAAALVKQKNPSWSNVQIRNHLKNTATSLGSTNLYGSGLVNAEAATR

SEQ ID NO: 65117 - protein, 380 aa, Unidentified
VRSKKLWIVASTALLISVAFSSSIASAAEEAKEKYLIGFNEQEAVSEFVEQVEANDEVAILSEEEEVEIELLHEFETIPVLSVELSPEDVDALELDPAISYIEEDAEVTTMAQSVPWGISRVQAPAAHNRGLTGRGVKVAVLDTGISTHPDLNIRGGASFVPGEPSTQDGNGHGTHVAGTIAALNNSIGVLGVAPSAELYAVKVLGASGGGAISSIAQGLEWAGNNGMHVANLSLGLQAPSATLEQAVNSATSRGVLVVAASGNSGEGSISYPARYANAMAVGATDQDNNRADFSQYGAGLDIVAPGVNVQSTYPGSTYASLNGTSMATPHVAGAAVLVKQKNPSWSNVRIRDRLKNTATSLGSTNLYGSGLVNAEAATR

SEQ ID NO: 65118 - protein, 380 aa, Unidentified
VRSKKLWIVASTALLISVAFSSSIASAAEEAKEKYLIGFNEQEAVSEFVEQVEANDEVAILSEEEEVEIELLHEFETIPVLSVELSPEDVDALELDPAISYIEEDAEVTTMAQSVPWGISRVQAPAAHNRGLTGRGVRVAVLDTGISTHPDLNIRGGASFVPGEPSTQDGNGHGTHVAGTIAALNNSIGVLGVAPSAELYAVKVLGASGGGAISSIAQGLEWAGNNGMHVANLSLGLQAPSATLEQAVNSATSRGVLVVAASGNSGEGSISYPARYANAMAVGATDQNNNRADFSQYGAGLDIVAPGVNVQSTYPGSTYASLNGTSMATPHVAGAAVLVKQKNPSWSNVRIRDRLKNTATSLGSTNLYGSGLVNAEAATR

SEQ ID NO: 65119 - protein, 380 aa, Unidentified
VRSKKLWIVASTALLISVAFSSSIASAAEEAKEKYLIGFNEQEAVSEFVEQVEANDEVAILSEEEEVEIELLHEFETIPVLSVELSPEDVDALELDPAISYIEEDAEVTTMAQSVPWGISRVQAPAAHNRGLAGRGVKVAVLDTGISTHPDLRIRGGASFVPGEPSTQDGNGHGTHVAGTIAALNNSIGVLGVAPSAELYAVKVLGASGSGAISSIAQGLEWAGNNRMHVANLSLGIESPSATLEQAVNSATSRGVLVVAASGNSGADSISYPARYANAMAVGATDQNNNRADFSQYGAGLDIVAPGVNVQSTYPGSTYASDNGTSMATPHVAGAAVLVKQKNPSWSNVQIRDHLKNTATSLGSTNLYGSGLVNAFAATR

SEQ ID NO: 65120 - protein, 270 aa, Unidentified
MAEVFDVQVPGVNAFDANGFYVHNSGVKVAVLDTGISTHPDLNIRGGASFVPGEPSTQDGNGHGTHVAGTIAALNNSIGVLGVAPSAELYAVKVLGASGSGSVSSIAQGLEWAGNNGMHVANLSLGSPSPSATLEQAVNSATSRGVLVVAASGNSGAGSISYPARYANAMAVGATDQNNNRASFSQYGAGLDIVAPGVNVQSTYPGSTYASLNGTSMATPHVAGAAALVKQKNPSWSNVQIRNHLKNTATSLGSTNLYGSGLVNAEAATR

SEQ ID NO: 65121 - protein, 269 aa, Bacillus clausii
AQTVPWGIERVQAPAAHNRGLTGSGVKVAVLDTGISTHPDLRIRGGASFVPGEPSTQDGNGHGTHVAGTIAALDNSIGVLGVAPSAELYAVKVLGAFGLGTISSIAQGLEWAGNNGMHVANLSLGSPSPSATLEQAVNSATSRGVLVVAASGNSGAGSIRYPARYKNAIAVGATDQNNNRASFSQYGPGLDIVAPGVNILSTWPGSTYKSLNGTSMATPHVAGAAALVKQKNPSWSNVQIRNHLKNTATSLGDTWEYGSGLVNAEAATR

SEQ ID NO: 65122 - protein, 269 aa, Unidentified
AQSVPWGISRVQAPAAHNRGVTGSGVKVAVLDTGISAHPDLNIRGGASFVTGEPTYQDGNGHGTHVAGTIAALNNSIGVLGVAPNAELYAVKVLAANGRGPVSSIAQGLEWAGNNGMDVANLSLGSPSKSATLEQAVNSATSRGVLVVAATGNSGTGSLDYPARYANAMAVGATDQNNNRASFSQYGAGLDIVAPGVNVQSTYPGSTYASFNGTSMATPHVVGVAALVKQKNPSWSNVQIRNHLKNTATSLGSTNLYGSGLVNAEAATR

SEQ ID NO: 65123 - protein, 269 aa, Bacillus circulans
AQSVPWGISRVQAPAAHNRGLTGSGEKVAVLDTGISTHPDLNIRGGASFVPGAPSTQDGNGHGTHVAGTIAALNNSIGVLGVAPSAELYAVNVLGADGRGAISSIAHGLEWTGNNNMHVANLSLGSPSPSATLEQAVNSATSRGVLVVAASGNSGASSISYPARYANAMAVGATDQNNNRASFSQYGAGLDIVAPGVGVQSSYPGSTYASLNGTSMATPHVAGVAALVKHKNPSWSNTQIRNHLENTATSLGSTNLYVSGLVKAEAATR

SEQ ID NO: 65124 - protein, 269 aa, Unidentified
AQSVPWGISRVQAPAAHNRGVTGSGVRVAVLDTGISAHPDLNIRGGASFVTGEPTYQDGNGHGTHVAGTIAALNNSIGVLGVAPNAELYAVKVLAANGRGPVSSIAQGLEWAGNNGMDVANLSLGSPSPSATLEQAVNSATSRGVLVVAATGNSGTGSLDYPARYANAMAVGATDQNNNRASFSQYGAGLDIVAPGVNVQSTYPGSTYASFNGTSMATPHVVGVAALVKQKNPSWSNVQIRNHLKNTATSLGSTNLYGSGLVNAEAATR

SEQ ID NO: 65125 - protein, 230 aa, Unidentified
AQSVPWGISRVQAPAAHNRGLTGSGVKVAVLDTGISTHPDLNIRGGASFVPGEPSTQDGNGHGTHVAGTIAALNNSIGVLGVAPSAELYAVKVLGASGSGSVSSIAQGLEWAGNNGMHVANLSLGSPSPSATLEQAVNSATSRGVLVVAASGNSGAGSISYPARYANAMAVGATDQNNNRASFSQYGAGLDIVAPGVNVQSTYPGCVLHDTEIYVNGMVMEAEQIWQAYA

SEQ ID NO: 65126 - protein, 305 aa, Unidentified
PIVAVEPAGKARTFDLRVPPFANFVSEDLVVHNTTMAQSVPWGISRVQAPAAHNRGLTGSGVKVAVLDTGISTHPDLNIRGGASFVPGEPSTQDGNGHGTHVAGTIAALNNSIGVLGVAPSAELYAVKVLGASGSGSVSSIAQGLEWAGNNGMHVANLSLGSPSPSATLEQAVNSATSRGVLVVAASGNSGAGSISYPARYANAMAVGATDQNNNRASFSQYGAGLDIVAPGVNVQSTYPGSTYASLNGTSMATPHVAGAAALVKQKNPSWSNVQIRNHLKNTATSLGSTNLYGSGLVNAEAATR

SEQ ID NO: 65127 - protein, 274 aa, unidentified
AQTVPXGIPLIKADKVQAQGXKGANVKVAVLDTGIQASHPDLNVVGGASXVAGEAXNTDGNGHGTHVAGTVAALDNTTGVLGVAPSVSLXAVKVLNSSGSGTXSGIVSGIEXATTNGMDVINMSLGGPSGSTAMKQAVDNAXARGVVVVAAAGNSGSSGNTNTIGXPAKXDSVIAVGAVDSNSNRASXSSVGAELEVMAPGAGVXSTXPTSTXATLNGTSMASPHVAGAAALILSKHPNLSASQVRNRLSSTATXLGSSXXXGKGLINVEAAAQ

SEQ ID NO: 65128 - protein, 275 aa, Bacillus licheniformis
AGTVPYSIPLIKADKVQAQGFKGANVKVAVLDTGIDASNPDLNVVGGASFVAGEAYNTQDGNGNGTNVAGTVAALDNTTGVLGVAPSVSLYAVEVLNSSGSGSYSGIVSGIENATTNGRDVINRSLGGASGSTARKQAVDNAYARGVVVVAAAGNSGNSGSTNTIGYPAKYDSVIAVGAVDSNSNRASFSSVGAELEVRAPGASVYSTYPTNTYATLNGTSRASPNVAGAAALILSKNPNLSAGQVRKRLSSTATTLGSSFYYGKGLINVEAAAQ

SEQ ID NO: 65129 - protein, 331 aa, Unidentified
AEEAKEKYLIGFNEQEAVSEFVEQVEANDEVAILSEEEEVEIELLHEFETIPVLSVELSPEDVDALELDPAISYIEEDAEVTTMAQSVPWGISRVQAPAAHNRGLTGSGVKVAVLDTGISTHPDLNIRGGASFVPGEPSTQDGNGHGTHVAGTIAALNNSIGVLGVAPSAELYAVKVLGASGSGSVSSIAQGLEWAGNNGMHVANLSLGSPSPSATLEQAVNSATSRGVLVVAASGNSGAGSISYPARYANAMAVGATDQNNNRASFSQYGAGLDIVAPGVNVQSTYPGCLSADHEVLTSTGWKALPAIKDADQVMTLDLQTGTQQWNSVQ

SEQ ID NO: 65130 - protein, 246 aa, Unidentified
VAVEPAGKARTFDLRVPPFANFVSEDLVVHNSTQDGNGHGTHVAGTIAALNNSIGVLGVAPSAELYAVKVLGASGSGSVSSIAQGLEWAGNNGMHVANLSLGSPSPSATLEQAVNSATSRGVLVVAASGNSGAGSISYPARYANAMAVGATDQNNNRASFSQYGAGLDIVAPGVNVQSTYPGSTYASLNGTSMATPHVAGAAALVKQKNPSWSNVQIRNHLKNTATSLGSTNLYGSGLVNAEAATR

SEQ ID NO: 65131 - protein, 290 aa, Unidentified
AEEAKEKYLIGFNEQEAVSEFVEQVEANDEVAILSEEEEVEIELLHEFETIPVLSVELSPEDVDALELDPAISYIEEDAEVTTMAQSVPWGISRVQAPAAHNRGLTGSGVKVAVLDTGISTHPDLNIRGGASFVPGEPSTQDGNGHGTHVAGTIAALNNSIGVLGVAPSAELYAVKVLGASGSGSVSSIAQGLEWAGNNGMHVANLSLGSPSPSATLEQAVNSATSRGVLVVAASGNSGAGSISYPARYANAMAVGACLAEGSLVLDAATGQRVPIEKVRPGMEVFSLGP

SEQ ID NO: 65132 - protein, 225 aa, Unidentified
AQSVPWGISRVQAPAAHNRGLTGSGVKVAVLDTGISTHPDLNIRGGASFVPGEPSTQDGNGHGTHVAGTIAALNNSIGVLGVAPSAELYAVKVLGASGSGSVSSIAQGLEWAGNNGMHVANLSLGSPSPSATLEQAVNSATSRGVLVVAASGNSGAGSISYPARYANAMAVGATDQNNNRASFSQYGAGLDIVAPGVNVQSTYPGCISGDSLISLASTGKRVSIK

SEQ ID NO: 65133 - protein, 176 aa, Bacillus licheniformis
AQSVPWGISRVQAPAAHNRGLTGSGVKVAVLDTGISTHPDLNIRGGASFVPGEPSTQDGNGHGTHVAGTIAALNNSIGVLGVAPSAELYAVKVLGASGSGSVSSIAQGLEWAGNNGMHVANLSLGSPSPSATLEQAVNSATSRGVLVVAASGNSGAGCLSLDTMVVTNGKAIEIRD

SEQ ID NO: 65134 - protein, 269 aa, Synthetic construct
AQSVPWGISRVQAPAAHNRGLTGSGVKVAVLDTGISTHPDLNIRGGASFVPGEPSTQDGNGHGTHVAGTIAALNNSIGVLGVAPSAELYAVKVLGASGSGSVSSIAQGLEWAGNNGMHVANLSLGSPSPSATLEQAVNSATSRGVLVVAASGNSGAGSISYPARYANAMAVGATDQNNNRASFSQYGAGLDIXXXXXNXXXXXXXXXXXXXEXXSMATPHVAGAAALVKQKNPSWSNVQIRNHLKNTATSLGSTNLYGSGLVNAEAATR

SEQ ID NO: 65135 - protein, 245 aa, Unidentified
VAVEPAGKARTFDLRVPPFANFVSEDLVVHNTQDGNGHGTHVAGTIAALNNSIGVLGVAPSAELYAVKVLGASGSGSVSSIAQGLEWAGNNGMHVANLSLGSPSPSATLEQAVNSATSRGVLVVAASGNSGAGSISYPARYANAMAVGATDQNNNRASFSQYGAGLDIVAPGVNVQSTYPGSTYASLNGTSMATPHVAGAAALVKQKNPSWSNVQIRNHLKNTATSLGSTNLYGSGLVNAEAATR

SEQ ID NO: 65136 - protein, 274 aa, unidentified
AQTVPXGIPLIKADKVQAQGXKGANVKVAVLDTGIQASHPDLNVVGGASXVAGEAXNTDGNGHGTHVAGTVAALDNTTGVLGVAPSVSLXAVKVLNSSGSGXXSGIVSGIEXATTNGMDVINMSLGGXSGSTAMKQAVDNAXARGVVVVAAAGNSGXSGXTNTIGXPAKXDSVIAVGAVDSNSNRASXSSVGAELEVMAPGAGVXSTXPTXTXATLNGTSMASPHVAGAAALILSKHPNLSASQVRNRLSSTATXLGSSXXXGKGLINVEAAAQ

SEQ ID NO: 65137 - protein, 279 aa, Unidentified
EVESIVESPPATVYDITVADNHEYVTDGIISHNSGVKVAVLDTGISTHPDLNIRGGASFVPGEPSTQDGNGHGTHVAGTIAALNNSIGVLGVAPSAELYAVKVLGASGSGSVSSIAQGLEWAGNNGMHVANLSLGSPSPSATLEQAVNSATSRGVLVVAASGNSGAGSISYPARYANAMAVGATDQNNNRASFSQYGAGLDIVAPGVNVQSTYPGSTYASLNGTSMATPHVAGAAALVKQKNPSWSNVQIRNHLKNTATSLGSTNLYGSGLVNAEAATR

SEQ ID NO: 65138 - protein, 335 aa, Unidentified
AEEAKEKYLIGFNEQEAVSEFVEQVEANDEVAILSEEEEVEIELLHEFETIPVLSVELSPEDVDALELDPAISYIEEDAEVTTMAQSVPWGISRVQAPAAHNRGLTGSGVKVAVLDTGISTHPDLNIRGGASFVPGEPSTQDGNGHGTHVAGTIAALNNSIGVLGVAPSAELYAVKVLGASGSGSVSSIAQGLEWAGNNGMHVANLSLGSPSPSATLEQAVNSATSRGVLVVAASGNSGAGSISYPARYANAMAVGATDQNNNRASFSQYGAGLDIVAPGVNVQSTYPGCVTGETLLLTENGYEKAADLYKKQNNLKVVIDNRTKDFAVDSKGTT

SEQ ID NO: 65139 - protein, 286 aa, Unidentified
LELPVAFLSVESIEDGEADVVDLSVPETHEFVANGVVCHNSGVKVAVLDTGISTHPDLNIRGGASFVPGEPSTQDGNGHGTHVAGTIAALNNSIGVLGVAPSAELYAVKVLGASGSGSVSSIAQGLEWAGNNGMHVANLSLGSPSPSATLEQAVNSATSRGVLVVAASGNSGAGSISYPARYANAMAVGATDQNNNRASFSQYGAGLDIVAPGVNVQSTYPGSTYASLNGTSMATPHVAGAAALVKQKNPSWSNVQIRNHLKNTATSLGSTNLYGSGLVNAEAATR

SEQ ID NO: 65140 - protein, 335 aa, Unidentified
AEEAKEKYLIGFNEQEAVSEFVEQVEANDEVAILSEEEEVEIELLHEFETIPVLSVELSPEDVDALELDPAISYIEEDAEVTTMAQSVPWGISRVQAPAAHNRGLTGSGVKVAVLDTGISTHPDLNIRGGASFVPGEPSTQDGNGHGTHVAGTIAALNNSIGVLGVAPSAELYAVKVLGASGSGSVSSIAQGLEWAGNNGMHVANLSLGSPSPSATLEQAVNSATSRGVLVVAASGNSGAGSISYPARYANAMAVGATDQNNNRASFSQYGAGLDIVAPGVNVQSTYPGCLTAGTRVLRADTGAETTMGELFALQARDVPVWSLDESLRYVRRHL

SEQ ID NO: 65141 - protein, 269 aa, Synthetic construct
AQSVPWGISRVQAPAAHNRGLTGSGVKVAVLDTGISTHPDLNIRGGASFVPGEPSTQDGNGHGTHVAGTIAALNNSIGVLGVAPSAELYAVKVLGASGSGSVSSIAQGLEWAGNNGMHVANLSLGSPSPSATLEQAVNSATSRGVLVVAASGNSGAGSISYPARYANAMAVGATDQNNNRASFSQYGAGLDIXXXXXXXXXXXXXXXXXXXXXXSMATPHVAGAAALVKQKNPSWSNVQIRNHLKNTATSLGSTNLYGSGLVNAEAATR

SEQ ID NO: 65142 - protein, 229 aa, Unidentified
AQSVPWGISRVQAPAAHNRGLTGSGVKVAVLDTGISTHPDLNIRGGASFVPGEPSTQDGNGHGTHVAGTIAALNNSIGVLGVAPSAELYAVKVLGASGSGSVSSIAQGLEWAGNNGMHVANLSLGSPSPSATLEQAVNSATSRGVLVVAASGNSGAGSISYPARYANAMAVGATDQNNNRASFSQYGAGLDIVAPGVNVQSTYPGCLPARARVVDWCTGRVVRVGEIVR

SEQ ID NO: 65143 - protein, 297 aa, Unidentified
ELKEDDYYGITLSDDSDHQFLLANQVVVHNSVPWGISRVQAPAAHNRGLTGSGVKVAVLDTGISTHPDLNIRGGASFVPGEPSTQDGNGHGTHVAGTIAALNNSIGVLGVAPSAELYAVKVLGASGSGSVSSIAQGLEWAGNNGMHVANLSLGSPSPSATLEQAVNSATSRGVLVVAASGNSGAGSISYPARYANAMAVGATDQNNNRASFSQYGAGLDIVAPGVNVQSTYPGSTYASLNGTSMATPHVAGAAALVKQKNPSWSNVQIRNHLKNTATSLGSTNLYGSGLVNAEAATR

SEQ ID NO: 65144 - protein, 278 aa, Unidentified
DISLESEATEWAGFRVDKDQLYLRHDYVVLHNSGVKVAVLDTGISTHPDLNIRGGASFVPGEPSTQDGNGHGTHVAGTIAALNNSIGVLGVAPSAELYAVKVLGASGSGSVSSIAQGLEWAGNNGMHVANLSLGSPSPSATLEQAVNSATSRGVLVVAASGNSGAGSISYPARYANAMAVGATDQNNNRASFSQYGAGLDIVAPGVNVQSTYPGSTYASLNGTSMATPHVAGAAALVKQKNPSWSNVQIRNHLKNTATSLGSTNLYGSGLVNAEAATR

SEQ ID NO: 65145 - protein, 318 aa, Saccharomyces cerevisiae
AEEAKEKYLIGFNEQEAVSEFVEQVEANDEVAILSEEEEVEIELLHEFETIPVLSVELSPEDVDALELDPAISYIEEDAEVTTMAQSVPWGISRVQAPAAHNRGLTGSGVKVAVLDTGISTHPDLNIRGGASFVPGEPSTQDGNGHGTHVAGTIAALNNSIGVLGVAPSAELYAVKVLGASGSGSVSSIAQGLEWAGNNGMHVANLSLGSPSPSATLEQAVNSATSRGVLVVAASGNSGAGSISYPARYANAMAVGATDQNNNRASFSQYGAGLDIVAPGVNVQAFAKGTNVLMADGSIECIENIEVGNKVMGKDGRP

SEQ ID NO: 65146 - protein, 330 aa, Unidentified
AEEAKEKYLIGFNEQEAVSEFVEQVEANDEVAILSEEEEVEIELLHEFETIPVLSVELSPEDVDALELDPAISYIEEDAEVTTMAQSVPWGISRVQAPAAHNRGLTGSGVKVAVLDTGISTHPDLNIRGGASFVPGEPSTQDGNGHGTHVAGTIAALNNSIGVLGVAPSAELYAVKVLGASGSGSVSSIAQGLEWAGNNGMHVANLSLGSPSPSATLEQAVNSATSRGVLVVAASGNSGAGSISYPARYANAMAVGATDQNNNRASFSQYGAGLDIVAPGVNVQSTYPGCLTADTYVWTDRGLETVAEVFGRAGLPLSSTSRVTDVRDRD

SEQ ID NO: 65147 - protein, 286 aa, Unidentified
SVSWDEVAEILEYEPKDPWVYDLQVPGYHNFLANGIFVHNSGVKVAVLDTGISTHPDLNIRGGASFVPGEPSTQDGNGHGTHVAGTIAALNNSIGVLGVAPSAELYAVKVLGASGSGSVSSIAQGLEWAGNNGMHVANLSLGSPSPSATLEQAVNSATSRGVLVVAASGNSGAGSISYPARYANAMAVGATDQNNNRASFSQYGAGLDIVAPGVNVQSTYPGSTYASLNGTSMATPHVAGAAALVKQKNPSWSNVQIRNHLKNTATSLGSTNLYGSGLVNAEAATR

SEQ ID NO: 65148 - protein, 269 aa, unidentified
AQSVPWGISRVQAPAAHNRGLTGSGVKVAVLDTGISTHPDLNIRGGASFVPGEPSTQDGNGHGTHVAGTVAALNNSIGVIGVAPSADLYAVKVLGANGRGSVSGIAQGLEWAAANNMHIANMSLGSDAPSTTLERAVNYATSQGVLVIAATGNNGSGSVGYPARYANAMAVGATDQNNNRASFSQYGAGLDIVAPGVNVQSTYPGSTYASLNGTSMATPHVAGAAALVKQKNPSWSNVQIRNHLKNTATSLGSTNLYGSGLVNAEAATR

SEQ ID NO: 65149 - protein, 280 aa, Thermus thermophilus
DPIVAVEPAGKARTFDLRVPPFANFVSEDLVVHNSGVKVAVLDTGISTHPDLNIRGGASFVPGEPSTQDGNGHGTHVAGTIAALNNSIGVLGVAPSAELYAVKVLGASGSGSVSSIAQGLEWAGNNGMHVANLSLGSPSPSATLEQAVNSATSRGVLVVAASGNSGAGSISYPARYANAMAVGATDQNNNRASFSQYGAGLDIVAPGVNVQSTYPGSTYASLNGTSMATPHVAGAAALVKQKNPSWSNVQIRNHLKNTATSLGSTNLYGSGLVNAEAATR

SEQ ID NO: 65150 - protein, 233 aa, Unidentified
AQSVPWGISRVQAPAAHNRGLTGSGVKVAVLDTGISTHPDLNIRGGASFVPGEPSTQDGNGHGTHVAGTIAALNNSIGVLGVAPSAELYAVKVLGASGSGSVSSIAQGLEWAGNNGMHVANLSLGSPSPSATLEQAVNSATSRGVLVVAASGNSGAGSISYPARYANAMAVGATDQNNNRASFSQYGAGLDIVAPGVNVQSTYPGCVTADTWVMTTAGPAQVSELTGRSFSAV

SEQ ID NO: 65151 - protein, 278 aa, Unidentified
VASVEPGGEILTLDLSVEGNHTYLANGLVSHNSGVKVAVLDTGISTHPDLNIRGGASFVPGEPSTQDGNGHGTHVAGTIAALNNSIGVLGVAPSAELYAVKVLGASGSGSVSSIAQGLEWAGNNGMHVANLSLGSPSPSATLEQAVNSATSRGVLVVAASGNSGAGSISYPARYANAMAVGATDQNNNRASFSQYGAGLDIVAPGVNVQSTYPGSTYASLNGTSMATPHVAGAAALVKQKNPSWSNVQIRNHLKNTATSLGSTNLYGSGLVNAEAATR

SEQ ID NO: 65152 - protein, 277 aa, Unidentified
VRYIPEPQEVYDVTTETHNFVGGNMPTLLHNSGVKVAVLDTGISTHPDLNIRGGASFVPGEPSTQDGNGHGTHVAGTIAALNNSIGVLGVAPSAELYAVKVLGASGSGSVSSIAQGLEWAGNNGMHVANLSLGSPSPSATLEQAVNSATSRGVLVVAASGNSGAGSISYPARYANAMAVGATDQNNNRASFSQYGAGLDIVAPGVNVQSTYPGSTYASLNGTSMATPHVAGAAALVKQKNPSWSNVQIRNHLKNTATSLGSTNLYGSGLVNAEAATR

SEQ ID NO: 65153 - protein, 231 aa, Unidentified
AQSVPWGISRVQAPAAHNRGLTGSGVKVAVLDTGISTHPDLNIRGGASFVPGEPSTQDGNGHGTHVAGTIAALNNSIGVLGVAPSAELYAVKVLGASGSGSVSSIAQGLEWAGNNGMHVANLSLGSPSPSATLEQAVNSATSRGVLVVAASGNSGAGSISYPARYANAMAVGATDQNNNRASFSQYGAGLDIVAPGVNVQSTYPGCVVAGTEVTDAETGAVVTVGELFESR

SEQ ID NO: 65154 - protein, 230 aa, Unidentified
AQSVPWGISRVQAPAAHNRGLTGSGVKVAVLDTGISTHPDLNIRGGASFVPGEPSTQDGNGHGTHVAGTIAALNNSIGVLGVAPSAELYAVKVLGASGSGSVSSIAQGLEWAGNNGMHVANLSLGSPSPSATLEQAVNSATSRGVLVVAASGNSGAGSISYPARYANAMAVGATDQNNNRASFSQYGAGLDIVAPGVNVQSTYPGCLSGSTKVIDAATGNLFSLKEIAAQ

SEQ ID NO: 65155 - protein, 173 aa, Bacillus sp.
STQDGNGHGTHVAGTIAALNNSVGVLGVAPSVELYAVKVLGASGRGSISGIARGLEWAGNNGMHVANMSLGSPFPSATLERAVNQATSRGVLVIAASGNSGAGSVSYPARYANAMAVGATDQNNNRASFSQYGAGLDIVAPGVGVQSTYPGSTYASLSGTSMASPHVAGAAAL

SEQ ID NO: 65156 - protein, 173 aa, Bacillus sp.
STQDGNGHGTHVAGTIAALNNSIGVLGVAPSADLYGVKVLGASGRGSISSIARGLQWAADNGMHVANLSLGSDFPSATLERAVNSATSRGVLVVAASGNSGAGSISYPARYANAMAVGATDQNNNRASFSHYGAGLDIVAPGVGVQSTYPGNTYASLNGTSMATPHVAGVAAL

SEQ ID NO: 65157 - protein, 173 aa, Bacillus sp.
STQDGNGHGTHVAGTIAALNNSIGVIGVAPSVDLYGVKVLGASGSGSVSSIARGLEWAGDNGMHVANLSLGSPSPSATLEQAVNSATSRGVLVIAATGNTGAGTLSYPARYANAMAVGATDQNNNRASFSQYGTGLDIVAPGVGVQSTYPGSTYVSLNGTSMATPHVASAAAL

SEQ ID NO: 65158 - protein, 278 aa, Unidentified
ITAVEDAGQQPTFDLMVPRTHSFLANGILSHNSGVKVAVLDTGISTHPDLNIRGGASFVPGEPSTQDGNGHGTHVAGTIAALNNSIGVLGVAPSAELYAVKVLGASGSGSVSSIAQGLEWAGNNGMHVANLSLGSPSPSATLEQAVNSATSRGVLVVAASGNSGAGSISYPARYANAMAVGATDQNNNRASFSQYGAGLDIVAPGVNVQSTYPGSTYASLNGTSMATPHVAGAAALVKQKNPSWSNVQIRNHLKNTATSLGSTNLYGSGLVNAEAATR

SEQ ID NO: 65159 - protein, 333 aa, Unidentified
AEEAKEKYLIGFNEQEAVSEFVEQVEANDEVAILSEEEEVEIELLHEFETIPVLSVELSPEDVDALELDPAISYIEEDAEVTTMAQSVPWGISRVQAPAAHNRGLTGSGVKVAVLDTGISTHPDLNIRGGASFVPGEPSTQDGNGHGTHVAGTIAALNNSIGVLGVAPSAELYAVKVLGASGSGSVSSIAQGLEWAGNNGMHVANLSLGSPSPSATLEQAVNSATSRGVLVVAASGNSGAGSISYPARYANAMAVGATDQNNNRASFSQYGAGLDIVAPGVNVQSTYPGCVAPETKILTDRGQIAIADVAGEKVNIWNGSEWSEVLVKKTGEN

SEQ ID NO: 65160 - protein, 331 aa, Unidentified
AEEAKEKYLIGFNEQEAVSEFVEQVEANDEVAILSEEEEVEIELLHEFETIPVLSVELSPEDVDALELDPAISYIEEDAEVTTMAQSVPWGISRVQAPAAHNRGLTGSGVKVAVLDTGISTHPDLNIRGGASFVPGEPSTQDGNGHGTHVAGTIAALNNSIGVLGVAPSAELYAVKVLGASGSGSVSSIAQGLEWAGNNGMHVANLSLGSPSPSATLEQAVNSATSRGVLVVAASGNSGAGSISYPARYANAMAVGATDQNNNRASFSQYGAGLDIVAPGVNVQSTYPGCVDGDTTVLLDGKLIKIKDLEDKWKDVKVLTSDDLNPKLTSL

SEQ ID NO: 65161 - protein, 286 aa, Unidentified
DAGRLDVDKQFIETWEDVEVTYNLTTEKGNLLANGLFVKNSGVKVAVLDTGISTHPDLNIRGGASFVPGEPSTQDGNGHGTHVAGTIAALNNSIGVLGVAPSAELYAVKVLGASGSGSVSSIAQGLEWAGNNGMHVANLSLGSPSPSATLEQAVNSATSRGVLVVAASGNSGAGSISYPARYANAMAVGATDQNNNRASFSQYGAGLDIVAPGVNVQSTYPGSTYASLNGTSMATPHVAGAAALVKQKNPSWSNVQIRNHLKNTATSLGSTNLYGSGLVNAEAATR

SEQ ID NO: 65162 - protein, 212 aa, Unidentified
AQSVPWGISRVQAPAAHNRGLTGSGVKVAVLDTGISTHPDLNIRGGASFVPGEPSTQDGNGHGTHVAGTIAALNNSIGVLGVAPSAELYAVKVLGASGSGSVSSIAQGLEWAGNNGMHVANLSLGSPSPSATLEQAVNSATSRGVLVVAASGNSGAGSISYPARYANAMAVGATDQNNNRACLAEGSLVLDAATGQRVPIEKVRPGMEVFSL

SEQ ID NO: 65163 - protein, 269 aa, Unidentified
AQXXPWGISRVQAPAAHNRGLTGSGVXVAVLDTGISTHPDLNIRGGASFVPGEPXTQDGNGHGTHVAGTIAALXNSIGVLGVAPXAELYAVKVLGAXGXGXXSSIAQGLEWAGNNGMHVAXLSLGSPSPSATLEQAVNSATSRGVLVVAASGNSGAXSISYPAXYANAMAVGATXQNNNRASFSQYGXGLDIXAPGVNXQSTYPGSTYASXNGTSMATPHVAGAAXLVKXKNPSWSNVXIXXHLKXTATSLGSTNLYGSGLVNAEAAXR

SEQ ID NO: 65164 - protein, 262 aa, Bacillus licheniformis
VKVIGRRSLGVQRIFDIGLPQDHNFLLANGAIAANCSFVAGEAYNTDGNGHGTHVAGTVAALDNTTGVLGVAPSVSLYAVKVLNSSGSGSYSGIVSGIEWATTNGMDVINMSLGGASGSTAMKQAVDNAYARGVVVVAAAGNSGSSGNTNTIGYPAKYDSVIAVGAVDSNSNRASFSSVGAELEVMAPGAGVYSTYPTNTYATLNGTSMVSPHVAGAAALILSKHPNLSASQVRNRLSSTATYLGSSFYYGKGLINVEAAAQ

SEQ ID NO: 65165 - protein, 277 aa, Unidentified
IEYVDADIDYTYCLTVSETHSLIVNDLSQKQSGVKVAVLDTGISTHPDLNIRGGASFVPGEPSTQDGNGHGTHVAGTIAALNNSIGVLGVAPSAELYAVKVLGASGSGSVSSIAQGLEWAGNNGMHVANLSLGSPSPSATLEQAVNSATSRGVLVVAASGNSGAGSISYPARYANAMAVGATDQNNNRASFSQYGAGLDIVAPGVNVQSTYPGSTYASLNGTSMATPHVAGAAALVKQKNPSWSNVQIRNHLKNTATSLGSTNLYGSGLVNAEAATR

SEQ ID NO: 65166 - protein, 173 aa, Bacillus sp.
STQDGNGHGTHVAGTIAALNNSVGVLGVAPNAELYAVKVLGASGSGSVSGIARGLEWAGDNGMHVANLSLGSPFPSATLEQAVNAATSRGVLVVAASGNSGSGTVGYPARYANAMAVGATDQNNNRASFSEYGAGLDIVAPGVGVQSTYPGSRYASLSGTSMASPHVAGAAAL

SEQ ID NO: 65167 - protein, 173 aa, Bacillus sp.
STQDGNGHGTHVAGTVAALNNNVGVLGVAPNAELYAVKVLGANGSGSVSGIAQGLEWAGANGMHVANMSLGSPSPSATLERAVNAATSRGVLVVAATGNSGAGSVSYPARYANAMAVGATDQNNNRASFSQYGAGLDIVAPGVGVQSTYPGNTYVSLNGTSMATPHVAGVAAL

SEQ ID NO: 65168 - protein, 173 aa, Bacillus sp.
STQDGNGHGTHVAGTVAALNNSIGVLGVAPSADLYAVKVLGASGRGTVSSIAQGLEWAANNGTHVANLSLGTPSPSTTLERAVNYATSRGVLVVAASGNSGAGSVSYPARYANAMAVGATDQNNRRASFSQYGAGLDIVAPAVNVQSTYPGSTYASMSGTSMASPHVAGAAAL

SEQ ID NO: 65169 - protein, 376 aa, Unidentified
LGKIVASTALLISVAFSSSIASAAEEAKEKYLIGFNEQEAVSEFVEQVDANNDVAVLSEEEEVEIELLHEFETIPVLSVELSPEDVDTLELDPAISYIEEDVEVSIMAQSVPWGISRVQAPAAHNRGVTGSGVKVAVLDTGISAHPDLNIRGGASFVTGEPTYQDGNGHGTHVAGTIAALNNSIGVLGVAPNAELYAVKVLAANGRGPVSSIAQGLEWAGNNGMDVANLSLGSPSPSATLEQAVNSATSRGVLVVAATGNSGTGSLDYPARYANAMAVGATDQNNNRASFSQYGAGLDIVAPGVNVQSTYPGSTYASFNGTSMATPHVVGVAALVKQKNPSWSNVQIRNHLKNTATSLGSTNLYGSGLVNAEAATR

SEQ ID NO: 65170 - protein, 286 aa, Unidentified
YFDKIKEIVPLDRDDEYVYDVVEVKLGHNFVGGQGVLLHNSGVKVAVLDTGISTHPDLNIRGGASFVPGEPSTQDGNGHGTHVAGTIAALNNSIGVLGVAPSAELYAVKVLGASGSGSVSSIAQGLEWAGNNGMHVANLSLGSPSPSATLEQAVNSATSRGVLVVAASGNSGAGSISYPARYANAMAVGATDQNNNRASFSQYGAGLDIVAPGVNVQSTYPGSTYASLNGTSMATPHVAGAAALVKQKNPSWSNVQIRNHLKNTATSLGSTNLYGSGLVNAEAATR

SEQ ID NO: 65171 - protein, 269 aa, Unidentified
AQXXPWGISRVQAPAAHNRGLTGSGVXVAVLDTGISTHPDLNIRGGASFVPGEPXTQDGNGHGTHVAGTIAALXNSIGVLGVAPXAELYAVKVLGAXGXGXXSSIAQGLEWAGNNGMHVAXLSLGSPSPSATLEQAVNSATSRGVLVVAASGNSGAXSISYPAXYANAMAVGATXQNNNRASFSQYGXGLDIXAPGVNXQSTYPGSTYASXNGTSMATPHVAGAAXLVKXKNPSWSNVXIXXHLKXHATSLGSTNLYGSGLVNAEAAXR

SEQ ID NO: 65172 - protein, 269 aa, Unidentified
AQXXPWGISRVQAPAAHNRGLTGSGVXVAVLDTGISTHPDLNIRGGASFVPGEPXTQDGNGHGTHVAGTIAALXNSIGVLGVAPXAELYAVKVLGAXGXGXXSSIAQGLEWAGNNGMHVAXLSLGSPSPSATLEQAVNSATSRGVLVVAASGNSGAXSISYPAXYANAMAVGATXQNNNRASFSQYGXGLDIXAPGVNXQSTYPGSTYASXNGTSMATPHVAGAAXLVKXKNPSWSNVXIXXHLKXEATSLGSTNLYGSGLVNAEAAXR

SEQ ID NO: 65173 - protein, 269 aa, Unidentified
AQXXPWGISRVQAPAAHNRGLTGSGVXVAVLDTGISTHPDLNIRGGASFVPGEPXTQDGNGHGTHVAGTIAALXNSIGVLGVAPXAELYAVKVLGAXGXGXXSSIAQGLEWAGNNGMHVAXLSLGSPSPSATLEQAVNSATSRGVLVVAASGNSGAXSISYPAXYANAMAVGATXQNNNRASFSQYGXGLDIXAPGVNXQSTYPGSTYASXNGTSMATPHVAGAAXLVKXKNPSWSNVXIXXHLKXKATSLGSTNLYGSGLVNAEAAXR

SEQ ID NO: 65174 - protein, 269 aa, Unidentified
AQXXPWGISRVQAPAAHNRGLTGSGVXVAVLDTGISTHPDLNIRGGASFVPGEPXTQDGNGHGTHVAGTIAALXNSIGVLGVAPXAELYAVKVLGAXGXGXXSSIAQGLEWAGNNGMHVAXLSLGSPSPSATLEQAVNSATSRGVLVVAASGNSGAXSISYPAXYANAMLVGATXQNNNRASFSQYGXGLDIXAPGVNXQSTYPGSTYASXNGTSMATPHVAGAAXLVKXKNPSWSNVXIXXHLKXTATSLGSTNLYGSGLVNAEAAXR

SEQ ID NO: 65175 - protein, 269 aa, Unidentified
AQXXPWGISRVQAPAAHNRGLTGSGVXVAVLDTGISTHPDLNIRGGASFVPGEPXTQDGNGHGTHVAGTIAALXNSIGVLGVAPXAELYAVKVLGAXGXGXXSSIAQGLEWAGNNGMHVAXLSLGSPSPSATLEQAVNSATSRGVLVVAASGNSGAXSISYPAXYANAMAVGATXQNNNRNSFSQYGXGLDIXAPGVNXQSTYPGSTYASXNGTSMATPHVAGAAXLVKXKNPSWSNVXIXXHLKXTATSLGSTNLYGSGLVNAEAAXR

SEQ ID NO: 65176 - protein, 269 aa, Unidentified
AQXXPWGISRVQAPAAHNRGLTGSGVXVAVLDTGISTHPDLNIRGGASFVPGEPXTQDGNGHGTHVAGTIAALXNSIGVLGVAPXAELYAVKVLGAXGXGXXSSIAQGLEWAGNNGMHVAXLSLGSPSPSATLEQAVNSATSRGVLVVAASGNSGAXSISYPAXYANAMAVGATXQNNNRASFSQYGXGLDIXAPGVNXQSTYPGSTYASXNGTSMATPHVAGAAXLVKXKNPSWSNVXIXXHLKXQATSLGSTNLYGSGLVNAEAAXR

SEQ ID NO: 65177 - protein, 289 aa, Thermus thermophilus
DVETGEVLWDPIVAVEPAGKARTFDLRVPPFANFVSEDLVVHNSGVKVAVLDTGISTHPDLNIRGGASFVPGEPSTQDGNGHGTHVAGTIAALNNSIGVLGVAPSAELYAVKVLGASGSGSVSSIAQGLEWAGNNGMHVANLSLGSPSPSATLEQAVNSATSRGVLVVAASGNSGAGSISYPARYANAMAVGATDQNNNRASFSQYGAGLDIVAPGVNVQSTYPGSTYASLNGTSMATPHVAGAAALVKQKNPSWSNVQIRNHLKNTATSLGSTNLYGSGLVNAEAATR

SEQ ID NO: 65178 - protein, 236 aa, Unidentified
AQSVPWGISRVQAPAAHNRGLTGSGVKVAVLDTGISTHPDLNIRGGASFVPGEPSTQDGNGHGTHVAGTIAALNNSIGVLGVAPSAELYAVKVLGASGSGSVSSIAQGLEWAGNNGMHVANLSLGSPSPSATLEQAVNSATSRGVLVVAASGNSGAGSISYPARYANAMAVGATDQNNNRASFSQYGAGLDIVAPGVNVQSTYPGCLAGDTLITLADGRRVPIRELVSQQNFSVWA

SEQ ID NO: 65179 - protein, 283 aa, Unidentified
IDKIKEIEEISYDSKLYDVGIVSKEHNFIANSIVVHNSGVKVAVLDTGISTHPDLNIRGGASFVPGEPSTQDGNGHGTHVAGTIAALNNSIGVLGVAPSAELYAVKVLGASGSGSVSSIAQGLEWAGNNGMHVANLSLGSPSPSATLEQAVNSATSRGVLVVAASGNSGAGSISYPARYANAMAVGATDQNNNRASFSQYGAGLDIVAPGVNVQSTYPGSTYASLNGTSMATPHVAGAAALVKQKNPSWSNVQIRNHLKNTATSLGSTNLYGSGLVNAEAATR

SEQ ID NO: 65180 - protein, 312 aa, Unidentified
LEALAEGQVLWDPIVAVEPAGKARTFDLRVPPFANFVSEDLVVHNSVPWGISRVQAPAAHNRGLTGSGVKVAVLDTGISTHPDLNIRGGASFVPGEPSTQDGNGHGTHVAGTIAALNNSIGVLGVAPSAELYAVKVLGASGSGSVSSIAQGLEWAGNNGMHVANLSLGSPSPSATLEQAVNSATSRGVLVVAASGNSGAGSISYPARYANAMAVGATDQNNNRASFSQYGAGLDIVAPGVNVQSTYPGSTYASLNGTSMATPHVAGAAALVKQKNPSWSNVQIRNHLKNTATSLGSTNLYGSGLVNAEAATR

SEQ ID NO: 65181 - protein, 173 aa, Bacillus sp.
STQDGNGHGTHVAGTIAALNNNIGVLGVAPSAELYAVKVLGASGRGSVSSIAQGLEWAGDNGMHVANLSLGSPFPSSTLERAVNAATSRGVLVIAASGNSGSGSISYPARYANAMAVGATDQNNNRANSSQYGAGLEIVAPGVGVQSTYPGSTYVSMSGTSMASPHVAGAAAL

SEQ ID NO: 65182 - protein, 173 aa, Bacillus sp.
STQDGNGHGTHVAGTVAALNNNIGVLGVAPSVELYGVKVLGASGSGSVSSIAQGLEWAADNGMHVANMSLGSPFPSSTLEQAVNSATSRGVLVVAASGNSGSGTVGYPARYANAMAVGATDQNNNRASFSQYGAGLDIVAPGVGVQSTYPGSRYASLSGTSMATPHVAGVAAL

SEQ ID NO: 65183 - protein, 269 aa, Unidentified
AQSVPWGISRVQAQSAHNRGITGSGVKVAVLDTGISTHEDLNVRGGASFVAGEPGYQDGNGHGTHVAGTIAALNNSIGVLGVAPNAELYAVKVLGASGSGSISGIAQGLQWAGNNGMHIANISLGTPAPSATLEQAVNAATSRGVLVIAASGNSGAGSVGYPARYANAMAVGATDQNNNRASFSQYGAGLDIVAPGVGVQSTYPGNRYASLNGTSMATPHVAGVAALVKQKNPSWSNVQVRNHLKNTATNLGNTNLYGSGLVNAEAATR

SEQ ID NO: 65184 - protein, 269 aa, Unidentified
AQXXPWGISRVQAPAAHNRGLTGSGVXVAVLDTGISTHPDLNIRGGASFVPGEPXTQDGNGHGTHVAGTIAALXNSIGVLGVAPXAELYAVKVLGAXGXGXXSSIAQGLEWAGNNGMHVAXLSLGSPSPSATLEQAVNSATSRGVLVVAASGNSGAXSISYPAXYANAMLVGATXQNNNRASFSQYGXGLDIXAPGVNXQSTYPGSTYASXNGTSMATPHVAGAAXLVKXKNPSWSNVXIXXHLKXKATSLGSTNLYGSGLVNAEAAXR

SEQ ID NO: 65185 - protein, 269 aa, Unidentified
AQXXPWGISRVQAPAAHNRGLTGSGVXVAVLDTGISTHPDLNIRGGASFVPGEPXTQDGNGHGTHVAGTIAALXNSIGVLGVAPXAELYAVKVLGAXGXGXXSSIAQGLEWAGNNGMHVAXLSLGSPSPSATLEQAVNSATSRGVLVVAASGNSGAXSISYPAXYANAMLVGATXQNNNRASFSQYGXGLDIXAPGVNXQSTYPGSTYASXNGTSMATPHVAGAAXLVKXKNPSWSNVXIXXHLKXEATSLGSTNLYGSGLVNAEAAXR

SEQ ID NO: 65186 - protein, 269 aa, Unidentified
AQXXPWGISRVQAPAAHNRGLTGSGVXVAVLDTGISTHPDLNIRGGASFVPGEPXTQDGNGHGTHVAGTIAALXNSIGVLGVAPXAELYAVKVLGAXGXGXXSSIAQGLEWAGNNGMHVAXLSLGSPSPSATLEQAVNSATSRGVLVVAASGNSGAXSISYPAXYANAMAVGATXQNNNRNSFSQYGXGLDIXAPGVNXQSTYPGSTYASXNGTSMATPHVAGAAXLVKXKNPSWSNVXIXXHLKXHATSLGSTNLYGSGLVNAEAAXR

SEQ ID NO: 65187 - protein, 269 aa, Unidentified
AQXXPWGISRVQAPAAHNRGLTGSGVXVAVLDTGISTHPDLNIRGGASFVPGEPXTPDGNGHGTHVAGTIAALXNSIGVLGVAPXAELYAVKVLGAXGXGXXSSIAQGLEWAGNNGMHVAXLSLGSPSPSATLEQAVNSATSRGVLVVAASGNSGAXSISYPAXYANAMFVGATXQNNNRASFSQYGXGLDIXAPGVNXQSTYPGSTYASXNGTSMATPHVAGAAXLVKXKNPSWSNVXIXXHLKXTATSLGSTNLYGSGLVNAEAAXR

SEQ ID NO: 65188 - protein, 269 aa, Unidentified
AQXXPWGISRVQAPAAHNRGLTGSGVXVAVLDTGISTHPDLNIRGGASFVPGEPXTQDGNGHGTHVAGTIAALXNSIGVLGVAPXAELYAVKVLGAXGXGXXSSIAQGLEWAGNNGMHVAXLSLGSPSPSATLEQAVNSATSRGVLVVAASGNSGAXSISYPAXYANAMLVGATXQNNNRASFSQYGXGLDIXAPGVNXQSTYPGSTYASXNGTSMATPHVAGAAXLVKXKNPSWSNVXIXXHLKXHATSLGSTNLYGSGLVNAEAAXR

SEQ ID NO: 65189 - protein, 269 aa, Unidentified
AQSVPWGISRVQAQSAHNRGITGSGVKVAVLDTGISTHEDLNVRGGASFVAGEPGYQDGNGHGTHVAGTIAALNNSIGVLGVAPNAELYAVKVLGASGSGSISGIAQGLQWAGNNGMHIANMSLGTPAPSATLEQAVNAATSRGVLVIAASGNSGAGSVQYPARYANAMAVGATDQNNNRASFSQYGAGLDIVAPGVGVQSTYPGNRYASLNGTSMATPHVAGVAALVKQKNPSWSNVQVRNHLKNTATNLGNTNLYGSGLVNAEAATR

SEQ ID NO: 65190 - protein, 269 aa, Unidentified
AQSVPWGISRVQAQSAHNRGITGSGVKVAVLDTGISTHEDLNVRGGASFVAGEPGYQDGNGHGTHVAGTIAALNNSIGVLGVAPNAELYAVKVLGASGSGSISGIAQGLQWAGNNGMHIANMSLGTPAPSATLEQAVNAATSRGVLVIAASGNSGAGSVGYPARYANAMAVGATDQNNNRASFSQYGAGLDIVAPGVGVQSTYPGNRYASLNGTSMATPHVAGVAALVKQKNPSWSNVQVRNHLKNTATNLGPTNLYGSGLVNAEAATR

SEQ ID NO: 65191 - protein, 269 aa, Unidentified
AQXXPWGISRVQAPAAHNRGLTGSGVXVAVLDTGISTHPDLNIRGGASFVPGEPXTQDGNGHGTHVAGTIAALXNSIGVLGVAPXAELYAVKVLGAXGXGXXSSIAQGLEWAGNNGMHVAXLSLGSPSPSATLEQAVNSATSRGVLVVAASGNSGAXSISYPAXYANAMAVGATXQNNNRNSFSQYGXGLDIXAPGVNXQSTYPGSTYASXNGTSMATPHVAGAAXLVKXKNPSWSNVXIXXHLKXKATSLGSTNLYGSGLVNAEAAXR

SEQ ID NO: 65192 - protein, 269 aa, Unidentified
AQXXPWGISRVQAPAAHNRGLTGSGVXVAVLDTGISTHPDLNIRGGASFVPGEPXTQDGNGHGTHVAGTIAALXNSIGVLGVAPXAELYAVKVLGAXGXGXXSSIAQGLEWAGNNGMHVAXLSLGSPSPSATLEQAVNSATSRGVLVVAASGNSGAXSISYPAXYANAMFVGATXQNNNRASFSQYGXGLDIXAPGVNXQSTYPGSTYASXNGTSMATPHVAGAAXLVKXKNPSWSNVXIXXHLKXEATSLGSTNLYGSGLVNAEAAXR

SEQ ID NO: 65193 - protein, 269 aa, Unidentified
AQXXPWGISRVQAPAAHNRGLTGSGVXVAVLDTGISTHPDLNIRGGASFVPGEPXTQDGNGHGTHVAGTIAALXNSIGVLGVAPXAELYAVKVLGAXGXGXXSSIAQGLEWAGNNGMHVAXLSLGSPSPSATLEQAVNSATSRGVLVVAASGNSGAXSISYPAXYANAMFVGATXQNNNRASFSQYGXGLDIXAPGVNXQSTYPGSTYASXNGTSMATPHVAGAAXLVKXKNPSWSNVXIXXHLKXQATSLGSTNLYGSGLVNAEAAXR

SEQ ID NO: 65194 - protein, 269 aa, Unidentified
AQXXPWGISRVQAPAAHNRGLTGSGVXVAVLDTGISTHPDLNIRGGASFVPGEPXTQDGNGHGTHVAGTIAALXNSIGVLGVAPXAELYAVKVLGAXGXGXXSSIAQGLEWAGNNGMHVAXLSLGSPSPSATLEQAVNSATSRGVLVVAASGNSGAXSISYPAXYANAMLVGATXQNNNRASFSQYGXGLDIXAPGVNXQSTYPGSTYASXNGTSMATPHVAGAAXLVKXKNPSWSNVXIXXHLKXQATSLGSTNLYGSGLVNAEAAXR

SEQ ID NO: 65195 - protein, 269 aa, Unidentified
AQXXPWGISRVQAPAAHNRGLTGSGVXVAVLDTGISTHPDLNIRGGASFVPGEPXTQDGNGHGTHVAGTIAALXNSIGVLGVAPXAELYAVKVLGAXGXGXXSSIAQGLEWAGNNGMHVAXLSLGSPSPSATLEQAVNSATSRGVLVVAASGNSGAXSISYPAXYANAMFVGATXQNNNRASFSQYGXGLDIXAPGVNXQSTYPGSTYASXNGTSMATPHVAGAAXLVKXKNPSWSNVXIXXHLKXKATSLGSTNLYGSGLVNAEAAXR

SEQ ID NO: 65196 - protein, 269 aa, Unidentified
AQXXPWGISRVQAPAAHNRGLTGSGVXVAVLDTGISTHPDLNIRGGASFVPGEPXTQDGNGHGTHVAGTIAALXNSIGVLGVAPXAELYAVKVLGAXGXGXXSSIAQGLEWAGNNGMHVAXLSLGSPSPSATLEQAVNSATSRGVLVVAASGNSGAXSISYPAXYANAMFVGATXQNNNRASFSQYGXGLDIXAPGVNXQSTYPGSTYASXNGTSMATPHVAGAAXLVKXKNPSWSNVXIXXHLKXHATSLGSTNLYGSGLVNAEAAXR

SEQ ID NO: 65197 - protein, 269 aa, Unidentified
AQXXPWGISRVQAPAAHNRGLTGSGVXVAVLDTGISTHPDLNIRGGASFVPGEPXTQDGNGHGTHVAGTIAALXNSIGVLGVAPXAELYAVKVLGAXGXGXXSSIAQGLEWAGNNGMHVAXLSLGSPSPSATLEQAVNSATSRGVLVVAASGNSGAXSISYPAXYANAMAVGATXQNNNRNSFSQYGXGLDIXAPGVNXQSTYPGSTYASXNGTSMATPHVAGAAXLVKXKNPSWSNVXIXXHLKXEATSLGSTNLYGSGLVNAEAAXR

SEQ ID NO: 65198 - protein, 269 aa, Unidentified
AQXXPWGISRVQAPAAHNRGLTGSGVXVAVLDTGISTHPDLNIRGGASFVPGEPXTQDGNGHGTHVAGTIAALXNSIGVLGVAPXAELYAVKVLGAXGXGXXSSIAQGLEWAGNNGMHVAXLSLGSPSPSATLEQAVNSATSRGVLVVAASGNSGAXSISYPAXYANAMAVGATXQNNNRNSFSQYGXGLDIXAPGVNXQSTYPGSTYASXNGTSMATPHVAGAAXLVKXKNPSWSNVXIXXHLKXQATSLGSTNLYGSGLVNAEAAXR

SEQ ID NO: 65199 - protein, 247 aa, Unidentified
AQSVPWGISRVQAPAAHNRGLTGSGVKVAVLDTGISTHPDLNIRGGASFVPGEPSTQDGNGHGTHVAGTIAALNNSIGVLGVAPSAELYAVKVLGASGSGSVSSIAQGLEWAGNNGMHVANLSLGSPSPSATLEQAVNSATSRGVLVVAASGNSGAGSISYPARYANAMAVGATDQNNNRASFSQYGAGLDIVAPGVNVQSTYPGCLSADHEVLTSTGWKALPAIKDADQVMTLDLQTGTQQWNSVQ

SEQ ID NO: 65200 - protein, 295 aa, Unidentified
DEEVKYFEMLSKLYPTKITKIEPLGKAHVYDLQVEDVHLLTGNGIYTSNSGVKVAVLDTGISTHPDLNIRGGASFVPGEPSTQDGNGHGTHVAGTIAALNNSIGVLGVAPSAELYAVKVLGASGSGSVSSIAQGLEWAGNNGMHVANLSLGSPSPSATLEQAVNSATSRGVLVVAASGNSGAGSISYPARYANAMAVGATDQNNNRASFSQYGAGLDIVAPGVNVQSTYPGSTYASLNGTSMATPHVAGAAALVKQKNPSWSNVQIRNHLKNTATSLGSTNLYGSGLVNAEAATR

SEQ ID NO: 65201 - protein, 288 aa, Unidentified
ISQAHSFKIKDIQLETEATEWAGFRVDQDQLYLRHDFLVLHNSGVKVAVLDTGISTHPDLNIRGGASFVPGEPSTQDGNGHGTHVAGTIAALNNSIGVLGVAPSAELYAVKVLGASGSGSVSSIAQGLEWAGNNGMHVANLSLGSPSPSATLEQAVNSATSRGVLVVAASGNSGAGSISYPARYANAMAVGATDQNNNRASFSQYGAGLDIVAPGVNVQSTYPGSTYASLNGTSMATPHVAGAAALVKQKNPSWSNVQIRNHLKNTATSLGSTNLYGSGLVNAEAATR

SEQ ID NO: 65202 - protein, 275 aa, Bacillus sp. NSP9.1
AQTVPYGIPLIKADKVQAQGFKGANVKVGVIDTGIQSSHSDLNVSGGASFVSGDSNPFIDGNGHGTHVAGTVAALDNSIGVLGVAPNVSLYAIKVLNSSGSGTYSAIVSGIEWATSNGMDVINMSLGGSSGSTALKQAVDNAYARGVVVVAAAGNSGSSGSSNTIGYPAKYDSVIAVGAVDSNSNRASYSSVGSELEVMAPGSGVYSTYPSNTYATLNGTSMASPHVAGAAALILSKYPTLSASQVRNRLSSTATYLGSSFYYGNGLINVEAAAQ

SEQ ID NO: 65203 - protein, 299 aa, Unidentified
EKYDAWVADKALVKTQRFAATITAIEPAGVEPVYDTTQPDGNTVIFNGLVTGQSGVKVAVLDTGISTHPDLNIRGGASFVPGEPSTQDGNGHGTHVAGTIAALNNSIGVLGVAPSAELYAVKVLGASGSGSVSSIAQGLEWAGNNGMHVANLSLGSPSPSATLEQAVNSATSRGVLVVAASGNSGAGSISYPARYANAMAVGATDQNNNRASFSQYGAGLDIVAPGVNVQSTYPGSTYASLNGTSMATPHVAGAAALVKQKNPSWSNVQIRNHLKNTATSLGSTNLYGSGLVNAEAATR

SEQ ID NO: 65204 - protein, 269 aa, Unidentified
AQSVPWGISRVQAQSAHNRGITGSGVKVAVLDTGISTHEDLNVRGGASFVAGEPGYQDGNGHGTHVAGTIAALNNSIGVLGVAPNAELYAVKVLGASGSGSISGIAQGLQWAGNNGMHIANMSLGTSAPSATLEQAVNAATSRGVLVIAASGNSGAGSVQYPARYANAMAVGATDQNNNRASFSQYGAGLDIVAPGVGVQSTYPGNRYASLNGTSMATPHVAGVAALVKQKNPSWSNVQVRNHLKNTATNLGPTNLYGSGLVNAEAATR

SEQ ID NO: 65205 - protein, 269 aa, Unidentified
AQSVPWGISRVQAQSAHNRGITGSGVKVAVLDTGISTHEDLNVRGGASFVAGEPGYQDGNGHGTHVAGTIAALNNNIGVLGVAPNAELYAVKVLGASGSGSISGIAQGLQWAGNNGMHIANMSLGTPAPSATLEQAVNAATSRGVLVIAASGNSGAGSVQYPARYANAMAVGATDQNNNRASFSQYGAGLDIVAPGVGVQSTYPGNRYASLNGTSMATPHVAGVAALVKQKNPSWSNVQVRNHLKNTATNLGPTNLYGSGLVNAEAATR

SEQ ID NO: 65206 - protein, 269 aa, Unidentified
AQSVPWGISRVQAQSAHNRGITGSGVKVAVLDTGISTHEDLNVRGGASFVAGEPGYQDGNGHGTHVAGTIAALNNNIGVLGVAPNAELYAVKVLGASGSGSISGIAQGLQWAGNNGMHIANMSLGTPAPSATLEQAVNAATSRGVLVIAASGNSGAGSVGYPARYANAMAVGATDQNNNRASFSQYGAGLDIVAPGVGVQSTYPGNRYASLNGTSMATPHVAGVAALVKQKNPSWSNVQVRNHLKNTATNLGPTNLYGSGLVNAEAATR

SEQ ID NO: 65207 - protein, 269 aa, Unidentified
AQSVPWGISRVQAQSAHNRGITGSGVKVAVLDTGISTHEDLNVRGGASFVAGEPGYQDGNGHGTHVAGTIAALNNSIGVLGVAPNAELYAVKVLGASGSGSISGIAQGLQWAGNNGMHIANMSLGTSAPSATLEQAVNAATSRGVLVIAASGNSGAGSVGYPARYANAMAVGATDQNNNRASFSQYGAGLDIVAPGVGVQSTYPGNRYASLNGTSMATPHVAGVAALVKQKNPSWSNVQVRNHLKNTATNLGPTNLYGSGLVNAEAATR

SEQ ID NO: 65208 - protein, 269 aa, Alkalihalobacillus patagoniensis
AQSVPWGISRVQAQSAHNRGITGSGVKVAVLDTGISTHEDLNVRGGASFVAGEPGYQDGNGHGTHVAGTIAALNNSIGVLGVAPNAELYAVKVLGASGSGSISGIAQGLQWAGNNGMHIANMSLGTSAPSATLEQAVNAATSRGVLVIAASGNSGAGSVGYPARYANAMAVGATDQNNNRASFSQYGAGLDIVAPGVGVQSTYPGNRYASLNGTSMATPHVAGVAALVKQKNPSWSNVQVRNHLKNTATNLGNTNLYGSGLVNAEAATR

SEQ ID NO: 65209 - protein, 269 aa, Unidentified
AQSVPWGISRVQAQSAHNRGITGSGVKVAVLDTGISTHEDLNVRGGASFVAGEPGYQDGNGHGTHVAGTIAALNNSIGVLGVAPNAELYAVKVLGASGSGSISGIAQGLQWAGNNGMHIANMSLGTPAPSATLEQAVNAATSRGVLVIAASGNSGAGSVGYPARYANAMAVGATDQNNQRASFSQYGAGLDIVAPGVGVQSTYPGNRYASLNGTSMATPHVAGVAALVKQKNPSWSNVQVRNHLKNTATNLGNTNLYGSGLVNAEAATR

SEQ ID NO: 65210 - protein, 269 aa, Unidentified
AQVVPWGISRVQAQSAHNRGITGSGVKVAVLDTGISTHEDLNVRGGASFVAGEPGYQDGNGHGTHVAGTIAALNNSIGVLGVAPNAELYAVKVLGASGSGSISGIAQGLQWAGNNGMHIANMSLGTPAPSATLEQAVNAATSRGVLVIAASGNSGAGSVGYPARYANAMAVGATDQNNNRASFSQYGAGLDIVAPGVGVQSTYPGNRYASLNGTSMATPHVAGVAALVKQKNPSWSNVQVRNHLKNTATNLGPTNLYGSGLVNAEAATR

SEQ ID NO: 65211 - protein, 269 aa, Unidentified
AQSVPWGISRVQAQSAHNRGITGSGVKVAVLDTGISTHEDLNVRGGASFVAGEPGYQDGNGHGTHVAGTIAALDNSIGVLGVAPNAELYAVKVLGASGSGSISGIAQGLQWAGNNGMHIANMSLGTPAPSATLEQAVNAATSRGVLVIAASGNSGAGSVGYPARYANAMAVGATDQNNNRASFSQYGAGLDIVAPGVGVQSTYPGNRYASLNGTSMATPHVAGVAALVKQKNPSWSNVQVRNHLKNTATNLGNTNLYGSGLVNAEAATR

SEQ ID NO: 65212 - protein, 269 aa, Unidentified
AQSVPWGISRVQAQSAHNRGITGSGVKVAVLDTGISTHEDLNVRGGASFVAGEPGYQDGNGHGTHVAGTIAALNNNIGVLGVAPNAELYAVKVLGASGSGSISGIAQGLQWAGNNGMHIANMSLGTPAPSATLEQAVNAATSRGVLVIAASGNSGAGSVGYPARYANAMAVGATDQNNNRASFSQYGAGLDIVAPGVGVQSTYPGNRYASLNGTSMATPHVAGVAALVKQKNPSWSNVQVRNHLKNTATNLGNTNLYGSGLVNAEAATR

SEQ ID NO: 65213 - protein, 269 aa, Unidentified
AQSVPWGISRVQAQSAHNRGITGSGVKVAVLDTGISTHEDLNVRGGASFVAGEPGYQDGNGHGTHVAGTIAALNNSIGVLGVAPNAELYAVKVLGASGSGSISGIAQGLQWAGNNGMHIANMSLGTPAPSATLEQAVNAATSRGVLVIAASGNSGAGSVQYPARYANAMAVGATDQNNNRASFSQYGAGLDIVAPGVGVQSTYPGNRYASLSGTSMATPHVAGVAALVKQKNPSWSNVQVRNHLKNTATNLGPTNLYGSGLVNAEAATR

SEQ ID NO: 65214 - protein, 269 aa, Unidentified
AQSVPWGISRVQAQSAHNRGITGSGVKVAVLDTGISTHEDLNVRGGASFVAGEPGYQDGNGHGTHVAGTIAALNNSIGVLGVAPNAELYAVKVLGASGSGSISGIAQGLQWAGNNGMHIANMSLGTPAPSATLEQAVNAATSRGVLVIAASGNSGAGSVGYPARYANAMAVGATDQNNNRASFSQYGAGLDIVAPGVGVQSTYPGNRYASLSGTSMATPHVAGVAALVKQKNPSWSNVQVRNHLKNTATNLGNTNLYGSGLVNAEAATR

SEQ ID NO: 65215 - protein, 341 aa, Unidentified
AEEAKEKYLIGFNEQEAVSEFVEQVEANDEVAILSEEEEVEIELLHEFETIPVLSVELSPEDVDALELDPAISYIEEDAEVTTMAQSVPWGISRVQAPAAHNRGLTGSGVKVAVLDTGISTHPDLNIRGGASFVPGEPSTQDGNGHGTHVAGTIAALNNSIGVLGVAPSAELYAVKVLGASGSGSVSSIAQGLEWAGNNGMHVANLSLGSPSPSATLEQAVNSATSRGVLVVAASGNSGAGSISYPARYANAMAVGATDQNNNRASFSQYGAGLDIVAPGVNVQSTYPGCVKNDSLIFTDRGLVTAAELAVGVPEEHAAFTEVGVDTSTGRATTNAVYNGG

SEQ ID NO: 65216 - protein, 367 aa, Bacillus circulans
LLLSVAFTSSIVSAAEEANEKYLIGLNEQEAVSEFVESIEANDEVAILSEDESVEIELLHEFETIPVVSVELSPEDVKDLEKDPAISYTEEDIEVTIMAQSVPWGISRVQAPAAHNRGLTGSGEKVAVLDTGISTHPDLNIRGGASFVPGAPSTQDGNGHGTHVAGTIAALNNSIGVLGVAPSAELYAVNVLGADGRGAISSIAHGLEWTGNNNMHVANLSLGSPSPSATLEQAVNSATSRGVLVVAASGNSGASSISYPARYANAMAVGATDQNNNRASFSQYGAGLDIVAPGVGVQSSYPGSTYASLNGTSMATPHVAGVAALVKHKNPSWSNTQIRNHLENTATSLGSTNLYVSGLVKAEAATR

SEQ ID NO: 65217 - protein, 173 aa, Bacillus sp.
STQDGNGHGTHVAGTVAALNNNIGVIGVAPNVELYAVKVLGASGSGSVSSIARGLQWAANNGMHIANLSLGSSAPSATLERAVNAATSRGVLVVAASGNSGAGSIGYPARYANAMAVGATDQNNNRASFSQYGAGLDILAPGVGVQSTYPGSTYASMSGTSMATPHVAGAAAL

SEQ ID NO: 65218 - protein, 173 aa, Bacillus sp.
STQDGNGHGTHVAGTIAALNNSVGVLGVAPSADLYAVKVLGASGRGSVSSIARGLEWAANNGMHVANLSLGSPFPSSTLERAVNYATSRDVLVIAATGNSGAGTVGYPARYANAMAVGATDQNNNRASSSQYGAGLDIVAPGVGVQSTYPGSTYASLNGTSMASPHVAGAAAL

SEQ ID NO: 65219 - protein, 173 aa, Bacillus sp.
STQDGNGHGTHVAGTVAALNNSIGVLGVAPSAELYAVKVLGASGRGSVSSIAQGLEWAGANGMHIANLSLGSPAPSSTLERAVNSATSRGVLVIAATGNTGSGSISYPARYANAMAVGATDQNNRRASFSQYGAGIDIVAPGVGVQSTYPGNTYVSMSGTSMATPHVAGAAAL

SEQ ID NO: 65220 - protein, 173 aa, Bacillus sp.
STQDGNGHGTHVAGTVAALNNNVGVLGVAPNAELYAVKVLGASGRGSVSSVAQGLEWAADNGTHVANLSLGSDFPSATLERAVNSATSRGVLVVAATGNNGSGTVSYPARYANAMAVGATDQNNNRASFSQYGAGLDIVAPGVGVQSTYPGSTYASLNGTSMATPHVAGAAAL

SEQ ID NO: 65221 - protein, 173 aa, Bacillus sp.
STQDGNGHGTHVAGTVAALNNSVGVLGVAPNAELYGVKVLGANGRGTISSIARGLEWAGANGMHVANLSLGTPAPSATLEQAVNQATSQGVLVVAASGNSGAGSISYPARYANAMAVGATDQNNRRASFSQYGTGLDIVAPGVGVQSTYPGSTYASLNGTSMASPHVAGAAAL

SEQ ID NO: 65222 - protein, 173 aa, Bacillus sp.
STQDGNGHGTHIAGTIAALNNSVGVLGVAPSVDLYGVKVLGASGRGSVSSIAQGLEWAGDNGMHVANLSLGTDQPSATLERAVNSATSQGVLVVAASGNSGAGSVSYPARYANAMAVGATDQNNRRASFSQYGAGLDIVAPGVGVQSTYPGSRYASMNGTSMASPHVAGAAAL

SEQ ID NO: 65223 - protein, 269 aa, Unidentified
AQVVPWGISRVQAQSAHNRGITGSGVKVAVLDTGISTHEDLNVRGGASFVAGEPGYQDGNGHGTHVAGTIAALNNSIGVLGVAPNAELYAVKVLGASGSGSISGIAQGLQWAGNNGMHIANMSLGTSAPSATLEQAVNAATSRGVLVIAASGNSGAGSVQYPARYANAMAVGATDQNNNRASFSQYGAGLDIVAPGVGVQSTYPGNRYASLNGTSMATPHVAGVAALVKQKNPSWSNVQVRNHLKNTATNLGNTNLYGSGLVNAEAATR

SEQ ID NO: 65224 - protein, 269 aa, Unidentified
AQSVPWGISRVQAQSAHNRGITGSGVKVAVLDTGISTHEDLNVRGGASFVAGEPGYQDGNGHGTHVAGTIAALNNSIGVLGVAPNAELYAVKVLGASGSGSISGIAQGLQWAGNNGMHIANMSLGTSAPSATLEQAVNAATSRGVLVIAASGNSGAGSVGYPARYANAMAVGATDQNNNRASFSQYGAGLDIVAPGVGVQSTYPGNRYASLSGTSMATPHVAGVAALVKQKNPSWSNVQVRNHLKNTATNLGNTNLYGSGLVNAEAATR

SEQ ID NO: 65225 - protein, 269 aa, Unidentified
AQSVPWGISRVQAQSAHNRGITGSGVKVAVLDTGISTHEDLNVRGGASFVAGEPGYQDGNGHGTHVAGTIAALNNSIGVLGVAPNAELYAVKVLGASGSGSISGIAQGLQWAGNNGMHIANMSLGTSAPSATLEQAVNAATSRGVLVIAASGNSGAGSVGYPARYANAMAVGATDQNNNRASFSQYGAGLDIVAPGVGVQSTYPGNRYASLSGTSMATPHVAGVAALVKQKNPSWSNVQVRNHLKNTATNLGPTNLYGSGLVNAEAATR

SEQ ID NO: 65226 - protein, 269 aa, Unidentified
AQSVPWGISRVQAQSAHNRGITGSGVKVAVLDTGISTHEDLNVRGGASFVAGEPGYQDGNGHGTHVAGTIAALNNSIGVLGVAPNAELYAVKVLGASGSGSISGIAQGLQWAGNNGMHIANISLGTSAPSATLEQAVNAATSRGVLVIAASGNSGAGSVGYPARYANAMAVGATDQNNNRASFSQYGAGLDIVAPGVGVQSTYPGNRYASLSGTSMATPHVAGVAALVKQKNPSWSNVQVRNHLKNTATNLGNTNLYGSGLVNAEAATR

SEQ ID NO: 65227 - protein, 269 aa, Unidentified
AQSVPWGISRVQAQSAHNRGITGSGVKVAVLDTGISTHEDLNVRGGASFVAGEPGYQDGNGHGTHVAGTIAALNNNIGVLGVAPNAELYAVKVLGASGSGSISGIAQGLQWAGNNGMHIANMSLGTSAPSATLEQAVNAATSRGVLVIAASGNSGAGSVGYPARYANAMAVGATDQNNNRASFSQYGAGLDIVAPGVGVQSTYPGNRYASLNGTSMATPHVAGVAALVKQKNPSWSNVQVRNHLKNTATNLGPTNLYGSGLVNAEAATR

SEQ ID NO: 65228 - protein, 269 aa, Unidentified
AQSVPWGISRVQAQSAHNRGITGSGVKVAVLDTGISTHEDLNVRGGASFVAGEPGYQDGNGHGTHVAGTIAALNNNIGVLGVAPNAELYAVKVLGASGSGSISGIAQGLQWAGNNGMHIANISLGTSAPSATLEQAVNAATSRGVLVIAASGNSGAGSVGYPARYANAMAVGATDQNNNRASFSQYGAGLDIVAPGVGVQSTYPGNRYASLNGTSMATPHVAGVAALVKQKNPSWSNVQVRNHLKNTATNLGNTNLYGSGLVNAEAATR

SEQ ID NO: 65229 - protein, 269 aa, Unidentified
AQSVPWGISRVQAQSAHNRGITGSGVKVAVLDTGISTHEDLNVRGGASFVAGEPGYQDGNGHGTHVAGTIAALNNSIGVLGVAPNAELYAVKVLGASGSGSISGIAQGLQWAGNNGMHIANMSLGTSAPSATLEQAVNAATSRGVLVIAASGNSGAGSVGYPARYANAMAVGATDQNNQRASFSQYGAGLDIVAPGVGVQSTYPGNRYASLNGTSMATPHVAGVAALVKQKNPSWSNVQVRNHLKNTATNLGPTNLYGSGLVNAEAATR

SEQ ID NO: 65230 - protein, 269 aa, Unidentified
AQSVPWGISRVQAQSAHNRGITGSGVKVAVLDTGISTHEDLNVRGGASFVAGEPGYQDGNGHGTHVAGTIAALDNSIGVLGVAPNAELYAVKVLGASGSGSISGIAQGLQWAGNNGMHIANMSLGTPAPSATLEQAVNAATSRGVLVIAASGNSGAGSVGYPARYANAMAVGATDQNNNRASFSQYGAGLDIVAPGVGVQSTYPGNRYASLSGTSMATPHVAGVAALVKQKNPSWSNVQVRNHLKNTATNLGNTNLYGSGLVNAEAATR

SEQ ID NO: 65231 - protein, 269 aa, Unidentified
AQSVPWGISRVQAQSAHNRGITGSGVKVAVLDTGISTHEDLNVRGGASFVAGEPGYQDGNGHGTHVAGTIAALDNSIGVLGVAPNAELYAVKVLGASGSGSISGIAQGLQWAGNNGMHIANMSLGTSAPSATLEQAVNAATSRGVLVIAASGNSGAGSVGYPARYANAMAVGATDQNNNRASFSQYGAGLDIVAPGVGVQSTYPGNRYASLNGTSMATPHVAGVAALVKQKNPSWSNVQVRNHLKNTATNLGPTNLYGSGLVNAEAATR

SEQ ID NO: 65232 - protein, 269 aa, Unidentified
AQVVPWGISRVQAQSAHNRGITGSGVKVAVLDTGISTHEDLNVRGGASFVAGEPGYQDGNGHGTHVAGTIAALDNSIGVLGVAPNAELYAVKVLGASGSGSISGIAQGLQWAGNNGMHIANMSLGTPAPSATLEQAVNAATSRGVLVIAASGNSGAGSVGYPARYANAMAVGATDQNNNRASFSQYGAGLDIVAPGVGVQSTYPGNRYASLNGTSMATPHVAGVAALVKQKNPSWSNVQVRNHLKNTATNLGNTNLYGSGLVNAEAATR

SEQ ID NO: 65233 - protein, 269 aa, Unidentified
AQSVPWGISRVQAQSAHNRGITGSGVKVAVLDTGISTHEDLNVRGGASFVAGEPGYQDGNGHGTHVAGTIAALNNNIGVLGVAPNAELYAVKVLGASGSGSISGIAQGLQWAGNNGMHIANMSLGTSAPSATLEQAVNAATSRGVLVIAASGNSGAGSVQYPARYANAMAVGATDQNNNRASFSQYGAGLDIVAPGVGVQSTYPGNRYASLNGTSMATPHVAGVAALVKQKNPSWSNVQVRNHLKNTATNLGNTNLYGSGLVNAEAATR

SEQ ID NO: 65234 - protein, 269 aa, Unidentified
AQVVPWGISRVQAQSAHNRGITGSGVKVAVLDTGISTHEDLNVRGGASFVAGEPGYQDGNGHGTHVAGTIAALNNSIGVLGVAPNAELYAVKVLGASGSGSISGIAQGLQWAGNNGMHIANMSLGTSAPSATLEQAVNAATSRGVLVIAASGNSGAGSVGYPARYANAMAVGATDQNNNRASFSQYGAGLDIVAPGVGVQSTYPGNRYASLNGTSMATPHVAGVAALVKQKNPSWSNVQVRNHLKNTATNLGNTNLYGSGLVNAEAATR

SEQ ID NO: 65235 - protein, 269 aa, Unidentified
AQSVPWGISRVQAQSAHNRGITGSGVKVAVLDTGISTHEDLNVRGGASFVAGEPGYQDGNGHGTHVAGTIAALNNSIGVLGVAPNAELYAVKVLGASGSGSISGIAQGLQWAGNNGMHIANMSLGTSAPSATLEQAVNAATSRGVLVIAASGNSGAGSVGYPARYANAMAVGATDQNNQRASFSQYGAGLDIVAPGVGVQSTYPGNRYASLNGTSMATPHVAGVAALVKQKNPSWSNVQVRNHLKNTATNLGNTNLYGSGLVNAEAATR

SEQ ID NO: 65236 - protein, 269 aa, Unidentified
AQSVPWGIERVQAQSAHNRGITGSGVKVAVLDTGISTHEDLNVRGGASFVAGEPGYQDGNGHGTHVAGTIAALNNSIGVLGVAPNAELYAVKVLGASGSGSISGIAQGLQWAGNNGMHIANMSLGTSAPSATLEQAVNAATSRGVLVIAASGNSGAGSVQYPARYANAMAVGATDQNNNRASFSQYGAGLDIVAPGVGVQSTYPGNRYASLNGTSMATPHVAGVAALVKQKNPSWSNVQVRNHLKNTATNLGNTNLYGSGLVNAEAATR

SEQ ID NO: 65237 - protein, 269 aa, Unidentified
AQSVPWGISRVQAQSAHNRGITGSGVKVAVLDTGISTHEDLNVRGGASFVAGEPGYQDGNGHGTHVAGTIAALNNSIGVLGVAPNAELYAVKVLGASGSGSISGIAQGLQWAGNNGMHIANMSLGTSAPSATLEQAVNAATSRGVLVIAASGNSGAGSVQYPARYANAMAVGATDQNNNRASFSQYGAGLDIVAPGVGVQSTYPGNRYASLSGTSMATPHVAGVAALVKQKNPSWSNVQVRNHLKNTATNLGNTNLYGSGLVNAEAATR

SEQ ID NO: 65238 - protein, 269 aa, Unidentified
AQSVPWGISRVQAQSAHNRGITGSGVKVAVLDTGISTHEDLNVRGGASFVAGEPGYQDGNGHGTHVAGTIAALNNNIGVLGVAPNAELYAVKVLGASGSGSISGIAQGLQWAGNNGMHIANMSLGTPAPSATLEQAVNAATSRGVLVIAASGNSGAGSVGYPARYANAMAVGATDQNNQRASFSQYGAGLDIVAPGVGVQSTYPGNRYASLNGTSMATPHVAGVAALVKQKNPSWSNVQVRNHLKNTATNLGPTNLYGSGLVNAEAATR

SEQ ID NO: 65239 - protein, 269 aa, Unidentified
AQSVPWGISRVQAQSAHNRGITGSGVKVAVLDTGISTHEDLNVRGGASFVAGEPGYQDGNGHGTHVAGTIAALNNSIGVLGVAPNAELYAVKVLGASGSGSISGIAQGLQWAGNNGMHIANMSLGTSAPSATLEQAVNAATSRGVLVIAASGNSGAGSVQYPARYANAMAVGATDQNNQRASFSQYGAGLDIVAPGVGVQSTYPGNRYASLNGTSMATPHVAGVAALVKQKNPSWSNVQVRNHLKNTATNLGNTNLYGSGLVNAEAATR

SEQ ID NO: 65240 - protein, 269 aa, Unidentified
AQSVPWGISRVQAQSAHNRGITGSGVKVAVLDTGISTHEDLNVRGGASFVAGEPGYQDGNGHGTHVAGTIAALNNSIGVLGVAPNAELYAVKVLGASGSGSISGIAQGLQWAGNNGMHIANMSLGTPAPSATLEQAVNAATSRGVLVIAASGNSGAGSVGYPARYANAMAVGATDQNNQRASFSQYGAGLDIVAPGVGVQSTYPGNRYASLSGTSMATPHVAGVAALVKQKNPSWSNVQVRNHLKNTATNLGPTNLYGSGLVNAEAATR

SEQ ID NO: 65241 - protein, 269 aa, Unidentified
AQSVPWGISRVQAQSAHNRGITGSGVKVAVLDTGISTHEDLNVRGGASFVAGEPGYQDGNGHGTHVAGTIAALDNSIGVLGVAPNAELYAVKVLGASGSGSISGIAQGLQWAGNNGMHIANMSLGTSAPSATLEQAVNAATSRGVLVIAASGNSGAGSVGYPARYANAMAVGATDQNNNRASFSQYGAGLDIVAPGVGVQSTYPGNRYASLNGTSMATPHVAGVAALVKQKNPSWSNVQVRNHLKNTATNLGNTNLYGSGLVNAEAATR

SEQ ID NO: 65242 - protein, 269 aa, Unidentified
AQSVPWGISRVQAQSAHNRGITGSGVKVAVLDTGISTHEDLNVRGGASFVAGEPGYQDGNGHGTHVSGTIAALNNSIGVLGVAPNAELYAVKVLGASGSGSISGIAQGLQWAGNNGMHIANMSLGTPAPSATLEQAVNAATSRGVLVIAASGNSGAGSVQYPARYANAMAVGATDQNNNRASFSQYGAGLDIVAPGVGVQSTYPGNRYASLSGTSMATPHVAGVAALVKQKNPSWSNVQVRNHLKNTATNLGNTNLYGSGLVNAEAATR

SEQ ID NO: 65243 - protein, 269 aa, Unidentified
AQSVPWGISRVQAQSAHNRGITGSGVKVAVLDTGISTHEDLNVRGGASFVAGEPGYQDGNGHGTHVAGTIAALNNSIGVLGVAPNAELYAVKVLGASGSGSISGIAQGLQWAGNNGMHIANISLGTSAPSATLEQAVNAATSRGVLVIAASGNSGAGSVGYPARYANAMAVGATDQNNQRASFSQYGAGLDIVAPGVGVQSTYPGNRYASLNGTSMATPHVAGVAALVKQKNPSWSNVQVRNHLKNTATNLGNTNLYGSGLVNAEAATR

SEQ ID NO: 65244 - protein, 269 aa, Unidentified
AQVVPWGISRVQAQSAHNRGITGSGVKVAVLDTGISTHEDLNVRGGASFVAGEPGYQDGNGHGTHVAGTIAALDNSIGVLGVAPNAELYAVKVLGASGSGSISGIAQGLQWAGNNGMHIANMSLGTPAPSATLEQAVNAATSRGVLVIAASGNSGAGSVQYPARYANAMAVGATDQNNNRASFSQYGAGLDIVAPGVGVQSTYPGNRYASLNGTSMATPHVAGVAALVKQKNPSWSNVQVRNHLKNTATNLGNTNLYGSGLVNAEAATR

SEQ ID NO: 65245 - protein, 269 aa, Unidentified
AQVVPWGISRVQAQSAHNRGITGSGVKVAVLDTGISTHEDLNVRGGASFVAGEPGYQDGNGHGTHVAGTIAALNNSIGVLGVAPNAELYAVKVLGASGSGSISGIAQGLQWAGNNGMHIANMSLGTSAPSATLEQAVNAATSRGVLVIAASGNSGAGSVGYPARYANAMAVGATDQNNNRASFSQYGAGLDIVAPGVGVQSTYPGNRYASLNGTSMATPHVAGVAALVKQKNPSWSNVQVRNHLKNTATNLGPTNLYGSGLVNAEAATR

SEQ ID NO: 65246 - protein, 269 aa, Unidentified
AQSVPWGIERVQAQSAHNRGITGSGVKVAVLDTGISTHEDLNVRGGASFVAGEPGYQDGNGHGTHVAGTIAALNNSIGVLGVAPNAELYAVKVLGASGSGSISGIAQGLQWAGNNGMHIANMSLGTSAPSATLEQAVNAATSRGVLVIAASGNSGAGSVGYPARYANAMAVGATDQNNNRASFSQYGAGLDIVAPGVGVQSTYPGNRYASLNGTSMATPHVAGVAALVKQKNPSWSNVQVRNHLKNTATNLGPTNLYGSGLVNAEAATR

SEQ ID NO: 65247 - protein, 269 aa, Unidentified
AQSVPWGISRVQAQSAHNRGITGSGVKVAVLDTGISTHEDLNVRGGASFVAGEPGYQDGNGHGTHVAGTIAALDNSIGVLGVAPNAELYAVKVLGASGSGSISGIAQGLQWAGNNGMHIANMSLGTSAPSATLEQAVNAATSRGVLVIAASGNSGAGSVQYPARYANAMAVGATDQNNNRASFSQYGAGLDIVAPGVGVQSTYPGNRYASLNGTSMATPHVAGVAALVKQKNPSWSNVQVRNHLKNTATNLGNTNLYGSGLVNAEAATR

SEQ ID NO: 65248 - protein, 269 aa, Unidentified
AQVVPWGISRVQAQSAHNRGITGSGVKVAVLDTGISTHEDLNVRGGASFVAGEPGYQDGNGHGTHVSGTIAALNNSIGVLGVAPNAELYAVKVLGASGSGSISGIAQGLQWAGNNGMHIANMSLGTPAPSATLEQAVNAATSRGVLVIAASGNSGAGSVGYPARYANAMAVGATDQNNNRASFSQYGAGLDIVAPGVGVQSTYPGNRYASLNGTSMATPHVAGVAALVKQKNPSWSNVQVRNHLKNTATNLGNTNLYGSGLVNAEAATR

SEQ ID NO: 65249 - protein, 269 aa, Unidentified
AQSVPWGIERVQAQSAHNRGITGSGVKVAVLDTGISTHEDLNVRGGASFVAGEPGYQDGNGHGTHVAGTIAALNNSIGVLGVAPNAELYAVKVLGASGSGSISGIAQGLQWAGNNGMHIANMSLGTSAPSATLEQAVNAATSRGVLVIAASGNSGAGSVGYPARYANAMAVGATDQNNNRASFSQYGAGLDIVAPGVGVQSTYPGNRYASLNGTSMATPHVAGVAALVKQKNPSWSNVQVRNHLKNTATNLGNTNLYGSGLVNAEAATR

SEQ ID NO: 65250 - protein, 269 aa, Unidentified
AQVVPWGISRVQAQSAHNRGITGSGVKVAVLDTGISTHEDLNVRGGASFVAGEPGYQDGNGHGTHVAGTIAALDNSIGVLGVAPNAELYAVKVLGASGSGSISGIAQGLQWAGNNGMHIANMSLGTPAPSATLEQAVNAATSRGVLVIAASGNSGAGSVGYPARYANAMAVGATDQNNNRASFSQYGAGLDIVAPGVGVQSTYPGNRYASLNGTSMATPHVAGVAALVKQKNPSWSNVQVRNHLKNTATNLGPTNLYGSGLVNAEAATR

SEQ ID NO: 65251 - protein, 269 aa, Unidentified
AQSVPWGISRVQAQSAHNRGITGSGVKVAVLDTGISTHEDLNVRGGASFVAGEPGYQDGNGHGTHVSGTIAALNNSIGVLGVAPNAELYAVKVLGASGSGSISGIAQGLQWAGNNGMHIANMSLGTSAPSATLEQAVNAATSRGVLVIAASGNSGAGSVQYPARYANAMAVGATDQNNNRASFSQYGAGLDIVAPGVGVQSTYPGNRYASLNGTSMATPHVAGVAALVKQKNPSWSNVQVRNHLKNTATNLGNTNLYGSGLVNAEAATR

SEQ ID NO: 65252 - protein, 269 aa, Bacillus sp.
AQSVPWGISRVQAQSAHNRGITGSGVKVAVLDTGISTHEDLNVRGGASFVAGEPGYQDGNGHGTHVAGTIAALNNSLGVLGVAPNAELYAVKVLGASGSGSISGIAQGLQWAGNNGMHIANMSLGTSAPSATLEQAVNAATSRGVLVIAASGNSGAGSVGYPARYANAMAVGATDQNNNRASFSQYGAGLDIVAPGVGVQSTYPGNRYASLNGTSMATPHVAGVAALVKQKNPSWSNVQVRNHLKNTATNLGNTNLYGSGLVNAEAATR

SEQ ID NO: 65253 - protein, 269 aa, Unidentified
AQSVPWGISRVQAQSAHNRGITGSGVKVAVLDTGISTHEDLNVRGGASFVAGEPGYQDGNGHGTHVAGTIAALNNNIGVLGVAPNAELYAVKVLGASGSGSISGIAQGLQWAGNNGMHIANMSLGTSAPSATLEQAVNAATSRGVLVIAASGNSGAGSVGYPARYANAMAVGATDQNNNRASFSQYGAGLDIVAPGVGVQSTYPGNRYASLNGTSMATPHVAGVAALVKQKNPSWSNVQVRNHLKNTATNLGNTNLYGSGLVNAEAATR

SEQ ID NO: 65254 - protein, 341 aa, Saccharomyces cerevisiae
LGKIVASTALLISVAFSSSIASAAEEAKEKYLIGFNEQEAVSEFVEQVEANDEVAILSEEEEVEIELLHEFETIPVLSVELSPEDVDALELDPAISYIEEDAEVTTMAQSVPWGISRVQAPAAHNRGLTGSGVKVAVLDTGISTHPDLNIRGGASFVPGEPSTQDGNGHGTHVAGTIAALNNSIGVLGVAPSAELYAVKVLGASGSGSVSSIAQGLEWAGNNGMHVANLSLGSPSPSATLEQAVNSATSRGVLVVAASGNSGAGSISYPARYANAMAVGATDQNNNRASFSQYGAGLDIVAPGVNVQCFAKGTNVLMADGSIECIENIEVGNKVMGKDGRP

SEQ ID NO: 65255 - protein, 251 aa, Unidentified
AQSVPWGISRVQAPAAHNRGLTGSGVKVAVLDTGISTHPDLNIRGGASFVPGEPSTQDGNGHGTHVAGTIAALNNSIGVLGVAPSAELYAVKVLGASGSGSVSSIAQGLEWAGNNGMHVANLSLGSPSPSATLEQAVNSATSRGVLVVAASGNSGAGSISYPARYANAMAVGATDQNNNRASFSQYGAGLDIVAPGVNVQSTYPGCVTGETLLLTENGYEKAADLYKKQNNLKVVIDNRTKDFAVDSKGTT

SEQ ID NO: 65256 - protein, 294 aa, Unidentified
SAELDVLAVNDVLWDEVVAIEPDGEEQVYDATVLGGHNFVADGIAVHNSGVKVAVLDTGISTHPDLNIRGGASFVPGEPSTQDGNGHGTHVAGTIAALNNSIGVLGVAPSAELYAVKVLGASGSGSVSSIAQGLEWAGNNGMHVANLSLGSPSPSATLEQAVNSATSRGVLVVAASGNSGAGSISYPARYANAMAVGATDQNNNRASFSQYGAGLDIVAPGVNVQSTYPGSTYASLNGTSMATPHVAGAAALVKQKNPSWSNVQIRNHLKNTATSLGSTNLYGSGLVNAEAATR

SEQ ID NO: 65257 - protein, 206 aa, Unidentified
AQSVPWGISRVQAPAAHNRGLTGSGVKVAVLDTGISTHPDLNIRGGASFVPGEPSTQDGNGHGTHVAGTIAALNNSIGVLGVAPSAELYAVKVLGASGSGSVSSIAQGLEWAGNNGMHVANLSLGSPSPSATLEQAVNSATSRGVLVVAASGNSGAGSISYPARYANAMAVGACLAEGSLVLDAATGQRVPIEKVRPGMEVFSLGP

SEQ ID NO: 65258 - protein, 274 aa, Synthetic construct
AQTVPYGIPLIKADKVQAQGYKGANVKVGIIDTGIAASHTDLKVVGGASFVSGESYNTDGNGHGTHVAGTVAALDNTTGVLGVAPNVSLYAIKVLNSSGSGTYSAIVSGIEWATQNGLDVINMSLGGPSGSTALKQAVDKAYASGIVVVAAAGNSGSSGSQNTIGYPAKYDSVIAVGAVDSNKNRASFSSVGAELEVMAPGASVYSTYPSNTYTSLNGTSMASPHVAGAAALILSKYPTLSASQVRNRLSSTATNLGDSFYYGKGLINVEAAAQ

SEQ ID NO: 65259 - protein, 251 aa, Unidentified
AQSVPWGISRVQAPAAHNRGLTGSGVKVAVLDTGISTHPDLNIRGGASFVPGEPSTQDGNGHGTHVAGTIAALNNSIGVLGVAPSAELYAVKVLGASGSGSVSSIAQGLEWAGNNGMHVANLSLGSPSPSATLEQAVNSATSRGVLVVAASGNSGAGSISYPARYANAMAVGATDQNNNRASFSQYGAGLDIVAPGVNVQSTYPGCLTAGTRVLRADTGAETTMGELFALQARDVPVWSLDESLRYVRRHL

SEQ ID NO: 65260 - protein, 269 aa, Unidentified
AQSVPWGIERVQAQSAHNRGITGSGVKVAVLDTGISTHEDLNVRGGASFVAGEPGYQDGNGHGTHVAGTIAALDNSIGVLGVAPNAELYAVKVLGASGSGSISGIAQGLQWAGNNGMHIANMSLGTSAPSATLEQAVNAATSRGVLVIAASGNSGAGSVGYPARYANAMAVGATDQNNNRASFSQYGAGLDIVAPGVGVQSTYPGNRYASLNGTSMATPHVAGVAALVKQKNPSWSNVQVRNHLKNTATNLGPTNLYGSGLVNAEAATR

SEQ ID NO: 65261 - protein, 269 aa, Unidentified
AQSVPWGIERVQAQSAHNRGITGSGVKVAVLDTGISTHEDLNVRGGASFVAGEPGYQDGNGHGTHVSGTIAALNNSIGVLGVAPNAELYAVKVLGASGSGSISGIAQGLQWAGNNGMHIANMSLGTSAPSATLEQAVNAATSRGVLVIAASGNSGAGSVGYPARYANAMAVGATDQNNNRASFSQYGAGLDIVAPGVGVQSTYPGNRYASLNGTSMATPHVAGVAALVKQKNPSWSNVQVRNHLKNTATNLGPTNLYGSGLVNAEAATR

SEQ ID NO: 65262 - protein, 269 aa, Unidentified
AQSVPWGISRVQAQSAHNRGITGSGVKVAVLDTGISTHEDLNVRGGASFVAGEPGYQDGNGHGTHVAGTIAALDNSIGVLGVAPNAELYAVKVLGASGSGSISGIAQGLQWAGNNGMHIANMSLGTSAPSATLEQAVNAATSRGVLVIAASGNSGAGSVGYPARYANAMAVGATDQNNQRASFSQYGAGLDIVAPGVGVQSTYPGNRYASLNGTSMATPHVAGVAALVKQKNPSWSNVQVRNHLKNTATNLGPTNLYGSGLVNAEAATR

SEQ ID NO: 65263 - protein, 269 aa, Unidentified
AQSVPWGISRVQAQSAHNRGITGSGVKVAVLDTGISTHEDLNVRGGASFVAGEPGYQDGNGHGTHVAGTIAALDNSIGVLGVAPNAELYAVKVLGASGSGSISGIAQGLQWAGNNGMHIANMSLGTSAPSATLEQAVNAATSRGVLVIAASGNSGAGSVGYPARYANAMAVGATDQNNQRASFSQYGAGLDIVAPGVGVQSTYPGNRYASLNGTSMATPHVAGVAALVKQKNPSWSNVQVRNHLKNTATNLGNTNLYGSGLVNAEAATR

SEQ ID NO: 65264 - protein, 269 aa, Unidentified
AQVVPWGISRVQAQSAHNRGITGSGVKVAVLDTGISTHEDLNVRGGASFVAGEPGYQDGNGHGTHVAGTIAALDNSIGVLGVAPNAELYAVKVLGASGSGSISGIAQGLQWAGNNGMHIANMSLGTSAPSATLEQAVNAATSRGVLVIAASGNSGAGSVGYPARYANAMAVGATDQNNNRASFSQYGAGLDIVAPGVGVQSTYPGNRYASLNGTSMATPHVAGVAALVKQKNPSWSNVQVRNHLKNTATNLGNTNLYGSGLVNAEAATR

SEQ ID NO: 65265 - protein, 269 aa, Unidentified
AQSVPWGIERVQAQSAHNRGITGSGVKVAVLDTGISTHEDLNVRGGASFVAGEPGYQDGNGHGTHVAGTIAALDNSIGVLGVAPNAELYAVKVLGASGSGSISGIAQGLQWAGNNGMHIANMSLGTSAPSATLEQAVNAATSRGVLVIAASGNSGAGSVGYPARYANAMAVGATDQNNNRASFSQYGAGLDIVAPGVGVQSTYPGNRYASLNGTSMATPHVAGVAALVKQKNPSWSNVQVRNHLKNTATNLGNTNLYGSGLVNAEAATR

SEQ ID NO: 65266 - protein, 269 aa, Unidentified
AQVVPWGISRVQAQSAHNRGITGSGVKVAVLDTGISTHEDLNVRGGASFVAGEPGYQDGNGHGTHVAGTIAALNNSIGVLGVAPNAELYAVKVLGASGSGSISGIAQGLQWAGNNGMHIANMSLGTSAPSATLEQAVNAATSRGVLVIAASGNSGAGSVGYPARYANAMAVGATDQNNQRASFSQYGAGLDIVAPGVGVQSTYPGNRYASLNGTSMATPHVAGVAALVKQKNPSWSNVQVRNHLKNTATNLGPTNLYGSGLVNAEAATR

SEQ ID NO: 65267 - protein, 269 aa, Unidentified
AQVVPWGISRVQAQSAHNRGITGSGVKVAVLDTGISTHEDLNVRGGASFVAGEPGYQDGNGHGTHVAGTIAALNNNIGVLGVAPNAELYAVKVLGASGSGSISGIAQGLQWAGNNGMHIANMSLGTSAPSATLEQAVNAATSRGVLVIAASGNSGAGSVQYPARYANAMAVGATDQNNNRASFSQYGAGLDIVAPGVGVQSTYPGNRYASLNGTSMATPHVAGVAALVKQKNPSWSNVQVRNHLKNTATNLGNTNLYGSGLVNAEAATR

SEQ ID NO: 65268 - protein, 269 aa, Unidentified
AQSVPWGISRVQAQSAHNRGITGSGVKVAVLDTGISTHEDLNVRGGASFVAGEPGYQDGNGHGTHVSGTIAALNNSIGVLGVAPNAELYAVKVLGASGSGSISGIAQGLQWAGNNGMHIANMSLGTSAPSATLEQAVNAATSRGVLVIAASGNSGAGSVQYPARYANAMAVGATDQNNNRASFSQYGAGLDIVAPGVGVQSTYPGNRYASLSGTSMATPHVAGVAALVKQKNPSWSNVQVRNHLKNTATNLGNTNLYGSGLVNAEAATR

SEQ ID NO: 65269 - protein, 269 aa, Unidentified
AQSVPWGISRVQAQSAHNRGITGSGVKVAVLDTGISTHEDLNVRGGASFVAGEPGYQDGNGHGTHVAGTIAALDNSIGVLGVAPNAELYAVKVLGASGSGSISGIAQGLQWAGNNGMHIANMSLGTSAPSATLEQAVNAATSRGVLVIAASGNSGAGSVGYPARYANAMAVGATDQNNNRASFSQYGAGLDIVAPGVGVQSTYPGNRYASLSGTSMATPHVAGVAALVKQKNPSWSNVQVRNHLKNTATNLGNTNLYGSGLVNAEAATR

SEQ ID NO: 65270 - protein, 269 aa, Unidentified
AQVVPWGISRVQAQSAHNRGITGSGVKVAVLDTGISTHEDLNVRGGASFVAGEPGYQDGNGHGTHVAGTIAALDNSIGVLGVAPNAELYAVKVLGASGSGSISGIAQGLQWAGNNGMHIANMSLGTSAPSATLEQAVNAATSRGVLVIAASGNSGAGSVQYPARYANAMAVGATDQNNNRASFSQYGAGLDIVAPGVGVQSTYPGNRYASLNGTSMATPHVAGVAALVKQKNPSWSNVQVRNHLKNTATNLGNTNLYGSGLVNAEAATR

SEQ ID NO: 65271 - protein, 269 aa, Unidentified
AQSVPWGISRVQAQSAHNRGITGSGVKVAVLDTGISTHEDLNVRGGASFVAGEPGYQDGNGHGTHVAGTIAALNNSIGVLGVAPNAELYAVKVLGASGSGSISGIAQGLQWAGNNGMHIANMSLGTSAPSATLEQAVNAATSRGVLVIAASGNSGAGSVGYPARYANAMAVGATDQNNQRASFSQYGAGLDIVAPGVGVQSTYPGNRYASLSGTSMATPHVAGVAALVKQKNPSWSNVQVRNHLKNTATNLGNTNLYGSGLVNAEAATR

SEQ ID NO: 65272 - protein, 269 aa, Unidentified
AQSVPWGIERVQAQSAHNRGITGSGVKVAVLDTGISTHEDLNVRGGASFVAGEPGYQDGNGHGTHVSGTIAALNNSIGVLGVAPNAELYAVKVLGASGSGSISGIAQGLQWAGNNGMHIANMSLGTSAPSATLEQAVNAATSRGVLVIAASGNSGAGSVQYPARYANAMAVGATDQNNNRASFSQYGAGLDIVAPGVGVQSTYPGNRYASLNGTSMATPHVAGVAALVKQKNPSWSNVQVRNHLKNTATNLGNTNLYGSGLVNAEAATR

SEQ ID NO: 65273 - protein, 269 aa, Unidentified
AQVVPWGISRVQAQSAHNRGITGSGVKVAVLDTGISTHEDLNVRGGASFVAGEPGYQDGNGHGTHVAGTIAALNNNIGVLGVAPNAELYAVKVLGASGSGSISGIAQGLQWAGNNGMHIANMSLGTSAPSATLEQAVNAATSRGVLVIAASGNSGAGSVGYPARYANAMAVGATDQNNNRASFSQYGAGLDIVAPGVGVQSTYPGNRYASLNGTSMATPHVAGVAALVKQKNPSWSNVQVRNHLKNTATNLGPTNLYGSGLVNAEAATR

SEQ ID NO: 65274 - protein, 269 aa, Unidentified
AQVVPWGISRVQAQSAHNRGITGSGVKVAVLDTGISTHEDLNVRGGASFVAGEPGYQDGNGHGTHVAGTIAALNNNIGVLGVAPNAELYAVKVLGASGSGSISGIAQGLQWAGNNGMHIANMSLGTSAPSATLEQAVNAATSRGVLVIAASGNSGAGSVGYPARYANAMAVGATDQNNNRASFSQYGAGLDIVAPGVGVQSTYPGNRYASLNGTSMATPHVAGVAALVKQKNPSWSNVQVRNHLKNTATNLGNTNLYGSGLVNAEAATR

SEQ ID NO: 65275 - protein, 269 aa, Unidentified
AQSVPWGISRVQAQSAHNRGITGSGVKVAVLDTGISTHEDLNVRGGASFVAGEPGYQDGNGHGTHVAGTIAALNNNIGVLGVAPNAELYAVKVLGASGSGSISGIAQGLQWAGNNGMHIANMSLGTSAPSATLEQAVNAATSRGVLVIAASGNSGAGSVGYPARYANAMAVGATDQNNQRASFSQYGAGLDIVAPGVGVQSTYPGNRYASLNGTSMATPHVAGVAALVKQKNPSWSNVQVRNHLKNTATNLGPTNLYGSGLVNAEAATR

SEQ ID NO: 65276 - protein, 269 aa, Unidentified
AQVVPWGISRVQAQSAHNRGITGSGVKVAVLDTGISTHEDLNVRGGASFVAGEPGYQDGNGHGTHVAGTIAALNNSIGVLGVAPNAELYAVKVLGASGSGSISGIAQGLQWAGNNGMHIANMSLGTSAPSATLEQAVNAATSRGVLVIAASGNSGAGSVGYPARYANAMAVGATDQNNNRASFSQYGAGLDIVAPGVGVQSTYPGNRYASLSGTSMATPHVAGVAALVKQKNPSWSNVQVRNHLKNTATNLGPTNLYGSGLVNAEAATR

SEQ ID NO: 65277 - protein, 269 aa, Unidentified
AQSVPWGIERVQAQSAHNRGITGSGVKVAVLDTGISTHEDLNVRGGASFVAGEPGYQDGNGHGTHVAGTIAALNNSIGVLGVAPNAELYAVKVLGASGSGSISGIAQGLQWAGNNGMHIANMSLGTSAPSATLEQAVNAATSRGVLVIAASGNSGAGSVQYPARYANAMAVGATDQNNNRASFSQYGAGLDIVAPGVGVQSTYPGNRYASLSGTSMATPHVAGVAALVKQKNPSWSNVQVRNHLKNTATNLGNTNLYGSGLVNAEAATR

SEQ ID NO: 65278 - protein, 269 aa, Unidentified
AQSVPWGISRVQAQSAHNRGITGSGVKVAVLDTGISTHEDLNVRGGASFVAGEPGYQDGNGHGTHVAGTIAALDNSIGVLGVAPNAELYAVKVLGASGSGSISGIAQGLQWAGNNGMHIANMSLGTSAPSATLEQAVNAATSRGVLVIAASGNSGAGSVQYPARYANAMAVGATDQNNNRASFSQYGAGLDIVAPGVGVQSTYPGNRYASLSGTSMATPHVAGVAALVKQKNPSWSNVQVRNHLKNTATNLGNTNLYGSGLVNAEAATR

SEQ ID NO: 65279 - protein, 269 aa, Unidentified
AQSVPWGISRVQAQSAHNRGITGSGVKVAVLDTGISTHEDLNVRGGASFVAGEPGYQDGNGHGTHVAGTIAALNNNIGVLGVAPNAELYAVKVLGASGSGSISGIAQGLQWAGNNGMHIANMSLGTSAPSATLEQAVNAATSRGVLVIAASGNSGAGSVQYPARYANAMAVGATDQNNQRASFSQYGAGLDIVAPGVGVQSTYPGNRYASLNGTSMATPHVAGVAALVKQKNPSWSNVQVRNHLKNTATNLGPTNLYGSGLVNAEAATR

SEQ ID NO: 65280 - protein, 269 aa, Unidentified
AQSVPWGISRVQAQSAHNRGITGSGVKVAVLDTGISTHEDLNVRGGASFVAGEPGYQDGNGHGTHVAGTIAALDNNIGVLGVAPNAELYAVKVLGASGSGSISGIAQGLQWAGNNGMHIANMSLGTPAPSATLEQAVNAATSRGVLVIAASGNSGAGSVGYPARYANAMAVGATDQNNQRASFSQYGAGLDIVAPGVGVQSTYPGNRYASLNGTSMATPHVAGVAALVKQKNPSWSNVQVRNHLKNTATNLGNTNLYGSGLVNAEAATR

SEQ ID NO: 65281 - protein, 269 aa, Unidentified
AQSVPWGISRVQAQSAHNRGITGSGVKVAVLDTGISTHEDLNVRGGASFVAGEPGYQDGNGHGTHVAGTIAALDNNIGVLGVAPNAELYAVKVLGASGSGSISGIAQGLQWAGNNGMHIANMSLGTSAPSATLEQAVNAATSRGVLVIAASGNSGAGSVQYPARYANAMAVGATDQNNNRASFSQYGAGLDIVAPGVGVQSTYPGNRYASLNGTSMATPHVAGVAALVKQKNPSWSNVQVRNHLKNTATNLGNTNLYGSGLVNAEAATR

SEQ ID NO: 65282 - protein, 269 aa, Unidentified
AQSVPWGISRVQAQSAHNRGITGSGVKVAVLDTGISTHEDLNVRGGASFVAGEPGYQDGNGHGTHVSGTIAALNNSIGVLGVAPNAELYAVKVLGASGSGSISGIAQGLQWAGNNGMHIANMSLGTSAPSATLEQAVNAATSRGVLVIAASGNSGAGSVGYPARYANAMAVGATDQNNQRASFSQYGAGLDIVAPGVGVQSTYPGNRYASLNGTSMATPHVAGVAALVKQKNPSWSNVQVRNHLKNTATNLGNTNLYGSGLVNAEAATR

SEQ ID NO: 65283 - protein, 269 aa, Unidentified
AQVVPWGISRVQAQSAHNRGITGSGVKVAVLDTGISTHEDLNVRGGASFVAGEPGYQDGNGHGTHVAGTIAALNNSIGVLGVAPNAELYAVKVLGASGSGSISGIAQGLQWAGNNGMHIANMSLGTSAPSATLEQAVNAATSRGVLVIAASGNSGAGSVQYPARYANAMAVGATDQNNQRASFSQYGAGLDIVAPGVGVQSTYPGNRYASLNGTSMATPHVAGVAALVKQKNPSWSNVQVRNHLKNTATNLGPTNLYGSGLVNAEAATR

SEQ ID NO: 65284 - protein, 269 aa, Unidentified
AQVVPWGISRVQAQSAHNRGITGSGVKVAVLDTGISTHEDLNVRGGASFVAGEPGYQDGNGHGTHVAGTIAALNNSIGVLGVAPNAELYAVKVLGASGSGSISGIAQGLQWAGNNGMHIANMSLGTSAPSATLEQAVNAATSRGVLVIAASGNSGAGSVGYPARYANAMAVGATDQNNNRASFSQYGAGLDIVAPGVGVQSTYPGNRYASLSGTSMATPHVAGVAALVKQKNPSWSNVQVRNHLKNTATNLGNTNLYGSGLVNAEAATR

SEQ ID NO: 65285 - protein, 269 aa, Unidentified
AQSVPWGISRVQAQSAHNRGITGSGVKVAVLDTGISTHEDLNVRGGASFVAGEPGYQDGNGHGTHVSGTIAALDNSIGVLGVAPNAELYAVKVLGASGSGSISGIAQGLQWAGNNGMHIANMSLGTSAPSATLEQAVNAATSRGVLVIAASGNSGAGSVQYPARYANAMAVGATDQNNNRASFSQYGAGLDIVAPGVGVQSTYPGNRYASLNGTSMATPHVAGVAALVKQKNPSWSNVQVRNHLKNTATNLGNTNLYGSGLVNAEAATR

SEQ ID NO: 65286 - protein, 269 aa, Unidentified
AQVVPWGISRVQAQSAHNRGITGSGVKVAVLDTGISTHEDLNVRGGASFVAGEPGYQDGNGHGTHVAGTIAALNNSIGVLGVAPNAELYAVKVLGASGSGSISGIAQGLQWAGNNGMHIANMSLGTSAPSATLEQAVNAATSRGVLVIAASGNSGAGSVGYPARYANAMAVGATDQNNQRASFSQYGAGLDIVAPGVGVQSTYPGNRYASLNGTSMATPHVAGVAALVKQKNPSWSNVQVRNHLKNTATNLGNTNLYGSGLVNAEAATR

SEQ ID NO: 65287 - protein, 269 aa, Unidentified
AQVVPWGIERVQAQSAHNRGITGSGVKVAVLDTGISTHEDLNVRGGASFVAGEPGYQDGNGHGTHVAGTIAALNNSIGVLGVAPNAELYAVKVLGASGSGSISGIAQGLQWAGNNGMHIANMSLGTSAPSATLEQAVNAATSRGVLVIAASGNSGAGSVGYPARYANAMAVGATDQNNNRASFSQYGAGLDIVAPGVGVQSTYPGNRYASLNGTSMATPHVAGVAALVKQKNPSWSNVQVRNHLKNTATNLGNTNLYGSGLVNAEAATR

SEQ ID NO: 65288 - protein, 269 aa, Unidentified
AQSVPWGISRVQAQSAHNRGITGSGVKVAVLDTGISTHEDLNVRGGASFVAGEPGYQDGNGHGTHVSGTIAALNNNIGVLGVAPNAELYAVKVLGASGSGSISGIAQGLQWAGNNGMHIANMSLGTSAPSATLEQAVNAATSRGVLVIAASGNSGAGSVGYPARYANAMAVGATDQNNNRASFSQYGAGLDIVAPGVGVQSTYPGNRYASLNGTSMATPHVAGVAALVKQKNPSWSNVQVRNHLKNTATNLGPTNLYGSGLVNAEAATR

SEQ ID NO: 65289 - protein, 269 aa, Unidentified
AQVVPWGISRVQAQSAHNRGITGSGVKVAVLDTGISTHEDLNVRGGASFVAGEPGYQDGNGHGTHVAGTIAALNNSIGVLGVAPNAELYAVKVLGASGSGSISGIAQGLQWAGNNGMHIANMSLGTSAPSATLEQAVNAATSRGVLVIAASGNSGAGSVQYPARYANAMAVGATDQNNNRASFSQYGAGLDIVAPGVGVQSTYPGNRYASLSGTSMATPHVAGVAALVKQKNPSWSNVQVRNHLKNTATNLGNTNLYGSGLVNAEAATR

SEQ ID NO: 65290 - protein, 269 aa, Unidentified
AQSVPWGISRVQAQSAHNRGITGSGVKVAVLDTGISTHEDLNVRGGASFVAGEPGYQDGNGHGTHVAGTIAALNNNIGVLGVAPNAELYAVKVLGASGSGSISGIAQGLQWAGNNGMHIANMSLGTSAPSATLEQAVNAATSRGVLVIAASGNSGAGSVQYPARYANAMAVGATDQNNNRASFSQYGAGLDIVAPGVGVQSTYPGNRYASLSGTSMATPHVAGVAALVKQKNPSWSNVQVRNHLKNTATNLGNTNLYGSGLVNAEAATR

SEQ ID NO: 65291 - protein, 269 aa, Unidentified
AQSVPWGIERVQAQSAHNRGITGSGVKVAVLDTGISTHEDLNVRGGASFVAGEPGYQDGNGHGTHVAGTIAALNNSIGVLGVAPNAELYAVKVLGASGSGSISGIAQGLQWAGNNGMHIANMSLGTSAPSATLEQAVNAATSRGVLVIAASGNSGAGSVGYPARYANAMAVGATDQNNQRASFSQYGAGLDIVAPGVGVQSTYPGNRYASLNGTSMATPHVAGVAALVKQKNPSWSNVQVRNHLKNTATNLGNTNLYGSGLVNAEAATR

SEQ ID NO: 65292 - protein, 269 aa, Unidentified
AQSVPWGISRVQAQSAHNRGITGSGVKVAVLDTGISTHEDLNVRGGASFVAGEPGYQDGNGHGTHVSGTIAALNNSIGVLGVAPNAELYAVKVLGASGSGSISGIAQGLQWAGNNGMHIANMSLGTSAPSATLEQAVNAATSRGVLVIAASGNSGAGSVQYPARYANAMAVGATDQNNQRASFSQYGAGLDIVAPGVGVQSTYPGNRYASLNGTSMATPHVAGVAALVKQKNPSWSNVQVRNHLKNTATNLGNTNLYGSGLVNAEAATR

SEQ ID NO: 65293 - protein, 269 aa, Unidentified
AQSVPWGISRVQAQSAHNRGITGSGVKVAVLDTGISTHEDLNVRGGASFVAGEPGYQDGNGHGTHVAGTIAALNNNIGVLGVAPNAELYAVKVLGASGSGSISGIAQGLQWAGNNGMHIANMSLGTSAPSATLEQAVNAATSRGVLVIAASGNSGAGSVGYPARYANAMAVGATDQNNNRASFSQYGAGLDIVAPGVGVQSTYPGNRYASLSGTSMATPHVAGVAALVKQKNPSWSNVQVRNHLKNTATNLGNTNLYGSGLVNAEAATR

SEQ ID NO: 65294 - protein, 269 aa, Unidentified
AQSVPWGISRVQAQSAHNRGITGSGVKVAVLDTGISTHEDLNVRGGASFVAGEPGYQDGNGHGTHVSGTIAALDNSIGVLGVAPNAELYAVKVLGASGSGSISGIAQGLQWAGNNGMHIANMSLGTSAPSATLEQAVNAATSRGVLVIAASGNSGAGSVGYPARYANAMAVGATDQNNNRASFSQYGAGLDIVAPGVGVQSTYPGNRYASLNGTSMATPHVAGVAALVKQKNPSWSNVQVRNHLKNTATNLGPTNLYGSGLVNAEAATR

SEQ ID NO: 65295 - protein, 269 aa, Unidentified
AQSVPWGIERVQAQSAHNRGITGSGVKVAVLDTGISTHEDLNVRGGASFVAGEPGYQDGNGHGTHVAGTIAALNNSIGVLGVAPNAELYAVKVLGASGSGSISGIAQGLQWAGNNGMHIANMSLGTSAPSATLEQAVNAATSRGVLVIAASGNSGAGSVGYPARYANAMAVGATDQNNQRASFSQYGAGLDIVAPGVGVQSTYPGNRYASLNGTSMATPHVAGVAALVKQKNPSWSNVQVRNHLKNTATNLGPTNLYGSGLVNAEAATR

SEQ ID NO: 65296 - protein, 269 aa, Unidentified
AQSVPWGISRVQAQSAHNRGITGSGVKVAVLDTGISTHEDLNVRGGASFVAGEPGYQDGNGHGTHVSGTIAALNNSIGVLGVAPNAELYAVKVLGASGSGSISGIAQGLQWAGNNGMHIANMSLGTPAPSATLEQAVNAATSRGVLVIAASGNSGAGSVGYPARYANAMAVGATDQNNQRASFSQYGAGLDIVAPGVGVQSTYPGNRYASLSGTSMATPHVAGVAALVKQKNPSWSNVQVRNHLKNTATNLGNTNLYGSGLVNAEAATR

SEQ ID NO: 65297 - protein, 269 aa, Unidentified
AQVVPWGIERVQAQSAHNRGITGSGVKVAVLDTGISTHEDLNVRGGASFVAGEPGYQDGNGHGTHVAGTIAALNNSIGVLGVAPNAELYAVKVLGASGSGSISGIAQGLQWAGNNGMHIANMSLGTSAPSATLEQAVNAATSRGVLVIAASGNSGAGSVGYPARYANAMAVGATDQNNNRASFSQYGAGLDIVAPGVGVQSTYPGNRYASLNGTSMATPHVAGVAALVKQKNPSWSNVQVRNHLKNTATNLGPTNLYGSGLVNAEAATR

SEQ ID NO: 65298 - protein, 269 aa, Unidentified
AQSVPWGISRVQAQSAHNRGITGSGVKVAVLDTGISTHEDLNVRGGASFVAGEPGYQDGNGHGTHVSGTIAALNNNIGVLGVAPNAELYAVKVLGASGSGSISGIAQGLQWAGNNGMHIANMSLGTSAPSATLEQAVNAATSRGVLVIAASGNSGAGSVGYPARYANAMAVGATDQNNNRASFSQYGAGLDIVAPGVGVQSTYPGNRYASLNGTSMATPHVAGVAALVKQKNPSWSNVQVRNHLKNTATNLGNTNLYGSGLVNAEAATR

SEQ ID NO: 65299 - protein, 269 aa, Unidentified
AQSVPWGISRVQAQSAHNRGITGSGVKVAVLDTGISTHEDLNVRGGASFVAGEPGYQDGNGHGTHVSGTIAALNNSIGVLGVAPNAELYAVKVLGASGSGSISGIAQGLQWAGNNGMHIANMSLGTSAPSATLEQAVNAATSRGVLVIAASGNSGAGSVGYPARYANAMAVGATDQNNNRASFSQYGAGLDIVAPGVGVQSTYPGNRYASLSGTSMATPHVAGVAALVKQKNPSWSNVQVRNHLKNTATNLGPTNLYGSGLVNAEAATR

SEQ ID NO: 65300 - protein, 269 aa, Unidentified
AQSVPWGISRVQAQSAHNRGITGSGVKVAVLDTGISTHEDLNVRGGASFVAGEPGYQDGNGHGTHVSGTIAALNNSIGVLGVAPNAELYAVKVLGASGSGSISGIAQGLQWAGNNGMHIANMSLGTSAPSATLEQAVNAATSRGVLVIAASGNSGAGSVQYPARYANAMAVGATDQNNNRASFSQYGAGLDIVAPGVGVQSTYPGNRYASLSGTSMATPHVAGVAALVKQKNPSWSNVQVRNHLKNTATNLGPTNLYGSGLVNAEAATR

SEQ ID NO: 65301 - protein, 269 aa, Unidentified
AQVVPWGISRVQAQSAHNRGITGSGVKVAVLDTGISTHEDLNVRGGASFVAGEPGYQDGNGHGTHVSGTIAALNNSIGVLGVAPNAELYAVKVLGASGSGSISGIAQGLQWAGNNGMHIANMSLGTPAPSATLEQAVNAATSRGVLVIAASGNSGAGSVGYPARYANAMAVGATDQNNNRASFSQYGAGLDIVAPGVGVQSTYPGNRYASLSGTSMATPHVAGVAALVKQKNPSWSNVQVRNHLKNTATNLGNTNLYGSGLVNAEAATR

SEQ ID NO: 65302 - protein, 269 aa, Unidentified
AQVVPWGISRVQAQSAHNRGITGSGVKVAVLDTGISTHEDLNVRGGASFVAGEPGYQDGNGHGTHVSGTIAALNNSIGVLGVAPNAELYAVKVLGASGSGSISGIAQGLQWAGNNGMHIANMSLGTSAPSATLEQAVNAATSRGVLVIAASGNSGAGSVGYPARYANAMAVGATDQNNNRASFSQYGAGLDIVAPGVGVQSTYPGNRYASLNGTSMATPHVAGVAALVKQKNPSWSNVQVRNHLKNTATNLGNTNLYGSGLVNAEAATR

SEQ ID NO: 65303 - protein, 269 aa, Unidentified
AQSVPWGIERVQAQSAHNRGITGSGVKVAVLDTGISTHEDLNVRGGASFVAGEPGYQDGNGHGTHVAGTIAALNNNIGVLGVAPNAELYAVKVLGASGSGSISGIAQGLQWAGNNGMHIANMSLGTSAPSATLEQAVNAATSRGVLVIAASGNSGAGSVGYPARYANAMAVGATDQNNNRASFSQYGAGLDIVAPGVGVQSTYPGNRYASLNGTSMATPHVAGVAALVKQKNPSWSNVQVRNHLKNTATNLGNTNLYGSGLVNAEAATR

SEQ ID NO: 65304 - protein, 269 aa, Unidentified
AQSVPWGISRVQAQSAHNRGITGSGVKVAVLDTGISTHEDLNVRGGASFVAGEPGYQDGNGHGTHVAGTIAALDNNIGVLGVAPNAELYAVKVLGASGSGSISGIAQGLQWAGNNGMHIANMSLGTSAPSATLEQAVNAATSRGVLVIAASGNSGAGSVGYPARYANAMAVGATDQNNNRASFSQYGAGLDIVAPGVGVQSTYPGNRYASLNGTSMATPHVAGVAALVKQKNPSWSNVQVRNHLKNTATNLGPTNLYGSGLVNAEAATR

SEQ ID NO: 65305 - protein, 269 aa, Unidentified
AQVVPWGISRVQAQSAHNRGITGSGVKVAVLDTGISTHEDLNVRGGASFVAGEPGYQDGNGHGTHVAGTIAALDNSIGVLGVAPNAELYAVKVLGASGSGSISGIAQGLQWAGNNGMHIANMSLGTPAPSATLEQAVNAATSRGVLVIAASGNSGAGSVGYPARYANAMAVGATDQNNQRASFSQYGAGLDIVAPGVGVQSTYPGNRYASLNGTSMATPHVAGVAALVKQKNPSWSNVQVRNHLKNTATNLGNTNLYGSGLVNAEAATR

SEQ ID NO: 65306 - protein, 269 aa, Unidentified
AQSVPWGISRVQAQSAHNRGITGSGVKVAVLDTGISTHEDLNVRGGASFVAGEPGYQDGNGHGTHVAGTIAALNNNIGVLGVAPNAELYAVKVLGASGSGSISGIAQGLQWAGNNGMHIANMSLGTSAPSATLEQAVNAATSRGVLVIAASGNSGAGSVGYPARYANAMAVGATDQNNQRASFSQYGAGLDIVAPGVGVQSTYPGNRYASLNGTSMATPHVAGVAALVKQKNPSWSNVQVRNHLKNTATNLGNTNLYGSGLVNAEAATR

SEQ ID NO: 65307 - protein, 269 aa, Unidentified
AQSVPWGIERVQAQSAHNRGITGSGVKVAVLDTGISTHEDLNVRGGASFVAGEPGYQDGNGHGTHVAGTIAALNNNIGVLGVAPNAELYAVKVLGASGSGSISGIAQGLQWAGNNGMHIANMSLGTSAPSATLEQAVNAATSRGVLVIAASGNSGAGSVGYPARYANAMAVGATDQNNNRASFSQYGAGLDIVAPGVGVQSTYPGNRYASLNGTSMATPHVAGVAALVKQKNPSWSNVQVRNHLKNTATNLGPTNLYGSGLVNAEAATR

SEQ ID NO: 65308 - protein, 269 aa, Unidentified
AQSVPWGISRVQAQSAHNRGITGSGVKVAVLDTGISTHEDLNVRGGASFVAGEPGYQDGNGHGTHVAGTIAALDNSIGVLGVAPNAELYAVKVLGASGSGSISGIAQGLQWAGNNGMHIANMSLGTPAPSATLEQAVNAATSRGVLVIAASGNSGAGSVGYPARYANAMAVGATDQNNQRASFSQYGAGLDIVAPGVGVQSTYPGNRYASLSGTSMATPHVAGVAALVKQKNPSWSNVQVRNHLKNTATNLGNTNLYGSGLVNAEAATR

SEQ ID NO: 65309 - protein, 269 aa, Unidentified
AQSVPWGISRVQAQSAHNRGITGSGVKVAVLDTGISTHEDLNVRGGASFVAGEPGYQDGNGHGTHVAGTIAALDNSIGVLGVAPNAELYAVKVLGASGSGSISGIAQGLQWAGNNGMHIANMSLGTSAPSATLEQAVNAATSRGVLVIAASGNSGAGSVQYPARYANAMAVGATDQNNNRASFSQYGAGLDIVAPGVGVQSTYPGNRYASLSGTSMATPHVAGVAALVKQKNPSWSNVQVRNHLKNTATNLGPTNLYGSGLVNAEAATR

SEQ ID NO: 65310 - protein, 269 aa, Unidentified
AQSVPWGISRVQAQSAHNRGITGSGVKVAVLDTGISTHEDLNVRGGASFVAGEPGYQDGNGHGTHVAGTIAALDNSIGVLGVAPNAELYAVKVLGASGSGSISGIAQGLQWAGNNGMHIANMSLGTSAPSATLEQAVNAATSRGVLVIAASGNSGAGSVQYPARYANAMAVGATDQNNQRASFSQYGAGLDIVAPGVGVQSTYPGNRYASLNGTSMATPHVAGVAALVKQKNPSWSNVQVRNHLKNTATNLGPTNLYGSGLVNAEAATR

SEQ ID NO: 65311 - protein, 269 aa, Unidentified
AQSVPWGIERVQAQSAHNRGITGSGVKVAVLDTGISTHEDLNVRGGASFVAGEPGYQDGNGHGTHVAGTIAALNNSIGVLGVAPNAELYAVKVLGASGSGSISGIAQGLQWAGNNGMHIANMSLGTSAPSATLEQAVNAATSRGVLVIAASGNSGAGSVGYPARYANAMAVGATDQNNNRASFSQYGAGLDIVAPGVGVQSTYPGNRYASLSGTSMATPHVAGVAALVKQKNPSWSNVQVRNHLKNTATNLGNTNLYGSGLVNAEAATR

SEQ ID NO: 65312 - protein, 269 aa, Unidentified
AQSVPWGIERVQAQSAHNRGITGSGVKVAVLDTGISTHEDLNVRGGASFVAGEPGYQDGNGHGTHVAGTIAALNNSIGVLGVAPNAELYAVKVLGASGSGSISGIAQGLQWAGNNGMHIANMSLGTSAPSATLEQAVNAATSRGVLVIAASGNSGAGSVQYPARYANAMAVGATDQNNQRASFSQYGAGLDIVAPGVGVQSTYPGNRYASLNGTSMATPHVAGVAALVKQKNPSWSNVQVRNHLKNTATNLGNTNLYGSGLVNAEAATR

SEQ ID NO: 65313 - protein, 269 aa, Unidentified
AQSVPWGISRVQAQSAHNRGITGSGVKVAVLDTGISTHEDLNVRGGASFVAGEPGYQDGNGHGTHVSGTIAALDNSIGVLGVAPNAELYAVKVLGASGSGSISGIAQGLQWAGNNGMHIANMSLGTSAPSATLEQAVNAATSRGVLVIAASGNSGAGSVGYPARYANAMAVGATDQNNNRASFSQYGAGLDIVAPGVGVQSTYPGNRYASLNGTSMATPHVAGVAALVKQKNPSWSNVQVRNHLKNTATNLGNTNLYGSGLVNAEAATR

SEQ ID NO: 65314 - protein, 269 aa, Unidentified
AQSVPWGISRVQAQSAHNRGITGSGVKVAVLDTGISTHEDLNVRGGASFVAGEPGYQDGNGHGTHVAGTIAALDNNIGVLGVAPNAELYAVKVLGASGSGSISGIAQGLQWAGNNGMHIANMSLGTSAPSATLEQAVNAATSRGVLVIAASGNSGAGSVGYPARYANAMAVGATDQNNNRASFSQYGAGLDIVAPGVGVQSTYPGNRYASLNGTSMATPHVAGVAALVKQKNPSWSNVQVRNHLKNTATNLGNTNLYGSGLVNAEAATR

SEQ ID NO: 65315 - protein, 269 aa, Unidentified
AQSVPWGIERVQAQSAHNRGITGSGVKVAVLDTGISTHEDLNVRGGASFVAGEPGYQDGNGHGTHVAGTIAALDNSIGVLGVAPNAELYAVKVLGASGSGSISGIAQGLQWAGNNGMHIANMSLGTSAPSATLEQAVNAATSRGVLVIAASGNSGAGSVQYPARYANAMAVGATDQNNNRASFSQYGAGLDIVAPGVGVQSTYPGNRYASLNGTSMATPHVAGVAALVKQKNPSWSNVQVRNHLKNTATNLGNTNLYGSGLVNAEAATR

SEQ ID NO: 65316 - protein, 269 aa, Unidentified
AQSVPWGISRVQAQSAHNRGITGSGVKVAVLDTGISTHEDLNVRGGASFVAGEPGYQDGNGHGTHVAGTIAALNNSIGVLGVAPNAELYAVKVLGASGSGSISGIAQGLQWAGNNGMHIANMSLGTSAPSATLEQAVNAATSRGVLVIAASGNSGAGSVGYPARYANAMAVGATDQNNQRASFSQYGAGLDIVAPGVGVQSTYPGNRYASLSGTSMATPHVAGVAALVKQKNPSWSNVQVRNHLKNTATNLGPTNLYGSGLVNAEAATR

SEQ ID NO: 65317 - protein, 269 aa, Unidentified
AQSVPWGISRVQAQSAHNRGITGSGVKVAVLDTGISTHEDLNVRGGASFVAGEPGYQDGNGHGTHVAGTIAALNNNIGVLGVAPNAELYAVKVLGASGSGSISGIAQGLQWAGNNGMHIANMSLGTSAPSATLEQAVNAATSRGVLVIAASGNSGAGSVGYPARYANAMAVGATDQNNNRASFSQYGAGLDIVAPGVGVQSTYPGNRYASLSGTSMATPHVAGVAALVKQKNPSWSNVQVRNHLKNTATNLGPTNLYGSGLVNAEAATR

SEQ ID NO: 65318 - protein, 269 aa, Unidentified
AQSVPWGISRVQAQSAHNRGITGSGVKVAVLDTGISTHEDLNVRGGASFVAGEPGYQDGNGHGTHVAGTIAALNNNIGVLGVAPNAELYAVKVLGASGSGSISGIAQGLQWAGNNGMHIANMSLGTSAPSATLEQAVNAATSRGVLVIAASGNSGAGSVQYPARYANAMAVGATDQNNNRASFSQYGAGLDIVAPGVGVQSTYPGNRYASLSGTSMATPHVAGVAALVKQKNPSWSNVQVRNHLKNTATNLGPTNLYGSGLVNAEAATR

SEQ ID NO: 65319 - protein, 269 aa, Unidentified
AQSVPWGISRVQAQSAHNRGITGSGVKVAVLDTGISTHEDLNVRGGASFVAGEPGYQDGNGHGTHVAGTIAALNNSIGVLGVAPNAELYAVKVLGASGSGSISGIAQGLQWAGNNGMHIANMSLGTSAPSATLEQAVNAATSRGVLVIAASGNSGAGSVQYPARYANAMAVGATDQNNQRASFSQYGAGLDIVAPGVGVQSTYPGNRYASLSGTSMATPHVAGVAALVKQKNPSWSNVQVRNHLKNTATNLGNTNLYGSGLVNAEAATR

SEQ ID NO: 65320 - protein, 269 aa, Unidentified
AQSVPWGIERVQAQSAHNRGITGSGVKVAVLDTGISTHEDLNVRGGASFVAGEPGYQDGNGHGTHVAGTIAALNNSIGVLGVAPNAELYAVKVLGASGSGSISGIAQGLQWAGNNGMHIANMSLGTSAPSATLEQAVNAATSRGVLVIAASGNSGAGSVGYPARYANAMAVGATDQNNNRASFSQYGAGLDIVAPGVGVQSTYPGNRYASLSGTSMATPHVAGVAALVKQKNPSWSNVQVRNHLKNTATNLGPTNLYGSGLVNAEAATR

SEQ ID NO: 65321 - protein, 269 aa, Unidentified
AQSVPWGISRVQAQSAHNRGITGSGVKVAVLDTGISTHEDLNVRGGASFVAGEPGYQDGNGHGTHVSGTIAALNNSIGVLGVAPNAELYAVKVLGASGSGSISGIAQGLQWAGNNGMHIANMSLGTSAPSATLEQAVNAATSRGVLVIAASGNSGAGSVGYPARYANAMAVGATDQNNNRASFSQYGAGLDIVAPGVGVQSTYPGNRYASLSGTSMATPHVAGVAALVKQKNPSWSNVQVRNHLKNTATNLGNTNLYGSGLVNAEAATR

SEQ ID NO: 65322 - protein, 269 aa, Unidentified
AQVVPWGISRVQAQSAHNRGITGSGVKVAVLDTGISTHEDLNVRGGASFVAGEPGYQDGNGHGTHVSGTIAALNNNIGVLGVAPNAELYAVKVLGASGSGSISGIAQGLQWAGNNGMHIANMSLGTPAPSATLEQAVNAATSRGVLVIAASGNSGAGSVGYPARYANAMAVGATDQNNNRASFSQYGAGLDIVAPGVGVQSTYPGNRYASLNGTSMATPHVAGVAALVKQKNPSWSNVQVRNHLKNTATNLGNTNLYGSGLVNAEAATR

SEQ ID NO: 65323 - protein, 173 aa, Bacillus sp.
STQDGNGHGTHVAGTVAALNNSIGVLGVAPSAELYAVKVLGASGRGSVSGIAQGLEWAGTNGMHVANMSLGTPAPSATLEQAVNAATSQGVLVIAASGNSGSGTVSYPARYANAMAVGATDQNNNRASFSQYGAGLDTVAPGVGVQSTYPGSTYASMSGTSMASPHVAGVAAL

SEQ ID NO: 65324 - protein, 173 aa, Bacillus sp.
STQDGNGHGTHVAGTVAALNNSDGVLGVAPSVDLYAVKVLGASGSGTISSIARGLEWAGNNGMHVANMSLGSPSPSATLERAVNQATSRGVLVVAATGNTGAGTVGYPARYANAMAVGATDQNNNRANFSQYGAGLDIVAPGVNVQSTYPGSRYASLNGTSMASPHVAGVAAL

SEQ ID NO: 65325 - protein, 173 aa, Bacillus sp.
STQDGNGHGTHVAGTIAALNNSVGVIGVAPSAELYGVKVLGANGSGTVSGIARGLEWAADNGMHVANMSLGSSAPSATLERAVNSATSRGVLVVAATGNSGAGSISYPARYANAMAVGATDQNNNRASFSQYGTGLDIVAPGVNVQSTYPGSRYASMSGTSMASPHVAGAAAL

SEQ ID NO: 65326 - protein, 173 aa, Bacillus sp.
STQDGNGHGTHVAGTVAALNNSVGVFGVAPSVDLYAVKVLGASGSGTVSSVAQGLQWAGDNGMHVANLSLGSDAPSATLEQAVNSATSRGVLVVAASGNTGAGTVGYPARYANAMAVGATDQNNRRANFSQYGAGLDIVAPGVGVQSTYPGSTYASLNGTSMATPHVAGVAAL

SEQ ID NO: 65327 - protein, 173 aa, Bacillus sp.
STQDGNGHGTHVAGTVAALNNSIGVLGVAPNAELYGVKVLGANGSGSISGIARGLEWAGNNGMHIANLSLGTDSPSATLEQAVNYATSRGVLVIAASGNSGSGTVGYPARYANAMAVGATDQNNNRASFSQYGTGLDIVAPGVGVQSTYPGSTYASLNGTSMASPHVAGAAAL

SEQ ID NO: 65328 - protein, 173 aa, Bacillus sp.
STQDGNGHGTHVAGTVAALNNNIGVLGVAPSAELYGVKVLGASGRGTVSGIAQGLEWAGDNGMHVANLSLGTDQPSSTLERAVNAATSRGVLVVAASGNTGAGSIGYPARYANAMAVGATDQNNNRANFSQYGAGLDIVAPGVGVQSTYPGSRYASLNGTSMATPHVAGVAAL

SEQ ID NO: 65329 - protein, 173 aa, Bacillus sp.
STQDGNGHGTHVAGTVAALNNNVGVIGVAPSAELYGVKVLGASGSGSISSIARGLEWAGNNGMHVANMSLGTDAPSATLERAVNQATSRGVLVVAATGNSGAGSVAYPARYANAMAVGATDQNNNRANFSQYGAGLDIVAPGVGVQSTYPGSTYASLNGTSMATPHVAGVAAL

SEQ ID NO: 65330 - protein, 173 aa, Bacillus sp.
STQDGNGHGTHVAGTVAALNNNVGVLGVAPSAELYAVKVLGANGSGTVSSIAQGLEWAGNNGMHVANLSLGTDQPSATLERAVNAATSRGVLVVAASGNTGSGSVGYPARYANAMAVGATDQNNNRANFSQYGAGLDIVAPGVGVQSTYPGNRYASMNGTSMATPHVAGAAAL

SEQ ID NO: 65331 - protein, 173 aa, Bacillus sp.
STQDGNGHGTHVAGTIAALNNSVGVIGVAPSADLYAVKVLGASGRGSVSGIARGLEWAANNGMHVANLSLGSPAPSATLERAVNYATSRGVLVIAASGNSGAGSVGYPARYANAMAVGATDQNNNRASFSQHGTGLDIVAPGVGVQSTYPGSRYASLSGTSMASPHVAGAAAL

SEQ ID NO: 65332 - protein, 268 aa, Alkalihalobacillus patagoniensis
AQSVPWGISRVCAQSAHNRGITGSGVKVAVLDTGISTHEDLNVRGGASFVAGEPGYQDGNGHGTHVAGTIAALNNSIGVLGVAPNAELYAVKVLGASGSGSISGIAQGLQWAGNNGMHIANMSLGTSAPSATLEQAVNAATSRGVLVIAASGNSGAGSVGYPARYANAMAVGATDQNNNRASFSQYGAGLDIVAPGVGVQSTYPGNRYASLNGTSMATPHVAGVAALVKQKNPSWSNVQVRNHLKNTTNLGNTNLYGSGLVNACAATR

SEQ ID NO: 65333 - protein, 337 aa, Unidentified
AEEAKEKYLIGFNEQEAVSEFVEQVEANDEVAILSEEEEVEIELLHEFETIPVLSVELSPEDVDALELDPAISYIEEDAEVTTMAQSVPWGISRVQAPAAHNRGLTGSGVKVAVLDTGISTHPDLNIRGGASFVPGEPSTQDGNGHGTHVAGTIAALNNSIGVLGVAPSAELYAVKVLGASGSGSVSSIAQGLEWAGNNGMHVANLSLGSPSPSATLEQAVNSATSRGVLVVAASGNSGAGSISYPARYANAMAVGATDQNNNRASFSQYGAGLDIVAPGVNVQSTYPGCFAPGTRVITASGDVVEIDEIVERAAETAVDGGLREGSTEVTVGVTNV

SEQ ID NO: 65334 - protein, 274 aa, Synthetic construct
AQTVPYGIPLIKADKVQAQGYKGANVKVGIIDTGIAASHTDLKVVGGASFVSGESYNTDGNGHGTHVAGTVAALDNTTGVLGVAPNVSLYAIKVLNSSGSGTYSAIVSGIEWATQNGLDVINMSLGGPSGSTALKQAVDKAYASGIVVVAAAGNSGSSGSQNTIGYPAKYDSVIAVGAVDSNKNRASFSSVGAELEVMAPGVSVYSTYPSNTYDSLNGTSMASPHVAGAAALILSKYPTLSASQVRNRLSSTATNLGDSFYYGKGLINVEAAAQ

SEQ ID NO: 65335 - protein, 274 aa, Bacillus licheniformis
AQTVPYGIPLIKADKVQAQGYKGANVKVGIIDTGIAASHTDLKVVGGASFVSGESYNTDGNGHGTHVAGTVAALDNTTGVLGVAPNVSLYAIKVLNSSGSGTYSAIVSGIEWATQNGLDVINMSLGGPSGSTALKQAVDKAYASGIVVVAAAGNSGSSGSQNTIGYPAKYDSVIAVGAVDSNKNRASFSSVGAELEVMAPGVSVYSTYPSNTYTSLNGTSMASPHVAGAAALILSKYPTLSASQVRNRLSSTATNLGDSFYYGKGLINVEAAAQ

SEQ ID NO: 65336 - protein, 274 aa, Synthetic construct
AQTVPYGIPLIKADKVQAQGYKGANVKVGIIDTGIAASHTDLKVVGGASFVSGESYNTDGNGHGTHVAGTVAALDNTTGVLGVAPNVSLYAIKVLNSSGSGTYSAIVSGIEWATQNGLDVINMSLGGPSGSTALKQAVDKAYASGIVVVAAAGNSGSSGSQNTIGYPAKYDSVIAVGAVDSNKNRASFSSVGAELEVMAPGVSVYSTYPSNTYTDLNGTSMASPHVAGAAALILSKYPTLSASQVRNRLSSTATNLGDSFYYGKGLINVEAAAQ

SEQ ID NO: 65337 - protein, 274 aa, Synthetic construct
AQTVPYGIPLIKADKVQAQGYKGANVKVGIIDTGIAASHTDLKVVGGASFVSGESYNTDGNGHGTHVAGTVAALDNTTGVLGVAPNVSLYAIKVLNSSGSGTYSAIVSGIEWATQNGLDVINMSLGGPSGSTALKQAVDKAYASGIVVVAAAGNSGSSGSENTIGYPAKYDSVIAVGAVDSNKNRASFSSVGAELEVMAPGVSVYSTYPSNTYTSLNGTSMASPHVAGAAALILSKYPTLSASQVRNRLSSTATNLGDSFYYGKGLINVEAAAQ

SEQ ID NO: 65338 - protein, 300 aa, Unidentified
LAEAAACPELRQLAQSDVYWDPIVSIEPDGVEEVFDLTVPGPHNFVANDIIAHNSGVKVAVLDTGISTHPDLNIRGGASFVPGEPSTQDGNGHGTHVAGTIAALNNSIGVLGVAPSAELYAVKVLGASGSGSVSSIAQGLEWAGNNGMHVANLSLGSPSPSATLEQAVNSATSRGVLVVAASGNSGAGSISYPARYANAMAVGATDQNNNRASFSQYGAGLDIVAPGVNVQSTYPGSTYASLNGTSMATPHVAGAAALVKQKNPSWSNVQIRNHLKNTATSLGSTNLYGSGLVNAEAATR

SEQ ID NO: 65339 - protein, 269 aa, Unidentified
AQSVPWGISRVQAQSAHNRGITGSGVKVAVLDTGISTHEDLNVRGGASFVAGEPGYQDGNGHGTHVAGTIAALNNNIGVLGVAPNAELYAVKVLGASGSGSISGIAQGLQWAGNNGMHIANMSLGTSAPSATLEQAVNAATSRGVLVIAASGNSGAGSVQYPARYANAMAVGATDQNNQRASFSQYGAGLDIVAPGVGVQSTYPGNRYASLSGTSMATPHVAGVAALVKQKNPSWSNVQVRNHLKNTATNLGNTNLYGSGLVNAEAATR

SEQ ID NO: 65340 - protein, 269 aa, Unidentified
AQSVPWGISRVQAQSAHNRGITGSGVKVAVLDTGISTHEDLNVRGGASFVAGEPGYQDGNGHGTHVAGTIAALDNSIGVLGVAPNAELYAVKVLGASGSGSISGIAQGLQWAGNNGMHIANMSLGTSAPSATLEQAVNAATSRGVLVIAASGNSGAGSVQYPARYANAMAVGATDQNNQRASFSQYGAGLDIVAPGVGVQSTYPGNRYASLSGTSMATPHVAGVAALVKQKNPSWSNVQVRNHLKNTATNLGNTNLYGSGLVNAEAATR

SEQ ID NO: 65341 - protein, 269 aa, Unidentified
AQSVPWGISRVQAQSAHNRGITGSGVKVAVLDTGISTHEDLNVRGGASFVAGEPGYQDGNGHGTHVSGTIAALDNNIGVLGVAPNAELYAVKVLGASGSGSISGIAQGLQWAGNNGMHIANMSLGTSAPSATLEQAVNAATSRGVLVIAASGNSGAGSVGYPARYANAMAVGATDQNNNRASFSQYGAGLDIVAPGVGVQSTYPGNRYASLNGTSMATPHVAGVAALVKQKNPSWSNVQVRNHLKNTATNLGPTNLYGSGLVNAEAATR

SEQ ID NO: 65342 - protein, 269 aa, Unidentified
AQSVPWGISRVQAQSAHNRGITGSGVKVAVLDTGISTHEDLNVRGGASFVAGEPGYQDGNGHGTHVAGTIAALDNSIGVLGVAPNAELYAVKVLGASGSGSISGIAQGLQWAGNNGMHIANMSLGTSAPSATLEQAVNAATSRGVLVIAASGNSGAGSVGYPARYANAMAVGATDQNNQRASFSQYGAGLDIVAPGVGVQSTYPGNRYASLSGTSMATPHVAGVAALVKQKNPSWSNVQVRNHLKNTATNLGPTNLYGSGLVNAEAATR

SEQ ID NO: 65343 - protein, 269 aa, Unidentified
AQSVPWGISRVQAQSAHNRGITGSGVKVAVLDTGISTHEDLNVRGGASFVAGEPGYQDGNGHGTHVSGTIAALNNNIGVLGVAPNAELYAVKVLGASGSGSISGIAQGLQWAGNNGMHIANMSLGTSAPSATLEQAVNAATSRGVLVIAASGNSGAGSVQYPARYANAMAVGATDQNNNRASFSQYGAGLDIVAPGVGVQSTYPGNRYASLSGTSMATPHVAGVAALVKQKNPSWSNVQVRNHLKNTATNLGNTNLYGSGLVNAEAATR

SEQ ID NO: 65344 - protein, 269 aa, Unidentified
AQVVPWGISRVQAQSAHNRGITGSGVKVAVLDTGISTHEDLNVRGGASFVAGEPGYQDGNGHGTHVAGTIAALDNNIGVLGVAPNAELYAVKVLGASGSGSISGIAQGLQWAGNNGMHIANMSLGTSAPSATLEQAVNAATSRGVLVIAASGNSGAGSVGYPARYANAMAVGATDQNNNRASFSQYGAGLDIVAPGVGVQSTYPGNRYASLNGTSMATPHVAGVAALVKQKNPSWSNVQVRNHLKNTATNLGNTNLYGSGLVNAEAATR

SEQ ID NO: 65345 - protein, 269 aa, Unidentified
AQVVPWGISRVQAQSAHNRGITGSGVKVAVLDTGISTHEDLNVRGGASFVAGEPGYQDGNGHGTHVSGTIAALDNSIGVLGVAPNAELYAVKVLGASGSGSISGIAQGLQWAGNNGMHIANMSLGTSAPSATLEQAVNAATSRGVLVIAASGNSGAGSVGYPARYANAMAVGATDQNNNRASFSQYGAGLDIVAPGVGVQSTYPGNRYASLNGTSMATPHVAGVAALVKQKNPSWSNVQVRNHLKNTATNLGPTNLYGSGLVNAEAATR

SEQ ID NO: 65346 - protein, 269 aa, Unidentified
AQSVPWGIERVQAQSAHNRGITGSGVKVAVLDTGISTHEDLNVRGGASFVAGEPGYQDGNGHGTHVAGTIAALNNNIGVLGVAPNAELYAVKVLGASGSGSISGIAQGLQWAGNNGMHIANMSLGTSAPSATLEQAVNAATSRGVLVIAASGNSGAGSVGYPARYANAMAVGATDQNNNRASFSQYGAGLDIVAPGVGVQSTYPGNRYASLSGTSMATPHVAGVAALVKQKNPSWSNVQVRNHLKNTATNLGPTNLYGSGLVNAEAATR

SEQ ID NO: 65347 - protein, 269 aa, Unidentified
AQSVPWGIERVQAQSAHNRGITGSGVKVAVLDTGISTHEDLNVRGGASFVAGEPGYQDGNGHGTHVSGTIAALDNSIGVLGVAPNAELYAVKVLGASGSGSISGIAQGLQWAGNNGMHIANMSLGTSAPSATLEQAVNAATSRGVLVIAASGNSGAGSVGYPARYANAMAVGATDQNNNRASFSQYGAGLDIVAPGVGVQSTYPGNRYASLNGTSMATPHVAGVAALVKQKNPSWSNVQVRNHLKNTATNLGNTNLYGSGLVNAEAATR

SEQ ID NO: 65348 - protein, 269 aa, Unidentified
AQSVPWGIERVQAQSAHNRGITGSGVKVAVLDTGISTHEDLNVRGGASFVAGEPGYQDGNGHGTHVAGTIAALDNNIGVLGVAPNAELYAVKVLGASGSGSISGIAQGLQWAGNNGMHIANMSLGTSAPSATLEQAVNAATSRGVLVIAASGNSGAGSVQYPARYANAMAVGATDQNNNRASFSQYGAGLDIVAPGVGVQSTYPGNRYASLNGTSMATPHVAGVAALVKQKNPSWSNVQVRNHLKNTATNLGNTNLYGSGLVNAEAATR

SEQ ID NO: 65349 - protein, 269 aa, Unidentified
AQSVPWGISRVQAQSAHNRGITGSGVKVAVLDTGISTHEDLNVRGGASFVAGEPGYQDGNGHGTHVAGTIAALDNNIGVLGVAPNAELYAVKVLGASGSGSISGIAQGLQWAGNNGMHIANMSLGTSAPSATLEQAVNAATSRGVLVIAASGNSGAGSVGYPARYANAMAVGATDQNNNRASFSQYGAGLDIVAPGVGVQSTYPGNRYASLSGTSMATPHVAGVAALVKQKNPSWSNVQVRNHLKNTATNLGNTNLYGSGLVNAEAATR

SEQ ID NO: 65350 - protein, 269 aa, Unidentified
AQVVPWGISRVQAQSAHNRGITGSGVKVAVLDTGISTHEDLNVRGGASFVAGEPGYQDGNGHGTHVAGTIAALNNNIGVLGVAPNAELYAVKVLGASGSGSISGIAQGLQWAGNNGMHIANMSLGTSAPSATLEQAVNAATSRGVLVIAASGNSGAGSVGYPARYANAMAVGATDQNNQRASFSQYGAGLDIVAPGVGVQSTYPGNRYASLNGTSMATPHVAGVAALVKQKNPSWSNVQVRNHLKNTATNLGNTNLYGSGLVNAEAATR

SEQ ID NO: 65351 - protein, 269 aa, Unidentified
AQSVPWGIERVQAQSAHNRGITGSGVKVAVLDTGISTHEDLNVRGGASFVAGEPGYQDGNGHGTHVSGTIAALNNNIGVLGVAPNAELYAVKVLGASGSGSISGIAQGLQWAGNNGMHIANMSLGTSAPSATLEQAVNAATSRGVLVIAASGNSGAGSVQYPARYANAMAVGATDQNNNRASFSQYGAGLDIVAPGVGVQSTYPGNRYASLNGTSMATPHVAGVAALVKQKNPSWSNVQVRNHLKNTATNLGNTNLYGSGLVNAEAATR

SEQ ID NO: 65352 - protein, 269 aa, Unidentified
AQSVPWGIERVQAQSAHNRGITGSGVKVAVLDTGISTHEDLNVRGGASFVAGEPGYQDGNGHGTHVAGTIAALDNSIGVLGVAPNAELYAVKVLGASGSGSISGIAQGLQWAGNNGMHIANMSLGTSAPSATLEQAVNAATSRGVLVIAASGNSGAGSVGYPARYANAMAVGATDQNNNRASFSQYGAGLDIVAPGVGVQSTYPGNRYASLSGTSMATPHVAGVAALVKQKNPSWSNVQVRNHLKNTATNLGNTNLYGSGLVNAEAATR

SEQ ID NO: 65353 - protein, 269 aa, Unidentified
AQVVPWGISRVQAQSAHNRGITGSGVKVAVLDTGISTHEDLNVRGGASFVAGEPGYQDGNGHGTHVAGTIAALDNSIGVLGVAPNAELYAVKVLGASGSGSISGIAQGLQWAGNNGMHIANMSLGTSAPSATLEQAVNAATSRGVLVIAASGNSGAGSVGYPARYANAMAVGATDQNNNRASFSQYGAGLDIVAPGVGVQSTYPGNRYASLSGTSMATPHVAGVAALVKQKNPSWSNVQVRNHLKNTATNLGNTNLYGSGLVNAEAATR

SEQ ID NO: 65354 - protein, 269 aa, Unidentified
AQVVPWGIERVQAQSAHNRGITGSGVKVAVLDTGISTHEDLNVRGGASFVAGEPGYQDGNGHGTHVSGTIAALNNSIGVLGVAPNAELYAVKVLGASGSGSISGIAQGLQWAGNNGMHIANMSLGTSAPSATLEQAVNAATSRGVLVIAASGNSGAGSVGYPARYANAMAVGATDQNNNRASFSQYGAGLDIVAPGVGVQSTYPGNRYASLNGTSMATPHVAGVAALVKQKNPSWSNVQVRNHLKNTATNLGNTNLYGSGLVNAEAATR

SEQ ID NO: 65355 - protein, 269 aa, Unidentified
AQSVPWGISRVQAQSAHNRGITGSGVKVAVLDTGISTHEDLNVRGGASFVAGEPGYQDGNGHGTHVAGTIAALDNNIGVLGVAPNAELYAVKVLGASGSGSISGIAQGLQWAGNNGMHIANMSLGTSAPSATLEQAVNAATSRGVLVIAASGNSGAGSVQYPARYANAMAVGATDQNNQRASFSQYGAGLDIVAPGVGVQSTYPGNRYASLNGTSMATPHVAGVAALVKQKNPSWSNVQVRNHLKNTATNLGNTNLYGSGLVNAEAATR

SEQ ID NO: 65356 - protein, 269 aa, Unidentified
AQSVPWGISRVQAQSAHNRGITGSGVKVAVLDTGISTHEDLNVRGGASFVAGEPGYQDGNGHGTHVSGTIAALNNNIGVLGVAPNAELYAVKVLGASGSGSISGIAQGLQWAGNNGMHIANMSLGTSAPSATLEQAVNAATSRGVLVIAASGNSGAGSVGYPARYANAMAVGATDQNNQRASFSQYGAGLDIVAPGVGVQSTYPGNRYASLNGTSMATPHVAGVAALVKQKNPSWSNVQVRNHLKNTATNLGNTNLYGSGLVNAEAATR

SEQ ID NO: 65357 - protein, 269 aa, Unidentified
AQVVPWGISRVQAQSAHNRGITGSGVKVAVLDTGISTHEDLNVRGGASFVAGEPGYQDGNGHGTHVAGTIAALNNNIGVLGVAPNAELYAVKVLGASGSGSISGIAQGLQWAGNNGMHIANMSLGTSAPSATLEQAVNAATSRGVLVIAASGNSGAGSVGYPARYANAMAVGATDQNNNRASFSQYGAGLDIVAPGVGVQSTYPGNRYASLSGTSMATPHVAGVAALVKQKNPSWSNVQVRNHLKNTATNLGNTNLYGSGLVNAEAATR

SEQ ID NO: 65358 - protein, 269 aa, Unidentified
AQVVPWGISRVQAQSAHNRGITGSGVKVAVLDTGISTHEDLNVRGGASFVAGEPGYQDGNGHGTHVSGTIAALNNNIGVLGVAPNAELYAVKVLGASGSGSISGIAQGLQWAGNNGMHIANMSLGTSAPSATLEQAVNAATSRGVLVIAASGNSGAGSVGYPARYANAMAVGATDQNNNRASFSQYGAGLDIVAPGVGVQSTYPGNRYASLNGTSMATPHVAGVAALVKQKNPSWSNVQVRNHLKNTATNLGNTNLYGSGLVNAEAATR

SEQ ID NO: 65359 - protein, 269 aa, Unidentified
AQSVPWGIERVQAQSAHNRGITGSGVKVAVLDTGISTHEDLNVRGGASFVAGEPGYQDGNGHGTHVAGTIAALDNSIGVLGVAPNAELYAVKVLGASGSGSISGIAQGLQWAGNNGMHIANMSLGTSAPSATLEQAVNAATSRGVLVIAASGNSGAGSVGYPARYANAMAVGATDQNNNRASFSQYGAGLDIVAPGVGVQSTYPGNRYASLSGTSMATPHVAGVAALVKQKNPSWSNVQVRNHLKNTATNLGPTNLYGSGLVNAEAATR

SEQ ID NO: 65360 - protein, 269 aa, Unidentified
AQSVPWGISRVQAQSAHNRGITGSGVKVAVLDTGISTHEDLNVRGGASFVAGEPGYQDGNGHGTHVAGTIAALDNNIGVLGVAPNAELYAVKVLGASGSGSISGIAQGLQWAGNNGMHIANMSLGTSAPSATLEQAVNAATSRGVLVIAASGNSGAGSVGYPARYANAMAVGATDQNNQRASFSQYGAGLDIVAPGVGVQSTYPGNRYASLNGTSMATPHVAGVAALVKQKNPSWSNVQVRNHLKNTATNLGNTNLYGSGLVNAEAATR

SEQ ID NO: 65361 - protein, 269 aa, Unidentified
AQVVPWGIERVQAQSAHNRGITGSGVKVAVLDTGISTHEDLNVRGGASFVAGEPGYQDGNGHGTHVAGTIAALDNSIGVLGVAPNAELYAVKVLGASGSGSISGIAQGLQWAGNNGMHIANMSLGTSAPSATLEQAVNAATSRGVLVIAASGNSGAGSVGYPARYANAMAVGATDQNNNRASFSQYGAGLDIVAPGVGVQSTYPGNRYASLNGTSMATPHVAGVAALVKQKNPSWSNVQVRNHLKNTATNLGNTNLYGSGLVNAEAATR

SEQ ID NO: 65362 - protein, 269 aa, Unidentified
AQSVPWGISRVQAQSAHNRGITGSGVKVAVLDTGISTHEDLNVRGGASFVAGEPGYQDGNGHGTHVAGTIAALDNSIGVLGVAPNAELYAVKVLGASGSGSISGIAQGLQWAGNNGMHIANMSLGTSAPSATLEQAVNAATSRGVLVIAASGNSGAGSVGYPARYANAMAVGATDQNNQRASFSQYGAGLDIVAPGVGVQSTYPGNRYASLSGTSMATPHVAGVAALVKQKNPSWSNVQVRNHLKNTATNLGNTNLYGSGLVNAEAATR

SEQ ID NO: 65363 - protein, 269 aa, Unidentified
AQSVPWGISRVQAQSAHNRGITGSGVKVAVLDTGISTHEDLNVRGGASFVAGEPGYQDGNGHGTHVSGTIAALNNNIGVLGVAPNAELYAVKVLGASGSGSISGIAQGLQWAGNNGMHIANMSLGTSAPSATLEQAVNAATSRGVLVIAASGNSGAGSVGYPARYANAMAVGATDQNNNRASFSQYGAGLDIVAPGVGVQSTYPGNRYASLSGTSMATPHVAGVAALVKQKNPSWSNVQVRNHLKNTATNLGNTNLYGSGLVNAEAATR

SEQ ID NO: 65364 - protein, 269 aa, Unidentified
AQVVPWGIERVQAQSAHNRGITGSGVKVAVLDTGISTHEDLNVRGGASFVAGEPGYQDGNGHGTHVAGTIAALNNNIGVLGVAPNAELYAVKVLGASGSGSISGIAQGLQWAGNNGMHIANMSLGTSAPSATLEQAVNAATSRGVLVIAASGNSGAGSVGYPARYANAMAVGATDQNNNRASFSQYGAGLDIVAPGVGVQSTYPGNRYASLNGTSMATPHVAGVAALVKQKNPSWSNVQVRNHLKNTATNLGNTNLYGSGLVNAEAATR

SEQ ID NO: 65365 - protein, 269 aa, Unidentified
AQVVPWGISRVQAQSAHNRGITGSGVKVAVLDTGISTHEDLNVRGGASFVAGEPGYQDGNGHGTHVAGTIAALNNNIGVLGVAPNAELYAVKVLGASGSGSISGIAQGLQWAGNNGMHIANMSLGTSAPSATLEQAVNAATSRGVLVIAASGNSGAGSVGYPARYANAMAVGATDQNNQRASFSQYGAGLDIVAPGVGVQSTYPGNRYASLNGTSMATPHVAGVAALVKQKNPSWSNVQVRNHLKNTATNLGPTNLYGSGLVNAEAATR

SEQ ID NO: 65366 - protein, 269 aa, Unidentified
AQVVPWGISRVQAQSAHNRGITGSGVKVAVLDTGISTHEDLNVRGGASFVAGEPGYQDGNGHGTHVSGTIAALNNSIGVLGVAPNAELYAVKVLGASGSGSISGIAQGLQWAGNNGMHIANMSLGTSAPSATLEQAVNAATSRGVLVIAASGNSGAGSVGYPARYANAMAVGATDQNNNRASFSQYGAGLDIVAPGVGVQSTYPGNRYASLSGTSMATPHVAGVAALVKQKNPSWSNVQVRNHLKNTATNLGNTNLYGSGLVNAEAATR

SEQ ID NO: 65367 - protein, 269 aa, Unidentified
AQVVPWGISRVQAQSAHNRGITGSGVKVAVLDTGISTHEDLNVRGGASFVAGEPGYQDGNGHGTHVAGTIAALNNSIGVLGVAPNAELYAVKVLGASGSGSISGIAQGLQWAGNNGMHIANMSLGTSAPSATLEQAVNAATSRGVLVIAASGNSGAGSVGYPARYANAMAVGATDQNNQRASFSQYGAGLDIVAPGVGVQSTYPGNRYASLSGTSMATPHVAGVAALVKQKNPSWSNVQVRNHLKNTATNLGPTNLYGSGLVNAEAATR

SEQ ID NO: 65368 - protein, 269 aa, Unidentified
AQSVPWGISRVQAQSAHNRGITGSGVKVAVLDTGISTHEDLNVRGGASFVAGEPGYQDGNGHGTHVSGTIAALNNNIGVLGVAPNAELYAVKVLGASGSGSISGIAQGLQWAGNNGMHIANMSLGTSAPSATLEQAVNAATSRGVLVIAASGNSGAGSVGYPARYANAMAVGATDQNNQRASFSQYGAGLDIVAPGVGVQSTYPGNRYASLNGTSMATPHVAGVAALVKQKNPSWSNVQVRNHLKNTATNLGPTNLYGSGLVNAEAATR

SEQ ID NO: 65369 - protein, 269 aa, Unidentified
AQVVPWGISRVQAQSAHNRGITGSGVKVAVLDTGISTHEDLNVRGGASFVAGEPGYQDGNGHGTHVSGTIAALNNSIGVLGVAPNAELYAVKVLGASGSGSISGIAQGLQWAGNNGMHIANMSLGTSAPSATLEQAVNAATSRGVLVIAASGNSGAGSVGYPARYANAMAVGATDQNNQRASFSQYGAGLDIVAPGVGVQSTYPGNRYASLNGTSMATPHVAGVAALVKQKNPSWSNVQVRNHLKNTATNLGPTNLYGSGLVNAEAATR

SEQ ID NO: 65370 - protein, 269 aa, Unidentified
AQSVPWGIERVQAQSAHNRGITGSGVKVAVLDTGISTHEDLNVRGGASFVAGEPGYQDGNGHGTHVSGTIAALNNSIGVLGVAPNAELYAVKVLGASGSGSISGIAQGLQWAGNNGMHIANMSLGTSAPSATLEQAVNAATSRGVLVIAASGNSGAGSVGYPARYANAMAVGATDQNNNRASFSQYGAGLDIVAPGVGVQSTYPGNRYASLSGTSMATPHVAGVAALVKQKNPSWSNVQVRNHLKNTATNLGPTNLYGSGLVNAEAATR

SEQ ID NO: 65371 - protein, 269 aa, Unidentified
AQVVPWGISRVQAQSAHNRGITGSGVKVAVLDTGISTHEDLNVRGGASFVAGEPGYQDGNGHGTHVAGTIAALNNSIGVLGVAPNAELYAVKVLGASGSGSISGIAQGLQWAGNNGMHIANMSLGTSAPSATLEQAVNAATSRGVLVIAASGNSGAGSVQYPARYANAMAVGATDQNNQRASFSQYGAGLDIVAPGVGVQSTYPGNRYASLSGTSMATPHVAGVAALVKQKNPSWSNVQVRNHLKNTATNLGNTNLYGSGLVNAEAATR

SEQ ID NO: 65372 - protein, 269 aa, Unidentified
AQVVPWGISRVQAQSAHNRGITGSGVKVAVLDTGISTHEDLNVRGGASFVAGEPGYQDGNGHGTHVAGTIAALDNSIGVLGVAPNAELYAVKVLGASGSGSISGIAQGLQWAGNNGMHIANMSLGTSAPSATLEQAVNAATSRGVLVIAASGNSGAGSVGYPARYANAMAVGATDQNNQRASFSQYGAGLDIVAPGVGVQSTYPGNRYASLNGTSMATPHVAGVAALVKQKNPSWSNVQVRNHLKNTATNLGNTNLYGSGLVNAEAATR

SEQ ID NO: 65373 - protein, 269 aa, Unidentified
AQSVPWGISRVQAQSAHNRGITGSGVKVAVLDTGISTHEDLNVRGGASFVAGEPGYQDGNGHGTHVAGTIAALNNNIGVLGVAPNAELYAVKVLGASGSGSISGIAQGLQWAGNNGMHIANMSLGTSAPSATLEQAVNAATSRGVLVIAASGNSGAGSVGYPARYANAMAVGATDQNNQRASFSQYGAGLDIVAPGVGVQSTYPGNRYASLSGTSMATPHVAGVAALVKQKNPSWSNVQVRNHLKNTATNLGNTNLYGSGLVNAEAATR

SEQ ID NO: 65374 - protein, 269 aa, Unidentified
AQSVPWGIERVQAQSAHNRGITGSGVKVAVLDTGISTHEDLNVRGGASFVAGEPGYQDGNGHGTHVSGTIAALNNNIGVLGVAPNAELYAVKVLGASGSGSISGIAQGLQWAGNNGMHIANMSLGTSAPSATLEQAVNAATSRGVLVIAASGNSGAGSVGYPARYANAMAVGATDQNNNRASFSQYGAGLDIVAPGVGVQSTYPGNRYASLNGTSMATPHVAGVAALVKQKNPSWSNVQVRNHLKNTATNLGNTNLYGSGLVNAEAATR

SEQ ID NO: 65375 - protein, 269 aa, Unidentified
AQSVPWGISRVQAQSAHNRGITGSGVKVAVLDTGISTHEDLNVRGGASFVAGEPGYQDGNGHGTHVSGTIAALNNSIGVLGVAPNAELYAVKVLGASGSGSISGIAQGLQWAGNNGMHIANMSLGTSAPSATLEQAVNAATSRGVLVIAASGNSGAGSVGYPARYANAMAVGATDQNNQRASFSQYGAGLDIVAPGVGVQSTYPGNRYASLSGTSMATPHVAGVAALVKQKNPSWSNVQVRNHLKNTATNLGNTNLYGSGLVNAEAATR

SEQ ID NO: 65376 - protein, 269 aa, Unidentified
AQSVPWGISRVQAQSAHNRGITGSGVKVAVLDTGISTHEDLNVRGGASFVAGEPGYQDGNGHGTHVAGTIAALDNNIGVLGVAPNAELYAVKVLGASGSGSISGIAQGLQWAGNNGMHIANMSLGTSAPSATLEQAVNAATSRGVLVIAASGNSGAGSVQYPARYANAMAVGATDQNNNRASFSQYGAGLDIVAPGVGVQSTYPGNRYASLSGTSMATPHVAGVAALVKQKNPSWSNVQVRNHLKNTATNLGNTNLYGSGLVNAEAATR

SEQ ID NO: 65377 - protein, 269 aa, Unidentified
AQVVPWGISRVQAQSAHNRGITGSGVKVAVLDTGISTHEDLNVRGGASFVAGEPGYQDGNGHGTHVSGTIAALDNSIGVLGVAPNAELYAVKVLGASGSGSISGIAQGLQWAGNNGMHIANMSLGTSAPSATLEQAVNAATSRGVLVIAASGNSGAGSVGYPARYANAMAVGATDQNNNRASFSQYGAGLDIVAPGVGVQSTYPGNRYASLNGTSMATPHVAGVAALVKQKNPSWSNVQVRNHLKNTATNLGNTNLYGSGLVNAEAATR

SEQ ID NO: 65378 - protein, 269 aa, Unidentified
AQVVPWGIERVQAQSAHNRGITGSGVKVAVLDTGISTHEDLNVRGGASFVAGEPGYQDGNGHGTHVAGTIAALNNSIGVLGVAPNAELYAVKVLGASGSGSISGIAQGLQWAGNNGMHIANMSLGTSAPSATLEQAVNAATSRGVLVIAASGNSGAGSVGYPARYANAMAVGATDQNNQRASFSQYGAGLDIVAPGVGVQSTYPGNRYASLNGTSMATPHVAGVAALVKQKNPSWSNVQVRNHLKNTATNLGNTNLYGSGLVNAEAATR

SEQ ID NO: 65379 - protein, 269 aa, Unidentified
AQSVPWGISRVQAQSAHNRGITGSGVKVAVLDTGISTHEDLNVRGGASFVAGEPGYQDGNGHGTHVSGTIAALDNNIGVLGVAPNAELYAVKVLGASGSGSISGIAQGLQWAGNNGMHIANMSLGTSAPSATLEQAVNAATSRGVLVIAASGNSGAGSVGYPARYANAMAVGATDQNNNRASFSQYGAGLDIVAPGVGVQSTYPGNRYASLNGTSMATPHVAGVAALVKQKNPSWSNVQVRNHLKNTATNLGNTNLYGSGLVNAEAATR

SEQ ID NO: 65380 - protein, 269 aa, Unidentified
AQSVPWGIERVQAQSAHNRGITGSGVKVAVLDTGISTHEDLNVRGGASFVAGEPGYQDGNGHGTHVAGTIAALNNNIGVLGVAPNAELYAVKVLGASGSGSISGIAQGLQWAGNNGMHIANMSLGTSAPSATLEQAVNAATSRGVLVIAASGNSGAGSVGYPARYANAMAVGATDQNNQRASFSQYGAGLDIVAPGVGVQSTYPGNRYASLNGTSMATPHVAGVAALVKQKNPSWSNVQVRNHLKNTATNLGNTNLYGSGLVNAEAATR

SEQ ID NO: 65381 - protein, 269 aa, Unidentified
AQVVPWGIERVQAQSAHNRGITGSGVKVAVLDTGISTHEDLNVRGGASFVAGEPGYQDGNGHGTHVAGTIAALNNSIGVLGVAPNAELYAVKVLGASGSGSISGIAQGLQWAGNNGMHIANMSLGTSAPSATLEQAVNAATSRGVLVIAASGNSGAGSVGYPARYANAMAVGATDQNNNRASFSQYGAGLDIVAPGVGVQSTYPGNRYASLSGTSMATPHVAGVAALVKQKNPSWSNVQVRNHLKNTATNLGPTNLYGSGLVNAEAATR

SEQ ID NO: 65382 - protein, 269 aa, Unidentified
AQSVPWGIERVQAQSAHNRGITGSGVKVAVLDTGISTHEDLNVRGGASFVAGEPGYQDGNGHGTHVAGTIAALDNNIGVLGVAPNAELYAVKVLGASGSGSISGIAQGLQWAGNNGMHIANMSLGTSAPSATLEQAVNAATSRGVLVIAASGNSGAGSVGYPARYANAMAVGATDQNNNRASFSQYGAGLDIVAPGVGVQSTYPGNRYASLNGTSMATPHVAGVAALVKQKNPSWSNVQVRNHLKNTATNLGNTNLYGSGLVNAEAATR

SEQ ID NO: 65383 - protein, 269 aa, Unidentified
AQVVPWGISRVQAQSAHNRGITGSGVKVAVLDTGISTHEDLNVRGGASFVAGEPGYQDGNGHGTHVSGTIAALNNSIGVLGVAPNAELYAVKVLGASGSGSISGIAQGLQWAGNNGMHIANMSLGTSAPSATLEQAVNAATSRGVLVIAASGNSGAGSVGYPARYANAMAVGATDQNNQRASFSQYGAGLDIVAPGVGVQSTYPGNRYASLNGTSMATPHVAGVAALVKQKNPSWSNVQVRNHLKNTATNLGNTNLYGSGLVNAEAATR

SEQ ID NO: 65384 - protein, 269 aa, Unidentified
AQVVPWGISRVQAQSAHNRGITGSGVKVAVLDTGISTHEDLNVRGGASFVAGEPGYQDGNGHGTHVAGTIAALNNSIGVLGVAPNAELYAVKVLGASGSGSISGIAQGLQWAGNNGMHIANMSLGTSAPSATLEQAVNAATSRGVLVIAASGNSGAGSVGYPARYANAMAVGATDQNNQRASFSQYGAGLDIVAPGVGVQSTYPGNRYASLSGTSMATPHVAGVAALVKQKNPSWSNVQVRNHLKNTATNLGNTNLYGSGLVNAEAATR

SEQ ID NO: 65385 - protein, 269 aa, Unidentified
AQVVPWGIERVQAQSAHNRGITGSGVKVAVLDTGISTHEDLNVRGGASFVAGEPGYQDGNGHGTHVAGTIAALNNSIGVLGVAPNAELYAVKVLGASGSGSISGIAQGLQWAGNNGMHIANMSLGTSAPSATLEQAVNAATSRGVLVIAASGNSGAGSVGYPARYANAMAVGATDQNNNRASFSQYGAGLDIVAPGVGVQSTYPGNRYASLSGTSMATPHVAGVAALVKQKNPSWSNVQVRNHLKNTATNLGNTNLYGSGLVNAEAATR

SEQ ID NO: 65386 - protein, 269 aa, Unidentified
AQVVPWGISRVQAQSAHNRGITGSGVKVAVLDTGISTHEDLNVRGGASFVAGEPGYQDGNGHGTHVSGTIAALNNSIGVLGVAPNAELYAVKVLGASGSGSISGIAQGLQWAGNNGMHIANMSLGTSAPSATLEQAVNAATSRGVLVIAASGNSGAGSVGYPARYANAMAVGATDQNNNRASFSQYGAGLDIVAPGVGVQSTYPGNRYASLSGTSMATPHVAGVAALVKQKNPSWSNVQVRNHLKNTATNLGPTNLYGSGLVNAEAATR

SEQ ID NO: 65387 - protein, 269 aa, Unidentified
AQSVPWGIERVQAQSAHNRGITGSGVKVAVLDTGISTHEDLNVRGGASFVAGEPGYQDGNGHGTHVAGTIAALNNNIGVLGVAPNAELYAVKVLGASGSGSISGIAQGLQWAGNNGMHIANMSLGTSAPSATLEQAVNAATSRGVLVIAASGNSGAGSVGYPARYANAMAVGATDQNNNRASFSQYGAGLDIVAPGVGVQSTYPGNRYASLSGTSMATPHVAGVAALVKQKNPSWSNVQVRNHLKNTATNLGNTNLYGSGLVNAEAATR

SEQ ID NO: 65388 - protein, 269 aa, Unidentified
AQSVPWGIERVQAQSAHNRGITGSGVKVAVLDTGISTHEDLNVRGGASFVAGEPGYQDGNGHGTHVAGTIAALNNSIGVLGVAPNAELYAVKVLGASGSGSISGIAQGLQWAGNNGMHIANMSLGTSAPSATLEQAVNAATSRGVLVIAASGNSGAGSVGYPARYANAMAVGATDQNNQRASFSQYGAGLDIVAPGVGVQSTYPGNRYASLSGTSMATPHVAGVAALVKQKNPSWSNVQVRNHLKNTATNLGNTNLYGSGLVNAEAATR

SEQ ID NO: 65389 - protein, 269 aa, Unidentified
AQSVPWGIERVQAQSAHNRGITGSGVKVAVLDTGISTHEDLNVRGGASFVAGEPGYQDGNGHGTHVAGTIAALDNSIGVLGVAPNAELYAVKVLGASGSGSISGIAQGLQWAGNNGMHIANMSLGTSAPSATLEQAVNAATSRGVLVIAASGNSGAGSVGYPARYANAMAVGATDQNNQRASFSQYGAGLDIVAPGVGVQSTYPGNRYASLNGTSMATPHVAGVAALVKQKNPSWSNVQVRNHLKNTATNLGNTNLYGSGLVNAEAATR

SEQ ID NO: 65390 - protein, 269 aa, Unidentified
AQSVPWGISRVQAQSAHNRGITGSGVKVAVLDTGISTHEDLNVRGGASFVAGEPGYQDGNGHGTHVAGTIAALDNNIGVLGVAPNAELYAVKVLGASGSGSISGIAQGLQWAGNNGMHIANMSLGTSAPSATLEQAVNAATSRGVLVIAASGNSGAGSVGYPARYANAMAVGATDQNNNRASFSQYGAGLDIVAPGVGVQSTYPGNRYASLSGTSMATPHVAGVAALVKQKNPSWSNVQVRNHLKNTATNLGPTNLYGSGLVNAEAATR

SEQ ID NO: 65391 - protein, 269 aa, Unidentified
AQSVPWGISRVQAQSAHNRGITGSGVKVAVLDTGISTHEDLNVRGGASFVAGEPGYQDGNGHGTHVSGTIAALDNSIGVLGVAPNAELYAVKVLGASGSGSISGIAQGLQWAGNNGMHIANMSLGTSAPSATLEQAVNAATSRGVLVIAASGNSGAGSVGYPARYANAMAVGATDQNNQRASFSQYGAGLDIVAPGVGVQSTYPGNRYASLNGTSMATPHVAGVAALVKQKNPSWSNVQVRNHLKNTATNLGPTNLYGSGLVNAEAATR

SEQ ID NO: 65392 - protein, 269 aa, Unidentified
AQSVPWGISRVQAQSAHNRGITGSGVKVAVLDTGISTHEDLNVRGGASFVAGEPGYQDGNGHGTHVSGTIAALDNSIGVLGVAPNAELYAVKVLGASGSGSISGIAQGLQWAGNNGMHIANMSLGTSAPSATLEQAVNAATSRGVLVIAASGNSGAGSVGYPARYANAMAVGATDQNNQRASFSQYGAGLDIVAPGVGVQSTYPGNRYASLNGTSMATPHVAGVAALVKQKNPSWSNVQVRNHLKNTATNLGNTNLYGSGLVNAEAATR

SEQ ID NO: 65393 - protein, 269 aa, Unidentified
AQSVPWGIERVQAQSAHNRGITGSGVKVAVLDTGISTHEDLNVRGGASFVAGEPGYQDGNGHGTHVSGTIAALNNSIGVLGVAPNAELYAVKVLGASGSGSISGIAQGLQWAGNNGMHIANMSLGTSAPSATLEQAVNAATSRGVLVIAASGNSGAGSVQYPARYANAMAVGATDQNNNRASFSQYGAGLDIVAPGVGVQSTYPGNRYASLSGTSMATPHVAGVAALVKQKNPSWSNVQVRNHLKNTATNLGNTNLYGSGLVNAEAATR

SEQ ID NO: 65394 - protein, 269 aa, Unidentified
AQSVPWGISRVQAQSAHNRGITGSGVKVAVLDTGISTHEDLNVRGGASFVAGEPGYQDGNGHGTHVSGTIAALNNSIGVLGVAPNAELYAVKVLGASGSGSISGIAQGLQWAGNNGMHIANMSLGTSAPSATLEQAVNAATSRGVLVIAASGNSGAGSVGYPARYANAMAVGATDQNNQRASFSQYGAGLDIVAPGVGVQSTYPGNRYASLSGTSMATPHVAGVAALVKQKNPSWSNVQVRNHLKNTATNLGPTNLYGSGLVNAEAATR

SEQ ID NO: 65395 - protein, 269 aa, Unidentified
AQSVPWGISRVQAQSAHNRGITGSGVKVAVLDTGISTHEDLNVRGGASFVAGEPGYQDGNGHGTHVSGTIAALNNNIGVLGVAPNAELYAVKVLGASGSGSISGIAQGLQWAGNNGMHIANMSLGTSAPSATLEQAVNAATSRGVLVIAASGNSGAGSVGYPARYANAMAVGATDQNNNRASFSQYGAGLDIVAPGVGVQSTYPGNRYASLSGTSMATPHVAGVAALVKQKNPSWSNVQVRNHLKNTATNLGPTNLYGSGLVNAEAATR

SEQ ID NO: 65396 - protein, 269 aa, Unidentified
AQSVPWGIERVQAQSAHNRGITGSGVKVAVLDTGISTHEDLNVRGGASFVAGEPGYQDGNGHGTHVAGTIAALNNSIGVLGVAPNAELYAVKVLGASGSGSISGIAQGLQWAGNNGMHIANMSLGTSAPSATLEQAVNAATSRGVLVIAASGNSGAGSVQYPARYANAMAVGATDQNNQRASFSQYGAGLDIVAPGVGVQSTYPGNRYASLSGTSMATPHVAGVAALVKQKNPSWSNVQVRNHLKNTATNLGNTNLYGSGLVNAEAATR

SEQ ID NO: 65397 - protein, 269 aa, Unidentified
AQVVPWGISRVQAQSAHNRGITGSGVKVAVLDTGISTHEDLNVRGGASFVAGEPGYQDGNGHGTHVAGTIAALDNSIGVLGVAPNAELYAVKVLGASGSGSISGIAQGLQWAGNNGMHIANMSLGTSAPSATLEQAVNAATSRGVLVIAASGNSGAGSVGYPARYANAMAVGATDQNNNRASFSQYGAGLDIVAPGVGVQSTYPGNRYASLSGTSMATPHVAGVAALVKQKNPSWSNVQVRNHLKNTATNLGPTNLYGSGLVNAEAATR

SEQ ID NO: 65398 - protein, 269 aa, Unidentified
AQSVPWGISRVQAQSAHNRGITGSGVKVAVLDTGISTHEDLNVRGGASFVAGEPGYQDGNGHGTHVSGTIAALDNSIGVLGVAPNAELYAVKVLGASGSGSISGIAQGLQWAGNNGMHIANMSLGTSAPSATLEQAVNAATSRGVLVIAASGNSGAGSVGYPARYANAMAVGATDQNNNRASFSQYGAGLDIVAPGVGVQSTYPGNRYASLSGTSMATPHVAGVAALVKQKNPSWSNVQVRNHLKNTATNLGNTNLYGSGLVNAEAATR

SEQ ID NO: 65399 - protein, 246 aa, Unidentified
AQSVPWGISRVQAPAAHNRGLTGSGVKVAVLDTGISTHPDLNIRGGASFVPGEPSTQDGNGHGTHVAGTIAALNNSIGVLGVAPSAELYAVKVLGASGSGSVSSIAQGLEWAGNNGMHVANLSLGSPSPSATLEQAVNSATSRGVLVVAASGNSGAGSISYPARYANAMAVGATDQNNNRASFSQYGAGLDIVAPGVNVQSTYPGCLTADTYVWTDRGLETVAEVFGRAGLPLSSTSRVTDVRDRD

SEQ ID NO: 65400 - protein, 297 aa, Unidentified
EDVKRMLHLIEGLEVVKEINVTNEPKTFYDLTVERYQNYLAGENGMVFVHNSGVKVAVLDTGISTHPDLNIRGGASFVPGEPSTQDGNGHGTHVAGTIAALNNSIGVLGVAPSAELYAVKVLGASGSGSVSSIAQGLEWAGNNGMHVANLSLGSPSPSATLEQAVNSATSRGVLVVAASGNSGAGSISYPARYANAMAVGATDQNNNRASFSQYGAGLDIVAPGVNVQSTYPGSTYASLNGTSMATPHVAGAAALVKQKNPSWSNVQIRNHLKNTATSLGSTNLYGSGLVNAEAATR

SEQ ID NO: 65401 - protein, 234 aa, Unidentified
AQSVPWGISRVQAPAAHNRGLTGSGVKVAVLDTGISTHPDLNIRGGASFVPGEPSTQDGNGHGTHVAGTIAALNNSIGVLGVAPSAELYAVKVLGASGSGSVSSIAQGLEWAGNNGMHVANLSLGSPSPSATLEQAVNSATSRGVLVVAASGNSGAGSISYPARYANAMAVGATDQNNNRASFSQYGAGLDIVAPGVNVQAFAKGTNVLMADGSIECIENIEVGNKVMGKDGRP

SEQ ID NO: 65402 - protein, 234 aa, Unidentified
AQSVPWGISRVQAPAAHNRGLTGSGVKVAVLDTGISTHPDLNIRGGASFVPGEPSTQDGNGHGTHVAGTIAALNNSIGVLGVAPSAELYAVKVLGASGSGSVSSIAQGLEWAGNNGMHVANLSLGSPSPSATLEQAVNSATSRGVLVVAASGNSGAGSISYPARYANAMAVGATDQNNNRASFSQYGAGLDIVAPGVNVQCFAKGTNVLMADGSIECIENIEVGNKVMGKDGRP

SEQ ID NO: 65403 - protein, 274 aa, Synthetic construct
AQTVPYGIPLIKADKVQAQGYKGANVKVGIIDTGIAASHTDLKVVGGASFVSGESYNTDGNGHGTHVAGTVAALDNTTGVLGVAPNVSLYAIKVLNSSGSGTYSAIVSGIEWATQNGLDVINMSLGGPSGSTALKQAVDKAYASGIVVVAAAGNSGSSGSQNTIGYPAKYDSVIAVGAVDSNKNRASDSSVGAELEVMAPGVSVYSTYPSNTYTSLNGTSMASPHVAGAAALILSKYPTLSASQVRNRLSSTATNLGDSFYYGKGLINVEAAAQ

SEQ ID NO: 65404 - protein, 274 aa, Synthetic construct
AQTVPYGIPLIKADKVQAQGYKGANVKVGIIDTGIAASHTDLKVVGGASFVSGESYNTDGNGHGTHVAGTVAALDNTTGVLGVAPNVSLYAIKVLNSSGSGTYSAIVSGIEWATQNGLDVINMSLGNPSGSTALKQAVDKAYASGIVVVAAAGNSGSSGSQNTIGYPAKYDSVIAVGAVDSNKNRASFSSVGAELEVMAPGVSVYSTYPSNTYTSLNGTSMASPHVAGAAALILSKYPTLSASQVRNRLSSTATNLGDSFYYGKGLINVEAAAQ

SEQ ID NO: 65405 - protein, 274 aa, Bacillus subtilis
AQTVPYGIPLIKADKVQAQGYKGANVKVGIIDTGIAASHTDLKVVGGASFVSGESYNTDGNGHGTHVAGTVAALDNTTGVLGVAPNVSLYIAKVLNSSGSGTYSAIVSGIEWATQNGLDVINMSLGGPSGSTALKQAVDKAYASGIVVVAAAGNSGSSGSQNTIGYPAKYDSVIAVGAVDSNKNRASFSSVGAELEVMAPGVSVYSTYPSNTYTSLNGTSMASPHVAGAAALILSKYPTLSASQVRNRLSSTATNLGDSFYYGKGLINVEAAAQ

SEQ ID NO: 65406 - protein, 274 aa, Synthetic construct
AQTVPYGIPLIKADKVQAQGYKGANVKVGIIDTGIAASHTDLKVVGGASFVSGESYNTDGNGHGTHVAGTVAALDNTTGVLGVAPNVSLYAIKVLNSSGSGTYSAIVSGIEWATQNGLDVINMSLGGPSGSTALKQAVDKAYASGIVVVAAAGNSGSSGSQNTIGYPAKYDSVIAVGAVDSNKNRASFSSVGAELEVMAPGVSVYSTYPSNTYTSNNGTSMASPHVAGAAALILSKYPTLSASQVRNRLSSTATNLGDSFYYGKGLINVEAAAQ

SEQ ID NO: 65407 - protein, 274 aa, Synthetic construct
AQTVPYGIPLIKADKVQAQGYKGANVKVGIIDTGIAASHTDLKVVGGASFVSGESYNTDNNGHGTHVAGTVAALDNTTGVLGVAPNVSLYAIKVLNSSGSGTYSAIVSGIEWATQNGLDVINMSLGGPSGSTALKQAVDKAYASGIVVVAAAGNSGSSGSQNTIGYPAKYDSVIAVGAVDSNKNRASFSSVGAELEVMAPGVSVYSTYPSNTYTSLNGTSMASPHVAGAAALILSKYPTLSASQVRNRLSSTATNLGDSFYYGKGLINVEAAAQ

SEQ ID NO: 65408 - protein, 274 aa, Bacillus sp.
AQTVPYGIPLIKADKVQAQGYKGANVKVGIIDTGIAASHTDLKVVGGASFVSGESYNTDGNGHGTHVAGTVAALDNTTGVLGVAPNVSLYAIKVLNSSGSGTYSAIVSGIEWATQNGLDVINMSLGGPSGSTALKQAVDKAYASGIVVVAAAGNSGSSGSQNTIGYPAKYDSVIAVGAVDSNKNRASFSSVGSELEVMAPGVSVYSTYPSNTYTSLNGTSMASPHVAGAAALILSKYPTLSASQVRNRLSSTATNLGDSFYYGKGLINVEAAAQ

SEQ ID NO: 65409 - protein, 274 aa, Synthetic construct
AQTVPYGIPLIKADKVQAQGYKGANVKVGIIDTGIAASHTDLKVVGGASFVSGESYNTDGNGHGTHVAGTVAALDNTTGVLGVAPNVSLYAIKVLNSSGSGTYSAIVSGIEWATQNGLDVINMSLGGPSGSTALKQAVDKAYASGIVVVAAAGNSGSSGSQNTIGYPAKYDSVIAVGAVDSNKNRASFSSVGAELEVMAPGSSVYSTYPSDTYTSLNGTSMASPHVAGAAALILSKYPTLSASQVRNRLSSTATNLGDSFYYGKGLINVEAAAQ

SEQ ID NO: 65410 - protein, 274 aa, Synthetic construct
AQTVPYGIPLIKADKVQAQGYKGANVKVGIIDTGIAASHTDLKVVGGASFVSGESYNTDGNGHGTHVAGTVAALDNTTGVLGVAPNVSLYAIKVLNSSGSGTYSAIVSGIEWATQNGLDVINMSLGGPSGSTALKQAVDKAYASGIVVVAAAGNSGSSGSQNTIGYPAKYDSVIAVGAVDSNKNRAEFSSVGAELEVMAPGVSVYSTYPSNTYTSLNGTSMASPHVAGAAALILSKYPTLSASQVRNRLSSTATNLGDSFYYGKGLINVEAAAQ

SEQ ID NO: 65411 - protein, 274 aa, Synthetic construct
AQTVPYGIPLIKADKVQAQGYKGANVKVGIIDTGIAASHTDLKVVGGASFVSGESYNTDGNGHGTHVAGTVAALDNTTGVLGVAPNVSLYAIKVLNSSGSGTYSAIVSGIEWATQNGLDVINMSLGGPSGSTALKQAVDKAYASGIVVVAAAGNSSSSGSQNTIGYPAKYDSVIAVGAVDSNKNRASFSSVGAELEVMAPGVSVYSTYPSNTYTSLNGTSMASPHVAGAAALILSKYPTLSASQVRNRLSSTATNLGDSFYYGKGLINVEAAAQ

SEQ ID NO: 65412 - protein, 274 aa, unidentified
AQTVPYGIPLIKADKVQAQGYKGANVKVGIIDTGIAASHTDLKVVGGASFVSGESYNTDGNGHGTHVAGTVAALDNTTGVLGVAPNVSLYAIKVLNSSGSGTYSAIVSGIEWATQNGLDVINMSLGGPSGSTALKQAVDKAYASGIVVVAAAGNSGSSGSQNTIGYPAKYDSVIAVGAVDSNKNRASFSSVGAELEVMAPGVSVYSTYPSNTYTSLNGTSMASPHVAGAAALILSKYPTLSAAQVRNRLSSTATNLGDSFYYGKGLINVEAAAQ

SEQ ID NO: 65413 - protein, 274 aa, Synthetic construct
AQTVPYGIPLIKADKVQAQGYKGANVKVGIIDTGIAASHTDLKVVGGASFVSGESYNTDGNGHGTHVAGTVAALDNTTGVLGVAPNVSLYAIKVLNSSGSGTYSAIVSGIEWATQNGLDVINMSLGGPSGSTALKQAVDKAYASGIVVVAAAGNSGSSGSQNTIGYPAKYDSVIAVGAVDSNKNRASFSSVGAELEVMAPGMSVYSTYPSNPYTSLNGTSMASPHVAGAAALILSKYPTLSASQVRNRLSSTATNLGDSFYYGKGLINVEAAAQ

SEQ ID NO: 65414 - protein, 274 aa, Synthetic construct
AQTVPYGIPLIKADKVQAQGYKGANVKVGIIDTGIAASHTDLKVVGGASFVSGESYNTDGNGHGTHVAGTVAALDNTTGVLGVAPNVSLYAIKVLNSSGSGTYSAIVSGIEWATQNGLDVINMSLQGPSGSTALKQAVDKAYASGIVVVAAAGNSGSSGSQNTIGYPAKYDSVIAVGAVDSNKNRASFSSVGAELEVMAPGVSVYSTYPSNTYGELNGTSMASPHVAGAAALILSKYPTLSASQVRNRLSSTATNLGDSFYYGKGLINVEAAAQ

SEQ ID NO: 65415 - protein, 274 aa, Synthetic construct
AQTVPYGIPLIKADKVQAQGYKGANVKVGIIDTGIAASHTDLKVVGGASFVSGESYNTDGNGHGTHVAGTVAALDNTTGVLGVAPNVSLYAIKVENSSGSGTYSAIVSGIEWATQNGLDVINMSLGGPSGSTALKQAVDKAYASGIVVVAAAGNSGSSGSQNTIGYPAKYDSVIAVGAVDSNKNRASFSSVGAELEVMAPGVSVYSTYPSNTYTSLNGTSMASPHVAGAAALILSKYPTLSASQVRNRLSSTATNLGDSFYYGKGLINVEAAAQ

SEQ ID NO: 65416 - protein, 274 aa, Synthetic construct
AQTVPYGIPLIKADKVQAQGYKGANVKVGIIDTGIAASHTDLKVVGGASFVSGESYNTDGNGHGTHVAGTVAALDNTTGVLGVAPNVSLYAIKVLNSSGSGTYSAIVSGIEWATQNGLDVINMSLGGPSGSTALKQAVDKAYASGIVVVAAAGNSGSSGSQNTIGYPAKYDSVIAVGAVDSNKNRASFSSVGAELEVMAPGVSVYSTYPSNTYTSLNPTSMASPHVAGAAALILSKYPTLSASQVRNRLSSTATNLGDSFYYGKGLINVEAAAQ

SEQ ID NO: 65417 - protein, 274 aa, Bacillus sp.
AQTVPYGIPLIKADKVQAQGYKGANVKVGIIDTGIASSHTDLKVVGGASFVSGESYNTDGNGHGTHVAGTVAALDNTTGVLGVAPNVSLYAIKVLNSSGSGTYSAIVSGIEWATQNGLDVINMSLGGPSGSTALKQAVDKAYASGIVVVAAAGNSGSSGSQNTIGYPAKYDSVIAVGAVDSNKNRASFSSVGAELEVMAPGVSVYSTYPSNTYTSLNGTSMASPHVAGAAALILSKYPTLSASQVRNRLSSTATNLGDSFYYGKGLINVEAAAQ

SEQ ID NO: 65418 - protein, 274 aa, Synthetic construct
AQTVPYGIPLIKADKVQAQGYKGANVKVGIIDTGIAASHTDLKVVGGASFVSGESYNTDGNGHGTHVAGTVAALDNTTGVLGVAPNVSLYAIKVLNSSGSGTYSAIVSGIEWATQNGLDVINMSLGGPSGSEALKQAVDKAYASGIVVVAAAGNSGSSGSQNTIGYPAKYDSVIAVGAVDSNKNRASFSSVGAELEVMAPGVSVYSTYPSNTYTSLNGTSMASPHVAGAAALILSKYPTLSASQVRNRLSSTATNLGDSFYYGKGLINVEAAAQ

SEQ ID NO: 65419 - protein, 173 aa, Bacillus sp.
STQDGNGHGTHVAGTVAALNNSVGVIGVAPNADLYAVKVLGANGRGTISSIARGLEWAGDNGMHVANLSLGSPAPSATLEQAVNQATSRGVLVIAASGNNGSGSVSYPARYANAMAVGATDQNNNRASSSQYGAGLDIVAPGVGVQSTYPGSTYASLSGTSMATPHVAGAAAL

SEQ ID NO: 65420 - protein, 173 aa, Bacillus sp.
STQDGNGHGTHVAGTVAALNNNDGVIGVAPSAELYAVKVLGASGSGSISSIARGLEWAADNGTHIANMSLGTPQPSATLERAVNSATSRGVLVVAASGNSGSGSVSYPARYANAMAVGATDQNNNRASFSQYGAGLDILAPGVGVQSTYPGSTYASLNGTSMASPHVAGVAAL

SEQ ID NO: 65421 - protein, 173 aa, Bacillus sp.
STQDGNGHGTHVAGTIAALNNNIGVLGVAPNVDLYGVKVLGASGRGSVSGIARGLEWAGDNGMHVANLSLGSSQPSATLEQAVNSATSRGVLVIAATGNTGAGTVSYPARYANAMAVGATDQNNNRANFSQYGTGLDIVAPGVGVQSTYPGSTYASMNGTSMATPHVAGAAAL

SEQ ID NO: 65422 - protein, 173 aa, Bacillus sp.
STQDGNGHGTHVAGTVAALNNSIGVIGVAPSAELYGVKVLGANGSGSVSSIARGLEWAGNNGMHIANLSLGSDFPSATLEQAVNAATSRGVLVVAASGNNGSGSVGYPARYANAMGVGATDQNNRRANFSQYGAGLDIVAPGVGVQSTYPGNTYVSLNGTSMATPHVAGVAAL

SEQ ID NO: 65423 - protein, 173 aa, Bacillus sp.
STQDGNGHGTHVAGTIAALNNSVGVLGVAPSVDLYGVKVLGASGRGSVSGIAQGLEWAAANGMHVANMSLGSDAPSATLERAVNQATSRGVLVIAATGNNGSGSISYPARYANAMAVGATDQNNNRASFSQYGAGLDIVAPGVNVQSTYPGSTYVSLSGTSMASPHVAGAAAL

SEQ ID NO: 65424 - protein, 173 aa, Bacillus sp.
STQDGNGHGTHVAGTVAALNNNVGVLGVAPSAELYAVKVLGANGRGTISGIAQGLEWAANNGMHVANLSLGSPSPSATLEQAVNAATSRGVLVVAASGNSGAGTIGYPATYANAMAVGATDQNNNRASFSQYGTGIDIVAPGVGVQSTYPGNRYASMSGTSMATPHVAGAAAL

SEQ ID NO: 65425 - protein, 173 aa, Bacillus sp.
STQDGNGHGTHVAGTVAALNNSVGVLGVAPSVELYAVKVLGASGRGTVSGIAQGLQWAAANGMHVANLSLGTDFPSATLEQAVNAATSRGVLVVAASGNSGSGSISYPARYANAMAVGATDQNNNRANFSQYGGGLDIVAPGVGVQSTYPGSTYVSLSGTSMAVPHVAGAAAL

SEQ ID NO: 65426 - protein, 173 aa, Bacillus sp.
STQDGNGHGTHVAGTVAALNNSVGVIGVAPSAELYAVKVLGASGRGTISSIARGLEWAANNGTHVANLSLGSPAPSATLERAVNSATSRGVLVVAATGNNGSGTISYPARYANAMAVGATDQNNNRANSSQYGTGLDIVAPGVGVQSTYPGSTYASLSGTSMATPHVAGAAAL

SEQ ID NO: 65427 - protein, 173 aa, Bacillus sp.
STQDGNGHGTHVAGTVAALNNSIGVLGVAPSVELYAVKVLGASGRGSISSIARGLEWAGDNGMHIANMSLGTDQPSATLEQAVNAATSRGVLVIAATGNTGAGSISYPARYANAMAVGATDQNNNRANFSQYGAGLDIVAPGVGVQSTYPGSRYASMNGTSMATPHVAGVAAL

SEQ ID NO: 65428 - protein, 173 aa, Bacillus sp.
STQDGNGHGTHVAGTIAALNNSVGVIGVAPNVDLYGVKVLGASGSGTISSIAQGLEWAADNGMHVANLSLGTPAPSSTLERAVNAATSRGVLVVAASGNSGAGSISYPARYANAMAVGATDQNNNRASFSQYGTGIDIVAPGVGVQSTYPGNTYASLNGTSMASPHVAGAAAL

SEQ ID NO: 65429 - protein, 173 aa, Bacillus sp.
STQDGNGHGTHVAGTVAALNNNDGVLGVAPNAELYAVKVLGASGSGTVSGIAQGLEWAADNGTHIANLSLGTPQPSATLERAVKSATSRGVLVVAASGNSGAGSVSYPARYANAMAVGATDQNNNRASFSQYGAGIDIVAPGVGVQSTYPGSTYASMSGTSMATPHVAGVAAL

SEQ ID NO: 65430 - protein, 173 aa, Bacillus sp.
STQDGNGHGTHVAGTVAALNNSIGVLGVAPSADLYGVKVLGASGRGSISSIARGLEWAGNNGMHIANMSLGSDQPSATLERAVNSATSRGVLVVAASGNSGAGSVTYPARYANAMAVGATDQNNRRASFSHYGAGLDIVAPGVGVQSTYPGSRYASLSGTSMASPHVAGVAAL

SEQ ID NO: 65431 - protein, 173 aa, Bacillus sp.
STQDGNGHGTHVAGTVAALNNSIGVLGVAPSVDLYAVKVLGANGRGTVSGIAQGLEWAADKGMHVANLSLGSSSPSTTLEQAVNAATSQGVLVIAATGNSGAGSISYPARYANAMAVGATDQNNNRASFSQYGQGLDIVAPGVGVQSTYPGSTYVSLSGTSMATPHVAGAAAL

SEQ ID NO: 65432 - protein, 173 aa, Bacillus sp.
STQDGNGHGTHVAGTVAALNNSDGVIGVAPSAELYAVKVLGANGSGSVSGIARGLEWAGANGMHVANLSLGTDQPSATLEQAVNQATSRGVLVVAASGNSGSGTVGYPARYANAMAVGATDQNNNRASFSQYGAGIDIVAPGVGVQSTYPGSRYTSLSGTSMATPHVAGAAAL

SEQ ID NO: 65433 - protein, 173 aa, Bacillus sp.
STQDGNGHGTHVAGTVAALNNSDGVLGVAPSADLYAVKVLGASGRGSVSSIARGLEWAAANGMHVANLSLGSDQPSSTLERAVNEATSQGVLVVAASGNNGAGTVGYPARYANAMAVGATDQNNRRASFSQYGAGLDIVAPGVGVQSTYPGSTYASMNGTSMATPHVAGAAAL

SEQ ID NO: 65434 - protein, 299 aa, Unidentified
IVHAEVGKEDVTDCLTTDRITAVKTVTPTAEWVYDLEVEGTHAYLTNGVLSHNSGVKVAVLDTGISTHPDLNIRGGASFVPGEPSTQDGNGHGTHVAGTIAALNNSIGVLGVAPSAELYAVKVLGASGSGSVSSIAQGLEWAGNNGMHVANLSLGSPSPSATLEQAVNSATSRGVLVVAASGNSGAGSISYPARYANAMAVGATDQNNNRASFSQYGAGLDIVAPGVNVQSTYPGSTYASLNGTSMATPHVAGAAALVKQKNPSWSNVQIRNHLKNTATSLGSTNLYGSGLVNAEAATR

SEQ ID NO: 65435 - protein, 269 aa, Unidentified
AQSVPWGISRVQAQSAHNRGITGSGVKVAVLDTGISTHEDLNVRGGASFVAGEPGYQDGNGHGTHVSGTIAALNNNIGVLGVAPNAELYAVKVLGASGSGSISGIAQGLQWAGNNGMHIANMSLGTSAPSATLEQAVNAATSRGVLVIAASGNSGAGSVGYPARYANAMAVGATDQNNQRASFSQYGAGLDIVAPGVGVQSTYPGNRYASLSGTSMATPHVAGVAALVKQKNPSWSNVQVRNHLKNTATNLGNTNLYGSGLVNAEAATR

SEQ ID NO: 65436 - protein, 269 aa, Unidentified
AQVVPWGISRVQAQSAHNRGITGSGVKVAVLDTGISTHEDLNVRGGASFVAGEPGYQDGNGHGTHVAGTIAALNNNIGVLGVAPNAELYAVKVLGASGSGSISGIAQGLQWAGNNGMHIANMSLGTSAPSATLEQAVNAATSRGVLVIAASGNSGAGSVGYPARYANAMAVGATDQNNQRASFSQYGAGLDIVAPGVGVQSTYPGNRYASLSGTSMATPHVAGVAALVKQKNPSWSNVQVRNHLKNTATNLGNTNLYGSGLVNAEAATR

SEQ ID NO: 65437 - protein, 269 aa, unidentified
AQSVPWGISRVQAPAAHNRGLTGSGVKVAVLDTGISTHPDLNIRGGASFVPGEPSTQDGNGHGTHVAGTIAALDNSIGVIGVAPSADLYAVKVLGANGRGSVSGIAQGLEWAAANNMHIANMSLGSDAPSTTLERAVNYATSQGVLVIAATGNNGSGSVGYPARYANAMAVGATDQNNRRANFSQYGTGIDIVAPGVNVQSTYPGNRYVSMNGTSMATPHVAGVAALVKQKNPSWSNVQIRNHLKNTATSLGSTNLYGSGLVNAEAATR

SEQ ID NO: 65438 - protein, 269 aa, Unidentified
AQVVPWGISRVQAQSAHNRGITGSGVKVAVLDTGISTHEDLNVRGGASFVAGEPGYQDGNGHGTHVSGTIAALDNSIGVLGVAPNAELYAVKVLGASGSGSISGIAQGLQWAGNNGMHIANMSLGTSAPSATLEQAVNAATSRGVLVIAASGNSGAGSVGYPARYANAMAVGATDQNNQRASFSQYGAGLDIVAPGVGVQSTYPGNRYASLNGTSMATPHVAGVAALVKQKNPSWSNVQVRNHLKNTATNLGNTNLYGSGLVNAEAATR

SEQ ID NO: 65439 - protein, 269 aa, Unidentified
AQVVPWGISRVQAQSAHNRGITGSGVKVAVLDTGISTHEDLNVRGGASFVAGEPGYQDGNGHGTHVSGTIAALNNNIGVLGVAPNAELYAVKVLGASGSGSISGIAQGLQWAGNNGMHIANMSLGTSAPSATLEQAVNAATSRGVLVIAASGNSGAGSVGYPARYANAMAVGATDQNNQRASFSQYGAGLDIVAPGVGVQSTYPGNRYASLNGTSMATPHVAGVAALVKQKNPSWSNVQVRNHLKNTATNLGNTNLYGSGLVNAEAATR

SEQ ID NO: 65440 - protein, 269 aa, Unidentified
AQSVPWGIERVQAQSAHNRGITGSGVKVAVLDTGISTHEDLNVRGGASFVAGEPGYQDGNGHGTHVAGTIAALNNNIGVLGVAPNAELYAVKVLGASGSGSISGIAQGLQWAGNNGMHIANMSLGTSAPSATLEQAVNAATSRGVLVIAASGNSGAGSVGYPARYANAMAVGATDQNNQRASFSQYGAGLDIVAPGVGVQSTYPGNRYASLSGTSMATPHVAGVAALVKQKNPSWSNVQVRNHLKNTATNLGNTNLYGSGLVNAEAATR

SEQ ID NO: 65441 - protein, 270 aa, Synthetic construct
AQSVPWGISRVQAPAAHNRGLTGSGVKVAVLDTGISTHPDLNIRGGASFVPGEPSTQDGNGHGTHVAGTVAALNNSIGVIGVAPSADLYAVKVLGANGRGSVSGIAQGLEWAAANNMHIANMSLGSDAPSTTLERAVNYATSQGVLVIAATGNNGSGSVGYPARYANAMAVGATDQNNRRANFSQYGAGGLDIVAPGVDIESTYPGSSYDSLSGTSMATPHVAGVAALVKQKNPSWSNVQIRNHLKNTATSLGSTNLYGSGLVNAEAATR

SEQ ID NO: 65442 - protein, 269 aa, Unidentified
AQSVPWGISRVQAQSAHNRGITGSGVKVAVLDTGISTHEDLNVRGGASFVAGEPGYQDGNGHGTHVSGTIAALDNNIGVLGVAPNAELYAVKVLGASGSGSISGIAQGLQWAGNNGMHIANMSLGTSAPSATLEQAVNAATSRGVLVIAASGNSGAGSVGYPARYANAMAVGATDQNNNRASFSQYGAGLDIVAPGVGVQSTYPGNRYASLSGTSMATPHVAGVAALVKQKNPSWSNVQVRNHLKNTATNLGNTNLYGSGLVNAEAATR

SEQ ID NO: 65443 - protein, 269 aa, Unidentified
AQSVPWGIERVQAQSAHNRGITGSGVKVAVLDTGISTHEDLNVRGGASFVAGEPGYQDGNGHGTHVAGTIAALDNNIGVLGVAPNAELYAVKVLGASGSGSISGIAQGLQWAGNNGMHIANMSLGTSAPSATLEQAVNAATSRGVLVIAASGNSGAGSVGYPARYANAMAVGATDQNNQRASFSQYGAGLDIVAPGVGVQSTYPGNRYASLNGTSMATPHVAGVAALVKQKNPSWSNVQVRNHLKNTATNLGNTNLYGSGLVNAEAATR

SEQ ID NO: 65444 - protein, 269 aa, Unidentified
AQSVPWGISRVQAQSAHNRGITGSGVKVAVLDTGISTHEDLNVRGGASFVAGEPGYQDGNGHGTHVAGTIAALDNNIGVLGVAPNAELYAVKVLGASGSGSISGIAQGLQWAGNNGMHIANMSLGTSAPSATLEQAVNAATSRGVLVIAASGNSGAGSVGYPARYANAMAVGATDQNNQRASFSQYGAGLDIVAPGVGVQSTYPGNRYASLSGTSMATPHVAGVAALVKQKNPSWSNVQVRNHLKNTATNLGNTNLYGSGLVNAEAATR

SEQ ID NO: 65445 - protein, 269 aa, Unidentified
AQVVPWGISRVQAQSAHNRGITGSGVKVAVLDTGISTHEDLNVRGGASFVAGEPGYQDGNGHGTHVSGTIAALDNNIGVLGVAPNAELYAVKVLGASGSGSISGIAQGLQWAGNNGMHIANMSLGTSAPSATLEQAVNAATSRGVLVIAASGNSGAGSVGYPARYANAMAVGATDQNNNRASFSQYGAGLDIVAPGVGVQSTYPGNRYASLNGTSMATPHVAGVAALVKQKNPSWSNVQVRNHLKNTATNLGNTNLYGSGLVNAEAATR

SEQ ID NO: 65446 - protein, 271 aa, Synthetic construct
AQSVPWGISRVQAPAAHNRGLTGSGVKVAVLDTGISTHPDLNIRGGASFVPGEPSTQDGNGHGTHVAGTVAALNNSIGVIGVAPSADLYAVKVLGANGRGSVSGIAQGLEWAAANNMHIANMSLGSDAPSTTLERAVNYATSQGVLVIAATGNNGSGSVGYPARYANAMAVGATDQNNRRANFSQYGAGKALDIVAPGVDIESTYPGSSYDSLSGTSMATPHVAGVAALVKQKNPSWSNVQIRNHLKNTATSLGSTNLYGSGLVNAEAATR

SEQ ID NO: 65447 - protein, 269 aa, Unidentified
AQSVPWGIERVQAQSAHNRGITGSGVKVAVLDTGISTHEDLNVRGGASFVAGEPGYQDGNGHGTHVSGTIAALDNNIGVLGVAPNAELYAVKVLGASGSGSISGIAQGLQWAGNNGMHIANMSLGTSAPSATLEQAVNAATSRGVLVIAASGNSGAGSVGYPARYANAMAVGATDQNNNRASFSQYGAGLDIVAPGVGVQSTYPGNRYASLNGTSMATPHVAGVAALVKQKNPSWSNVQVRNHLKNTATNLGNTNLYGSGLVNAEAATR

SEQ ID NO: 65448 - protein, 269 aa, Unidentified
AQSVPWGIERVQAQSAHNRGITGSGVKVAVLDTGISTHEDLNVRGGASFVAGEPGYQDGNGHGTHVSGTIAALNNNIGVLGVAPNAELYAVKVLGASGSGSISGIAQGLQWAGNNGMHIANMSLGTSAPSATLEQAVNAATSRGVLVIAASGNSGAGSVGYPARYANAMAVGATDQNNNRASFSQYGAGLDIVAPGVGVQSTYPGNRYASLSGTSMATPHVAGVAALVKQKNPSWSNVQVRNHLKNTATNLGNTNLYGSGLVNAEAATR

SEQ ID NO: 65449 - protein, 269 aa, Unidentified
AQVVPWGIERVQAQSAHNRGITGSGVKVAVLDTGISTHEDLNVRGGASFVAGEPGYQDGNGHGTHVSGTIAALNNSIGVLGVAPNAELYAVKVLGASGSGSISGIAQGLQWAGNNGMHIANMSLGTSAPSATLEQAVNAATSRGVLVIAASGNSGAGSVGYPARYANAMAVGATDQNNQRASFSQYGAGLDIVAPGVGVQSTYPGNRYASLNGTSMATPHVAGVAALVKQKNPSWSNVQVRNHLKNTATNLGNTNLYGSGLVNAEAATR

SEQ ID NO: 65450 - protein, 269 aa, Unidentified
AQVVPWGISRVQAQSAHNRGITGSGVKVAVLDTGISTHEDLNVRGGASFVAGEPGYQDGNGHGTHVSGTIAALDNSIGVLGVAPNAELYAVKVLGASGSGSISGIAQGLQWAGNNGMHIANMSLGTSAPSATLEQAVNAATSRGVLVIAASGNSGAGSVGYPARYANAMAVGATDQNNNRASFSQYGAGLDIVAPGVGVQSTYPGNRYASLSGTSMATPHVAGVAALVKQKNPSWSNVQVRNHLKNTATNLGNTNLYGSGLVNAEAATR

SEQ ID NO: 65451 - protein, 269 aa, Unidentified
AQVVPWGISRVQAQSAHNRGITGSGVKVAVLDTGISTHEDLNVRGGASFVAGEPGYQDGNGHGTHVSGTIAALNNSIGVLGVAPNAELYAVKVLGASGSGSISGIAQGLQWAGNNGMHIANMSLGTSAPSATLEQAVNAATSRGVLVIAASGNSGAGSVGYPARYANAMAVGATDQNNQRASFSQYGAGLDIVAPGVGVQSTYPGNRYASLSGTSMATPHVAGVAALVKQKNPSWSNVQVRNHLKNTATNLGNTNLYGSGLVNAEAATR

SEQ ID NO: 65452 - protein, 274 aa, Synthetic construct
AQTVPYGIPLIKADKVQAQGYKGANVKVGIIDTGIAASHTDLKVVGGASFVSGESYNTDGNGHGTHVAGTVAALDNTTGVLGVAPNVSLYAIKVLNSSGSGTYSAIVSGIEWATQNGLDVINMSLGGPSGSTALKQAVDKAYASGIVVVAAAGNSGSSGSQNTIGYPAKYDSVIAVGAVDSNKNRASFSSVGAELEVMAPGVSVYSTYPSNPYTSLNGPSMASPHVAGAAALILSKYPTLSASQVRNRLSSTATNLGDSFYYGKGLINVEAAAQ

SEQ ID NO: 65453 - protein, 274 aa, Synthetic construct
AQTVPYGIPLIKADKVQAQGYKGANVKVGIIDTGIAASHTDLKVVGGASFVSGESYNTDGNGHGTHVAGTVAALDNTTGVLGVAPNVSLYAIKVLNSSGSGTYSAIVSGIEWATQNGLDVINMSLGGPSGSTALKQAVDKAYASGIVVVAAAGNSGSSGSQNTIGYPAKYDSVIAVGAVDSNKNRASFSSVGAELEVMAGSVSVYSTYPDNTYTSLNGTSMASPHVAGAAALILSKYPTLSASQVRNRLSSTATNLGDSFYYGKGLINVEAAAQ

SEQ ID NO: 65454 - protein, 274 aa, Bacillus licheniformis
AQTVPYGIPLIKADKVQAQGYKGANVKVGIIDTGIASSHTDLKVVGGASFVSGESYNTDGNGHGTHVAGTVAALDNTTGVLGVAPNVSLYAIKVLNSSGSGTYSAIVSGIEWATQNGLDVINMSLGGPSGSTALKQAVDKAYASGIVVVAAAGNSGSSGSQNTIGYPAKYDSVIAVGAVDSNKNRASFSSVGSELEVMAPGVSVYSTYPSNTYTSLNGTSMASPHVAGAAALILSKYPTLSASQVRNRLSSTATNLGDSFYYGKGLINVEAAAQ

SEQ ID NO: 65455 - protein, 274 aa, Bacillus sp.
AQTVPYGIPLIKADKVQAQGYKGANVKVGIIDTGIAXSHTDLKVVGGASFVSGESYNTDGNGHGTHVAGTVAALDNTTGVLGVAPNVSLYAIKVLNSSGSGTYSAIVSGIEWATQNGLDVINMSLGGPSGSTALKQAVDKAYASGIVVVAAAGNSGSSGSQNTIGYPAKYDSVIAVGAVDSNKNRASFSSVGXELEVMAPGVSVYSTYPSNTYTSLNGTSMASPHVAGAAALILSKYPTLSASQVRNRLSSTATNLGDSFYYGKGLINVEAAAQ

SEQ ID NO: 65456 - protein, 274 aa, Synthetic construct
AQTVPYGIPLIKADKVQAQGYKGANVKVGIIDTGIAASHTDLKVVGGASFVSGESYNTDGNGHGTHVAGTVAALDNTTGVLGVAPNVSLYAIKVLNSSGSGTYSAIVSGIEWATQNGLDVINMSLGGPSGSTALKQAVDKAYASGIVVVAAAGNSQSSGSQNTTGYPAKYDSVIAVGAVDSNKNRASFSSVGAELEVMAPGVSVYSTYPSNTYTSLNGTSMASPHVAGAAALILSKYPTLSASQVRNRLSSTATNLGDSFYYGKGLINVEAAAQ

SEQ ID NO: 65457 - protein, 274 aa, Synthetic construct
AQTVPYGIPLIKADKVQAQGYKGANVKVGIIDTGIAASHTDLKVVGGASFVSGESYNTDGNGHGTHVAGTVAALDNTTGVLGVAPNVSLYAIKVLNSSGSGTYSAIVSGIEWATQNGLDVINMSLGGPSGSTALKQAVDKAYASGIVVVAAAGNSESSGSQQTIGYPAKYDSVIAVGAVDSNKNRASFSSVGAELEVMAPGVSVYSTYPSNTYTSLNGTSMASPHVAGAAALILSKYPTLSASQVRNRLSSTATNLGDSFYYGKGLINVEAAAQ

SEQ ID NO: 65458 - protein, 274 aa, Synthetic construct
AQTVPYGIPLIKADKVQAQGYKGANVKVGIIDTGIAASHTDLKVVGGASFVSGESYNTDGNGHGTHVAGTVAALDNTTGVLGVAPNVSLYAIKVLNESGSGTYSALVSGIEWATQNGLDVINMSLGGPSGSTALKQAVDKAYASGIVVVAAAGNSGSSGSQNTIGYPAKYDSVIAVGAVDSNKNRASFSSVGAELEVMAPGVSVYSTYPSNTYTSLNGTSMASPHVAGAAALILSKYPTLSASQVRNRLSSTATNLGDSFYYGKGLINVEAAAQ

SEQ ID NO: 65459 - protein, 274 aa, Synthetic construct
AQTVPYGIPLIKADKVQAQGYKGANVKVGIIDTGIAASHTDLKVVGGASFVSGESYNTDGNGHGTHVAGTVAALDNTTGVLGVAPNVSLYAIKVLDSSGSGTHSAIVSGIEWATQNGLDVINMSLGGPSGSTALKQAVDKAYASGIVVVAAAGNSGSSGSQNTIGYPAKYDSVIAVGAVDSNKNRASFSSVGAELEVMAPGVSVYSTYPSNTYTSLNGTSMASPHVAGAAALILSKYPTLSASQVRNRLSSTATNLGDSFYYGKGLINVEAAAQ

SEQ ID NO: 65460 - protein, 274 aa, Synthetic construct
AQTVPYGIPLIKADKVQAQGYKGANVKVGIIDTGIAASHTDLKVVGGASFVSGESYNTDGNGHGTHVAGTVAALDNTTGVLGVAPNVSLYAIKVLQSSGSGTYSAAVSGIEWATQNGLDVINMSLGGPSGSTALKQAVDKAYASGIVVVAAAGNSGSSGSQNTIGYPAKYDSVIAVGAVDSNKNRASFSSVGAELEVMAPGVSVYSTYPSNTYTSLNGTSMASPHVAGAAALILSKYPTLSASQVRNRLSSTATNLGDSFYYGKGLINVEAAAQ

SEQ ID NO: 65461 - protein, 274 aa, Synthetic construct
AQTVPYGIPLIKADKVQAQGYKGANVKVGIIDTGIAASHTDLKVVGGASFVSGESYNTDGNGHGTHVAGTVAALDNTTGVLGVAPNVSLYAIKVLNSSGSGTYSAIVSGIEWATQNGLDVINMSLGGPDNSTALKQAVDKAYASGIVVVAAAGNSGSSGSQNTIGYPAKYDSVIAVGAVDSNKNRASFSSVGAELEVMAPGVSVYSTYPSNTYTSLNGTSMASPHVAGAAALILSKYPTLSASQVRNRLSSTATNLGDSFYYGKGLINVEAAAQ

SEQ ID NO: 65462 - protein, 270 aa, Synthetic construct
AQSVPWGISRVQAPAAHNRGLTGSGVKVAVLDTGISTHPDLNIRGGASFVPGEPSTQDGNGHGTHVAGTVAALNNSIGVIGVAPSADLYAVKVLGANGRGSVSGIAQGLEWAAANNMHIANMSLGSDAPSTTLERAVNYATSQGVLVIAATGNNGSGSVGYPARYANAMAVGATDQNNRRANFSQYGTGIDIVAPGVDIESTYPGSSYDSLSGTSMATPHVAGVAAALVKQKNPSWSNVQIRNHLKNTATSLGSTNLYGSGLVNAEAATR

SEQ ID NO: 65463 - protein, 247 aa, Unidentified
AQSVPWGISRVQAPAAHNRGLTGSGVKVAVLDTGISTHPDLNIRGGASFVPGEPSTQDGNGHGTHVAGTIAALNNSIGVLGVAPSAELYAVKVLGASGSGSVSSIAQGLEWAGNNGMHVANLSLGSPSPSATLEQAVNSATSRGVLVVAASGNSGAGSISYPARYANAMAVGATDQNNNRASFSQYGAGLDIVAPGVNVQSTYPGCVDGDTTVLLDGKLIKIKDLEDKWKDVKVLTSDDLNPKLTSL

SEQ ID NO: 65464 - protein, 249 aa, Unidentified
AQSVPWGISRVQAPAAHNRGLTGSGVKVAVLDTGISTHPDLNIRGGASFVPGEPSTQDGNGHGTHVAGTIAALNNSIGVLGVAPSAELYAVKVLGASGSGSVSSIAQGLEWAGNNGMHVANLSLGSPSPSATLEQAVNSATSRGVLVVAASGNSGAGSISYPARYANAMAVGATDQNNNRASFSQYGAGLDIVAPGVNVQSTYPGCVAPETKILTDRGQIAIADVAGEKVNIWNGSEWSEVLVKKTGEN

SEQ ID NO: 65465 - protein, 173 aa, Bacillus sp.
STQDGNGHGTHVAGTIAALDNDEGVVGVAPNADLYAVKVLSASGSGSISSIAQGLEWSGENGMDIANLSLGSSAPSATLEQAVNAATSRGVLVIAASGNSGAGSVGYPARYANAMAVGATDQNNNRASFSQYGAGLDIVAPGVGVQSTYPGNRYASLNGTSMATPHVAGAAAL

SEQ ID NO: 65466 - protein, 173 aa, Bacillus sp.
STQDGNGHGTHVAGTIAALDNDEGVVGVAPNADLYAVKVLSASGAGSISSIAQGLEWSGENGMDIANLSLGSSAPSATLEQAVNAATSRGVLVIAASGNSGAGSVGYPARYANAMAVGATDQNNNRASFSQYGAGLDIVAPGVGVQSTYPGSTYASLNGTSMATPHVAGVAAL

SEQ ID NO: 65467 - protein, 173 aa, Bacillus sp.
STQDGNGHGTHVAGTIAALNNSIGVLGVAPNAELYGVKVLGASGSGTVSGIARGLEWAANNGMHIANMSLGTDAPSSTLEQAVNSATSQGVLVIAATGNSGAGTISYPARYANAMAVGATDQNNRRASFSQYGTGIDIVAPGVGVQSTYPGSTYASLNGTSMASPHVAGAAAL

SEQ ID NO: 65468 - protein, 173 aa, Bacillus sp.
STQDGNGHGTHVAGTIAALNNNVGVLGVAPSAELYGVKVLGASGSGSISGIARGLEWAAANGMHVANMSLGTPFPSATLEQAVKAATSRGVLVVAASGNSGAGSISYPARYANAMAVGATDQNNNRASFSQYGTGIDIVAPGVGVKSTYPGSTYVSLSGTSMASPHVAGVAAL

SEQ ID NO: 65469 - protein, 173 aa, Bacillus sp.
STQDGNGHGTHVAGTVAALNNSVGVLGVAPSAELYAVKVLGASGRGTISGIAQGLEWAADNGMHVANLSLGTSAPSATLERAVNAATSRGVLVVAASGNSGAGTVSYPARYANAMAVGATDQNNNRASFSQYGTGLDIVAPGVGVQSTYPGNTYASMSGTSMASPHVAGAAAL

SEQ ID NO: 65470 - protein, 173 aa, Bacillus sp.
STQDGNGHGTHVAGTVAALNNNIGVLGVAPSVELYGVKVLGASGRGSVSGIARGLQWTADNGMHIANLSLGSSSPSATLERAVNYATSRGVLVIAATGNTGAGTISYPARYANAMAVGATDQNNNRASFSQYGTGLDIVAPGVGVQSTYPGSTYASLNGTSMATPHVAGAAAL

SEQ ID NO: 65471 - protein, 173 aa, Bacillus sp.
STQDGNGHGTHVAGTVAALNNSDGVIGVAPSADLYAVKVLGANGSGSVSSIAQGLEWAADNGMHIANMSLGTSSPSVTLERAVNAATSQGVLVVAASGNTGAGSIGYPARYANAMAVGATDQNNRRASFSQYGAGLDIVAPGVNVQSTYPGSRYASLSGTSMASPHVAGAAAL

SEQ ID NO: 65472 - protein, 173 aa, Bacillus sp.
STQDGNGHGTHVAGTIAALNNSVGVLGVAPSAELYGVKVLGASGRGSVSSIAQGLEWAADNGMHVANMSLGTSFPSSTLERAVNAATSRGVLVIAASGNSGSGTIGYPGRYANAMAVGATDQNNNRASFSQYGTGIDIVAPGVGVQSTYPGSTYASLSGTSMATPHVAGAAAL

SEQ ID NO: 65473 - protein, 173 aa, Bacillus sp.
STQDGNGHGTHVAGTVAALNNNDGVLGVAPSADLYGVKVLGANGRGSVSGIARGLEWAADNGMHVANMSLGTSAPSATLEQAVNQATSRGVLVVAASGNSGAGTIGYPARYANAMAVGATDQNNNRASFSQYGAGLDIVAPGVGVQSTYPGSTYVSLNGTSMATPHVAGVAAL

SEQ ID NO: 65474 - protein, 274 aa, Synthetic construct
AQTVPYGIPLIKADKVQAQGYKGANVKVGIIDTGIAASHTDLKVVGGASFVSGESYNTDGEGHSGHVAGTVAALDNTTGVLGVAPNVSLYAIKVLNSSGSGTYSAIVSGIEWATQNGLDVINMSLGGPSGSTALKQAVDKAYASGIVVVAAAGNSGSSGSQNTIGYPAKYDSVIAVGAVDSNKNRASFSSVGAELEVMAPGVSVYSTYPSNTYTSLNGTSMASPHVAGAAALILSKYPTLSASQVRNRLSSTATNLGDSFYYGKGLINVEAAAQ

SEQ ID NO: 65475 - protein, 274 aa, Synthetic construct
AQTVPYGIPLIKADKVQAQGYKGANVKVGIIDTGIAASHTDLKVVGGASFVSGESYNTDGNGHGTHVAGTVAALDNTTGVLGVAPNVSLYAIKVLNSSGSGTYSAIVSGIEWATQNGLDVINMSLGGPSGSTALKQAVDKAYASGIVVVAAAGNSGSSGSQNTIGYPAKYDSVIAVGAVDSNKNRSSASEVGAELEVMAPGVSVYSTYPSNTYTSLNGTSMASPHVAGAAALILSKYPTLSASQVRNRLSSTATNLGDSFYYGKGLINVEAAAQ

SEQ ID NO: 65476 - protein, 274 aa, Synthetic construct
AQTVPYGIPLIKADKVQAQGYKGANVKVGIIDTGIAASHTDLKVVGGASFVSGESYNTDGNGHGTHVAGTVAALDNTTGVLGVAPNVSLYAIKGLNSSPSGTYSAVVSGIEWATQNGLDVINMSLGGPSGSTALKQAVDKAYASGIVVVAAAGNSGSSGSQNTIGYPAKYDSVIAVGAVDSNKNRASFSSVGAELEVMAPGVSVYSTYPSNTYTSLNGTSMASPHVAGAAALILSKYPTLSASQVRNRLSSTATNLGDSFYYGKGLINVEAAAQ

SEQ ID NO: 65477 - protein, 274 aa, Synthetic construct
AQTVPYGIPLIKADKVQAQGYKGANVKVGIIDTGIAASHTDLKVVGGASFVSGESYNTDGNGHGTHVAGTVAALDNTTGVLGVAPNVSLYAIKVLNSSGSGTYSAIVSGIEWATQNGLDVINMSLGGPSGSTALKQAVDKAYASGIVVVAAAGNSGSSGSQNTIGYPAKYDSVIAVGAVDSNKNRASFSSVGAELEVMAPGVSTYSTYDSNTCTSLNGTSMASPHVAGAAALILSKYPTLSASQVRNRLSSTATNLGDSFYYGKGLINVEAAAQ

SEQ ID NO: 65478 - protein, 270 aa, Synthetic construct
AQSVPWGISRVQAPAAHNRGLTGSGVKVAVLDTGISTHPDLNIRGGASFVPGEPSTQDGNGHGTHVAGTVAALNNSIGVIGVAPSADLYAVKVLGANGRGSVSGIAQGLEWAAANNMHIANMSLGSDAPSTTLERAVNYATSQGVLVIAATGNNGSGSVXGYPARYANAMAVGATDQNNRRANFSQYGTGIDIVAPGVDIESTYPGSSYDSLSGTSMATPHVAGVAALVKQKNPSWSNVQIRNHLKNTATSLGSTNLYGSGLVNAEAATR

SEQ ID NO: 65479 - protein, 269 aa, Synthetic construct
AQSVPWGISRVQAPAAHNRGLTGSGVKVAVLDTGISTHPDLNIRGGASFVPGEPSTQDGNGHGTHVAGTVAALNNSIGVIGVAPSADLYAVKVLGANGRGSVSGIAQGLEWAAANNMHIANMSLGSDAPSTTLERAVNYATSQGVLVIAATGNNGSGSVGYPARYANAMAVGATDQNNRRANFSQYGTGIDIVAPGVDIESTYPGSSYDSLSGTSMATPHVAGVAALVKQKNPSWSNVQIRNHLKNTATSLGSTNLYGSGLVNAEAATR

SEQ ID NO: 65480 - protein, 270 aa, Synthetic construct
AQSVPWGISRVQAPAAHNRGLTGSGVKVAVLDTGISTHPDLNIRGGASFVPGEPSTQDGNGHGTHVAGTVAALNNSIGVIGVAPSADLYAVKVLGANGRGSVSGIAQGLEWAAANNMHIANMSLGSDAPSTTLERAVNYATSQGVLVIAATGNNGSGSVGXYPARYANAMAVGATDQNNRRANFSQYGTGIDIVAPGVDIESTYPGSSYDSLSGTSMATPHVAGVAALVKQKNPSWSNVQIRNHLKNTATSLGSTNLYGSGLVNAEAATR

SEQ ID NO: 65481 - protein, 270 aa, Synthetic construct
AQSVPWGISRVQAPAAHNRGLTGSGVKVAVLDTGISTHPDLNIRGGASFVPGEPSTQDGNGHGTHVAGTVAALNNSIGVIGVAPSADLYAVKVLGANGRGSVSGIAQGLEWAAANNMHIANMSLGSDAPSTTLERAVNYATSQGVLVIAATGNNGSGSXVGYPARYANAMAVGATDQNNRRANFSQYGTGIDIVAPGVDIESTYPGSSYDSLSGTSMATPHVAGVAALVKQKNPSWSNVQIRNHLKNTATSLGSTNLYGSGLVNAEAATR

SEQ ID NO: 65482 - protein, 274 aa, Synthetic construct
AQTVPYGIPLIKADKVQAQGYKGANVKVGIIDTGIAASHTDLKVVGGASFVSGESYNTDGNGHGTHVAGTVAALDNTTGVLGVAPNVSLYAIKVLNSSGSETYEAIVSGIEWATQNGLDVINMSLGGPSGSTALKQAVDKAYASGIVVVAAAGNSGSSGSQNTIGYPAKYDSVIAVGAVDSNKNRASFSSVGAELEVMAPGVDVISTYPENPYTSLNGTSMASPHVAGAAALILSKYPTLSASQVRNRLSSTATNLGDSFYYGKGLINVEAAAQ

SEQ ID NO: 65483 - protein, 274 aa, Synthetic construct
AQTVPYGIPLIKADKVQAQGYKGANVKVGIIDTGIAASHTDLKVVGGASFVSGESYNTDGNGHGEHVAGTVAALDNTTGVLGVAPNVSLYAIKVLNSSGSGTYSAMVSGIEWATQNGLDVINMSHGGPSGSTALKQAVDKAYASGIVVVAAAGNSGSSGSQNTIGYPAKYDSVIAVGAVDSNKNRASFSSVGAELEVMAPGVSVLSTYPSNTYTDLNGTSMASPHVAGAAALILSKYPTLSASQVRNRLSSTATNLGDSFYYGKGLINVEAAAQ

SEQ ID NO: 65484 - protein, 274 aa, Synthetic construct
AQTVPYGIPLIKADKVQAQGYKGANVKVGIIDTGIAASHTDLKVVGGASFVSGESYNTDGNGHGTHVAGTVAALDNTTGVLGVAPNVSLYAIKVLNSSGSGTYSAIVSGIEWATQNGLDVINMSLGGPSGSTALKQAVDKAYASGIVVVAAAGNSGSSGSQNTIGYPAKYDSVIAVGAVDSNKNRNDQSEVGAELEVMAPGVSVYSTYPSNTYTSLNGTSMASPHVAGAAALILSKYPTLSASQVRNRLSSTATNLGDSFYYGKGLINVEAAAQ

SEQ ID NO: 65485 - protein, 274 aa, Synthetic construct
AQTVPYGIPLIKADKVQAQGYKGANVKVGIIDTGIAASHTDLKVVGGASFVSGESYNTDGNGHGTHVAGTVAALDNTTGVLGVAPNVSLYAIKVLNSSGSGTYSAIVSGIEWATQNGLDVINMSLGGPSGSTALKQAVDKAYASGIVVVAAAGNSESSGSQNSIGYPAKYDSVIAVGAVDSNKNRASFSSVGAELEVMAPGVSVYSTYPSSNYTSLNGTSMASPHVAGAAALILSKYPTLSASQVRNRLSSTATNLGDSFYYGKGLINVEAAAQ

SEQ ID NO: 65486 - protein, 274 aa, Synthetic construct
AQTVPYGIPLIKADKVQAQGYKGANVKVGIIDTGIAASHTDLKVVGGASFVSGESYNTDGNGHGTHVAGTVAALDNTTGVLGVAPNVSLYAIKVLNSSGSGTYSAIVSGIEWATQNGLDVINMSAGGPEPDTALKQAVDKAYASGIVVVAAAGNSGSSGSQNTIGYPAKYDSVIAVGAVDSNKNRASFSSVGAELEVMAPGVSVYSTYPSNTYTSLNGTSMASPHVAGAAALILSKYPTLSASQVRNRLSSTATNLGDSFYYGKGLINVEAAAQ

SEQ ID NO: 65487 - protein, 274 aa, Synthetic construct
AQTVPYGIPLIKADKVQAQGYKGANVKVGIIDTGIAASHTDLKVVGGASFVSGESYNTDGNGHGTHVAGTVAALDNTTGVLGVAPNVSLYAIKVLNSSGSGTYSAIVSGIEWATQNGLDVINMSLGGPSGSTALKQAVDKAYASGIVVVAAAGNSGSSGSQNTIGYPAKYDSVIAVGAVDSNKNRASFSSVGAELEVMAPGVSVYSNQPSNSETELNGTSMASPHVAGAAALILSKYPTLSASQVRNRLSSTATNLGDSFYYGKGLINVEAAAQ

SEQ ID NO: 65488 - protein, 274 aa, Synthetic construct
AQTVPYGIPLIKADKVQAQGYKGANVKVGIIDTGIAASHTDLKVVGGASFVSGESYNTDDDDHGQHVAGTVAALDNTTGVLGVAPNVSLYAIKVLNSSGSGTYSAIVSGIEWATQNGLDVINMSLGGPSGSTALKQAVDKAYASGIVVVAAAGNSGSSGSQNTIGYPAKYDSVIAVGAVDSNKNRASFSSVGAELEVMAPGVSVYSTYPSNTYTSLNGTSMASPHVAGAAALILSKYPTLSASQVRNRLSSTATNLGDSFYYGKGLINVEAAAQ

SEQ ID NO: 65489 - protein, 274 aa, Synthetic construct
AQTVPYGIPLIKADKVQAQGYKGANVKVGIIDTGIAASHTDLKVVGGASFVSGESYNTDGNGHGTHVAGTVAALDNTTGVLGVAPNVSLYAIKVLNSSGSGTYSAIVSGIEWATQNGLDVINMSLGGPSGSTALKQAVDKAYASGIVVVAAAGNSGSSGSQNTIGYPAKYDSVIAVGAVDSNKNRASFSSVGAELEVMAPNVSVGSQYPSNTITSLNGTSMASPHVAGAAALILSKYPTLSASQVRNRLSSTATNLGDSFYYGKGLINVEAAAQ

SEQ ID NO: 65490 - protein, 350 aa, Alkalihalobacillus patagoniensis
AEEAKEKYLIGFTEQEAVSTFVEQIEEEEVSISEVDDVEIDLLYEFETIPVLSVELNPEDVASLESDPAISYIEEDAEVTTMAQSVPWGISRVCAQSAHNRGITGSGVKVAVLDTGISTHEDLNVRGGASFVAGEPGYQDGNGHGTHVAGTIAALNNSIGVLGVAPNAELYAVKVLGASGSGSISGIAQGLQWAGNNGMHIANMSLGTSAPSATLEQAVNAATSRGVLVIAASGNSGAGSVGYPARYANAMAVGATDQNNNRASFSQYGAGLDIVAPGVGVQSTYPGNRYASLNGTSMATPHVAGVAALVKQKNPSWSNVQVRNHLKNTTNLGNTNLYGSGLVNACAATR

SEQ ID NO: 65491 - protein, 173 aa, Bacillus sp.
STQDGNGHGTHVAGTIAALNNNIGVLGVAPSVELYGVKVLGASGRGSISGIARGLEWAGDNGMHVANLSLGTDQPSATLERAVNAATSQGVLVIAATGNSGSGSVSYPARYANAMAVGATDQNNNRASSSQYGTGLDIVAPGVGVQSTYPGSTYVSLNGTSMATPHVAGAAAL

SEQ ID NO: 65492 - protein, 173 aa, Bacillus sp.
STQDGNGHGTHVAGTVAALNNSVGVLGVAPSADLYAVKVLGASGSGTISGIAQGLEWAANNGTHVANLSLGTSQPSATLERAVNAATSQGVLVVAATGNTGAGTIGYPARYANAMAVGATDQNNNRASFSQYGTGLDIVAPGVGVQSTYPGSRYASLSGTSMATPHVAGAAAL

SEQ ID NO: 65493 - protein, 173 aa, Bacillus sp.
STQDGNGHGTHVAGTVAALNNNVGVLGVAPSAELYAVKVLGASGRGTVSSIARGLQWAGDNGMHVANMSLGTSFPSATLEQAVNAATSQGVLVVAASGNTGSGSVGYPARYANAMAVGATDQNNNRANFSQYGTGIDIVAPGVGVQSTYPGSTYASLNGTSMATPHVAGAAAL

SEQ ID NO: 65494 - protein, 173 aa, Bacillus sp.
STQDGNGHGTHVAGTIAALNNNVGVLGVAPSVELYAVKVLGANGSGTISGIAQGLEWAANNGTHVANLSLGTDAPSATLERAVNQATSRGVLVVAASGNSGSGTIGYPARYANAMAVGATDQNNNRASFSQYGAGIDIVAPGVGVQSTYPGSTYALLSGTSMATPHVAGVAAL

SEQ ID NO: 65495 - protein, 173 aa, Bacillus sp.
STQDGNGHGTHVAGTVAALNNSVGVLGVAPSVELYAVKVLGANGRGSISGIAQGLEWAGANGMHIANMSLGTSAPSSTLERAVNSAASRGVLVVAASGNNGAGSVSYPARYANAMAVGATDQNNRRANFSQYGAGLDIVAPGVGVQSTYPGSTYASLSGTSMATPHVAGAAAL

SEQ ID NO: 65496 - protein, 173 aa, Bacillus sp.
STQDGNGHGTHVAGTIAALNNSIGVLGVAPSVELYGVKVLGANGSGTISSIARGLEWAGNNGMHVANMSLGSDFPSSTLEQAVNAATSRGVLVVAASGNSGSGSVGYPARYANAMAVGATDQNNRRANSSQYGAGLDIVAPGVGVQSTYPGSRYVSLSGTSMASPHVAGAAAL

SEQ ID NO: 65497 - protein, 173 aa, Bacillus sp.
STQDGNGHGTHVTGTIAALNNSIGVIGVAPSVELYGVKVLGASGRGSISGIARGLEWAADNGMHVANMSLGSPQPSATLEQAVNSATSRGVLVIAATGNSGSGTIAYPARYPNAMAVGATDQNNNRASFSQYGQGLDIVAPGVGVQSTYPGSRYASLNGTSMASPHVAGAAAL

SEQ ID NO: 65498 - protein, 173 aa, Bacillus sp.
STQDGNGHGTHVAGTIAALNNSVGVLGVAPNVELYAVKVLGASGRGTISGIAQGLEWAADNGTHIANLSLGTSFPSATLERAVNSATSRGVLVVAATGNTGAGSISYPARFANAMAVGATDQNNRRASFSQYGAGLDIVGPGVGVQSTYPGSTYASLSGTSMATPHVAGAAAL

SEQ ID NO: 65499 - protein, 173 aa, Bacillus sp.
STQDGNGHGTHVAGTVAALNNNVGVLGVAPSADLYGVKVLGANGSGSVSSIARGLEWAAANNMHVANLSLGSPQPSATLERAVNAATSQGVLVVAASGNTGSGIVSYPARYANAMAVGATDQNNNRASFSQYGTGLDIVAPGVGVQSTYPGSRYASLSGTSMATPHVAGAAAL

SEQ ID NO: 65500 - protein, 300 aa, Unidentified
ELLLLPRKKMEISKKHVSLDARPFTVSDVEDGEFRAIEVSGGVFQLANRLVVANSGVKVAVLDTGISTHPDLNIRGGASFVPGEPSTQDGNGHGTHVAGTIAALNNSIGVLGVAPSAELYAVKVLGASGSGSVSSIAQGLEWAGNNGMHVANLSLGSPSPSATLEQAVNSATSRGVLVVAASGNSGAGSISYPARYANAMAVGATDQNNNRASFSQYGAGLDIVAPGVNVQSTYPGSTYASLNGTSMATPHVAGAAALVKQKNPSWSNVQIRNHLKNTATSLGSTNLYGSGLVNAEAATR

SEQ ID NO: 65501 - protein, 269 aa, Synthetic construct
AQSVPWGISRVQAPAAHNRGLTGSGVKVAVXDTGISTHPDLNIRGGASFVPGEPSTQDGNGHGTHVAGTVAALNNSIGVIGVAPSADLYAVKVLGANGRGSVSGIAQGLEWAAANNMHIANMSLGSDAPSTTLERAVNYATSQGVLVIAATGNNGSGSVGYPARYANAMAVGATDQNNRRANFSQYGTGIDIVAPGVDIESTYPGSSYDSLSGTSMATPHVAGVAALVKQKNPSWSNVQIRNHLKNTATSLGSTNLYGSGLVNAEAATR

SEQ ID NO: 65502 - protein, 269 aa, Synthetic construct
AQSVPWGISRVQAPAAHNRGLTGSGVKVAVLDTGISTHPDLNIRGGASFVPGEPSTQDGNGHGTHVAGTVAALNNSIGVIGVAPSADLYAVKVLGANGRGSVSGIAQGLEWAAANNMHIANMSLGSDAPSTTLERAVNYATSQGVLVIAATGNNGSGSVGYPARYANAMAVGATDQNNRRANFSQYGTGIDIVAPGVDIESTYPGSSYDSLSGTSMATPHVAGVAALVKQKNPSWSNVQIRNHLKNXATSLGSTNLYGSGLVNAEAATR

SEQ ID NO: 65503 - protein, 269 aa, Synthetic construct
AQSVPWGISRXQAPAAHNRGLTGSGVKVAVLDTGISTHPDLNIRGGASFVPGEPSTQDGNGHGTHVAGTVAALNNSIGVIGVAPSADLYAVKVLGANGRGSVSGIAQGLEWAAANNMHIANMSLGSDAPSTTLERAVNYATSQGVLVIAATGNNGSGSVGYPARYANAMAVGATDQNNRRANFSQYGTGIDIVAPGVDIESTYPGSSYDSLSGTSMATPHVAGVAALVKQKNPSWSNVQIRNHLKNTATSLGSTNLYGSGLVNAEAATR

SEQ ID NO: 65504 - protein, 269 aa, Synthetic construct
AQSVPWGISRVQAPAAHNRGLTGSGVKVAVLDTXISTHPDLNIRGGASFVPGEPSTQDGNGHGTHVAGTVAALNNSIGVIGVAPSADLYAVKVLGANGRGSVSGIAQGLEWAAANNMHIANMSLGSDAPSTTLERAVNYATSQGVLVIAATGNNGSGSVGYPARYANAMAVGATDQNNRRANFSQYGTGIDIVAPGVDIESTYPGSSYDSLSGTSMATPHVAGVAALVKQKNPSWSNVQIRNHLKNTATSLGSTNLYGSGLVNAEAATR

SEQ ID NO: 65505 - protein, 269 aa, Synthetic construct
AQSVPWGISRVQAPAAHNRGLTGSGVKVAVLDTGISTHPDLNIRGGASFVPGEPSTQDGNGHGTHVAGTVAALNNSIGVIGVAPSADLYAVKVLGANGRGSVSGIAQGLEWAAANNMHIANMSLGSDAPSTTLERAVNYATSQGVLVIAATGNNGSGSVGYPARYANAXAVGATDQNNRRANFSQYGTGIDIVAPGVDIESTYPGSSYDSLSGTSMATPHVAGVAALVKQKNPSWSNVQIRNHLKNTATSLGSTNLYGSGLVNAEAATR

SEQ ID NO: 65506 - protein, 269 aa, Synthetic construct
AQSVPWGISRVQAPAAHNRGLTGSGVKVAVLXTGISTHPDLNIRGGASFVPGEPSTQDGNGHGTHVAGTVAALNNSIGVIGVAPSADLYAVKVLGANGRGSVSGIAQGLEWAAANNMHIANMSLGSDAPSTTLERAVNYATSQGVLVIAATGNNGSGSVGYPARYANAMAVGATDQNNRRANFSQYGTGIDIVAPGVDIESTYPGSSYDSLSGTSMATPHVAGVAALVKQKNPSWSNVQIRNHLKNTATSLGSTNLYGSGLVNAEAATR

SEQ ID NO: 65507 - protein, 269 aa, Synthetic construct
AQSVPWGISRVQAPAAHNRGLTGSGVKVAILDTGISTHPDLNIRGGASFVPGEPSTQDGNGHGTHVAGTVAALNNSIGVIGVAPSADLYAVKVLGANGRGSVSGIAQGLEWAAANNMHIANMSLGSDAPSTTLERAVNYATSQGVLVIAATGNNGSGSVGYPARYANAMAVGATDQNNRRANFSQYGTGIDIVAPGVDIESTYPGSSYDSLSGTSMATPHVAGVAALVKQKNPSWSNVQIRNHLKNTATSLGSTNLYGSGLVNAEAATR

SEQ ID NO: 65508 - protein, 269 aa, Synthetic construct
AQSVPWGISRVQAPAAHNRGLTGSGVKVAVLDTGISTHPDLNIRGGASFVPGEPSTQDGNGHGTHVAGTVAALNNSIGVIGVAPSADLYAVKVLGANGRGSVSGIAQGLEWAAANNMHIANMSLGSDAPSTTLERAVNYATSQGVLVIAATGNNGSGSVGYPARYANAMAVGATDQNNRRANFSQYGTGIDIVAPGVDIESTYPGSSYDSLSGTSMATPHVAGVAALVKQKNPSWSNVQIRNHLKNTATSLGSTNLYGSXLVNAEAATR

SEQ ID NO: 65509 - protein, 269 aa, Synthetic construct
AQSVPWGISRVQAPAAHNRGLTGSGVKVAVLDTGISTHPDLNIRGGASFVPGEPSTQDGNGHGTHXAGTVAALNNSIGVIGVAPSADLYAVKVLGANGRGSVSGIAQGLEWAAANNMHIANMSLGSDAPSTTLERAVNYATSQGVLVIAATGNNGSGSVGYPARYANAMAVGATDQNNRRANFSQYGTGIDIVAPGVDIESTYPGSSYDSLSGTSMATPHVAGVAALVKQKNPSWSNVQIRNHLKNTATSLGSTNLYGSGLVNAEAATR

SEQ ID NO: 65510 - protein, 269 aa, Synthetic construct
AQSVPWGISRVQAPAAHNRGLTGSGVKVAVLDTGISTHPDLNIRGGASFVPGEPSTQDGNGHGXHVAGTVAALNNSIGVIGVAPSADLYAVKVLGANGRGSVSGIAQGLEWAAANNMHIANMSLGSDAPSTTLERAVNYATSQGVLVIAATGNNGSGSVGYPARYANAMAVGATDQNNRRANFSQYGTGIDIVAPGVDIESTYPGSSYDSLSGTSMATPHVAGVAALVKQKNPSWSNVQIRNHLKNTATSLGSTNLYGSGLVNAEAATR

SEQ ID NO: 65511 - protein, 269 aa, Synthetic construct
AQSVPWGISRVQAPAAHNRGLTGSGVKVAVLDTGISTHPDLNIRGGASFVPGEPSTQDGNGHGTHVAGTVAALNNSIGVIGVAPSADLYAVKXLGANGRGSVSGIAQGLEWAAANNMHIANMSLGSDAPSTTLERAVNYATSQGVLVIAATGNNGSGSVGYPARYANAMAVGATDQNNRRANFSQYGTGIDIVAPGVDIESTYPGSSYDSLSGTSMATPHVAGVAALVKQKNPSWSNVQIRNHLKNTATSLGSTNLYGSGLVNAEAATR

SEQ ID NO: 65512 - protein, 269 aa, Bacillus sp.
AQSVPWGIDRVQAPIAQNRGFTGAGVRVAVLDTGISTHPDLNIRGGVSFVPGEPTIADGNGHGTHVAGTIAALNNNVGVLGVAPNVELYGVKVLGANGSGSISGIAQGLQWAGNNGMHVANLSLGSSQPSATLEQAVNQATSQGVLVVAASGNSGAGTVGYPARYANAMAVGATDQNNNRASFSQYGQGLDIVAPGVGVQSTYPGNRYASLSGTSMATPHVAGVAALVKQKNPSWSNVQVRNHLKNTATNLGNTNLYGSGLVNAEAATR

SEQ ID NO: 65513 - protein, 269 aa, Synthetic construct
AQSVPWGISRVQAPAAHNRGLTGSGVKVAVLDTGISTHPDLNIRGGASFVPGEPSTQDGNGHGTHVAGTVAALNNSIGVIGVAPSADXYAVKVLGANGRGSVSGIAQGLEWAAANNMHIANMSLGSDAPSTTLERAVNYATSQGVLVIAATGNNGSGSVGYPARYANAMAVGATDQNNRRANFSQYGTGIDIVAPGVDIESTYPGSSYDSLSGTSMATPHVAGVAALVKQKNPSWSNVQIRNHLKNTATSLGSTNLYGSGLVNAEAATR

SEQ ID NO: 65514 - protein, 269 aa, Synthetic construct
AQSVPWGISRVQAPAAHNRGLTGSGVKVAVLDTGISTHPDLNIRGGASFVPGEPSTQDGNGHGTHVAGTVAALNNSIGVIGVAPSADLYAVKVLGANGRGSVSGIAQGLEWAAANNMHIANMSLGSDAPSTTLERAVNYATSQGVLVIAATGNNGSGSVGYPARYANAMAVGATDQNNRRANFSQYGTGIDIVXPGVDIESTYPGSSYDSLSGTSMATPHVAGVAALVKQKNPSWSNVQIRNHLKNTATSLGSTNLYGSGLVNAEAATR

SEQ ID NO: 65515 - protein, 269 aa, Synthetic construct
AQSVPWGISRVQAPAAHNRGLTGSGVKVAVLDTGISTHPDLNIRGGASFVPGEPSTQDGNGHGTXVAGTVAALNNSIGVIGVAPSADLYAVKVLGANGRGSVSGIAQGLEWAAANNMHIANMSLGSDAPSTTLERAVNYATSQGVLVIAATGNNGSGSVGYPARYANAMAVGATDQNNRRANFSQYGTGIDIVAPGVDIESTYPGSSYDSLSGTSMATPHVAGVAALVKQKNPSWSNVQIRNHLKNTATSLGSTNLYGSGLVNAEAATR

SEQ ID NO: 65516 - protein, 269 aa, Synthetic construct
AQSVPWGISRVQAPAAHNRGLTGSGVKVAVLDTGISTHPDLNIRGGASFVPGEPSTQDGNGHGTHVAGTVAALNNSIGVIGVAPSADLYAVKVLGANGRGSVSGIAQGLEWAAANNMHIANMSLGSDAPSTTLERAVNYATSQGVLVIAATGNNGSGSVGYPARYANAMAVXATDQNNRRANFSQYGTGIDIVAPGVDIESTYPGSSYDSLSGTSMATPHVAGVAALVKQKNPSWSNVQIRNHLKNTATSLGSTNLYGSGLVNAEAATR

SEQ ID NO: 65517 - protein, 270 aa, Synthetic construct
AQSVPWGISRIQAPAAHNRGLTGSGVKVAVLDTGISTHPDLNIRGGASFVPGEPSTQDGNGHGTHVAGTVAALNNSIGVIGVAPSADLYAVKVLAGANGRGSVSGIAQGLEWAAANNMHIANMSLGSDAPSTTLERAVNYATSQGVLVIAATGNNGSGSVGYPARYANAMAVGATDQNNRRANFSQYGTGIDIVAPGVDIESTYPGSSYDSLSGTSMATPHVAGVAALVKQKNPSWSNVQIRNHLKNTATSLGSTNLYGSGLVNAEAATR

SEQ ID NO: 65518 - protein, 269 aa, Synthetic construct
AQSVPWGISRVQAPAAHNRGLTGSGVKVAVLATGISTHPDLNIRGGASFVPGEPSTQDGNGHGTHVAGTVAALNNSIGVIGVAPSADLYAVKVLGANGRGSVSGIAQGLEWAAANNMHIANMSLGSDAPSTTLERAVNYATSQGVLVIAATGNNGSGSVGYPARYANAMAVGATDQNNRRANFSQYGTGIDIVAPGVDIESTYPGSSYDSLSGTSMATPHVAGVAALVKQKNPSWSNVQIRNHLKNTATSLGSTNLYGSGLVNAEAATR

SEQ ID NO: 65519 - protein, 269 aa, Synthetic construct
AQSVPWGISRVQAPAAHNRGLTGSGVKVAVLDTGISTHPDLNIRGGASFVPGEPSTQDGNGHXTHVAGTVAALNNSIGVIGVAPSADLYAVKVLGANGRGSVSGIAQGLEWAAANNMHIANMSLGSDAPSTTLERAVNYATSQGVLVIAATGNNGSGSVGYPARYANAMAVGATDQNNRRANFSQYGTGIDIVAPGVDIESTYPGSSYDSLSGTSMATPHVAGVAALVKQKNPSWSNVQIRNHLKNTATSLGSTNLYGSGLVNAEAATR

SEQ ID NO: 65520 - protein, 269 aa, Synthetic construct
AQSVPWGISRIQAPAAHNRGLTGSGVKVAVLDTGISTHPDLNIRGGASFVPGEPSTQDGNGHGTHVAGTVAALNNSIGVIGVAPSADLYAVKVLGANGRGSVSGIAQGLEWAAANNMHIANMSLGSDAPSTTLERAVNYATSQGVLVIAATGNNGSGSVGYPARYANAMAVGATDQNNRRANFSQYGTGIDIVAPGVDIESTYPGSSYDSLSGTSMATPHVAGVAALVKQKNPSWSNVQIRNHLKNTATSLGSTNLYGSGLVNAEAATR

SEQ ID NO: 65521 - protein, 269 aa, Synthetic construct
AQSVPWGISRVQAPAAHNRGLTGSGVKVAXLDTGISTHPDLNIRGGASFVPGEPSTQDGNGHGTHVAGTVAALNNSIGVIGVAPSADLYAVKVLGANGRGSVSGIAQGLEWAAANNMHIANMSLGSDAPSTTLERAVNYATSQGVLVIAATGNNGSGSVGYPARYANAMAVGATDQNNRRANFSQYGTGIDIVAPGVDIESTYPGSSYDSLSGTSMATPHVAGVAALVKQKNPSWSNVQIRNHLKNTATSLGSTNLYGSGLVNAEAATR

SEQ ID NO: 65522 - protein, 269 aa, Synthetic construct
AQSVPWGISRVQAPAAHNRGLTGSGVKVAVLDTGISTHPDLNIRGGASFVPGEPSTQDGNGHGTHVAGTVAALNNSIGVIGVAPSADLYAVKVLGANGRGSVSGIAQGLEWAAANNMHIANMSLGSDAPSTTLERAVNYATSQGVLVIAXTGNNGSGSVGYPARYANAMAVGATDQNNRRANFSQYGTGIDIVAPGVDIESTYPGSSYDSLSGTSMATPHVAGVAALVKQKNPSWSNVQIRNHLKNTATSLGSTNLYGSGLVNAEAATR

SEQ ID NO: 65523 - protein, 269 aa, Synthetic construct
AQSVPWGISRVQAPAAHNRGLTGSGVKVAVLDTGISTHPDLNIRGGASFVPGEPSTQDGNGHGTHAAGTVAALNNSIGVIGVAPSADLYAVKVLGANGRGSVSGIAQGLEWAAANNMHIANMSLGSDAPSTTLERAVNYATSQGVLVIAATGNNGSGSVGYPARYANAMAVGATDQNNRRANFSQYGTGIDIVAPGVDIESTYPGSSYDSLSGTSMATPHVAGVAALVKQKNPSWSNVQIRNHLKNTATSLGSTNLYGSGLVNAEAATR

SEQ ID NO: 65524 - protein, 269 aa, Synthetic construct
AQSVPWGISRVQAPAAHNRGLTGSGVKVAVLDTGISTHPDLNIRGGASFVPGEPSTQDGNGHGTHVAGTVAALNNSIGVIGVAPSADLYAVKVLGANGRGSVSGIAQGLEWAAANNMHIANMSLGSDAPSTTLERAVNYATSQGVLVIAATGNNGSGSVGYPARYANAMAVGATDQNNRRANFSQYGTGIDIVAPXVDIESTYPGSSYDSLSGTSMATPHVAGVAALVKQKNPSWSNVQIRNHLKNTATSLGSTNLYGSGLVNAEAATR

SEQ ID NO: 65525 - protein, 269 aa, Synthetic construct
AQSVPWGISRVQAPAAHNRGLTGSGVKVAVLDTGISTHPDLNIRGGASFVPGEPSTQDGNGHGTHVAGTVAALNNSIGVIGVAPSADLYAVKVLGANGRGSVSGIAQGLEWAAANNMHIANMSLGSDAPSTTLERAVNYATSQGVLVIAATGNNGSGSVGYPARYANAMAVGATDQNNRRANFSQYGTGIDIVAPGVDIESTYPGSSYDSLSGTSMATPHVAGVAALVKQKNPSWSNVQIRNHLKNTATSLGSTNLYXSGLVNAEAATR

SEQ ID NO: 65526 - protein, 269 aa, Synthetic construct
AQSVPWGISRVQAPAAHNRGLTGSGVKVAVLDTGISTHPDLNIRGGASFVPGEPSTQDGNGHGTHVXGTVAALNNSIGVIGVAPSADLYAVKVLGANGRGSVSGIAQGLEWAAANNMHIANMSLGSDAPSTTLERAVNYATSQGVLVIAATGNNGSGSVGYPARYANAMAVGATDQNNRRANFSQYGTGIDIVAPGVDIESTYPGSSYDSLSGTSMATPHVAGVAALVKQKNPSWSNVQIRNHLKNTATSLGSTNLYGSGLVNAEAATR

SEQ ID NO: 65527 - protein, 269 aa, Synthetic construct
AQSVPWGISRVQAPAAHNRGLTGSGVKVAVLDTGISTHPDLNIRGGASFVPGEPSTQDGNGHGTHVAGTVAALNNSIGVIGVAPSADLYAVKVLGANGRGSVSGIAQGLEWAAANNMHIANMSLGSDAPSTTLERAVNYATSQGVLVIAATGNNGSGSVGYPARYANAMAVGATDQNNRRANFSQYGTGIDIVAPGVDIEXTYPGSSYDSLSGTSMATPHVAGVAALVKQKNPSWSNVQIRNHLKNTATSLGSTNLYGSGLVNAEAATR

SEQ ID NO: 65528 - protein, 269 aa, Synthetic construct
AQSVPWGISRVQAPAAHNRGLTGSGVKVAVLDTGISTHPDLNIRGGASFVPGEPSTQDGNGHGTHVAGTVAALNNSIGVIGVAPSADLYAVKVLGANGRGSVSGIAQGLEWAAANNMHIANMSLGSDAPSTTLERAVNYATSQGVLVIAATGNNGSGSVGYPARYANAMAVGATDQNNRRANFSQYGTGIDIXAPGVDIESTYPGSSYDSLSGTSMATPHVAGVAALVKQKNPSWSNVQIRNHLKNTATSLGSTNLYGSGLVNAEAATR

SEQ ID NO: 65529 - protein, 269 aa, Synthetic construct
AQSVPWGISRVQAPAAHNRGLTGSGVKVAVLDTGISTHPDLNIRGGASFVPGEPSTQDGNGHGTHVAGTVAALNNSIGVIGVXPSADLYAVKVLGANGRGSVSGIAQGLEWAAANNMHIANMSLGSDAPSTTLERAVNYATSQGVLVIAATGNNGSGSVGYPARYANAMAVGATDQNNRRANFSQYGTGIDIVAPGVDIESTYPGSSYDSLSGTSMATPHVAGVAALVKQKNPSWSNVQIRNHLKNTATSLGSTNLYGSGLVNAEAATR

SEQ ID NO: 65530 - protein, 269 aa, Synthetic construct
AQSVPWGISRVQAPAAHNRGLTGSGVKVAVLDTGISTHPDLNIRGGASFVPGEPSTQDGNGHGTHVAGTVAALNNSIGVIGVAPSADLYAVKVLGANGRGSVSGIAQGLEWAAANNMHIANMSLGSDAPSTTLERAVNYATSQGVLVIAATGNNGSGSVGYPARYANAMAVGAXDQNNRRANFSQYGTGIDIVAPGVDIESTYPGSSYDSLSGTSMATPHVAGVAALVKQKNPSWSNVQIRNHLKNTATSLGSTNLYGSGLVNAEAATR

SEQ ID NO: 65531 - protein, 269 aa, Synthetic construct
AQSVPWGISRVQAPAAHNRGLTGSGVKVAVLDTGISTHPDLNIRGGASFVPGEPSTQDGNGHGTHVAGTVAALNNSIGVIGVAPSADLYAVKVLGANGRGSVSGIAQGLEWAAANNMHIANMSLGSDAPSTTLERAVNYATSQGVLVIAATGNNGSGSVGYPARYANAMAXGATDQNNRRANFSQYGTGIDIVAPGVDIESTYPGSSYDSLSGTSMATPHVAGVAALVKQKNPSWSNVQIRNHLKNTATSLGSTNLYGSGLVNAEAATR

SEQ ID NO: 65532 - protein, 269 aa, Synthetic construct
AQSVPWGISRVQAPAAHNRGLTGSGVKVAVLDTGISTHPDLNIRGGASFVPGEPSTQDGNGHGTHVAGTVAALNNSIGVIGVAPSADLYAVKVLGANGRGSVSGIAQGLEWAAANNMHIANMSLGSDAPSTTLERAVNYATSQGVLVIAATXNNGSGSVGYPARYANAMAVGATDQNNRRANFSQYGTGIDIVAPGVDIESTYPGSSYDSLSGTSMATPHVAGVAALVKQKNPSWSNVQIRNHLKNTATSLGSTNLYGSGLVNAEAATR

SEQ ID NO: 65533 - protein, 269 aa, Synthetic construct
AQSVPWGISRVQAPAAHNRGLTGSGVKVAVLDTGISTHPDLNIRGGASFVPGEPSTQDGNGHGTHVAGTVAALNNSIGVIGVAPSADLYAVKVLGANGRGSVSGIAQGLEWAAANNMHIANMSLGSDAPSTTLERAVNYATSQGVLVIAATGNNGSGSVGYPARYANAMAVGATDQNNRRANFSQYGTGIDIVAXGVDIESTYPGSSYDSLSGTSMATPHVAGVAALVKQKNPSWSNVQIRNHLKNTATSLGSTNLYGSGLVNAEAATR

SEQ ID NO: 65534 - protein, 297 aa, Unidentified
ENDENLAREAVLNYNHRIVNIEAVSETIDVYDIEVPHTHNFALASGVFVHNSGVKVAVLDTGISTHPDLNIRGGASFVPGEPSTQDGNGHGTHVAGTIAALNNSIGVLGVAPSAELYAVKVLGASGSGSVSSIAQGLEWAGNNGMHVANLSLGSPSPSATLEQAVNSATSRGVLVVAASGNSGAGSISYPARYANAMAVGATDQNNNRASFSQYGAGLDIVAPGVNVQSTYPGSTYASLNGTSMATPHVAGAAALVKQKNPSWSNVQIRNHLKNTATSLGSTNLYGSGLVNAEAATR

SEQ ID NO: 65535 - protein, 274 aa, Synthetic construct
AQTVPYGIPLIKADKVQAQGYKGANVKVGIIDTGIAASHTDLKVVGGASFVSGESYNTDNEGHGTHVAGTVAALDNTTGVLGVAPNVSLYAIKVLNSSGSGTYSAIVSGIEWATQNGLDVINMSLGGPSGSTALKQAVDKAYASGIVVVAAASNSGSSGSQNTIGYPAKYDSVIAVGAVDSNKNRASFSSVGAELEVMAPGVSVYSTYDSDTYTELNGTSMASPHVAGAAALILSKYPTLSASQVRNRLSSTATNLGDSFYYGKGLINVEAAAQ

SEQ ID NO: 65536 - protein, 269 aa, Synthetic construct
AQSVPWGISRVQAPAAHNRGLTGSGVKVAILDTGISTHPDLNIRGGASFVPGEPSTQDGNGHGTHVAGTVAALNNSIGVIGVAPSADLYAVKVLGANGRGSVSGIAQGLEWAAANNMHIANMSLGSDAPSTTLERAVNYATSQGVLVIAATGNNGSGSVGYPARYANAMAVGATDQNNRRANFSQYGTGIDIVAPGVDIESTYPGSSYDSLSGTSMATPHVAGVAALVKQKNPSWSNRQIRNHLKNTATSLGSTNLYGSGLVNAEAATR

SEQ ID NO: 65537 - protein, 269 aa, Synthetic construct
AQSVPWGISRVQAPAAHNRGLTGSGVKVAVLDTGISTHPDLNIRGGASFVPGEPSTQDGNGHGTHAAGTVAALNNSIGVIGVAPSADLYAVKVLGANGRGSVSGIAQGLEWAAANNMHIANMSLGSDAPSTTLERAINYATSQGVLVIAATGNNGSGSVGYPARYANAMAVGATDQNNRRANFSQYGTGIDIVAPGVDIESTYPGSSYDSLSGTSMATPHVAGVAALVKQKNPSWSNVQIRNHLKNTATSLGSTNLYGSGLVNAEAATR

SEQ ID NO: 65538 - protein, 269 aa, Synthetic construct
AQSVPWGISRIQAPAAHNRGLTGSGVKVAVLDTGISTHPDLNIRGGASFVPGEPSTQDGNGHGTHVAGTVAALNNSIGVIGVAPSADLYAVKVLGANGRGSVSGIAQGLEWAAANNMHIANMSLGSDAPSTTLERALNYATSQGVLVIAATGNNGSGSVGYPARYANAMAVGATDQNNRRANFSQYGTGIDIVAPGVDIESTYPGSSYDSLSGTSMATPHVAGVAALVKQKNPSWSNVQIRNHLKNTATSLGSTNLYGSGLVNAEAATR

SEQ ID NO: 65539 - protein, 269 aa, Synthetic construct
AQSVPWGISRVQAPAAHNRGLTGSGVKVAILDTGISTHPDLNIRGGASFVPGEPSTQDGNGHGTHVAGTVAALNNSIGVIGVAPSADLYAVKVLGANGRGSVSGIAQGLEWAAANNMHIANMSLGSDAPSTTLERAVNYATSQGVLVIAATGNNGSGSVGYPARYANAMAVGATDQNNRRANFSQYGTGIDIVAPGVDIESTYPGSSYDSLSGTSMATPHVAGVAALVKQKNPSWSNVQIRNHLRNTATSLGSTNLYGSGLVNAEAATR

SEQ ID NO: 65540 - protein, 269 aa, Synthetic construct
AQSVPWGISRVQAPAAHNRGLTGSGVKVAVLDTGISTHPDLNIRGGASFVPGEPSTQDGNGHGTHAAGTVAALNNSIGVIGVAPSADLYAVKVLGANGRGSVSGIAQGLEWAAANNMHIANMSLGSDAPSTTLERAVNYATSQGVLVIAATGNNGSGSVGYPARYANAMAVGATDQNNRRANFSQYGTGIDIVAPGADIESTYPGSSYDSLSGTSMATPHVAGVAALVKQKNPSWSNVQIRNHLKNTATSLGSTNLYGSGLVNAEAATR

SEQ ID NO: 65541 - protein, 269 aa, Synthetic construct
AQSVPWGISRIQAPAAHNRGLTGSGVKVAILDTGISTHPDLNIRGGASFVPGEPSTQDGNGHGTHVAGTVAALNNSIGVIGVAPSADLYAVKVLGANGRGSVSGIAQGLEWAAANNMHIANMSLGSDAPSTTLERAVNYATSQGVLVIAATGNNGSGSVGYPARYANAMAVGATDQNNRRANFSQYGTGIDIVAPGVDIESTYPGSSYDSLSGTSMATPHVAGVAALVKQKNPSWSNVQIRNHLKNTATSLGSTNLYGSGLVNAEAATR

SEQ ID NO: 65542 - protein, 269 aa, Synthetic construct
AQSVPWGISRIQAPAAHNRGLTGSGVKVAVLDTGISTHPDLNVRGGASFVPGEPSTQDGNGHGTHVAGTVAALNNSIGVIGVAPSADLYAVKVLGANGRGSVSGIAQGLEWAAANNMHIANMSLGSDAPSTTLERAVNYATSQGVLVIAATGNNGSGSVGYPARYANAMAVGATDQNNRRANFSQYGTGIDIVAPGVDIESTYPGSSYDSLSGTSMATPHVAGVAALVKQKNPSWSNVQIRNHLKNTATSLGSTNLYGSGLVNAEAATR

SEQ ID NO: 65543 - protein, 269 aa, Synthetic construct
AQSVPWGISRIQAPAAHNRGLTGSGVKVAVLDTGISTHPDLNIRGGASFVPGEPSTQDGNGHGTHVAGTVAALNNSIGVIGIAPSADLYAVKVLGANGRGSVSGIAQGLEWAAANNMHIANMSLGSDAPSTTLERAVNYATSQGVLVIAATGNNGSGSVGYPARYANAMAVGATDQNNRRANFSQYGTGIDIVAPGVDIESTYPGSSYDSLSGTSMATPHVAGVAALVKQKNPSWSNVQIRNHLKNTATSLGSTNLYGSGLVNAEAATR

SEQ ID NO: 65544 - protein, 269 aa, Synthetic construct
AQSVPWGISRVQAPAAHNRGLTGSGVKVAILDTGISTHPDLNIRGGASFVPGEPSTQDGNGHGTHVAGTVAALNNSIGVIGVAPSADLYAVKVLGANGRGSVSGIAQGLEWAAANNMHIANMSLGSDAPSTTLERALNYATSQGVLVIAATGNNGSGSVGYPARYANAMAVGATDQNNRRANFSQYGTGIDIVAPGVDIESTYPGSSYDSLSGTSMATPHVAGVAALVKQKNPSWSNVQIRNHLKNTATSLGSTNLYGSGLVNAEAATR

SEQ ID NO: 65545 - protein, 269 aa, Synthetic construct
AQSVPWGISRVQAPAAHNRGLTGSGVKVAVLDTGISTHPDLNIRGGASFVPGEPSTQDGNGHGTHAAGTVAALNNSIGVIGVAPSADLYAVKVLGANGRGSVSGIAQGLEWAAANNMHIANMSLGSDAPSTTLERALNYATSQGVLVIAATGNNGSGSVGYPARYANAMAVGATDQNNRRANFSQYGTGIDIVAPGVDIESTYPGSSYDSLSGTSMATPHVAGVAALVKQKNPSWSNVQIRNHLKNTATSLGSTNLYGSGLVNAEAATR

SEQ ID NO: 65546 - protein, 299 aa, Unidentified
EFGKENIDYMKSLIENIAFVEVEDVEIIDYDGYVYDLTTETHNFIANGIVVHNSGVKVAVLDTGISTHPDLNIRGGASFVPGEPSTQDGNGHGTHVAGTIAALNNSIGVLGVAPSAELYAVKVLGASGSGSVSSIAQGLEWAGNNGMHVANLSLGSPSPSATLEQAVNSATSRGVLVVAASGNSGAGSISYPARYANAMAVGATDQNNNRASFSQYGAGLDIVAPGVNVQSTYPGSTYASLNGTSMATPHVAGAAALVKQKNPSWSNVQIRNHLKNTATSLGSTNLYGSGLVNAEAATR

SEQ ID NO: 65547 - protein, 173 aa, Bacillus sp.
STQDGNGHGTHVAGTVAALNNNIGVLGVAPNAELYAVKVLGASGRGTVSGIARGLEWAGDNGMHVANLSLGTSSPSSTLEQAVNYATSQGVLVVAATGNSGSGTISYPARYANAMAVGATDQNNNRASFSQYGTGLDIVAPGVRVQSTYPGNRYASLSGTSMASPHVAGVAAL

SEQ ID NO: 65548 - protein, 173 aa, Bacillus sp.
STQDGNGHGTHVAGTIAALNNNDGVLGVAPSVDLYGVKVLGASGRGTVSSIAQGLLWAANNGTHVANMSLGSSAPSTTLERAVNYATSRGVLVVAASGNSGSGTISYPARYANAMAVGATDQNNNRASFSQYGAGIDIVAPGVNVQSTYPGSTYVSLSGTSMASPHVAGVAAL

SEQ ID NO: 65549 - protein, 173 aa, Bacillus sp.
STQDGNGHGTHVAGTVAALNNSVGVLGVAPSAELYAVKVLGASGSGTVSSIARGLEWAADNNMHIANMSLGTPSPSATLERAVNQATSRGVLVVAATGNSGSGSIGYPARYANAMAVGATDQNNRRANFSQYGTGLDIVAPGVGVQSTYPGSRYVSLSGTSMATPHVAGVAAL

SEQ ID NO: 65550 - protein, 173 aa, Bacillus sp.
STQDGNGHGTHVAGTIAALNNNVGVIGVAPNADLYAVKVLGASGRGTISGIARGLEWAGANGMHIANLSLGTPSPSTTLERAVNAATSRDVLVVAASGNGGSGSIGYPARYANAMAVGATDQNNNRASFSQYGAGLDIVAPGVGVQSTYPGSTYASLNGTSMASPHVAGVAAL

SEQ ID NO: 65551 - protein, 173 aa, Bacillus sp.
STQDGNGHGTHVAGTVAALNNSIGVLGVVPSADLYAVKVLGASGRGTVSGIAQGLEWAGNNNMHVANLSLGSDFPSSTLERAVNAATSRDVLVVAASGNTGSGSISYPARYANAMAVGATDQNNNRANFSQYGQGIDIVAPGVGVQSTYPGSRYASLSGTSMASPHVAGVAAL

SEQ ID NO: 65552 - protein, 173 aa, Bacillus sp.
STQDGNGHGTHVAGTVAALNNSVGVLGVAPSVELYAVKVLGASGRGTVSSIARGLEWAANNGTHVANMSLGTSQPSATLEQAVNAATSRGVLVVAASGNSGSGTVGYPARYANAMAVGATDQNNNRASFSQYGTGLDIVAPGVGVQSTYPGSRYASLSGTSMASPHVAGVAAL

SEQ ID NO: 65553 - protein, 173 aa, Bacillus sp.
STQDGNGHGTHVAGTVAALNNSVGVLGVAPSADLYAVKVLGASGRGTVSSIARGLEWAADNNMHIANLSLGTDQPSATLEQAVNAATSQGVLVVAASGNNGSGSIGYPARYANAMAVGATDQNNNRASFSQYGTGLDIVAPGVGVQSTYPGNTYVSLSGTSMATPHVAGAAAL

SEQ ID NO: 65554 - protein, 173 aa, Bacillus sp.
STQDGNGHGTHVAGTVAALNNNVGVIGVAPSAELYAVKVLGASGSGTISGIAQGLQWAADNGTHVANLSLGSDFPSSTLEQAVNSATSRGVLVVAASGNNGSGSVSYPAGYANAMAVGATDQNNRRASSSQYGAGLDIVAPGVGVQSTYPGSRYASLSGTSMATPHVAGAAAL

SEQ ID NO: 65555 - protein, 173 aa, Bacillus sp.
STQDGNGHGTHVAGTVAALNNSDGVLGVAPSVDLYGVKVLGASGSGSISGIAQGLQWAADNGMHVANLSLGSPQPSATLERAVNYATSRGVLVVAATGNTGAGSVGYPARYANAMAVGATDQNNRRASFSQYGAGLDIVAPGVGVQSTYPGNRYVSLSGTSMATPHVAGAAAL

SEQ ID NO: 65556 - protein, 173 aa, Bacillus sp.
STQDGNGHGTHVAGTIAALDNDEGVVGVAPNADLYAVKVLSASGSGSISSIAQGLEWSGENGMDIANLSLGSSAPSATLEQAVNAATSRGVLVIAASGNSGAGSVGYPARYANAMAVGATDQNNNRASSSQYGAGLDIVAPGVGVQSTYPGNRYASLNGTSMATPHVAGVAAL

SEQ ID NO: 65557 - protein, 173 aa, Bacillus sp.
STQDGNGHGTHVAGTIAALNNSDGVIGVAPSADLYAVKVLGANGSGTVSSIARGLQWAANNGMHVANLSLGSDQPSATLERAVNAATSRGVLVVAASGNSGAGTVGYPARYANAMAVGATDQNNNRASFSQYGTGLDIVAPGVGVQSTYPGNTYVSMSGTSMASPHVAGVAAL

SEQ ID NO: 65558 - protein, 173 aa, Bacillus sp.
STQDGNGHGTHVAGTIAALNNNAGVLGVAPNVDLYAVKVLGANGSGSISGIARGLEWAGDNGMHVANLSLGSPQPSATLERAVNAATSRGVLVVAASGNNGVGSVSYPARYANAMAVGATDQNNNRANFSQYGTGLDIVAPGVGVQSTYPGSRFASLNGTSMASPHVAGVAAL

SEQ ID NO: 65559 - protein, 173 aa, Bacillus sp.
STQDGNGHGTHVAGTIAALNNNDGVLGVAPSVELYGVKVLGASGRGTVSSIARGLEWAANNGMHVANMSLGTPAPSTTLERAVNQATSRGVLVIAASGNNGSGSISYPARYANAMAVGATDQNNRRASFSQYGAGLDIVAPGVGVQSTYPGSRYASLSGTSMASPHVAGVAAL

SEQ ID NO: 65560 - protein, 173 aa, Bacillus sp.
STQDGNGHGTHVAGTIAALNNSVGVLGVAPNADLYGVKVLGASGRGTISSIARGLEWAGANGMHVANLSLGTSSPSSTLEQAVNQATSRGVLVVAASGNTGSGTVSYPATYANAMAVGATDQNNNRANFSQYGTGLDIVAPGVGVQSTYPGSRYASLNGTSMASPHVAGAAAL

SEQ ID NO: 65561 - protein, 173 aa, Bacillus sp.
STQDGNGHGTHVAGTVAALNNNIGVLGVAPSADLYAVKVLGASGSGTISSIAQGLEWAGANGMHVANLSLGTSFPSTTLERAVNSATSRGVLVIAASGNSGSGTVGYPARYANAMAVGATDQNNRRASSSQYGAGLDIVAPGVGVQSTYTGSTYVSLSGTSMATPHVAGVAAL

SEQ ID NO: 65562 - protein, 173 aa, Bacillus sp.
STQDGNGHGTHVAGTVAALNNSDGVIGVAPSVELYAVKVLGANGRGSVSGIARGLEWAANNNMHVANLSLGTSSPSSTLERAVKAATSQGVLVVAASGNNGAGTICYPARYANAMAVGATDQNNNRASFSQYGAGLDIVAPGVGVQSTYPGNTYASLNGTSMATPHVAGVAAL

SEQ ID NO: 65563 - protein, 173 aa, Bacillus sp.
STQDGNGHGTHVAGTVAALNNNVGVLGVAPSADLYAVKVLGASGRGTVSSIARGLQWAANNGMHVANLSLGSDQPSTTLERAVNYATSQGVLVIAASGNTGSGSIGYPARYANAMAVGATDQNNNRANFSQYGAGLDIVAPGVGVQSTYPGSTYASMNGTSMASPHVAGAAAL

SEQ ID NO: 65564 - protein, 269 aa, Synthetic construct
AQSVPWGISRIQAPAAHNRGLTGSGVKVAVLDTGISTHPDLNIRGGASFVPGEPSTQDGNGHGTHVAGTVAALNNSIGVIGIAPSADLYAVKVLGANGRGSVSGIAQGLEWAAANNMHIANMSLGSDAPSTTLERAVNYATSQGVLVIAATGNNGSGSVGYPARYANAMAVGATDQNNRRANFSQYGTGIDIVAPGVDIESTYPGSSYDSLSGTSMATPHVAGVAALVKQKNPSWSNVQIRNHLRNTATSLGSTNLYGSGLVNAEAATR

SEQ ID NO: 65565 - protein, 270 aa, Synthetic construct
AQSVPWGISRIQAPAAHNRGLTGSGVKVAVLDTGISTHPDLNIRGGASFVPGEPSTQDGNGHGTHVAGTVAALNNSIGVIGVAPSADLYAVKVLAGANGRGSVSGICQGLEWAAANNMHIANMSLGSDAPSTTLERCVNYATSQGVLVIAATGNNGSGSVGYPARYANAMAVGATDQNNRRANFSQYGTGIDIVAPGVDIESTYPGSSYDSLSGTSMATPHVAGVAALVKQKNPSWSNVQIRNHLKNTATSLGSTNLYGSGLVNAEAATR

SEQ ID NO: 65566 - protein, 269 aa, Synthetic construct
AQSVPWGISRVQAPAAHNRGLTGSGVKVAVLDTGISTHPDLNIRGGTSFVPGEPSTQDGNGHGTHAAGTVAALNNSIGVIGVAPSADLYAVKVLGANGRGSVSGIAQGLEWAAANNMHIANMSLGSDAMSTTLERAVNYATSQGVLVIAATGNNGSGSVGYPARYANAMAVGATDQNNRRANFSQYGTGIDIVAPGVDIESTYPGSSYDSLSGTSMATPHVAGVAALVKQKNPSWSNVQIRNHLKNTATSLGSTNLYGSGLVNAEAATR

SEQ ID NO: 65567 - protein, 269 aa, Synthetic construct
AQSVPWGISRIQAPTAHNRGLAGSGVKVAVLDTGISTHPDLNIRGGASFVPGEPSTQDGNGHGTHVAGTVAALNNSIGVIGVAPSADLYAVKVLGANGRGSVSGIAQGLEWAAANNMHIANMSLGSDAPSTTLERAVNYATSQGVLVIAATGNNGSGSVGYPARYANAMAVGATDQNNRRANFSQYGTGIDIVAPGVDIESTYPGSSYDSLSGTSMATPHVAGVAALVKQKNPSWSNVQIRNHLKNTATSLGSTNLYGSGLVNAEAATR

SEQ ID NO: 65568 - protein, 173 aa, Bacillus sp.
STQDGNGHGTHVAGTVAALNNNVGVIGVAPSADLYAVKVLGASGRGTISGIAQGLEWAGDNGMHVANLSLGSDQPSATLEQAVNAATSQGVLVVAASGNSGSGSVGYPARYANAMAVGATDQNNNRASFSQYGQGLDIVAPGVGVQSTYPGSRYASMSGTSMASPHVAGVAAL

SEQ ID NO: 65569 - protein, 173 aa, Bacillus sp.
STQDGNGHGTHVAGTVAALNNSDGVIGVAPSADLYAVKVLGANGRGSISGIARGLEWAANNGMHVANMSLGTDQPSATLERAVNQATSQGVLVIAATGNNGSGSVSYPARYANAMAVGATDQNNNRASFSQYGAGLDIVAPGVGVQSTYPGSRYASLNGTSMATPHVAGAAAL

SEQ ID NO: 65570 - protein, 173 aa, Bacillus sp.
STQDGNGHGTHVAGTIAALNNSDGVIGVAPNADLYAVKVLGASGRGTVSGIAQGLEWAAANGMHVANMSLGTPQPSATLERAVNAATSQGVLVVAASGNNGSGSISYPARYANAMAVGATDQNNRRASSSQYGTGLDIVAPGVGVQSTYPGSRYASLNGTSMASPHVAGVAAL

SEQ ID NO: 65571 - protein, 173 aa, Bacillus sp.
STQDGNGHGTHVAGTVAALNNSVGVLGVAPSVELYGVKVLGANGSGSISSIARGLEWAADNGMHIANLSLGSSFPSATLEQAVNQATSRGVLVIAATGNSGSGTVGYPARYANAMAVGATDQNNNRANFSQYGAGLDIVAPGVGVQSTYTGSTYASMNGTSMASPHVAGAAAL

SEQ ID NO: 65572 - protein, 173 aa, Bacillus sp.
STQDGNGHGTHVAGTIAALNNSVGVLGVAPSAELYAVKVLGASGRGTVSGIARGLQWAADNGMHVANLSLGTPQPSATLERAVNQATSRGVLVIAASGNTGSGTVSYPARYANAMAVGATDQNNRRANFSQYGAGLDIVAPGVGVQSTYRGSTYASLSGTSMASPHVAGVAAL

SEQ ID NO: 65573 - protein, 173 aa, Bacillus sp.
STQDGNGHGTHVAGTVAALNNNIGVLGVAPSADLYAVKVLGTSGSGTVSSIARGLEWAASNGMHVANMSLGTSQPSATLERAVNAATSRGVLVVAATGNSGSGTIGYPARYANAMAVGATDQNNRRASFSQYGTGLDIVAPGVGVKSTYPGSTYASLNGTSMASPHVAGVAAL

SEQ ID NO: 65574 - protein, 173 aa, Bacillus sp.
STQDGNGHGTHVAGTIAALNNSIGVLGVAPNAELYAVKVLGANGRGSVSGIAQGLEWAAANNMHIANMSLGSDAPSTTLERAVNYATSQGVLVIAATGNNGSGSVGYPARYANAMAVGATDQNNNRASFSQYGAGLDIVAPGVNVQSTYPGSTYDSLSGTSMATPHVAGVAAL

SEQ ID NO: 65575 - protein, 173 aa, Bacillus sp.
STQDGNGHGTHVAGTVAALNNNVGVLGVAPSVDLYAVKVLGASGRGSVSSIAQGLEWAATNNMHVANLSLGSSQPSSTLEQAVNAATSRGVLVIAASGNNGSGTVSYPARYANAMAVGATDQNNNRASFSHYGTGLDIVAPGVGVQSTYPGSRYASLNGTSMASPHVAGVAAL

SEQ ID NO: 65576 - protein, 173 aa, Bacillus sp.
STQDGNGHGTHVAGTVAALNNSVGVLGVAPSVELYAVKVLGASGSGSISGIARGLEWAADNNTHVANLSLGSDFPSATLERAVNYATSRGVLVVAASGNTGSGTIGYPARYANAMAVGATDQNNRRASFSQYGTGLDIVAPGVGVQSTYPGSRYASLNGTSMASPHVAGVAAL

SEQ ID NO: 65577 - protein, 269 aa, Synthetic construct
AQSVPWGIRRVQAPTAHNRGLSGSGVKVAILDTGISTHPDLNIRGGASFVPGEPSTQDGNGHGTHVAGTVAALNNSIGVIGVAPSADLYAVKVLGANGRGSVSGIAQGLEWAAANNMHIANMSLGSDAPSTTLERAVNYATSQGVLVIAATGNNGSGSVGYPARYANAMAVGATDQNNRRANFSQYGTGIDIVAPGVDIESTYPGSSYDSLSGTSMATPHVAGVAALVKQKNPSWSNVQIRNHLKNTATSLGSTNLYGSGLVNAEAATR

SEQ ID NO: 65578 - protein, 257 aa, Unidentified
AQSVPWGISRVQAPAAHNRGLTGSGVKVAVLDTGISTHPDLNIRGGASFVPGEPSTQDGNGHGTHVAGTIAALNNSIGVLGVAPSAELYAVKVLGASGSGSVSSIAQGLEWAGNNGMHVANLSLGSPSPSATLEQAVNSATSRGVLVVAASGNSGAGSISYPARYANAMAVGATDQNNNRASFSQYGAGLDIVAPGVNVQSTYPGCVKNDSLIFTDRGLVTAAELAVGVPEEHAAFTEVGVDTSTGRATTNAVYNGG

SEQ ID NO: 65579 - protein, 274 aa, Bacillus glycinifermentans
AQTVPYGIPQIKADKVQAQGYKGANVKVGVLDTGIAASHSDLNVVGGASFVSGESYNTDGNGHGTHVAGTVAALDNSIGVLGVAPNVSLYAIKVLNSSGSGTYSAIVSGIEWATANNLDVINMSLGGPSGSTALKQAVDKAYASGVVVVAAAGNSGTSGSSSTIGYPAKYDSVIAVGAVNSSNQRASFSSVGPELDVVAPGVSIYSTYPSNTYATLNGTSMASPHVAGAAALILSKSPALSASQVRDRLSSTATNLGDSFYYGKGLINVEAAAQ

SEQ ID NO: 65580 - protein, 274 aa, Bacillus sp. TH008
AQTVPYGIPQIKADKVQAQGYKGANVKVGVIDTGIAASHSDLNVVGGASFVSGESYNTDGNGHGTHVAGTVAALDNSIGVLGVAPNVSLYAIKVLNSSGSGTYSAIVSGIEWATANNLDVINMSLGGTSGSTALKQAVDKAYASGVVVVAAAGNSGTSGSSSTIGYPAKYDSVIAVGAVNSSNQRASFSSVGPELDVVAPGVSIYSTYPSNTYATLNGTSMASPHVAGAAALILSKYPTLSASQVRDRLSSTATNLGDSFYYGKGLINVEAAAQ

SEQ ID NO: 65581 - protein, 173 aa, Bacillus sp.
STQDGNGHGTHVAGTVAALNNSDGVIGVAPNVELYGVKVLGANGRGTVSGIAQGLEWAAANGMHVANLSLGSPAPSATLEQAVNAATSRGVLVIAASGNSGAGTVGYPARYANAMAVGATDQNNNRANFSQYGAGLDIVAPGVGVQSTYPGNTYTSLSGTSMASPHVAGVAAL

SEQ ID NO: 65582 - protein, 173 aa, Bacillus sp.
STQDGNGHGTHVAGTVAALNNSDGVIGVAPSADLYGVKVLGANGSGSISGIAQGLEWAAANGMHVANMSLGTSFPSSTLEQAVNAATSRGVLVVAASGNSGAGTVSYPARYANAMAVGATDQNNNRASFSQYGAGIDIVAPGVGVQSTYPGNRCVSLSGTSMATPHVAGAAAL

SEQ ID NO: 65583 - protein, 173 aa, Bacillus sp.
STQDGNGHGTHVAGTVAALNNNDGVLGVAPNVDLYAVKVLGASGRGSVSGIARGLEWAGANGMHIANMSLGTSFPSATLEQAVNAATSRGVLVVAATGNNGAGTVGYPARYANAMAVGATDQNNNRASSSQYGAGLDIVAPGVGVQSTYPGSRYASLSGTSMATPHVAGAAAL

SEQ ID NO: 65584 - protein, 173 aa, Bacillus sp.
STQDGNGHGTHVAGTVAALNNNVGVLGVAPSVDLYGVKVLGASGRGTVSGIVRGLEWAADNGMHVANLSLGTPFPSATLERAVNAATSQGVLVIAASGNSGSGSISYPARYANAMAVGATDQNNNRASFSQYGAGIDIVAPGVGVQSTYPGNRYASLSGTSMATPHVAGAAAL

SEQ ID NO: 65585 - protein, 378 aa, Alkalihalobacillus patagoniensis
MNKKMGKVVASTALLISLAFSSSIAQAAEEAKEKYLIGFTEQEAVSTFVEQIEEEEVSISEVDDVEIDLLYEFETIPVLSVELNPEDVASLESDPAISYIEEDAEVTTMAQSVPWGISRVQAQSAHNRGITGSGVKVAVLDTGISTHEDLNVRGGASFVAGEPGYQDGNGHGTHVAGTIAALNNSIGVLGVAPNAELYAVKVLGASGSGSISGIAQGLQWAGNNGMHIANMSLGTSAPSATLEQAVNAATSRGVLVIAASGNSGAGSVGYPARYANAMAVGATDQNNNRASFSQYGAGLDIVAPGVGVQSTYPGNRYASLNGTSMATPHVAGVAALVKQKNPSWSNVQVRNHLKNTATNLGNTNLYGSGLVNAEAATR

SEQ ID NO: 65586 - protein, 316 aa, Unidentified
KEKVVSALLKEIERLEGVAKLALETIELARRLEFHEVSSVEVVDYNDWVYDLVIPETHNFIAPNGLVLHNSGVKVAVLDTGISTHPDLNIRGGASFVPGEPSTQDGNGHGTHVAGTIAALNNSIGVLGVAPSAELYAVKVLGASGSGSVSSIAQGLEWAGNNGMHVANLSLGSPSPSATLEQAVNSATSRGVLVVAASGNSGAGSISYPARYANAMAVGATDQNNNRASFSQYGAGLDIVAPGVNVQSTYPGSTYASLNGTSMATPHVAGAAALVKQKNPSWSNVQIRNHLKNTATSLGSTNLYGSGLVNAEAATR

SEQ ID NO: 65587 - protein, 253 aa, Unidentified
AQSVPWGISRVQAPAAHNRGLTGSGVKVAVLDTGISTHPDLNIRGGASFVPGEPSTQDGNGHGTHVAGTIAALNNSIGVLGVAPSAELYAVKVLGASGSGSVSSIAQGLEWAGNNGMHVANLSLGSPSPSATLEQAVNSATSRGVLVVAASGNSGAGSISYPARYANAMAVGATDQNNNRASFSQYGAGLDIVAPGVNVQSTYPGCFAPGTRVITASGDVVEIDEIVERAAETAVDGGLREGSTEVTVGVTNV

SEQ ID NO: 65588 - protein, 324 aa, Unidentified
ELVISNDNILYFAERVGFSDAEKMEKLEKAIWNYKRKMNRERFVASVEEVVPDGVEKVYDVKIPGINAFNANGFVVHNSGVKVAVLDTGISTHPDLNIRGGASFVPGEPSTQDGNGHGTHVAGTIAALNNSIGVLGVAPSAELYAVKVLGASGSGSVSSIAQGLEWAGNNGMHVANLSLGSPSPSATLEQAVNSATSRGVLVVAASGNSGAGSISYPARYANAMAVGATDQNNNRASFSQYGAGLDIVAPGVNVQSTYPGSTYASLNGTSMATPHVAGAAALVKQKNPSWSNVQIRNHLKNTATSLGSTNLYGSGLVNAEAATR

SEQ ID NO: 65589 - protein, 173 aa, Bacillus sp.
STQDGNGHGTHVAGTIAALNNSDGVLGVAPNVDLYGVKVLGANGSGTVSGIARGLQWAGDNGMHVANLSLGTDAPSATLERAVNQATSRGVLVVAASGNTGAGSISYPARYANAMAVGATDQNNRRANFSQYGAGLDIVAPGVGVQSTYTGNRYVSMNGTSMASPHVAGAAAL

SEQ ID NO: 65590 - protein, 173 aa, Bacillus sp.
STQDGNGHGTHVAGTVAALNNNVGVLGVAPSVDLYAVKVLGANGSGTISGIAQGLEWAANNGMHVANMSLGSPAPSATLERAVNQATSRGVLVVAATGNSGSGTVGYPARYANAMAVGATDQNNNRASFSQYGAGIDIVAPGVGVQSTYPGSRYVSLSGTSMASPHVAGVAAL

SEQ ID NO: 65591 - protein, 173 aa, Bacillus sp.
STQDGNGHGTHVAGTIAALNNSVGVLGVAPNADLYGVKVLGASGRGSISGIAQGLEWAATNGMHVANLSLGTDQPSATLERAVNYATSRGVLVVAASGNTGSGTIGYPARYANAMAVGATDQNNNRASFSQYGAGIDIVAPGVGVQSTYTGSRYALMSGTSMATPHVAGVAAL

SEQ ID NO: 65592 - protein, 173 aa, Bacillus sp.
STQDGNGHGTHVAGTVAALNNNVGVIGVAPSVDLYAVKVLGASGRGSVSGIARGLQWAAANGMHIANLSLGSSQPSATLERAVNYATSRGVLVVAASGNSGSGTVSYPARYANAMAVGATDQNNNRANSSQYGTGLDIVAPGVGVQSTYPGNTYASLSGTSMATPHVAGAAAL

SEQ ID NO: 65593 - protein, 173 aa, Bacillus sp.
STQDGNGHGTHVAGTIAALNNNVGVLGVAPNVELYGVKVLGASGSGSISGIAQGLQWAGNNGMHIANMSLGTSAPSATLEQAVNAATSRGVLVIAASGNSGAGSVGYPARYANAMAVGATDQNNRRANFSQYGTGIDIVAPGVNVQSTYPGNRYVSMNGTSMATPHVAGVAAL

SEQ ID NO: 65594 - protein, 173 aa, Bacillus sp.
STQDGNGHGTHVAGTVAALNNNVGVLGVAPSAELYAVKVLGASGSGTISSIAQGLEWAGTNGTHIANLSLGTDQPSATLERAVNAATSRGVLVVAASGNNGSGSVSYPARYANAMAVGATDQNNRRANFSQYGAGLDIVAPGVGVQSTCPGNRYVSLSGTSMASPHVAGVAAL

SEQ ID NO: 65595 - protein, 378 aa, Bacillus sp.
MNKKMGKVVASTALLISLAFSSSIAQAAEEAKEKYLIGFTEQEAVSTFVEQIEEEEVSISEVDDVEIDLLYEFETIPVLSVEINPEDVASLESDPAISYIEEDAEVTTMAQSVPWGISRVQAQSAHNRGITGSGVKVAVLDTGISTHEDLNVRGGASFVAGEPGYQDGNGHGTHVAGTIAALNNSLGVLGVAPNAELYAVKVLGASGSGSISGIAQGLQWAGNNGMHIANMSLGTSAPSATLEQAVNAATSRGVLVIAASGNSGAGSVGYPARYANAMAVGATDQNNNRASFSQYGAGLDIVAPGVGVQSTYPGNRYASLNGTSMATPHVAGVAALVKQKNPSWSNVQVRNHLKNTATNLGNTNLYGSGLVNAEAATR

SEQ ID NO: 65596 - protein, 159 aa, Bacillus sp.
AQTVPWGIIAPAVHRGTGSGVKVAVLDTGIHPDLRGGASFVPGEPTDNGHGTHVAGTVAALNNSIGVLGVAPSALYAVKVLGANGSGSSGIAQGIEWAANNMDVINMSLGGGSTLEAVNARGVVVAAAGNGSGTVGYPARYSIAVGAVDNNRASFSSYG

SEQ ID NO: 65597 - protein, 173 aa, Bacillus sp.
STQDGNGHGTHVAGTIAALNNSIGVLGVAPNAELYAVKVLGASGSGSISGIAQGLEWAAANNMHIANMSLGSDAPSTTLERAVNYATSQGVLVIAATGNNGSGSVGYPARYANAMAVGATDQNNRRANFSQYGTGIDIVAPGVNVQSTYPGNRYASLNGTSMATPHVAGVAAL

SEQ ID NO: 65598 - protein, 173 aa, Bacillus sp.
STQDGNGHGTHVAGTVAALNNSVGVLGVAPSADLYAVKVLGASGRGSVSGIAQGLEWAADNGMHVANMSLGTDFPSATLEQAVNAATSRDVLVVAATGNTGSGTVGYPARYANAMAVGATDQNNNRANFSQYGTGLDIVAPGVGVQSTYPGSRYVSMSGTSMASPHVAGAAAL

SEQ ID NO: 65599 - protein, 173 aa, Bacillus sp.
STQDGNGHGTHVAGTVAALNNSDGVIGVAPSVDLYGVKVLGASGRGSVSSIARGLEWAADNGMHVANLSLGSDQLSTTLERAVNQATSRGVLVVAASGNNGSGTVSYPARYANAMAVGATDQNNNRASSSQYGTGLDIVAPGVGVQSTYPGSRYASLSGTSMASPHVAGVAAL

SEQ ID NO: 65600 - protein, 308 aa, Unidentified
VSRKLIKDIEAETAETVSIADHELTGFYAATVESVTEDTAYTKDISVPSNNTYIADGFVTHNSGVKVAVLDTGISTHPDLNIRGGASFVPGEPSTQDGNGHGTHVAGTIAALNNSIGVLGVAPSAELYAVKVLGASGSGSVSSIAQGLEWAGNNGMHVANLSLGSPSPSATLEQAVNSATSRGVLVVAASGNSGAGSISYPARYANAMAVGATDQNNNRASFSQYGAGLDIVAPGVNVQSTYPGSTYASLNGTSMATPHVAGAAALVKQKNPSWSNVQIRNHLKNTATSLGSTNLYGSGLVNAEAATR

SEQ ID NO: 65601 - protein, 335 aa, Unidentified
QESYEELLRKLETTNDERVRNETLILLSDVSDAHELAKEKIEKIKEIVNSEVHWEKVTEVGEVDGVEYVYDLTVEGSHNFVANGFIVHNSGVKVAVLDTGISTHPDLNIRGGASFVPGEPSTQDGNGHGTHVAGTIAALNNSIGVLGVAPSAELYAVKVLGASGSGSVSSIAQGLEWAGNNGMHVANLSLGSPSPSATLEQAVNSATSRGVLVVAASGNSGAGSISYPARYANAMAVGATDQNNNRASFSQYGAGLDIVAPGVNVQSTYPGSTYASLNGTSMATPHVAGAAALVKQKNPSWSNVQIRNHLKNTATSLGSTNLYGSGLVNAEAATR

SEQ ID NO: 65602 - protein, 376 aa, Bacillus sp.
MGKIVASTALLISIAFSSSIAQAAEEAKEKYLIGFNEQEAVSTFVEQMEEDAFTILAEDKEEVDIELLYEFETIPVLSVELSPDDVASLELDPAISYIEEDFEVTTMAQSVPWGIDRVQAPIAQNRGFTGAGVRVAVLDTGISTHPDLNIRGGVSFVPGEPTIADGNGHGTHVAGTIAALNNNVGVLGVAPNVELYGVKVLGANGSGSISGIAQGLQWAGNNGMHVANLSLGSSQPSATLEQAVNQATSQGVLVVAASGNSGAGTVGYPARYANAMAVGATDQNNNRASFSQYGQGLDIVAPGVGVQSTYPGNRYASLSGTSMATPHVAGVAALVKQKNPSWSNVQVRNHLKNTATNLGNTNLYGSGLVNAEAATR

SEQ ID NO: 65603 - protein, 173 aa, Bacillus sp.
STQDGNGHGTHVAGTIAALNNSIGVLGVAPNAELYAVKVLGANGRGSVSGIAQGLEWAAANNMHIANMSLGSDAPSTTLKRAVNYATSQGVLVIAATGNNGSGSVGYPARYANAMAVGATDQNNRRANFSQYGTGIDIVAPGVNVQSTYPGNRYASLNGTSMATPHVAGAAAL

SEQ ID NO: 65604 - protein, 173 aa, Bacillus sp.
STQDGNGHGTHVAGTIAALNNSVGVLGVAPNAELYAVKVLGANGRGSVSGIAQGLEWAAANNMHIANMSLGSDAPSTTLERAVNYATSQGVLVIAATGNNGSGSVGYPARYANAMAVGATDQNNRRANFSQYGTGIDIVAPGVNVQSTYPGTRYASLNGTSMATPHVAGAAAL

SEQ ID NO: 65605 - protein, 173 aa, Bacillus sp.
STQDGNGHGTHVAGTVAALNNNIGVLGVAPNVGLYAVKVLGASGRGTVSGIARGLEWAATNGMHVANLSLGSDAPSATLEQAVNQATSRGVLVVAATGNTGSGTISYPARYANAMAVGATDQNNRRANFSQYGQGLDIVAPGVGVQSTYPGNTYVSMSGTSMASPHVAGVAAL

SEQ ID NO: 65606 - protein, 338 aa, Unidentified
NSSIKIYLESNTQEIEKLEEIRKTELKLVKEILNDEKLIDSIGYVLFLASNEIYWDEIVEIEQLNGEFTIYDLHVPRYHNFIGGNLPTILHNSGVKVAVLDTGISTHPDLNIRGGASFVPGEPSTQDGNGHGTHVAGTIAALNNSIGVLGVAPSAELYAVKVLGASGSGSVSSIAQGLEWAGNNGMHVANLSLGSPSPSATLEQAVNSATSRGVLVVAASGNSGAGSISYPARYANAMAVGATDQNNNRASFSQYGAGLDIVAPGVNVQSTYPGSTYASLNGTSMATPHVAGAAALVKQKNPSWSNVQIRNHLKNTATSLGSTNLYGSGLVNAEAATR

SEQ ID NO: 65607 - protein, 173 aa, Bacillus sp.
STQDGNGHGTHVAGTVAALNNSIGVIGVAPSADLYAVKVLGANGSGSVSGIARGLEWAATNNMHIANMSLGSDFPSSTLERAVNYATSRDVLVIAATGNNGSGSVGYPARYANAMAVGATDQNNRRANFSQYGTGIDIVAPGVNVQSTYPGNRYASLNGTSMATPHVAGAAAL

SEQ ID NO: 65608 - protein, 173 aa, Bacillus sp.
STQDGNGHGTHVAGTIAALDNSIGVIGVAPSADLYAVKVLGANGRGSVSGIAQGLEWAAANNMHIANMSLGSDAPSTTLERAVNYATSQGVLVIAATGNNGSGSVGYPARYANAMAVGATDQNNRRANFSQYGTGIDIVAPGVNVQSTYPGNRYASLNGTSMATPHVAGAAAL

SEQ ID NO: 65609 - protein, 173 aa, Bacillus sp.
STQDGNGHGTHVAGTIAALDNSIGVIGVAPSADLYAVKVLGANGSGSVSGIARGLEWAATNNMHIANMSLGSDAPSTTLERAVNYATSQGVLVIAATGNNGSGSVGYPARYANAMAVGATDQNNRRANFSQYGTGIDIVAPGVNVQSTYPGNRYASLNGTSMATPHVAGAAAL

SEQ ID NO: 65610 - protein, 173 aa, Bacillus sp.
STQDGNGHGTHVAGTVAALNNSIGVIGVAPSADLYAVKVLGANGRGSVSGIAQGLEWAAANNMHIANMSLGSDFPSSTLERAVNYATSQGVLVIAATGNNGSGSVGYPARYANAMAVGATDQNNRRANFSQYGTGIDIVAPGVNVQSTYPGNRYASLNGTSMATPHVAGAAAL

SEQ ID NO: 65611 - protein, 173 aa, Bacillus sp.
STQDGNGHGTHVAGTIAALNNNVGVIGVAPNVELYGVKVLGANGRGTISSIARGLEWAANNGTHIANLSLGTDQPSATLERAVNQATSQGVLVIAASGNSGSGSVSYPARYANAMAVGATDQNNNRASFSHYGTGLDIVAPGVGVQSTYPGSRYASLNGTSMASPHVAGVAAL

SEQ ID NO: 65612 - protein, 268 aa, Bacillus sp.
QTVPWGINRVQAPIAQSRGFTGTGVRVAVLDTGISNHADLRIRGGASFVPGEPNISDGNGHGTHVAGTIAALNNSIGVLGVAPNVDLYGVKVLGASGSGSISGIAQGLQWAANNGMHIANMSLGSSAGSATMEQAVNQATASGVLVVAASGNSGAGNVGFPARYANAMAVGATDQNNNRASFSQYGAGLDIVAPGVGVQSTVPGNGYSSFNGTSMATPHVAGVAALVKQKNPSWSNVQIRNHLKNTATNLGNTNQFGSGLVNAEAATR

SEQ ID NO: 65613 - protein, 268 aa, Bacillus sp.
QTVPWGINRVQAPIAQSRGFTGTGVRVAVLDTGISNHADLRIRGGASFVPGEPNISDGNGHGTHVAGTIAALNNSIGVLGVAPNVDLYGVKVLGASGSGSISGIAQGLQWAANNGMHIANMSLGSSAGSATMEQAVNQATASGVLVVAASGNSGAGNVGFPARYANAMAVGATDQNNNRASFSQYGAGLDIVAPGVGVQSTVPGNGYASFNGTSMATPHVAGVAALVKQKNPSWSNVQIRNHLKNTATNLGNTTQFGSGLVNAEAATR

SEQ ID NO: 65614 - protein, 274 aa, Bacillus licheniformis
AQQVPYGIPLIKADKLTYPSFKGANVKGAVLATGIPPYPIQCEANRFTGLVAGEAYNTDGNGHGTHVAGTVAALDNTTGVLGVAPSVSLYAVKVLNSSGSGSYSGIVSGIEWATTNGMDVINMSKCLGSGSTAMKTLRLNRFAKGVVVVAAAGNSGSSGNTNTIGYPAKYHSVIAVGAVDSNSGFASFSSVGAELPVMAPGAGVYSTPYRKHGTSRNGTSMASPHVAGAATLILSKHPNLPASQVRQWLSSTATYLGSSFYYGKGLINVEAAAQ

SEQ ID NO: 65615 - protein, 269 aa, Synthetic construct
AQTVPWGIPHIKADKAHAAGVTGSGVKVAILDTGIDANHEDLNVKGGASFVAGEPNALQDGNGHGTHVAGTVAALDNTIGVLGVAPSVSLYAVKVLGASGSGSVSSIAQGLEWAGNNGMHVANLSLGSPSPSATLEQAVNSATSRGVLVVAASGNSGAGSISYPARYANAMAVGATDQNNNRASFSQYGAGLDIVAPGVNILSTTPGNNYASLNGTSMAAPHVAGAAALIKAKYPSMTNVQIRNRLKNTATNLGDPFFYGKGVINVESA

SEQ ID NO: 65616 - protein, 268 aa, Bacillus sp.
QTVPWGINRVQAPIAQSRGFTGTGVRVAVLDTGISNHADLRIRGGASFVPGEPNISDGNGHGTHVAGTIAALNNSIGVLGVAPNVDLYGVKVLGASGSGSISGIAQGLQWAANNGMHIANMSLGSSSAGSATMEQAVNQATASGVLVVAASGNSGAGNVGFPARYANAMAVGATDQNNNRASFSQYGAGLDIVAPGVGVQSTVPGNGYSSFNGTSMATPHVAVGAALVKQKNPSWSNVQIRNHLKNTATNLGNTNQFSGLVNAEAATR

SEQ ID NO: 65617 - protein, 269 aa, Synthetic construct
AQTVPWGIPHIKADKAHAAGVTGSGVKVAILDTGIDANHADLNVKGGASFVAGEPNALQDGNGHGTHVAGTVAALDNTIGVLGVAPSVSLYAVKVLGASGSGSVSSIAQGLEWAGNNGMHVANLSLGSPSPSATLEQAVNSATSRGVLVVAASGNSGAGSISYPARYANAMAVGATDQNNNRASFSQYGAGLDIVAPGVNILSTTPGNNYASLNGTSMAAPHVAGAAALIKAKYPSMTNVQIRNRLKNTATNLGDPFFYGKGVINVESA

SEQ ID NO: 65618 - protein, 269 aa, Synthetic construct
AQTVPWGIPHIKADKAHAAGVTGSGVKVAILDTGIDANHADLNVKGGASFVAGEPNALQDGNGHGTHVAGTVAALDNNIGVLGVAPSVSLYAVKVLGASGSGSVSSIAQGLEWAGNNGMHVANLSLGSPSPSATLEQAVNSATSRGVLVVAASGNSGAGSISYPARYANAMAVGATDQNNNRASFSQYGAGLDIVAPGVNILSTTPGNNYASLNGTSMAAPHVAGAAALIKAKYPSMTNVQIRNRLKNTATNLGDPFFYGKGVINVESA

SEQ ID NO: 65619 - protein, 269 aa, Synthetic construct
AQVVPWGIPHIKADKAHAAGVTGSGVKVAILDTGIDANHADLNVKGGASFVAGEPNALQDGNGHGTHVAGTVAALDNTIGVLGVAPSVSLYAVKVLGASGSGSVSSIAQGLEWAGNNGMHVANLSLGSPSPSATLEQAVNSATSRGVLVVAASGNSGAGSISYPARYANAMAVGATDQNNNRASFSQYGAGLDIVAPGVNILSTTPGNNYASLNGTSMAAPHVAGAAALIKAKYPSMTNVQIRNRLKNTATNLGDPFFYGKGVINVESA

SEQ ID NO: 65620 - protein, 269 aa, Synthetic construct
AQTVPWGIPHIKADKAHAAGVTGSGVKVAILDTGIDANHADLNVKGGASFVAGEPNALQDGNGHGTHVAGTVAALDNTIGVLGVAPSVSLYAVKVLGASGSGSVSSIAQGLEWAGNNGMHVANLSLGSPSPSATLEQAVNSATSRGVLVVAASGNSGAGSISYPARYANAMAVGATDQNNNRASFSQYGAGLDIVAPGVNILSTTPGNNYASLNGTSMAAPHVAGAAALIKAKYPSMTNVQIRNRLKNTATNLGPPFFYGKGVINVESA

SEQ ID NO: 65621 - protein, 327 aa, Unidentified
AERQTVEITAAEFATLSTEERSLYSAFTSPAVEKGAEGSAAQMHSFKVEDISLESEKTEWAGFRVDKDQLYLRHDYLVLHNSGVKVAVLDTGISTHPDLNIRGGASFVPGEPSTQDGNGHGTHVAGTIAALNNSIGVLGVAPSAELYAVKVLGASGSGSVSSIAQGLEWAGNNGMHVANLSLGSPSPSATLEQAVNSATSRGVLVVAASGNSGAGSISYPARYANAMAVGATDQNNNRASFSQYGAGLDIVAPGVNVQSTYPGSTYASLNGTSMATPHVAGAAALVKQKNPSWSNVQIRNHLKNTATSLGSTNLYGSGLVNAEAATR

SEQ ID NO: 65622 - protein, 210 aa, Bacillus sp.
QSVPWGITRVQAPAAINRGTNGSGVRVAVLDTGISTHSDLTIRGGASFVPGEPNTSDLNGHGTHVAGTIAALNNSIGVVGVAPNADLYAVKVLGANGRGSIGGIAQGLEWAAANNMHIANLSLGSDAPSSTLEQAVNYATSRGVLVIAASGNNGSGNVGYPARYANAMAVGATDQNNNRANFSQYGAGLDIVAPGVGIQSTYPGNRYASL

SEQ ID NO: 65623 - protein, 209 aa, Bacillus sp.
QSVPWGITRVQAPAAINRGTNGSGVRVAVLDTGISTHSDLTIRGGASFVPGEPNTSDLNGHGTHVAGTIAALNNSIGVVGVAPNADLYAVKVLGANGRGSIGGIAQGLEWAAANNMHIANLSLGSDAPSSTLEQAVNYATSRGVLVIAASGNNGSGNVGYPARYANAMAVGATDQNNNRANFSQYGAGLDIVAPGVGIQSTYPGNRYAS

SEQ ID NO: 65624 - protein, 269 aa, Bacillus pumilus
AQTIPWGINRVQAPIAQSRGFTGSGVRVAVLDTGISNHADLRIRGGASFVPGEPNISDGNGHGTHVAGTIAALNNSIGVLGVAPNVDLYGVKVLGASGRGSISGIAQGLQWAANNGMHIANMSLGSSAGSATMEQAVNQATASGVLVVAASGNSGAGNVGFPARYANAMAVGATDQNNNRASFSQYGAGLDIVAPGVGVQSTVPGNGYASFNGTSMATPHVAGVAALVKQKNPSWSNVQIRNHLKNTATNLGNTTQFGSGLVNAEAATR

SEQ ID NO: 65625 - protein, 269 aa, Bacillus pumilus
AQTIPWGINRVQAPIAHSRGFTGTGVRVAVLDTGISNHADLRIRGGASFVPGEPNISDGNGHGTHVAGTIAALNNSIGVLGVAPNVDLYGVKVLGASGRGSISGIAQGLQWAANNGMHIANMSLGSSAGSATMEQAVNQATASGVLVVAASGNSGAGNVGFPARYANAMAVGATDQNNNRASFSQYGAGLDIVAPGVGVQSTVPGNGYASFNGTSMATPHVAGVAALVKQKNPSWSNVQIRNHLKNTATNLGNTTQFGSGLVNAEAATR

SEQ ID NO: 65626 - protein, 268 aa, Bacillus sp.
QTVPWGINRVQAPIAQSRGFTGTGVRVAVLDTGISNHADLRIRGGASFVPGEPNISDGNGHGTHVAGTIAALNNSIGVLGVAPNVDLYGVKVLGASGEGSISGIAQGLQWAANNGMHIANMSLGSSAGSATMEQAVNQATASGVLVVAASGNSGAGNVGFPARYANAMAVGATDQNNNRASFSQYGAGLDIVAPGVGVQSTVPGNGYASFNGTSMATPHVAGVAALVKQKNPSWSNVQIRNHLKNTATNLGNTTQFGSGLVNAEAATR

SEQ ID NO: 65627 - protein, 268 aa, Bacillus sp.
QTIPWGITRVQAPAAINRGFTGAGVRVAVLDTGISNHPDLNIRGGVSFVPGESTYQDGNGHGTHVAGTIAALNNSIGVVGVAPNTELYAVKVLGANGSGSISSIAQGLQWTAQNNIHVANLSLGSSTGSQTLELAVNQATSAGVLVVAASGNNGSGTISYPARYANALAVGATDQNNNRASFSQYGTGLNIVAPGVGVQSTYPGNRYASLSGTSMATPHVAGVAALVKQKNPSWSNTQIRQHLLNTATPLGSSNQYGSGLVNAEAATR

SEQ ID NO: 65628 - protein, 268 aa, Unidentified
QTIPWGITRVQAPAAINRGFTGAGVRVAVLDTGISNHPDLNIRGGVSFVPGESTYQDGNGHGTHVAGTIAALNNSIGVVGVAPNTELYAVKVLGANGSGSISSIAQGLQWTAQNNIHVANLSLGSPTGSQTLELAVNQATSAGVLVVAASGNNGSGTISYPARYANALAVGATDQNNNRASFSQYGTGLNIVAPGVGVQSTYPGNRYASLSGTSMATPHVAGVAALVKQKNPGWSNTQIRQHLLNTATPLGSSNQYGSGLVNAEAATR

SEQ ID NO: 65629 - protein, 268 aa, Bacillus sp.
QTVPWGINRVQAPIAQSRGFTGTGVRVAVLDTGISNHADLRIRGGASFVPGEPNISDGNGHGTHVAGTIAALNNSIGVLGVAPNVDLYGVKVLGADGSGSISGIAQGLQWAANNGMHIANMSLGSSAGSATMEQAVNQATASGVLVVAASGNSGAGNVGFPARYANAMAVGATDQNNNRASFSQYGAGLDIVAPGVGVQSTVPGNGYASFNGTSMATPHVAGVAALVKQKNPSWSNVQIRNHLKNTATNLGNTTQFGSGLVNAEAATR

SEQ ID NO: 65630 - protein, 173 aa, Bacillus sp.
STQDGNGHGTHVAGTIAALNNNVGVLGVAPSVDLYGVKVLDASGRGTISGIARGLEWAAANGMHIANMSLGSDQPSTTLERAVNAATSRGVLVVAASGNTGSGTVSYPARYANAMAVGATDQNNNRANSSQYGAGLDIVAPGVGVQSTYPGSTYASLSGTSMASPHVAGVAAL

SEQ ID NO: 65631 - protein, 173 aa, Bacillus sp.
STQDGNGHGTHVAGTVAALNNSIGVIGVAPSADLYAVKVLGANGRGSVSGIAQGLEWAAANNMHIANMSLGSDAPSTTLERAVNYATSQGVLVIAATGNNGSGSVGYPARYANAMAVGATDQNNRRANFSQYGTGIDIVAPGVNVQSTYPGNRYASLNGTSMATPHVAGVAAL

SEQ ID NO: 65632 - protein, 173 aa, Bacillus sp.
STQDGNGHGTHVAGTIAALNNSIGVLGVAPNADLYAVKVLGANGSGSVSGIARGLEWAATNNMHIANMSLGSDAPSTTLERAVNYATSQGVLVIAATGNNGSGSVGYPARYANAMAVGATDQNNRRANFSQYGTGIDIVAPGVNVQSTYPGNRYARLNGTSMATPHVAGVAAL

SEQ ID NO: 65633 - protein, 173 aa, Bacillus sp.
STQDGNGHGTHVAGTVAALNNSIGVIGVAPSADLYAVKVLGANGRGSVSGIAQGLEWAAANNMHIANMSLGSDAPSTTLERAVNYATSQGVLVIAATGNNGSGSVGYPARYANAMAVGATDQNNRRANFSQYGTGIDIVAPGVNVQSTYPGNRYASLSGTSMATPHVAGAAAL

SEQ ID NO: 65634 - protein, 173 aa, Bacillus sp.
STQDGNGHGTHVAGTVAALNNSIGVIGVAPSADLYAVKVLGANGRGSVSGIAQGLEWAAANNMHIANMSLGSDFPSSTLERAVNYATSRDVLVIAATGNNGSGSVGYPARYANAMAVGATDQNNRRANFSQYGTGIDIVAPGVNVQSTYPGNRYASLNGTSMATPHVAGVAAL

SEQ ID NO: 65635 - protein, 173 aa, Bacillus sp.
STQDGNGHGTHVAGTIAALNNSIGVLGVAPNAELYAVKVLGANGRGSVSGIAQGLEWAAANNMHIANMSLGSDAPSTTLERAVNYATSQGVLVIAATGNNGSGSVGYPARYANAMAVGATDQNNRRANFSQYGTGIDIVAPGVNVQSTYPGNRYVSMNGTSMATPHVAGVAAL

SEQ ID NO: 65636 - protein, 173 aa, Bacillus sp.
STQDGNGHGTHVAGTIAALNNSIGVIGVAPSADLYAVKVLGANGRGSVSGIAQGLEWAAANNMHIANMSLGSDAPSTTLERAVNYATSQGVLVIAATGNNGSGSVGYPARYANAMAVGATDQNNRRANFSQYGTGIDIVAPGVNVQSTYPGNRYVSMNGTSMATPHVAGAAAL

SEQ ID NO: 65637 - protein, 173 aa, Bacillus sp.
STQDGNGHGTHVAGTIAALNNSIGVIGVAPNADLYAVKVLGANGSGSVSGIARGLEWAATNNMHIANMSLGSDFPSSTLERAVNYATSQGVLVIAATGNNGSGSVGYPARYANAMAVGATDQNNRRANFSQYGTGIDIVAPGVNVQSTYPGNRYASLNGTSMATPHVAGVAAL

SEQ ID NO: 65638 - protein, 173 aa, Bacillus sp.
STQDGNGHGTHVAGTVAALNNNDGVLGVAPNVDLYAVKVLGANGRGSISGIARGLQWAADNGTHVANLSLGTDQPSTTLERAVNYATSRGVLVVAATGNTGSGTVSYPARYANAMAVGATDQNNNRANFSQYGAGIDIVAPGVNVQSTYPGNTYVSLNGTSMATPHVAGAAAL

SEQ ID NO: 65639 - protein, 269 aa, Synthetic construct
AQTVPWGIPHIKADKAHAAGVTGSGVKVAILDTGIDANHEDLNVKGGASFVAGEPNALQDGNGHGTHVAGTVAALDNTTGVLGVAPSVSLYAVKVLGASGSGSVSSIAQGLEWAGNNGMHVANLSLGSPSPSATLEQAVNSATSRGVLVVAASGNSGAGSISYPARYANAMAVGATDQNNNRASFSQYGAGLDIVAPGVNILSTTPGNNYASLNGTSMAAPHVAGAAALIKAKYPSMTNVQIRNRLKNTATNLGPPFFYGKGVINVESA

SEQ ID NO: 65640 - protein, 269 aa, Synthetic construct
AQTVPWGIPHIKADKAHAAGVTGSGVKVAILDTGIDANHADLNVKGGASFVAGEPNALQDGNGHGTHVAGTVAALDNNTGVLGVAPSVSLYAVKVLGASGSGSVSSIAQGLEWAGNNGMHVANLSLGSPSPSATLEQAVNSATSRGVLVVAASGNSGAGSISYPARYANAMAVGATDQNNNRASFSQYGAGLDIVAPGVNILSTTPGNNYASLNGTSMAAPHVAGAAALIKAKYPSMTNVQIRNRLKNTATNLGDPFFYGKGVINVESA

SEQ ID NO: 65641 - protein, 269 aa, Synthetic construct
AQTVPWGIPHIKADKAHAAGVTGSGVKVAILDTGIDANHADLNVKGGASFVAGEPNALQDGNGHGTHVAGTVAALDNNTGVLGVAPSVSLYAVKVLGASGSGSVSSIAQGLEWAGNNGMHVANLSLGSPSPSATLEQAVNSATSRGVLVVAASGNSGAGSISYPARYANAMAVGATDQNNNRASFSQYGAGLDIVAPGVNILSTTPGNNYASLNGTSMAAPHVAGAAALIKAKYPSMTNVQIRNRLKNTATNLGPPFFYGKGVINVESA

SEQ ID NO: 65642 - protein, 269 aa, unidentified
AQTVPWGIPHIKADKAHAAGVTGSGVKVAILDTGIDANHADLNVKGGASFVAGEPNALQDGNGHGTHVAGTVAALDNTTGVLGVAPSVSLYAVKVLGASGSGSVSSIAQGLEWAGNNGMHVANLSLGSPSPSATLEQAVNSATSRGVLVVAASGNSGAGSISYPARYANAMAVGATDQNNNRASFSQYGAGLDIVAPGVNILSTTPGNNYASLNGTSMAAPHVAGAAALIKAKYPSMTNVQIRNRLKNTATNLGDPFFYGKGVINVESA

SEQ ID NO: 65643 - protein, 269 aa, Synthetic construct
AQVVPWGIPHIKADKAHAAGVTGSGVKVAILDTGIDANHADLNVKGGASFVAGEPNALQDGNGHGTHVAGTVAALDNTTGVLGVAPSVSLYAVKVLGASGSGSVSSIAQGLEWAGNNGMHVANLSLGSPSPSATLEQAVNSATSRGVLVVAASGNSGAGSISYPARYANAMAVGATDQNNNRASFSQYGAGLDIVAPGVNILSTTPGNNYASLNGTSMAAPHVAGAAALIKAKYPSMTNVQIRNRLKNTATNLGPPFFYGKGVINVESA

SEQ ID NO: 65644 - protein, 269 aa, Synthetic construct
AQVVPWGIPHIKADKAHAAGVTGSGVKVAILDTGIDANHADLNVKGGASFVAGEPNALQDGNGHGTHVAGTVAALDNNTGVLGVAPSVSLYAVKVLGASGSGSVSSIAQGLEWAGNNGMHVANLSLGSPSPSATLEQAVNSATSRGVLVVAASGNSGAGSISYPARYANAMAVGATDQNNNRASFSQYGAGLDIVAPGVNILSTTPGNNYASLNGTSMAAPHVAGAAALIKAKYPSMTNVQIRNRLKNTATNLGDPFFYGKGVINVESA

SEQ ID NO: 65645 - protein, 269 aa, Synthetic construct
AQTVPWGIPHIKADKAHAAGVTGSGVKVAILDTGIDANHEDLNVKGGASFVAGEPNALQDGNGHGTHVAGTVAALDNTTGVLGVAPSVSLYAVKVLGASGSGSVSSIAQGLEWAGNNGMHVANLSLGSPSPSATLEQAVNSATSRGVLVVAASGNSGAGSISYPARYANAMAVGATDQNNNRASFSQYGAGLDIVAPGVNILSTTPGNNYASLNGTSMAAPHVAGAAALIKAKYPSMTNVQIRNRLKNTATNLGDPFFYGKGVINVESA

SEQ ID NO: 65646 - protein, 269 aa, Synthetic construct
AQVVPWGIPHIKADKAHAAGVTGSGVKVAILDTGIDANHEDLNVKGGASFVAGEPNALQDGNGHGTHVAGTVAALDNTTGVLGVAPSVSLYAVKVLGASGSGSVSSIAQGLEWAGNNGMHVANLSLGSPSPSATLEQAVNSATSRGVLVVAASGNSGAGSISYPARYANAMAVGATDQNNNRASFSQYGAGLDIVAPGVNILSTTPGNNYASLNGTSMAAPHVAGAAALIKAKYPSMTNVQIRNRLKNTATNLGDPFFYGKGVINVESA

SEQ ID NO: 65647 - protein, 269 aa, Synthetic construct
AQTVPWGIPHIKADKAHAAGVTGSGVKVAILDTGIDANHADLNVKGGASFVAGEPNALQDGNGHGTHVAGTVAALDNTIGVLGVAPSVSLYAVKVLGASGSGSVSSIAQGLEWAGNNGMHVANLSLGSPSPSATLEQAVNSATSRGVLVVAASGNSGAGSIQYPARYANAMAVGATDQNNNRASFSQYGAGLDIVAPGVNILSTTPGNNYASLNGTSMAAPHVAGAAALIKAKYPSMTNVQIRNRLKNTATNLGDPFFYGKGVINVESA

SEQ ID NO: 65648 - protein, 269 aa, Synthetic construct
AQTVPWGIPHIKADKAHAAGVTGSGVKVAILDTGIDANHADLNVKGGASFVAGEPNALQDGNGHGTHVAGTVAALDNTIGVLGVAPSVSLYAVKVLGASGSGSVSSIAQGLEWAGNNGMHVANLSLGSPSPSATLEQAVNSATSRGVLVVAASGNSGAGSISYPARYANAMAVGATDQNNQRASFSQYGAGLDIVAPGVNILSTTPGNNYASLNGTSMAAPHVAGAAALIKAKYPSMTNVQIRNRLKNTATNLGDPFFYGKGVINVESA

SEQ ID NO: 65649 - protein, 269 aa, Synthetic construct
AQTVPWGIPHIKADKAHAAGSTGSGVKVAILDTGIDANHEDLNVKGGASFVAGEPNALQDGNGHGTHVAGTVAALDNTTGVLGVAPSVSLYAVKVLGASGSGSVSSIAQGLEWAGNNGMHVANLSLGSPSPSATLEQAVNSATSRGVLVVAASGNSGAGSISYPARYANAMAVGATDQNNNRASFSQYGAGLDIVAPGVNILSTTPGNNYASLNGTSMAAPHVAGAAALIKAKYPSMTNVQIRNRLKNTATNLGDPFFYGKGVINVESA

SEQ ID NO: 65650 - protein, 269 aa, Synthetic construct
AQVVPWGIPHIKADKAHAAGVTGSGVKVAILDTGIDANHADLNVKGGASFVAGEPNALQDGNGHGTHVAGTVAALDNTTGVLGVAPSVSLYAVKVLGASGSGSVSSIAQGLEWAGNNGMHVANLSLGSPSPSATLEQAVNSATSRGVLVVAASGNSGAGSISYPARYANAMAVGATDQNNNRASFSQYGAGLDIVAPGVNILSTTPGNNYASLNGTSMAAPHVAGAAALIKAKYPSMTNVQIRNRLKNTATNLGDPFFYGKGVINVESA

SEQ ID NO: 65651 - protein, 269 aa, Synthetic construct
AQTVPWGIPHIKADKAHAAGVTGSGVKVAILDTGIDANHADLNVKGGASFVAGEPNALQDGNGHGTHVAGTVAALDNTIGVLGVAPSVSLYAVKVLGASGSGSVSSIAQGLEWAGNNGMHVANISLGSPSPSATLEQAVNSATSRGVLVVAASGNSGAGSISYPARYANAMAVGATDQNNNRASFSQYGAGLDIVAPGVNILSTTPGNNYASLNGTSMAAPHVAGAAALIKAKYPSMTNVQIRNRLKNTATNLGDPFFYGKGVINVESA

SEQ ID NO: 65652 - protein, 269 aa, Synthetic construct
AQTVPWGIPHIKADKAHAAGVTGSGVKVAILDTGIDANHADLNVKGGASFVAGEPNALQDGNGHGTHVSGTVAALDNTIGVLGVAPSVSLYAVKVLGASGSGSVSSIAQGLEWAGNNGMHVANLSLGSPSPSATLEQAVNSATSRGVLVVAASGNSGAGSISYPARYANAMAVGATDQNNNRASFSQYGAGLDIVAPGVNILSTTPGNNYASLNGTSMAAPHVAGAAALIKAKYPSMTNVQIRNRLKNTATNLGDPFFYGKGVINVESA

SEQ ID NO: 65653 - protein, 269 aa, Synthetic construct
AQTVPWGIPHIKADKAHAAGVTGSGVKVAILDTGIDANHADLNVKGGASFVAGEPNALQDGNGHGTHVAGTVAALDNTIGVLGVAPSVSLYAVKVLGASGSGSVSSIAQGLEWAGNNGMHVANLSLGSPSPSATLEQAVNSATSRGVLVVAASGNSGAGSISYPARYANAMAVGATDQNNNRASFSQYGAGLDIVAPGVNILSTTPGNNYASLSGTSMAAPHVAGAAALIKAKYPSMTNVQIRNRLKNTATNLGDPFFYGKGVINVESA

SEQ ID NO: 65654 - protein, 269 aa, Synthetic construct
AQTVPWGIPHIKADKAHAAGVTGSGVKVAILDTGIDANHEDLNVKGGASFVAGEPNALQDGNGHGTHVAGTVAALDNNTGVLGVAPSVSLYAVKVLGASGSGSVSSIAQGLEWAGNNGMHVANLSLGSPSPSATLEQAVNSATSRGVLVVAASGNSGAGSISYPARYANAMAVGATDQNNNRASFSQYGAGLDIVAPGVNILSTTPGNNYASLNGTSMAAPHVAGAAALIKAKYPSMTNVQIRNRLKNTATNLGDPFFYGKGVINVESA

SEQ ID NO: 65655 - protein, 210 aa, Bacillus sp.
QSVPWGINRVQAPTAINRGTNGSGVRVAVLDTGISTHSDLTIRGGASFVPGEPNTSDLNGHGTHVAGTIAALNNSIGVVGVAPNADLYAVKVLGANGRGSIGGIAQGLEWAAANNMHIANLSLGSDAPSSTLEQAVNYATSRGVLVIAASGNNGSGNVGYPARYANAMAVGATDQNNNRANFSQYGAGLDIVAPGVGIQSTYPGNRYASL

SEQ ID NO: 65656 - protein, 269 aa, Bacillus pumilus
AQTIPWGINRVQAPIAQSRGFTGTGVRVAVLDTGISNHADLRIRGGASFVPGEPNISDGNGHGTHVAGTIAALNNSIGVLGVAPNVDLYGVKVLGASGRGSISGIAQGLQWAANNGMHIANMSLGSSAGSATMEQAVNQATASGVLVVAASGNSGAGNVGFPARYANAMAVGATDQNNNRASFSQYGAGLDIVAPGVGVQSTVPGNGYASFNGTSMATPHVAGVAALVKQKNPSWSNVQIRNHLKNTATNLGNTTQFGSGLVNAEAATR

SEQ ID NO: 65657 - protein, 269 aa, Bacillus pumilus
AQTIPWGINRVQAPIAQSRGFTGTGVRVAVLDTGISNHADLRIRGGASFVPGEPNISDGNGHGTHVAGTIAALNNSIGVLGVAPNVDLYGVKVLGASGRGSISGIAQGLQWAANNGMHIANMSLGSSAGSATMEQAVNQATASGVLVVAASGNSGAGNVGFPARYANAMAVGATDQNNNRASFSQYGAGLDIVAPGVGVQSTVPGDGYASFNGTSMATPHVAGVAALVKQKNPSWSNVQIRNHLKNTATNLGNTTQFGSGLVNAEAATR

SEQ ID NO: 65658 - protein, 270 aa, unidentified
AQSVPWGISRVQAPAAHNRGLTGSGVRVAVLDTGIDSTHPDLNIRGGASFVPGEPPTQDGNGHGTHVAGTVAALDNSIGVIGVAPNADLYAVKVLNANGGGAXSGIAQGLEWAAANNMDIASMSLGSDAPSTTLERAVNYATSQGVLVIAATGNNGSGSVGXPAXYANAMAVGATDQNNRRANFSQYGTGIDIVAPGVDIESTYPGSSYDSLSGTSXASPHVAGVAALVLQKNPSWSNVQIRNHLKNTATSLGSTNLYGSGLVNAEAAAR

SEQ ID NO: 65659 - protein, 268 aa, Unidentified
QTVPWGITRVQAPAVHNRGVTGSGVRVAVLDTGISAHSDLNIRGGASFVPGEPTTADLNGHGTHVAGTVAALNNSIGVIGVAPNAELYAVKVLGANGSGSVSGIAQGLEWAATNNIHIANMSLGTDAPSTTLERAVNYATSQGVLVIAATGNNGSGTISYPARYANAMAVGATDQNNNRASFSQYGAGLDIVAPGVNVQSTYPGNRYVSMNGTSMATPHVAGAAALVKQRYPSWNATQIRNHLKNTATNLGNSSQFGSGLVNAEAATR

SEQ ID NO: 65660 - protein, 268 aa, Bacillus sp.
QTVPWGINRVQAPIAQSRGFTGTGVRVAVLDTGISNHADLRIRGGASFVPGEPNISDGNGHGTHVAGTIAALNNSIGVLGVAPNVDLYGVKVLGADGEGSISGIAQGLQWAANNGMHIANMSLGSSAGSATMEQAVNQATASGVLVVAASGNSGAGNVGFPARYANAMAVGATDQNNNRASFSQYGAGLDIVAPGVGVQSTVPGNGYASFNGTSMATPHVAGVAALVKQKNPSWSNVQIRNHLKNTATNLGNTTQFGSGLVNAEAATR

SEQ ID NO: 65661 - protein, 268 aa, Unidentified
QTVPWGITRVQAPAVHNRGITGSGVRVAILDSGISAHSDLNIRGGASFVPGEPTTADLNGHGTHVAGTVAALNNSIGVIGVAPNAELYAVKVLGASGSGSVSGIAQGLEWAATNNMHIANMSLGSDFPSSTLERAVNYATSRDVLVIAATGNNGSGSVGYPARYANAMAVGATDQNNRRANFSQYGTGIDIVAPGVNVQSTYPGNRYVSMNGTSMATPHVAGAAALVKQRYPSWNATQIRNHLKNTATNLGNTNLYGSGLVNAEAATR

SEQ ID NO: 65662 - protein, 268 aa, Unidentified
QTVPWGINRVQAPIAQSRGFTGTGVRVAVLDTGISNHADLRIRGGASFVPGEPNISDGNGHGTHVAGTIAALNNSIGVIGVAPNVDLYGVKVLGASGCGSISGIAQGLQWAANNGMHIANMSLGSSAGSATMEQAVNQATASGVLVVAASGNSGAGNVGFPARYANAMAVGATDQNNNRASFSQYGAGLDIVAPGVGVQSTVPGNGYASFNGTSMATPHVAGVAALVKQKNPSWSNVQIRNHLKNTATNLGNTTQFGSGLVNAEAATR

SEQ ID NO: 65663 - protein, 268 aa, Bacillus subtilis
QTVPWGINRVQAPIAQSRGFTGTGVRVAVLDTGISNHADLRIRGGASFVPGEPNISDGNGHGTQVAGTIAALNNSIGVLGVAPNVDLYGVKVLGASGSGSISGIAQGLQWAANNGMHIANMSLGSSAGSATMEQAVNQATASGVLVVAASGNSGAGNVGFPARYANAMAVGATDQNNNRATFSQYGAGLDIVAPGVGVQSTVPGNGYASFNGTSMATPHVAGVAALVKQKNPSWSNVQIRNHLKNTATNLGNTTQFGSGLVNAEAATR

SEQ ID NO: 65664 - protein, 268 aa, Unidentified
QTTPWGITRVQAPTALNRGFTGSGVRVAVLDTGIATHSDLNIRGGVSFVSGEPGYQDGNGHGTHVAGTIAALNNSIGVIGVAPNAELYAVKVLGANGSGSVSAIAQGLQWSAQNNMHIANLSLGSPTGSQTLELAVNQANSAGVLVVAASGNNGSGTVSYPARYTNALAVGATDQNNNRASFSQYGTGLNIVAPGVGVQSTYPGNRYASLNGTSMATPHVAGVAALVKQKNPSWSNTQIRNHLLNTATSLGSSTQFGSGLVNAEAATR

SEQ ID NO: 65665 - protein, 268 aa, Unidentified
QTVPWGISRVQAPAVHNRGITGSGVRVAILDSGISAHSDLNIRGGASFVPGEPTTADLNGHGTHVAGTVAALNNSIGVIGVAPNAELYAVKVLGASGSGSISGIAQGLEWAATNNMHIANMSLGSDAPSTTLERAVNYATSRDVLVIAATGNNGSGSVGYPARYANAMAVGATDQNNRRANFSQYGTGIDIVAPGVNVQSTYPGNRYVSMNGTSMATPHVAGAAALVKQRYPSWNATQIRNHLKNTATNLGNTNLYGSGLVNAEAATR

SEQ ID NO: 65666 - protein, 268 aa, Unidentified
QSVPWGITRVQAPAAINRGTNGSGVRVAVLDTGISTHSDLTIRGGASFVPGEPNTSDLNGHGTHVAGTIAALNNSIGVVGVAPNADLYAVKVLGANGRGSIGGIAQGLGWAAANNMHIANLSLGSDAPSSTLEQAVNYATSRGVLVIAASGNNGSGNVGYPARYANAMAVGATDQNNNRANFSQYGAGLDIVAPGVGIQSTYPGNRYASLNGTSMATPHVAGAAALVKQRYPSWSASQIRNHLKNTSTNLGSSTLYGSGLVNADAASR

SEQ ID NO: 65667 - protein, 268 aa, Bacillus sp.
QSVPWGITRVQAPAAINRGTNGSGVRAAVLDTGISTHSDLTIRGGASFVPGEPNTSDLNGHGTHVAGTIAALNNSIGVVGVAPNADLYAVKVLGANGRGSIGGIAQGLEWAAANNMHIANLSLGSDAPSSTLEQAVNYATSRGVLVIAASGNNGSGNVGYPARYANAMAVGATDQNNNRANFSQYGAGLDIVAPGVGIQSTYPGNRYASLNGTSMATPHVAGAAALVKQRYPSWSASQIRNHLKNTSTNLGSSTLYGSGLVNADAASR

SEQ ID NO: 65668 - protein, 269 aa, Synthetic construct
AQTVPWGIPHIKADKAHAAGVTGSGVKVAILDTGIDANHADLNVKGGASFVAGEPNALQDGNGHGTHVAGTVAALDNTTGVLGVAPSVSLYAVKVLGASGSGSVSSIAQGLEWAGNNGMHVANLSLGSPSPSATLEQAVNSATSRGVLVVAASGNSGAGSISYPARYANAMAVGATDQNNQRASFSQYGAGLDIVAPGVNILSTTPGNNYASLNGTSMAAPHVAGAAALIKAKYPSMTNVQIRNRLKNTATNLGPPFFYGKGVINVESA

SEQ ID NO: 65669 - protein, 269 aa, Synthetic construct
AQTVPWGIPHIKADKAHAAGVTGSGVKVAILDTGIDANHADLNVKGGASFVAGEPNALQDGNGHGTHVAGTVAALDNTTGVLGVAPSVSLYAVKVLGASGSGSVSSIAQGLEWAGNNGMHVANLSLGSPSPSATLEQAVNSATSRGVLVVAASGNSGAGSISYPARYANAMAVGATDQNNQRASFSQYGAGLDIVAPGVNILSTTPGNNYASLNGTSMAAPHVAGAAALIKAKYPSMTNVQIRNRLKNTATNLGDPFFYGKGVINVESA

SEQ ID NO: 65670 - protein, 269 aa, unidentified
AQTVPWGIPHIKADKAHAAGVTGSGVKVAILDTGIDANHADLNVKGGASFVAGEPNALQDGNGHGTHVAGTVAALDNTTGVLGVAPSVSLYAVKVLGASGSGSVSSIAQGLEWAGNNGMHVANLSLGSPSPSATLEQAVNSATSRGVVVVAASGNSGAGSISYPARYANAMAVGATDQNNNRASFSQYGAGLDIVAPGVNILSTTPGNNYASLNGTSMAAPHVAGAAALIKAKYPSMTNVQIRNRLKNTATNLGDPFFYGKGVINVESA

SEQ ID NO: 65671 - protein, 269 aa, Synthetic construct
AQTVPWGIPHIKADKAHAAGVTGSGVKVAILDTGIDANHADLNVKGGASFVAGEPNALQDGNGHGTHVSGTVAALDNTTGVLGVAPSVSLYAVKVLGASGSGSVSSIAQGLEWAGNNGMHVANLSLGSPSPSATLEQAVNSATSRGVLVVAASGNSGAGSISYPARYANAMAVGATDQNNNRASFSQYGAGLDIVAPGVNILSTTPGNNYASLNGTSMAAPHVAGAAALIKAKYPSMTNVQIRNRLKNTATNLGDPFFYGKGVINVESA

SEQ ID NO: 65672 - protein, 269 aa, Synthetic construct
AQTVPWGIPHIKADKAHAAGVTGSGVKVAILDTGIDANHEDLNVKGGASFVAGEPNALQDGNGHGTHVAGTVAALDNTTGVLGVAPSVSLYAVKVLGASGSGSVSSIAQGLEWAGNNGMHVANLSLGSPSPSATLEQAVNSATSRGVLVVAASGNSGAGSISYPARYANAMAVGATDQNNQRASFSQYGAGLDIVAPGVNILSTTPGNNYASLNGTSMAAPHVAGAAALIKAKYPSMTNVQIRNRLKNTATNLGDPFFYGKGVINVESA

SEQ ID NO: 65673 - protein, 269 aa, Synthetic construct
AQVVPWGIPHIKADKAHAAGVTGSGVKVAILDTGIDANHADLNVKGGASFVAGEPNALQDGNGHGTHVAGTVAALDNTTGVLGVAPSVSLYAVKVLGASGSGSVSSIAQGLEWAGNNGMHVANLSLGSPSPSATLEQAVNSATSRGVLVVAASGNSGAGSISYPARYANAMAVGATDQNNQRASFSQYGAGLDIVAPGVNILSTTPGNNYASLNGTSMAAPHVAGAAALIKAKYPSMTNVQIRNRLKNTATNLGDPFFYGKGVINVESA

SEQ ID NO: 65674 - protein, 269 aa, Synthetic construct
AQTVPWGIPHIKADKAHAAGVTGSGVKVAILDTGIDANHADLNVKGGASFVAGEPNALQDGNGHGTHVSGTVAALDNNTGVLGVAPSVSLYAVKVLGASGSGSVSSIAQGLEWAGNNGMHVANLSLGSPSPSATLEQAVNSATSRGVLVVAASGNSGAGSISYPARYANAMAVGATDQNNNRASFSQYGAGLDIVAPGVNILSTTPGNNYASLNGTSMAAPHVAGAAALIKAKYPSMTNVQIRNRLKNTATNLGDPFFYGKGVINVESA

SEQ ID NO: 65675 - protein, 269 aa, Synthetic construct
AQVVPWGIPHIKADKAHAAGVTGSGVKVAILDTGIDANHADLNVKGGASFVAGEPNALQDGNGHGTHVSGTVAALDNTTGVLGVAPSVSLYAVKVLGASGSGSVSSIAQGLEWAGNNGMHVANLSLGSPSPSATLEQAVNSATSRGVLVVAASGNSGAGSISYPARYANAMAVGATDQNNNRASFSQYGAGLDIVAPGVNILSTTPGNNYASLNGTSMAAPHVAGAAALIKAKYPSMTNVQIRNRLKNTATNLGDPFFYGKGVINVESA

SEQ ID NO: 65676 - protein, 269 aa, Synthetic construct
AQTVPWGIPHIKADKAHAAGVTGSGVKVAILDTGIDANHADLNVKGGASFVAGEPNALQDGNGHGTHVAGTVAALDNTTGVLGVAPSVSLYAVKVLGASGSGSVSSIAQGLEWAGNNGMHVANLSLGSPSPSATLEQAVNSATSRGVLVVAASGNSGAGSIQYPARYANAMAVGATDQNNNRASFSQYGAGLDIVAPGVNILSTTPGNNYASLNGTSMAAPHVAGAAALIKAKYPSMTNVQIRNRLKNTATNLGDPFFYGKGVINVESA

SEQ ID NO: 65677 - protein, 269 aa, Synthetic construct
AQTVPWGIPHIKADKAHAAGVTGSGVKVAILDTGIDANHADLNVKGGASFVAGEPNALQDGNGHGTHVAGTVAALDNNTGVLGVAPSVSLYAVKVLGASGSGSVSSIAQGLEWAGNNGMHVANLSLGSPSPSATLEQAVNSATSRGVLVVAASGNSGAGSIQYPARYANAMAVGATDQNNNRASFSQYGAGLDIVAPGVNILSTTPGNNYASLNGTSMAAPHVAGAAALIKAKYPSMTNVQIRNRLKNTATNLGDPFFYGKGVINVESA

SEQ ID NO: 65678 - protein, 269 aa, Synthetic construct
AQTVPWGIPHIKADKAHAAGVTGSGVKVAILDTGIDANHADLNVKGGASFVAGEPNALQDGNGHGTHVAGTVAALDNNTGVLGVAPSVSLYAVKVLGASGSGSVSSIAQGLEWAGNNGMHVANLSLGSPSPSATLEQAVNSATSRGVLVVAASGNSGAGSISYPARYANAMAVGATDQNNNRASFSQYGAGLDIVAPGVNILSTTPGNNYASLSGTSMAAPHVAGAAALIKAKYPSMTNVQIRNRLKNTATNLGDPFFYGKGVINVESA

SEQ ID NO: 65679 - protein, 269 aa, Synthetic construct
AQTVPWGIPHIKADKAHAAGVTGSGVKVAILDTGIDANHEDLNVKGGASFVAGEPNALQDGNGHGTHVAGTVAALDNTTGVLGVAPSVSLYAVKVLGASGSGSVSSIAQGLEWAGNNGMHVANISLGSPSPSATLEQAVNSATSRGVLVVAASGNSGAGSISYPARYANAMAVGATDQNNNRASFSQYGAGLDIVAPGVNILSTTPGNNYASLNGTSMAAPHVAGAAALIKAKYPSMTNVQIRNRLKNTATNLGDPFFYGKGVINVESA

SEQ ID NO: 65680 - protein, 269 aa, Synthetic construct
AQVVPWGIPHIKADKAHAAGVTGSGVKVAILDTGIDANHADLNVKGGASFVAGEPNALQDGNGHGTHVAGTVAALDNTTGVLGVAPSVSLYAVKVLGASGSGSVSSIAQGLEWAGNNGMHVANISLGSPSPSATLEQAVNSATSRGVLVVAASGNSGAGSISYPARYANAMAVGATDQNNNRASFSQYGAGLDIVAPGVNILSTTPGNNYASLNGTSMAAPHVAGAAALIKAKYPSMTNVQIRNRLKNTATNLGDPFFYGKGVINVESA

SEQ ID NO: 65681 - protein, 269 aa, Synthetic construct
AQTVPWGIPHIKADKAHAAGVTGSGVKVAILDTGIDANHADLNVKGGASFVAGEPNALQDGNGHGTHVAGTVAALDNNTGVLGVAPSVSLYAVKVLGASGSGSVSSIAQGLEWAGNNGMHVANLSLGSPSPSATLEQAVNSATSRGVLVVAASGNSGAGSISYPARYANAMAVGATDQNNQRASFSQYGAGLDIVAPGVNILSTTPGNNYASLNGTSMAAPHVAGAAALIKAKYPSMTNVQIRNRLKNTATNLGDPFFYGKGVINVESA

SEQ ID NO: 65682 - protein, 269 aa, Synthetic construct
AQVVPWGIPHIKADKAHAAGVTGSGVKVAILDTGIDANHADLNVKGGASFVAGEPNALQDGNGHGTHVAGTVAALDNTTGVLGVAPSVSLYAVKVLGASGSGSVSSIAQGLEWAGNNGMHVANLSLGSPSPSATLEQAVNSATSRGVLVVAASGNSGAGSISYPARYANAMAVGATDQNNNRASFSQYGAGLDIVAPGVNILSTTPGNNYASLSGTSMAAPHVAGAAALIKAKYPSMTNVQIRNRLKNTATNLGDPFFYGKGVINVESA

SEQ ID NO: 65683 - protein, 269 aa, Synthetic construct
AQVVPWGIPHIKADKAHAAGVTGSGVKVAILDTGIDANHADLNVKGGASFVAGEPNALQDGNGHGTHVAGTVAALDNTTGVLGVAPSVSLYAVKVLGASGSGSVSSIAQGLEWAGNNGMHVANLSLGSPSPSATLEQAVNSATSRGVLVVAASGNSGAGSIQYPARYANAMAVGATDQNNNRASFSQYGAGLDIVAPGVNILSTTPGNNYASLNGTSMAAPHVAGAAALIKAKYPSMTNVQIRNRLKNTATNLGDPFFYGKGVINVESA

SEQ ID NO: 65684 - protein, 269 aa, Synthetic construct
AQTVPWGIPHIKADKAHAAGVTGSGVKVAILDTGIDANHEDLNVKGGASFVAGEPNALQDGNGHGTHVSGTVAALDNTTGVLGVAPSVSLYAVKVLGASGSGSVSSIAQGLEWAGNNGMHVANLSLGSPSPSATLEQAVNSATSRGVLVVAASGNSGAGSISYPARYANAMAVGATDQNNNRASFSQYGAGLDIVAPGVNILSTTPGNNYASLNGTSMAAPHVAGAAALIKAKYPSMTNVQIRNRLKNTATNLGDPFFYGKGVINVESA

SEQ ID NO: 65685 - protein, 269 aa, Synthetic construct
AQTVPWGIPHIKADKAHAAGVTGSGVKVAILDTGIDANHEDLNVKGGASFVAGEPNALQDGNGHGTHVAGTVAALDNTTGVLGVAPSVSLYAVKVLGASGSGSVSSIAQGLEWAGNNGMHVANLSLGSPSPSATLEQAVNSATSRGVLVVAASGNSGAGSIQYPARYANAMAVGATDQNNNRASFSQYGAGLDIVAPGVNILSTTPGNNYASLNGTSMAAPHVAGAAALIKAKYPSMTNVQIRNRLKNTATNLGDPFFYGKGVINVESA

SEQ ID NO: 65686 - protein, 382 aa, Unidentified
VRSKKLWISLLFALTLIFTMAFSNMSAQAAEEAKEKYLIGFNEQEAVSEFVEQVEANDEVAILSEEEEVEIELLHEFETIPVLSVELSPEDVDALELDPAISYIEEDAEVTTMQQTVPWGITRVQAPAVHNRGITGSGVRVAILDSGISTHEDLNVRGGVSFVPGEPTTADLNGHGTHVAGTVAALNNSIGVVGVAPSADLYAVKVLGANGRGSVSGIAQGLEWAAANNMHIANMSLGSDAPSSTLERAVNYATSRDVLVIAATGNNGSGSVGYPARYANAMAVGATDQNNRRANFSQYGTGIDIVAPGVNVQSTYPGNRYVSMNGTSMATPHVAGAAALVKQRYPSWNATQIRNHLKNTATNLGNSSQFGSGLVNAEAATR

SEQ ID NO: 65687 - protein, 173 aa, Bacillus sp.
STQDGNGHGTHVAGTVAALNNSIGVIGVAPSADLYAVKVLGANGRGSVSGIAQGLEWAAANNMHIANMSLGSDAPSTTLERAVNYATSRDVLVIAATGNNGSGSVGYPARYANAMAVGATDQNNRRANFSQYGTGIDIVAPGVNVQSTYPGNRYASLSGTSMATPHVAGVAAL

SEQ ID NO: 65688 - protein, 173 aa, Bacillus sp.
STQDGNGHGTHVAGTVAALNNSIGVIGVAPSADLYAVKVLGANGRGSVSGIAQGLEWAAANNMHIANMSLGSDAPSTTLGRAVNYATSQGVLVIAATGNNGSGSVGYPARYANAMAVGATDQNNRRANFSQYGTGIDIVAPGVNVQSTYPGNRYASLNGTSMATPHVAGVAAL

SEQ ID NO: 65689 - protein, 173 aa, Bacillus sp.
STQDGNGHGTHVAGTVAALNNSIGVLGVAPNAELYAVKVLGASGSGSISGIAQGLEWAAANNMHIANMSLGSDAPSTTLERAVNYATSQGVLVIAATGNNGSGSVGYPARYANAMAVGATDQNNRRANFSQYGTGIDIVAPGVEIESTYPGSSYDSLRGTSMATPHVAGAAAL

SEQ ID NO: 65690 - protein, 173 aa, Bacillus sp.
STQDGNGHGTHVAGTVAALNNSIGVIGVAPSADLYAVKVLGANGRGSVSGIAQGLEWAAANNMHIANMSLGSDAPSTTLERAVNYATSQGVLVIAATGNNGSGSVGYPARYANAMAVGATDQNNRRANFSQYGTGIDIVAPGVNVQSTYPGNRYASLSGTSMATPHVAGVAAL

SEQ ID NO: 65691 - protein, 269 aa, Unidentified
AQTVPWGITRVQAPAVHNRGITGSGVRVAILDSGISAHSDLNIRGGASFVPGEPTTADLNGHGTHVAGTVAALNNSIGVVGVAPNAELYAVKVLGANGSGSVSGIAQGLEWAATNNMHIANMSLGSDAPSTTLERAVNYATSAGVLVIAATGNNGSGSVGYPARYANALAVGATDQNNRRANFSQYGTGLDIVAPGVNVQSTYPGNRYVSMNGTSMATPHVAGAAALVKQRYPSWNATQIRNHLKNTATNLGNTNLYGSGLVNAEAATR

SEQ ID NO: 65692 - protein, 269 aa, Bacillus pumilus
AQTIPWGINRVQAPIAQSRGFTGTGVRVAVLDTGISNHADLRIRGGASFVPGEPNISDGNGHGTHVAGTIAALNNSIGVLGVAPNVDLYGVKVLGASGRGSISGIAQGLQWAANNGMHIANMSLGSSAGSATMEQAVNHATASGVLVVAASGNSGAENVGFPARYANAMAVGATDQNNNRASFSQYGAGLDIVAPGVGVQSTVPGNGYASFNGTSMATPHVAGVAALVKQKNPSWSNVQIRNHLKNTATNLGNTTQFGSGLVNAEAATR

SEQ ID NO: 65693 - protein, 269 aa, Bacillus pumilus
AQTIPWGINRVQAPIAQSRGFTGTGVRVAVLDTGISNHADLRIRGGASFVPGEPNISDGNGHGTHVAGTIAALNNSIGVLGVAPNVDLYGVKVLGASGRGSISGIAQGLQWAANNGMHIANMSLGSSAGSATMEQAVNQATASGVLVVAASGNSGEGNVGFPARYANAMAVGATDQNNNRASFSQYGAGLDIVAPGVGVQSTVPGNGYASFNGTSMATPHVAGVAALVKQKNPSWSNVQIRNHLKNTATNLGNTTQFGSGLVNAEAATR

SEQ ID NO: 65694 - protein, 269 aa, Bacillus pumilus
AQTIPWGINRVQAPIAQSRGFTGTGVRVAVLDTGISNHADLRIRGGASFVPGEPNISDGNGHGTHVAGTIAALNNSIGVLGVAPDVDLYGVKVLGASGRGSISGIAQGLQWAANNGMHIANMSLGSSAGSATMEQAVNQATASGVLVVAASGNSGAGDVGFPARYANAMAVGATDQKNNRASFSQYGAGLDIVAPGVGVQSTVPGNGYASFNGTSMATPHVAGVAALVKQKNPSWSNVQIRNHLKNTATNLGNTTQFGSGLVNAEAATR

SEQ ID NO: 65695 - protein, 172 aa, Bacillus sp.
STQDGNGHGTHVAGTVAALNNSIGVIGVAPSADLYAVKVLGANGRGSVSGIARGLEWAAANNMHIANMSLGSDAPSTTLERAVNYATSQGVLVIAATGNNGSGSVGYPARYANAMAVGATDQNNRRANFSQYGTGIDIVAPGVNVQSTYPGNRYASLNGTSMAPHVAGVAAL

SEQ ID NO: 65696 - protein, 268 aa, Bacillus subtilis
QTVPWGINRVQAPIAQSRGFTGTGVRVAVLDTGISNHADLRIRGGASFVPGEPNISDGNGHGTQVAGTIAALNNSIGVLGVAPNVDLYGVKVLGASGSGSISGIAQGLQWAANNGMHIANNSLGSSAGSATMEQAVNQATASGVLVVAASGNSGAGNVGFTARYANAMAVGATDQNNNRATFSQYGAGLDIVAPGVGVQSTVPGNGYASFNGTSMATPHVAGVAALVKQKNPSWSNVQIRNHLKNTATNLGNTTQFGSGLVNAEAATR

SEQ ID NO: 65697 - protein, 268 aa, Unidentified
QTVPWGITRVQAPAVHNRGITGSGVRVAILDSGISAHSDLNIRGGASFVPGEPTTADLNGHGTHVAGTVAALNNSIGVIGVAPNAELYAVKVLGANGSGSVSGIAQGLEWAATNNMHIANMSLGSDFPSSTLERAVNYATSQGVLVIAATGNNGSGSVGYPARYANAMAVGATDQNNRRANFSQYGTGIDIVAPGVNVQSTYPGNRYVSMNGTSMATPHVAGAAALVKQRYPSWNATQIRNHLKNTATNLGNTNLYGSGLVNAEAATR

SEQ ID NO: 65698 - protein, 268 aa, Bacillus sp. G-825-6
QVTPWGITRVQAPTAWTRGYTGTGVRVAVLDTGISTHPDLNIRGGVSFVPGEPSYQDGNGHGTHVAGTIAALNNSIGVVGVAPNAELYAVKVLGANGSGSVSSIAQGLQWTAQNNIHVANLSLGSPVGSQTLELAVNQATNAGVLVVAATGNNGSGTVSYPARYANALAVGATDQNNNRASFSQYGTGLNIVAPGVGIQSTYPGNRYASLSGTSMATPHVAGVAALVKQKNPSWSNTQIRQHLTSTATSLGNSNQFGSGLVNAEAATR

SEQ ID NO: 65699 - protein, 268 aa, Unidentified
QTVPWGITRVQAPAVHNRGITGSGVRVAILDSGISAHSDLNIRGGASFVPGEPTTADLNGHGTHVAGTVAALNNSIGVIGVAPSADLYAVKVLGANGSGSVSGIAQGLEWAATNNMHIANMSLGSDFPSSTLERAVNYATSRDVLVIAATGNNGSGSVGYPARYANAMAVGATDQNNRRANFSQYGTGIDIVAPGVNVQSTYPGNRYVSMNGTSMATPHVAGAAALVKQRYPSWNATQIRNHLKNTATNLGNTNLYGSGLVNAEAATR

SEQ ID NO: 65700 - protein, 268 aa, Bacillus sp.
QTVPWGINRVQAPIAQSRGFTGTGVRVAVLDTGISNHADLRIRGGASFVPGEPNISDGNGHGTQVAGTIAALNNSIGVLGVAPNVDLYGVKVLGASGSGSISGIAQGLQWAANNGMHIANMSLGSSAGSATMEQAVNQATASGVLVVAASGNSGAGNVGFPARYANAMAVGATDQNNNRATFSQYGAGLDIVAPGVGVQSTVPGNGYPSFNGTSMATPHVAGVAALVKQKNPSWSNVQIRNHLKNTATNLGNTTQFGSGLVNAEAATR

SEQ ID NO: 65701 - protein, 360 aa, Unidentified
AKELNVYDFEILAGIIKKVEKEVIMLSQVLGLRNETQTELLHLKSRRELLIRLKDKLDMLRKRLKDLEEALGKDAVIRMITDVEVIKNTDSDWVYDITIEPYHLFVSDGLILHNSGVKVAVLDTGISTHPDLNIRGGASFVPGEPSTQDGNGHGTHVAGTIAALNNSIGVLGVAPSAELYAVKVLGASGSGSVSSIAQGLEWAGNNGMHVANLSLGSPSPSATLEQAVNSATSRGVLVVAASGNSGAGSISYPARYANAMAVGATDQNNNRASFSQYGAGLDIVAPGVNVQSTYPGSTYASLNGTSMATPHVAGAAALVKQKNPSWSNVQIRNHLKNTATSLGSTNLYGSGLVNAEAATR

SEQ ID NO: 65702 - protein, 269 aa, Synthetic construct
AQTVPWGIPHIKADKAHAAGVTGSGVKVAILDTGIDANHADLNVKGGASFVAGEPNALQDGNGHGTHVAGTVAALDNTTGVLGVAPSVSLYAVKVLGASGSGSVSSIAQGLEWAGNNGMHVANLSLGSPSPSATLEQAVNSATSRGVLVVAASGNSGAGSIQYPARYANAMAVGATDQNNNRASFSQYGAGLDIVAPGVNILSTTPGNNYASLSGTSMAAPHVAGAAALIKAKYPSMTNVQIRNRLKNTATNLGDPFFYGKGVINVESA

SEQ ID NO: 65703 - protein, 269 aa, Synthetic construct
AQTVPWGIPHIKADKAHAAGVTGSGVKVAILDTGIDANHADLNVKGGASFVAGEPNALQDGNGHGTHVSGTVAALDNTTGVLGVAPSVSLYAVKVLGASGSGSVSSIAQGLEWAGNNGMHVANLSLGSPSPSATLEQAVNSATSRGVLVVAASGNSGAGSIQYPARYANAMAVGATDQNNNRASFSQYGAGLDIVAPGVNILSTTPGNNYASLNGTSMAAPHVAGAAALIKAKYPSMTNVQIRNRLKNTATNLGDPFFYGKGVINVESA

SEQ ID NO: 65704 - protein, 269 aa, Synthetic construct
AQTVPWGIPHIKADKAHAAGVTGSGVKVAILDTGIDANHADLNVKGGASFVAGEPNALQDGNGHGTHVSGTVAALDNTTGVLGVAPSVSLYAVKVLGASGSGSVSSIAQGLEWAGNNGMHVANLSLGSPSPSATLEQAVNSATSRGVLVVAASGNSGAGSISYPARYANAMAVGATDQNNQRASFSQYGAGLDIVAPGVNILSTTPGNNYASLNGTSMAAPHVAGAAALIKAKYPSMTNVQIRNRLKNTATNLGDPFFYGKGVINVESA

SEQ ID NO: 65705 - protein, 269 aa, Bacillus pumilus
AQTIPWGINRVQAPIAQSRGFTGTGVRVAVLDTGISNHADLRIRGGASFVPGEPNISDGNGHGTHVAGTIAALNNSIGVLGVAPNVDLYGVKVLGASGRGSISGIAQGLQWAANNGMHIANMSLGSSAGSATMEQAVNQATASGVLVVAASGNSGAENVGFPARYANAMAVGATDHNNNRASFSQYGAGLDIVAPGVGVQSTVPGNGYASFNGTSMATPHVAGVAALVKQKNPSWSNVQIRNHLKNTATNLGNTTQFGSGLVNAEAATR

SEQ ID NO: 65706 - protein, 173 aa, Bacillus sp.
STQDGNGHGTHVAGTVAALNNSIGVIGVAPSADLYAVKVLGANGRGSVSGIAQGLEWAAANNMHIANMSLGSDAPSTTLERAVNYATSQGVLVIAATGNNGSGSVGYPARYANAMAVGATDQNNRRANFSQYGTGIDIVAPGVNVQSTYPGGQYAELSGTSMASPHVAGAAAL

SEQ ID NO: 65707 - protein, 173 aa, Bacillus sp.
STQDGNGHGTHVAGTVAALXNSIGVIGVAPSADLYAVKVLGANGRGSVSGIAQGLEWAAANNMHIANMSLGSDAPSTTLERAVNYATSQGVLVIAATGNNGSGSVGYPARYANAMAVGATDQNNRRANFSQYGTGIDIVAPGVNVQSTYPGNRYVSMNGTSMATPHVAGAAAL

SEQ ID NO: 65708 - protein, 173 aa, Bacillus sp.
STQDGNGHGTHVAGTVAALNNNVGVIGVAPSVELYAVKVLGANGSGTISGIARGLEWAGANGMHIANMSLGTDFPSSTLERAVNYATSQGVLVIAASGNSGAGSVGYPARYANAMAVGATDQNNRRANSSQYGTGLDIVAPGVGVQSTYPGSRYVSLSGTSMATPHVAGVAAL

SEQ ID NO: 65709 - protein, 173 aa, Bacillus sp.
STQDGNGHGTHVAGTVAALNNSIGVIGVAPSADLYAVKVLGANGRGSVSGIAQGLEWAAANNMHIANMSLGSDAPSTTLERAVNYATSQGVLVIAATGNNGSGSVGYPARYANAMAVGATDQNNRRANFSQYGTGIDIVAPGVNVQSTYPGNRYVSMNGTSMATPHVAGVAAL

SEQ ID NO: 65710 - protein, 173 aa, Bacillus sp.
STQDGNGHGTHVAGTVAALNNSIGVLGVAPSVELYGVKVLGANGRGSISGIARGLEWAAANGMHIANLSLGTSFPSTTLERAVNQATSRGVLVVAASGNNGSGTVGYPATYANAMAVGATDQNNRRANFSQYGAGIDIVAPGVGVQSTYTGNRYASLSGTSMASPHVAGAAAL

SEQ ID NO: 65711 - protein, 173 aa, Bacillus sp.
STQDGNGHGTHVAGTVAALNNSIGVIGVAPSADLYAVKVLGANGRGSVSGIAQGLEWAAANNMHIANMSLGSDAPSTTLERAVNYATSQGVLVIAATGNNGSGSVGYPARYANAMAVGATDQNNRRANFSQYGTGIDIVAPGVNVQSTYPGNRYVSMSGTSMATPHVAGAAAL

SEQ ID NO: 65712 - protein, 333 aa, Unidentified
YSELVKIAQEIKDEKLYNKLAWILSEVTEEEAKIKEKVNTLKVILSSDLIPERVESVKIIKSPYPYVYDLTVEGSHSFIANGFVVHNSGVKVAVLDTGISTHPDLNIRGGASFVPGEPSTQDGNGHGTHVAGTIAALNNSIGVLGVAPSAELYAVKVLGASGSGSVSSIAQGLEWAGNNGMHVANLSLGSPSPSATLEQAVNSATSRGVLVVAASGNSGAGSISYPARYANAMAVGATDQNNNRASFSQYGAGLDIVAPGVNVQSTYPGSTYASLNGTSMATPHVAGAAALVKQKNPSWSNVQIRNHLKNTATSLGSTNLYGSGLVNAEAATR

SEQ ID NO: 65713 - protein, 333 aa, Unidentified
KEENYLRILEEEGLIENGKLTELGKELLEVWRNREFDSKDVDYVRNIVENLVFLPVEKVERIEYEGYVYDVTTETHNFVANGILVHNSGVKVAVLDTGISTHPDLNIRGGASFVPGEPSTQDGNGHGTHVAGTIAALNNSIGVLGVAPSAELYAVKVLGASGSGSVSSIAQGLEWAGNNGMHVANLSLGSPSPSATLEQAVNSATSRGVLVVAASGNSGAGSISYPARYANAMAVGATDQNNNRASFSQYGAGLDIVAPGVNVQSTYPGSTYASLNGTSMATPHVAGAAALVKQKNPSWSNVQIRNHLKNTATSLGSTNLYGSGLVNAEAATR

SEQ ID NO: 65714 - protein, 268 aa, Unidentified
QTVPWGITRVQAPAVHNRGITGSGVRVAILDSGISAHSDLNIRGGASFVPGEPTTADLNGHGTHVAGTVAALNNSIGVIGVAPNAELYAVKVLGANGSGSVSGIAQGLEWAATNNMHIANMSLGSDFPSSTLERAVNYATSRDVLVIAATGNNGSGSVGYPARYANAMAVGATDQNNRRANFSQYGAGLDIVAPGVNVQSTYPGNRYVSMNGTSMATPHVAGAAALVKQRYPSWNATQIRNHLKNTATNLGNSSQFGSGLVNAEAATR

SEQ ID NO: 65715 - protein, 173 aa, Bacillus sp.
STQDGNGHGTHVAGTIAALDNDEGVVGVAPNADLYAVKVLGANGRGSVSGIAQGLEWAAANNMHIANMSLGSDAPSTTLERAVNYATSQGVLVIAATGNNGSGSVGYPARYANAMAVGATDQNNRRANFSQYGTGIDIVAPGVNVQSTYPGNRYASLNGTSMATPHVAGVAAL

SEQ ID NO: 65716 - protein, 173 aa, Bacillus sp.
STQDGNGHGTHVAGTVAALDNSVGVLGVAPEADLYAVKVLSASGAGSISSIAQGLEWSAANNMHIANMSLGSDAPSTTLERAVNYATSQGVLVIAATGNNGSGSVGYPARYANAMAVGATDQNNRRANFSQYGTGIDIVAPGVNVQSTYPGNRYASLNGTSMATPHVAGVAAL

SEQ ID NO: 65717 - protein, 173 aa, Bacillus sp.
STQDGNGHGTHVAGTIAALNNSVGVLGVAPNADLYAVKVLGANGRGSVSGIAQGLEWAAANNMHIANMSLGSDAPSTTLERAVNYATSQGVLVIAATGNNGSGSVGYPARYANAMAVGATDQNNRRANFSQYGTGIDIVAPGVGVQSTYPGNRYASLSGTSMASPHVAGVAAL

SEQ ID NO: 65718 - protein, 269 aa, Unidentified
AQVVPWGITRVQAPAVHNRGITGSGVRVAILDTGISAHEDLNIRGGASFVPGEPTTADLNGHGTHVAGTVAALDNSIGVIGVAPDAELYAVKVLGANGSGSVSGIAQGLEWAATNRMHIANMSLGQPSPSSTLERAVNYATSRDVLVIAATGNNGSGSVGYPARYANAMAVGATDQNNNRANFSQYGTGIDIVAPGVNVQSTYIGNRYVSKNGTSMATPHVAGAAALVKQRYPSWNATQIRNHLKNTATNLGNSSQFGSGLVNAEAATR

SEQ ID NO: 65719 - protein, 269 aa, Unidentified
AQTVPWGITRVQAPAVHNRGITGSGVRVAILDSGISAHSDLTIRGGASFVPGEPTTADLNGHGTHVAGTVAALNNSIGVIGVAPSADLYAVKVLGANGRGSVSGIAQGLEWAATNNMHIANMSLGSDAPSTTLERAVNYATSQGVLVIAATGNNGSGSVGYPARYANAMAVGATDQNNNRASFSQYGAGLDIVAPGVNVQSTYPGNRYVSMNGTSMATPHVAGVAALVKQRYPSWNATQIRNHLKNTATNLGNSSQFGSGLVNAEAATR

SEQ ID NO: 65720 - protein, 268 aa, Unidentified
QTVPWGITRVQAPAVHNRGITGSGVRVAILDSGISAHEDLNIRGGASFVPGEPSTADLNGHGTHVAGTVAALNNSIGVIGVAPNAELYAVKVLGANGSGSVSGIAQGLEWAATNNMHIANMSLGSDFPSSTLERAVNYATSRDVLVIAATGNNGSGSVGYPARYANAMAVGATDQNNRRANFSQYGTGIDIVAPGVNVQSTYPGNRYVSMNGTSMATPHVAGAAALVKQRYPSWNATQIRNHLKNTATNLGNSSQFGSGLVNAEAATR

SEQ ID NO: 65721 - protein, 268 aa, Unidentified
QTVPWGITRVQAPAVHNRGITGSGVRVAILDSGISAHSDLNIRGGASFVPGEPTTADLNGHGTHVAGTVAALNNSIGVIGVAPNAELYAVKVLGANGSGSVSGIAQGLEWAATNGMHIANMSLGSDFPSSTLERAVNYATSRDVLVIAATGNNGSGSVGYPARYANAMAVGATDQNNRRANFSQYGTGIDIVAPGVNVQSTYPGNRYVSMNGTSMATPHVAGAAALVKQRYPSWNATQIRNHLKNTATNLGNSSQFGSGLVNAEAATR

SEQ ID NO: 65722 - protein, 268 aa, Unidentified
QTVPWGITRVQAPAVHNRGITGSGVRVAILDSGISAHEDLNIRGGASFVPGEPTTADLNGHGTHVAGTVAALNNSIGVIGVAPNAELYAVKVLGANGSGSVSGIAQGLEWAATNNMHIANMSLGSDFPSSTLERAVNYATSRDVLVIAATGNNGAGSVGYPARYANAMAVGATDQNNRRANFSQYGTGIDIVAPGVNVQSTYPGNRYVSMNGTSMATPHVAGAAALVKQRYPSWNATQIRNHLKNTATNLGNSSQFGSGLVNAEAATR

SEQ ID NO: 65723 - protein, 268 aa, Unidentified
QTVPWGITRVQAPAVHNRGITGSGVRVAILDSGISAHEDLNIRGGASFVPGEPTTADLNGHGTHVAGTVAALNNSIGVIGVAPNAELYAVKVLGANGSGSVSGIAQGLEWAATNNMHIANMSLGSDFPSSTLERAVNYATSRDVLVIAATGNNGSGSVGYPARYANAMAVGATDQNNRRANFSQYGTGIDIVAPGVNVQSTYPGNRYVSMNGTSMATPHVAGAAALVKQRYPSWNAVQIRNHLKNTATNLGNSSQFGSGLVNAEAATR

SEQ ID NO: 65724 - protein, 268 aa, Unidentified
QTVPWGITRVQAPAVHNRGVTGSGVRVAILDSGISTHSDLTIRGGASFVPGEPTTADLNGHGTHVAGTVAALNNSIGVIGVAPSADLYAVKVLGANGRGSVSGIAQGLEWAAANNMHIANMSLGSDAPSTTLERAVNYATSQGVLVIAATGNNGSGSVGYPARYANAMAVGATDQNNRRANFSQYGTGIDIVAPGVNVQSTYPGNRYASLNGTSMATPHVAGAAALVKQRYPSWNATQIRNHLKNTATNLGNSSQFGSGLVNAEAATR

SEQ ID NO: 65725 - protein, 268 aa, Unidentified
QTVPWGITRVQAPAVHNRGITGSGVRVAILDSGISAHSDLNIRGGASFVPGEPTTADLNGHGTHVAGTVAALNNSIGVIGVAPNAELYAVKVLGANGSGSVSGIAQGLEWAATNNMHIANMSLGSDSPSSTLERAVNYATSRDVLVIAATGNNGSGSVGYPARYANAMAVGATDQNNRRANFSQYGTGIDIVAPGVNVQSTYPGNRYVSMNGTSMATPHVAGAAALVKQRYPSWNATQIRNHLKNTATNLGNSSQFGSGLVNAEAATR

SEQ ID NO: 65726 - protein, 268 aa, Unidentified
QTVPWGITRVQAPAVHNRGITGSGVRVAILDSGISAHEDLNIRGGASFVPGEPTTADLNGHGTHVAGTVAALNNSIGVIGVAPSAELYAVKVLGANGSGSVSGIAQGLEWAATNNMHIANMSLGSDFPSSTLERAVNYATSRDVLVIAATGNNGSGSVGYPARYANAMAVGATDQNNRRANFSQYGTGIDIVAPGVNVQSTYPGNRYVSMNGTSMATPHVAGAAALVKQRYPSWNATQIRNHLKNTATNLGNSSQFGSGLVNAEAATR

SEQ ID NO: 65727 - protein, 268 aa, Unidentified
QTVPWGITRVQAPAVHNRGITGSGVRVAILDSGISAHEDLNIRGGASFVPGEPTTADLNGHGTHVAGTVAALNNSIGVIGVAPNAELYAVKVLGANGSGSVSGIAQGLEWAATNNMHIANMSLGSDFPSSTLERAVNYATSRDVLVIAATGNNGSGSVGYPARYANAMAVGATDQNNRRANFSQYGTGIDIVAPGVNVQSTYPGNTYVSMNGTSMATPHVAGAAALVKQRYPSWNATQIRNHLKNTATNLGNSSQFGSGLVNAEAATR

SEQ ID NO: 65728 - protein, 268 aa, Unidentified
QTVPWGITRVQAPAVHNRGITGSGVRVAILDSGISAHEDLNIRGGASFVPGEPTTADLNGHGTHVAGTVAALNNSIGVIGVAPNAELYAVKVLGANGSGSVSGIAQGLEWAATNNMHIANMSLGSDFPSSTLERAVNYATSRDVLVIAATGNNGSGSVGYPARYANAMAVGATDQNNRRANFSQYGTGIDIVAPGVNVQSTYPGNRYVSMNGTSMATPHVAGAAALVKQRYPSWNATQIRNHLKNTATNLGNSNQFGSGLVNAEAATR

SEQ ID NO: 65729 - protein, 268 aa, Unidentified
QTVPWGITRVQAPAVHNRGITGSGVRVAILDSGISAHEDLNIRGGASFVPGEPTTQDLNGHGTHVAGTVAALNNSIGVIGVAPNAELYAVKVLGANGSGSVSGIAQGLEWAATNNMHIANMSLGSDFPSSTLERAVNYATSRDVLVIAATGNNGSGSVGYPARYANAMAVGATDQNNRRANFSQYGTGIDIVAPGVNVQSTYPGNRYVSMNGTSMATPHVAGAAALVKQRYPSWNATQIRNHLKNTATNLGNSSQFGSGLVNAEAATR

SEQ ID NO: 65730 - protein, 268 aa, Bacillus gibsonii
QTVPWGITRVQAPAVHNRGVTGSGVRVAILDSGISTHSDLTIRGGASFVPGEPTTADLNGHGTHVAGTVAALNNSIGVIGVAPSADLYAVKVLGANGRGSVSGIAQGLEWAAANNMHIANMSLGSDAPSITLERAVNYATSQGVLVIAATGNNGSGSVGYPARYANAMAVGATDQNNRRANFSQYGTGIDIVAPGVNVQSTYPGNRYASLNGTSMATPHVAGAAALVKQRYPSWNATQIRNHLKNTATNLGNSSQFGSGLVNAEAATR

SEQ ID NO: 65731 - protein, 268 aa, Unidentified
QTVPWGITRVQAPAVHNRGITGSGVRVAILDSGISAHEDLNIRGGASFVPGEPTTADLNGHGTHVAGTVAALNNSIGVIGVAPNAELYAVKVLGANGSGSVSGIAQGLEWAATNNMHIANMSLGSDFPSSTLERAVNYATSRDVLVIAATGNNGSGSVGYPARYANAMAVGATDQNNRRANFSQYGTGIDIVAPGVNVQSTYPGNRYVSMNGTSMATPHVAGAAALVKQRYPSWNATQIRNHLKNTATNLGNSSLFGSGLVNAEAATR

SEQ ID NO: 65732 - protein, 268 aa, Unidentified
QTVPWGITRVQAPAVHNRGITGSGVKVAILDSGISAHEDLNIRGGASFVPGEPTTADLNGHGTHVAGTVAALNNSIGVIGVAPNAELYAVKVLGANGSGSVSGIAQGLEWAATNNMHIANMSLGSDFPSSTLERAVNYATSRDVLVIAATGNNGSGSVGYPARYANAMAVGATDQNNRRANFSQYGTGIDIVAPGVNVQSTYPGNRYVSMNGTSMATPHVAGAAALVKQRYPSWNATQIRNHLKNTATNLGNSSQFGSGLVNAEAATR

SEQ ID NO: 65733 - protein, 268 aa, Unidentified
QTVPWGITRVQAPAVHNRGITGSGVRVAILDSGISAHEDLNIRGGASFVPGEPTTADLNGHGTHVAGTVAALNNSIGVIGVAPNAELYAVKVLGANGSGSVSGIAQGLEWAATNNMHIANMSLGSDFPSSTLERAVNYATSRDVLVIAATGNNGSGSVGYPARYANAMAVGATDQNNRRANFSQYGTGIDIVAPGVNVQSTYPGNRYVSLNGTSMATPHVAGAAALVKQRYPSWNATQIRNHLKNTATNLGNSSQFGSGLVNAEAATR

SEQ ID NO: 65734 - protein, 268 aa, Unidentified
QTVPWGITRVQAPAVHNRGITGSGVRVAILDSGISAHEDLNIRGGASFVPGEPTTADLNGHGTHVAGTVAALNNSIGVIGVAPNAELYAVKVLGANGSGSVSGIAQGLEWAANNNMHIANMSLGSDFPSSTLERAVNYATSRDVLVIAATGNNGSGSVGYPARYANAMAVGATDQNNRRANFSQYGTGIDIVAPGVNVQSTYPGNRYVSMNGTSMATPHVAGAAALVKQRYPSWNATQIRNHLKNTATNLGNSSQFGSGLVNAEAATR

SEQ ID NO: 65735 - protein, 268 aa, Unidentified
QTVPWGITRVQAPAVHNRGITGSGVRVAILDSGISAHSDLNIRGGASFVPGEPTTADLNGHGTHVAGTVAALNNSIGVIGVAPSAELYAVKVLGANGSGSVSGIAQGLEWAATNNMHIANMSLGSDFPSSTLERAVNYATSRDVLVIAATGNNGSGSVGYPARYANAMAVGATDQNNRRANFSQYGTGIDIVAPGVNVQSTYPGNRYVSMNGTSMATPHVAGAAALVKQRYPSWNATQIRNHLKNTATNLGNSSQFGSGLVNAEAATR

SEQ ID NO: 65736 - protein, 268 aa, Unidentified
QTVPWGITRVQAPAVHNRGITGSGVRVAILDSGISTHSDLNIRGGASFVPGEPTTADLNGHGTHVAGTVAALNNSIGVIGVAPNAELYAVKVLGANGSGSVSGIAQGLEWAATNNMHIANMSLGSDFPSSTLERAVNYATSRDVLVIAATGNNGSGSVGYPARYANAMAVGATDQNNRRANFSQYGTGIDIVAPGVNVQSTYPGNRYVSMNGTSMATPHVAGAAALVKQRYPSWNATQIRNHLKNTATNLGNSSQFGSGLVNAEAATR

SEQ ID NO: 65737 - protein, 268 aa, Unidentified
QTVPWGITRVQAPAVHNRGITGSGVRVAILDSGISAHEDLNIRGGASFVPGEPTTADLNGHGTHVAGTVAALNNSIGVLGVAPNAELYAVKVLGANGSGSVSGIAQGLEWAATNNMHIANMSLGSDFPSSTLERAVNYATSRDVLVIAATGNNGSGSVGYPARYANAMAVGATDQNNRRANFSQYGTGIDIVAPGVNVQSTYPGNRYVSMNGTSMATPHVAGAAALVKQRYPSWNATQIRNHLKNTATNLGNSSQFGSGLVNAEAATR

SEQ ID NO: 65738 - protein, 268 aa, Unidentified
QTVPWGITRVQAPAVHNRGITGSGVRVAILDSGISAHEDLNIRGGASFVPGEPTTADLNGHGTHVAGTVAALNNSIGVIGVAPNAELYAVKVLGANGSGSVSGIAQGLEWAATNNMHIANMSLGSDFPSSTLERAVNYATSRDVLVIAATGNNGSGSVGYPARYANAMAVGATDQNNRRANFSQYGTGIDIVAPGVNVQSTYPGNRYVSMNGTSMATPHVAGAAALVKQRYPSWSATQIRNHLKNTATNLGNSSQFGSGLVNAEAATR

SEQ ID NO: 65739 - protein, 268 aa, Unidentified
QTVPWGITRVQAPAVHNRGITGSGVRVAILDSGISAHEDLNIRGGASFVPGEPTTADLNGHGTHVAGTVAALNNSIGVIGVAPNAELYAVKVLGANGSGSVSGIAQGLEWAATNNMHIANMSLGSDFPSSTLERAVNYATSRDVLVIAATGNNGSGSVGYPARYANAMAVGATDQNNRRANFSQYGTGIDIVAPGVNVQSTYPGNRYVSMNGTSMATPHVAGAAALVKQRYPSWNATQIRNHLKNTATSLGNSSQFGSGLVNAEAATR

SEQ ID NO: 65740 - protein, 268 aa, Unidentified
QTVPWGITRVQAPAVHNRGITGSGVRVAILDSGISAHSDLNIRGGASFVPGEPTTADLNGHGTHVAGTVAALNNSIGVIGVAPNAELYAVKVLGASGSGSVSGIAQGLEWAATNNMHIANMSLGSDFPSSTLERAVNYATSRDVLVIAATGNNGSGSVGYPARYANAMAVGATDQNNRRANFSQYGTGIDIVAPGVNVQSTYPGNRYVSMNGTSMATPHVAGAAALVKQRYPSWNATQIRNHLKNTATNLGNSSQFGSGLVNAEAATR

SEQ ID NO: 65741 - protein, 268 aa, Unidentified
QTVPWGITRVQAPAVHNRGITGSGVRVAILDSGISAHSDLNIRGGASFVPGEPTTADLNGHGTHVAGTVAALNNSIGVIGVAPNAELYAVKVLGANGSGSVSGIAQGLEWAATNNMHIANMSLGSDAPSTTLERAVNYATSAGVLVVAATGNNGSGSVGYPARYANAMAVGATDQNNRRANFSQYGTGIDIVAPGVNVQSTYPGNRYVSMNGTSMATPHVAGAAALVKQRYPSWNATQIRNHLKNTATNLGNSSQFGSGLVNAEAATR

SEQ ID NO: 65742 - protein, 268 aa, Unidentified
QTVPWGISRVQAPAVHNRGITGSGVRVAILDSGISAHEDLNIRGGASFVPGEPTTADLNGHGTHVAGTVAALNNSIGVIGVAPNAELYAVKVLGANGSGSVSGIAQGLEWAATNNMHIANMSLGSDFPSSTLERAVNYATSRDVLVIAATGNNGSGSVGYPARYANAMAVGATDQNNRRANFSQYGTGIDIVAPGVNVQSTYPGNRYVSMNGTSMATPHVAGAAALVKQRYPSWNATQIRNHLKNTATNLGNSSQFGSGLVNAEAATR

SEQ ID NO: 65743 - protein, 268 aa, Unidentified
QTVPWGITRVQAPAVHNRGITGSGVRVAILDTGISAHEDLNIRGGASFVPGEPTTADLNGHGTHVAGTVAALNNSIGVIGVAPNAELYAVKVLGANGSGSVSGIAQGLEWAATNNMHIANMSLGSDFPSSTLERAVNYATSRDVLVIAATGNNGSGSVGYPARYANAMAVGATDQNNRRANFSQYGTGIDIVAPGVNVQSTYPGNRYVSMNGTSMATPHVAGAAALVKQRYPSWNATQIRNHLKNTATNLGNSSQFGSGLVNAEAATR

SEQ ID NO: 65744 - protein, 268 aa, Unidentified
QTVPWGITRVQAPAVHNRGITGSGVRVAILDSGISAHEDLNIRGGASFVPGEPTTADLNGHGTHVAGTVAALNNSIGVIGVAPNAELYAVKVLGANGSGSVSGIAQGLEWAATNNMHIANMSLGSDFPSSTLERAVNYATSRDVLVIAATGNNGSGSVGYPARYANAMAVGATDQNNRRANFSQYGAGIDIVAPGVNVQSTYPGNRYVSMNGTSMATPHVAGAAALVKQRYPSWNATQIRNHLKNTATNLGNSSQFGSGLVNAEAATR

SEQ ID NO: 65745 - protein, 268 aa, Unidentified
QTVPWGITRVQAPAVHNRGITGSGVRVAILDSGISAHEDLNIRGGASFVPGEPTTADLNGHGTHVAGTVAALNNSIGVIGVAPNAELYAVKVLGANGSGSVSGIAQGLEWAATNNMHIANMSLGSDSPSSTLERAVNYATSRDVLVIAATGNNGSGSVGYPARYANAMAVGATDQNNRRANFSQYGTGIDIVAPGVNVQSTYPGNRYVSMNGTSMATPHVAGAAALVKQRYPSWNATQIRNHLKNTATNLGNSSQFGSGLVNAEAATR

SEQ ID NO: 65746 - protein, 268 aa, Unidentified
QTVPWGITRVQAPAVHNRGITGSGVRVAILDSGISAHEDLNIRGGASFVPGEPTTADLNGHGTHVAGTVAALNNSIGVIGVAPNAELYAVKVLGANGSGSVSGIAQGLEWAATNNMHIANMSLGSDFPSSTLERAVNYATSRDVLVIAATGNNGSGSVGYPARYANAMAVGATDQNNRRASFSQYGTGIDIVAPGVNVQSTYPGNRYVSMNGTSMATPHVAGAAALVKQRYPSWNATQIRNHLKNTATNLGNSSQFGSGLVNAEAATR

SEQ ID NO: 65747 - protein, 268 aa, Unidentified
QTVPWGITRVQAPAVHNRGITGSGVRVAILDSGISAHEDLNIRGGASFVPGEPTTADLNGHGTHVAGTVAALNNSIGVIGVAPNAELYAVKVLGASGSGSVSGIAQGLEWAATNNMHIANMSLGSDFPSSTLERAVNYATSRDVLVIAATGNNGSGSVGYPARYANAMAVGATDQNNRRANFSQYGTGIDIVAPGVNVQSTYPGNRYVSMNGTSMATPHVAGAAALVKQRYPSWNATQIRNHLKNTATNLGNSSQFGSGLVNAEAATR

SEQ ID NO: 65748 - protein, 268 aa, Unidentified
QTVPWGITRVQAPAVHNRGITGSGVRVAILDSGISAHEDLNIRGGASFVPGEPTTADLNGHGTHVAGTVAALNNSIGVIGVAPNAELYAVKVLGANGSGSVSGIAQGLEWAATNNMHIANMSLGSDFPSATLERAVNYATSRDVLVIAATGNNGSGSVGYPARYANAMAVGATDQNNRRANFSQYGTGIDIVAPGVNVQSTYPGNRYVSMNGTSMATPHVAGAAALVKQRYPSWNATQIRNHLKNTATNLGNSSQFGSGLVNAEAATR

SEQ ID NO: 65749 - protein, 268 aa, Unidentified
QTVPWGITRVQAPAVHNRGITGSGVRVAILDSGISAHEDLNIRGGASFVPGEPTTADLNGHGTHVAGTVAALNNSIGVIGVAPNAELYAVKVLGANGSGSVSGIAQGLEWAATNNMHIANLSLGSDFPSSTLERAVNYATSRDVLVIAATGNNGSGSVGYPARYANAMAVGATDQNNRRANFSQYGTGIDIVAPGVNVQSTYPGNRYVSMNGTSMATPHVAGAAALVKQRYPSWNATQIRNHLKNTATNLGNSSQFGSGLVNAEAATR

SEQ ID NO: 65750 - protein, 268 aa, Unidentified
QTVPWGITRVQAPAVHNRGITGSGVRVAILDSGISAHEDLNIRGGASFVPGEPTTADLNGHGTHVAGTVAALNNSIGVIGVAPNAELYAVKVLGANGSGSVSGIAQGLEWAATNNMHIANMSLGSDFPSSTLERAVNYATSRDVLVVAATGNNGSGSVGYPARYANAMAVGATDQNNRRANFSQYGTGIDIVAPGVNVQSTYPGNRYVSMNGTSMATPHVAGAAALVKQRYPSWNATQIRNHLKNTATNLGNSSQFGSGLVNAEAATR

SEQ ID NO: 65751 - protein, 268 aa, Unidentified
QTVPWGITRVQAPAVHNRGITGSGVRVAILDSGISAHEDLNIRGGASFVPGEPTTADLNGHGTHVAGTVAALNNSIGVIGVAPNAELYAVKVLGANGSGSVSGIAQGLEWAATNNMHIANMSLGSDFPSSTLERAVNYATSRDVLVIAATGNNGSGSVSYPARYANAMAVGATDQNNRRANFSQYGTGIDIVAPGVNVQSTYPGNRYVSMNGTSMATPHVAGAAALVKQRYPSWNATQIRNHLKNTATNLGNSSQFGSGLVNAEAATR

SEQ ID NO: 65752 - protein, 268 aa, Unidentified
QTVPWGITRVQAPAVHNRGITGSGVKVAILDSGISTHEDLNIRGGVSFVPGEPTTADLNGHGTHVAGTVAALNNSIGVVGVAPSADLYAVKVLGANGRGSVSGIAQGLEWAAQNNMHVANMSLGTDAPSSTLERAVNYATSRDVLVIAATGNNGSGSVSYPARYANAMAVGATDQNNRRANFSQYGTGIDIVAPGVNVQSTYPGNRYVSMNGTSMATPHVAGAAALVKQRYPSWNATQIRDHLKNTATNLGNSSQYGSGLVNAEAATR

SEQ ID NO: 65753 - protein, 268 aa, Unidentified
QTVPWGITRVQAPAVHNRGITGSGVRVAILDSGISAHEDLNIRGGASFVPGEPTTADLNGHGTHVAGTVAALNNSIGVIGVAPNAELYAVKVLGANGSGSVSGIAQGLEWAATNNMHIANMSLGSDFPSSTLERAVNSATSRDVLVIAATGNNGSGSVGYPARYANAMAVGATDQNNRRANFSQYGTGIDIVAPGVNVQSTYPGNRYVSMNGTSMATPHVAGAAALVKQRYPSWNATQIRNHLKNTATNLGNSSQFGSGLVNAEAATR

SEQ ID NO: 65754 - protein, 268 aa, Unidentified
QTVPWGITRVQAPAVHNRGLTGSGVRVAILDSGISAHEDLNIRGGASFVPGEPTTADLNGHGTHVAGTVAALNNSIGVIGVAPNAELYAVKVLGANGSGSVSGIAQGLEWAATNNMHIANMSLGSDFPSSTLERAVNYATSRDVLVIAATGNNGSGSVGYPARYANAMAVGATDQNNRRANFSQYGTGIDIVAPGVNVQSTYPGNRYVSMNGTSMATPHVAGAAALVKQRYPSWNATQIRNHLKNTATNLGNSSQFGSGLVNAEAATR

SEQ ID NO: 65755 - protein, 268 aa, Unidentified
QTVPWGITRVQAPAVHNRGFTGSGVRVAILDSGISTHSDLTIRGGASFVPGEPTTADLNGHGTHVAGTVAALNNSIGVLGVAPNAELYAVKVLGANGSGSISGIAQGLEWAAANNMHIANMSLGTDAPSSTLERAVNYATSQGVLVIAATGNNGSGTISYPARYANAMAVGATDQNNRRANFSQYGSGIDIVAPGVNVQSTYPGNRYASLSGTSMATPHVAGAAALVKQRYPSWNATQIRNHLKNTATNLGNSSQFGSGLVNAEAATR

SEQ ID NO: 65756 - protein, 268 aa, Unidentified
QTVPWGITRVQAPAVHNRGITGSGVRVAILDSGISAHSDLNIRGGASFVPGEPTTADLNGHGTHVAGTVAALNNSIGVIGVAPNAELYAVKVLGANGSGSVSGIAQGLEWAATNNMHIANMSLGSPFPSSTLERAVNYATSRDVLVIAATGNNGSGSVGYPARYANAMAVGATDQNNRRANFSQYGTGIDIVAPGVNVQSTYPGNRYVSMNGTSMATPHVAGAAALVKQRYPSWNATQIRNHLKNTATNLGNSSQFGSGLVNAEAATR

SEQ ID NO: 65757 - protein, 268 aa, Unidentified
QTVPWGITRVQAPAVHNRGITGSGVRVAILDSGISAHSDLNIRGGASFVPGEPTTADLNGHGTHVAGTVAALNNSIGVIGVAPNAELYAVKVLGANGSGSVSGIAQGLEWAATNNMHIANMSLGSDFPSSTLERAVNYATSRDVLVIAATGNNGSGSVGYPARYANAMAVGATDQNNRRANFSQYGTGIDIVAPGVNVQSTYPGNRYVSMNGTSSATPHVAGAAALVKQRYPSWNATQIRNHLKNTATNLGNSSQFGSGLVNAEAATR

SEQ ID NO: 65758 - protein, 268 aa, Unidentified
QTVPWGITRVQAPAVHNRGLTGSGVRVAILDSGISAHSDLNIRGGASFVPGEPTTADLNGHGTHVAGTVAALNNSIGVIGVAPNAELYAVKVLGANGSGSVSGIAQGLEWAATNNMHIANMSLGSDFPSSTLERAVNYATSRDVLVIAATGNNGSGSVGYPARYANAMAVGATDQNNRRANFSQYGTGIDIVAPGVNVQSTYPGNRYVSMNGTSMATPHVAGAAALVKQRYPSWNATQIRNHLKNTATNLGNSSQFGSGLVNAEAATR

SEQ ID NO: 65759 - protein, 267 aa, Unidentified
QTVPWGITRVQAPAVHNRGITGSGVRVAILDSGISAHSDLNIRGGASFVPGEPTTADLNGHGTHVAGTVAALNNSIGVIGVAPNAELYAVKVLGANGSGSVSGIAQGLEWAATNNMHIANMSLGSDAPSTTLERAVNYATSGVLVIAATGNNGSGSVGYPARYANAMAVGATDQNNRRANFSQYGTGIDIVAPGVNVQSTYPGNRYVSMNGTSMATPHVAGAAALVKQRYPSWNATQIRNHLKNTATNLGNSSQFGSGLVNAEAATR

SEQ ID NO: 65760 - protein, 267 aa, Unidentified
QTVPWGITRVQAPAVHNRGITGSGVRVAILDSGISAHSDLNIRGGASFVPGEPTTADLNGHGTHVAGTVAALNNSIGVIGVAPNAELYAVKVLGANGSGSVSGIAQGLEWAATNNMHIANMSLGSDFPSSTLERAVNYATSRDVLVIAATGNNGSGSVGYPARYANAMAVGATDQNNRRANFSQYGTGIDIVAPGVNVQSTYPGNRYVSNGTSMATPHVAGAAALVKQRYPSWNATQIRNHLKNTATNLGNSSQFGSGLVNAEAATR

SEQ ID NO: 65761 - protein, 267 aa, Unidentified
QTVPWGITRVQAPAVHNRGVTGSGVRVAILDSGISTHSDLTIRGGASFVPGEPTTADLNGHGTHVAGTVAALNNSIGVIGVAPSADLYAVKVLGANGRGSVSGIAQGLEWAAANNMHIANMSLGSDAPSTTLERAVNYATSQGVLVIAATGNNGSGSVGYPARYANAMAVGATDQNNRRANFSQYGTGIDIVAPGVNVQSTYPGNRYASLNGTSMATPHVAGAAALVKQRYPSWNATQIRNHLKNTATNLGNSSQFGSGLVNAEAAT

SEQ ID NO: 65762 - protein, 269 aa, Unidentified
AQTVPWGITRVQAPAVHNRGITGSGVRVAILDSGISAHEDLNIRGGASFVPGEPTTADLNGHGTHVAGTVAALNNSIGVIGVAPNAELYAVKVLGANGSGSVSGIAQGLEWAATNNMHIANMSLGSDFPSSTLERAVNYATSRDVLVIAATGNNGSGSVGYPARYANAMAVGATDQNNRRANFSQYGTGIDIVAPGVNVQSTYPGNRYVSMNGTSMATPHVAGAAALVKQRYPSWNATQIRNHLKNTATNLGNSSQFGSGLVNAEAATR

SEQ ID NO: 65763 - protein, 268 aa, Unidentified
QTVPWGITRVQAPAVHNRGITGSGVRVAILDSGISAHEDLNIRGGASFVPGEPTTADLNGHGTHVAGTVAALNNSIGVIGVAPNAELYAVKVLGANGSGSVSGIAQGLEWAATNNMHIANMSLGSDFPSSTLERAVNYATSRDVLVIAATGNNGSGSVGYPARYANAMAVGATDQNNRRANFSQYGTGIDIVAPGVNVQSTYPGNRYVSMNGTSMATPHVAGAAALVKQRYPSWNATQIRNHLKNTATTLGNSSQFGSGLVNAEAATR

SEQ ID NO: 65764 - protein, 268 aa, Unidentified
QTVPWGITRVQAPAVHNRGITGSGVRVAILDSGISAHEDLNIRGGASFVPGEPTTADMNGHGTHVAGTVAALNNSIGVIGVAPNAELYAVKVLGANGSGSVSGIAQGLEWAATNNMHIANMSLGSDFPSSTLERAVNYATSRDVLVIAATGNNGSGSVGYPARYANAMAVGATDQNNRRANFSQYGTGIDIVAPGVNVQSTYPGNRYVSMNGTSMATPHVAGAAALVKQRYPSWNATQIRNHLKNTATNLGNSSQFGSGLVNAEAATR

SEQ ID NO: 65765 - protein, 268 aa, Unidentified
QTVPWGITRVQAPAVHNRGITGSGVRVAILDSGISAHEDLNIRGGASFVPGEPTTADLNGHGTHVAGTVAALNNSIGVIGVAPNAELYAVKVLGANGSGSVSVIAQGLEWAATNNMHIANMSLGSDFPSSTLERAVNYATSRDVLVIAATGNNGSGSVGYPARYANAMAVGATDQNNRRANFSQYGTGIDIVAPGVNVQSTYPGNRYVSMNGTSMATPHVAGAAALVKQRYPSWNATQIRNHLKNTATNLGNSSQFGSGLVNAEAATR

SEQ ID NO: 65766 - protein, 268 aa, Unidentified
QTVPWGITRVQAPAVHNRGITGSGVRVAILDSGISAHEDLNIRGGASFVPGEPTTADLNGHGTHVAGTVAALNNSIGVIGVAPNAELYAVKVLGANGSGSVSTIAQGLEWAATNNMHIANMSLGSDFPSSTLERAVNYATSRDVLVIAATGNNGSGSVGYPARYANAMAVGATDQNNRRANFSQYGTGIDIVAPGVNVQSTYPGNRYVSMNGTSMATPHVAGAAALVKQRYPSWNATQIRNHLKNTATNLGNSSQFGSGLVNAEAATR

SEQ ID NO: 65767 - protein, 268 aa, Unidentified
QTVPWGITRVQAPAVHNRGITGSGVRVAILDSGISAHEDLNIRGGASFVPGEPTTADLNGHGTHVAGTVAALNNSIGVIGVAPNAELYAVKVLGANGSGSVSGIAQGLEWAATNNMHIANMSLGSDFPSSTLERAVNYATSRDVLVIAATGNNGSGSVGYPARYANAMAVGATDQNNRRANFSQYGTGIDIVAPGVNVQSTYPGNNYVSMNGTSMATPHVAGAAALVKQRYPSWNATQIRNHLKNTATNLGNSSQFGSGLVNAEAATR

SEQ ID NO: 65768 - protein, 268 aa, Unidentified
QTVPWGITRVQAPAVHNRGITGSGVRVAILDSGISAHEDLNIRGGASFVPGEPTTMDLNGHGTHVAGTVAALNNSIGVIGVAPNAELYAVKVLGANGSGSVSGIAQGLEWAATNNMHIANMSLGSDFPSSTLERAVNYATSRDVLVIAATGNNGSGSVGYPARYANAMAVGATDQNNRRANFSQYGTGIDIVAPGVNVQSTYPGNRYVSMNGTSMATPHVAGAAALVKQRYPSWNATQIRNHLKNTATNLGNSSQFGSGLVNAEAATR

SEQ ID NO: 65769 - protein, 268 aa, Unidentified
QTVPWGITRVQAPAVHNRGITGSGVRVAILDSGISAHEDLNIRGGASFVPGEPTTADLNGHGTHVAGTVAALNNSIGVIGVAPNAELYAVKVLGANGSGSVSGIAQGLEWAATNNMHIANMSLGSDFPSSTLERAVNYATSRDVLVIAATGNNGNGSVGYPARYANAMAVGATDQNNRRANFSQYGTGIDIVAPGVNVQSTYPGNRYVSMNGTSMATPHVAGAAALVKQRYPSWNATQIRNHLKNTATNLGNSSQFGSGLVNAEAATR

SEQ ID NO: 65770 - protein, 268 aa, Unidentified
QTVPWGITRVQAPAVHNRGITGSGVKVAILDSGISAHSDLNIRGGASFVPGEPTTADLNGHGTHVAGTVAALNNSIGVIGVAPNAELYAVKVLGANGRGSISGIAQGLEWAAQNNMHVANMSLGTDAPSSTLERAVNYATSRDVLVIAATGNNGSGTISYPARYANAMAVGATDQNNRRANFSQYGAGIDIVAPGVNVQSTYPGNRYVSMNGTSMATPHVAGAAALVKQRYPSWNATQIRDHLKNTATNLGNSSQFGSGLVNAEAATR

SEQ ID NO: 65771 - protein, 268 aa, Unidentified
QTVPWGITRVQAPAVHNRGITGSGVRVAILDSGISAHEDLNIRGGASFVPGEPTTADLNGHGTHVAGTVAALNNSIGVIGVAPNAELYAVKVLGANGSGSVSGIAQGLEWAATNNMHIANMSLGSDFPSSTLETAVNYATSRDVLVIAATGNNGSGSVGYPARYANAMAVGATDQNNRRANFSQYGTGIDIVAPGVNVQSTYPGNRYVSMNGTSMATPHVAGAAALVKQRYPSWNATQIRNHLKNTATNLGNSSQFGSGLVNAEAATR

SEQ ID NO: 65772 - protein, 268 aa, Unidentified
QTVPWGITRVQAPAVHNRGITGSGVRVAILDSGISAHEDLNIRGGASFVPGEPTTADLNGHGTHVAGTVAALNNSIGVIGVAPNAELYAVKVLGANGSGSVSGIAQGLEWAATNNMHIANMSLGSDFPSSTLERAVNYATSRDVLVIAATGNNGSGSVGYPARYANAMAVGATDQNNCRANFSQYGTGIDIVAPGVNVQSTYPGNRYVSMNGTSMATPHVAGAAALVKQRYPSWNATQIRNHLKNTATNLGNSSQFGSGLVNAEAATR

SEQ ID NO: 65773 - protein, 268 aa, Unidentified
QTVPWGITRVQAPAVHNRGITGSGVRVAILDSGISAHSDLNIRGGASFVPGEPTTADLNGHGTHVAGTVAALNNSIGVIGVAPNAELYAVKVLGANGSGSVSGIAQGLEWAATNFMHIANMSLGSDFPSSTLERAVNYATSRDVLVIAATGNNGSGSVGYPARYANAMAVGATDQNNRRANFSQYGTGIDIVAPGVNVQSTYPGNRYVSMNGTSMATPHVAGAAALVKQRYPSWNATQIRNHLKNTATNLGNSSQFGSGLVNAEAATR

SEQ ID NO: 65774 - protein, 268 aa, Unidentified
QTVPWGITRVQAPAVHNRGITGSGVRVAILDSGISAHEDLNIRGGASFVPGEPTTADLNGHGTHVAGTVAALNNSIGVIGVAPNAELYAVKVLGANGSGSVSGIAQGLEWAATNNMHIANMSLGSDFPSSTLERAVNYATSRDVLVIAATGNNGSGSVGYPARYANAMAVGATDQNNRRANFSQYGTGIDIVAPGVNVQSTYPGNRYVSMNGTSMATPHVAGAAALVKQHYPSWNATQIRNHLKNTATNLGNSSQFGSGLVNAEAATR

SEQ ID NO: 65775 - protein, 268 aa, Unidentified
QTVPWGITRVQAPAVHNRGITGSGVRVAILDSGISAHEDLNIRGGASFVPGEPNTADLNGHGTHVAGTVAALNNSIGVIGVAPNAELYAVKVLGANGSGSVSGIAQGLEWAATNNMHIANMSLGSDFPSSTLERAVNYATSRDVLVIAATGNNGSGSVGYPARYANAMAVGATDQNNRRANFSQYGTGIDIVAPGVNVQSTYPGNRYVSMNGTSMATPHVAGAAALVKQRYPSWNATQIRNHLKNTATNLGNSSQFGSGLVNAEAATR

SEQ ID NO: 65776 - protein, 268 aa, Unidentified
QTVPWGITRVQAPAVHNRGITGSGVRVAILDSGISAHEDLNIRGGASFVPGEPTTADLNGHGTHVAGTVAALNNSIGVIGVAPNAELYAVKVLGANGSGSVSGIAQGLEWAATNNMHIANMSLGSDFPSSTLERAVNYATSRDVLVIAATGNNGSGSVGYPARYANAMAVGATDQNNRRANFSQYGTGIDIVAPGVNVQSTYPGNRYVSMNGTSMATPHVAGAAALVKQRYPSWNATQIRNHLKNTATNLGNSMQFGSGLVNAEAATR

SEQ ID NO: 65777 - protein, 268 aa, Unidentified
QTVPWGITRVQAPAVHNRGITGSGVRVAILDSGISAHEDLNIRGGASFVPGEPYTADLNGHGTHVAGTVAALNNSIGVIGVAPNAELYAVKVLGANGSGSVSGIAQGLEWAATNNMHIANMSLGSDFPSSTLERAVNYATSRDVLVIAATGNNGSGSVGYPARYANAMAVGATDQNNRRANFSQYGTGIDIVAPGVNVQSTYPGNRYVSMNGTSMATPHVAGAAALVKQRYPSWNATQIRNHLKNTATNLGNSSQFGSGLVNAEAATR

SEQ ID NO: 65778 - protein, 268 aa, Unidentified
QTVPWGITRVQAPAVHNRGITGSGVRVAILDSGISAHEDLNIRGGASFVPGEPTTADENGHGTHVAGTVAALNNSIGVIGVAPNAELYAVKVLGANGSGSVSGIAQGLEWAATNNMHIANMSLGSDFPSSTLERAVNYATSRDVLVIAATGNNGSGSVGYPARYANAMAVGATDQNNRRANFSQYGTGIDIVAPGVNVQSTYPGNRYVSMNGTSMATPHVAGAAALVKQRYPSWNATQIRNHLKNTATNLGNSSQFGSGLVNAEAATR

SEQ ID NO: 65779 - protein, 268 aa, Unidentified
QTVPWGITRVQAPAVHNRGITGSGVRVAILDSGISAHEDLNIRGGASFVPGEPTTNDLNGHGTHVAGTVAALNNSIGVIGVAPNAELYAVKVLGANGSGSVSGIAQGLEWAATNNMHIANMSLGSDFPSSTLERAVNYATSRDVLVIAATGNNGSGSVGYPARYANAMAVGATDQNNRRANFSQYGTGIDIVAPGVNVQSTYPGNRYVSMNGTSMATPHVAGAAALVKQRYPSWNATQIRNHLKNTATNLGNSSQFGSGLVNAEAATR

SEQ ID NO: 65780 - protein, 268 aa, Unidentified
QTVPWGITRVQAPAVHNRGITGSGVRVAILDSGISAHEDLNIRGGASFVPGEPTTADLNGHGTHVAGTVAALNNSIGVIGVAPNAELYAVKVLGANGSGSVSGIAQGLEWAATNNMHIANMSLGSDFPSNTLERAVNYATSRDVLVIAATGNNGSGSVGYPARYANAMAVGATDQNNRRANFSQYGTGIDIVAPGVNVQSTYPGNRYVSMNGTSMATPHVAGAAALVKQRYPSWNATQIRNHLKNTATNLGNSSQFGSGLVNAEAATR

SEQ ID NO: 65781 - protein, 268 aa, Unidentified
QTVPWGITRVQAPAVHNRGITGSGVRVAILDSGISAHEDLNIRGGASFVPGEPTTADLNGHGTHVAGTVAALNNSIGVIGVAPNAELYAVKVLGANGSGSVSGIAQGLEWAATNNMHIANMSLGSDFPSSTLERAVNYATSRDVLVIAATGNNGSGSVGYPARYANAMAVGATDQNNRRANFSQYGTGIDIVAPGVNVQSTYPGNRYVSMNGTSMATPHVAGAAALVKQRYPSWNATQIRNHLKNTATNLGNSSEFGSGLVNAEAATR

SEQ ID NO: 65782 - protein, 268 aa, Unidentified
QTVPWGITRVQAPAVHNRGITGSGVRVAILDSGISAHEDLNIRGGASFVPGEPTTADLNGHGTHVAGTVAALNNSIGVIGVAPNAELYAVKVLGANGSGSVSGIAQGLEWAATNNMHIANMSLGSDFPSSTLERAVNYATSRDVLVIAATGNNGSGSVGYPARYANAMAVGATDQNNRRANFSQYGTGIDIVAPGVNVQSTYPGNRYVSMNGTSMATPHVAGAAALVKQRYPSWNATQIRNHLKNTATNLGNSSMFGSGLVNAEAATR

SEQ ID NO: 65783 - protein, 268 aa, Unidentified
QTVPWGITRVQAPAVHNRGITGSGVRVAILDSGISAHEDLNIRGGASFVPGEPETADLNGHGTHVAGTVAALNNSIGVIGVAPNAELYAVKVLGANGSGSVSGIAQGLEWAATNNMHIANMSLGSDFPSSTLERAVNYATSRDVLVIAATGNNGSGSVGYPARYANAMAVGATDQNNRRANFSQYGTGIDIVAPGVNVQSTYPGNRYVSMNGTSMATPHVAGAAALVKQRYPSWNATQIRNHLKNTATNLGNSSQFGSGLVNAEAATR

SEQ ID NO: 65784 - protein, 268 aa, Unidentified
QTVPWGITRVQAPAVHNRGITGSGVRVAILDSGISAHEDLNIRGGASFVPGEPTTADQNGHGTHVAGTVAALNNSIGVIGVAPNAELYAVKVLGANGSGSVSGIAQGLEWAATNNMHIANMSLGSDFPSSTLERAVNYATSRDVLVIAATGNNGSGSVGYPARYANAMAVGATDQNNRRANFSQYGTGIDIVAPGVNVQSTYPGNRYVSMNGTSMATPHVAGAAALVKQRYPSWNATQIRNHLKNTATNLGNSSQFGSGLVNAEAATR

SEQ ID NO: 65785 - protein, 268 aa, Unidentified
QTVPWGITRVQAPAVHNRGWTGSGVRVAILDSGISAHEDLNIRGGASFVPGEPTTADLNGHGTHVAGTVAALNNSIGVIGVAPNAELYAVKVLGANGSGSVSGIAQGLEWAATNNMHIANMSLGSDFPSSTLERAVNYATSRDVLVIAATGNNGSGSVGYPARYANAMAVGATDQNNRRANFSQYGTGIDIVAPGVNVQSTYPGNRYVSMNGTSMATPHVAGAAALVKQRYPSWNATQIRNHLKNTATNLGNSSQFGSGLVNAEAATR

SEQ ID NO: 65786 - protein, 268 aa, Unidentified
QTVPWGITRVQAPAVHNRGPTGSGVRVAILDSGISAHEDLNIRGGASFVPGEPTTADLNGHGTHVAGTVAALNNSIGVIGVAPNAELYAVKVLGANGSGSVSGIAQGLEWAATNNMHIANMSLGSDFPSSTLERAVNYATSRDVLVIAATGNNGSGSVGYPARYANAMAVGATDQNNRRANFSQYGTGIDIVAPGVNVQSTYPGNRYVSMNGTSMATPHVAGAAALVKQRYPSWNATQIRNHLKNTATNLGNSSQFGSGLVNAEAATR

SEQ ID NO: 65787 - protein, 268 aa, Unidentified
QTVPWGITRVQAPAVHNRGITGSGVRVAILDSGISAHEDLNIRGGASFVPGEPTTADLNGHGTHVAGTVAALNNSIGVIGVAPNAELYAVKVLGANGSGSVSGIAQGLEWAATNNMHIANMSLGSDQPSSTLERAVNYATSRDVLVIAATGNNGSGSVGYPARYANAMAVGATDQNNRRANFSQYGTGIDIVAPGVNVQSTYPGNRYVSMNGTSMATPHVAGAAALVKQRYPSWNATQIRNHLKNTATNLGNSSQFGSGLVNAEAATR

SEQ ID NO: 65788 - protein, 268 aa, Unidentified
QTVPWGITRVQAPAVHNRGITGSGVRVAILDSGISAHEDLNIRGGASFVPGEPTTADLNGHGTHVAGTVAALNNSIGVIGVAPNAELYAVKVLGANGSGSVSGIAQGLEWAATNNMHIANMSLGSDFPSSTLERAVNEATSRDVLVIAATGNNGSGSVGYPARYANAMAVGATDQNNRRANFSQYGTGIDIVAPGVNVQSTYPGNRYVSMNGTSMATPHVAGAAALVKQRYPSWNATQIRNHLKNTATNLGNSSQFGSGLVNAEAATR

SEQ ID NO: 65789 - protein, 268 aa, Unidentified
QTVPWGITRVQAPAVHNRGITGSGVRVAILDSGISAHEDLNIRGGASFVPGEPHTADLNGHGTHVAGTVAALNNSIGVIGVAPNAELYAVKVLGANGSGSVSGIAQGLEWAATNNMHIANMSLGSDFPSSTLERAVNYATSRDVLVIAATGNNGSGSVGYPARYANAMAVGATDQNNRRANFSQYGTGIDIVAPGVNVQSTYPGNRYVSMNGTSMATPHVAGAAALVKQRYPSWNATQIRNHLKNTATNLGNSSQFGSGLVNAEAATR

SEQ ID NO: 65790 - protein, 268 aa, Unidentified
QTVPWGITRVQAPAVHNRGITGSGVRVAILDSGISAHEDLNIRGGASFVPGEPTTDDLNGHGTHVAGTVAALNNSIGVIGVAPNAELYAVKVLGANGSGSVSGIAQGLEWAATNNMHIANMSLGSDFPSSTLERAVNYATSRDVLVIAATGNNGSGSVGYPARYANAMAVGATDQNNRRANFSQYGTGIDIVAPGVNVQSTYPGNRYVSMNGTSMATPHVAGAAALVKQRYPSWNATQIRNHLKNTATNLGNSSQFGSGLVNAEAATR

SEQ ID NO: 65791 - protein, 268 aa, Unidentified
QTVPWGITRVQAPAVHNRGITGSGVRVAILDSGISAHEDLNIRGGASFVPGEPTTADLNGHGTHVAGTVAALNNSIGVIGVAPVAELYAVKVLGANGSGSVSGIAQGLEWAATNNMHIANMSLGSDFPSSTLERAVNYATSRDVLVIAATGNNGSGSVGYPARYANAMAVGATDQNNRRANFSQYGTGIDIVAPGVNVQSTYPGNRYVSMNGTSMATPHVAGAAALVKQRYPSWNATQIRNHLKNTATNLGNSSQFGSGLVNAEAATR

SEQ ID NO: 65792 - protein, 268 aa, Unidentified
QTVPWGITRVQAPAVHNRGITGSGVRVAILDSGISAHSDLNIRGGASFVPGEPTTADLNGHGTHVAGTVAALNNSIGVIGVAPNAELYAVKVLGANGSGSVSGIAQGLEWAAQNNMHIANMSLGSDFPSSTLERAVNYATSRDVLVIAATGNNGSGSVGYPARYANAMAVGATDQNNRRANFSQYGTGIDIVAPGVNVQSTYPGNRYVSMNGTSMATPHVAGAAALVKQRYPSWNATQIRNHLKNTATNLGNSSQFGSGLVNAEAATR

SEQ ID NO: 65793 - protein, 268 aa, Unidentified
QTVPWGITRVQAPAVHNRGITGSGVRVAILDSGISAHEDLNIRGGASFVPGEPTTADLNGHGTHVAGTVAALNNSIGVIGVAPMAELYAVKVLGANGSGSVSGIAQGLEWAATNNMHIANMSLGSDFPSSTLERAVNYATSRDVLVIAATGNNGSGSVGYPARYANAMAVGATDQNNRRANFSQYGTGIDIVAPGVNVQSTYPGNRYVSMNGTSMATPHVAGAAALVKQRYPSWNATQIRNHLKNTATNLGNSSQFGSGLVNAEAATR

SEQ ID NO: 65794 - protein, 268 aa, Unidentified
QQVPWGITRVQAPAVHNRGITGSGVRVAILDSGISAHSDLNIRGGASFVPGEPTTADLNGHGTHVAGTVAALNNSIGVIGVAPNAELYAVKVLGANGSGSVSGIAQGLEWAATNNMHIANMSLGSDFPSSTLERAVNYATSRDVLVIAATGNNGSGSVGYPARYANAMAVGATDQNNRRANFSQYGTGIDIVAPGVNVQSTYPGNRYVSMNGTSMATPHVAGAAALVKQRYPSWNATQIRNHLKNTATNLGNSSQFGSGLVNAEAATR

SEQ ID NO: 65795 - protein, 268 aa, Unidentified
QTVPWGITRVQAPAVHNRGITGSGVRVAILDSGISAHEDLNIRGGASFVPGEPTTADLNGHGTHVAGTVAALNNSIGVIGVAPNAELYAVKVLGANGSGSVSGIAQGLEWAATNNMHIANMSLGSDFPSSTLERAVNYATSRDVLVIAATGNNGSGSVGYPARYANAMAVGATDQNNRRANFSQYGTGMDIVAPGVNVQSTYPGNRYVSMNGTSMATPHVAGAAALVKQRYPSWNATQIRNHLKNTATNLGNSSQFGSGLVNAEAATR

SEQ ID NO: 65796 - protein, 268 aa, Unidentified
QTVPWGITRVQAPAVHNRGITGSGVRVAILDSGISAHEDLNIRGGASFVPGEPTTADLNGHGTHVAGTVAALNNSIGVIGVAPNAELYAVKVLGANGSGSVSGIAQGLEWAATNNMHIANMSLGSDFPSETLERAVNYATSRDVLVIAATGNNGSGSVGYPARYANAMAVGATDQNNRRANFSQYGTGIDIVAPGVNVQSTYPGNRYVSMNGTSMATPHVAGAAALVKQRYPSWNATQIRNHLKNTATNLGNSSQFGSGLVNAEAATR

SEQ ID NO: 65797 - protein, 268 aa, Unidentified
QTVPWGITRVQAPAVHNRGITGSGVRVAILDSGISAHEDLNIRGGASFVPGEPTTADLNGHGTHVAGTVAALNNSIGVIGVAPNAELYAVKVLGANGSGSVSGIAQGLEWAATNNMHIANMSLGSDFPSSTLERAVNYATSRDVLVIAATGNNGSGSVGYPARYANAMAVGATDQNNRRANFSQYGTGIDIVAPGVNVQSTYPGNRYVSMNGTSMATPHVAGAAALVKQRYPSWNATQIRNHLKNTATNLGPSSQFGSGLVNAEAATR

SEQ ID NO: 65798 - protein, 268 aa, Unidentified
QTVPWGITRVQAPAVHNRGITGSGVRVAILDSGISAHSDLNIRGGASFVPGEPTTADLNGHGTHVAGTVAALNNSIGVIGVAPNAELYAVKVLGANGSGSVSGIAQGLEWAATNNMHIANMSLGSDCPSSTLERAVNYATSRDVLVIAATGNNGSGSVGYPARYANAMAVGATDQNNRRANFSQYGTGIDIVAPGVNVQSTYPGNRYVSMNGTSMATPHVAGAAALVKQRYPSWNATQIRNHLKNTATNLGNSSQFGSGLVNAEAATR

SEQ ID NO: 65799 - protein, 268 aa, Unidentified
QTVPWGITRVQAPAVHNRGITGSGVRVAILDSGISAHEDLNIRGGASFVPGEPTTADLNGHGTHVAGTVAALNNSIGVIGVAPNAELYAVKVLGANGSGSVSGIAQGLEWAATNNMHIANMSLGSDFPSSTLERAVNYATSRDVLVIAATGNNGSGSVGYPARYANAMAVGATDQNNRRAHFSQYGTGIDIVAPGVNVQSTYPGNRYVSMNGTSMATPHVAGAAALVKQRYPSWNATQIRNHLKNTATNLGNSSQFGSGLVNAEAATR

SEQ ID NO: 65800 - protein, 268 aa, Unidentified
QTVPWGITRVQAPAVHNRGITGSGVRVAILDSGISAHEDLNIRGGASFVPGEPTTADLNGHGTHVAGTVAALNNSIGVIGVAPNAELYAVKVLGANGSGSVSGIAQGLEWAATNNMHIANMSLGSDFPSSTLERAVNYATSRDVLVIAATGNNGSGSVGYPARYANAMAVGATDQNNRRANFSQYGTGIDIVAPGVNVQSTYPGNRYVSMNGTSMATPHVAGAAALVKQRYPSWNAAQIRNHLKNTATNLGNSSQFGSGLVNAEAATR

SEQ ID NO: 65801 - protein, 268 aa, Unidentified
QTVPWGITRVQAPAVHNRGITGSGVRVAILDSGISAHEDLNIRGGASFVPGEPTTADLNGHGTHVAGTVAALNNSIGVIGVAPNAELYAVKVLGANGSGSVSGIAQGLEWAATNNMHIANMSLGSDFPSDTLERAVNYATSRDVLVIAATGNNGSGSVGYPARYANAMAVGATDQNNRRANFSQYGTGIDIVAPGVNVQSTYPGNRYVSMNGTSMATPHVAGAAALVKQRYPSWNATQIRNHLKNTATNLGNSSQFGSGLVNAEAATR

SEQ ID NO: 65802 - protein, 268 aa, Unidentified
QTVPWGITRVQAPAVHNRGITGSGVRVAILDSGISAHEDLNIRGGASFVPGEPTTADLNGHGTHVAGTVAALNNSIGVIGVAPNAELYAVKVLGANGSGSVSGIAQGLEWAATNNMHIANMSLGSDFPSSTLERAVNYATSRDVLVIAATGNNGSGSVGYPARYANAMAVGATDQNNRRANFSQYGDGIDIVAPGVNVQSTYPGNRYVSMNGTSMATPHVAGAAALVKQRYPSWNATQIRNHLKNTATNLGNSSQFGSGLVNAEAATR

SEQ ID NO: 65803 - protein, 268 aa, Unidentified
QTVPWGITRVQAPAVHNRGITGSGVRVAILDSGISAHEDLNIRGGASFVPGEPTTADLNGHGTHVAGTVAALNNSIGVIGVAPNAELYAVKVLGANGSGSVSGIAQGLEWAATNNMHIANMSLGSDFPSSTLERAVNYATSRDVLVIAATGNNGSGSVGYPARYANAMAVGATDQNNRRANFSQYGTGIDIVAPGVNVQSTYPGNRYVSMNGTSMATPHVAGAAALVKQRYPSWNATQIRNHLKNTATNLGNSFQFGSGLVNAEAATR

SEQ ID NO: 65804 - protein, 268 aa, Unidentified
QTVPWGITRVQAPAVHNRGITGSGVRVAILDSGISAHEDLNIRGGASFVPGEPTTADLNGHGTHVAGTVAALNNSIGVIGVAPSAELYAVKVLGANGRGSVSGIAQGLEWAATNNMHIANMSLGAEGPSSTLERAVNYATSRDVLVIAATGNNGSGSVGYPARYANAMAVGATDQNNRRANFSQYGTGIDIVAPGVNVQSTYPGNRYVSLNGTSMATPHVAGAAALVKQRYPSWNATQIRNHLKNTATNLGNSSQFGSGLVNAEAATR

SEQ ID NO: 65805 - protein, 268 aa, Unidentified
QTVPWGITRVQAPAVHNRGITGSGVRVAILDSGISAHEDLNIRGGASFVPGEPTTADLNGHGTHVAGTVAALNNSIGVIGVAPNAELYAVKVLGANGSGSVSGIAQGLEWAATNNMHIANMSLGSDFPSSTLERAVNYATSRNVLVIAATGNNGSGSVGYPARYANAMAVGATDQNNRRANFSQYGTGIDIVAPGVNVQSTYPGNRYVSMNGTSMATPHVAGAAALVKQRYPSWNATQIRNHLKNTATNLGNSSQFGSGLVNAEAATR

SEQ ID NO: 65806 - protein, 268 aa, Unidentified
QTVPWGITRVQAPAVHNRGITGSGVRVAILDSGISAHSDLNIRGGASFVPGEPTTADLNGHGTHVAGTVAALNNSIGVIGVAPNAELYAVKVLGANGSGSVSGIAQGLEWAATNDMHIANMSLGSDFPSSTLERAVNYATSRDVLVIAATGNNGSGSVGYPARYANAMAVGATDQNNRRANFSQYGTGIDIVAPGVNVQSTYPGNRYVSMNGTSMATPHVAGAAALVKQRYPSWNATQIRNHLKNTATNLGNSSQFGSGLVNAEAATR

SEQ ID NO: 65807 - protein, 268 aa, Bacillus gibsonii
QTVPWGITRVQAPAVHNRGITGSGVRVAILDSGISAHSDLNIRGGASFVPGEPTTADLNGHGTHVAGTVAALNNSIGVIGVAPNAELYAVKVLGANGSGSVSGIAQGLEWAATNXMHIANMSLGSDFPSSTLERAVNYATSRDVLVIAATGNNGSGSVGYPARYANAMAVGATDQNNRRANFSQYGTGIDIVAPGVNVQSTYPGNRYVSMNGTSMATPHVAGAAALVKQRYPSWNATQIRNHLKNTATNLGNSSQFGSGLVNAEAATR

SEQ ID NO: 65808 - protein, 268 aa, Unidentified
QTVPWGITRVQAPAVHNRGITGSGVRVAILDSGISAHEDLNIRGGASFVPGEPTTADLNGHGTHVAGTVAALNNSIGVIGVAPNAELYAVKVLGANGSGSVSGIAQGLEWAATNNMHIANMSLGSDFPSSTLERAVNYATSREVLVIAATGNNGSGSVGYPARYANAMAVGATDQNNRRANFSQYGTGIDIVAPGVNVQSTYPGNRYVSMNGTSMATPHVAGAAALVKQRYPSWNATQIRNHLKNTATNLGNSSQFGSGLVNAEAATR

SEQ ID NO: 65809 - protein, 268 aa, Unidentified
QTVPWGITRVQAPAVHNRGITGSGVRVAILDSGISAHSDLNIRGGASFVPGEPTTADLNGHGTHVAGTVAALNNSIGVIGVAPNAELYAVKVLGANGSGSVSGIAQGLEWAATNEMHIANMSLGSDFPSSTLERAVNYATSRDVLVIAATGNNGSGSVGYPARYANAMAVGATDQNNRRANFSQYGTGIDIVAPGVNVQSTYPGNRYVSMNGTSMATPHVAGAAALVKQRYPSWNATQIRNHLKNTATNLGNSSQFGSGLVNAEAATR

SEQ ID NO: 65810 - protein, 268 aa, Unidentified
QTVPWGITRVQAPAVHNRGITGSGVRVAILDSGISAHSDLNIRGGASFVPGEPTTADLNGHGTHVAGTVAALNNSIGVIGVAPNAELYAVKVLGANGSGSVSGIAQGLEWAATNVMHIANMSLGSDFPSSTLERAVNYATSRDVLVIAATGNNGSGSVGYPARYANAMAVGATDQNNRRANFSQYGTGIDIVAPGVNVQSTYPGNRYVSMNGTSMATPHVAGAAALVKQRYPSWNATQIRNHLKNTATNLGNSSQFGSGLVNAEAATR

SEQ ID NO: 65811 - protein, 268 aa, Unidentified
QTVPWGITRVQAPAVHNRGITGSGVRVAILDSGISAHEDLNIRGGASFVPGEPTTADLNGHGTHVAGTVAALNNSIGVIGVAPNAELYAVKVLGANGSGSVSGIAQGLEWAATNNMHIANMSLGSDFPSSTLERAVNYATSRDVLVIAATGNNGSGSVGYPARYANAMAVGATDQNNRRANFSQYGTGIDIVAPGVNVQSTYPGNRYVSKNGTSMATPHVAGAAALVKQRYPSWNATQIRNHLKNTATNLGNSSQFGSGLVNAEAATR

SEQ ID NO: 65812 - protein, 268 aa, Unidentified
QTVPWGITRVQAPAVHNRGITGSGVRVAILDSGISAHEDLNIRGGASFVPGEPTTADLNGHGTHVAGTVAALNNSIGVIGVAPNAELYAVKVLGANGSGSVSGIAQGLEWAATNNMHIANMSLGSDFPSSTLERAVNYATSRDVLVIAATGNNGSGSVGYPARYANAMAVGATDQNNVRANFSQYGTGIDIVAPGVNVQSTYPGNRYVSMNGTSMATPHVAGAAALVKQRYPSWNATQIRNHLKNTATNLGNSSQFGSGLVNAEAATR

SEQ ID NO: 65813 - protein, 268 aa, Unidentified
QTVPWGITRVQAPAVHNRGTTGSGVRVAILDSGISAHEDLNIRGGASFVPGEPTTADLNGHGTHVAGTVAALNNSIGVIGVAPNAELYAVKVLGANGSGSVSGIAQGLEWAATNNMHIANMSLGSDFPSSTLERAVNYATSRDVLVIAATGNNGSGSVGYPARYANAMAVGATDQNNRRANFSQYGTGIDIVAPGVNVQSTYPGNRYVSMNGTSMATPHVAGAAALVKQRYPSWNATQIRNHLKNTATNLGNSSQFGSGLVNAEAATR

SEQ ID NO: 65814 - protein, 268 aa, Bacillus gibsonii
QTVPWGITRVQAPAVHNRGITGSGVRVAILDSGISAHSDLNIRGGASFVPGEPTTADLNGHGTHVAGTVAALNNSIGVIGVAPNAELYAVKVLGANGSGSVSGIAQGLEWAATNNMHIANMSLGSDFPSSTLERAVNYATSRDVLVIAATGNNGSGSVGYPARYANAMAVGATDQNNRRANFSQYGPGIDIVAPGVNVQSTYPGNRYVSMNGTSMATPHVAGAAALVKQRYPSWNATQIRNHLKNTATNLGNSSQFGSGLVNAEAATR

SEQ ID NO: 65815 - protein, 268 aa, Unidentified
QTVPWGITRVQAPAVHNRGITGSGVRVAILDSGISAHEDLNIRGGASFVPGEPTTADLNGHGTHVAGTVAALNNSIGVIGVAPNAELYAVKVLGANGSGSVSGIAQGLEWAATNNMHIANMSLGSDFPSSTLEEAVNYATSRDVLVIAATGNNGSGSVGYPARYANAMAVGATDQNNRRANFSQYGTGIDIVAPGVNVQSTYPGNRYVSMNGTSMATPHVAGAAALVKQRYPSWNATQIRNHLKNTATNLGNSSQFGSGLVNAEAATR

SEQ ID NO: 65816 - protein, 268 aa, Unidentified
QTVPWGITRVQAPAVHNRGITGSGVRVAILDSGISAHEDLNIRGGASFVPGEPTTADLNGHGTHVAGTVAALNNSIGVIGVAPNAELYAVKVLGANGSGSVSGIAQGLEWAATNNMHIANMSLGSDFPSSTLERAVNYATSRDVLVLAATGNNGSGSVGYPARYANAMAVGATDQNNRRANFSQYGTGIDIVAPGVNVQSTYPGNRYVSMNGTSMATPHVAGAAALVKQRYPSWNATQIRNHLKNTATNLGNSSQFGSGLVNAEAATR

SEQ ID NO: 65817 - protein, 268 aa, Unidentified
QTVPWGITRVQAPAVHNRGITGSGVRVAILDSGISAHEDLNIRGGASFVPGEPTTADLNGHGTHVAGTVAALNNSIGVIGVAPNAELYAVKVLGANGSGSVSGIAQGLEWAATNNMHIANMSLGSDFPSSTLERAVNYATSRDVLVIAATGNNGSGSVGYPARYANAMAVGATDQNNRRANFSQYGTGIDIVAPGVNVQSTYPGNRYVSMNGTSMATPHVAGAAALVKQRYPSWNATQIRNHLKNTATNLGNYSQFGSGLVNAEAATR

SEQ ID NO: 65818 - protein, 268 aa, Unidentified
QTVPWGITRVQAPAVHNRGITGSGVRVAILDSGISAHEDLNIRGGASFVPGEPTTADLNGHGTHVAGTVAALNNSIGVIGVAPNAELYAVKVLGANGSGSVSGIAQGLEWAATNNMHIANMSLGSDFPSSTLERAVNYATSRDVLVIAATGNNGSGSVGYPARYANAMAVGATDQNNRRANFSQYGTGIDIVAPGVNVQSTYPGNRYVSMNGTSMATPHVAGAAALVKQRYPSWNATQIRNHLKNTATDLGNSSQFGSGLVNAEAATR

SEQ ID NO: 65819 - protein, 268 aa, Unidentified
QTVPWGITRVQAPAVHNRGITGSGVRVAILDSGISAHEDLNIRGGASFVPGEPTTADLNGHGTHVAGTVAALNNSIGVIGVAPNAELYAVKVLGANGSGSVSGIAQGLEWAATNNMHIANMSLGSDFPSSTLERAVNYATSRDVLVIAATGNNGSGSVGYPARYANAMAVGATDQNNRRANFSQYGTGIDIVAPGVNVQSTYPGNRYVSMNGTSMATPHVAGAAALVKQRYPSWNAEQIRNHLKNTATNLGNSSQFGSGLVNAEAATR

SEQ ID NO: 65820 - protein, 268 aa, Unidentified
QTVPWGITRVQAPAVHNRGITGSGVRVAILDSGISAHEDLNIRGGASFVPGEPTTADLNGHGTHVAGTVAALNNSIGVIGVAPNAELYAVKVLGANGSGSVSGIAQGLEWAATNNMHIANMSLGSDFPSSTLERAVNYATSRDVLVIAATGNNGSGSVGYPARYANAMAVGATDQNNRRANFSQYGVGIDIVAPGVNVQSTYPGNRYVSMNGTSMATPHVAGAAALVKQRYPSWNATQIRNHLKNTATNLGNSSQFGSGLVNAEAATR

SEQ ID NO: 65821 - protein, 268 aa, Unidentified
QTVPWGITRVQAPAVHNRGITGSGVRVAILDSGISAHEDLNIRGGASFVPGEPTTADLNGHGTHVAGTVAALNNSIGVIGVAPNAELYAVKVLGANGSGSVSGIAQGLEWAATNNMHIANMSLGSDFPSVTLERAVNYATSRDVLVIAATGNNGSGSVGYPARYANAMAVGATDQNNRRANFSQYGTGIDIVAPGVNVQSTYPGNRYVSMNGTSMATPHVAGAAALVKQRYPSWNATQIRNHLKNTATNLGNSSQFGSGLVNAEAATR

SEQ ID NO: 65822 - protein, 268 aa, Unidentified
QTVPWGITRVQAPAVHNRGITGSGVRVAILDSGISAHSDLNIRGGASFVPGEPTTADLNGHGTHVAGTVAALNNSIGVIGVAPNAELYAVKVLGANGSGSVSGIAQGLEWAATNNMHIANMSLGSDFPSSTLERAVNYATSRDVLVIAATGNNGSGSVGYPARYANAMAVGATDQNNRRANFSQYGTGIDIVAPGVNVQSTYPGNRYVSCNGTSMATPHVAGAAALVKQRYPSWNATQIRNHLKNTATNLGNSSQFGSGLVNAEAATR

SEQ ID NO: 65823 - protein, 268 aa, Unidentified
QTVPWGITRVQAPAVHNRGITGSGVRVAILDSGISAHEDLNIRGGASFVPGEPTTADLNGHGTHVAGTVAALNNSIGVIGVAPNAELYAVKVLGANGSGSVSGIAQGLEWAATNHMHIANMSLGSDFPSSTLERAVNYATSRDVLVIAATGNNGSGSVGYPARYANAMAVGATDQNNRRANFSQYGTGIDIVAPGVNVQSTYPGNRYVSMNGTSMATPHVAGAAALVKQRYPSWNATQIRNHLKNTATNLGNSSQFGSGLVNAEAATR

SEQ ID NO: 65824 - protein, 268 aa, Unidentified
QTVPWGITRVQAPAVHNRGITGSGVRVAILDSGISAHEDLNIRGGASFVPGEPTTADLNGHGTHVAGTVAALNNSIGVIGVAPNAELYAVKVLGANGSGSVSGIAQGLEWAATNNMHIANMSLGSDFPSSTLERAVNYATSRDVLVIAATGNNGSGSVGYPARYANAMAVGATDQNNRRANFSQYGTGIDIVAPGVNVQSTYPGNRYVSMNGTSMATPHVAGAAALVKQNYPSWNATQIRNHLKNTATNLGNSSQFGSGLVNAEAATR

SEQ ID NO: 65825 - protein, 268 aa, Unidentified
QTVPWGITRVQAPAVHNRGITGSGVRVAILDSGISAHEDLNIRGGASFVPGEPTTADLNGHGTHVAGTVAALNNSIGVIGVAPNAELYAVKVLGANGSGSVSGIAQGLEWAATNNMHIANMSLGSDFPSSTLERAVNYATSRDVLVIAATGNNGSGSVGYPARYANAMAVGATDQNNRRANFSQYGTGIDIVAPGVNVQSTYPGNRYVSMNGTSMATPHVAGAAALVKQRYPSWNATQIRNHLKNTATNLGNSWQFGSGLVNAEAATR

SEQ ID NO: 65826 - protein, 268 aa, Unidentified
QTVPWGITRVQAPAVHNRGITGSGVRVAILDSGISAHSDLNIRGGASFVPGEPTTADLNGHGTHVAGTVAALNNSIGVIGVAPNAELYAVKVLGANGSGSVSGIAQGLEWAATNNMHIANMSLGSDKPSSTLERAVNYATSRDVLVIAATGNNGSGSVGYPARYANAMAVGATDQNNRRANFSQYGTGIDIVAPGVNVQSTYPGNRYVSMNGTSMATPHVAGAAALVKQRYPSWNATQIRNHLKNTATNLGNSSQFGSGLVNAEAATR

SEQ ID NO: 65827 - protein, 268 aa, Unidentified
QTVPWGITRVQAPAVHNRGITGSGVRVAILDSGISAHEDLNIRGGASFVPGEPTTADLNGHGTHVAGTVAALNNSIGVIGVAPNAELYAVKVLGANGSGSVSGIAQGLEWAATNNMHIANMSLGSDFPSSTLERAVNYATSRDVLVIAATGNNGSGSVTYPARYANAMAVGATDQNNRRANFSQYGTGIDIVAPGVNVQSTYPGNRYVSMNGTSMATPHVAGAAALVKQRYPSWNATQIRNHLKNTATNLGNSSQFGSGLVNAEAATR

SEQ ID NO: 65828 - protein, 268 aa, Unidentified
QTVPWGITRVQAPAVHNRGITGSGVRVAILDSGISAHEDLNIRGGASFVPGEPTTADLNGHGTHVAGTVAALNNSIGVIGVAPNAELYAVKVLGANGSGSVSGIAQGLEWAATNNMHIANMSLGSDFPSSTLERAVNYATSRDVLVIAATGNNGSGSVGYPARYANAMAVGATDQNNRRANFSQYGTGIDIVAPGVNVQSTYPGNRYVSMNGTSMATPHVAGAAALVKQEYPSWNATQIRNHLKNTATNLGNSSQFGSGLVNAEAATR

SEQ ID NO: 65829 - protein, 268 aa, Unidentified
QTVPWGITRVQAPAVHNRGITGSGVRVAILDSGISAHSDLNIRGGASFVPGEPTTADLNGHGTHVAGTVAALNNSIGVIGVAPNAELYAVKVLGANGSGSVSGIAQGLEWAATNNMHIANMSLGSDFPSSTLERAVNYATSRDVLVIAATGNNGSGSVGYPARYANAMAVGATDQNNQRANFSQYGTGIDIVAPGVNVQSTYPGNRYVSMNGTSMATPHVAGAAALVKQRYPSWNATQIRNHLKNTATNLGNSSQFGSGLVNAEAATR

SEQ ID NO: 65830 - protein, 268 aa, Unidentified
QTVPWGITRVQAPAVHNRGITGSGVRVAILDSGISAHEDLNIRGGASFVPGEPTTADLNGHGTHVAGTVAALNNSIGVIGVAPNAELYAVKVLGANGSGSVSAIAQGLEWAATNNMHIANMSLGSDFPSSTLERAVNYATSRDVLVIAATGNNGSGSVGYPARYANAMAVGATDQNNRRANFSQYGTGIDIVAPGVNVQSTYPGNRYVSMNGTSMATPHVAGAAALVKQRYPSWNATQIRNHLKNTATNLGNSSQFGSGLVNAEAATR

SEQ ID NO: 65831 - protein, 268 aa, Unidentified
QTVPWGITRVQAPAVHNRGITGSGVRVAILDSGISAHEDLNIRGGASFVPGEPTTADLNGHGTHVAGTVAALNNSIGVIGVAPNAELYAVKVLGANGSGSVSGIAQGLEWAATNNMHIANMSLGSDFPSSTLERAVNYATSRDVLVIAATGNNGSGSVGYPARYANAMAVGATDQNNHRANFSQYGTGIDIVAPGVNVQSTYPGNRYVSMNGTSMATPHVAGAAALVKQRYPSWNATQIRNHLKNTATNLGNSSQFGSGLVNAEAATR

SEQ ID NO: 65832 - protein, 268 aa, Unidentified
QTVPWGITRVQAPAVHNRGITGSGVRVAILDSGISAHEDLNIRGGASFVPGEPTTADLNGHGTHVAGTVAALNNSIGVIGVAPNAELYAVKVLGANGSGSVSGIAQGLEWAATNNMHIANMSLGSDFPSSTLERAVNYATSRDVLVIAATGNNGSGSVGYPARYANAMAVGATDQNNRRANFSQYGTGIDIVAPGVNVQSTYPGNRYVSMNGTSMATPHVAGAAALVKQRYPSWNATQIRNHLKNTATNLGNSSQFGSGLVNAEAATR

SEQ ID NO: 65833 - protein, 268 aa, Unidentified
QTVPWGITRVQAPAVHNRGITGSGVRVAILDSGISAHEDLNIRGGASFVPGEPTTADLNGHGTHVAGTVAALNNSIGVIGVAPNAELYAVKVLGAKGSGSVSGIAQGLEWAATNNMHIANMSLGSDFPSSTLERAVNYATSRDVLVIAATGNNGSGSVGYPARYANAMAVGATDQNNRRANFSQYGTGIDIVAPGVNVQSTYPGNRYVSMNGTSMATPHVAGAAALVKQRYPSWNATQIRNHLKNTATNLGNSSQFGSGLVNAEAATR

SEQ ID NO: 65834 - protein, 268 aa, Unidentified
QTVPWGITRVQAPAVHNRGITGSGVRVAILDSGISAHEDLNIRGGASFVPGEPTTADLNGHGTHVAGTVAALNNSIGVIGVAPNAELYAVKVLGANGSGSVSGIAQGLEWAATNNMHIANMSLGSDFPSSTLERAVNYATSRDVLVIAATGNNGSGSVMYPARYANAMAVGATDQNNRRANFSQYGTGIDIVAPGVNVQSTYPGNRYVSMNGTSMATPHVAGAAALVKQRYPSWNATQIRNHLKNTATNLGNSSQFGSGLVNAEAATR

SEQ ID NO: 65835 - protein, 268 aa, Unidentified
QTVPWGITRVQAPAVHNRGITGSGVRVAILDSGISAHEDLNIRGGASFVPGEPTTADLNGHGTHVAGTVAALNNSIGVIGVAPNAELYAVKVLGANGSGSVSGIAQGLEWAATNNMHIANMSLGSDFPSSTLEKAVNYATSRDVLVIAATGNNGSGSVGYPARYANAMAVGATDQNNRRANFSQYGTGIDIVAPGVNVQSTYPGNRYVSMNGTSMATPHVAGAAALVKQRYPSWNATQIRNHLKNTATNLGNSSQFGSGLVNAEAATR

SEQ ID NO: 65836 - protein, 268 aa, Unidentified
QTVPWGITRVQAPAVHNRGITGSGVRVAILDSGISAHSDLNIRGGASFVPGEPTTADLNGHGTHVAGTVAALNNSIGVIGVAPSADLYAVKVLGANGRGSVSGIAQGLEWAAQNNMHVANMSLGTDAPSSTLERAVNYATSADVLVIAATGNNGSGSVSYPARYANAMAVGATDQNNRRANFSQYGTGIDIVAPGVNVQSTYPGNRYVSMNGTSMATPHVAGAAALVKQRYPSWNATQIRNHLKNTATNLGNSSQYGSGLVNAEAATR

SEQ ID NO: 65837 - protein, 268 aa, Unidentified
QTVPWGITRVQAPAVHNRGITGSGVRVAILDSGISAHEDLNIRGGASFVPGEPTTADLNGHGTHVAGTVAALNNSIGVIGVAPNAELYAVKVLGANGSGSVSGIAQGLEWAATNNMHIANMSLGSDFPSSTLERAVNYATSRDVLVIAATGNNGSGSVGYPARYANAMAVGATDQNNRRAAFSQYGTGIDIVAPGVNVQSTYPGNRYVSMNGTSMATPHVAGAAALVKQRYPSWNATQIRNHLKNTATNLGNSSQFGSGLVNAEAATR

SEQ ID NO: 65838 - protein, 268 aa, Unidentified
QTVPWGITRVQAPAVHNRGITGSGVRVAILDSGISAHEDLNIRGGASFVPGEPTTADLNGHGTHVAGTVAALNNSIGVIGVAPNAELYAVKVLGANGSGSVSGIAQGLEWAATNNMHIANMSLGSDFPSSTLERAVNYATSRDVLVIAATGNNGSGSVGYPARYANAMAVGATDQNNMRANFSQYGTGIDIVAPGVNVQSTYPGNRYVSMNGTSMATPHVAGAAALVKQRYPSWNATQIRNHLKNTATNLGNSSQFGSGLVNAEAATR

SEQ ID NO: 65839 - protein, 268 aa, Unidentified
QTVPWGITRVQAPAVHNRGITGSGVRVAILDSGISAHEDLNIRGGASFVPGEPTTADLNGHGTHVAGTVAALNNSIGVIGVAPNAELYAVKVLGANGSGSVSGIAQGLEWAATNNMHIANMSLGSDFPSSTLEMAVNYATSRDVLVIAATGNNGSGSVGYPARYANAMAVGATDQNNRRANFSQYGTGIDIVAPGVNVQSTYPGNRYVSMNGTSMATPHVAGAAALVKQRYPSWNATQIRNHLKNTATNLGNSSQFGSGLVNAEAATR

SEQ ID NO: 65840 - protein, 268 aa, Unidentified
QTVPWGIARVQAPAVHNRGITGSGVRVAILDSGISAHEDLNIRGGASFVPGEPTTADLNGHGTHVAGTVAALNNSIGVIGVAPNAELYAVKVLGANGSGSVSGIAQGLEWAATNNMHIANMSLGSDFPSSTLERAVNYATSRDVLVIAATGNNGSGSVGYPARYANAMAVGATDQNNRRANFSQYGTGIDIVAPGVNVQSTYPGNRYVSMNGTSMATPHVAGAAALVKQRYPSWNATQIRNHLKNTATNLGNSSQFGSGLVNAEAATR

SEQ ID NO: 65841 - protein, 268 aa, Bacillus gibsonii
QTVPWGITRVQAPAVHNRGITGSGVRVAILDSGISAHSDLNIRGGASFVPGEPTTADLNGHGTHVAGTVAALNNSIGVIGVAPNAELYAVKVLGAXGSGSVSGIAQGLEWAATNNMHIANMSLGSDFPSSTLERAVNYATSRDVLVIAATGNNGSGSVGYPARYANAMAVGATDQNNRRANFSQYGTGIDIVAPGVNVQSTYPGNRYVSMNGTSMATPHVAGAAALVKQRYPSWNATQIRNHLKNTATNLGNSSQFGSGLVNAEAATR

SEQ ID NO: 65842 - protein, 268 aa, Unidentified
QTVPWGITRVQAPAVHNRGITGSGVRVAILDSGISAHEDLNIRGGASFVPGEPTTADLNGHGTHVAGTVAALNNSIGVIGVAPNAELYAVKVLGANGSGSVSGIAQGLEWAATNNMHIANMSLGSDFPSSTLERAVNYATSRDVLVIAATGNNGSGSVGYPARYANAMAVGATDQNNRRANFSQYGTGIDIVAPGVNVQSTYPGNRYVSMNGTSMATPHVAGAAALVKQRYPSWNATQIRNHLKNTATNLGNSDQFGSGLVNAEAATR

SEQ ID NO: 65843 - protein, 268 aa, Unidentified
QTVPWGITRVQAPAVHNRGITGSGVRVAILDSGISAHEDLNIRGGASFVPGEPTTADLNGHGTHVAGTVAALNNSIGVIGVAPNAELYAVKVLGANGSGSVSGIAQGLEWAATNNMHIANMSLGSDFPSSTLERAVNYATSRDVLVIAATGNNGSGSVGYPARYANAMAVGATDQNNRRANFSQYGPGIDIVAPGVNVQSTYPGNRYVSMNGTSMATPHVAGAAALVKQRYPSWNATQIRNHLKNTATNLGNSSQFGSGLVNAEAATR

SEQ ID NO: 65844 - protein, 268 aa, Unidentified
QTVPWGITRVQAPAVHNRGITGSGVRVAILDSGISAHEDLNIRGGASFVPGEPTTADLNGHGTHVAGTVAALNNSIGVIGVAPNAELYAVKVLGANGSGSVSGIAQGLEWAATNNMHIANMSLGSDFPSSTLERAVNYATSRDVLVIAATGNNGSGSVGYPARYANAMAVGATDQNNRRANFSQYGTGIDIVAPGVNVQSTYPGNRYVSMNGTSMATPHVAGAAALVKQRYPSWNATQIRNHLKNTATNLGNSIQFGSGLVNAEAATR

SEQ ID NO: 65845 - protein, 268 aa, Unidentified
QTVPWGITRVQAPAVHNRGITGSGVRVAILDSGISAHSDLNIRGGASFVPGEPTTADLNGHGTHVAGTVAALNNSIGVIGVAPNAELYAVKVLGANGSGSVSGIAQGLEWAATNQMHIANMSLGSDFPSSTLERAVNYATSRDVLVIAATGNNGSGSVGYPARYANAMAVGATDQNNRRANFSQYGTGIDIVAPGVNVQSTYPGNRYVSMNGTSMATPHVAGAAALVKQRYPSWNATQIRNHLKNTATNLGNSSQFGSGLVNAEAATR

SEQ ID NO: 65846 - protein, 268 aa, Unidentified
QTVPWGITRVQAPAVHNRGITGSGVRVAILDSGISAHEDLNIRGGASFVPGEPTTADLNGHGTHVAGTVAALNNSIGVIGVAPNAELYAVKVLGANGSGSVSGIAQGLEWAATNNMHIANMSLGSDFPSSTLEIAVNYATSRDVLVIAATGNNGSGSVGYPARYANAMAVGATDQNNRRANFSQYGTGIDIVAPGVNVQSTYPGNRYVSMNGTSMATPHVAGAAALVKQRYPSWNATQIRNHLKNTATNLGNSSQFGSGLVNAEAATR

SEQ ID NO: 65847 - protein, 268 aa, Unidentified
QTVPWGITRVQAPAVHNRGITGSGVRVAILDSGISAHEDLNIRGGASFVPGEPTTHDLNGHGTHVAGTVAALNNSIGVIGVAPNAELYAVKVLGANGSGSVSGIAQGLEWAATNNMHIANMSLGSDFPSSTLERAVNYATSRDVLVIAATGNNGSGSVGYPARYANAMAVGATDQNNRRANFSQYGTGIDIVAPGVNVQSTYPGNRYVSMNGTSMATPHVAGAAALVKQRYPSWNATQIRNHLKNTATNLGNSSQFGSGLVNAEAATR

SEQ ID NO: 65848 - protein, 268 aa, Unidentified
QTVPWGITRVQAPAVHNRGITGSGVRVAILDSGISAHEDLNIRGGASFVPGEPTTADLNGHGTHVAGTVAALNNSIGVIGVAPNAELYAVKVLGANGSGSVSGIAQGLEWAAVNNMHIANMSLGSDFPSSTLERAVNYATSRDVLVIAATGNNGSGSVGYPARYANAMAVGATDQNNRRANFSQYGTGIDIVAPGVNVQSTYPGNRYVSMNGTSMATPHVAGAAALVKQRYPSWNATQIRNHLKNTATNLGNSSQFGSGLVNAEAATR

SEQ ID NO: 65849 - protein, 268 aa, Unidentified
QTVPWGITRVQAPAVHNRGMTGSGVRVAILDSGISAHSDLNIRGGASFVPGEPTTADLNGHGTHVAGTVAALNNSIGVIGVAPNAELYAVKVLGANGSGSVSGIAQGLEWAATNNMHIANMSLGSDFPSSTLERAVNYATSRDVLVIAATGNNGSGSVGYPARYANAMAVGATDQNNRRANFSQYGTGIDIVAPGVNVQSTYPGNRYVSMNGTSMATPHVAGAAALVKQRYPSWNATQIRNHLKNTATNLGNSSQFGSGLVNAEAATR

SEQ ID NO: 65850 - protein, 268 aa, Unidentified
QTVPWGITRVQAPAVHNRGITGSGVRVAILDSGISAHEDLNIRGGASFVPGEPTTADLNGHGTHVAGTVAALNNSIGVIGVAPNAELYAVKVLGANGSGSVSGIAQGLEWAATNNMHIANMSLGSDFPSSTLERAVNYATSRDVLVIAATGNNGSGSVGYPARYANAMAVGATDQNNSRANFSQYGTGIDIVAPGVNVQSTYPGNRYVSMNGTSMATPHVAGAAALVKQRYPSWNATQIRNHLKNTATNLGNSSQFGSGLVNAEAATR

SEQ ID NO: 65851 - protein, 268 aa, Unidentified
QTVPWGITRVQAPAVHNRGITGSGVRVAILDSGISAHSDLNIRGGASFVPGEPTTADLNGHGTHVAGTVAALNNSIGVIGVAPNAELYAVKVLGANGSGSVSGIAQGLEWAATNNMHIANMSLGSDFPSSTLERAVNYATSRDVLVIAATGNNGSGSVGYPARYANAMAVGATDQNNRRANFSQYGTGIDIVAPGVNVQSTYPGNRYVSMNGTSMATPHVAGAAALVKQRYPSWNATQIRNHLKNTATNLGNSSQFGSGLVNAEAATR

SEQ ID NO: 65852 - protein, 268 aa, Unidentified
QTVPWGITRVQAPAVHNRGITGSGVRVAILDSGISAHEDLNIRGGASFVPGEPTTADLNGHGTHVAGTVAALNNSIGVIGVAPNAELYAVKVLGANGSGSVSGIAQGLEWAATNNMHIANMSLGSDFPSSTLERAVNYATSRDVLVIAATGNNGSGSVGYPARYANAMAVGATDQNNRRANFSQYGIGIDIVAPGVNVQSTYPGNRYVSMNGTSMATPHVAGAAALVKQRYPSWNATQIRNHLKNTATNLGNSSQFGSGLVNAEAATR

SEQ ID NO: 65853 - protein, 268 aa, Unidentified
QTVPWGITRVQAPAVHNRGITGSGVRVAILDSGISAHSDLNIRGGASFVPGEPTTADLNGHGTHVAGTVAALNNSIGVIGVAPNAELYAVKVLGANGSGSVSGIAQGLEWAATNAMHIANMSLGSDFPSSTLERAVNYATSRDVLVIAATGNNGSGSVGYPARYANAMAVGATDQNNRRANFSQYGTGIDIVAPGVNVQSTYPGNRYVSMNGTSMATPHVAGAAALVKQRYPSWNATQIRNHLKNTATNLGNSSQFGSGLVNAEAATR

SEQ ID NO: 65854 - protein, 268 aa, Unidentified
QTVPWGITRVQAPAVHNRGITGSGVRVAILDSGISAHEDLNIRGGASFVPGEPTTADLNGHGTHVAGTVAALNNSIGVIGVAPNAELYAVKVLGANGSGSVSGIAQGLEWAATNNMHIANMSLGSDFPSSTLERAVNYATSRDVLVIAATGNNGSGSVAYPARYANAMAVGATDQNNRRANFSQYGTGIDIVAPGVNVQSTYPGNRYVSMNGTSMATPHVAGAAALVKQRYPSWNATQIRNHLKNTATNLGNSSQFGSGLVNAEAATR

SEQ ID NO: 65855 - protein, 268 aa, Unidentified
QTVPWGITRVQAPAVHNRGITGSGVRVAILDSGISAHEDLNIRGGASFVPGEPTTADLNGHGTHVAGTVAALNNSIGVIGVAPNAELYAVKVLGANGSGSVSGIAQGLEWAATNNMHIANMSLGSDFPSSTLERAVNYATSRDVLVIAATGNNGSGSVGYPARYANAMAVGATDQNNRRATFSQYGTGIDIVAPGVNVQSTYPGNRYVSMNGTSMATPHVAGAAALVKQRYPSWNATQIRNHLKNTATNLGNSSQFGSGLVNAEAATR

SEQ ID NO: 65856 - protein, 268 aa, Unidentified
QTVPWGITRVQAPAVHNRGITGSGVRVAILDSGISAHEDLNIRGGASFVPGEPTTADLNGHGTHVAGTVAALNNSIGVIGVAPNAELYAVKVLGANGSGSVSGIAQGLEWAATNNMHIANMSLGSDFPSSTLERAVNYATSRDVLVIAATGNNGDGSVGYPARYANAMAVGATDQNNRRANFSQYGTGIDIVAPGVNVQSTYPGNRYVSMNGTSMATPHVAGAAALVKQRYPSWNATQIRNHLKNTATNLGNSSQFGSGLVNAEAATR

SEQ ID NO: 65857 - protein, 268 aa, Unidentified
QTVPWGITRVQAPAVHNRGITGSGVRVAILDSGISAHEDLNIRGGASFVPGEPTTADLNGHGTHVAGTVAALNNSIGVIGVAPNAELYAVKVLGANGSGSVSGIAQGLEWAATNNMHIANMSLGSDFPSSTLERAVNYATSRDVLVIAATGNNGSGSLGYPARYANAMAVGATDQNNRRANFSQYGTGIDIVAPGVNVQSTYPGNRYVSMNGTSMATPHVAGAAALVKQRYPSWNATQIRNHLKNTATNLGNSSQFGSGLVNAEAATR

SEQ ID NO: 65858 - protein, 268 aa, Unidentified
QTVPWGITRVQAPAVHNRGITGSGVRVAILDSGISAHEDLNIRGGASFVPGEPTTADLNGHGTHVAGTVAALNNSIGVIGVAPNAELYAVKVLGANGSGSVSGIAQGLEWAATNNMHIANMSLGSDFPSSTLERAVNYATSRDVLVIAATGNNGCGSVGYPARYANAMAVGATDQNNRRANFSQYGTGIDIVAPGVNVQSTYPGNRYVSMNGTSMATPHVAGAAALVKQRYPSWNATQIRNHLKNTATNLGNSSQFGSGLVNAEAATR

SEQ ID NO: 65859 - protein, 268 aa, Unidentified
QTVPWGITRVQAPAVHNRGITGSGVRVAILDSGISAHEDLNIRGGASFVPGEPTTADANGHGTHVAGTVAALNNSIGVIGVAPNAELYAVKVLGANGSGSVSGIAQGLEWAATNNMHIANMSLGSDFPSSTLERAVNYATSRDVLVIAATGNNGSGSVGYPARYANAMAVGATDQNNRRANFSQYGTGIDIVAPGVNVQSTYPGNRYVSMNGTSMATPHVAGAAALVKQRYPSWNATQIRNHLKNTATNLGNSSQFGSGLVNAEAATR

SEQ ID NO: 65860 - protein, 268 aa, Unidentified
QTVPWGITRVQAPAVHNRGITGSGVRVAILDSGISAHSDLNIRGGASFVPGEPTTADLNGHGTHVAGTVAALNNSIGVIGVAPNAELYAVKVLGANGSGSVSGIAQGLEWAATNNMHIANMSLGSDTPSSTLERAVNYATSRDVLVIAATGNNGSGSVGYPARYANAMAVGATDQNNRRANFSQYGTGIDIVAPGVNVQSTYPGNRYVSMNGTSMATPHVAGAAALVKQRYPSWNATQIRNHLKNTATNLGNSSQFGSGLVNAEAATR

SEQ ID NO: 65861 - protein, 268 aa, Unidentified
QTVPWGITRVQAPAVHNRGITGSGVRVAILDSGISAHEDLNIRGGASFVPGEPTTADLNGHGTHVAGTVAALNNSIGVIGVAPNAELYAVKVLGANGSGSVSGIAQGLEWAATNNMHIANMSLGSDFPSSTLERAVNYATSRDVLVIAATGNNGSGSVGYPARYANAMAVGATDQNNIRANFSQYGTGIDIVAPGVNVQSTYPGNRYVSMNGTSMATPHVAGAAALVKQRYPSWNATQIRNHLKNTATNLGNSSQFGSGLVNAEAATR

SEQ ID NO: 65862 - protein, 268 aa, Unidentified
QTVPWGITRVQAPAVHNRGHTGSGVRVAILDSGISAHEDLNIRGGASFVPGEPTTADLNGHGTHVAGTVAALNNSIGVIGVAPNAELYAVKVLGANGSGSVSGIAQGLEWAATNNMHIANMSLGSDFPSSTLERAVNYATSRDVLVIAATGNNGSGSVGYPARYANAMAVGATDQNNRRANFSQYGTGIDIVAPGVNVQSTYPGNRYVSMNGTSMATPHVAGAAALVKQRYPSWNATQIRNHLKNTATNLGNSSQFGSGLVNAEAATR

SEQ ID NO: 65863 - protein, 268 aa, Unidentified
QTVPWGITRVQAPAVHNRGITGSGVRVAILDSGISAHEDLNIRGGASFVPGEPTTADLNGHGTHVAGTVAALNNSIGVIGVAPNAELYAVKVLGANGSGSVSGIAQGLEWAATNNMHIANMSLGSDFPSMTLERAVNYATSRDVLVIAATGNNGSGSVGYPARYANAMAVGATDQNNRRANFSQYGTGIDIVAPGVNVQSTYPGNRYVSMNGTSMATPHVAGAAALVKQRYPSWNATQIRNHLKNTATNLGNSSQFGSGLVNAEAATR

SEQ ID NO: 65864 - protein, 268 aa, Unidentified
QTVPWGITRVQAPAVHNRGITGSGVRVAILDSGISAHSDLNIRGGASFVPGEPTTADLNGHGTHVAGTVAALNNSIGVIGVAPNAELYAVKVLGANGSGSVSGIAQGLEWAATNMMHIANMSLGSDFPSSTLERAVNYATSRDVLVIAATGNNGSGSVGYPARYANAMAVGATDQNNRRANFSQYGTGIDIVAPGVNVQSTYPGNRYVSMNGTSMATPHVAGAAALVKQRYPSWNATQIRNHLKNTATNLGNSSQFGSGLVNAEAATR

SEQ ID NO: 65865 - protein, 268 aa, Unidentified
QTVPWGITRVQAPAVHNRGITGSGVRVAILDSGISAHEDLNIRGGASFVPGEPTTADLNGHGTHVAGTVAALNNSIGVIGVAPNAELYAVKVLGANGSGSVSGIAQGLEWAATNNMHIANMSLGSDFPSSTLERAVNYATSRDVLVIAATGNNGSGSVGYPARYANAMAVGATDQNNRRANFSQYGTGIDIVAPGVNVQSTYPGNRYVSMNGTSMATPHVAGAAALVKQRHPSWNATQIRNHLKNTATNLGNSSQFGSGLVNAEAATR

SEQ ID NO: 65866 - protein, 268 aa, Unidentified
QTVPWGITRVQAPAVHNRGITGSGVRVAILDSGISAHSDLNIRGGASFVPGEPTTADLNGHGTHVAGTVAALNNSIGVIGVAPNAELYAVKVLGANGSGSVSGIAQGLEWAAANNMHIANMSLGSDFPSSTLERAVNYATSRDVLVIAATGNNGSGSVGYPARYANAMAVGATDQNNRRANFSQYGTGIDIVAPGVNVQSTYPGNRYVSMNGTSMATPHVAGAAALVKQRYPSWNATQIRNHLKNTATNLGNSSQFGSGLVNAEAATR

SEQ ID NO: 65867 - protein, 268 aa, Unidentified
QTVPWGITRVQAPAVHNRGITGSGVRVAILDSGISAHEDLNIRGGASFVPGEPTTADLNGHGTHVAGTVAALNNSIGVIGVAPNAELYAVKVLGAEGSGSVSGIAQGLEWAATNNMHIANMSLGSDFPSSTLERAVNYATSRDVLVIAATGNNGSGSVGYPARYANAMAVGATDQNNRRANFSQYGTGIDIVAPGVNVQSTYPGNRYVSMNGTSMATPHVAGAAALVKQRYPSWNATQIRNHLKNTATNLGNSSQFGSGLVNAEAATR

SEQ ID NO: 65868 - protein, 268 aa, Unidentified
QTVPWGITRVQAPAVHNRGITGSGVRVAILDSGISAHEDLNIRGGASFVPGEPTTADLNGHGTHVAGTVAALNNSIGVIGVAPNAELYAVKVLGANGSGSVSGIAQGLEWAATNNMHIANMSLGSDFPSSTLERAVNYATSRDVLVIAATGNNGSGSVGYPARYANAMAVGATDQNNRRANFSQYGQGIDIVAPGVNVQSTYPGNRYVSMNGTSMATPHVAGAAALVKQRYPSWNATQIRNHLKNTATNLGNSSQFGSGLVNAEAATR

SEQ ID NO: 65869 - protein, 268 aa, Unidentified
QTVPWGIRRVQAPAVHNRGITGSGVRVAILDSGISAHSDLNIRGGASFVPGEPTTADLNGHGTHVAGTVAALNNSIGVIGVAPNAELYAVKVLGANGSGSVSGIAQGLEWAATNNMHIANMSLGSDFPSSTLERAVNYATSRDVLVIAATGNNGSGSVGYPARYANAMAVGATDQNNRRANFSQYGTGIDIVAPGVNVQSTYPGNRYVSMNGTSMATPHVAGAAALVKQRYPSWNATQIRNHLKNTATNLGNSSQFGSGLVNAEAATR

SEQ ID NO: 65870 - protein, 268 aa, Unidentified
QTVPWGITRVQAPAVHNRGITGSGVRVAILDSGISAHEDLNIRGGASFVPGEPTTADLNGHGTHVAGTVAALNNSIGVIGVAPNAELYAVKVLGANGSGSVSGIAQGLEWAATNNMHIANMSLGSDFPSSTLERAVNYATSRDVLVIAATGNNGSGSVGYPARYANAMAVGATDQNNRRANFSQYGTGIDIVAPGVNVQSTYPGNKYVSMNGTSMATPHVAGAAALVKQRYPSWNATQIRNHLKNTATNLGNSSQFGSGLVNAEAATR

SEQ ID NO: 65871 - protein, 268 aa, Unidentified
QTVPWGIHRVQAPAVHNRGITGSGVRVAILDSGISAHEDLNIRGGASFVPGEPTTADLNGHGTHVAGTVAALNNSIGVIGVAPNAELYAVKVLGANGSGSVSGIAQGLEWAATNNMHIANMSLGSDFPSSTLERAVNYATSRDVLVIAATGNNGSGSVGYPARYANAMAVGATDQNNRRANFSQYGTGIDIVAPGVNVQSTYPGNRYVSMNGTSMATPHVAGAAALVKQRYPSWNATQIRNHLKNTATNLGNSSQFGSGLVNAEAATR

SEQ ID NO: 65872 - protein, 268 aa, Unidentified
QTVPWGITRVQAPAVHNRGITGSGVRVAILDSGISAHSDLNIRGGASFVPGEPTTADLNGHGTHVAGTVAALNNSIGVIGVAPNAELYAVKVLGANGSGSVSGIAQGLEWAATNNMHIANMSLGSDAPSSTLERAVNYATSRDVLVIAATGNNGSGSVGYPARYANAMAVGATDQNNRRANFSQYGTGIDIVAPGVNVQSTYPGNRYVSMNGTSMATPHVAGAAALVKQRYPSWNATQIRNHLKNTATNLGNSSQFGSGLVNAEAATR

SEQ ID NO: 65873 - protein, 268 aa, Unidentified
QTVPWGITRVQAPAVHNRGITGSGVRVAILDSGISAHEDLNIRGGASFVPGEPTTADLNGHGTHVAGTVAALNNSIGVIGVAPNAELYAVKVLGANGSGSVSGIAQGLEWAATNNMHIANMSLGSDFPSSTLERAVNYATSRDVLVIAATGNNGSGSVGYPARYANAMAVGATDQNNRRANFSQYGTGIDIVAPGVNVQSTYPGNRYVSRNGTSMATPHVAGAAALVKQRYPSWNATQIRNHLKNTATNLGNSSQFGSGLVNAEAATR

SEQ ID NO: 65874 - protein, 268 aa, Unidentified
QTVPWGITRVQAPAVHNRGITGSGVRVAILDSGISAHEDLNIRGGASFVPGEPTTADLNGHGTHVAGTVAALNNSIGVIGVAPNAELYAVKVLGANGSGSVSGIAQGLEWAATNNMHIANMSLGSDFPSSTLERAVNYATSRDVLVIAATGNNGSGSVGYPARYANAMAVGATDQNNRRANFSQYGYGIDIVAPGVNVQSTYPGNRYVSMNGTSMATPHVAGAAALVKQRYPSWNATQIRNHLKNTATNLGNSSQFGSGLVNAEAATR

SEQ ID NO: 65875 - protein, 268 aa, Unidentified
QTVPWGITRVQAPAVHNRGITGSGVRVAILDSGISAHSDLNIRGGASFVPGEPTTADLNGHGTHVAGTVAALNNSIGVIGVAPNAELYAVKVLGANGSGSVSGIAQGLEWAATNNMHIANMSLGSDFPSSTLERAVNYATSRDVLVIAATGNNGSGSVGYPARYANAMAVGATDQNNRRAEFSQYGTGIDIVAPGVNVQSTYPGNRYVSMNGTSMATPHVAGAAALVKQRYPSWNATQIRNHLKNTATNLGNSSQFGSGLVNAEAATR

SEQ ID NO: 65876 - protein, 268 aa, Unidentified
QTVPWGITRVQAPAVHNRGITGSGVRVAILDSGISAHEDLNIRGGASFVPGEPTTADLNGHGTHVAGTVAALNNSIGVIGVAPNAELYAVKVLGANGSGSVSGIAQGLEWAATNNMHIANMSLGSDFPSSTLERAVNYATSRDVLVIAATGNNGSGSVGYPARYANAMAVGATDQNNRRAYFSQYGTGIDIVAPGVNVQSTYPGNRYVSMNGTSMATPHVAGAAALVKQRYPSWNATQIRNHLKNTATNLGNSSQFGSGLVNAEAATR

SEQ ID NO: 65877 - protein, 268 aa, Unidentified
QTVPWGITRVQAPAVHNRGITGSGVRVAILDSGISAHEDLNIRGGASFVPGEPTTADLNGHGTHVAGTVAALNNSIGVIGVAPNAELYAVKVLGANGSGSVSGIAQGLEWATTNNMHIANMSLGSDFPSSTLERAVNYATSRDVLVIAATGNNGSGSVGYPARYANAMAVGATDQNNRRANFSQYGTGIDIVAPGVNVQSTYPGNRYVSMNGTSMATPHVAGAAALVKQRYPSWNATQIRNHLKNTATNLGNSSQFGSGLVNAEAATR

SEQ ID NO: 65878 - protein, 268 aa, Unidentified
QTVPWGITRVQAPAVHNRGITGSGVRVAILDSGISAHEDLNIRGGASFVPGEPDTADLNGHGTHVAGTVAALNNSIGVIGVAPNAELYAVKVLGANGSGSVSGIAQGLEWAATNNMHIANMSLGSDFPSSTLERAVNYATSRDVLVIAATGNNGSGSVGYPARYANAMAVGATDQNNRRANFSQYGTGIDIVAPGVNVQSTYPGNRYVSMNGTSMATPHVAGAAALVKQRYPSWNATQIRNHLKNTATNLGNSSQFGSGLVNAEAATR

SEQ ID NO: 65879 - protein, 268 aa, Unidentified
QTVPWGITRVQAPAVHNRGITGSGVRVAILDSGISAHEDLNIRGGASFVPGEPTTADLNGHGTHVAGTVAALNNSIGVIGVAPNAELYAVKVLGANGSGSVSGIAQGLEWAATNNMHIANMSLGSDFPSSTLEVAVNYATSRDVLVIAATGNNGSGSVGYPARYANAMAVGATDQNNRRANFSQYGTGIDIVAPGVNVQSTYPGNRYVSMNGTSMATPHVAGAAALVKQRYPSWNATQIRNHLKNTATNLGNSSQFGSGLVNAEAATR

SEQ ID NO: 65880 - protein, 268 aa, Unidentified
QVVPWGITRVQAPAVHNRGITGSGVRVAILDSGISAHEDLNIRGGASFVPGEPTTADLNGHGTHVAGTVAALNNSIGVIGVAPNAELYAVKVLGANGSGSVSGIAQGLEWAATNNMHIANMSLGSDFPSSTLERAVNYATSRDVLVIAATGNNGSGSVGYPARYANAMAVGATDQNNRRANFSQYGTGIDIVAPGVNVQSTYPGNRYVSMNGTSMATPHVAGAAALVKQRYPSWNATQIRNHLKNTATNLGNSSQFGSGLVNAEAATR

SEQ ID NO: 65881 - protein, 268 aa, Unidentified
QTVPWGITRVQAPAVHNRGETGSGVRVAILDSGISAHEDLNIRGGASFVPGEPTTADLNGHGTHVAGTVAALNNSIGVIGVAPNAELYAVKVLGANGSGSVSGIAQGLEWAATNNMHIANMSLGSDFPSSTLERAVNYATSRDVLVIAATGNNGSGSVGYPARYANAMAVGATDQNNRRANFSQYGTGIDIVAPGVNVQSTYPGNRYVSMNGTSMATPHVAGAAALVKQRYPSWNATQIRNHLKNTATNLGNSSQFGSGLVNAEAATR

SEQ ID NO: 65882 - protein, 268 aa, Unidentified
QTVPWGITRVQAPAVHNRGITGSGVRVAILDSGISAHSDLNIRGGASFVPGEPTTADLNGHGTHVAGTVAALNNSIGVIGVAPNAELYAVKVLGANGSGSVSGIAQGLEWAATNNMHIANMSLGSDVPSSTLERAVNYATSRDVLVIAATGNNGSGSVGYPARYANAMAVGATDQNNRRANFSQYGTGIDIVAPGVNVQSTYPGNRYVSMNGTSMATPHVAGAAALVKQRYPSWNATQIRNHLKNTATNLGNSSQFGSGLVNAEAATR

SEQ ID NO: 65883 - protein, 268 aa, Unidentified
QTVPWGITRVQAPAVHNRGITGSGVRVAILDSGISAHEDLNIRGGASFVPGEPTTADLNGHGTHVAGTVAALNNSIGVIGVAPNAELYAVKVLGANGSGSVSGIAQGLEWAATNNMHIANMSLGSDFPSSTLERAVNYATSRDVLVIAATGNNGSGSVGYPARYANAMAVGATDQNNQRANFSQYGTGIDIVAPGVNVQSTYPGNRYVSMNGTSMATPHVAGAAALVKQRYPSWNATQIRNHLKNTATNLGNSSQFGSGLVNAEAATR

SEQ ID NO: 65884 - protein, 268 aa, Unidentified
QTVPWGITRVQAPASHNRGITGSGVRVAILDSGISAHEDLNIRGGASFVPGEPTTADLNGHGTHVAGTVAALNNSIGVIGVAPNAELYAVKVLGANGSGSVSGIAQGLEWAATNNMHIANMSLGSDFPSSTLERAVNYATSRDVLVIAATGNNGSGSVGYPARYANAMAVGATDQNNRRANFSQYGTGIDIVAPGVNVQSTYPGNRYVSMNGTSMATPHVAGAAALVKQRYPSWNATQIRNHLKNTATNLGNSSQFGSGLVNAEAATR

SEQ ID NO: 65885 - protein, 268 aa, Unidentified
QTVPWGITRVQAPAVHNRGITGSGVRVAILDSGISAHSDLNIRGGASFVPGEPTTADLNGHGTHVAGTVAALNNSIGVIGVAPNAELYAVKVLGANGSGSVSGIAQGLEWAATNHMHIANMSLGSDFPSSTLERAVNYATSRDVLVIAATGNNGSGSVGYPARYANAMAVGATDQNNRRANFSQYGTGIDIVAPGVNVQSTYPGNRYVSMNGTSMATPHVAGAAALVKQRYPSWNATQIRNHLKNTATNLGNSSQFGSGLVNAEAATR

SEQ ID NO: 65886 - protein, 268 aa, Unidentified
QTVPWGITRVQAPAVHNRGITGSGVRVAILDSGISAHSDLNIRGGASFVPGEPTTADLNGHGTHVAGTVAALNNSIGVIGVAPNAELYAVKVLGANGSGSVSGIAQGLEWAATNSMHIANMSLGSDFPSSTLERAVNYATSRDVLVIAATGNNGSGSVGYPARYANAMAVGATDQNNRRANFSQYGTGIDIVAPGVNVQSTYPGNRYVSMNGTSMATPHVAGAAALVKQRYPSWNATQIRNHLKNTATNLGNSSQFGSGLVNAEAATR

SEQ ID NO: 65887 - protein, 268 aa, Unidentified
QTVPWGITRVQAPAVHNRGITGSGVRVAILDSGISAHSDLNIRGGASFVPGEPTTADLNGHGTHVAGTVAALNNSIGVIGVAPNAELYAVKVLGAAGSGSVSGIAQGLEWAATNNMHIANMSLGSDFPSSTLERAVNYATSRDVLVIAATGNNGSGSVGYPARYANAMAVGATDQNNRRANFSQYGTGIDIVAPGVNVQSTYPGNRYVSMNGTSMATPHVAGAAALVKQRYPSWNATQIRNHLKNTATNLGNSSQFGSGLVNAEAATR

SEQ ID NO: 65888 - protein, 268 aa, Unidentified
QTVPWGITRVQAPAVHNRGITGSGVRVAILDSGISAHSDLNIRGGASFVPGEPTTADLNGHGTHVAGTVAALNNSIGVIGVAPNAELYAVKVLGANGSGSVSGIAQGLEWAATNNMHIANMSLGSDMPSSTLERAVNYATSRDVLVIAATGNNGSGSVGYPARYANAMAVGATDQNNRRANFSQYGTGIDIVAPGVNVQSTYPGNRYVSMNGTSMATPHVAGAAALVKQRYPSWNATQIRNHLKNTATNLGNSSQFGSGLVNAEAATR

SEQ ID NO: 65889 - protein, 268 aa, Unidentified
QTVPWGITRVQAPAVHNRGITGSGVRVAILDSGISAHSDLNIRGGASFVPGEPTTADLNGHGTHVAGTVAALNNSIGVIGVAPNAELYAVKVLGAGGSGSVSGIAQGLEWAATNNMHIANMSLGSDFPSSTLERAVNYATSRDVLVIAATGNNGSGSVGYPARYANAMAVGATDQNNRRANFSQYGTGIDIVAPGVNVQSTYPGNRYVSMNGTSMATPHVAGAAALVKQRYPSWNATQIRNHLKNTATNLGNSSQFGSGLVNAEAATR

SEQ ID NO: 65890 - protein, 268 aa, Unidentified
QTVPWGITRVQAPAVHNRGITGSGVRVAILDSGISAHEDLNIRGGASFVPGEPTTADLNGHGTHVAGTVAALNNSIGVIGVAPNAELYAVKVLGANGSGSVSYIAQGLEWAATNNMHIANMSLGSDFPSSTLERAVNYATSRDVLVIAATGNNGSGSVGYPARYANAMAVGATDQNNRRANFSQYGTGIDIVAPGVNVQSTYPGNRYVSMNGTSMATPHVAGAAALVKQRYPSWNATQIRNHLKNTATNLGNSSQFGSGLVNAEAATR

SEQ ID NO: 65891 - protein, 268 aa, Unidentified
QTVPWGIWRVQAPAVHNRGITGSGVRVAILDSGISAHEDLNIRGGASFVPGEPTTADLNGHGTHVAGTVAALNNSIGVIGVAPNAELYAVKVLGANGSGSVSGIAQGLEWAATNNMHIANMSLGSDFPSSTLERAVNYATSRDVLVIAATGNNGSGSVGYPARYANAMAVGATDQNNRRANFSQYGTGIDIVAPGVNVQSTYPGNRYVSMNGTSMATPHVAGAAALVKQRYPSWNATQIRNHLKNTATNLGNSSQFGSGLVNAEAATR

SEQ ID NO: 65892 - protein, 268 aa, Unidentified
QTVPWGITRVQAPAVHNRGITGSGVRVAILDSGISAHEDLNIRGGASFVPGEPCTADLNGHGTHVAGTVAALNNSIGVIGVAPNAELYAVKVLGANGSGSVSGIAQGLEWAATNNMHIANMSLGSDFPSSTLERAVNYATSRDVLVIAATGNNGSGSVGYPARYANAMAVGATDQNNRRANFSQYGTGIDIVAPGVNVQSTYPGNRYVSMNGTSMATPHVAGAAALVKQRYPSWNATQIRNHLKNTATNLGNSSQFGSGLVNAEAATR

SEQ ID NO: 65893 - protein, 268 aa, Unidentified
QTVPWGITRVQAPAVHNRGQTGSGVRVAILDSGISAHEDLNIRGGASFVPGEPTTADLNGHGTHVAGTVAALNNSIGVIGVAPNAELYAVKVLGANGSGSVSGIAQGLEWAATNNMHIANMSLGSDFPSSTLERAVNYATSRDVLVIAATGNNGSGSVGYPARYANAMAVGATDQNNRRANFSQYGTGIDIVAPGVNVQSTYPGNRYVSMNGTSMATPHVAGAAALVKQRYPSWNATQIRNHLKNTATNLGNSSQFGSGLVNAEAATR

SEQ ID NO: 65894 - protein, 268 aa, Unidentified
QTVPWGITRVQAPAVHNRGITGSGVRVAILDSGISAHEDLNIRGGASFVPGEPTTADLNGHGTHVAGTVAALNNSIGVIGVAPNAELYAVKVLGANGSGSVSGIAQGLEWAATNNMHIANMSLGSDFPSSTLERAVNYATSRDVLVIAATGNNGSGSVGYPARYANAMAVGATDQNNRRANFSQYGTGIDIVAPGVNVQSTYPGNRYVSMNGTSMATPHVAGAAALVKQSYPSWNATQIRNHLKNTATNLGNSSQFGSGLVNAEAATR

SEQ ID NO: 65895 - protein, 268 aa, Unidentified
QTVPWGITRVQAPAVHNRGITGSGVRVAILDSGISAHEDLNIRGGASFVPGEPTTADLNGHGTHVAGTVAALNNSIGVIGVAPNAELYAVKVLGANGSGSVSGIAQGLEWAATNNMHIANMSLGSDFPSSTLERAVNYATSRDVLVIAATGNNGSGSVGYPARYANAMAVGATDQNNARANFSQYGTGIDIVAPGVNVQSTYPGNRYVSMNGTSMATPHVAGAAALVKQRYPSWNATQIRNHLKNTATNLGNSSQFGSGLVNAEAATR

SEQ ID NO: 65896 - protein, 268 aa, Unidentified
QTVPWGITRVQAPAVHNRGITGSGVRVAILDSGISAHEDLNIRGGASFVPGEPTTADLNGHGTHVAGTVAALNNSIGVIGVAPNAELYAVKVLGADGSGSVSGIAQGLEWAATNNMHIANMSLGSDFPSSTLERAVNYATSRDVLVIAATGNNGSGSVGYPARYANAMAVGATDQNNRRANFSQYGTGIDIVAPGVNVQSTYPGNRYVSMNGTSMATPHVAGAAALVKQRYPSWNATQIRNHLKNTATNLGNSSQFGSGLVNAEAATR

SEQ ID NO: 65897 - protein, 268 aa, Unidentified
QTVPWGITRVQAPAVHNRGITGSGVRVAILDSGISAHEDLNIRGGASFVPGEPTTADLNGHGTHVAGTVAALNNSIGVIGVAPNAELYAVKVLGANGSGSVSGIAQGLEWAATNNMHIANMSLGSDFPSSTLERAVNYATSRDVLVIAATGNNGSGSVGYPARYANAMAVGATDQNNERANFSQYGTGIDIVAPGVNVQSTYPGNRYVSMNGTSMATPHVAGAAALVKQRYPSWNATQIRNHLKNTATNLGNSSQFGSGLVNAEAATR

SEQ ID NO: 65898 - protein, 268 aa, Unidentified
QTVPWGITRVQAPAVHNRGITGSGVRVAILDSGISAHSDLNIRGGASFVPGEPTTADLNGHGTHVAGTVAALNNSIGVIGVAPNAELYAVKVLGANGSGSVSGIAQGLEWAATNNMHIANMSLGSDNPSSTLERAVNYATSRDVLVIAATGNNGSGSVGYPARYANAMAVGATDQNNRRANFSQYGTGIDIVAPGVNVQSTYPGNRYVSMNGTSMATPHVAGAAALVKQRYPSWNATQIRNHLKNTATNLGNSSQFGSGLVNAEAATR

SEQ ID NO: 65899 - protein, 268 aa, Unidentified
QTVPWGITRVQAPAVHNRGITGSGVRVAILDSGISAHEDLNIRGGASFVPGEPTTADLNGHGTHVAGTVAALNNSIGVIGVAPNAELYAVKVLGANGSGSVSGIAQGLEWAATNNMHIANMSLGSDFPSSTLERAVNYATSRDVLVIAATGNNGSGSVGYPARYANAMAVGATDQNNWRANFSQYGTGIDIVAPGVNVQSTYPGNRYVSMNGTSMATPHVAGAAALVKQRYPSWNATQIRNHLKNTATNLGNSSQFGSGLVNAEAATR

SEQ ID NO: 65900 - protein, 268 aa, Unidentified
QTVPWGITRVQAPAVHNRGITGSGVRVAILDSGISAHEDLNIRGGASFVPGEPMTADLNGHGTHVAGTVAALNNSIGVIGVAPNAELYAVKVLGANGSGSVSGIAQGLEWAATNNMHIANMSLGSDFPSSTLERAVNYATSRDVLVIAATGNNGSGSVGYPARYANAMAVGATDQNNRRANFSQYGTGIDIVAPGVNVQSTYPGNRYVSMNGTSMATPHVAGAAALVKQRYPSWNATQIRNHLKNTATNLGNSSQFGSGLVNAEAATR

SEQ ID NO: 65901 - protein, 268 aa, Unidentified
QTVPWGITRVQAPAVHNRGITGSGVRVAILDSGISAHEDLNIRGGASFVPGEPTTADLNGHGTHVAGTVAALNNSIGVIGVAPNAELYAVKVLGANGSGSVSGIAQGLEWAATNNMHIANMSLGSDGPSSTLERAVNYATSRDVLVIAATGNNGSGSVGYPARYANAMAVGATDQNNRRANFSQYGTGIDIVAPGVNVQSTYPGNRYVSMNGTSMATPHVAGAAALVKQRYPSWNATQIRNHLKNTATNLGNSSQFGSGLVNAEAATR

SEQ ID NO: 65902 - protein, 268 aa, Unidentified
QTVPWGITRVQAPAVHNRGITGSGVRVAILDSGISAHSDLNIRGGASFVPGEPTTADLNGHGTHVAGTVAALNNSIGVIGVAPNAELYAVKVLGANGSGSVSGIAQGLEWAATNNMHIANMSLGSDFPSSTLERAVNYATSQGVLVIAATGNNGSGSVGYPARYANAMAVGATDQNNRRANFSQYGTGIDIVAPGVNVQSTYPGNRYVSMNGTSMATPHVAGAAALVKQRYPSWNATQIRNHLKNTATNLGNSSQFGSGLVNAEAATR

SEQ ID NO: 65903 - protein, 268 aa, Unidentified
QTVPWGITRVQAPAVHNRGITGSGVRVAILDSGISAHEDLNIRGGASFVPGEPTTADLNGHGTHVAGTVAALNNSIGVIGVAPNAELYAVKVLGANGSGSVSGIAQGLEWAATNNMHIANMSLGSDFPSSTLERAVNYATSRDVLVIAATGNNGSGSVGYPARYANAMAVGATDQNNRRALFSQYGTGIDIVAPGVNVQSTYPGNRYVSMNGTSMATPHVAGAAALVKQRYPSWNATQIRNHLKNTATNLGNSSQFGSGLVNAEAATR

SEQ ID NO: 65904 - protein, 268 aa, Unidentified
QTVPWGITRVQAPAVHNRGFTGSGVRVAILDSGISAHEDLNIRGGASFVPGEPTTADLNGHGTHVAGTVAALNNSIGVIGVAPNAELYAVKVLGANGSGSVSGIAQGLEWAATNNMHIANMSLGSDFPSSTLERAVNYATSRDVLVIAATGNNGSGSVGYPARYANAMAVGATDQNNRRANFSQYGTGIDIVAPGVNVQSTYPGNRYVSMNGTSMATPHVAGAAALVKQRYPSWNATQIRNHLKNTATNLGNSSQFGSGLVNAEAATR

SEQ ID NO: 65905 - protein, 268 aa, Unidentified
QTVPWGITRVQAPAVHNRGITGSGVRVAILDSGISAHSDLNIRGGASFVPGEPTTADLNGHGTHVAGTVAALNNSIGVIGVAPNAELYAVKVLGANGSGSVSGIAQGLEWAATNNMHIANMSLGSDGPSSTLERAVNYATSRDVLVIAATGNNGSGSVGYPARYANAMAVGATDQNNRRANFSQYGTGIDIVAPGVNVQSTYPGNRYVSMNGTSMATPHVAGAAALVKQRYPSWNATQIRNHLKNTATNLGNSSQFGSGLVNAEAATR

SEQ ID NO: 65906 - protein, 268 aa, Unidentified
QTVPWGITRVQAPAVHNRGITGSGVRVAILDSGISAHEDLNIRGGASFVPGEPTTADTNGHGTHVAGTVAALNNSIGVIGVAPNAELYAVKVLGANGSGSVSGIAQGLEWAATNNMHIANMSLGSDFPSSTLERAVNYATSRDVLVIAATGNNGSGSVGYPARYANAMAVGATDQNNRRANFSQYGTGIDIVAPGVNVQSTYPGNRYVSMNGTSMATPHVAGAAALVKQRYPSWNATQIRNHLKNTATNLGNSSQFGSGLVNAEAATR

SEQ ID NO: 65907 - protein, 268 aa, Unidentified
QTVPWGITRVQAPAVHNRGITGSGVRVAILDSGISAHEDLNIRGGASFVPGEPTTADLNGHGTHVAGTVAALNNSIGVIGVAPEAELYAVKVLGANGSGSVSGIAQGLEWAATNNMHIANMSLGSDFPSSTLERAVNYATSRDVLVIAATGNNGSGSVGYPARYANAMAVGATDQNNRRANFSQYGTGIDIVAPGVNVQSTYPGNRYVSMNGTSMATPHVAGAAALVKQRYPSWNATQIRNHLKNTATNLGNSSQFGSGLVNAEAATR

SEQ ID NO: 65908 - protein, 268 aa, Unidentified
QTVPWGITRVQAPAVHNRGITGSGVRVAILDSGISAHEDLNIRGGASFVPGEPTTADLNGHGTHVAGTVAALNNSIGVIGVAPNAELYAVKVLGANGSGSVSGIAQGLEWAATNNMHIANMSLGSDFPSTTLERAVNYATSRDVLVIAATGNNGSGSVGYPARYANAMAVGATDQNNRRANFSQYGTGIDIVAPGVNVQSTYPGNRYVSMNGTSMATPHVAGAAALVKQRYPSWNATQIRNHLKNTATNLGNSSQFGSGLVNAEAATR

SEQ ID NO: 65909 - protein, 268 aa, Unidentified
QTVPWGITRVQAPAVHNRGITGSGVRVAILDSGISAHEDLNIRGGASFVPGEPTTADLNGHGTHVAGTVAALNNSIGVIGVAPNAELYAVKVLGANGSGSVSGIAQGLEWAATNNMHIANMSLGSDFPSSTLERAVNYATSRDVLVIAATGNNGSGSVGYPARYANAMAVGATDQNNRRANFSQYGCGIDIVAPGVNVQSTYPGNRYVSMNGTSMATPHVAGAAALVKQRYPSWNATQIRNHLKNTATNLGNSSQFGSGLVNAEAATR

SEQ ID NO: 65910 - protein, 268 aa, Unidentified
QTVPWGITRVQAPAVHNRGITGSGVRVAILDSGISEHSDLNIRGGASFVPGEPTTADLNGHGTHVAGTVAALNNSIGVIGVAPNAELYAVKVLGANGSGSVSGIAQGLEWAATNNMHIANMSLGSDFPSSTLERAVNYATSRDVLVIAATGNNGSGSVGYPARYANAMAVGATDQNNRRANFSQYGTGIDIVAPGVNVQSTYPGNRYVSMNGTSMATPHVAGAAALVKQRYPSWNATQIRNHLKNTATNLGNSSEFGSGLVNAEAATR

SEQ ID NO: 65911 - protein, 268 aa, Unidentified
QTVPWGITRVQAPAVHNRGNTGSGVRVAILDSGISAHSDLNIRGGASFVPGEPTTADLNGHGTHVAGTVAALNNSIGVIGVAPNAELYAVKVLGANGSGSVSGIAQGLEWAATNNMHIANMSLGSDFPSSTLERAVNYATSRDVLVIAATGNNGSGSVGYPARYANAMAVGATDQNNRRANFSQYGTGIDIVAPGVNVQSTYPGNRYVSMNGTSMATPHVAGAAALVKQRYPSWNATQIRNHLKNTATNLGNSSQFGSGLVNAEAATR

SEQ ID NO: 65912 - protein, 268 aa, Unidentified
QTVPWGITRVQAPAVHNRGITGSGVRVAILDSGISAHEDLNIRGGASFVPGEPTTADLNGHGTHVAGTVAALNNSIGVIGVAPDAELYAVKVLGANGSGSVSGIAQGLEWAATNNMHIANMSLGSDFPSSTLERAVNYATSRDVLVIAATGNNGSGSVGYPARYANAMAVGATDQNNRRANFSQYGTGIDIVAPGVNVQSTYPGNRYVSMNGTSMATPHVAGAAALVKQRYPSWNATQIRNHLKNTATNLGNSSQFGSGLVNAEAATR

SEQ ID NO: 65913 - protein, 268 aa, Unidentified
QTVPWGITRVQAPAVHNRGITGSGVRVAILDSGISAHEDLNIRGGASFVPGEPTTADLNGHGTHVAGTVAALNNSIGVIGVAPNAELYAVKVLGAGGSGSVSGIAQGLEWAATNNMHIANMSLGSDFPSSTLERAVNYATSRDVLVIAATGNNGSGSVGYPARYANAMAVGATDQNNRRANFSQYGTGIDIVAPGVNVQSTYPGNRYVSMNGTSMATPHVAGAAALVKQRYPSWNATQIRNHLKNTATNLGNSSQFGSGLVNAEAATR

SEQ ID NO: 65914 - protein, 268 aa, Unidentified
QTVPWGITRVQAPAVHNRGQTGSGVRVAILDSGISAHSDLNIRGGASFVPGEPTTADLNGHGTHVAGTVAALNNSIGVIGVAPNAELYAVKVLGANGSGSVSGIAQGLEWAATNNMHIANMSLGSDFPSSTLERAVNYATSRDVLVIAATGNNGSGSVGYPARYANAMAVGATDQNNRRANFSQYGTGIDIVAPGVNVQSTYPGNRYVSMNGTSMATPHVAGAAALVKQRYPSWNATQIRNHLKNTATNLGNSSQFGSGLVNAEAATR

SEQ ID NO: 65915 - protein, 268 aa, Unidentified
QTVPWGITRVQAPAVHNRGITGSGVRVAILDSGISAHEDLNIRGGASFVPGEPTTADLNGHGTHVAGTVAALNNSIGVIGVAPNAELYAVKVLGANGSGSVSGIAQGLEWAATNNMHIANMSLGSDFPSSTLERAVNYATSRDVLVIAATGNNGSGSVGYPARYANAMAVGATDQNNRRANFSQYGTGIDIVAPGVNVQSTYPGNRYVSMNGTSMATPHVAGAAALVKQRYPSWNAMQIRNHLKNTATNLGNSSQFGSGLVNAEAATR

SEQ ID NO: 65916 - protein, 268 aa, Unidentified
QTVPWGITRVQAPAVHNRGITGSGVRVAILDSGISAHEDLNIRGGASFVPGEPTTADLNGHGTHVAGTVAALNNSIGVIGVAPNAELYAVKVLGANGSGSVSGIAQGLEWAATNNMHIANMSLGSDFPSSTLERAVNYATSRDVLVIAATGNNGSGSVGYPARYANAMAVGATDQNNRRANFSQYGTGIDIVAPGVNVQSTYPGNRYVSMNGTSMATPHVAGAAALVKQRYPSWNADQIRNHLKNTATNLGNSSQFGSGLVNAEAATR

SEQ ID NO: 65917 - protein, 268 aa, Unidentified
QTVPWGITRVQAPAVHNRGITGSGVRVAILDSGISAHEDLNIRGGASFVPGEPTTADLNGHGTHVAGTVAALNNSIGVIGVAPNAELYAVKVLGANGSGSVSGIAQGLEWAATNNMHIANMSLGSDFPSSTLERAVNYATSRDVLVIAATGNNGSGSVGYPARYANAMAVGATDQNNRRANFSQYGTGIDIVAPGVNVQSTYPGNRYVSMNGTSMATPHVAGAAALVKQRYPSWNATQIRNHLKNTATNLGNSSFFGSGLVNAEAATR

SEQ ID NO: 65918 - protein, 268 aa, Unidentified
QTVPWGIERVQAPAVHNRGITGSGVRVAILDSGISAHEDLNIRGGASFVPGEPTTADLNGHGTHVAGTVAALNNSIGVIGVAPNAELYAVKVLGANGSGSVSGIAQGLEWAATNNMHIANMSLGSDFPSSTLERAVNYATSRDVLVIAATGNNGSGSVGYPARYANAMAVGATDQNNRRANFSQYGTGIDIVAPGVNVQSTYPGNRYVSMNGTSMATPHVAGAAALVKQRYPSWNATQIRNHLKNTATNLGNSSQFGSGLVNAEAATR

SEQ ID NO: 65919 - protein, 268 aa, Unidentified
QTVPWGITRVQAPAVHNRGITGSGVRVAILDSGISAHSDLNIRGGASFVPGEPTTADLNGHGTHVAGTVAALNNSIGVIGVAPNAELYAVKVLGANGSGSVSGIAQGLEWAATNNMHIANMSLGSDQPSSTLERAVNYATSRDVLVIAATGNNGSGSVGYPARYANAMAVGATDQNNRRANFSQYGTGIDIVAPGVNVQSTYPGNRYVSMNGTSMATPHVAGAAALVKQRYPSWNATQIRNHLKNTATNLGNSSQFGSGLVNAEAATR

SEQ ID NO: 65920 - protein, 268 aa, Unidentified
QTVPWGITRVQAPAVHNRGITGSGVRVAILDSGISAHEDLNIRGGASFVPGEPTTADLNGHGTHVAGTVAALNNSIGVIGVAPSAELYAVKVLGANGRGSVSGIAQGLEWAATNNMHIANMSLGSDAPSSTLERAVNYATSRDVLVIAATGNNGSGSVGYPARYANAMAVGATDQNNRRANFSQYGTGIDIVAPGVNVQSTYPGNRYVSMNGTSMATPHVAGAAALVKQRYPSWNATQIRNHLKNTATNLGNSSQFGSGLVNAEAATR

SEQ ID NO: 65921 - protein, 268 aa, Unidentified
QTVPWGITRVQAPAVHNRGITGSGVRVAILDSGISAHEDLNIRGGASFVPGEPTTADLNGHGTHVAGTVAALNNSIGVIGVAPNAELYAVKVLGANGSGSVSNIAQGLEWAATNNMHIANMSLGSDFPSSTLERAVNYATSRDVLVIAATGNNGSGSVGYPARYANAMAVGATDQNNRRANFSQYGTGIDIVAPGVNVQSTYPGNRYVSMNGTSMATPHVAGAAALVKQRYPSWNATQIRNHLKNTATNLGNSSQFGSGLVNAEAATR

SEQ ID NO: 65922 - protein, 268 aa, Unidentified
QTVPWGITRVQAPAVHNRGITGSGVRVAILDSGISAHEDLNIRGGASFVPGEPTTADLNGHGTHVAGTVAALNNSIGVIGVAPNAELYAVKVLGANGSGSVSGIAQGLEWAATNNMHIANMSLGSDFPSSTLERAVNYATSRDVLVIAATGNNGSGSVGYPARYANAMAVGATDQNNRRANFSQYGNGIDIVAPGVNVQSTYPGNRYVSMNGTSMATPHVAGAAALVKQRYPSWNATQIRNHLKNTATNLGNSSQFGSGLVNAEAATR

SEQ ID NO: 65923 - protein, 268 aa, Unidentified
QTVPWGITRVQAPAVHNRGITGSGVRVAILDSGISAHEDLNIRGGASFVPGEPTTADLNGHGTHVAGTVAALNNSIGVIGVAPNAELYAVKVLGANGSGSVSGIAQGLEWAATNNMHIANMSLGSDFPSSTLEWAVNYATSRDVLVIAATGNNGSGSVGYPARYANAMAVGATDQNNRRANFSQYGTGIDIVAPGVNVQSTYPGNRYVSMNGTSMATPHVAGAAALVKQRYPSWNATQIRNHLKNTATNLGNSSQFGSGLVNAEAATR

SEQ ID NO: 65924 - protein, 268 aa, Unidentified
QTVPWGITRVQAPAVHNRGITGSGVRVAILDSGISAHEDLNIRGGASFVPGEPTTADLNGHGTHVAGTVAALNNSIGVIGVAPNAELYAVKVLGAHGSGSVSGIAQGLEWAATNNMHIANMSLGSDFPSSTLERAVNYATSRDVLVIAATGNNGSGSVGYPARYANAMAVGATDQNNRRANFSQYGTGIDIVAPGVNVQSTYPGNRYVSMNGTSMATPHVAGAAALVKQRYPSWNATQIRNHLKNTATNLGNSSQFGSGLVNAEAATR

SEQ ID NO: 65925 - protein, 268 aa, Unidentified
QTVPWGITRVQAPAVHNRGITGSGVRVAILDSGISAHEDLNIRGGASFVPGEPTTADLNGHGTHVAGTVAALNNSIGVIGVAPNAELYAVKVLGANGSGSVSGIAQGLEWAATNNMHIANMSLGSDHPSSTLERAVNYATSRDVLVIAATGNNGSGSVGYPARYANAMAVGATDQNNRRANFSQYGTGIDIVAPGVNVQSTYPGNRYVSMNGTSMATPHVAGAAALVKQRYPSWNATQIRNHLKNTATNLGNSSQFGSGLVNAEAATR

SEQ ID NO: 65926 - protein, 268 aa, Unidentified
QTVPWGITRVQAPAVHNRGITGSGVRVAILDSGISAHEDLNIRGGASFVPGEPTTADLNGHGTHVAGTVAALNNSIGVIGVAPNAELYAVKVLGANGSGSVSGIAQGLEWAATNNMHIANMSLGSDFPSSTLERAVNYATSRDVLVIAATGNNGSGSVGYPARYANAMAVGATDQNNKRANFSQYGTGIDIVAPGVNVQSTYPGNRYVSMNGTSMATPHVAGAAALVKQRYPSWNATQIRNHLKNTATNLGNSSQFGSGLVNAEAATR

SEQ ID NO: 65927 - protein, 268 aa, Unidentified
QTVPWGITRVQAPAVHNRGITGSGVRVAILDSGISAHSDLNIRGGASFVPGEPTTADLNGHGTHVAGTVAALNNSIGVIGVAPNAELYAVKVLGADGSGSVSGIAQGLEWAATNNMHIANMSLGSDFPSSTLERAVNYATSRDVLVIAATGNNGSGSVGYPARYANAMAVGATDQNNRRANFSQYGTGIDIVAPGVNVQSTYPGNRYVSMNGTSMATPHVAGAAALVKQRYPSWNATQIRNHLKNTATNLGNSSQFGSGLVNAEAATR

SEQ ID NO: 65928 - protein, 268 aa, Unidentified
QTVPWGITRVQAPAVHNRGITGSGVRVAILDSGISAHEDLNIRGGASFVPGEPTTADLNGHGTHVAGTVAALNNSIGVIGVAPNAELYAVKVLGANGSGSVSGIAQGLEWAATNNMHIANMSLGSDFPSSTLERAVNYATSRDVLVIAATGNNGSGSVGYPARYANAMAVGATDQNNRRANFSQYGTGIDIVAPGVNVQSTYPGNQYVSMNGTSMATPHVAGAAALVKQRYPSWNATQIRNHLKNTATNLGNSSQFGSGLVNAEAATR

SEQ ID NO: 65929 - protein, 268 aa, Unidentified
QTVPWGITRVQAPALHNRGITGSGVRVAILDSGISAHEDLNIRGGASFVPGEPTTADLNGHGTHVAGTVAALNNSIGVIGVAPNAELYAVKVLGANGSGSVSGIAQGLEWAATNNMHIANMSLGSDFPSSTLERAVNYATSRDVLVIAATGNNGSGSVGYPARYANAMAVGATDQNNRRANFSQYGTGIDIVAPGVNVQSTYPGNRYVSMNGTSMATPHVAGAAALVKQRYPSWNATQIRNHLKNTATNLGNSSQFGSGLVNAEAATR

SEQ ID NO: 65930 - protein, 268 aa, Unidentified
QTVPWGITRVQAPAVHNRGITGSGVRVAILDSGISAHEDLNIRGGASFVPGEPTTADLNGHGTHVAGTVAALNNSIGVIGVAPNAELYAVKVLGANGSGSVSGIAQGLEWAATNNMHIANMSLGSDFPSSTLERAVNYATSRDVLVIAATGNNGSGSVGYPARYANAMAVGATDQNNRRAVFSQYGTGIDIVAPGVNVQSTYPGNRYVSMNGTSMATPHVAGAAALVKQRYPSWNATQIRNHLKNTATNLGNSSQFGSGLVNAEAATR

SEQ ID NO: 65931 - protein, 268 aa, Unidentified
QTVPWGITRVQAPAVHNRGITGSGVRVAILDSGISAHEDLNIRGGASFVPGEPTTADDNGHGTHVAGTVAALNNSIGVIGVAPNAELYAVKVLGANGSGSVSGIAQGLEWAATNNMHIANMSLGSDFPSSTLERAVNYATSRDVLVIAATGNNGSGSVGYPARYANAMAVGATDQNNRRANFSQYGTGIDIVAPGVNVQSTYPGNRYVSMNGTSMATPHVAGAAALVKQRYPSWNATQIRNHLKNTATNLGNSSQFGSGLVNAEAATR

SEQ ID NO: 65932 - protein, 268 aa, Unidentified
QTVPWGITRVQAPAVHNRGITGSGVRVAILDSGISAHSDLNIRGGASFVPGEPTTADLNGHGTHVAGTVAALNNSIGVVGVAPNAELYAVKVLGANGSGSVSGIAQGLEWAATNNMHIANMSLGSDFPSSTLERAVNYATSRDVLVIAATGNNGSGSVGYPARYANAMAVGATDQNNRRANFSQYGTGIDIVAPGVNVQSTYPGNRYVSMNGTSMATPHVAGAAALVKQRYPSWNATQIRNHLKNTATNLGNSSQFGSGLVNAEAATR

SEQ ID NO: 65933 - protein, 268 aa, Unidentified
QTVPWGITRVQAPAVHNRGITGSGVRVAILDSGISAHEDLNIRGGASFVPGEPTTADLNGHGTHVAGTVAALNNSIGVIGVAPNAELYAVKVLGANGSGSVSGIAQGLEWAATNNMHIANMSLGSDFPSSTLERAVNYATSRDVLVIAATGNNGSGSVGYPARYANAMAVGATDQNNRRANFSQYGTGIDIVAPGVNVQSTYPGNRYVSMNGTSMATPHVAGAAALVKQTYPSWNATQIRNHLKNTATNLGNSSQFGSGLVNAEAATR

SEQ ID NO: 65934 - protein, 268 aa, Unidentified
QTVPWGITRVQAPAVHNRGDTGSGVRVAILDSGISAHSDLNIRGGASFVPGEPTTADLNGHGTHVAGTVAALNNSIGVIGVAPNAELYAVKVLGANGSGSVSGIAQGLEWAATNNMHIANMSLGSDFPSSTLERAVNYATSRDVLVIAATGNNGSGSVGYPARYANAMAVGATDQNNRRANFSQYGTGIDIVAPGVNVQSTYPGNRYVSMNGTSMATPHVAGAAALVKQRYPSWNATQIRNHLKNTATNLGNSSQFGSGLVNAEAATR

SEQ ID NO: 65935 - protein, 268 aa, Unidentified
QTVPWGITRVQAPAVHNRGITGSGVRVAILDSGISAHEDLNIRGGASFVPGEPTTADLNGHGTHVAGTVAALNNSIGVIGVAPNAELYAVKVLGANGSGSVSGIAQGLEWAATNNMHIANMSLGSDIPSSTLERAVNYATSRDVLVIAATGNNGSGSVGYPARYANAMAVGATDQNNRRANFSQYGTGIDIVAPGVNVQSTYPGNRYVSMNGTSMATPHVAGAAALVKQRYPSWNATQIRNHLKNTATNLGNSSQFGSGLVNAEAATR

SEQ ID NO: 65936 - protein, 268 aa, Unidentified
QTVPWGITRVQAPAVHNRGITGSGVRVAILDSGISAHEDLNIRGGASFVPGEPTTADLNGHGTHVAGTVAALNNSIGVIGVAPNAELYAVKVLGANGSGSVSGIAQGLEWAATNNMHIANMSLGSDFPSSTLERAVNYATSRDVLVIAATGNNGSGSVGYPARYANAMAVGATDQNNRRANFSQYGTGIDIVAPGVNVQSTYPGNRYVSMNGTSMATPHVAGAAALVKQRRPSWNATQIRNHLKNTATNLGNSSQFGSGLVNAEAATR

SEQ ID NO: 65937 - protein, 268 aa, Unidentified
QTVPWGITRVQAPAVHNRGITGSGVRVAILDSGISAHEDLNIRGGASFVPGEPTTADLNGHGTHVAGTVAALNNSIGVIGVAPNAELYAVKVLGANGSGSVSGIAQGLEWAAKNNMHIANMSLGSDFPSSTLERAVNYATSRDVLVIAATGNNGSGSVGYPARYANAMAVGATDQNNRRANFSQYGTGIDIVAPGVNVQSTYPGNRYVSMNGTSMATPHVAGAAALVKQRYPSWNATQIRNHLKNTATNLGNSSQFGSGLVNAEAATR

SEQ ID NO: 65938 - protein, 268 aa, Unidentified
QTVPWGITRVQAPAVHNRGITGSGVRVAILDSGISAHEDLNIRGGASFVPGEPTTADLNGHGTHVAGTVAALNNSIGVIGVAPNAELYAVKVLGANGSGSVSGIAQGLEWAATNNMHIANMSLGSDFPSSTLERAVNYATSRDVLVIAATGNNGSGSVGYPARYANAMAVGATDQNNRRANFSQYGTGIDIVAPGVNVQSTYPGNRYVSMNGTSMATPHVAGAAALVKQRYPSWNATQIRNHLKNTATNLGNSSQMGSGLVNAEAATR

SEQ ID NO: 65939 - protein, 268 aa, Unidentified
QTVPWGITRVQAPAVHNRGITGSGVRVAILDSGISAHEDLNIRGGASFVPGEPTTADLNGHGTHVAGTVAALNNSIGVIGVAPNAELYAVKVLGANGSGSVSGIAQGLEWAATNNMHIANMSLGSDFPSSTLERAVNYATSRDVLVIAATGNNGSGSVGYPARYANAMAVGATDQNNRRANFSQYGSGIDIVAPGVNVQSTYPGNRYVSMNGTSMATPHVAGAAALVKQRYPSWNATQIRNHLKNTATNLGNSSQFGSGLVNAEAATR

SEQ ID NO: 65940 - protein, 268 aa, Unidentified
QTVPWGITRVQAPAVHNRGITGSGVRVAILDSGISAHEDLNIRGGASFVPGEPTTADLNGHGTHVAGTVAALNNSIGVIGVAPNAELYAVKVLGANGSGSVSGIAQGLEWAATNNMHIANMSLGSDFPSSTLERAVNYATSRDVLVIAATGNNGSGSVGYPARYANAMAVGATDQNNRRANFSQYGTGIDIVAPGVNVQSTYPGNRYVSMNGTSMATPHVAGAAALVKQRYPSWNATQIRNHLKNTATNLGNSSCFGSGLVNAEAATR

SEQ ID NO: 65941 - protein, 268 aa, Unidentified
QTVPWGIERVQAPAVHNRGITGSGVRVAILDSGISAHSDLNIRGGASFVPGEPTTADLNGHGTHVAGTVAALNNSIGVIGVAPNAELYAVKVLGANGSGSVSGIAQGLEWAATNNMHIANMSLGSDFPSSTLERAVNYATSRDVLVIAATGNNGSGSVGYPARYANAMAVGATDQNNRRANFSQYGTGIDIVAPGVNVQSTYPGNRYVSMNGTSMATPHVAGAAALVKQRYPSWNATQIRNHLKNTATNLGNSSQFGSGLVNAEAATR

SEQ ID NO: 65942 - protein, 268 aa, Unidentified
QTVPWGITRVQAPAVHNRGITGSGVRVAILDSGISAHSDLNIRGGASFVPGEPTTADLNGHGTHVAGTVAALNNSIGVIGVAPNAELYAVKVLGANGSGSVSGIAQGLEWAATNNMHIANMSLGSDHPSSTLERAVNYATSRDVLVIAATGNNGSGSVGYPARYANAMAVGATDQNNRRANFSQYGTGIDIVAPGVNVQSTYPGNRYVSMNGTSMATPHVAGAAALVKQRYPSWNATQIRNHLKNTATNLGNSSQFGSGLVNAEAATR

SEQ ID NO: 65943 - protein, 268 aa, Unidentified
QTVPWGITRVQAPAVHNRGSTGSGVRVAILDSGISAHEDLNIRGGASFVPGEPTTADLNGHGTHVAGTVAALNNSIGVIGVAPNAELYAVKVLGANGSGSVSGIAQGLEWAATNNMHIANMSLGSDFPSSTLERAVNYATSRDVLVIAATGNNGSGSVGYPARYANAMAVGATDQNNRRANFSQYGTGIDIVAPGVNVQSTYPGNRYVSMNGTSMATPHVAGAAALVKQRYPSWNATQIRNHLKNTATNLGNSSQFGSGLVNAEAATR

SEQ ID NO: 65944 - protein, 268 aa, Unidentified
QTVPWGITRVQAPAVHNRGITGSGVRVAILDSGISAHEDLNIRGGASFVPGEPTTADLNGHGTHVAGTVAALNNSIGVIGVAPNAELYAVKVLGANGSGSVSHIAQGLEWAATNNMHIANMSLGSDFPSSTLERAVNYATSRDVLVIAATGNNGSGSVGYPARYANAMAVGATDQNNRRANFSQYGTGIDIVAPGVNVQSTYPGNRYVSMNGTSMATPHVAGAAALVKQRYPSWNATQIRNHLKNTATNLGNSSQFGSGLVNAEAATR

SEQ ID NO: 65945 - protein, 268 aa, Unidentified
QTVPWGITRVQAPAVHNRGITGSGVRVAILDSGISAHEDLNIRGGASFVPGEPTTADLNGHGTHVAGTVAALNNSIGVIGVAPNAELYAVKVLGANGSGSVSGIAQGLEWAAENNMHIANMSLGSDFPSSTLERAVNYATSRDVLVIAATGNNGSGSVGYPARYANAMAVGATDQNNRRANFSQYGTGIDIVAPGVNVQSTYPGNRYVSMNGTSMATPHVAGAAALVKQRYPSWNATQIRNHLKNTATNLGNSSQFGSGLVNAEAATR

SEQ ID NO: 65946 - protein, 268 aa, Unidentified
QTVPWGITRVQAPAVHNRGITGSGVRVAILDSGISAHEDLNIRGGASFVPGEPTTADLNGHGTHVAGTVAALNNSIGVIGVAPNAELYAVKVLGANGSGSVSGIAQGLEWAATNNMHIANMSLGSDFPSSTLERAVNYATSRDVLVIAATGNNGSGSVGYPARYANAMAVGATDQNNRRACFSQYGTGIDIVAPGVNVQSTYPGNRYVSMNGTSMATPHVAGAAALVKQRYPSWNATQIRNHLKNTATNLGNSSQFGSGLVNAEAATR

SEQ ID NO: 65947 - protein, 268 aa, Bacillus gibsonii
QTVPWGITRVQAPAVHNRGITGSGVRVAILDSGISAHSDLNIRGGASFVPGEPTTADLNGHGTHVAGTVAALNNSIGVIGVAPNAELYAVKVLGANGSGSVSGIAQGLEWAATNNMHIANMSLGSDFPSSTLERAVNYATSRDVLVIAATGNNGSGSVGYPARYANAMAVGATDQNNRRANFSQYGTGIDIVAPGVNVQSTYPGNRYVSMNGTSXATPHVAGAAALVKQRYPSWNATQIRNHLKNTATNLGNSSQFGSGLVNAEAATR

SEQ ID NO: 65948 - protein, 268 aa, Unidentified
QTVPWGITRVQAPAVHNRGITGSGVRVAILDSGISAHEDLNIRGGASFVPGEPTTADLNGHGTHVAGTVAALNNSIGVIGVAPNAELYAVKVLGANGSGSVSGIAQGLEWAATNNMHIANMSLGSDFPSSTLERAVNYATSRDVLVIAATGNNGSGSVGYPARYANAMAVGATDQNNRRANFSQYGTGIDIVAPGVNVQSTYPGNRYVSMNGTSMATPHVAGAAALVKQRQPSWNATQIRNHLKNTATNLGNSSQFGSGLVNAEAATR

SEQ ID NO: 65949 - protein, 268 aa, Unidentified
QTVPWGITRVQAPAVHNRGATGSGVRVAILDSGISAHSDLNIRGGASFVPGEPTTADLNGHGTHVAGTVAALNNSIGVIGVAPNAELYAVKVLGANGSGSVSGIAQGLEWAATNNMHIANMSLGSDFPSSTLERAVNYATSRDVLVIAATGNNGSGSVGYPARYANAMAVGATDQNNRRANFSQYGTGIDIVAPGVNVQSTYPGNRYVSMNGTSMATPHVAGAAALVKQRYPSWNATQIRNHLKNTATNLGNSSQFGSGLVNAEAATR

SEQ ID NO: 65950 - protein, 268 aa, Unidentified
QTVPWGITRVQAPAVHNRGITGSGVRVAILDSGISAHEDLNIRGGASFVPGEPTTADLNGHGTHVAGTVAALNNSIGVIGVAPNAELYAVKVLGANGSGSVSGIAQGLEWAATNNMHIANMSLGSDFPSSTLERAVNYATSRDVLVIAATGNNGSGSVGYPARYANAMAVGATDQNNRRANFSQYGTGIDIVAPGVNVQSTYPGNRYVSMNGTSMATPHVAGAAALVKQRYPSWNATQIRNHLKNTATNLGNSCQFGSGLVNAEAATR

SEQ ID NO: 65951 - protein, 268 aa, Unidentified
QTVPWGITRVQAPAVHNRGITGSGVRVAILDSGISAHEDLNIRGGASFVPGEPTTADLNGHGTHVAGTVAALNNSIGVIGVAPNAELYAVKVLGANGSGSVSMIAQGLEWAATNNMHIANMSLGSDFPSSTLERAVNYATSRDVLVIAATGNNGSGSVGYPARYANAMAVGATDQNNRRANFSQYGTGIDIVAPGVNVQSTYPGNRYVSMNGTSMATPHVAGAAALVKQRYPSWNATQIRNHLKNTATNLGNSSQFGSGLVNAEAATR

SEQ ID NO: 65952 - protein, 268 aa, Unidentified
QTVPWGITRVQAPAVHNRGVTGSGVRVAILDSGISAHTDLNIRGGASFVPGEPTTADLNGHGTHVAGTVAALNNSIGVIGVAPNAELYAVKVLGANGSGSVSGIAQGLEWAATNNMHIANLSLGSDFPSSTLERAVNYATSRDVLVIAATGNNGSGSVGYPARYANAMAVGATDQENRRANFSQYGTGIDIVAPGVNVQSTYPGNRYVSMNGTSMATPHVAGAAALVKQRYPSWNATQIRNHLKNTATNLGNSSQFGSGLVNAEAATR

SEQ ID NO: 65953 - protein, 268 aa, Unidentified
QTVPWGITRVQAPAVHNRGITGSGVRVAILDSGISAHEDLNIRGGASFVPGEPTTADLNGHGTHVAGTVAALNNSIGVIGVAPNAELYAVKVLGANGSGSVSGIAQGLEWAATNNMHIANMSLGSDNPSSTLERAVNYATSRDVLVIAATGNNGSGSVGYPARYANAMAVGATDQNNRRANFSQYGTGIDIVAPGVNVQSTYPGNRYVSMNGTSMATPHVAGAAALVKQRYPSWNATQIRNHLKNTATNLGNSSQFGSGLVNAEAATR

SEQ ID NO: 65954 - protein, 268 aa, Unidentified
QTVPWGITRVQAPAVHNRGITGSGVRVAILDSGISAHEDLNIRGGASFVPGEPTTADLNGHGTHVAGTVAALNNSIGVIGVAPNAELYAVKVLGANGSGSVSGIAQGLEWAATNNMHIANMSLGSDFPSSTLERAVNYATSRDVLVIAATGNNGSGSVGYPARYANAMAVGATDQNNRRAIFSQYGTGIDIVAPGVNVQSTYPGNRYVSMNGTSMATPHVAGAAALVKQRYPSWNATQIRNHLKNTATNLGNSSQFGSGLVNAEAATR

SEQ ID NO: 65955 - protein, 268 aa, Unidentified
QTVPWGITRVQAPAVHNRGITGSGVRVAILDSGISAHEDLNIRGGASFVPGEPTTADCNGHGTHVAGTVAALNNSIGVIGVAPNAELYAVKVLGANGSGSVSGIAQGLEWAATNNMHIANMSLGSDFPSSTLERAVNYATSRDVLVIAATGNNGSGSVGYPARYANAMAVGATDQNNRRANFSQYGTGIDIVAPGVNVQSTYPGNRYVSMNGTSMATPHVAGAAALVKQRYPSWNATQIRNHLKNTATNLGNSSQFGSGLVNAEAATR

SEQ ID NO: 65956 - protein, 268 aa, Unidentified
QTVPWGITRVQAPAVHNRGITGSGVRVAILDSGISAHSDLNIRGGASFVPGEPTTADLNGHGTHVAGTVAALNNSIGVIGVAPNAELYAVKVLGANGSGSVSGIAQGLEWAATNNMHIANMSLGSDFPSSTLERAVNYATSRDVLVIAATGNNGSGSVQYPARYANAMAVGATDQNNRRANFSQYGTGIDIVAPGVNVQSTYPGNRYVSMNGTSMATPHVAGAAALVKQRYPSWNATQIRNHLKNTATNLGNSSQFGSGLVNAEAATR

SEQ ID NO: 65957 - protein, 268 aa, Unidentified
QTVPWGITRVQAPAVHNRGITGSGVRVAILDSGISAHEDLNIRGGASFVPGEPTTADLNGHGTHVAGTVAALNNSIGVIGVAPNAELYAVKVLGANGSGSVSGIAQGLEWAATNNMHIANMSLGSDLPSSTLERAVNYATSRDVLVIAATGNNGSGSVGYPARYANAMAVGATDQNNRRANFSQYGTGIDIVAPGVNVQSTYPGNRYVSMNGTSMATPHVAGAAALVKQRYPSWNATQIRNHLKNTATNLGNSSQFGSGLVNAEAATR

SEQ ID NO: 65958 - protein, 268 aa, Unidentified
QTVPWGITRVQAPAVHNRGITGSGVRVAILDSGISAHEDLNIRGGASFVPGEPTTADLNGHGTHVAGTVAALNNSIGVIGVAPNAELYAVKVLGANGSGSVSGIAQGLEWAATNNMHIANMSLGSDFPSSTLERAVNYATSRDVLVIAATGNNGSGSVGYPARYANAMAVGATDQNNRRANFSQYGTGIDIVAPGVNVQSTYPGNRYVSMNGTSMATPHVAGAAALVKQRYPSWNATQIRNHLKNTATNLGNPSQFGSGLVNAEAATR

SEQ ID NO: 65959 - protein, 268 aa, Unidentified
QTVPWGITRVQAPAVHNRGITGSGVRVAILDSGISAHEDLNIRGGASFVPGEPTTADLNGHGTHVAGTVAALNNSIGVIGVAPNAELYAVKVLGANGSGSVSGIAQGLEWAATNNMHIANMSLGSDFPSSTLEAAVNYATSRDVLVIAATGNNGSGSVGYPARYANAMAVGATDQNNRRANFSQYGTGIDIVAPGVNVQSTYPGNRYVSMNGTSMATPHVAGAAALVKQRYPSWNATQIRNHLKNTATNLGNSSQFGSGLVNAEAATR

SEQ ID NO: 65960 - protein, 268 aa, Unidentified
QTVPWGITRVQAPAVHNRGITGSGVRVAILDSGISAHEDLNIRGGASFVPGEPTTADLNGHGTHVAGTVAALNNSIGVIGVAPNAELYAVKVLGANGSGSVSGIAQGLEWAATNNMHIANMSLGSDFPSSTLERAVNYATSRDVLVIAATGNNGSGSVDYPARYANAMAVGATDQNNRRANFSQYGTGIDIVAPGVNVQSTYPGNRYVSMNGTSMATPHVAGAAALVKQRYPSWNATQIRNHLKNTATNLGNSSQFGSGLVNAEAATR

SEQ ID NO: 65961 - protein, 268 aa, Unidentified
QTVPWGITRVQAPAVHNRGITGSGVRVAILDSGISAHEDLNIRGGASFVPGEPTTADLNGHGTHVAGTVAALNNSIGVIGVAPNAELYAVKVLGANGSGSVSGIAQGLEWAATNNMHIANMSLGSDFPSSTLERAVNYATSRDVLVIAATGNNGSGSVGYPARYANAMAVGATDQNNRRANFSQYGTGIDIVAPGVNVQSTYPGNRYVSMNGTSMATPHVAGAAALVKQRYPSWNATQIRNHLKNTATNLGNSVQFGSGLVNAEAATR

SEQ ID NO: 65962 - protein, 268 aa, Unidentified
QTVPWGITRVQAPAMHNRGITGSGVRVAILDSGISAHEDLNIRGGASFVPGEPTTADLNGHGTHVAGTVAALNNSIGVIGVAPNAELYAVKVLGANGSGSVSGIAQGLEWAATNNMHIANMSLGSDFPSSTLERAVNYATSRDVLVIAATGNNGSGSVGYPARYANAMAVGATDQNNRRANFSQYGTGIDIVAPGVNVQSTYPGNRYVSMNGTSMATPHVAGAAALVKQRYPSWNATQIRNHLKNTATNLGNSSQFGSGLVNAEAATR

SEQ ID NO: 65963 - protein, 268 aa, Unidentified
QTVPWGITRVQAPAVHNRGITGSGVRVAILDSGISAHSDLNIRGGASFVPGEPTTADLNGHGTHVAGTVAALNNSIGVIGVAPNAELYAVKVLGANGSGSVSGIAQGLEWAATNNMHIANMSLGSDEPSSTLERAVNYATSRDVLVIAATGNNGSGSVGYPARYANAMAVGATDQNNRRANFSQYGTGIDIVAPGVNVQSTYPGNRYVSMNGTSMATPHVAGAAALVKQRYPSWNATQIRNHLKNTATNLGNSSQFGSGLVNAEAATR

SEQ ID NO: 65964 - protein, 268 aa, Unidentified
QTVPWGITRVQAPAVHNRGITGSGVRVAILDSGISAHEDLNIRGGASFVPGEPTTADLNGHGTHVAGTVAALNNSIGVIGVAPNAELYAVKVLGANGSGSVSGIAQGLEWAATNNMHIANMSLGSDFPSSTLERAVNYATSRDVLVIAATGNNGSGSVGYPARYANAMAVGATDQNNRRANFSQYGEGIDIVAPGVNVQSTYPGNRYVSMNGTSMATPHVAGAAALVKQRYPSWNATQIRNHLKNTATNLGNSSQFGSGLVNAEAATR

SEQ ID NO: 65965 - protein, 268 aa, Unidentified
QTVPWGITRVQAPAVHNRGITGSGVRVAILDSGISAHEDLNIRGGASFVPGEPTTADLNGHGTHVAGTVAALNNSIGVIGVAPNAELYAVKVLGANGSGSVSGIAQGLEWAATNNMHIANMSLGSDFPSSTLERAVNYATSRDVLVIAATGNNGSGSVGYPARYANAMAVGATDQNNRRAQFSQYGTGIDIVAPGVNVQSTYPGNRYVSMNGTSMATPHVAGAAALVKQRYPSWNATQIRNHLKNTATNLGNSSQFGSGLVNAEAATR

SEQ ID NO: 65966 - protein, 268 aa, Unidentified
QTVPWGITRVQAPAVHNRGITGSGVRVAILDSGISAHEDLNIRGGASFVPGEPTTADLNGHGTHVAGTVAALNNSIGVIGVAPNAELYAVKVLGANGSGSVSGIAQGLEWAATNNMHIANMSLGSDFPSSTLERAVNYATSRDVLVIAATGNNGSGSVGYPARYANAMAVGATDQNNGRANFSQYGTGIDIVAPGVNVQSTYPGNRYVSMNGTSMATPHVAGAAALVKQRYPSWNATQIRNHLKNTATNLGNSSQFGSGLVNAEAATR

SEQ ID NO: 65967 - protein, 268 aa, Unidentified
QTVPWGITRVQAPAVHNRGITGSGVRVAILDSGISAHEDLNIRGGASFVPGEPTTADLNGHGTHVAGTVAALNNSIGVIGVAPNAELYAVKVLGANGSGSVSWIAQGLEWAATNNMHIANMSLGSDFPSSTLERAVNYATSRDVLVIAATGNNGSGSVGYPARYANAMAVGATDQNNRRANFSQYGTGIDIVAPGVNVQSTYPGNRYVSMNGTSMATPHVAGAAALVKQRYPSWNATQIRNHLKNTATNLGNSSQFGSGLVNAEAATR

SEQ ID NO: 65968 - protein, 268 aa, Unidentified
QTVPWGITRVQAPAVHNRGITGSGVRVAILDSGISAHEDLNIRGGASFVPGEPTTADLNGHGTHVAGTVAALNNSIGVIGVAPNAELYAVKVLGANGSGSVSGIAQGLEWAATNNMHIANMSLGSDFPSSTLERAVNYATSRDVLVIAATGNNGSGSVCYPARYANAMAVGATDQNNRRANFSQYGTGIDIVAPGVNVQSTYPGNRYVSMNGTSMATPHVAGAAALVKQRYPSWNATQIRNHLKNTATNLGNSSQFGSGLVNAEAATR

SEQ ID NO: 65969 - protein, 268 aa, Unidentified
QTVPWGITRVQAPAVHNRGITGSGVRVAILDSGISAHEDLNIRGGASFVPGEPTTADLNGHGTHVAGTVAALNNSIGVIGVAPNAELYAVKVLGANGSGSVSGIAQGLEWAATNNMHIANMSLGSDFPSSTLERAVNYATSRDVLVIAATGNNGSGSVGYPARYANAMAVGATDQNNRRANFSQYGTGIDIVAPGVNVQSTYPGNRYVSMNGTSMATPHVAGAAALVKQLYPSWNATQIRNHLKNTATNLGNSSQFGSGLVNAEAATR

SEQ ID NO: 65970 - protein, 268 aa, Unidentified
QTVPWGITRVQAPAVHNRGITGSGVRVAILDSGISAHEDLNIRGGASFVPGEPTTADLNGHGTHVAGTVAALNNSIGVIGVAPNAELYAVKVLGANGSGSVSGIAQGLEWAATNNMHIANMSLGSDFPSSTLERAVNYATSRDVLVIAATGNNGSGSVGYPARYANAMAVGATDQNNRRANFSQYGLGIDIVAPGVNVQSTYPGNRYVSMNGTSMATPHVAGAAALVKQRYPSWNATQIRNHLKNTATNLGNSSQFGSGLVNAEAATR

SEQ ID NO: 65971 - protein, 268 aa, Unidentified
QTVPWGITRVQAPAVHNRGITGSGVRVAILDSGISAHEDLNIRGGASFVPGEPTTADLNGHGTHVAGTVAALNNSIGVIGVAPNAELYAVKVLGANGSGSVSGIAQGLEWAATNNMHIANMSLGSDFPSSTLERAVNYATSRDVLVIAATGNNGSGSVGYPARYANAMAVGATDQNNFRANFSQYGTGIDIVAPGVNVQSTYPGNRYVSMNGTSMATPHVAGAAALVKQRYPSWNATQIRNHLKNTATNLGNSSQFGSGLVNAEAATR

SEQ ID NO: 65972 - protein, 268 aa, Unidentified
QTVPWGITRVQAPAVHNRGITGSGVRVAILDSGISAHEDLNIRGGASFVPGEPTTADLNGHGTHVAGTVAALNNSIGVIGVAPNAELYAVKVLGANGSGSVSGIAQGLEWAATNNMHIANMSLGSDKPSSTLERAVNYATSRDVLVIAATGNNGSGSVGYPARYANAMAVGATDQNNRRANFSQYGTGIDIVAPGVNVQSTYPGNRYVSMNGTSMATPHVAGAAALVKQRYPSWNATQIRNHLKNTATNLGNSSQFGSGLVNAEAATR

SEQ ID NO: 65973 - protein, 268 aa, Unidentified
QTVPWGITRVQAPAVHNRGITGSGVRVAILDSGISAHEDLNIRGGASFVPGEPTTTDLNGHGTHVAGTVAALNNSIGVIGVAPNAELYAVKVLGANGSGSVSGIAQGLEWAATNNMHIANMSLGSDFPSSTLERAVNYATSRDVLVIAATGNNGSGSVGYPARYANAMAVGATDQNNRRANFSQYGTGIDIVAPGVNVQSTYPGNRYVSMNGTSMATPHVAGAAALVKQRYPSWNATQIRNHLKNTATNLGNSSQFGSGLVNAEAATR

SEQ ID NO: 65974 - protein, 268 aa, Unidentified
QTVPWGITRVQAPAVHNRGITGSGVRVAILDSGISAHEDLNIRGGASFVPGEPTTADLNGHGTHVAGTVAALNNSIGVIGVAPNAELYAVKVLGANGSGSVSGIAQGLEWAATNNMHIANMSLGSDFPSSTLERAVNYATSRDVLVIAATGNNGSGSVGYPARYANAMAVGATDQNNRRANFSQYGTGIDIVAPGVNVQSTYPGNRYPSMNGTSMATPHVAGAAALVKQRYPSWNATQIRNHLKNTATNLGNSSQFGSGLVNAEAATR

SEQ ID NO: 65975 - protein, 268 aa, Unidentified
QTVPWGITRVQAPAVHNRGTTGSGVRVAILDSGISAHSDLNIRGGASFVPGEPTTADLNGHGTHVAGTVAALNNSIGVIGVAPNAELYAVKVLGANGSGSVSGIAQGLEWAATNNMHIANMSLGSDFPSSTLERAVNYATSRDVLVIAATGNNGSGSVGYPARYANAMAVGATDQNNRRANFSQYGTGIDIVAPGVNVQSTYPGNRYVSMNGTSMATPHVAGAAALVKQRYPSWNATQIRNHLKNTATNLGNSSQFGSGLVNAEAATR

SEQ ID NO: 65976 - protein, 268 aa, Unidentified
QTVPWGITRVQAPAVHNRGITGSGVRVAILDSGISAHEDLNIRGGASFVPGEPTTADLNGHGTHVAGTVAALNNSIGVIGVAPNAELYAVKVLGANGSGSVSGIAQGLEWAATNNMHIANMSLGSDFPSSTLELAVNYATSRDVLVIAATGNNGSGSVGYPARYANAMAVGATDQNNRRANFSQYGTGIDIVAPGVNVQSTYPGNRYVSMNGTSMATPHVAGAAALVKQRYPSWNATQIRNHLKNTATNLGNSSQFGSGLVNAEAATR

SEQ ID NO: 65977 - protein, 268 aa, Unidentified
QTVPWGITRVQAPAVHNRGITGSGVRVAILDSGISAHEDLNIRGGASFVPGEPTTADLNGHGTHVAGTVAALNNSIGVIGVAPNAELYAVKVLGANGSGSVSGIAQGLEWAAQNNMHIANMSLGSDFPSSTLERAVNYATSRDVLVIAATGNNGSGSVGYPARYANAMAVGATDQNNRRANFSQYGTGIDIVAPGVNVQSTYPGNRYVSMNGTSMATPHVAGAAALVKQRYPSWNATQIRNHLKNTATNLGNSSQFGSGLVNAEAATR

SEQ ID NO: 65978 - protein, 268 aa, Unidentified
QTVPWGITRVQAPAVHNRGITGSGVRVAILDSGISTHEDLNIRGGASFVPGEPTTADLNGHGTHVAGTVAALNNSIGVIGVAPNAELYAVKVLGANGRGSVSGIAQGLEWAATNNMHIANMSLGAEGPSSTLERAVNYATSRDVLVIAATGNNGSGSVGYPARYANAMAVGATDQNNRRANFSQYGTGIDIVAPGVNVQSTYPGNRYVSLNGTSMATPHVAGAAALVKQRYPSWNATQIRNHLKNTATNLGNSSQFGSGLVNAEAATR

SEQ ID NO: 65979 - protein, 268 aa, Bacillus gibsonii
QTVPWGITRVQAPAVHNRGITGSGVRVAILDSGISAHSDLNIRGGASFVPGEPTTADLNGHGTHVAGTVAALNNSIGVIGVAPNAELYAVKVLGANGSGSVSGIAQGLEWAATNNMHIANMSLGSQFPSSTLERAVNYATSRDVLVIAATGNNGSGSVGYPARYANAMAVGATDQNNRRANFSQYGTGIDIVAPGVNVQSTYPGNRYVSMNGTSMATPHVAGAAALVKQRYPSWNATQIRNHLKNTATNLGNSSQFGSGLVNAEAATR

SEQ ID NO: 65980 - protein, 268 aa, Unidentified
QTVPWGITRVQAPAVHNRGITGSGVRVAILDSGISAHEDLNIRGGASFVPGEPTTADLNGHGTHVAGTVAALNNSIGVIGVAPNAELYAVKVLGANGSGSVSGIAQGLEWAATNNMHIANMSLGSDFPSSTLERAVNYATSRDVLVIAATGNNGSGSVGYPARYANAMAVGATDQNNRRAGFSQYGTGIDIVAPGVNVQSTYPGNRYVSMNGTSMATPHVAGAAALVKQRYPSWNATQIRNHLKNTATNLGNSSQFGSGLVNAEAATR

SEQ ID NO: 65981 - protein, 268 aa, Unidentified
QTVPWGIYRVQAPAVHNRGITGSGVRVAILDSGISAHEDLNIRGGASFVPGEPTTADLNGHGTHVAGTVAALNNSIGVIGVAPNAELYAVKVLGANGSGSVSGIAQGLEWAATNNMHIANMSLGSDFPSSTLERAVNYATSRDVLVIAATGNNGSGSVGYPARYANAMAVGATDQNNRRANFSQYGTGIDIVAPGVNVQSTYPGNRYVSMNGTSMATPHVAGAAALVKQRYPSWNATQIRNHLKNTATNLGNSSQFGSGLVNAEAATR

SEQ ID NO: 65982 - protein, 268 aa, Unidentified
QTVPWGITRVQAPAVHNRGITGSGVRVAILDSGISAHEDLNIRGGASFVPGEPTTADLNGHGTHVAGTVAALNNSIGVIGVAPNAELYAVKVLGANGSGSVSGIAQGLEWAVTNNMHIANMSLGSDFPSSTLERAVNYATSRDVLVIAATGNNGSGSVGYPARYANAMAVGATDQNNRRANFSQYGTGIDIVAPGVNVQSTYPGNRYVSMNGTSMATPHVAGAAALVKQRYPSWNATQIRNHLKNTATNLGNSSQFGSGLVNAEAATR

SEQ ID NO: 65983 - protein, 268 aa, Unidentified
QTVPWGITRVQAPAVHNRGWTGSGVRVAILDSGISAHSDLNIRGGASFVPGEPTTADLNGHGTHVAGTVAALNNSIGVIGVAPNAELYAVKVLGANGSGSVSGIAQGLEWAATNNMHIANMSLGSDFPSSTLERAVNYATSRDVLVIAATGNNGSGSVGYPARYANAMAVGATDQNNRRANFSQYGTGIDIVAPGVNVQSTYPGNRYVSMNGTSMATPHVAGAAALVKQRYPSWNATQIRNHLKNTATNLGNSSQFGSGLVNAEAATR

SEQ ID NO: 65984 - protein, 268 aa, Unidentified
QTVPWGITRVQAPAVHNRGITGSGVRVAILDSGISAHEDLNIRGGASFVPGEPTTADLNGHGTHVAGTVAALNNSIGVIGVAPNAELYAVKVLGANGSGSVSGIAQGLEWAATNNMHIANMSLGSDFPSSTLERAVNYATSRDVLVIAATGNNGSGSVGYPARYANAMAVGATDQNNRRANFSQYGTGIDIVAPGVNVQSTYPGNRYVSMNGTSMATPHVAGAAALVKQRYPSWNATQIRNHLKNTATNLGNSSQCGSGLVNAEAATR

SEQ ID NO: 65985 - protein, 268 aa, Unidentified
QTVPWGITRVQAPAVHNRGITGSGVRVAILDSGISAHSDLNIRGGASFVPGEPTTADLNGHGTHVAGTVAALNNSIGVIGVAPNAELYAVKVLGANGSGSVSGIAQGLEWAATNNMHIANMSLGSDFPSSTLERAVNYATSRDVLVIAATGNNGSGSVGYPARYANAMAVGATDQNNRRANFSQYGTGIDIVAPGVNVQSTYPGNRYVSQNGTSMATPHVAGAAALVKQRYPSWNATQIRNHLKNTATNLGNSSQFGSGLVNAEAATR

SEQ ID NO: 65986 - protein, 268 aa, Unidentified
QTVPWGITRVQAPAVHNRGITGSGVRVAILDSGISAHEDLNIRGGASFVPGEPTTADLNGHGTHVAGTVAALNNSIGVIGVAPNAELYAVKVLGANGSGSVSGIAQGLEWAATNEMHIANMSLGSDFPSSTLERAVNYATSRDVLVIAATGNNGSGSVGYPARYANAMAVGATDQNNRRANFSQYGTGIDIVAPGVNVQSTYPGNRYVSMNGTSMATPHVAGAAALVKQRYPSWNATQIRNHLKNTATNLGNSSQFGSGLVNAEAATR

SEQ ID NO: 65987 - protein, 268 aa, Unidentified
QTVPWGITRVQAPAVHNRGITGSGVRVAILDSGISAHEDLNIRGGASFVPGEPTTADLNGHGTHVAGTVAALNNSIGVIGVAPNAELYAVKVLGANGSGSVSGIAQGLEWAATNNMHIANMSLGSDFPSSTLERAVNYATSRDVLVIAATGNNGTGSVGYPARYANAMAVGATDQNNRRANFSQYGTGIDIVAPGVNVQSTYPGNRYVSMNGTSMATPHVAGAAALVKQRYPSWNATQIRNHLKNTATNLGNSSQFGSGLVNAEAATR

SEQ ID NO: 65988 - protein, 268 aa, Unidentified
QTVPWGITRVQAPAVHNRGITGSGVRVAILDSGISAHEDLNIRGGASFVPGEPTTADLNGHGTHVAGTVAALNNSIGVIGVAPNAELYAVKVLGANGSGSVSGIAQGLEWAATNNMHIANMSLGSDFPSSTLERAVNYATSRDVLVIAATGNNGSGSVGYPARYANAMAVGATDQNNRRANFSQYGTGIDIVAPGVNVQSTYPGNRYVSMNGTSMATPHVAGAAALVKQRWPSWNATQIRNHLKNTATNLGNSSQFGSGLVNAEAATR

SEQ ID NO: 65989 - protein, 268 aa, Unidentified
QTVPWGITRVQAPAVHNRGITGSGVRVAILDSGISAHSDLNIRGGASFVPGEPTTADLNGHGTHVAGTVAALNNSIGVIGVAPNAELYAVKVLGANGSGSVSGIAQGLEWAATNPMHIANMSLGSDFPSSTLERAVNYATSRDVLVIAATGNNGSGSVGYPARYANAMAVGATDQNNRRANFSQYGTGIDIVAPGVNVQSTYPGNRYVSMNGTSMATPHVAGAAALVKQRYPSWNATQIRNHLKNTATNLGNSSQFGSGLVNAEAATR

SEQ ID NO: 65990 - protein, 268 aa, Unidentified
QTVPWGITRVQAPAVHNRGITGSGVRVAILDSGISAHEDLNIRGGASFVPGEPTTADLNGHGTHVAGTVAALNNSIGVIGVAPNAELYAVKVLGANGSGSVSGIAQGLEWAATNNMHIANMSLGSDFPSSTLERAVNYATSRDVLVIAATGNDGSGSVGYPARYANAMAVGATDQNNRRANFSQYGTGIDIVAPGVNVQSTYPGNRYVSMNGTSMATPHVAGAAALVKQRYPSWNATQIRNHLKNTATNLGNSSQFGSGLVNAEAATR

SEQ ID NO: 65991 - protein, 268 aa, Unidentified
QTVPWGITRVQAPAVHNRGITGSGVRVAILDSGISAHEDLNIRGGASFVPGEPTTADLNGHGTHVAGTVAALNNSIGVIGVAPNAELYAVKVLGANGSGSVSGIAQGLEWAATNNMHIANMSLGSDFPSSTLESAVNYATSRDVLVIAATGNNGSGSVGYPARYANAMAVGATDQNNRRANFSQYGTGIDIVAPGVNVQSTYPGNRYVSMNGTSMATPHVAGAAALVKQRYPSWNATQIRNHLKNTATNLGNSSQFGSGLVNAEAATR

SEQ ID NO: 65992 - protein, 268 aa, Unidentified
QTVPWGITRVQAPAVHNRGVTGSGVRVAILDSGISAHEDLNIRGGASFVPGEPTTADLNGHGTHVAGTVAALDNSIGVIGVAPNAELYAVKVLGANGSGSVSGIAQGLEWAATNNMHIANLSLGSDFPSSTLERAVNYATSRDVLVIAATGNNGSGSVGYPARYANAMAVGATDQNNRRANFSQYGTGIDIVAPGVNVQSTYPGNRYVSMNGTSMATPHVAGAAALVKQRYPSWNATQIRNHLKNTATNLGDSSQFGSGLVNAEAATR

SEQ ID NO: 65993 - protein, 268 aa, Unidentified
QTVPWGITRVQAPAVHNRGRTGSGVRVAILDSGISAHSDLNIRGGASFVPGEPTTADLNGHGTHVAGTVAALNNSIGVIGVAPNAELYAVKVLGANGSGSVSGIAQGLEWAATNNMHIANMSLGSDFPSSTLERAVNYATSRDVLVIAATGNNGSGSVGYPARYANAMAVGATDQNNRRANFSQYGTGIDIVAPGVNVQSTYPGNRYVSMNGTSMATPHVAGAAALVKQRYPSWNATQIRNHLKNTATNLGNSSQFGSGLVNAEAATR

SEQ ID NO: 65994 - protein, 268 aa, Unidentified
QTVPWGITRVQAPAVHNRGITGSGVRVAILDSGISAHSDLNIRGGASFVPGEPTTADLNGHGTHVAGTVAALNNSIGVIGVAPNAELYAVKVLGANGSGSVSGIAQGLEWAATNYMHIANMSLGSDFPSSTLERAVNYATSRDVLVIAATGNNGSGSVGYPARYANAMAVGATDQNNRRANFSQYGTGIDIVAPGVNVQSTYPGNRYVSMNGTSMATPHVAGAAALVKQRYPSWNATQIRNHLKNTATNLGNSSQFGSGLVNAEAATR

SEQ ID NO: 65995 - protein, 268 aa, Unidentified
QTVPWGITRVQAPAVHNRGITGSGVRVAILDSGISAHEDLNIRGGASFVPGEPTTADLNGHGTHVAGTVAALNNSIGVIGVAPNAELYAVKVLGANGSGSVSGIAQGLEWAATNNMHIANMSLGSDFPSSTLERAVNYATSRDVLVIAATGNNGSGSVGYPARYANAMAVGATDQNNRRANFSQYGTGIDIVAPGVNVQSTYPGNRYVSMNGTSMATPHVAGAAALVKQRYPSWNATQIRNHLKNTATNLGNSAQFGSGLVNAEAATR

SEQ ID NO: 65996 - protein, 268 aa, Unidentified
QTVPWGITRVQAPAVHNRGVTGSGVRVAILDSGISAHSDLNIRGGASFVPGEPTTADLNGHGTHVAGTVAALNNSIGVIGVAPNAELYAVKVLGANGSGSVSGIAQGLEWAATNNMHIANMSLGSDFPSSTLERAVNYATSRDVLVIAATGNNGSGSVGYPARYANAMAVGATDQNNRRANFSQYGTGIDIVAPGVNVQSTYPGNRYVSMNGTSMATPHVAGAAALVKQRYPSWNATQIRNHLKNTATNLGNSSQFGSGLVNAEAATR

SEQ ID NO: 65997 - protein, 268 aa, Unidentified
QTVPWGITRVQAPAVHNRGITGSGVRVAILDSGISAHEDLNIRGGASFVPGEPTTADLNGHGTHVAGTVAALNNSIGVIGVAPNAELYAVKVLGANGSGSVSGIAQGLEWAATNNMHIANMSLGSDFPSSTLERAVNYATSRDVLVIAATGNNGSGSVGYPARYANAMAVGATDQNNRRANFSQYGTGIDIVAPGVNVQSTYPGNRYVSMNGTSMATPHVAGAAALVKQRYPSWNATQIRNHLKNTATNLGDSSQFGSGLVNAEAATR

SEQ ID NO: 65998 - protein, 268 aa, Unidentified
QTVPWGITRVQAPAVHNRGITGSGVRVAILDSGISAHSDLNIRGGASFVPGEPTTADLNGHGTHVAGTVAALNNSIGVIGVAPNAELYAVKVLGANGSGSVSGIAQGLEWAATNNMHIANMSLGSDDPSSTLERAVNYATSRDVLVIAATGNNGSGSVGYPARYANAMAVGATDQNNRRANFSQYGTGIDIVAPGVNVQSTYPGNRYVSMNGTSMATPHVAGAAALVKQRYPSWNATQIRNHLKNTATNLGNSSQFGSGLVNAEAATR

SEQ ID NO: 65999 - protein, 268 aa, Unidentified
QTVPWGITRVQAPAVHNRGITGSGVRVAILDSGISAHEDLNIRGGASFVPGEPTTADLNGHGTHVAGTVAALNNSIGVIGVAPNAELYAVKVLGANGSGSVSGIAQGLEWAADNNMHIANMSLGSDFPSSTLERAVNYATSRDVLVIAATGNNGSGSVGYPARYANAMAVGATDQNNRRANFSQYGTGIDIVAPGVNVQSTYPGNRYVSMNGTSMATPHVAGAAALVKQRYPSWNATQIRNHLKNTATNLGNSSQFGSGLVNAEAATR

SEQ ID NO: 66000 - protein, 268 aa, Unidentified
QTVPWGITRVQAPAVHNRGITGSGVRVAILDSGISAHEDLNIRGGASFVPGEPTTADLNGHGTHVAGTVAALNNSIGVIGVAPNAELYAVKVLGANGSGSVSGIAQGLEWAATNNMHIANMSLGSDRPSSTLERAVNYATSRDVLVIAATGNNGSGSVGYPARYANAMAVGATDQNNRRANFSQYGTGIDIVAPGVNVQSTYPGNRYVSMNGTSMATPHVAGAAALVKQRYPSWNATQIRNHLKNTATNLGNSSQFGSGLVNAEAATR

SEQ ID NO: 66001 - protein, 268 aa, Unidentified
QTVPWGITRVQAPAVHNRGITGSGVRVAILDSGISAHEDLNIRGGASFVPGEPTTADLNGHGTHVAGTVAALNNSIGVIGVAPNAELYAVKVLGANGSGSVSGIAQGLEWAATNNMHIANMSLGSDTPSSTLERAVNYATSRDVLVIAATGNNGSGSVGYPARYANAMAVGATDQNNRRANFSQYGTGIDIVAPGVNVQSTYPGNRYVSMNGTSMATPHVAGAAALVKQRYPSWNATQIRNHLKNTATNLGNSSQFGSGLVNAEAATR

SEQ ID NO: 66002 - protein, 268 aa, Unidentified
QTVPWGITRVQAPAVHNRGITGSGVRVAILDSGISAHEDLNIRGGASFVPGEPTTEDLNGHGTHVAGTVAALNNSIGVIGVAPNAELYAVKVLGANGSGSVSGIAQGLEWAATNNMHIANMSLGSDFPSSTLERAVNYATSRDVLVIAATGNNGSGSVGYPARYANAMAVGATDQNNRRANFSQYGTGIDIVAPGVNVQSTYPGNRYVSMNGTSMATPHVAGAAALVKQRYPSWNATQIRNHLKNTATNLGNSSQFGSGLVNAEAATR

SEQ ID NO: 66003 - protein, 268 aa, Unidentified
QTVPWGITRVQAPAVHNRGITGSGVRVAILDSGISAHEDLNIRGGASFVPGEPTTADLNGHGTHVAGTVAALNNSIGVIGVAPNAELYAVKVLGANGSGSVSGIAQGLEWAATNNMHIANMSLGSDFPSSTLERAVNYATSRDVLVIAATGNNGSGSVGYPARYANAMAVGATDQNNRRANFSQYGTGIDIVAPGVNVQSTYPGNLYVSMNGTSMATPHVAGAAALVKQRYPSWNATQIRNHLKNTATNLGNSSQFGSGLVNAEAATR

SEQ ID NO: 66004 - protein, 268 aa, Unidentified
QTVPWGITRVQAPAVHNRGITGSGVRVAILDSGISAHEDLNIRGGASFVPGEPTTADLNGHGTHVAGTVAALNNSIGVIGVAPNAELYAVKVLGANGSGSVSGIAQGLEWAATNNMHIANMSLGSDFPSSTLERAVNYATSRDVLVIAATGNNGSGSVGYPARYANAMAVGATDQNNYRANFSQYGTGIDIVAPGVNVQSTYPGNRYVSMNGTSMATPHVAGAAALVKQRYPSWNATQIRNHLKNTATNLGNSSQFGSGLVNAEAATR

SEQ ID NO: 66005 - protein, 268 aa, Unidentified
QTVPWGITRVQAPAVHNRGITGSGVRVAILDSGISAHEDLNIRGGASFVPGEPTTADLNGHGTHVAGTVAALNNSIGVIGVAPNAELYAVKVLGANGSGSVSGIAQGLEWAATNNMHIANMSLGSDFPSITLERAVNYATSRDVLVIAATGNNGSGSVGYPARYANAMAVGATDQNNRRANFSQYGTGIDIVAPGVNVQSTYPGNRYVSMNGTSMATPHVAGAAALVKQRYPSWNATQIRNHLKNTATNLGNSSQFGSGLVNAEAATR

SEQ ID NO: 66006 - protein, 268 aa, Unidentified
QTVPWGITRVQAPAVHNRGITGSGVRVAILDSGISAHEDLNIRGGASFVPGEPTTADLNGHGTHVAGTVAALNNSIGVIGVAPNAELYAVKVLGANGSGSVSGIAQGLEWAATNNMHIANMSLGSDFPSSTLERAVNYATSRDVLVIAATGNNGSGSVGYPARYANAMAVGATDQNNRRANFSQYGTGIDIVAPGVNVQSTYPGNRYVSMNGTSMATPHVAGAAALVKQRYPSWGATQIRNHLKNTATNLGNSSQFGSGLVNAEAATR

SEQ ID NO: 66007 - protein, 268 aa, Unidentified
QTVPWGITRVQAPAVHNRGCTGSGVRVAILDSGISAHEDLNIRGGASFVPGEPTTADLNGHGTHVAGTVAALNNSIGVIGVAPNAELYAVKVLGANGSGSVSGIAQGLEWAATNNMHIANMSLGSDFPSSTLERAVNYATSRDVLVIAATGNNGSGSVGYPARYANAMAVGATDQNNRRANFSQYGTGIDIVAPGVNVQSTYPGNRYVSMNGTSMATPHVAGAAALVKQRYPSWNATQIRNHLKNTATNLGNSSQFGSGLVNAEAATR

SEQ ID NO: 66008 - protein, 268 aa, Unidentified
QTVPWGITRVQAPAVHNRGITGSGVRVAILDSGISAHSDLNIRGGASFVPGEPTTADLNGHGTHVAGTVAALNNSIGVIGVAPNAELYAVKVLGANGSGSVSGIAQGLEWAATNLMHIANMSLGSDFPSSTLERAVNYATSRDVLVIAATGNNGSGSVGYPARYANAMAVGATDQNNRRANFSQYGTGIDIVAPGVNVQSTYPGNRYVSMNGTSMATPHVAGAAALVKQRYPSWNATQIRNHLKNTATNLGNSSQFGSGLVNAEAATR

SEQ ID NO: 66009 - protein, 268 aa, Unidentified
QTVPWGITRVQAPAVHNRGITGSGVRVAILDSGISAHEDLNIRGGASFVPGEPTTADLNGHGTHVAGTVAALNNSIGVIGVAPNAELYAVKVLGANGSGSVSGIAQGLEWAATNRMHIANMSLGSDFPSSTLERAVNYATSRDVLVIAATGNNGSGSVGYPARYANAMAVGATDQNNRRANFSQYGTGIDIVAPGVNVQSTYPGNRYVSMNGTSMATPHVAGAAALVKQRYPSWNATQIRNHLKNTATNLGNSSQFGSGLVNAEAATR

SEQ ID NO: 66010 - protein, 268 aa, Unidentified
QTVPWGITRVQAPAVHNRGYTGSGVRVAILDSGISAHSDLNIRGGASFVPGEPTTADLNGHGTHVAGTVAALNNSIGVIGVAPNAELYAVKVLGANGSGSVSGIAQGLEWAATNNMHIANMSLGSDFPSSTLERAVNYATSRDVLVIAATGNNGSGSVGYPARYANAMAVGATDQNNRRANFSQYGTGIDIVAPGVNVQSTYPGNRYVSMNGTSMATPHVAGAAALVKQRYPSWNATQIRNHLKNTATNLGNSSQFGSGLVNAEAATR

SEQ ID NO: 66011 - protein, 268 aa, Unidentified
QTVPWGITRVQAPAVHNRGKTGSGVRVAILDSGISAHSDLNIRGGASFVPGEPTTADLNGHGTHVAGTVAALNNSIGVIGVAPNAELYAVKVLGANGSGSVSGIAQGLEWAATNNMHIANMSLGSDFPSSTLERAVNYATSRDVLVIAATGNNGSGSVGYPARYANAMAVGATDQNNRRANFSQYGTGIDIVAPGVNVQSTYPGNRYVSMNGTSMATPHVAGAAALVKQRYPSWNATQIRNHLKNTATNLGNSSQFGSGLVNAEAATR

SEQ ID NO: 66012 - protein, 268 aa, Unidentified
QTVPWGITRVQAPAVHNRGITGSGVRVAILDSGISAHEDLNIRGGASFVPGEPTTADLNGHGTHVAGTVAALNNSIGVIGVAPNAELYAVKVLGANGSGSVSGIAQGLEWAATNNMHIANMSLGSDFPSSTLERAVNYATSRDVLVIAATGNNGSGSVGYPARYANAMAVGATDQNNRRANFSQYGTGIDIVAPGVNVQSTYPGNRYVSMNGTSMATPHVAGAAALVKQRYPSWNATQIRNHLKNTATNLGNSSWFGSGLVNAEAATR

SEQ ID NO: 66013 - protein, 268 aa, Unidentified
QTVPWGITRVQAPAVHNRGITGSGVRVAILDSGISAHEDLNIRGGASFVPGEPTTADLNGHGTHVAGTVAALNNSIGVIGVAPNAELYAVKVLGANGSGSVSGIAQGLEWAATNNMHIANMSLGSDYPSSTLERAVNYATSRDVLVIAATGNNGSGSVGYPARYANAMAVGATDQNNRRANFSQYGTGIDIVAPGVNVQSTYPGNRYVSMNGTSMATPHVAGAAALVKQRYPSWNATQIRNHLKNTATNLGNSSQFGSGLVNAEAATR

SEQ ID NO: 66014 - protein, 268 aa, Unidentified
QTVPWGITRVQAPAVHNRGITGSGVRVAILDSGISAHEDLNIRGGASFVPGEPTTADLNGHGTHVAGTVAALNNSIGVIGVAPNAELYAVKVLGANGSGSVSDIAQGLEWAATNNMHIANMSLGSDFPSSTLERAVNYATSRDVLVIAATGNNGSGSVGYPARYANAMAVGATDQNNRRANFSQYGTGIDIVAPGVNVQSTYPGNRYVSMNGTSMATPHVAGAAALVKQRYPSWNATQIRNHLKNTATNLGNSSQFGSGLVNAEAATR

SEQ ID NO: 66015 - protein, 268 aa, Unidentified
QTVPWGITRVQAPAVHNRGITGSGVRVAILDSGISAHEDLNIRGGASFVPGEPTTADLNGHGTHVAGTVAALNNSIGVIGVAPNAELYAVKVLGANGSGSVSGIAQGLEWAATNNMHIANMSLGSDFPSSTLEHAVNYATSRDVLVIAATGNNGSGSVGYPARYANAMAVGATDQNNRRANFSQYGTGIDIVAPGVNVQSTYPGNRYVSMNGTSMATPHVAGAAALVKQRYPSWNATQIRNHLKNTATNLGNSSQFGSGLVNAEAATR

SEQ ID NO: 66016 - protein, 268 aa, Unidentified
QTVPWGITRVQAPAVHNRGGTGSGVRVAILDSGISAHEDLNIRGGASFVPGEPTTADLNGHGTHVAGTVAALNNSIGVIGVAPNAELYAVKVLGANGSGSVSGIAQGLEWAATNNMHIANMSLGSDFPSSTLERAVNYATSRDVLVIAATGNNGSGSVGYPARYANAMAVGATDQNNRRANFSQYGTGIDIVAPGVNVQSTYPGNRYVSMNGTSMATPHVAGAAALVKQRYPSWNATQIRNHLKNTATNLGNSSQFGSGLVNAEAATR

SEQ ID NO: 66017 - protein, 268 aa, Bacillus gibsonii
QTVPWGITRVQAPAVHNRGITGSGVRVAILDSGISAHSDLNIRGGASFVPGEPTTADLNGHGTHVAGTVAALNNSIGVIGVAPNAELYAVKVLGANGSGSVSGIAQGLEWAATNNMHIANMSLGSDFPSSTLERAVNYATSRDVLVIAATGNNGSGSVGYPARYANAMAVGATDQNNRRANFSQYGTGIDIVAPGVNVQSTYPGNRYVSXNGTSMATPHVAGAAALVKQRYPSWNATQIRNHLKNTATNLGNSSQFGSGLVNAEAATR

SEQ ID NO: 66018 - protein, 268 aa, Unidentified
QTVPWGITRVQAPAVHNRGITGSGVRVAILDSGISAHEDLNIRGGASFVPGEPTTADLNGHGTHVAGTVAALNNSIGVIGVAPNAELYAVKVLGANGSGSVSGIAQGLEWAATNNMHIANMSLGSDFPSSTLERAVNYATSRDVLVIAATGNNGSGSVGYPARYANAMAVGATDQNNRRANFSQYGTGIDIVAPGVNVQSTYPGNRYVSMNGTSMATPHVAGAAALVKQRYPSWDATQIRNHLKNTATNLGNSSQFGSGLVNAEAATR

SEQ ID NO: 66019 - protein, 268 aa, Unidentified
QTVPWGITRVQAPAVHNRGITGSGVRVAILDSGISAHSDLNIRGGASFVPGEPTTADLNGHGTHVAGTVAALNNSIGVIGVAPNAELYAVKVLGANGSGSVSGIAQGLEWAATNKMHIANMSLGSDFPSSTLERAVNYATSRDVLVIAATGNNGSGSVGYPARYANAMAVGATDQNNRRANFSQYGTGIDIVAPGVNVQSTYPGNRYVSMNGTSMATPHVAGAAALVKQRYPSWNATQIRNHLKNTATNLGNSSQFGSGLVNAEAATR

SEQ ID NO: 66020 - protein, 268 aa, Unidentified
QTVPWGITRVQAPAVHNRGITGSGVRVAILDSGISAHEDLNIRGGASFVPGEPTTADLNGHGTHVAGTVAALNNSIGVIGVAPNAELYAVKVLGANGSGSVSGIAQGLEWAATNNMHIANMSLGSDFPSSTLERAVNYATSRDVLVIAATGNNGSGSVGYPARYANAMAVGATDQNNRRAPFSQYGTGIDIVAPGVNVQSTYPGNRYVSMNGTSMATPHVAGAAALVKQRYPSWNATQIRNHLKNTATNLGNSSQFGSGLVNAEAATR

SEQ ID NO: 66021 - protein, 268 aa, Unidentified
QTVPWGITRVQAPAVHNRGITGSGVRVAILDSGISAHEDLNIRGGASFVPGEPTTADLNGHGTHVAGTVAALNNSIGVIGVAPNAELYAVKVLGANGSGSVSGIAQGLEWAALNNMHIANMSLGSDFPSSTLERAVNYATSRDVLVIAATGNNGSGSVGYPARYANAMAVGATDQNNRRANFSQYGTGIDIVAPGVNVQSTYPGNRYVSMNGTSMATPHVAGAAALVKQRYPSWNATQIRNHLKNTATNLGNSSQFGSGLVNAEAATR

SEQ ID NO: 66022 - protein, 268 aa, Unidentified
QTVPWGITRVQAPAVHNRGCTGSGVRVAILDSGISAHSDLNIRGGASFVPGEPTTADLNGHGTHVAGTVAALNNSIGVIGVAPNAELYAVKVLGANGSGSVSGIAQGLEWAATNNMHIANMSLGSDFPSSTLERAVNYATSRDVLVIAATGNNGSGSVGYPARYANAMAVGATDQNNRRANFSQYGTGIDIVAPGVNVQSTYPGNRYVSMNGTSMATPHVAGAAALVKQRYPSWNATQIRNHLKNTATNLGNSSQFGSGLVNAEAATR

SEQ ID NO: 66023 - protein, 268 aa, Unidentified
QTVPWGITRVQAPAVHNRGITGSGVRVAILDSGISAHSDLNIRGGASFVPGEPTTADLNGHGTHVAGTVAALNNSIGVIGVAPNAELYAVKVLGANGSGSVSGIAQGLEWAATNNMHIANMSLGSDWPSSTLERAVNYATSRDVLVIAATGNNGSGSVGYPARYANAMAVGATDQNNRRANFSQYGTGIDIVAPGVNVQSTYPGNRYVSMNGTSMATPHVAGAAALVKQRYPSWNATQIRNHLKNTATNLGNSSQFGSGLVNAEAATR

SEQ ID NO: 66024 - protein, 268 aa, Unidentified
QTVPWGITRVQAPAVHNRGITGSGVRVAILDSGISAHEDLNIRGGASFVPGEPTTADLNGHGTHVAGTVAALNNSIGVIGVAPNAELYAVKVLGANGSGSVSGIAQGLEWAATNNMHIANMSLGSDFPSSTLERAVNYATSRDVLVIAATGNNGSGSVGYPARYANAMAVGATDQNNRRANFSQYGWGIDIVAPGVNVQSTYPGNRYVSMNGTSMATPHVAGAAALVKQRYPSWNATQIRNHLKNTATNLGNSSQFGSGLVNAEAATR

SEQ ID NO: 66025 - protein, 268 aa, Unidentified
QTVPWGITRVQAPAVHNRGITGSGVRVAILDSGISAHEDLNIRGGASFVPGEPTTADLNGHGTHVAGTVAALNNSIGVIGVAPNAELYAVKVLGANGSGSVSGIAQGLEWAATNNMHIANMSLGSDFPSSTLEYAVNYATSRDVLVIAATGNNGSGSVGYPARYANAMAVGATDQNNRRANFSQYGTGIDIVAPGVNVQSTYPGNRYVSMNGTSMATPHVAGAAALVKQRYPSWNATQIRNHLKNTATNLGNSSQFGSGLVNAEAATR

SEQ ID NO: 66026 - protein, 268 aa, Unidentified
QTVPWGITRVQAPAVHNRGITGSGVRVAILDSGISAHSDLNIRGGASFVPGEPTTADLNGHGTHVAGTVAALNNSIGVIGVAPNAELYAVKVLGANGSGSVSGIAQGLEWAATNNMHIANMSLGSDFPSSTLERAVNYATSRDVLVIAATGNNGSGSVGYPARYANAMAVGATDQNNRRANFSQYGTGIDIVAPGVNVQSTYPGNRYVSMNGTSMATPHVAGAAALVKQRYPSWNATQIRNHLKNTATNLGPSSQFGSGLVNAEAATR

SEQ ID NO: 66027 - protein, 268 aa, Unidentified
QTVPWGITRVQAPAVHNRGITGSGVRVAILDSGISAHSDLNIRGGASFVPGEPTTADLNGHGTHVAGTVAALNNSIGVIGVAPNAELYAVKVLGANGSGSVSGIAQGLEWAATNWMHIANMSLGSDFPSSTLERAVNYATSRDVLVIAATGNNGSGSVGYPARYANAMAVGATDQNNRRANFSQYGTGIDIVAPGVNVQSTYPGNRYVSMNGTSMATPHVAGAAALVKQRYPSWNATQIRNHLKNTATNLGNSSQFGSGLVNAEAATR

SEQ ID NO: 66028 - protein, 268 aa, Unidentified
QTVPWGITRVQAPAVHNRGDTGSGVRVAILDSGISAHEDLNIRGGASFVPGEPTTADLNGHGTHVAGTVAALNNSIGVIGVAPNAELYAVKVLGANGSGSVSGIAQGLEWAATNNMHIANMSLGSDFPSSTLERAVNYATSRDVLVIAATGNNGSGSVGYPARYANAMAVGATDQNNRRANFSQYGTGIDIVAPGVNVQSTYPGNRYVSMNGTSMATPHVAGAAALVKQRYPSWNATQIRNHLKNTATNLGNSSQFGSGLVNAEAATR

SEQ ID NO: 66029 - protein, 268 aa, Unidentified
QTVPWGITRVQAPAVHNRGNTGSGVRVAILDSGISAHEDLNIRGGASFVPGEPTTADLNGHGTHVAGTVAALNNSIGVIGVAPNAELYAVKVLGANGSGSVSGIAQGLEWAATNNMHIANMSLGSDFPSSTLERAVNYATSRDVLVIAATGNNGSGSVGYPARYANAMAVGATDQNNRRANFSQYGTGIDIVAPGVNVQSTYPGNRYVSMNGTSMATPHVAGAAALVKQRYPSWNATQIRNHLKNTATNLGNSSQFGSGLVNAEAATR

SEQ ID NO: 66030 - protein, 268 aa, Unidentified
QTVPWGIERVQAPAVHNRGITGSGVRVAILDSGISAHSDLNIRGGASFVPGEPTTADLNGHGTHVAGTVAALNNSIGVIGVAPNAELYAVKVLGANGSGSVSGIAQGLEWAATNNMHIANMSLGSDQPSSTLERAVNYATSRDVLVIAATGNNGSGSVGYPARYANAMAVGATDQNNRRAEFSQYGTGIDIVAPGVNVQSTYPGNRYVSMNGTSMATPHVAGAAALVKQRYPSWNATQIRNHLKNTATNLGNSSQFGSGLVNAEAATR

SEQ ID NO: 66031 - protein, 268 aa, Unidentified
QTVPWGITRVQAPAVHNRGITGSGVRVAILDSGISAHEDLNIRGGASFVPGEPTTADLNGHGTHVAGTVAALNNSIGVIGVAPCAELYAVKVLGANGSGSVSGIAQGLEWAATNNMHIANMSLGSDFPSSTLERAVNYATSRDVLVIAATGNNGSGSVGYPARYANAMAVGATDQNNRRANFSQYGTGIDIVAPGVNVQSTYPGNRYVSMNGTSMATPHVAGAAALVKQRYPSWNATQIRNHLKNTATNLGNSSQFGSGLVNAEAATR

SEQ ID NO: 66032 - protein, 268 aa, Unidentified
QTVPWGITRVQAPAVHNRGITGSGVRVAILDSGISAHEDLNIRGGASFVPGEPTTADLNGHGTHVAGTVAALNNSIGVIGVAPNAELYAVKVLGANGSGSVSGIAQGLEWAATNNMHIANMSLGSDFPSSTLERAVNYATSRDVLVIAATGNNGSGSVGYPARYANAMAVGATDQNNRRANFSQYGMGIDIVAPGVNVQSTYPGNRYVSMNGTSMATPHVAGAAALVKQRYPSWNATQIRNHLKNTATNLGNSSQFGSGLVNAEAATR

SEQ ID NO: 66033 - protein, 268 aa, Unidentified
QTVPWGITRVQAPAVHNRGITGSGVRVAILDSGISAHEDLNIRGGASFVPGEPTTADLNGHGTHVAGTVAALNNSIGVIGVAPNAELYAVKVLGANGSGSVSGIAQGLEWAATNNMHIANMSLGSDFPSSTLERAVNYATSRDVLVIAATGNNGSGSVGYPARYANAMAVGATDQNNRRANFSQYGTGIDIVAPGVNVQSTYPGNRYVSMNGTSMATPHVAGAAALVKQIYPSWNATQIRNHLKNTATNLGNSSQFGSGLVNAEAATR

SEQ ID NO: 66034 - protein, 268 aa, Unidentified
QTVPWGITRVQAPAVHNRGITGSGVRVAILDSGISAHEDLNIRGGASFVPGEPTTADLNGHGTHVAGTVAALNNSIGVIGVAPNAELYAVKVLGANGSGSVSGIAQGLEWAATNNMHIANMSLGSDFPSSTLERAVNYATSRDVLVIAATGNNGSGSVGYPARYANAMAVGATDQNNRRANFSQYGTGIDIVAPGVNVQSTYPGNRYVSMNGTSMATPHVAGAAALVKQRYPSWNATQIRNHLKNTATNLGNSEQFGSGLVNAEAATR

SEQ ID NO: 66035 - protein, 268 aa, Unidentified
QTVPWGITRVQAPAVHNRGITGSGVRVAILDSGISAHEDLNIRGGASFVPGEPTTADLNGHGTHVAGTVAALNNSIGVIGVAPNAELYAVKVLGANGSGSVSGIAQGLEWAATNNMHIANMSLGSDFPSSTLERAVNYATSRDVLVIAATGNNGSGSVGYPARYANAMAVGATDQNNRRANFSQYGTGIDIVAPGVNVQSTYPGNRYVSMNGTSMATPHVAGAAALVKQCYPSWNATQIRNHLKNTATNLGNSSQFGSGLVNAEAATR

SEQ ID NO: 66036 - protein, 268 aa, Unidentified
QTVPWGITRVQAPAVHNRGITGSGVRVAILDSGISAHEDLNIRGGASFVPGEPTTADLNGHGTHVAGTVAALNNSIGVIGVAPNAELYAVKVLGANGSGSVSGIAQGLEWAATNNMHIANMSLGSDFPSSTLERAVNYATSRDVLVIAATGNNGSGSVGYPARYANAMAVGATDQNNRRANFSQYGTGIDIVAPGVNVQSTYPGNRYVSMNGTSMATPHVAGAAALVKQQYPSWNATQIRNHLKNTATNLGNSSQFGSGLVNAEAATR

SEQ ID NO: 66037 - protein, 268 aa, Unidentified
QTVPWGITRVQAPAVHNRGITGSGVRVAILDSGISAHEDLNIRGGASFVPGEPTTADLNGHGTHVAGTVAALNNSIGVIGVAPNAELYAVKVLGANGSGSVSGIAQGLEWAATNNMHIANMSLGSDFPSSTLEFAVNYATSRDVLVIAATGNNGSGSVGYPARYANAMAVGATDQNNRRANFSQYGTGIDIVAPGVNVQSTYPGNRYVSMNGTSMATPHVAGAAALVKQRYPSWNATQIRNHLKNTATNLGNSSQFGSGLVNAEAATR

SEQ ID NO: 66038 - protein, 268 aa, Unidentified
QTVPWGITRVQAPAVHNRGITGSGVRVAILDSGISAHEDLNIRGGASFVPGEPTTADLNGHGTHVAGTVAALNNSIGVIGVAPNAELYAVKVLGANGSGSVSGIAQGLEWAAFNNMHIANMSLGSDFPSSTLERAVNYATSRDVLVIAATGNNGSGSVGYPARYANAMAVGATDQNNRRANFSQYGTGIDIVAPGVNVQSTYPGNRYVSMNGTSMATPHVAGAAALVKQRYPSWNATQIRNHLKNTATNLGNSSQFGSGLVNAEAATR

SEQ ID NO: 66039 - protein, 268 aa, Unidentified
QTVPWGITRVQAPAVHNRGITGSGVRVAILDSGISAHEDLNIRGGASFVPGEPTTADLNGHGTHVAGTVAALNNSIGVIGVAPNAELYAVKVLGAAGSGSVSGIAQGLEWAATNNMHIANMSLGSDFPSSTLERAVNYATSRDVLVIAATGNNGSGSVGYPARYANAMAVGATDQNNRRANFSQYGTGIDIVAPGVNVQSTYPGNRYVSMNGTSMATPHVAGAAALVKQRYPSWNATQIRNHLKNTATNLGNSSQFGSGLVNAEAATR

SEQ ID NO: 66040 - protein, 268 aa, Unidentified
QTVPWGITRVQAPAVHNRGETGSGVRVAILDSGISAHSDLNIRGGASFVPGEPTTADLNGHGTHVAGTVAALNNSIGVIGVAPNAELYAVKVLGANGSGSVSGIAQGLEWAATNNMHIANMSLGSDFPSSTLERAVNYATSRDVLVIAATGNNGSGSVGYPARYANAMAVGATDQNNRRANFSQYGTGIDIVAPGVNVQSTYPGNRYVSMNGTSMATPHVAGAAALVKQRYPSWNATQIRNHLKNTATNLGNSSQFGSGLVNAEAATR

SEQ ID NO: 66041 - protein, 268 aa, Unidentified
QTVPWGITRVQAPAVHNRGYTGSGVRVAILDSGISAHEDLNIRGGASFVPGEPTTADLNGHGTHVAGTVAALNNSIGVIGVAPNAELYAVKVLGANGSGSVSGIAQGLEWAATNNMHIANMSLGSDFPSSTLERAVNYATSRDVLVIAATGNNGSGSVGYPARYANAMAVGATDQNNRRANFSQYGTGIDIVAPGVNVQSTYPGNRYVSMNGTSMATPHVAGAAALVKQRYPSWNATQIRNHLKNTATNLGNSSQFGSGLVNAEAATR

SEQ ID NO: 66042 - protein, 268 aa, Unidentified
QTVPWGITRVQAPAVHNRGGTGSGVRVAILDSGISAHSDLNIRGGASFVPGEPTTADLNGHGTHVAGTVAALNNSIGVIGVAPNAELYAVKVLGANGSGSVSGIAQGLEWAATNNMHIANMSLGSDFPSSTLERAVNYATSRDVLVIAATGNNGSGSVGYPARYANAMAVGATDQNNRRANFSQYGTGIDIVAPGVNVQSTYPGNRYVSMNGTSMATPHVAGAAALVKQRYPSWNATQIRNHLKNTATNLGNSSQFGSGLVNAEAATR

SEQ ID NO: 66043 - protein, 268 aa, Unidentified
QTVPWGITRVQAPAVHNRGITGSGVRVAILDSGISAHSDLNIRGGASFVPGEPTTADLNGHGTHVAGTVAALNNSIGVIGVAPNAELYAVKVLGANGSGSVSGIAQGLEWAATNIMHIANMSLGSDFPSSTLERAVNYATSRDVLVIAATGNNGSGSVGYPARYANAMAVGATDQNNRRANFSQYGTGIDIVAPGVNVQSTYPGNRYVSMNGTSMATPHVAGAAALVKQRYPSWNATQIRNHLKNTATNLGNSSQFGSGLVNAEAATR

SEQ ID NO: 66044 - protein, 268 aa, Unidentified
QTVPWGITRVQAPAVHNRGITGSGVRVAILDSGISAHEDLNIRGGASFVPGEPTTADLNGHGTHVAGTVAALNNSIGVIGVAPNAELYAVKVLGANGSGSVSGIAQGLEWAATNNMHIANMSLGSDVPSSTLERAVNYATSRDVLVIAATGNNGSGSVGYPARYANAMAVGATDQNNRRANFSQYGTGIDIVAPGVNVQSTYPGNRYVSMNGTSMATPHVAGAAALVKQRYPSWNATQIRNHLKNTATNLGNSSQFGSGLVNAEAATR

SEQ ID NO: 66045 - protein, 268 aa, Unidentified
QTVPWGITRVQAPAVHNRGITGSGVRVAILDSGISAHSDLNIRGGASFVPGEPTTADLNGHGTHVAGTVAALNNSIGVIGVAPNAELYAVKVLGANGSGSVSGIAQGLEWAATNNMHIANMSLGSDFPSSTLERAVNYATSRDVLVIAATGNNGSGSVGYPARYANAMAVGATDQNNRRANFSQYGTGIDIVAPGVNVQSTYPGNRYVSMNGTSFATPHVAGAAALVKQRYPSWNATQIRNHLKNTATNLGNSSQFGSGLVNAEAATR

SEQ ID NO: 66046 - protein, 268 aa, Unidentified
QQVPWGITRVQAPAVHNRGITGSGVRVAILDSGISAHSDLNIRGGASFVPGEPTTADLNGHGTHVAGTVAALNNSIGVIGVAPNAELYAVKVLGANGSGSVSGIAQGLEWAATNNMHIANMSLGSDQPSSTLERAVNYATSRDVLVIAATGNNGSGSVGYPARYANAMAVGATDQNNRRANFSQYGTGIDIVAPGVNVQSTYPGNRYVSMNGTSMATPHVAGAAALVKQRYPSWNATQIRNHLKNTATNLGNSSQFGSGLVNAEAATR

SEQ ID NO: 66047 - protein, 268 aa, Unidentified
QTVPWGITRVQAPAVHNRGITGSGVRVAILDSGISAHSDLNIRGGASFVPGEPTTADLNGHGTHVAGTVAALNNSIGVIGVAPNAELYAVKVLGANGSGSVSGIAQGLEWAATNNMHIANMSLGSDYPSSTLERAVNYATSRDVLVIAATGNNGSGSVGYPARYANAMAVGATDQNNRRANFSQYGTGIDIVAPGVNVQSTYPGNRYVSMNGTSMATPHVAGAAALVKQRYPSWNATQIRNHLKNTATNLGNSSQFGSGLVNAEAATR

SEQ ID NO: 66048 - protein, 268 aa, Unidentified
QTVPWGITRVQAPAVHNRGITGSGVRVAILDSGISAHSDLNIRGGASFVPGEPTTADLNGHGTHVAGTVAALNNSIGVIGVAPNAELYAVKVLGANGSGSVSGIAQGLEWAATNNMHIANMSLGSDIPSSTLERAVNYATSRDVLVIAATGNNGSGSVGYPARYANAMAVGATDQNNRRANFSQYGTGIDIVAPGVNVQSTYPGNRYVSMNGTSMATPHVAGAAALVKQRYPSWNATQIRNHLKNTATNLGNSSQFGSGLVNAEAATR

SEQ ID NO: 66049 - protein, 268 aa, Unidentified
QTVPWGITRVQAPAVHNRGPTGSGVRVAILDSGISAHSDLNIRGGASFVPGEPTTADLNGHGTHVAGTVAALNNSIGVIGVAPNAELYAVKVLGANGSGSVSGIAQGLEWAATNNMHIANMSLGSDFPSSTLERAVNYATSRDVLVIAATGNNGSGSVGYPARYANAMAVGATDQNNRRANFSQYGTGIDIVAPGVNVQSTYPGNRYVSMNGTSMATPHVAGAAALVKQRYPSWNATQIRNHLKNTATNLGNSSQFGSGLVNAEAATR

SEQ ID NO: 66050 - protein, 268 aa, Unidentified
QTVPWGIRRVQAPAVHNRGITGSGVRVAILDSGISAHEDLNIRGGASFVPGEPTTADLNGHGTHVAGTVAALNNSIGVIGVAPNAELYAVKVLGANGSGSVSGIAQGLEWAATNNMHIANMSLGSDFPSSTLERAVNYATSRDVLVIAATGNNGSGSVGYPARYANAMAVGATDQNNRRANFSQYGTGIDIVAPGVNVQSTYPGNRYVSMNGTSMATPHVAGAAALVKQRYPSWNATQIRNHLKNTATNLGNSSQFGSGLVNAEAATR

SEQ ID NO: 66051 - protein, 268 aa, Unidentified
QTVPWGICRVQAPAVHNRGITGSGVRVAILDSGISAHEDLNIRGGASFVPGEPTTADLNGHGTHVAGTVAALNNSIGVIGVAPNAELYAVKVLGANGSGSVSGIAQGLEWAATNNMHIANMSLGSDFPSSTLERAVNYATSRDVLVIAATGNNGSGSVGYPARYANAMAVGATDQNNRRANFSQYGTGIDIVAPGVNVQSTYPGNRYVSMNGTSMATPHVAGAAALVKQRYPSWNATQIRNHLKNTATNLGNSSQFGSGLVNAEAATR

SEQ ID NO: 66052 - protein, 268 aa, Unidentified
QTVPWGITRVQAPAVHNRGMTGSGVRVAILDSGISAHEDLNIRGGASFVPGEPTTADLNGHGTHVAGTVAALNNSIGVIGVAPNAELYAVKVLGANGSGSVSGIAQGLEWAATNNMHIANMSLGSDFPSSTLERAVNYATSRDVLVIAATGNNGSGSVGYPARYANAMAVGATDQNNRRANFSQYGTGIDIVAPGVNVQSTYPGNRYVSMNGTSMATPHVAGAAALVKQRYPSWNATQIRNHLKNTATNLGNSSQFGSGLVNAEAATR

SEQ ID NO: 66053 - protein, 268 aa, Unidentified
QTVPWGITRVQAPAVHNRGITGSGVRVAILDSGISAHSDLNIRGGASFVPGEPTTADLNGHGTHVAGTVAALNNSIGVIGVAPDAELYAVKVLGANGSGSVSGIAQGLEWAATNNMHIANMSLGSDFPSSTLERAVNYATSRDVLVIAATGNNGSGSVGYPARYANAMAVGATDQNNRRANFSQYGTGIDIVAPGVNVQSTYPGNRYVSMNGTSMATPHVAGAAALVKQRYPSWNATQIRNHLKNTATNLGNSSQFGSGLVNAEAATR

SEQ ID NO: 66054 - protein, 268 aa, Unidentified
QTVPWGITRVQAPAVHNRGITGSGVRVAILDSGISAHEDLNIRGGASFVPGEPTTADLNGHGTHVAGTVAALNNSIGVIGVAPNAELYAVKVLGANGSGSVSGIAQGLEWAATNNMHIANMSLGSDFPSSTLERAVNYATSRDVLVIAATGNNGSGSVGYPARYANAMAVGATDQNNRRANFSQYGTGIDIVAPGVNVQSTYPGNRYVSMNGTSMATPHVAGAAALVKQRYPSWNATQIRNHLKNTATNLGNSSYFGSGLVNAEAATR

SEQ ID NO: 66055 - protein, 268 aa, Unidentified
QTVPWGIKRVQAPAVHNRGITGSGVRVAILDSGISAHEDLNIRGGASFVPGEPTTADLNGHGTHVAGTVAALNNSIGVIGVAPNAELYAVKVLGANGSGSVSGIAQGLEWAATNNMHIANMSLGSDFPSSTLERAVNYATSRDVLVIAATGNNGSGSVGYPARYANAMAVGATDQNNRRANFSQYGTGIDIVAPGVNVQSTYPGNRYVSMNGTSMATPHVAGAAALVKQRYPSWNATQIRNHLKNTATNLGNSSQFGSGLVNAEAATR

SEQ ID NO: 66056 - protein, 268 aa, Unidentified
QTVPWGITRVQAPAVHNRGITGSGVRVAILDSGISAHEDLNIRGGASFVPGEPTTADLNGHGTHVAGTVAALNNSIGVIGVAPNAELYAVKVLGANGSGSVSGIAQGLEWAATNNMHIANMSLGSDFPSSTLERAVNYATSRDVLVIAATGNNGSGSVGYPARYANAMAVGATDQNNRRADFSQYGTGIDIVAPGVNVQSTYPGNRYVSMNGTSMATPHVAGAAALVKQRYPSWNATQIRNHLKNTATNLGNSSQFGSGLVNAEAATR

SEQ ID NO: 66057 - protein, 268 aa, Unidentified
QTVPWGITRVQAPAVHNRGITGSGVRVAILDSGISAHEDLNIRGGASFVPGEPTTADLNGHGTHVAGTVAALNNSIGVIGVAPNAELYAVKVLGANGSGSVSGIAQGLEWAATNNMHIANMSLGSDFPSSTLERAVNYATSRDVLVIAATGNNGSGSVGYPARYANAMAVGATDQNNRRAKFSQYGTGIDIVAPGVNVQSTYPGNRYVSMNGTSMATPHVAGAAALVKQRYPSWNATQIRNHLKNTATNLGNSSQFGSGLVNAEAATR

SEQ ID NO: 66058 - protein, 268 aa, Unidentified
QTVPWGITRVQAPAVHNRGFTGSGVRVAILDSGISAHSDLNIRGGASFVPGEPTTADLNGHGTHVAGTVAALNNSIGVIGVAPNAELYAVKVLGANGSGSVSGIAQGLEWAATNNMHIANMSLGSDFPSSTLERAVNYATSRDVLVIAATGNNGSGSVGYPARYANAMAVGATDQNNRRANFSQYGTGIDIVAPGVNVQSTYPGNRYVSMNGTSMATPHVAGAAALVKQRYPSWNATQIRNHLKNTATNLGNSSQFGSGLVNAEAATR

SEQ ID NO: 66059 - protein, 268 aa, Unidentified
QTVPWGITRVQAPAVHNRGITGSGVRVAILDSGISAHEDLNIRGGASFVPGEPTTADLNGHGTHVAGTVAALNNSIGVIGVAPNAELYAVKVLGANGSGSVSGIAQGLEWAATNNMHIANMSLGSDFPSSTLERAVNYATSRDVLVIAATGNNGSGSVGYPARYANAMAVGATDQNNRRANFSQYGTGIDIVAPGVNVQSTYPGNRYVSMNGTSMATPHVAGAAALVKQRFPSWNATQIRNHLKNTATNLGNSSQFGSGLVNAEAATR

SEQ ID NO: 66060 - protein, 268 aa, Unidentified
QTVPWGITRVQAPAVHNRGITGSGVRVAILDSGISAHEDLNIRGGASFVPGEPTTADLNGHGTHVAGTVAALNNSIGVIGVAPNAELYAVKVLGANGSGSVSGIAQGLEWAATNNMHIANMSLGSDFPSSTLERAVNYATSRDVLVIAATGNNGSGSVGYPARYANAMAVGATDQNNRRANFSQYGTGIDIVAPGVNVQSTYPGNRYVSQNGTSMATPHVAGAAALVKQRYPSWNATQIRNHLKNTATNLGNSSQFGSGLVNAEAATR

SEQ ID NO: 66061 - protein, 268 aa, Unidentified
QTVPWGITRVQAPAVHNRGITGSGVRVAILDSGISAHEDLNIRGGASFVPGEPTTADLNGHGTHVAGTVAALNNSIGVIGVAPNAELYAVKVLGANGSGSVSGIAQGLEWAATNNMHIANMSLGSDFPSSTLERAVNYATSRDVLVIAATGNNGSGSVGYPARYANAMAVGATDQNNRRANFSQYGTGIDIVAPGVNVQSTYPGNRYVSMNGTSMATPHVAGAAALVKQRYPSWNATQIRNHLKNTATNLGNSSHFGSGLVNAEAATR

SEQ ID NO: 66062 - protein, 268 aa, Unidentified
QTVPWGITRVQAPAVHNRGITGSGVRVAILDSGISAHEDLNIRGGASFVPGEPTTADLNGHGTHVAGTVAALNNSIGVIGVAPNAELYAVKVLGANGSGSVSGIAQGLEWAAANNMHIANMSLGSDFPSSTLERAVNYATSRDVLVIAATGNNGSGSVGYPARYANAMAVGATDQNNRRANFSQYGTGIDIVAPGVNVQSTYPGNRYVSMNGTSMATPHVAGAAALVKQRYPSWNATQIRNHLKNTATNLGNSSQFGSGLVNAEAATR

SEQ ID NO: 66063 - protein, 268 aa, Unidentified
QTVPWGITRVQAPAVHNRGITGSGVRVAILDSGISAHEDLNIRGGASFVPGEPTTADLNGHGTHVAGTVAALNNSIGVIGVAPNAELYAVKVLGANGSGSVSGIAQGLEWAATNDMHIANMSLGSDFPSSTLERAVNYATSRDVLVIAATGNNGSGSVGYPARYANAMAVGATDQNNRRANFSQYGTGIDIVAPGVNVQSTYPGNRYVSMNGTSMATPHVAGAAALVKQRYPSWNATQIRNHLKNTATNLGNSSQFGSGLVNAEAATR

SEQ ID NO: 66064 - protein, 268 aa, Unidentified
QTVPWGITRVQAPAVHNRGITGSGVRVAILDSGISAHEDLNIRGGASFVPGEPATADLNGHGTHVAGTVAALNNSIGVIGVAPNAELYAVKVLGANGSGSVSGIAQGLEWAATNNMHIANMSLGSDFPSSTLERAVNYATSRDVLVIAATGNNGSGSVGYPARYANAMAVGATDQNNRRANFSQYGTGIDIVAPGVNVQSTYPGNRYVSMNGTSMATPHVAGAAALVKQRYPSWNATQIRNHLKNTATNLGNSSQFGSGLVNAEAATR

SEQ ID NO: 66065 - protein, 268 aa, Unidentified
QVVPWGITRVQAPAVHNRGITGSGVRVAILDSGISAHSDLNIRGGASFVPGEPTTADLNGHGTHVAGTVAALNNSIGVIGVAPNAELYAVKVLGANGSGSVSGIAQGLEWAATNNMHIANMSLGSDFPSSTLERAVNYATSRDVLVIAATGNNGSGSVGYPARYANAMAVGATDQNNRRANFSQYGTGIDIVAPGVNVQSTYPGNRYVSMNGTSMATPHVAGAAALVKQRYPSWNATQIRNHLKNTATNLGNSSQFGSGLVNAEAATR

SEQ ID NO: 66066 - protein, 268 aa, Unidentified
QTVPWGITRVQAPAVHNRGITGSGVRVAILDSGISAHSDLNIRGGASFVPGEPTTADLNGHGTHVAGTVAALNNSIGVIGVAPNAELYAVKVLGANGSGSVSGIAQGLEWAATNNMHIANMSLGSDLPSSTLERAVNYATSRDVLVIAATGNNGSGSVGYPARYANAMAVGATDQNNRRANFSQYGTGIDIVAPGVNVQSTYPGNRYVSMNGTSMATPHVAGAAALVKQRYPSWNATQIRNHLKNTATNLGNSSQFGSGLVNAEAATR

SEQ ID NO: 66067 - protein, 268 aa, Unidentified
QTVPWGITRVQAPAVHNRGITGSGVRVAILDSGISAHEDLNIRGGASFVPGEPTTADLNGHGTHVAGTVAALNNSIGVIGVAPNAELYAVKVLGANGSGSVSGIAQGLEWAATNNMHIANMSLGSAFPSSTLERAVNYATSRDVLVIAATGNNGSGSVGYPARYANAMAVGATDQNNRRANFSQYGTGIDIVAPGVNVQSTYPGNRYVSMNGTSMATPHVAGAAALVKQRYPSWNATQIRNHLKNTATNLGNSSQFGSGLVNAEAATR

SEQ ID NO: 66068 - protein, 268 aa, Unidentified
QTVPWGITRVQAPAVHNRGHTGSGVRVAILDSGISAHSDLNIRGGASFVPGEPTTADLNGHGTHVAGTVAALNNSIGVIGVAPNAELYAVKVLGANGSGSVSGIAQGLEWAATNNMHIANMSLGSDFPSSTLERAVNYATSRDVLVIAATGNNGSGSVGYPARYANAMAVGATDQNNRRANFSQYGTGIDIVAPGVNVQSTYPGNRYVSMNGTSMATPHVAGAAALVKQRYPSWNATQIRNHLKNTATNLGNSSQFGSGLVNAEAATR

SEQ ID NO: 66069 - protein, 268 aa, Unidentified
QTVPWGITRVQAPAVHNRGKTGSGVRVAILDSGISAHEDLNIRGGASFVPGEPTTADLNGHGTHVAGTVAALNNSIGVIGVAPNAELYAVKVLGANGSGSVSGIAQGLEWAATNNMHIANMSLGSDFPSSTLERAVNYATSRDVLVIAATGNNGSGSVGYPARYANAMAVGATDQNNRRANFSQYGTGIDIVAPGVNVQSTYPGNRYVSMNGTSMATPHVAGAAALVKQRYPSWNATQIRNHLKNTATNLGNSSQFGSGLVNAEAATR

SEQ ID NO: 66070 - protein, 268 aa, Unidentified
QTVPWGITRVQAPAVHNRGITGSGVRVAILDSGISAHEDLNIRGGASFVPGEPTTADLNGHGTHVAGTVAALNNSIGVIGVAPNAELYAVKVLGANGSGSVSGIAQGLEWAATNNMHIANMSLGSDFPSPTLERAVNYATSRDVLVIAATGNNGSGSVGYPARYANAMAVGATDQNNRRANFSQYGTGIDIVAPGVNVQSTYPGNRYVSMNGTSMATPHVAGAAALVKQRYPSWNATQIRNHLKNTATNLGNSSQFGSGLVNAEAATR

SEQ ID NO: 66071 - protein, 268 aa, Unidentified
QTVPWGITRVQAPAVHNRGITGSGVRVAILDSGISAHEDLNIRGGASFVPGEPTTADLNGHGTHVAGTVAALNNSIGVIGVAPNAELYAVKVLGANGSGSVSGIAQGLEWAATNNMHIANMSLGSDFPSSTLERAVNYATSRDVLVIAATGNNGSGSVGYPARYANAMAVGATDQNNRRAEFSQYGTGIDIVAPGVNVQSTYPGNRYVSMNGTSMATPHVAGAAALVKQRYPSWNATQIRNHLKNTATNLGNSSQFGSGLVNAEAATR

SEQ ID NO: 66072 - protein, 268 aa, Unidentified
QTVPWGITRVQAPAVHNRGITGSGVRVAILDSGISAHEDLNIRGGASFVPGEPTTADLNGHGTHVAGTVAALNNSIGVIGVAPNAELYAVKVLGANGSGSVSGIAQGLEWAATNNMHIANMSLGSDFPSSTLERAVNYATSRDVLVIAATGNNGSGSVGYPARYANAMAVGATDQNNRRANFSQYGTGIDIVAPGVNVQSTYPGNRYVSMNGTSMATPHVAGAAALVKQRYPSWNATQIRNHLKNTATNLGESSQFGSGLVNAEAATR

SEQ ID NO: 66073 - protein, 268 aa, Unidentified
QTVPWGITRVQAPAVHNRGITGSGVRVAILDSGISAHEDLNIRGGASFVPGEPTTADLNGHGTHVAGTVAALNNSIGVIGVAPNAELYAVKVLGANGSGSVSGIAQGLEWAATNNMHIANMSLGSDFPSQTLERAVNYATSRDVLVIAATGNNGSGSVGYPARYANAMAVGATDQNNRRANFSQYGTGIDIVAPGVNVQSTYPGNRYVSMNGTSMATPHVAGAAALVKQRYPSWNATQIRNHLKNTATNLGNSSQFGSGLVNAEAATR

SEQ ID NO: 66074 - protein, 268 aa, Unidentified
QTVPWGITRVQAPAVHNRGSTGSGVRVAILDSGISAHSDLNIRGGASFVPGEPTTADLNGHGTHVAGTVAALNNSIGVIGVAPNAELYAVKVLGANGSGSVSGIAQGLEWAATNNMHIANMSLGSDFPSSTLERAVNYATSRDVLVIAATGNNGSGSVGYPARYANAMAVGATDQNNRRANFSQYGTGIDIVAPGVNVQSTYPGNRYVSMNGTSMATPHVAGAAALVKQRYPSWNATQIRNHLKNTATNLGNSSQFGSGLVNAEAATR

SEQ ID NO: 66075 - protein, 268 aa, Unidentified
QTVPWGITRVQAPAVHNRGITGSGVRVAILDSGISAHEDLNIRGGASFVPGEPTTADLNGHGTHVAGTVAALNNSIGVIGVAPNAELYAVKVLGANGSGSVSGIAQGLEWAAMNNMHIANMSLGSDFPSSTLERAVNYATSRDVLVIAATGNNGSGSVGYPARYANAMAVGATDQNNRRANFSQYGTGIDIVAPGVNVQSTYPGNRYVSMNGTSMATPHVAGAAALVKQRYPSWNATQIRNHLKNTATNLGNSSQFGSGLVNAEAATR

SEQ ID NO: 66076 - protein, 268 aa, Unidentified
QTVPWGITRVQAPAVHNRGITGSGVRVAILDSGISAHEDLNIRGGASFVPGEPTTADLNGHGTHVAGTVAALNNSIGVIGVAPNAELYAVKVLGANGSGSVSGIAQGLEWAATNNMHIANMSLGSDFPSSTLERAVNYATSRDVLVIAATGNNGSGSVGYPARYANAMAVGATDQNNRRAWFSQYGTGIDIVAPGVNVQSTYPGNRYVSMNGTSMATPHVAGAAALVKQRYPSWNATQIRNHLKNTATNLGNSSQFGSGLVNAEAATR

SEQ ID NO: 66077 - protein, 268 aa, Unidentified
QTVPWGIGRVQAPAVHNRGITGSGVRVAILDSGISAHEDLNIRGGASFVPGEPTTADLNGHGTHVAGTVAALNNSIGVIGVAPNAELYAVKVLGANGSGSVSGIAQGLEWAATNNMHIANMSLGSDFPSSTLERAVNYATSRDVLVIAATGNNGSGSVGYPARYANAMAVGATDQNNRRANFSQYGTGIDIVAPGVNVQSTYPGNRYVSMNGTSMATPHVAGAAALVKQRYPSWNATQIRNHLKNTATNLGNSSQFGSGLVNAEAATR

SEQ ID NO: 66078 - protein, 268 aa, Unidentified
QTVPWGITRVQAPAVHNRGITGSGVRVAILDSGISAHSDLNIRGGASFVPGEPTTADLNGHGTHVAGTVAALNNSIGVIGVAPNAELYAVKVLGANGSGSVSGIAQGLEWAATNNMHIANISLGSDFPSSTLERAVNYATSRDVLVIAATGNNGSGSVGYPARYANAMAVGATDQNNRRANFSQYGTGIDIVAPGVNVQSTYPGNRYVSMNGTSMATPHVAGAAALVKQRYPSWNATQIRNHLKNTATNLGNSSQFGSGLVNAEAATR

SEQ ID NO: 66079 - protein, 268 aa, Unidentified
QTVPWGITRVQAPAVHNRGITGSGVRVAILDSGISAHSDLNIRGGASFVPGEPTTADLNGHGTHVAGTVAALNNSIGVIGVAPNAELYAVKVLGANGSGSVSGIAQGLEWAATNNMHIANMSLGSDAPSTTLERAVNYATSQGVLVIAATGNNGSGSVGYPARYANAMAVGATDQNNRRANFSQYGTGIDIVAPGVNVQSTYPGNRYVSMNGTSMATPHVAGAAALVKQRYPSWNATQIRNHLKNTATNLGNSSQFGSGLVNAEAATR

SEQ ID NO: 66080 - protein, 268 aa, Unidentified
QTVPWGITRVQAPAVHNRGITGSGVRVAILDSGISAHEDLNIRGGASFVPGEPTTADLNGHGTHVAGTVAALNNSIGVIGVAPNAELYAVKVLGANGSGSVSGIAQGLEWAATNNMHIANMSLGSDFPSSTLERAVNYATSRDVLVIAATGNNGSGSVGYPARYANAMAVGATDQNNRRANFSQYGTGIDIVAPGVNVQSTYPGNRYVSMNGTSMATPHVAGAAALVKQRYPSWTATQIRNHLKNTATNLGNSSQFGSGLVNAEAATR

SEQ ID NO: 66081 - protein, 268 aa, Unidentified
QTVPWGITRVQAPAVHNRGITGSGVRVAILDSGISAHEDLNIRGGASFVPGEPTTADLNGHGTHVAGTVAALNNSIGVIGVAPNAELYAVKVLGANGSGSVSGIAQGLEWAASNNMHIANMSLGSDFPSSTLERAVNYATSRDVLVIAATGNNGSGSVGYPARYANAMAVGATDQNNRRANFSQYGTGIDIVAPGVNVQSTYPGNRYVSMNGTSMATPHVAGAAALVKQRYPSWNATQIRNHLKNTATNLGNSSQFGSGLVNAEAATR

SEQ ID NO: 66082 - protein, 268 aa, Unidentified
QTVPWGINRVQAPAVHNRGITGSGVRVAILDSGISAHEDLNIRGGASFVPGEPTTADLNGHGTHVAGTVAALNNSIGVIGVAPNAELYAVKVLGANGSGSVSGIAQGLEWAATNNMHIANMSLGSDFPSSTLERAVNYATSRDVLVIAATGNNGSGSVGYPARYANAMAVGATDQNNRRANFSQYGTGIDIVAPGVNVQSTYPGNRYVSMNGTSMATPHVAGAAALVKQRYPSWNATQIRNHLKNTATNLGNSSQFGSGLVNAEAATR

SEQ ID NO: 66083 - protein, 268 aa, Unidentified
QTVPWGITRVQAPAVHNRGITGSGVRVAILDSGISAHEDLNIRGGASFVPGEPTTADNNGHGTHVAGTVAALNNSIGVIGVAPNAELYAVKVLGANGSGSVSGIAQGLEWAATNNMHIANMSLGSDFPSSTLERAVNYATSRDVLVIAATGNNGSGSVGYPARYANAMAVGATDQNNRRANFSQYGTGIDIVAPGVNVQSTYPGNRYVSMNGTSMATPHVAGAAALVKQRYPSWNATQIRNHLKNTATNLGNSSQFGSGLVNAEAATR

SEQ ID NO: 66084 - protein, 268 aa, Unidentified
QTVPWGITRVQAPAVHNRGITGSGVRVAILDSGISAHSDLNIRGGASFVPGEPTTADLNGHGTHVAGTVAALNNSIGVIGVAPNAELYAVKVLGANGSGSVSGIAQGLEWAATNRMHIANMSLGSDFPSSTLERAVNYATSRDVLVIAATGNNGSGSVGYPARYANAMAVGATDQNNRRANFSQYGTGIDIVAPGVNVQSTYPGNRYVSMNGTSMATPHVAGAAALVKQRYPSWNATQIRNHLKNTATNLGNSSQFGSGLVNAEAATR

SEQ ID NO: 66085 - protein, 268 aa, Unidentified
QTVPWGIMRVQAPAVHNRGITGSGVRVAILDSGISAHEDLNIRGGASFVPGEPTTADLNGHGTHVAGTVAALNNSIGVIGVAPNAELYAVKVLGANGSGSVSGIAQGLEWAATNNMHIANMSLGSDFPSSTLERAVNYATSRDVLVIAATGNNGSGSVGYPARYANAMAVGATDQNNRRANFSQYGTGIDIVAPGVNVQSTYPGNRYVSMNGTSMATPHVAGAAALVKQRYPSWNATQIRNHLKNTATNLGNSSQFGSGLVNAEAATR

SEQ ID NO: 66086 - protein, 268 aa, Unidentified
QTVPWGITRVQAPAVHNRGITGSGVRVAILDSGISAHEDLNIRGGASFVPGEPTTADLNGHGTHVAGTVAALNNSIGVIGVAPAAELYAVKVLGANGSGSVSGIAQGLEWAATNNMHIANMSLGSDFPSSTLERAVNYATSRDVLVIAATGNNGSGSVGYPARYANAMAVGATDQNNRRANFSQYGTGIDIVAPGVNVQSTYPGNRYVSMNGTSMATPHVAGAAALVKQRYPSWNATQIRNHLKNTATNLGNSSQFGSGLVNAEAATR

SEQ ID NO: 66087 - protein, 268 aa, Unidentified
QTVPWGITRVQAPAVHNRGITGSGVRVAILDSGISAHEDLNIRGGASFVPGEPTTADLNGHGTHVAGTVAALNNSIGVIGVAPNAELYAVKVLGANGSGSVSGIAQGLEWAATNNMHIANMSLGSDFPSSTLERAVNYATSRDVLVIAATGNNGSGSVGYPARYANAMAVGATDQNNRRANFSQYGTGIDIVAPGVNVQSTYPGNRYVSENGTSMATPHVAGAAALVKQRYPSWNATQIRNHLKNTATNLGNSSQFGSGLVNAEAATR

SEQ ID NO: 66088 - protein, 268 aa, Unidentified
QTVPWGITRVQAPAVHNRGITGSGVRVAILDSGISAHSDLNIRGGASFVPGEPTTADLNGHGTHVAGTVAALNNSIGVIGVAPNAELYAVKVLGANGSGSVSGIAQGLEWAATNCMHIANMSLGSDFPSSTLERAVNYATSRDVLVIAATGNNGSGSVGYPARYANAMAVGATDQNNRRANFSQYGTGIDIVAPGVNVQSTYPGNRYVSMNGTSMATPHVAGAAALVKQRYPSWNATQIRNHLKNTATNLGNSSQFGSGLVNAEAATR

SEQ ID NO: 66089 - protein, 268 aa, Unidentified
QTVPWGIQRVQAPAVHNRGITGSGVRVAILDSGISAHEDLNIRGGASFVPGEPTTADLNGHGTHVAGTVAALNNSIGVIGVAPNAELYAVKVLGANGSGSVSGIAQGLEWAATNNMHIANMSLGSDFPSSTLERAVNYATSRDVLVIAATGNNGSGSVGYPARYANAMAVGATDQNNRRANFSQYGTGIDIVAPGVNVQSTYPGNRYVSMNGTSMATPHVAGAAALVKQRYPSWNATQIRNHLKNTATNLGNSSQFGSGLVNAEAATR

SEQ ID NO: 66090 - protein, 329 aa, Unidentified
YAELKRAGIEIHNYLSGENMSYEMFRKFAKFVGMEEIAENHLTHVLFDEIVEIRYISEGQEVYDVTTETHNFIGGNMPTLLHNSGVKVAVLDTGISTHPDLNIRGGASFVPGEPSTQDGNGHGTHVAGTIAALNNSIGVLGVAPSAELYAVKVLGASGSGSVSSIAQGLEWAGNNGMHVANLSLGSPSPSATLEQAVNSATSRGVLVVAASGNSGAGSISYPARYANAMAVGATDQNNNRASFSQYGAGLDIVAPGVNVQSTYPGSTYASLNGTSMATPHVAGAAALVKQKNPSWSNVQIRNHLKNTATSLGSTNLYGSGLVNAEAATR

SEQ ID NO: 66091 - protein, 267 aa, Unidentified
QTVPWGITRVQAPAVHNRGITGSGVRVAILDSGISAHEDLNIRGGASFVPGEPTTADLNGHGTHVAGTVAALNNSIGVIGVAPNAELYAVKVLGANGRGSVSGIAQGLEWAATNNMHIANMSLGSDFPSSTLERAVNYATSRDVLVIAATGNNGSGSVGYPARYANAMAVGATDQNNRRANFSQYGTGIDIVAPGVNVQSTYPGNRYVSNGTSMATPHVAGAAALVKQRYPSWNATQIRNHLKNTATNLGNSSQFGSGLVNAEAATR

SEQ ID NO: 66092 - protein, 267 aa, Unidentified
QTVPWGITRVQAPAVHNRGITGSGVRVAILDSGISAHEDLNIRGGASFVPGEPTTADLNGHGTHVAGTVAALNNSIGVIGVAPNAELYAVKVLGANGSGSVSGIAQGLEWAATNNMHIANMSLGSDFPSSTLERAVNYATSRDVLVIAATGNNGSGSVGYPARYANAMAVGATDQNNRRANFSQYGTGIDIVAPGVNVQSTYPGNRYVSMNGTSMATPHVAGAAALVKQRYPSWNATQIRNHLKNTATNLGNSSQFGSGLVNAEAAT

SEQ ID NO: 66093 - protein, 329 aa, Unidentified
VKVGDEIAVLNTRPDFSVLSPPAMPELLSEPFNYELSSIGDVAWDEVVEVDEIDAKGLGVEYLYDLTVDINHNYVANGIVVSNSGVKVAVLDTGISTHPDLNIRGGASFVPGEPSTQDGNGHGTHVAGTIAALNNSIGVLGVAPSAELYAVKVLGASGSGSVSSIAQGLEWAGNNGMHVANLSLGSPSPSATLEQAVNSATSRGVLVVAASGNSGAGSISYPARYANAMAVGATDQNNNRASFSQYGAGLDIVAPGVNVQSTYPGSTYASLNGTSMATPHVAGAAALVKQKNPSWSNVQIRNHLKNTATSLGSTNLYGSGLVNAEAATR

SEQ ID NO: 66094 - protein, 269 aa, Unidentified
SQTVPWGITRVQAPAVHNRGITGSGVRVAILDSGISAHSDLNIRGGASFVPGEPTTADLNGHGTHVAGTVAALNNSIGVIGVAPNAELYAVKVLGANGSGSVSGIAQGLEWAATNNMHIANMSLGSDFPSSTLERAVNYATSRDVLVIAATGNNGSGSVGYPARYANAMAVGATDQNNRRANFSQYGTGIDIVAPGVNVQSTYPGNRYVSMNGTSMATPHVAGAAALVKQRYPSWNATQIRNHLKNTATNLGNSSQFGSGLVNAEAATR

SEQ ID NO: 66095 - protein, 268 aa, Unidentified
QTVPWGITRVQAPAVHNRGVTGSGVRVAILDSGISTHSDLTIRGGASFVPGEPTTADLNGHGTHVAGTVAALNNSIGVIGVAPSADLYAVKVLGANGRGSVSGIAQGLEWAAANNMHIANMSLGSDAPSTTLERAVNYATSQGVLVIAATGNNGSGSVGYPARYANAMAVGATDQNNRRANFSQYGSGIDIVAPGVNVQSTYPGNRYVSMNGTSMATPHVAGAAALVKQRYPSWNATQIRNHLKNTATNLGNSSQFGSGLVNAEAATR

SEQ ID NO: 66096 - protein, 268 aa, Unidentified
QTVPWGITRVQAPAVHNRGITGSGVRVAILDSGISAHEDLNIRGGASFVPNEPTTADLNGHGTHVAGTVAALNNSIGVIGVAPNAELYAVKVLGANGSGSVSGIAQGLEWAATNNMHIANMSLGSDFPSSTLERAVNYATSRDVLVIAATGNNGSGSVGYPARYANAMAVGATDQNNRRANFSQYGTGIDIVAPGVNVQSTYPGNRYVSMNGTSMATPHVAGAAALVKQRYPSWNATQIRNHLKNTATNLGNSSQFGSGLVNAEAATR

SEQ ID NO: 66097 - protein, 268 aa, Bacillus sp.
QTVPWGIQRVQAPAVINRGINGSGVRVAVLDSGISSHSDLSISGGVSFVPGEPTIADGNGHGTHVAGTIAALNNSIGVVGVAPNAQIYGVKVLGANGRGSVSGIAQGLEWAATNNMDIANLSLGSDAPSSTLEQAVNFATSRGVLVVAASGNNGSGNVGYPARYANAMAVGATDQNNRRANFSQYGAGLDIVAPGVGVQSTYPGNRYVSMNGTSMASPHVAGAAALVKQRYPSWSNTQIRNHLKNTATNLGNTNQFGSGLVNADAATR

SEQ ID NO: 66098 - protein, 268 aa, Unidentified
QTVPWGITRVQAPAVHNRGITGSGVRVAILDSGISAHEDLNIRGGASFVPDEPTTADLNGHGTHVAGTVAALNNSIGVIGVAPNAELYAVKVLGANGSGSVSGIAQGLEWAATNNMHIANMSLGSDFPSSTLERAVNYATSRDVLVIAATGNNGSGSVGYPARYANAMAVGATDQNNRRANFSQYGTGIDIVAPGVNVQSTYPGNRYVSMNGTSMATPHVAGAAALVKQRYPSWNATQIRNHLKNTATNLGNSSQFGSGLVNAEAATR

SEQ ID NO: 66099 - protein, 268 aa, Unidentified
QTVPWGITRVQAPAVHNRGITGSGVRVAILDSGISAHEDLNIRGGASFVPGEPTTADLNGHGTHVAGTVAALNNSIGVIGVAPNAELYAVKVLGANGSGSVSGIAQGLEWAATNNMHIANMSLGSDFPSSTLERAVNYATSRDVLVIAATGNNGSGSVGYPARYANAMAVGATDQNNRRANFSQYGTGIDCVAPGVNVQSTYPGNRYVSMNGTSMATPHVAGAAALVKQRYPSWNATQIRNHLKNTATNLGNSSQFGSGLVNAEAATR

SEQ ID NO: 66100 - protein, 268 aa, Unidentified
QTVPWGITRVQAPAVHNRGITGSGVRVAILDSGISAHSDLNIRGGASFVPGEPTTADLNGHGTHVAGTVAALNNSIGVIGVAPNAELYAVKVLGANGSGSVSGIAQGLEWAATNNMRIANMSLGSDSPSSTLERAVNYATSRDVLVIAATGNNGSGSVGYPARYANAMAVGATDQNNRRANFSQYGTGIDIVAPGVNVQSTYPGNRYVSMNGTSMASPHVAGAAALVKQRYPSWNATQIRNHLKNTATNLGNSSQFGSGLVNAEAATR

SEQ ID NO: 66101 - protein, 268 aa, Unidentified
QTVPWGITRVQAPAVHNRGITGSGVRVAILDSGISAHSDLNIRGGASFVPGEPTTADLNGHGTHVAGTVAALNNSIGVIGVAPNAELYAVKVLGANGSGSVSGIAQGLEWAATNNMHIANMSLGSDFPSSTLERAVNYATSRDVLVIAATGNNGSGSVGYPARYANAMAVGATDQNNRRANFSQYGTGIDIVAPGVNVQSTYPPNRYVSMNGTSMATPHVAGAAALVKQRYPSWNATQIRNHLKNTATNLGNSSQFGSGLVNAEAATR

SEQ ID NO: 66102 - protein, 268 aa, Unidentified
QTVPWGITRVQAPAVHARGITGSGVRVAILDSGISAHEDLNIRGGASFVPGEPTTADLNGHGTHVAGTVAALNNSIGVIGVAPNAELYAVKVLGANGSGSVSGIAQGLEWAATNNMHIANMSLGSDFPSSTLERAVNYATSRDVLVIAATGNNGSGSVGYPARYANAMAVGATDQNNRRANFSQYGTGIDIVAPGVNVQSTYPGNRYVSMNGTSMATPHVAGAAALVKQRYPSWNATQIRNHLKNTATNLGNSSQFGSGLVNAEAATR

SEQ ID NO: 66103 - protein, 268 aa, Unidentified
QTVPWGITRVQAPAVHNRGITGSGVRVAILDSGISAHSDLNIRGGASFVPGEPTTADLNGHGTHVAGTVAALNNSIGVIGVAPNAELYAVKVLGANGSGRVSGIAQGLEWAATNNMHIANMSLGSDFPSSTLERAVNYATSRDVLVIAATGNNGSGSVGYPARYANAMAVGATDQNNRRANFSQYGTGIDIVAPGVNVQSTYPGNRYVSMNGTSMATPHVAGAAALVKQRYPSWNATQIRNHLKNTATNLGNSSQFGSGLVNAEAATR

SEQ ID NO: 66104 - protein, 268 aa, Unidentified
QTVPWGITRVQAPAVHNRGITGSGVRVAILDSGISAHEDLNIRGGASFVPGEPTTADLNGHGTHVAGTVAALNNSIGVIGVAPNAELYAVKVLGANGSGSVSGIAQGLEWAATNNMHIANMSLGSDFPSSTLERAVNYATSRDVLVIAATGNNGSGSVGYPARYANAMAVGATDQNNRRANFSQYGTGIDIVAPGVEVQSTYPGNRYVSMNGTSMATPHVAGAAALVKQRYPSWNATQIRNHLKNTATNLGNSSQFGSGLVNAEAATR

SEQ ID NO: 66105 - protein, 268 aa, Unidentified
QTVPWGITRVQAPAVHNRGITGSGVRVAILDSGISAHEDLNIRGGASFVPGEPTTADLNGHGTHVAGTVAALNNSIGVIGVAPNAELYAVKVLGANGSGSVSGIAQGLEWAATNNMHIANMSLGSDFPSSTLERAVNYATSRDVLVIAATGNNGSGSVGYPARYANAMAVGATDQNNRRANFSQYGTGIDIVAPGVNVQSTYPGNRYVSMNGTSMATPHVAGAAALVKQRYPSWNATQIRNHLKNTATNLGNSSQFGSGLVNAAAATR

SEQ ID NO: 66106 - protein, 268 aa, Unidentified
QTVPWGITRVQAPVVHNRGITGSGVRVAILDSGISAHEDLNIRGGASFVPGEPTTADLNGHGTHVAGTVAALNNSIGVIGVAPNAELYAVKVLGANGSGSVSGIAQGLEWAATNNMHIANMSLGSDFPSSTLERAVNYATSRDVLVIAATGNNGSGSVGYPARYANAMAVGATDQNNRRANFSQYGTGIDIVAPGVNVQSTYPGNRYVSMNGTSMATPHVAGAAALVKQRYPSWNATQIRNHLKNTATNLGNSSQFGSGLVNAEAATR

SEQ ID NO: 66107 - protein, 268 aa, Bacillus gibsonii
QTVPWGITRVQAPAVHNRGITGSGVRVAILDSGISAHSDLNIRGGASFVPGEPTTADLNGHGTHVAGTVAALNNSIGVIGVAPNAELYAVKVLGANGSGSVSGIAQGLEWAATNNMHIANMSLGSDFPSSTLERAVNYATSRDVLVIAATGNNGSGSVGYPARYANAMAVGATDQNNRRANFSQYGTGIDIVAPGVNVXSTYPGNRYVSMNGTSMATPHVAGAAALVKQRYPSWNATQIRNHLKNTATNLGNSSQFGSGLVNAEAATR

SEQ ID NO: 66108 - protein, 268 aa, Unidentified
QTVPWGITRVQAPAVHNRGITGSGVRVAILDSGISAHEDLNIRGGASFVPGEPTTADLNGHGTHVAGTVAALNNSIGVIGVAPNAELYAVKVLGANGSGSVSGIAQGLEWAATNNMHIANMSLGSDFPSSTLERAVNYAESRDVLVIAATGNNGSGSVGYPARYANAMAVGATDQNNRRANFSQYGTGIDIVAPGVNVQSTYPGNRYVSMNGTSMATPHVAGAAALVKQRYPSWNATQIRNHLKNTATNLGNSSQFGSGLVNAEAATR

SEQ ID NO: 66109 - protein, 268 aa, Unidentified
QTVPWGITRVQAPAVHNRGITGSGVRVAILDSGISAHEDLNIRGGASFVPGEPTTADLNGHGTHVAGTVAALNNSIGVIGVAPNAELYAVKVLGANGSGSVSGVAQGLEWAATNNMHIANMSLGSDFPSSTLERAVNYATSRDVLVIAATGNNGSGSVGYPARYANAMAVGATDQNNRRANFSQYGTGIDIVAPGVNVQSTYPGNRYVSMNGTSMATPHVAGAAALVKQRYPSWNATQIRNHLKNTATNLGNSSQFGSGLVNAEAATR

SEQ ID NO: 66110 - protein, 268 aa, Unidentified
QTVPWGITRVQAPAVHNRGITGSGVRVAILDSGISAHEDLNIRGGASFVPGEPTTADLNGHGTHVAGTVAALNNSIGVIGVAPNAELYAVKVLGANGSGSVSGIAMGLEWAATNNMHIANMSLGSDFPSSTLERAVNYATSRDVLVIAATGNNGSGSVGYPARYANAMAVGATDQNNRRANFSQYGTGIDIVAPGVNVQSTYPGNRYVSMNGTSMATPHVAGAAALVKQRYPSWNATQIRNHLKNTATNLGNSSQFGSGLVNAEAATR

SEQ ID NO: 66111 - protein, 268 aa, Unidentified
QTVPWGITRVQAPAVHNRGITGSGVRVAILDSGISTHEDLNVRGGVSFVPGEPTTADLNGHGTHVAGTVAALNNSIGVIGVAPNAELYAVKVLGANGSGSVSGIAQGLEWAATNNMHIANMSLGSDFPSSTLERAVNYATSRDVLVIAATGNNGSGSVGYPARYANAMAVGATDQNNRRANFSQYGTGIDIVAPGVNVQSTYPGNRYVSMNGTSMATPHVAGAAALVKQRYPSWNATQIRNHLKNTATNLGNSSQFGSGLVNAEAATR

SEQ ID NO: 66112 - protein, 268 aa, Unidentified
QTVPWGITRVQAPAVHNRGITGSGVRVAILDSGISAHEDLNIRGGASFVPGEPTTADLNGHGTHVAGTVAALNNSIGVIGVAPNAELYAVKVLGANGSGSVSGIAQGLEWAATNNMHIANMSLGSDFPSSTMERAVNYATSRDVLVIAATGNNGSGSVGYPARYANAMAVGATDQNNRRANFSQYGTGIDIVAPGVNVQSTYPGNRYVSMNGTSMATPHVAGAAALVKQRYPSWNATQIRNHLKNTATNLGNSSQFGSGLVNAEAATR

SEQ ID NO: 66113 - protein, 268 aa, Unidentified
QTVPWGITRVQAPAVHNRGVTGSGVRVAILDSGISTHSDLTIRGGASFVPGEPTTADLNGHGTHVAGTVAALNNSIGVIGVAPSADLYAVKVLGANGRGSVSGIAQGLEWAAANNMHIANMSLGSDAPSTTLERAVNYATSQGVLVIAATGNNGSGSVGYPARYANAMAVGATDQNNRRANFSQYGTGIDIVAPGVNVQSTYPGNRYVSMNGTSMATPHVAGAAALVKQRYPSWNATQIRNHLKNTATNLGNSSQFGSGLVNAEAATR

SEQ ID NO: 66114 - protein, 268 aa, Unidentified
QTVPWGITRVQAPAVHNRGITGSGVRVAILDSGISAHEDLNIRGGASFVPGEPTTADLNGHGTHVAGTVAALNNSIGVIGVAPNAELYAVKVLGANGSGSVSGIAQGLEWAATNNMHIANMSLGSDFPSSTLERAVNYATSRDVLVIAATGNNGSGSVGYPARYANAMAVGATDQNNRRANFSQYGTGIDIVAPGVNVQSTYPGNRYVSMNGTSMATPHVAGAAALVKQRYPSWNATQIRQHLKNTATNLGNSSQFGSGLVNAEAATR

SEQ ID NO: 66115 - protein, 268 aa, Unidentified
QTVPWGITRVQAPAVHNRGITGSGVRVAILDSGISAHSDLNIRGGASFVPGEPTTADLNGHGTHVAGTVAALNNSIGVIGVAPNAELYAVKVLGANGSGSVSGIAQGLEWAATNNMHIANMSLGSDFPSSTLERAVNYATSRDVLVIAATGNNGSSSVGYPARYANAMAVGATDQNNRRANFSQYGTGIDIVAPGVNVQSTYPGNRYVSMNGTSMATPHVAGAAALVKQRYPSWNATQIRNHLKNTATNLGNSSQFGSGLVNAEAATR

SEQ ID NO: 66116 - protein, 268 aa, Unidentified
QTVPWGITRVQAPAVHNRGITGSGVRVAILDSGISAHSDLNIRGGASFVPGEPTTADLNGHGTHVAGTVAALNNSIGVIGVAPNAELYAVKVLGANGSGSVSGIAQGLEWAATNNMHIANMSLGSDFPSSTLERAVNYATSRDVLVIAATGNNGSGSVGYPARYANAMAVGATDQNNRRANFSQYGTGIDIVAPGVNVQSTYPGNRYVSMNGTSMATPHVAGAAALVKQRYPSWNATQIRNHLKNTITNLGNSSQFGSGLVNAEAATR

SEQ ID NO: 66117 - protein, 268 aa, Unidentified
QTVPWGITRVQAPAVHNRGITGSGVRVAILDSGISAHEDLNIRGGASFVPGEPTTADLNGHGTHVAGTVAALNNSIGVIGVAPNAELYAVKVLGANGSGSVSGIAQGLEWAATNNMHIANMSLGSDFPSSTLERAVNYATSRDVLVIAATGNNGSGSVGYPARYANAMAVGATDQLNRRANFSQYGTGIDIVAPGVNVQSTYPGNRYVSMNGTSMATPHVAGAAALVKQRYPSWNATQIRNHLKNTATNLGNSSQFGSGLVNAEAATR

SEQ ID NO: 66118 - protein, 268 aa, Unidentified
QTVPWGITRVQAPAVHNRGITGSGVRVAILDSGISAHEDLNIRGGNSFVPGEPTTADLNGHGTHVAGTVAALNNSIGVIGVAPNAELYAVKVLGANGSGSVSGIAQGLEWAATNNMHIANMSLGSDFPSSTLERAVNYATSRDVLVIAATGNNGSGSVGYPARYANAMAVGATDQNNRRANFSQYGTGIDIVAPGVNVQSTYPGNRYVSMNGTSMATPHVAGAAALVKQRYPSWNATQIRNHLKNTATNLGNSSQFGSGLVNAEAATR

SEQ ID NO: 66119 - protein, 268 aa, Unidentified
QTVPWGITRVQAPAVHDRGITGSGVRVAILDSGISAHEDLNIRGGASFVPGEPTTADLNGHGTHVAGTVAALNNSIGVIGVAPNAELYAVKVLGANGSGSVSGIAQGLEWAATNNMHIANMSLGSDFPSSTLERAVNYATSRDVLVIAATGNNGSGSVGYPARYANAMAVGATDQNNRRANFSQYGTGIDIVAPGVNVQSTYPGNRYVSMNGTSMATPHVAGAAALVKQRYPSWNATQIRNHLKNTATNLGNSSQFGSGLVNAEAATR

SEQ ID NO: 66120 - protein, 268 aa, Unidentified
QTVPWGITRVQAPAVHNRGITGSGVRVAILDSGISAHEDLNIRGGASFVPGEPTTADLNGHGTHVAGTVAALNNSIGVIGVAPNAELYAVKVLGANGSGSVSGIAQGLEWAATNNMHIANMSLGSDFPSSTLERAVNYATSRDVLVIAATGNNGSGSVGYPARYANAMAVGATDQNNRRANFSQYGTGIDIVAPGVNVQSTYPGNRYVSMNGTSMATPHVAGAAALVKQRYPSWNATQIRNHLKNTATNLGNSSQFGMGLVNAEAATR

SEQ ID NO: 66121 - protein, 268 aa, Unidentified
QTVPWGITRVQAPAVHNRGITGSGVRVAILDSGISAHSDLNIRGGASFVPGEPTTADLNGHGTHVAGTVAALNNSIGVIGVAPNAELYAVKVLGANGSGSVSGIAQGLEWAATNNMHIANMSLGSDFKSSTLERAVNYATSRDVLVIAATGNNGSGSVGYPARYANAMAVGATDQNNRRANFSQYGTGIDIVAPGVNVQSTYPGNRYVSMNGTSMATPHVAGAAALVKQRYPSWNATQIRNHLKNTATNLGNSSQFGSGLVNAEAATR

SEQ ID NO: 66122 - protein, 268 aa, Unidentified
QTVPWGITRVQAPAVHNRGITGSGVRVAILDSGISAHEDLNIRGGASFVPGEPTTADLNGHGTHVAGTVAALNNSIGVIGVAPNAELYAVKVLGANGSGSVSGIAQGLEWAATNNMHIANMSLGSDFPSSTLERAVNYATSRDVLVIAATGNNGSGSVGYPARYANAMAVGATDQNNRRANFSQYGTGIDIVAPGVNVQSTYPGNRYVSMNGTSMATPHVAGAAALVKQRYPSWNATLIRNHLKNTATNLGNSSQFGSGLVNAEAATR

SEQ ID NO: 66123 - protein, 268 aa, Unidentified
QTVPWGITRVQAPAVHNRGITGSGVRVAILDSGISAHEDLNIRGGASFVPGEPTTADLNGHGTHVAGTVAALNNSIGVIGVAPNAELYAVKVLGANGSGSVSGIAQGLEWAATNNMHIANMSLGSDFPSSTLERAVNYATSRDVLVIAATGNNGSGSVGYPARYANAMAVGATDQNNRRANFSQYGTGIDIVAPGVNVVSTYPGNRYVSMNGTSMATPHVAGAAALVKQRYPSWNATQIRNHLKNTATNLGNSSQFGSGLVNAEAATR

SEQ ID NO: 66124 - protein, 268 aa, Unidentified
QTVPWGITRVQAPAVHNRGITGSGVRVAILDSGISAHEDLNIRGGASFVPGEPTTADLNGHGTHVAGTVAALNNSIGVIGVAPNAELYAVKVLGANGSGSVSGIAQGLEWAATNNMHIANMSLGSDFPSSTLERAVNYATSRDVLVIAATGNNGSGFVGYPARYANAMAVGATDQNNRRANFSQYGTGIDIVAPGVNVQSTYPGNRYVSMNGTSMATPHVAGAAALVKQRYPSWNATQIRNHLKNTATNLGNSSQFGSGLVNAEAATR

SEQ ID NO: 66125 - protein, 268 aa, Unidentified
QTVPWGITRVQAPAVHNRGITGSGVRVAILDSGISAHSDLNIRGGASFVPGEPTTADLNGHGTHVAGTVAALNNSIGVIGVAPNAELAAVKVLGANGSGSVSGIAQGLEWAATNNMHIANMSLGSDFPSSTLERAVNYATSRDVLVIAATGNNGSGSVGYPARYANAMAVGATDQNNRRANFSQYGTGIDIVAPGVNVQSTYPGNRYVSMNGTSMATPHVAGAAALVKQRYPSWNATQIRNHLKNTATNLGNSSQFGSGLVNAEAATR

SEQ ID NO: 66126 - protein, 268 aa, Unidentified
QTVPWGITRVQAPAVHNRGITGSGVRVAILDSGISAHEDLNIRGGASFVPGEPTTADLNGHGTHVAGTVAALNNSIGVIGVAPNAELYAVKVLGANGSGSVSGIAQGLEWAATNNMHIANMSLGSDFPSSTLERAVNYATSRDVLVIAATGNNGSGSVGYPARYANAMAVGATDQNNRRANFSQYGTGIDIVAPGVNVQSTYPGNRYVDMNGTSMATPHVAGAAALVKQRYPSWNATQIRNHLKNTATNLGNSSQFGSGLVNAEAATR

SEQ ID NO: 66127 - protein, 268 aa, Unidentified
QTVPWGITRVQAPAVHNRGITGSGVRVAILDSGISAHSDLNIRGGASFVPGEPTTADLNGHGTHVAGTVAALNNSIGVIGVAPNAELYAVKVLGANGSGSVSGIAQGLEWAATNNMHIANMSLGSDFPVSTLERAVNYATSRDVLVIAATGNNGSGSVGYPARYANAMAVGATDQNNRRANFSQYGTGIDIVAPGVNVQSTYPGNRYVSMNGTSMATPHVAGAAALVKQRYPSWNATQIRNHLKNTATNLGNSSQFGSGLVNAEAATR

SEQ ID NO: 66128 - protein, 268 aa, Unidentified
QTVPWGITRVQAPAVHNRGITGSGVRVAILDSGISAHEDLNIRGGASFVPGEPTTADLNGHGTHVAGTVAALNNSIGVIGVAPNAELYAVKVLGANGSGSVSGIAQGLEWAATNNMHIANMSLGSDFASSTLERAVNYATSRDVLVIAATGNNGSGSVGYPARYANAMAVGATDQNNRRANFSQYGTGIDIVAPGVNVQSTYPGNRYVSMNGTSMATPHVAGAAALVKQRYPSWNATQIRNHLKNTATNLGNSSQFGSGLVNAEAATR

SEQ ID NO: 66129 - protein, 268 aa, Unidentified
QTVPWGITRVQAPAVHNRGITGSGVRVAILDSGISAHSDLNIRGGASFVPGEPTTADLNGHGTHVAGTVAALNNSIGVIGVAPNARLYAVKVLGANGSGSVSGIAQGLEWAATNNMHIANMSLGSDFPSSTLERAVNYATSRDVLVIAATGNNGSGSVGYPARYANAMAVGATDQNNRRANFSQYGTGIDIVAPGVNVQSTYPGNRYVSMNGTSMATPHVAGAAALVKQRYPSWNATQIRNHLKNTATNLGNSSQFGSGLVNAEAATR

SEQ ID NO: 66130 - protein, 268 aa, Unidentified
QTVPWGITRVWAPAVHNRGITGSGVRVAILDSGISAHEDLNIRGGASFVPGEPTTADLNGHGTHVAGTVAALNNSIGVIGVAPNAELYAVKVLGANGSGSVSGIAQGLEWAATNNMHIANMSLGSDFPSSTLERAVNYATSRDVLVIAATGNNGSGSVGYPARYANAMAVGATDQNNRRANFSQYGTGIDIVAPGVNVQSTYPGNRYVSMNGTSMATPHVAGAAALVKQRYPSWNATQIRNHLKNTATNLGNSSQFGSGLVNAEAATR

SEQ ID NO: 66131 - protein, 268 aa, Unidentified
QTVPWGITRVQAPAVHNRGITGSGVRVAILDSGISAHEDLNIRGGASFVPGEPTTADLNGHGTHVAGTVAALNNSIGVIGVAPNAELYAVKVLGANGSGSVSGIAQGLEWAATNNMHIANMSLGSDFPSSTLERAVNYATSRDVLVIAATGNNGSGSVGYPARYANAMAVGATDQNNRRANFSQFGTGIDIVAPGVNVQSTYPGNRYVSMNGTSMATPHVAGAAALVKQRYPSWNATQIRNHLKNTATNLGNSSQFGSGLVNAEAATR

SEQ ID NO: 66132 - protein, 268 aa, Unidentified
QTVPWGITRVQAPAVHNRGITGSGVRVAILDSGISAHEDLNIRGGASFVPGEPTTADLNGHGTHVAGTVAALNNSIGVIGVAPNAELYAVKVLGANGSGSVSGIAQGLEWAATNNMHIANMSLGSDFPSSTLERAVNYATSRDVLVIAATGNNGSGSVGYPARYANAMAVGATDQNNRRANFSQYGTGIDIVAPGVNVQSTYPGNRYVSMNGTSMATPHVAGAAALVKQRYPSWNATQIRTHLKNTATNLGNSSQFGSGLVNAEAATR

SEQ ID NO: 66133 - protein, 268 aa, Unidentified
QTVPWGITRVQAPAVHNRGITGSGVRVAILDSGISAHEDLNIRGGASFVPGEPTTADLNGHGTHVAGTVAALNNSIGVIGVAPNAELYAVKVLGANGSGSVSGIAQGLEWAATNNMHIANMSLGSDFPSSTLERAVNYATSRDVLVIAATGNNGSGSVGYPARYANAMAVGATDQNNRRANFSQYGTGIDIVAPGVNVQSTYPGNRYVSMNGTSMATPHVAGAAALVKQRYPSWNATQIRNHLKNTATNLGNSSQFGEGLVNAEAATR

SEQ ID NO: 66134 - protein, 268 aa, Unidentified
QTVPWGITRVQAPAVHNRGITGSGVRVAILDSGISAHSDLNIRGGASFVPGEPTTADLNGHGTHVAGTVAALNNSIGVIGLAPNAELYAVKVLGANGSGSVSGIAQGLEWAATNNMHIANMSLGSDFPSSTLERAVNYATSRDVLVIAATGNNGSGSVGYPARYANAMAVGATDQNNRRANFSQYGTGIDIVAPGVNVQSTYPGNRYVSMNGTSMATPHVAGAAALVKQRYPSWNATQIRNHLKNTATNLGNSSQFGSGLVNAEAATR

SEQ ID NO: 66135 - protein, 268 aa, Unidentified
QTVPWGITRVQAPAVHNRGITGSGVRVAILDSGISAHEDLNISGGASFVPGEPTTADLNGHGTHVAGTVAALNNSIGVIGVAPNAELYAVKVLGANGSGSVSGIAQGLEWAATNNMHIANMSLGSDFPSSTLERAVNYATSRDVLVIAATGNNGSGSVGYPARYANAMAVGATDQNNRRANFSQYGTGIDIVAPGVNVQSTYPGNRYVSMNGTSMATPHVAGAAALVKQRYPSWNATQIRNHLKNTATNLGNSSQFGSGLVNAEAATR

SEQ ID NO: 66136 - protein, 268 aa, Unidentified
QTVPWGITRVQAPAVHNRGITGSGVRVAILDSGIQAHEDLNIRGGASFVPGEPTTADLNGHGTHVAGTVAALNNSIGVIGVAPNAELYAVKVLGANGSGSVSGIAQGLEWAATNNMHIANMSLGSDFPSSTLERAVNYATSRDVLVIAATGNNGSGSVGYPARYANAMAVGATDQNNRRANFSQYGTGIDIVAPGVNVQSTYPGNRYVSMNGTSMATPHVAGAAALVKQRYPSWNATQIRNHLKNTATNLGNSSQFGSGLVNAEAATR

SEQ ID NO: 66137 - protein, 268 aa, Unidentified
QTVPWGITRVQAPAVHNRGITGSGVRVAILDSGISAHSDLNIRGGASFVPGEPTTADLNGHGTHVAGTVAALNNSIGVIGVAPNAELYAVKVLGANGMGSVSGIAQGLEWAATNNMHIANMSLGSDFPSSTLERAVNYATSRDVLVIAATGNNGSGSVGYPARYANAMAVGATDQNNRRANFSQYGTGIDIVAPGVNVQSTYPGNRYVSMNGTSMATPHVAGAAALVKQRYPSWNATQIRNHLKNTATNLGNSSQFGSGLVNAEAATR

SEQ ID NO: 66138 - protein, 268 aa, Unidentified
QTVPWGITRVQAPAVHNRGITGSGVRVAILDSGISAHSDLNIRGGASFVPGEPTTADLNGHGTHVAGTVAALNNSIGVIGVAPNAELYAVKVLGANGRGSVSGIAQGLEWAATNNMHIANMSLGSDFPSSTLERAVNYATSRDVLVIAATGNNGSGSVGYPARYANAMAVGATDQNNRRANFSQYGTGIDIVAPGVNVQSTYPGNRYVSMNGTSMATPHVAGAAALVKQRYPSWNATQIRNHLKNTATNLGNSSQFGSGLVNAEAATR

SEQ ID NO: 66139 - protein, 268 aa, Unidentified
QTVPWGITRVQAPAVHNRGITGSGVRVAILDSGISAHEDLNIGGGASFVPGEPTTADLNGHGTHVAGTVAALNNSIGVIGVAPNAELYAVKVLGANGSGSVSGIAQGLEWAATNNMHIANMSLGSDFPSSTLERAVNYATSRDVLVIAATGNNGSGSVGYPARYANAMAVGATDQNNRRANFSQYGTGIDIVAPGVNVQSTYPGNRYVSMNGTSMATPHVAGAAALVKQRYPSWNATQIRNHLKNTATNLGNSSQFGSGLVNAEAATR

SEQ ID NO: 66140 - protein, 268 aa, Unidentified
QTVPWGITRVQAPAVHNRGITGSGVRVAILDSGISAHEDLNIRGGASFVPGEPTTADLNGHGTHVAGTVAALNNSIGVIGVAPNAELYAVKVLGANGSGSVSGIAQGLEWAATNNMHIANMSLGSDFHSSTLERAVNYATSRDVLVIAATGNNGSGSVGYPARYANAMAVGATDQNNRRANFSQYGTGIDIVAPGVNVQSTYPGNRYVSMNGTSMATPHVAGAAALVKQRYPSWNATQIRNHLKNTATNLGNSSQFGSGLVNAEAATR

SEQ ID NO: 66141 - protein, 268 aa, Unidentified
QTVPWGITRVQAPAVHNRGITGSGVRVAILDSGISAMSDLNIRGGASFVPGEPTTADLNGHGTHVAGTVAALNNSIGVIGVAPNAELYAVKVLGANGSGSVSGIAQGLEWAATNNMHIANMSLGSDFPSSTLERAVNYATSRDVLVIAATGNNGSGSVGYPARYANAMAVGATDQNNRRANFSQYGTGIDIVAPGVNVQSTYPGNRYVSMNGTSMATPHVAGAAALVKQRYPSWNATQIRNHLKNTATNLGNSSQFGSGLVNAEAATR

SEQ ID NO: 66142 - protein, 268 aa, Unidentified
QTVPWGITRVQAPAVHNRGITGSGVRVAILDSGISAHEDLNIRGGASFVPGEPTTADLNGHGTHVAGTVAALNNSIGVIGVAPNAELYAVKVLGANGSGSVSGIAQGLEWAATNNMHIANMSLGSDFPSSTLERAVNYATSRDVLVIAATGNNGSGLVGYPARYANAMAVGATDQNNRRANFSQYGTGIDIVAPGVNVQSTYPGNRYVSMNGTSMATPHVAGAAALVKQRYPSWNATQIRNHLKNTATNLGNSSQFGSGLVNAEAATR

SEQ ID NO: 66143 - protein, 268 aa, Unidentified
QTVPWGITRVQAPAVHNRGITGSGVRVAILDSGISAHSDLNIRGGASFVPGEPTTADLNGHGTHVAGTVAALNNSIGVIGVAPNAELTAVKVLGANGSGSVSGIAQGLEWAATNNMHIANMSLGSDFPSSTLERAVNYATSRDVLVIAATGNNGSGSVGYPARYANAMAVGATDQNNRRANFSQYGTGIDIVAPGVNVQSTYPGNRYVSMNGTSMATPHVAGAAALVKQRYPSWNATQIRNHLKNTATNLGNSSQFGSGLVNAEAATR

SEQ ID NO: 66144 - protein, 268 aa, Unidentified
QTVPWGITRVQAPAVHNRGITGSGVRVAILDSGISTHEDLNVRGGVSFVPGEPTYADLNGHGTHVAGTVAALNNSIGVVGVAPSADLYAVKVLGANGRGSVSGIAQGLEWAAQNNMHVANMSLGTDAPSSTLERAVNYATSRDVLVIAATGNNGSGTISYPARYANAMAVGATDQNNRRANFSQYGTGIDIVAPGVNVQSTYPGNRYVSMNGTSMATPHVAGAAALVKQRYPSWNATQIRNHLKNTATNLGNSSQYGSGLVNAEAATR

SEQ ID NO: 66145 - protein, 268 aa, Unidentified
QTVPWGITRVQAPAVHNLGITGSGVRVAILDSGISAHEDLNIRGGASFVPGEPTTADLNGHGTHVAGTVAALNNSIGVIGVAPNAELYAVKVLGANGSGSVSGIAQGLEWAATNNMHIANMSLGSDFPSSTLERAVNYATSRDVLVIAATGNNGSGSVGYPARYANAMAVGATDQNNRRANFSQYGTGIDIVAPGVNVQSTYPGNRYVSMNGTSMATPHVAGAAALVKQRYPSWNATQIRNHLKNTATNLGNSSQFGSGLVNAEAATR

SEQ ID NO: 66146 - protein, 268 aa, Unidentified
QTVPWGITRVQAPAVHNRGITGSGVRVAILDSGISAHEDLNIRGGRSFVPGEPTTADLNGHGTHVAGTVAALNNSIGVIGVAPNAELYAVKVLGANGSGSVSGIAQGLEWAATNNMHIANMSLGSDFPSSTLERAVNYATSRDVLVIAATGNNGSGSVGYPARYANAMAVGATDQNNRRANFSQYGTGIDIVAPGVNVQSTYPGNRYVSMNGTSMATPHVAGAAALVKQRYPSWNATQIRNHLKNTATNLGNSSQFGSGLVNAEAATR

SEQ ID NO: 66147 - protein, 268 aa, Unidentified
QTVPWGITRVQAPAVHNRGITGSGVRVAILDSGISAHSDLNIRGGASFVPGEPTTADLNGHGTHVAGTVAALNNSIGVIGPAPNAELYAVKVLGANGSGSVSGIAQGLEWAATNNMHIANMSLGSDFPSSTLERAVNYATSRDVLVIAATGNNGSGSVGYPARYANAMAVGATDQNNRRANFSQYGTGIDIVAPGVNVQSTYPGNRYVSMNGTSMATPHVAGAAALVKQRYPSWNATQIRNHLKNTATNLGNSSQFGSGLVNAEAATR

SEQ ID NO: 66148 - protein, 268 aa, Unidentified
QTVPWGITRVQAPAVHNRGITGSGVRVAILDSGISAHSDLNIRGGASFVPGEPTTADLNGHGTHVAGTVAALNNTIGVIGVAPNAELYAVKVLGANGSGSVSGIAQGLEWAATNNMHIANMSLGSDFPSSTLERAVNYATSRDVLVIAATGNNGSGSVGYPARYANAMAVGATDQNNRRANFSQYGTGIDIVAPGVNVQSTYPGNRYVSMNGTSMATPHVAGAAALVKQRYPSWNATQIRNHLKNTATNLGNSSQFGSGLVNAEAATR

SEQ ID NO: 66149 - protein, 268 aa, Unidentified
QTVPWGITRVGAPAVHNRGITGSGVRVAILDSGISAHEDLNIRGGASFVPGEPTTADLNGHGTHVAGTVAALNNSIGVIGVAPNAELYAVKVLGANGSGSVSGIAQGLEWAATNNMHIANMSLGSDFPSSTLERAVNYATSRDVLVIAATGNNGSGSVGYPARYANAMAVGATDQNNRRANFSQYGTGIDIVAPGVNVQSTYPGNRYVSMNGTSMATPHVAGAAALVKQRYPSWNATQIRNHLKNTATNLGNSSQFGSGLVNAEAATR

SEQ ID NO: 66150 - protein, 268 aa, Unidentified
QTVPWGITRVQAPAVHNRGITGSGVRVAILDSGISAHEDLNIRGGASFVPGEPTTADLNGHGTHVAGTVAALNNSIGVIGVAPNAELYAVKVLGANGSGSVSGIAQGLEWAATNNMHIANMSLGSDFPSSTLERAVNYATSRDVLVIAATGNNGSGSVGYPARYANAMAVGATDQNNRRANFSQYGTGIDIVAPGVNVQSTYPGNRYVSMNGTSMATPHVAGAAALVKQRYPSWNATQIRNHLKNTATNLGNSSQFGSGLVQAEAATR

SEQ ID NO: 66151 - protein, 268 aa, Unidentified
QTVPWGITRVQAPAVHNRGITGSGVRVAILDSGISAHEDLNIRGGASFVPGEPTTADLNGHGTHVAGTVAALNNSIGVIGVAPNAELYAVKVLGANGSGSVSGIAQGLEWAATNNMHIANMSLGSDFPSSTLERAVNYATSRDVLVIAATGNNGSGSVGYPARYANAMAVGATDQNNRRANFSQYGTGIDIVAPGVNVQSTYPGNRYVSMNGTSMATPHVAGAAALVKQRYPSWNATQIRNHLKNQATNLGNSSQFGSGLVNAEAATR

SEQ ID NO: 66152 - protein, 268 aa, Unidentified
QTVPWGITRVQAPAVHNRGITGSGVRVAILDSGISAHEDLNIWGGASFVPGEPTTADLNGHGTHVAGTVAALNNSIGVIGVAPNAELYAVKVLGANGSGSVSGIAQGLEWAATNNMHIANMSLGSDFPSSTLERAVNYATSRDVLVIAATGNNGSGSVGYPARYANAMAVGATDQNNRRANFSQYGTGIDIVAPGVNVQSTYPGNRYVSMNGTSMATPHVAGAAALVKQRYPSWNATQIRNHLKNTATNLGNSSQFGSGLVNAEAATR

SEQ ID NO: 66153 - protein, 268 aa, Unidentified
QTVPWGITRVQAPAVHNRGITGSGVRVAILDSGISAHEDLNIRGGASFVPLEPTTADLNGHGTHVAGTVAALNNSIGVIGVAPNAELYAVKVLGANGSGSVSGIAQGLEWAATNNMHIANMSLGSDFPSSTLERAVNYATSRDVLVIAATGNNGSGSVGYPARYANAMAVGATDQNNRRANFSQYGTGIDIVAPGVNVQSTYPGNRYVSMNGTSMATPHVAGAAALVKQRYPSWNATQIRNHLKNTATNLGNSSQFGSGLVNAEAATR

SEQ ID NO: 66154 - protein, 268 aa, Unidentified
QTVPWGITRVQAPAVHNRGITGSGVRVAILDSGISAHEDLNIRGGASFVPGEPTTADLNGHGTHVAGTVAALNNSIGVIGVAPNAELYAVKVLGANGSGSVSGIAQGLEWAATNNMHIANMSLGSDFPSSTLERAVNYATSRDVLVIAATGNNGSGSVGYPARYANAMAVGATDQNNRRANFSQYGTGIDIVAPGVNVQSTYPGNRYVYMNGTSMATPHVAGAAALVKQRYPSWNATQIRNHLKNTATNLGNSSQFGSGLVNAEAATR

SEQ ID NO: 66155 - protein, 268 aa, Unidentified
QTVPWGITRVQAPAVHNRGITGSGVRVAILDSGISAHSDLNIRGGASFVPGEPTTADLNGHGTHVAGTVAALNNSIGVIGVAPNAELYAVKVLGANGSGSVSGIAQGLEWAATNNMHIANMSLGSDFPWSTLERAVNYATSRDVLVIAATGNNGSGSVGYPARYANAMAVGATDQNNRRANFSQYGTGIDIVAPGVNVQSTYPGNRYVSMNGTSMATPHVAGAAALVKQRYPSWNATQIRNHLKNTATNLGNSSQFGSGLVNAEAATR

SEQ ID NO: 66156 - protein, 268 aa, Unidentified
QTVPWGITNVQAPAVHNRGITGSGVRVAILDSGISAHEDLNIRGGASFVPGEPTTADLNGHGTHVAGTVAALNNSIGVIGVAPNAELYAVKVLGANGSGSVSGIAQGLEWAATNNMHIANMSLGSDFPSSTLERAVNYATSRDVLVIAATGNNGSGSVGYPARYANAMAVGATDQNNRRANFSQYGTGIDIVAPGVNVQSTYPGNRYVSMNGTSMATPHVAGAAALVKQRYPSWNATQIRNHLKNTATNLGNSSQFGSGLVNAEAATR

SEQ ID NO: 66157 - protein, 268 aa, Unidentified
QTVPWGITRVQAPAVHNRGITGSGVRVAILDSGISAHEDLNIRGGASFVPGETTTADLNGHGTHVAGTVAALNNSIGVIGVAPNAELYAVKVLGANGSGSVSGIAQGLEWAATNNMHIANMSLGSDFPSSTLERAVNYATSRDVLVIAATGNNGSGSVGYPARYANAMAVGATDQNNRRANFSQYGTGIDIVAPGVNVQSTYPGNRYVSMNGTSMATPHVAGAAALVKQRYPSWNATQIRNHLKNTATNLGNSSQFGSGLVNAEAATR

SEQ ID NO: 66158 - protein, 268 aa, Unidentified
QTVPWGITRVQAPAVHNRGITGSGVRVAILDSGISAHSDLNIRGGASFVPGEPTTADLNGHGTHVAGTVAALNNSIGVIGVAPNAELYAVKVLGANGSGSVSGIAQGLEWAATNNMHIANMSLGSDSPSSTLERAVNYATSRDVLVIAATGNNGSGSVGYPARYANAMAVGATDQNNRRANFSQYGTGIDIVAPGVNVQSTYPGNRYVSMNGTSMLSPHVAGAAALVKQRYPSWNATQIRNHLKNTATNLGNSSQFGSGLVNAEAATR

SEQ ID NO: 66159 - protein, 268 aa, Unidentified
QTVPWGITRVQAPAVHNRGITGSGVRVAILDSGISAHEDLNIFGGASFVPGEPTTADLNGHGTHVAGTVAALNNSIGVIGVAPNAELYAVKVLGANGSGSVSGIAQGLEWAATNNMHIANMSLGSDFPSSTLERAVNYATSRDVLVIAATGNNGSGSVGYPARYANAMAVGATDQNNRRANFSQYGTGIDIVAPGVNVQSTYPGNRYVSMNGTSMATPHVAGAAALVKQRYPSWNATQIRNHLKNTATNLGNSSQFGSGLVNAEAATR

SEQ ID NO: 66160 - protein, 268 aa, Unidentified
QTVPWGITRVQAPAVHNRGITGSGVRVAILDSGISAHSDLNIRGGASFVPGEPTTADLNGHGTHVAGTVAALNNSIGVIGVAPNAELEAVKVLGANGSGSVSGIAQGLEWAATNNMHIANMSLGSDFPSSTLERAVNYATSRDVLVIAATGNNGSGSVGYPARYANAMAVGATDQNNRRANFSQYGTGIDIVAPGVNVQSTYPGNRYVSMNGTSMATPHVAGAAALVKQRYPSWNATQIRNHLKNTATNLGNSSQFGSGLVNAEAATR

SEQ ID NO: 66161 - protein, 268 aa, Unidentified
QTVPWGITRVQAPAVHNRGITGSGVRVAILDSGISAHSYLNIRGGASFVPGEPTTADLNGHGTHVAGTVAALNNSIGVIGVAPNAELYAVKVLGANGSGSVSGIAQGLEWAATNNMHIANMSLGSDFPSSTLERAVNYATSRDVLVIAATGNNGSGSVGYPARYANAMAVGATDQNNRRANFSQYGTGIDIVAPGVNVQSTYPGNRYVSMNGTSMATPHVAGAAALVKQRYPSWNATQIRNHLKNTATNLGNSSQFGSGLVNAEAATR

SEQ ID NO: 66162 - protein, 268 aa, Unidentified
QTVPWGITRVQAPAVHNRGITGSGVRVAILDSGISAHEDLNIRGGASFVPGEPTTADLNGHGTHVAGTVAALNNSIGVIGVAPNAELYAVKVLGANGSGSVSGIAQGLEWAATNNMHIANMSLGSDFPSSTLERAVNYATSRDVLVIAATGNNGSGSVGYPARYANAMAVGATDQNNRRANFSQYGTGIDIVAPGVNVQSTYPGNRYVSMCGTSMATPHVAGAAALVKQRYPSWNATQIRNHLKNTATNLGNSSQFGSGLVNAEAATR

SEQ ID NO: 66163 - protein, 268 aa, Unidentified
QTVPWGITRVQAPAVHNRGITGSGVRVAILDSGISAHSDLNIRGGASFVPGEPTTACLNGHGTHVAGTVAALNNSIGVIGVAPNAELYAVKVLGANGSGSVSGIAQGLEWAATNNMHIANMSLGSDFPSSTLERAVNYATSRDVLVIAATGNNGSGSVGYPARYANAMAVGATDQNNRRANFSQYGTGIDIVAPGVNVQSTYPGNRYVSMNGTSMATPHVAGAAALVKQRYPSWNATQIRNHLKNTATNLGNSSQFGSGLVNAEAATR

SEQ ID NO: 66164 - protein, 268 aa, Unidentified
QTVPWGITRVQAPAVHNRGITGSGVRVAILDSGISAHEDLNIQGGASFVPGEPTTADLNGHGTHVAGTVAALNNSIGVIGVAPNAELYAVKVLGANGSGSVSGIAQGLEWAATNNMHIANMSLGSDFPSSTLERAVNYATSRDVLVIAATGNNGSGSVGYPARYANAMAVGATDQNNRRANFSQYGTGIDIVAPGVNVQSTYPGNRYVSMNGTSMATPHVAGAAALVKQRYPSWNATQIRNHLKNTATNLGNSSQFGSGLVNAEAATR

SEQ ID NO: 66165 - protein, 268 aa, Unidentified
QTVPWGITRVQAPAVHNRGITGSGVRVAILDSGISAHSDLNIRGGASFVPGEPTTADLNGHGTHVAGTVAALNNSIGVIGVAPNAELYAVKVLGANGSGSVSGIAQGLEWAATNNMHIANMSLGSDQPSSTLERAVNYATSRDVLVIAATGNNGSGSVGYPARYQNAMAVGATDQNNRRANFSQYGTGIDIVAPGVNVQSTYPGNRYVSMNGTSMATPHVAGAAALVKQRYPSWNATQIRNHLKNTATNLGNSSQFGSGLVNAEAATR

SEQ ID NO: 66166 - protein, 268 aa, Unidentified
QTVPWGITRVQAPAVHNRGITGSGVRVAILDSGISAHEDLNIRGGASFVPGEPTTADLNGHGTHVAGTVAALNNSIGVIGVAPNAELYAVKVLGANGSGSVSGIAQGLEWAATHNMHIANMSLGSDFPSSTLERAVNYATSRDVLVIAATGNNGSGSVGYPARYANAMAVGATDQNNRRANFSQYGTGIDIVAPGVNVQSTYPGNRYVSMNGTSMATPHVAGAAALVKQRYPSWNATQIRNHLKNTATNLGNSSQFGSGLVNAEAATR

SEQ ID NO: 66167 - protein, 268 aa, Unidentified
QTVPWGITRVQAPAVGNRGITGSGVRVAILDSGISAHEDLNIRGGASFVPGEPTTADLNGHGTHVAGTVAALNNSIGVIGVAPNAELYAVKVLGANGSGSVSGIAQGLEWAATNNMHIANMSLGSDFPSSTLERAVNYATSRDVLVIAATGNNGSGSVGYPARYANAMAVGATDQNNRRANFSQYGTGIDIVAPGVNVQSTYPGNRYVSMNGTSMATPHVAGAAALVKQRYPSWNATQIRNHLKNTATNLGNSSQFGSGLVNAEAATR

SEQ ID NO: 66168 - protein, 268 aa, Unidentified
QTVPWGITRVQAPAVHNRGITGSGVRVAILDSGISAHEDLNIRGGASFVPGEPTTADLNGHGTHVAGTVAALNNSIGVIGVAPNAELYAVKVLGANGSGSVSGIAQGLEWAATNNMHIANMSLGSDFPSSTLERAVNYATSRDVLVIAATGNNGSGSVGYPARYANAMAVGATDQNNRRANFSQYGTGIDIVAPGVNVYSTYPGNRYVSMNGTSMATPHVAGAAALVKQRYPSWNATQIRNHLKNTATNLGNSSQFGSGLVNAEAATR

SEQ ID NO: 66169 - protein, 268 aa, Unidentified
QTVPWGITRVQAPAVHNRGITGSGVRVAILDSGISAHEDLNIRGGASFVPGEPTTADLNGHGTHVAGTVAALNNSIGVIGVAPNAELYAVKVLGANGSGSVSGIAQGLEWAATNNMHIANMSLGSDFPSSTLERAVNYATSRDVLVIAATGNNGSGSVGYPARYANAMAVGATDQNNRRANFSQYGTGIDIVAPGVNVQSTYPGNRYVSMNGTSMATPHVAGAAALVKQRYPSWNATTIRNHLKNTATNLGNSSQFGSGLVNAEAATR

SEQ ID NO: 66170 - protein, 268 aa, Unidentified
QTVPWGITRVQAPAVHNRGITGSGVRVAILDSGISAHSDLNIRGGASFVPGEPTTADLNGHGTHVAGTVAALNNSIGVIGVAPNAELYAVKVLGANGSGSVSGIAQGLEWAATNNMHIANMSLGSDFPKSTLERAVNYATSRDVLVIAATGNNGSGSVGYPARYANAMAVGATDQNNRRANFSQYGTGIDIVAPGVNVQSTYPGNRYVSMNGTSMATPHVAGAAALVKQRYPSWNATQIRNHLKNTATNLGNSSQFGSGLVNAEAATR

SEQ ID NO: 66171 - protein, 268 aa, Unidentified
QTVPWGITRVQAPAVHNRGITGSGVRVAILDSGISAHEDLNIRGGASFVPGEPTTADLNGHGTHVAGTVAALNNSIGVIGVAPNAELYAVKVLGANGSGSVSGIAQGLEWAATNNMHIANMSLGSDFPSSTLERAVNYATSRDVLVIAATGNNGSGSVGYPARYANAMAVGATDQNNRRANFSQYGTGIDIVAPGVNVKSTYPGNRYVSMNGTSMATPHVAGAAALVKQRYPSWNATQIRNHLKNTATNLGNSSQFGSGLVNAEAATR

SEQ ID NO: 66172 - protein, 268 aa, Bacillus gibsonii
QTVPWGITRVQAPAVHNRGITGSGVRVAILDSGISAHSDLNIRGGASFVPGEPTTADLNGHGTHVAGTVAALNNSIGVIGVAPNAELYAVKVLGANGSGSXSGIAQGLEWAATNNMHIANMSLGSDFPSSTLERAVNYATSRDVLVIAATGNNGSGSVGYPARYANAMAVGATDQNNRRANFSQYGTGIDIVAPGVNVQSTYPGNRYVSMNGTSMATPHVAGAAALVKQRYPSWNATQIRNHLKNTATNLGNSSQFGSGLVNAEAATR

SEQ ID NO: 66173 - protein, 268 aa, Unidentified
QTVPWGITRVQAPAVHNRGITGSGVRVAILDSGISARSDLNIRGGASFVPGEPTTADLNGHGTHVAGTVAALNNSIGVIGVAPNAELYAVKVLGANGSGSVSGIAQGLEWAATNNMHIANMSLGSDFPSSTLERAVNYATSRDVLVIAATGNNGSGSVGYPARYANAMAVGATDQNNRRANFSQYGTGIDIVAPGVNVQSTYPGNRYVSMNGTSMATPHVAGAAALVKQRYPSWNATQIRNHLKNTATNLGNSSQFGSGLVNAEAATR

SEQ ID NO: 66174 - protein, 268 aa, Bacillus gibsonii
QTVPWGITRVQAPAVHNRGITGSGVRVAILDSGISAHSDLNIRGGASFVPGEPTTADLNGHGTHVAGTVAALNNSIGVIGVAPNAELYAVKVLGANGSGSVSGIAQGLEWAATNNMHIANMSLGSDFPSSTLERAVNYATSRDVLVIAATGNNGSGSVGYPASYANAMAVGATDQNNRRANFSQYGTGIDIVAPGVNVQSTYPGNRYVSMNGTSMATPHVAGAAALVKQRYPSWNATQIRNHLKNTATNLGNSSQFGSGLVNAEAATR

SEQ ID NO: 66175 - protein, 268 aa, Unidentified
QTVPWGITRVQAPAVNNRGITGSGVRVAILDSGISAHEDLNIRGGASFVPGEPTTADLNGHGTHVAGTVAALNNSIGVIGVAPNAELYAVKVLGANGSGSVSGIAQGLEWAATNNMHIANMSLGSDFPSSTLERAVNYATSRDVLVIAATGNNGSGSVGYPARYANAMAVGATDQNNRRANFSQYGTGIDIVAPGVNVQSTYPGNRYVSMNGTSMATPHVAGAAALVKQRYPSWNATQIRNHLKNTATNLGNSSQFGSGLVNAEAATR

SEQ ID NO: 66176 - protein, 268 aa, Unidentified
QTVPWGITRVQAPAVHNRGITGSGVRVAILDSGISAHEDLNIRGGASFVPGEPTTADLNGHGTHVAGTVAALNNSIGVIGVAHNAELYAVKVLGANGSGSVSGIAQGLEWAATNNMHIANMSLGSDFPSSTLERAVNYATSRDVLVIAATGNNGSGSVGYPARYANAMAVGATDQNNRRANFSQYGTGIDIVAPGVNVQSTYPGNRYVSMNGTSMATPHVAGAAALVKQRYPSWNATQIRNHLKNTATNLGNSSQFGSGLVNAEAATR

SEQ ID NO: 66177 - protein, 268 aa, Unidentified
QTVPWGITRVQAPAVHNRGITGSGVRVAILDSGIEAHEDLNIRGGASFVPGEPTTADLNGHGTHVAGTVAALNNSIGVIGVAPNAELYAVKVLGANGSGSVSGIAQGLEWAATNNMHIANMSLGSDFPSSTLERAVNYATSRDVLVIAATGNNGSGSVGYPARYANAMAVGATDQNNRRANFSQYGTGIDIVAPGVNVQSTYPGNRYVSMNGTSMATPHVAGAAALVKQRYPSWNATQIRNHLKNTATNLGNSSQFGSGLVNAEAATR

SEQ ID NO: 66178 - protein, 268 aa, Unidentified
QTVPWGITRVQAPAVHNRGITGSGVRVAILDSGISTHEDLNVRGGASFVPGEPTTADLNGHGTHVAGTVAALNNSIGVIGVAPSADLYAVKVLGANGRGSVSGIAQGLEWAAQNNMHIANMSLGSDFPSSTLERAVNYATSRDVLVIAATGNNGSGSVGYPARYANAMAVGATDQNNRRANFSQYGTGIDIVAPGVNVQSTYPGNRYVSMNGTSMATPHVAGAAALVKQRYPSWNATQIRNHLKNTATNLGNSSQFGSGLVNAEAATR

SEQ ID NO: 66179 - protein, 268 aa, Unidentified
QTVPWGITRVQAPAVHNRGITGSGVRVAILDSGISAHEDLNIRGGASFVPGEPTTADLNGHGTHVAGTVAALNNSIGVIGVAPNAELYAVKVLGANGSGSVSGIAQGLEWAATNNMHIANMSLGSDFPSSTLERAVNYATSRDVLVIAATGNNGSGSVGYPARYANAMAVGATDQHNRRANFSQYGTGIDIVAPGVNVQSTYPGNRYVSMNGTSMATPHVAGAAALVKQRYPSWNATQIRNHLKNTATNLGNSSQFGSGLVNAEAATR

SEQ ID NO: 66180 - protein, 268 aa, Unidentified
QTVPWGITRVQAPAVHNRGITGSGVRVAILDSGISAHSDLNIRGGAPFVPGEPTTADLNGHGTHVAGTVAALNNSIGVIGVAPNAELYAVKVLGANGSGSVSGIAQGLEWAATNNMHIANMSLGSDFPSSTLERAVNYATSRDVLVIAATGNNGSGSVGYPARYANAMAVGATDQNNRRANFSQYGTGIDIVAPGVNVQSTYPGNRYVSMNGTSMATPHVAGAAALVKQRYPSWNATQIRNHLKNTATNLGNSSQFGSGLVNAEAATR

SEQ ID NO: 66181 - protein, 268 aa, Unidentified
QTVPWGITRVQAPAVHNRGITGSGVRVAILDSGISAHSDLNIRGGARFVPGEPTTADLNGHGTHVAGTVAALNNSIGVIGVAPNAELYAVKVLGANGSGSVSGIAQGLEWAATNNMHIANMSLGSDFPSSTLERAVNYATSRDVLVIAATGNNGSGSVGYPARYANAMAVGATDQNNRRANFSQYGTGIDIVAPGVNVQSTYPGNRYVSMNGTSMATPHVAGAAALVKQRYPSWNATQIRNHLKNTATNLGNSSQFGSGLVNAEAATR

SEQ ID NO: 66182 - protein, 268 aa, Unidentified
QTVPWGITRVQAPAVHNRGITGSGVRVAILDSGISAHEDLNIRGGASFVPGEPTTADLNGHGTHVAGTVAALNNTIGVIGVAPNAELYAVKVLGANGSGSVSGIAQGLEWAATNNMHIANMSLGSDFPSSTLERAVNYATSRDVLVIAATGNNGSGSVGYPARYANAMAVGATDQNNRRANFSQYGTGIDIVAPGVNVQSTYPGNRYVSMNGTSMATPHVAGAAALVKQRYPSWNATQIRNHLKNTATNLGNSSQFGSGLVNAEAATR

SEQ ID NO: 66183 - protein, 268 aa, Unidentified
QTVPWGITRVQAPAVHNRGITGSGVRVAILDSGISAHSDLNIRGGASFVPGEPTTADLNGHGTHVAGTVAALNNSIGVIGVAPNAELYAVKVLGANGSGSVSGIAQGLEWAATNNMHIANMSLGSDFPCSTLERAVNYATSRDVLVIAATGNNGSGSVGYPARYANAMAVGATDQNNRRANFSQYGTGIDIVAPGVNVQSTYPGNRYVSMNGTSMATPHVAGAAALVKQRYPSWNATQIRNHLKNTATNLGNSSQFGSGLVNAEAATR

SEQ ID NO: 66184 - protein, 268 aa, Unidentified
QTVPWGITRVQAPAVHNRGITGSGVRVAILDSGISAHEDLNIRGGASFVPGEPTTADLNGHGTHVAGTVAALNNSIGVIGVAPNAELYAVKVLGANGSGSVSGIAQGLEWAATNNMHIANMSLGSDFPSSTLERAVNYATSRDVLVIAATGNNGSGSVGYPARYANAMAVGATDQQNRRANFSQYGTGIDIVAPGVNVQSTYPGNRYVSMNGTSMATPHVAGAAALVKQRYPSWNATQIRNHLKNTATNLGNSSQFGSGLVNAEAATR

SEQ ID NO: 66185 - protein, 268 aa, Unidentified
QTVPWGIERVQAPAVHNRGITGSGVRVAILDSGISAHSDLNIRGGASFVPGEPTTADLNGHGTHVAGTVAALNNSIGVIGVAPNAELYAVKVLGANGSGSVSGIAQGLEWAATNNMHIANMSLGSDFPSSTLERAVNYATSRDVLVIAATGNNGSGSVGYPARYANAMAVGATDQNNRRANFSQYGTGIDIVAPGVNVQSTYPGNRYVIMNGTSMATPHVAGAAALVKQRYPSWNATQIRNHLKNTATNLGNSSQFGSGLVNAEAATR

SEQ ID NO: 66186 - protein, 268 aa, Unidentified
QTVPWGITRVQAPAVHNRGITGSGVRVAILDSGISAHSDLNIRGGASFVPGEPTTADLNGHGTHVAGTVAALNNSIGVIGVAPNAELYAVKVLGANGSGSVSGIAQGLEWAATNNMHIANMSLGSDFPSSTLERAVNYATSRDVLVIAATGNNGSGSVGYPARYANAMAVGATDQNNRRANFSQYGTGIDIVAPGVNVQSTWPGNRYVSMNGTSMATPHVAGAAALVKQRYPSWNATQIRNHLKNTATNLGNSSQFGSGLVNAEAATR

SEQ ID NO: 66187 - protein, 268 aa, Unidentified
QTVPWGITRVQAPAVHNRGITGSGVRVAILDSGISAHSDLNIRGGASFVPGEPTTASLNGHGTHVAGTVAALNNSIGVIGVAPNAELYAVKVLGANGSGSVSGIAQGLEWAATNNMHIANMSLGSDFPSSTLERAVNYATSRDVLVIAATGNNGSGSVGYPARYANAMAVGATDQNNRRANFSQYGTGIDIVAPGVNVQSTYPGNRYVSMNGTSMATPHVAGAAALVKQRYPSWNATQIRNHLKNTATNLGNSSQFGSGLVNAEAATR

SEQ ID NO: 66188 - protein, 268 aa, Bacillus gibsonii
QTVPWGITRVQAPAVHNRGITGSGVRVAILDSGISAHSDLNIRGGASFVPGEPTTADLNGHGTHVAGTVAALNNSIGVIGVAPNAELYAVKVLGANGSGSVSGIAQGLEWAATNNMHIANMSLGSDFPSSTLERAVNYATSRDVLVIAATGNNGSGSVGYPARYANAMAVGATDQNNRRANFSQYGTGIDIVAPGVNVQSTYPGNRYVSMNGTSMATPHVAGAAALVKQRYPSWNATQIRNHLKNTARNLGNSSQFGSGLVNAEAATR

SEQ ID NO: 66189 - protein, 268 aa, Unidentified
QTVPWGITRVQAPAVHNRGITGSGVRVAILDSGISAHSDLNIRGGASFVPGEPTTADLNGHGTHVAGTVAALNNSIGVIGVAPNAELYAVKVLGANGSGSVSGIAQGLEWAATNNMHIANMSLGSDFPSSTLERAVNYATSRDVLVIAATGNNGSGSVGYPARYANAMAVGATDQNNRRANFSQYGTGIDIVAPGVNVQSTYPGNRYVSMNGTSMATPHVAGAAALVKQRYPSWNATQIRNHLKNTDTNLGNSSQFGSGLVNAEAATR

SEQ ID NO: 66190 - protein, 268 aa, Unidentified
QTVPWGITRVQAPAVHNRGITGSGVRVAILDSGISAHEDLNIRGGASFVPGEPTTADLNGHGTHVAGTVAALNNSIGVIGVAPNAELYAVKVLAANGSGSVSGIAQGLEWAATNNMHIANMSLGSDFPSSTLERAVNYATSRDVLVIAATGNNGSGSVGYPARYANAMAVGATDQNNRRANFSQYGTGIDIVAPGVNVQSTYPGNRYVSMNGTSMATPHVAGAAALVKQRYPSWNATQIRNHLKNTATNLGNSSQFGSGLVNAEAATR

SEQ ID NO: 66191 - protein, 268 aa, Unidentified
QTVPWGITRVQAPAVHNRGITGSNVRVAILDSGISAHEDLNIRGGASFVPGEPTTADLNGHGTHVAGTVAALNNSIGVIGVAPNAELYAVKVLGANGSGSVSGIAQGLEWAATNNMHIANMSLGSDFPSSTLERAVNYATSRDVLVIAATGNNGSGSVGYPARYANAMAVGATDQNNRRANFSQYGTGIDIVAPGVNVQSTYPGNRYVSMNGTSMATPHVAGAAALVKQRYPSWNATQIRNHLKNTATNLGNSSQFGSGLVNAEAATR

SEQ ID NO: 66192 - protein, 268 aa, Unidentified
QTVPWGITRVQAPAVFNRGITGSGVRVAILDSGISAHEDLNIRGGASFVPGEPTTADLNGHGTHVAGTVAALNNSIGVIGVAPNAELYAVKVLGANGSGSVSGIAQGLEWAATNNMHIANMSLGSDFPSSTLERAVNYATSRDVLVIAATGNNGSGSVGYPARYANAMAVGATDQNNRRANFSQYGTGIDIVAPGVNVQSTYPGNRYVSMNGTSMATPHVAGAAALVKQRYPSWNATQIRNHLKNTATNLGNSSQFGSGLVNAEAATR

SEQ ID NO: 66193 - protein, 268 aa, Unidentified
QTVPWGITRVQAPAVHNRGITGSGVRVAILDSGISAHEDLNIRGGASFVPGEPTTADLNGHGTHVAGTVAALNNSIGVIGVAPNAELYAVKVLGANGSGSVSGIAQGLEWAATNNMHIANMSLGSDFPSSTLERAVNYATDRDVLVIAATGNNGSGSVGYPARYANAMAVGATDQNNRRANFSQYGTGIDIVAPGVNVQSTYPGNRYVSMNGTSMATPHVAGAAALVKQRYPSWNATQIRNHLKNTATNLGNSSQFGSGLVNAEAATR

SEQ ID NO: 66194 - protein, 268 aa, Unidentified
QTVPWGITRVQAPAVHNRGITGSGVRVAILDSGISAHEDLNIRGGASFVPGEPTTADLNGHGTHVAGTVAALNNSIGVIGVAPNAELYAVKVLGANGSGSVSGIAQGLEWAATNNMHIANMSLGSDFPSSTLERAVNYATSRDVLVIAATGNNGSGSVGYPARYANAMAVGATDQNNRRANFSQYGTGIDIVAPGVNVQSTYPGNRYVSMNGTSMATPHVAGAAALVKQRYPSWNATQIREHLKNTATNLGNSSQFGSGLVNAEAATR

SEQ ID NO: 66195 - protein, 268 aa, Unidentified
QTVPWGITRVQAPIVHNRGITGSGVRVAILDSGISAHEDLNIRGGASFVPGEPTTADLNGHGTHVAGTVAALNNSIGVIGVAPNAELYAVKVLGANGSGSVSGIAQGLEWAATNNMHIANMSLGSDFPSSTLERAVNYATSRDVLVIAATGNNGSGSVGYPARYANAMAVGATDQNNRRANFSQYGTGIDIVAPGVNVQSTYPGNRYVSMNGTSMATPHVAGAAALVKQRYPSWNATQIRNHLKNTATNLGNSSQFGSGLVNAEAATR

SEQ ID NO: 66196 - protein, 268 aa, Unidentified
QTVPWGITRVQAPAVHNRGITGSGVRVAILDSGISAHSWLNIRGGASFVPGEPTTADLNGHGTHVAGTVAALNNSIGVIGVAPNAELYAVKVLGANGSGSVSGIAQGLEWAATNNMHIANMSLGSDFPSSTLERAVNYATSRDVLVIAATGNNGSGSVGYPARYANAMAVGATDQNNRRANFSQYGTGIDIVAPGVNVQSTYPGNRYVSMNGTSMATPHVAGAAALVKQRYPSWNATQIRNHLKNTATNLGNSSQFGSGLVNAEAATR

SEQ ID NO: 66197 - protein, 268 aa, Unidentified
QTVPWGITRVQAPAVHNRGITGSGVRVAILDSGISAHEDLNIRGGASFVPGEPTTADLNGHGTHVAGTVAALNNSIGVIGVAPNAELYAVKVLGANGSGSVSGIAQGLEWAATNNMHIANMSLGSDFPSSTLERAVNYATSRDVLVIAATGNNGSGSVGYPARYANAMAVGATDQNNRRANFSQYGTGIDIVAPGVNVQSTYPGNRYVSMNGTSMATPHVAGAAALVKQRYPSWNATQIRNHLKNTATNLGNSSQFGSGLVNAEAAER

SEQ ID NO: 66198 - protein, 268 aa, Unidentified
QTVPWGITRVQAPAVHNRGITGSGVRVAILDSGISAHSQLNIRGGASFVPGEPTTADLNGHGTHVAGTVAALNNSIGVIGVAPNAELYAVKVLGANGSGSVSGIAQGLEWAATNNMHIANMSLGSDFPSSTLERAVNYATSRDVLVIAATGNNGSGSVGYPARYANAMAVGATDQNNRRANFSQYGTGIDIVAPGVNVQSTYPGNRYVSMNGTSMATPHVAGAAALVKQRYPSWNATQIRNHLKNTATNLGNSSQFGSGLVNAEAATR

SEQ ID NO: 66199 - protein, 268 aa, Unidentified
QTVPWGITRVQAPAVHNRGITGSGVRVAILDSGISAHSDLNIRGGASFVPGEPTTADLNGHGTHVAGTVAALNNSIGVIGVAPNAELYAVKVLGANGSGSVSGIAQGLEWAATNNMHIANMSLGSDFPSSTLERAVNYATSRDVLVIAATGNNGSGSVGYPARYANAMAVGATDQNNRRANFSQYGTGIDIVAPGVNVQSTYPGNRYVSMNGTSMATPHVAGAAALVKQRYPSWNATQIRNHLKNTYTNLGNSSQFGSGLVNAEAATR

SEQ ID NO: 66200 - protein, 268 aa, Unidentified
QTVPWGITRVQAPAVHNRGITGSGVRVAILDSGISAHEDLNIRGGASFVPGEPTTADLNGHGTHVAGTVAALNNSIGVIGVAPNAELYAVKVLGANGSGSVSGIAQGLEWAATNNMHIANMSLGSDFPSSTLERAVNYATSRDVLVIAATGNNGSGSVGYPARYANAMAVGATDQNNRRANFSQYGTGIDIVAPGVNVQSTYPGNRYVSMNGTSMATPHVAGAAALVKQRYPSWNATQIRNHLKNTAINLGNSSQFGSGLVNAEAATR

SEQ ID NO: 66201 - protein, 268 aa, Unidentified
QTVPWGITRVQAPAVHNRGITGSGVRVAILDSGICAHEDLNIRGGASFVPGEPTTADLNGHGTHVAGTVAALNNSIGVIGVAPNAELYAVKVLGANGSGSVSGIAQGLEWAATNNMHIANMSLGSDFPSSTLERAVNYATSRDVLVIAATGNNGSGSVGYPARYANAMAVGATDQNNRRANFSQYGTGIDIVAPGVNVQSTYPGNRYVSMNGTSMATPHVAGAAALVKQRYPSWNATQIRNHLKNTATNLGNSSQFGSGLVNAEAATR

SEQ ID NO: 66202 - protein, 268 aa, Unidentified
QTVPWGITRVQAPAVHNRGITGSGVRVAILDSGISAHEDLNIRGGASFVPGEPTTADLSGHGTHVAGTVAALNNSIGVIGVAPNAELYAVKVLGANGSGSVSGIAQGLEWAATNNMHIANMSLGSDFPSSTLERAVNYATSRDVLVIAATGNNGSGSVGYPARYANAMAVGATDQNNRRANFSQYGTGIDIVAPGVNVQSTYPGNRYVSMNGTSMATPHVAGAAALVKQRYPSWNATQIRNHLKNTATNLGNSSQFGSGLVNAEAATR

SEQ ID NO: 66203 - protein, 268 aa, Unidentified
QTVPWGITKVQAPAVHNRGITGSGVRVAILDSGISAHEDLNIRGGASFVPGEPTTADLNGHGTHVAGTVAALNNSIGVIGVAPNAELYAVKVLGANGSGSVSGIAQGLEWAATNNMHIANMSLGSDFPSSTLERAVNYATSRDVLVIAATGNNGSGSVGYPARYANAMAVGATDQNNRRANFSQYGTGIDIVAPGVNVQSTYPGNRYVSMNGTSMATPHVAGAAALVKQRYPSWNATQIRNHLKNTATNLGNSSQFGSGLVNAEAATR

SEQ ID NO: 66204 - protein, 268 aa, Unidentified
QTVPWGITRVQAPAVHNWGITGSGVRVAILDSGISAHEDLNIRGGASFVPGEPTTADLNGHGTHVAGTVAALNNSIGVIGVAPNAELYAVKVLGANGSGSVSGIAQGLEWAATNNMHIANMSLGSDFPSSTLERAVNYATSRDVLVIAATGNNGSGSVGYPARYANAMAVGATDQNNRRANFSQYGTGIDIVAPGVNVQSTYPGNRYVSMNGTSMATPHVAGAAALVKQRYPSWNATQIRNHLKNTATNLGNSSQFGSGLVNAEAATR

SEQ ID NO: 66205 - protein, 268 aa, Unidentified
QTVPWGITRVQAPAVHNRGITGSGVRVAILDSGISAHEDLNIRGGASFVPGEPTTADLNGHGTHVAGTVAALNNSIGVIGVAPNAELYAVKVLGANGSGSVSGIAQGLEWAATNNMHIANMSLGSDFPSSTLERAVNYATSRDVLVIAATGNNGSGSVGYPARYANAMAVGATDQNNRRANFSQYGTGIDIMAPGVNVQSTYPGNRYVSMNGTSMATPHVAGAAALVKQRYPSWNATQIRNHLKNTATNLGNSSQFGSGLVNAEAATR

SEQ ID NO: 66206 - protein, 268 aa, Unidentified
QTVPWGITRVQAPAVHNRGITGSGVRVAILDSGISAHEDLNIRGGASFVPGEPTTADLNGHGTHVAGTVAALDNSIGVIGVAPNAELYAVKVLGANGSGSVSGIAQGLEWAATNNMHIANMSLGSDFPSSTLERAVNYATSRDVLVIAATGNNGSGSVGYPARYANAMAVGATDQNNRRANFSQYGTGIDIVAPGVNVQSTYPGNRYVSMNGTSMATPHVAGAAALVKQRYPSWNATQIRNHLKNTATNLGDSSQFGSGLVNAEAATR

SEQ ID NO: 66207 - protein, 268 aa, Unidentified
QTVPWGITRVQAPAVHNRGITGSGVRVAILDSGISAHEDLNIRGGASFVPGEPTTADLNGHGTHVAGTVAALNNSIGVIGVAPNAELYAVKVLGANGSGSVSGIAQGLEWAATNNMHIANMSLGSDFYSSTLERAVNYATSRDVLVIAATGNNGSGSVGYPARYANAMAVGATDQNNRRANFSQYGTGIDIVAPGVNVQSTYPGNRYVSMNGTSMATPHVAGAAALVKQRYPSWNATQIRNHLKNTATNLGNSSQFGSGLVNAEAATR

SEQ ID NO: 66208 - protein, 268 aa, Unidentified
QTVPWGITRVQAPAVHNRGITGSGVRVAILDSGISAHEDLNIRGGASFVPGEPTTADLNGHGTHVAGTVAALNNSIGVIGVAPNAELYAVKVLGANGSGSVSGIAQGLEWAATNNMDIANMSLGSDFPSSTLERAVNYATSRDVLVIAATGNNGSGSVGYPARYANAMAVGATDQNNRRANFSQYGTGIDIVAPGVNVQSTYPGNRYVSMNGTSMATPHVAGAAALVKQRYPSWNATQIRNHLKNTATNLGNSSQFGSGLVNAEAATR

SEQ ID NO: 66209 - protein, 268 aa, Unidentified
QTVPWGITRVQAPAVHNRGITGSGVRVAILDSGISAHEDLNIRGGASFVPGEPTTADLNGHGTHVAGTVAALNNSIGVIGVAPNAELYAVKVLGANGSGSVSGIAQGLEWAATNNMHIANMSLGSDFPSSTLERAVNYATSRDVLVIAATGNNGSGYVGYPARYANAMAVGATDQNNRRANFSQYGTGIDIVAPGVNVQSTYPGNRYVSMNGTSMATPHVAGAAALVKQRYPSWNATQIRNHLKNTATNLGNSSQFGSGLVNAEAATR

SEQ ID NO: 66210 - protein, 268 aa, Unidentified
QTVPWGITRVQAPAVHNFGITGSGVRVAILDSGISAHEDLNIRGGASFVPGEPTTADLNGHGTHVAGTVAALNNSIGVIGVAPNAELYAVKVLGANGSGSVSGIAQGLEWAATNNMHIANMSLGSDFPSSTLERAVNYATSRDVLVIAATGNNGSGSVGYPARYANAMAVGATDQNNRRANFSQYGTGIDIVAPGVNVQSTYPGNRYVSMNGTSMATPHVAGAAALVKQRYPSWNATQIRNHLKNTATNLGNSSQFGSGLVNAEAATR

SEQ ID NO: 66211 - protein, 268 aa, Unidentified
QTVPWGITRVQAPAVHNRGITGSGVRVAILDSGISAHSDLNIRGGASFVPGEPTTADLNGHGTHVAGTVAALNNSIGVIGVAPNAELYAVKVLGANGSGSVSGIAQGLEWAATNNMHIANMSLGSDFPSSTLERAVNYATSRDVLVIAATGNNGSGSVGYPARYANAMAVGATDQNNRRANFSQYGTGIDIVAPGVNVVSTYPGNRYVSMNGTSMATPHVAGAAALVKQRYPSWNATQIRNHLKNTATNLGNSSQFGSGLVNAEAATR

SEQ ID NO: 66212 - protein, 268 aa, Unidentified
QTVPWGITRVQAPAVHNRGITGSGVRVAILDSGISAHEDLNIRGGASFVPGEPTTADLNGHGTHVAGTVAALNNSIGVIGVAPNAELYAVKVLGANGSGSVSGIAQGLEWAATNNMHIANMSLGSDFPSSTLERAVNYATSRDVLVIAATGNNGSGSVGYPARYANAMAVGATDLNNRRANFSQYGTGIDIVAPGVNVQSTYPGNRYVSMNGTSMATPHVAGAAALVKQRYPSWNATQIRNHLKNTATNLGNSSQFGSGLVNAEAATR

SEQ ID NO: 66213 - protein, 268 aa, Unidentified
QTVPWGITRVQAPAVHNRGITGSGVRVAILDSGISAHEDLNIRGGKSFVPGEPTTADLNGHGTHVAGTVAALNNSIGVIGVAPNAELYAVKVLGANGSGSVSGIAQGLEWAATNNMHIANMSLGSDFPSSTLERAVNYATSRDVLVIAATGNNGSGSVGYPARYANAMAVGATDQNNRRANFSQYGTGIDIVAPGVNVQSTYPGNRYVSMNGTSMATPHVAGAAALVKQRYPSWNATQIRNHLKNTATNLGNSSQFGSGLVNAEAATR

SEQ ID NO: 66214 - protein, 268 aa, Unidentified
QTVPWGITRVQAPAVHNRGITGSGVRVAILDSGISAHEDLNIEGGASFVPGEPTTADLNGHGTHVAGTVAALNNSIGVIGVAPNAELYAVKVLGANGSGSVSGIAQGLEWAATNNMHIANMSLGSDFPSSTLERAVNYATSRDVLVIAATGNNGSGSVGYPARYANAMAVGATDQNNRRANFSQYGTGIDIVAPGVNVQSTYPGNRYVSMNGTSMATPHVAGAAALVKQRYPSWNATQIRNHLKNTATNLGNSSQFGSGLVNAEAATR

SEQ ID NO: 66215 - protein, 268 aa, Unidentified
QTVPWGITRVQAPAVHNRGITGSGVRVAILDSGISAHSDLNIRGGASFVPGEPTTADLNGHGTHVAGTVAALNNSIGVIGVAPNAELYAVKVLGANGSGSVSGIAQGLEWAATNNMHIANMSLGSDFPSSTLERAVNYATSRDVLVIAATGNNGSGSVGYPARYANAMAVGATDQNNRRANFSQYGTGIDIVAPGVNVWSTYPGNRYVSMNGTSMATPHVAGAAALVKQRYPSWNATQIRNHLKNTATNLGNSSQFGSGLVNAEAATR

SEQ ID NO: 66216 - protein, 268 aa, Unidentified
QTVPWGITRVQAPAVHNRGITGSGVRVAILDSGISAHSDLNIRGGASFVPGEPTTADLNGHGTHVAGTVAALNNSIGVIGVAPNAELYAVKVLGANGSGSVSGIAQGLEWAATNNMHIANMSLGSDFPSSTLERAVNYATSRDVLVIAATGNNGSGSVGYPARYANAMAVGATDQNNRRANFSQYGTGIDIVAPGVNVQSTYPGNRYVSMNGTSMATPHVAGAAALVKQRYPSWNATQIRNHLKNTVTNLGNSSQFGSGLVNAEAATR

SEQ ID NO: 66217 - protein, 268 aa, Unidentified
QTVPWGITRVQAPAVHNRGITGSGVRVAILDSGISAHSDLNIRGGASFVPGEPTTADLNGHGTHVAGTVAALNNSIGVIGVAPNAELYAVKVLGANGSGSVSGIAQGLEWAATNNMHIANMSLGSDFPISTLERAVNYATSRDVLVIAATGNNGSGSVGYPARYANAMAVGATDQNNRRANFSQYGTGIDIVAPGVNVQSTYPGNRYVSMNGTSMATPHVAGAAALVKQRYPSWNATQIRNHLKNTATNLGNSSQFGSGLVNAEAATR

SEQ ID NO: 66218 - protein, 268 aa, Unidentified
QTVPWGITRVQAPAVHNRGITGSGVRVAILDSGISAHEDLNITGGASFVPGEPTTADLNGHGTHVAGTVAALNNSIGVIGVAPNAELYAVKVLGANGSGSVSGIAQGLEWAATNNMHIANMSLGSDFPSSTLERAVNYATSRDVLVIAATGNNGSGSVGYPARYANAMAVGATDQNNRRANFSQYGTGIDIVAPGVNVQSTYPGNRYVSMNGTSMATPHVAGAAALVKQRYPSWNATQIRNHLKNTATNLGNSSQFGSGLVNAEAATR

SEQ ID NO: 66219 - protein, 268 aa, Unidentified
QTVPWGITRVQAPAVHNRGITGSGVRVAILDSGISAHSDLNIRGGASFVPGEPTTADLNGHGTHVAGTVAALNNSIGVIGVAPNAFLYAVKVLGANGSGSVSGIAQGLEWAATNNMHIANMSLGSDFPSSTLERAVNYATSRDVLVIAATGNNGSGSVGYPARYANAMAVGATDQNNRRANFSQYGTGIDIVAPGVNVQSTYPGNRYVSMNGTSMATPHVAGAAALVKQRYPSWNATQIRNHLKNTATNLGNSSQFGSGLVNAEAATR

SEQ ID NO: 66220 - protein, 268 aa, Unidentified
QTVPWGITRVQAPAVHNRGITGSGVRVAILDSGISAHEDLNIRGGASFVPGEPTTADLNGHGTHVAGTVAALNNSIGVIGVAPNAELYAVKVLGANGSGSVSGIAQGLEWAATNNMHIANMSLGSDFPSSTLERAVNYATSRDVLVIAATGNNGSGSVGYPARYANAMAVGATDQNNRRANFSQYGTGIDIVAPGVNVQSTYPGNRYVSMNGTSMATPHVAGAAALVKQRYPSWNATQIRNHLKNTATNLGNSSQFGSGLVNAEAADR

SEQ ID NO: 66221 - protein, 268 aa, Bacillus gibsonii
QTVPWGITRVQAPTVHNRGITGSGVRVAILDSGISAHSDLNIRGGASFVPGEPTTADLNGHGTHVAGTVAALNNSIGVIGVAPNAELYAVKVLGANGSGSVSGIAQGLEWAATNNMHIANMSLGSDFPSSTLERAVNYATSRDVLVIAATGNNGSGSVGYPARYANAMAVGATDQNNRRANFSQYGTGIDIVAPGVNVQSTYPGNRYVSMNGTSMATPHVAGAAALVKQRYPSWNATQIRNHLKNTATNLGNSSQFGSGLVNAEAATR

SEQ ID NO: 66222 - protein, 268 aa, Unidentified
QTVPWGITRVQAPAVHNRGITGEGVRVAILDSGISAHEDLNIRGGASFVPGEPTTADLNGHGTHVAGTVAALNNSIGVIGVAPNAELYAVKVLGANGSGSVSGIAQGLEWAATNNMHIANMSLGSDFPSSTLERAVNYATSRDVLVIAATGNNGSGSVGYPARYANAMAVGATDQNNRRANFSQYGTGIDIVAPGVNVQSTYPGNRYVSMNGTSMATPHVAGAAALVKQRYPSWNATQIRNHLKNTATNLGNSSQFGSGLVNAEAATR

SEQ ID NO: 66223 - protein, 268 aa, Unidentified
QTVPWGITRVQAPAVHNRGITGSGVRVAILDSGISAHEDLNIRGGASFVPGEPTTADLNGHGTHVAGTVAALNNSIGVIGVAPNAELYAVKVLGANGSGSVSGIAQGLEWAATNNMHIANMSLGSDFPSSTLERAVNYATSRDVLVIAATGNNGSGSVGYPARYANAMAVGATDQNNRRANFSQYGTGIDIVAPGVNVQSTYPGNRYVSMNGTSMATPHVAGAAALVKQRYPSWNATQIRNHLKNTASNLGNSSQFGSGLVNAEAATR

SEQ ID NO: 66224 - protein, 268 aa, Unidentified
QTVPWGITRVQAPAVHNRGITGSGVRVAILDSGISAHEDLNIRGGASFVPGEPTTADLNGHGTHVAGTVAALNNSIGVIGVAPNAELYAVKVLGANGSGSVSGIAQGLEWAATNNMHIANMSLGSDFPSSTLERAVNYATSRDVLVIAATGNNGSGSVGYPAKYANAMAVGATDQNNRRANFSQYGTGIDIVAPGVNVQSTYPGNRYVSMNGTSMATPHVAGAAALVKQRYPSWNATQIRNHLKNTATNLGNSSQFGSGLVNAEAATR

SEQ ID NO: 66225 - protein, 268 aa, Unidentified
QTVPWGITRVQAPAVHNQGITGSGVRVAILDSGISAHEDLNIRGGASFVPGEPTTADLNGHGTHVAGTVAALNNSIGVIGVAPNAELYAVKVLGANGSGSVSGIAQGLEWAATNNMHIANMSLGSDFPSSTLERAVNYATSRDVLVIAATGNNGSGSVGYPARYANAMAVGATDQNNRRANFSQYGTGIDIVAPGVNVQSTYPGNRYVSMNGTSMATPHVAGAAALVKQRYPSWNATQIRNHLKNTATNLGNSSQFGSGLVNAEAATR

SEQ ID NO: 66226 - protein, 268 aa, Unidentified
QTVPWGITRVQAPAVHNRGITGSGVRVAILDSGISAHEDLNIRGGASFVPGEPTTADLNGHGTHVAGTVAALNNSIGVIGVAPNAELYAVKVLGANGSGSVSGIAQGLEWAATQNMHIANMSLGSDFPSSTLERAVNYATSRDVLVIAATGNNGSGSVGYPARYANAMAVGATDQNNRRANFSQYGTGIDIVAPGVNVQSTYPGNRYVSMNGTSMATPHVAGAAALVKQRYPSWNATQIRNHLKNTATNLGNSSQFGSGLVNAEAATR

SEQ ID NO: 66227 - protein, 268 aa, Unidentified
QTVPWGITRVQAPAVHNRGITGSGVRVAILDSGISAHEDLNIRGGASFVPGEPTTADLNGHGTHVAGTVAALNNSIGVIGVAPNAELYAVKVLGANGRGSVSGIAQGLEWAATNNMHIANMSLGAEGPSSTLERAVNYATSRDVLVIAATGNNGSGSVQYPARYANAMAVGATDQNNQRANFSQYGTGIDIVAPGVNVQSTYPGNRYVSLNGTSMATPHVAGAAALVKQRYPSWNATQIRNHLKNTATNLGNSSQFGSGLVNAEAATR

SEQ ID NO: 66228 - protein, 268 aa, Unidentified
QTVPWGITRVQAPAVHNRGITGSGVRVAILDSGISAHSDLNIRGGASFVPGEPTTADLNGHGTHVAGTVAALNNSIGVIGVAPNAELLAVKVLGANGSGSVSGIAQGLEWAATNNMHIANMSLGSDFPSSTLERAVNYATSRDVLVIAATGNNGSGSVGYPARYANAMAVGATDQNNRRANFSQYGTGIDIVAPGVNVQSTYPGNRYVSMNGTSMATPHVAGAAALVKQRYPSWNATQIRNHLKNTATNLGNSSQFGSGLVNAEAATR

SEQ ID NO: 66229 - protein, 268 aa, Unidentified
QTVPWGITRVQAPAVHNRGITGSGVRVAILDSGISAHEDLNIRGGASFVPGEPTTADLNGHGTHVAGTVAALNNSIGVIGVAPNAELYAVKVLGANGSGSVSGIAQGLEWAATNNMHIANMSLGSDFPSSTLERAVNYATSRDVLVIAATGNNGSQSVGYPARYANAMAVGATDQNNRRANFSQYGTGIDIVAPGVNVQSTYPGNRYVSMNGTSMATPHVAGAAALVKQRYPSWNATQIRNHLKNTATNLGNSSQFGSGLVNAEAATR

SEQ ID NO: 66230 - protein, 268 aa, Unidentified
QTVPWGITRVQAPAVHNRGITGSGVRVAILDSGISAHSDLNIRGGASFVPGEPTTADLNGHGTHVAGTVAALNNSIGVIGVAPNAELYAVKVLGANGSGSVSGIAQGLEWAATNNMHIANMSLGSDFPSSTLERAVNYATSRDVLVIAATGNNGSGSVGYPARYANAMAVGATDQNNRRANFSQYGTGIDIVAPGVNVTSTYPGNRYVSMNGTSMATPHVAGAAALVKQRYPSWNATQIRNHLKNTATNLGNSSQFGSGLVNAEAATR

SEQ ID NO: 66231 - protein, 268 aa, Unidentified
QTVPWGITRVQAPAVHNRGITGSGVRVAILDSGISAHSDLNIRGGASFVPGEPTYADLNGHGTHVAGTVAALNNSIGVIGVAPNAELYAVKVLGANGSGSVSGIAQGLEWAATNNMHIANMSLGSDFPSSTLERAVNYATSRDVLVIAATGNNGSGSVGYPARYANAMAVGATDQNNRRANFSQYGTGIDIVAPGVNVQSTYPGNRYVSMNGTSMATPHVAGAAALVKQRYPSWNATQIRNHLKNTATNLGNSSQFGSGLVNAEAATR

SEQ ID NO: 66232 - protein, 268 aa, Unidentified
QTVPWGITRVQAPAVHNRGITGSGVRVAILDSGISAHEDLNIRGGASFVPGEPTTADLNGHGTHVAGTVAALNNSIGVIGVAPNAELYAVKVLGANGSGSVSGIAQGLEWAATNNMHIANMSLGSDFPSSTLERAVNYATSRDVLVIAATGNNGSGCVGYPARYANAMAVGATDQNNRRANFSQYGTGIDIVAPGVNVQSTYPGNRYVSMNGTSMATPHVAGAAALVKQRYPSWNATQIRNHLKNTATNLGNSSQFGSGLVNAEAATR

SEQ ID NO: 66233 - protein, 268 aa, Unidentified
QTVPWGITRVQAPAVHNRGITGSGVRVAILDSGISAHEDLNIRGGASFVPGEPTTADLNGHGTHVAGTVAALNNSIGVIGVAPNAELYAVKVLGANGSGSVSGIAQGLEWAATNNMHIANMSLGSDFPSSTLERAVNYATSRDVLVIAATGNNGSGSVGYPARYANAMAVGATDCNNRRANFSQYGTGIDIVAPGVNVQSTYPGNRYVSMNGTSMATPHVAGAAALVKQRYPSWNATQIRNHLKNTATNLGNSSQFGSGLVNAEAATR

SEQ ID NO: 66234 - protein, 268 aa, Unidentified
QTVPWGITRVQAPAVHNRGITGSGVRVAILDSGISAHEDLNIRGGASFVPGEPTTADLNGHGTHVAGTVAALNNSIGVIGVAPNAELYAVKVLGANGSGSVSGIAQGLEWAATNNMHIANMSLGSDFPSSTLERAVNYATSRDVLVIAATGNNGSGSVGYPARYANAMAVGATDQWNRRANFSQYGTGIDIVAPGVNVQSTYPGNRYVSMNGTSMATPHVAGAAALVKQRYPSWNATQIRNHLKNTATNLGNSSQFGSGLVNAEAATR

SEQ ID NO: 66235 - protein, 268 aa, Unidentified
QTVPWGITRVQAPAVHNRGITGSGVRVAILDSGISAHSDLNIRGGASFVPGEPTTADLNGHGTHVAGTVAALNNSIGVIGVAPNAELYAVKVLGANGSGTVSGIAQGLEWAATNNMHIANMSLGSDFPSSTLERAVNYATSRDVLVIAATGNNGSGSVGYPARYANAMAVGATDQNNRRANFSQYGTGIDIVAPGVNVQSTYPGNRYVSMNGTSMATPHVAGAAALVKQRYPSWNATQIRNHLKNTATNLGNSSQFGSGLVNAEAATR

SEQ ID NO: 66236 - protein, 268 aa, Unidentified
QTVPWGITRVQAPAVHNRGITGSGVRVAILDSGIAAHEDLNIRGGASFVPGEPTTADLNGHGTHVAGTVAALNNSIGVIGVAPNAELYAVKVLGANGSGSVSGIAQGLEWAATNNMHIANMSLGSDFPSSTLERAVNYATSRDVLVIAATGNNGSGSVGYPARYANAMAVGATDQNNRRANFSQYGTGIDIVAPGVNVQSTYPGNRYVSMNGTSMATPHVAGAAALVKQRYPSWNATQIRNHLKNTATNLGNSSQFGSGLVNAEAATR

SEQ ID NO: 66237 - protein, 268 aa, Unidentified
QTVPWGITRVQAPAVHNRGITGSGVRVAILDSGISAHEDLNIRGGASFVPGEPTTADLNGHGTHVAGTVAALNNSIGVIGVAPNAELYAVKVLGANGSGSVSGIAQGLEWAATNNMHIANMSLGSDFPSSTLERAVNYATSRDVLVIAATGNNGSGSVGYPARYANAMAVGATDQNNRRANFSQYGTGIDIVAPGVNVQSTYPGNRYVSMNGTSMATPHVAGAAALVKQRYPSWNATQIRNHLKNTATNLGNSSQFGSGLVNAEMATR

SEQ ID NO: 66238 - protein, 268 aa, Unidentified
QTVPWGITRVQAPAVHNHGITGSGVRVAILDSGISAHEDLNIRGGASFVPGEPTTADLNGHGTHVAGTVAALNNSIGVIGVAPNAELYAVKVLGANGSGSVSGIAQGLEWAATNNMHIANMSLGSDFPSSTLERAVNYATSRDVLVIAATGNNGSGSVGYPARYANAMAVGATDQNNRRANFSQYGTGIDIVAPGVNVQSTYPGNRYVSMNGTSMATPHVAGAAALVKQRYPSWNATQIRNHLKNTATNLGNSSQFGSGLVNAEAATR

SEQ ID NO: 66239 - protein, 268 aa, Unidentified
QTVPWGITRVQAPAVHNRGITGSGVRVAILDSGISAHEDLNIRGGASFVPGEPTTADLNGHGTHVAGTVAALNNSIGVIGVAPNAELYAVKVLGANGRGSVSGIAQGLEWAAQNNMHIANMSLGSDAPSSTLERAVNYATSRDVLVIAATGNNGSGSVGYPARYANAMAVGATDQNNRRANFSQYGTGIDIVAPGVNVQSTYPGNRYVSMNGTSMATPHVAGAAALVKQRYPSWNATQIRNHLKNTATNLGNSSQFGSGLVNAEAATR

SEQ ID NO: 66240 - protein, 268 aa, Unidentified
QTVPWGITRVQAPAVHNRGITGSGVRVAILDSGISAHEDLNIRGGASFVPGEPTTADLNGHGTHVAGTVAALNNSIGVIGVAPNAELYAVKVLGANGSGSVSGIAQGLEWAATNNMHIANMSLGSDFPSSTLERAVNYATSRDVLVIAATGNNGSGSVGYPARYANAMAVGATDQNNRRANFSQYGTGIDIVAPGVNVQSTYPGNRYVSMNGTSMATPHVAGAAAQVKQRYPSWNATQIRNHLKNTATNLGNSSQFGSGLVNAEAATR

SEQ ID NO: 66241 - protein, 268 aa, Unidentified
QTVPWGITRVQAPAVHNRGITGSGVRVAILDSGISTHEDLNIRGGASFVPGEPTYADLNGHGTHVAGTVAALNNSIGVIGVAPSADLYAVKVLGANGRGSVSGIAQGLEWAAQNNMHIANMSLGSDAPSSTLERAVNYATSRDVLVIAATGNNGSGSVGYPARYANAMAVGATDQNNRRANFSQYGTGIDIVAPGVNVQSTYPGNRYVSMNGTSMATPHVAGAAALVKQRYPSWNATQIRNHLKNTATNLGNSSQFGSGLVNAEAATR

SEQ ID NO: 66242 - protein, 268 aa, Unidentified
QTVPWGITRVQAPAVHNRGITGSGVRVAILDSGISAHEDLNIRGGASFVPGEPTTADLNGHGTHVAGTVAALNNSIGVIGVAPNAELYAVKVLGANGSGSVSGIAQGLEWAATNNMHIANMSLGSDFPSSTLERAVNYATSRDVLVIAATGNNGSGSVGYPAYYANAMAVGATDQNNRRANFSQYGTGIDIVAPGVNVQSTYPGNRYVSMNGTSMATPHVAGAAALVKQRYPSWNATQIRNHLKNTATNLGNSSQFGSGLVNAEAATR

SEQ ID NO: 66243 - protein, 268 aa, Unidentified
QTVPWGITRVQAPAVHNRGITGSGVRVAILDSGISAHSRLNIRGGASFVPGEPTTADLNGHGTHVAGTVAALNNSIGVIGVAPNAELYAVKVLGANGSGSVSGIAQGLEWAATNNMHIANMSLGSDFPSSTLERAVNYATSRDVLVIAATGNNGSGSVGYPARYANAMAVGATDQNNRRANFSQYGTGIDIVAPGVNVQSTYPGNRYVSMNGTSMATPHVAGAAALVKQRYPSWNATQIRNHLKNTATNLGNSSQFGSGLVNAEAATR

SEQ ID NO: 66244 - protein, 268 aa, Unidentified
QTVPWGITRVQAPAVHNRGITGSGVRVAILDSGISAHSDLNIRGGASFVPGEPTTADLNGHGTHVAGTVAALNNSIGVIGVAPNAYLYAVKVLGANGSGSVSGIAQGLEWAATNNMHIANMSLGSDFPSSTLERAVNYATSRDVLVIAATGNNGSGSVGYPARYANAMAVGATDQNNRRANFSQYGTGIDIVAPGVNVQSTYPGNRYVSMNGTSMATPHVAGAAALVKQRYPSWNATQIRNHLKNTATNLGNSSQFGSGLVNAEAATR

SEQ ID NO: 66245 - protein, 268 aa, Unidentified
QTVPWGITRVQAPAVHNRGITGSGVRVAILDSGISAHEDLNIRGGASFVPGEPTTADLNGHGTHVAGTVAALNNSIGVIGVAPNAELYAVKVLGANGSGSVSGIAQGLEWAATNNMHIANMSLGSDFPSSTLERAVNYATSRDVLVIAATGNNGSGSVGYPARYANAMAVGATDQNNRRANFSQYGTGIDIVAPGVNVQSTYPGNRYVSMNGTSMATPHVAGVAALVKQRYPSWNATQIRNHLKNTATNLGNSSQFGSGLVNAEAATR

SEQ ID NO: 66246 - protein, 268 aa, Unidentified
QTVPWGITRVQAPAVHNRGITGSGVRVAILDSGISAHSDLNIRGGASFVPGEPTTADLNGHGTHVAGTVAALNNSIGVIGYAPNAELYAVKVLGANGSGSVSGIAQGLEWAATNNMHIANMSLGSDFPSSTLERAVNYATSRDVLVIAATGNNGSGSVGYPARYANAMAVGATDQNNRRANFSQYGTGIDIVAPGVNVQSTYPGNRYVSMNGTSMATPHVAGAAALVKQRYPSWNATQIRNHLKNTATNLGNSSQFGSGLVNAEAATR

SEQ ID NO: 66247 - protein, 268 aa, Unidentified
QTVPWGITRVQAPAVHNRGITGSGVRVAILDSGISAHEDLNIRGGASFVPGEPTTADLNGHGTHVAGTVAALNNSIGVIGVAPNAELYAVKVLGANGSGSVSGIAQGLEWAATNNMHIANMSLGSDFPSSTLERAVNYATSRDVLVIAATGNNGSGSVGYPARYANAMAVGATDQNNRRANFSQYGTDIDIVAPGVNVQSTYPGNRYVSMNGTSMATPHVAGAAALVKQRYPSWNATQIRNHLKNTATNLGNSSQFGSGLVNAEAATR

SEQ ID NO: 66248 - protein, 268 aa, Unidentified
QTVPWGITRVQAPAVHNRGITGSGVRVAILDSGISAHSDLNIRGGASFVPGEPTTADLNGHGTHVAGTVAALNNSIGVIGVAPNAELYAVKVLGANGSGSVSGIAQGLEWAATNNMHIANMSLGSDFPDSTLERAVNYATSRDVLVIAATGNNGSGSVGYPARYANAMAVGATDQNNRRANFSQYGTGIDIVAPGVNVQSTYPGNRYVSMNGTSMATPHVAGAAALVKQRYPSWNATQIRNHLKNTATNLGNSSQFGSGLVNAEAATR

SEQ ID NO: 66249 - protein, 268 aa, Unidentified
QTVPWGITRVQAPAVHNRGITGSGVRVAILDSGISAHEDLNIRGGASFVPGEPTTADLNGHGTHVAGTVAALNNSIGVIGVAPNAELYAVKVLGANGSGSVSGIAQGLEWAATNNMHIANMSLGSDFPSSTLERAVNYATSRDVLVIAATGNNGSGSVGYPARYANAMAVGATDQNNRRANFSQYGTGIDIVAPGVNVQSTYPGNRYVEMNGTSMATPHVAGAAALVKQRYPSWNATQIRNHLKNTATNLGNSSQFGSGLVNAEAATR

SEQ ID NO: 66250 - protein, 268 aa, Unidentified
QTVPWGITRVQAPAVHNRGITGSGVRVAILDSGISAHSDLNIRGGAEFVPGEPTTADLNGHGTHVAGTVAALNNSIGVIGVAPNAELYAVKVLGANGSGSVSGIAQGLEWAATNNMHIANMSLGSDFPSSTLERAVNYATSRDVLVIAATGNNGSGSVGYPARYANAMAVGATDQNNRRANFSQYGTGIDIVAPGVNVQSTYPGNRYVSMNGTSMATPHVAGAAALVKQRYPSWNATQIRNHLKNTATNLGNSSQFGSGLVNAEAATR

SEQ ID NO: 66251 - protein, 268 aa, Unidentified
QTVPWGITRVQAPAVHNRGITGSGVRVAILDSGISAHEDLNIRGGASFVPGEPTTADLNGHGTHVAGTVAALNNRIGVIGVAPNAELYAVKVLGANGSGSVSGIAQGLEWAATNNMHIANMSLGSDFPSSTLERAVNYATSRDVLVIAATGNNGSGSVGYPARYANAMAVGATDQNNRRANFSQYGTGIDIVAPGVNVQSTYPGNRYVSMNGTSMATPHVAGAAALVKQRYPSWNATQIRNHLKNTATNLGNSSQFGSGLVNAEAATR

SEQ ID NO: 66252 - protein, 268 aa, Unidentified
QTVPWGITRVQAPAVHNRGITGSGVRVAILDSGISAHEDLNIRGGASFVPGEPTTADLNGHGTHVAGTVAALNNSIGVIGVAPNAELYAVKVLGANGSGSVSGIAQGLEWAATNNMHIANMSLGSDFPSSTLERAVNYATSRDVLVIAATGNNGSGSVGYPARYANAMAVGATDQNNRRANFSQYGTGIDIVAPGVNVQSTYPGNRYVSMNGTSMATPHVAGAAALVKQRYPDWNATQIRNHLKNTATNLGNSSQFGSGLVNAEAATR

SEQ ID NO: 66253 - protein, 268 aa, Unidentified
QTVPWGITRVQAPAVYNRGITGSGVRVAILDSGISAHEDLNIRGGASFVPGEPTTADLNGHGTHVAGTVAALNNSIGVIGVAPNAELYAVKVLGANGSGSVSGIAQGLEWAATNNMHIANMSLGSDFPSSTLERAVNYATSRDVLVIAATGNNGSGSVGYPARYANAMAVGATDQNNRRANFSQYGTGIDIVAPGVNVQSTYPGNRYVSMNGTSMATPHVAGAAALVKQRYPSWNATQIRNHLKNTATNLGNSSQFGSGLVNAEAATR

SEQ ID NO: 66254 - protein, 268 aa, Unidentified
QTVPWGITRVQAPAVHNRGITGSGVRVAILDSGITAHEDLNIRGGASFVPGEPTTADLNGHGTHVAGTVAALNNSIGVIGVAPNAELYAVKVLGANGSGSVSGIAQGLEWAATNNMHIANMSLGSDFPSSTLERAVNYATSRDVLVIAATGNNGSGSVGYPARYANAMAVGATDQNNRRANFSQYGTGIDIVAPGVNVQSTYPGNRYVSMNGTSMATPHVAGAAALVKQRYPSWNATQIRNHLKNTATNLGNSSQFGSGLVNAEAATR

SEQ ID NO: 66255 - protein, 268 aa, Unidentified
QTVPWGITRVQAPAVHNRGITGSGVRVAILDSGISAHEDLNIRGGASFVPGEPTSADLNGHGTHVAGTVAALNNSIGVIGVAPNAELYAVKVLGANGSGSVSGIAQGLEWAATNNMHIANMSLGSDFPSSTLERAVNYATSRDVLVIAATGNNGSGSVGYPARYANAMAVGATDQNNRRANFSQYGTGIDIVAPGVNVQSTYPGNRYVSMNGTSMATPHVAGAAALVKQRYPSWNATQIRNHLKNTATNLGNSSQFGSGLVNAEAATR

SEQ ID NO: 66256 - protein, 268 aa, Unidentified
QTVPWGITRVQAPAVHNRGITGSGVRVAILDSGISAHSDLNIRGGASFVPGEPTTADLNGHGTHVAGTVAALNNSIGVIGVAPNAELFAVKVLGANGSGSVSGIAQGLEWAATNNMHIANMSLGSDFPSSTLERAVNYATSRDVLVIAATGNNGSGSVGYPARYANAMAVGATDQNNRRANFSQYGTGIDIVAPGVNVQSTYPGNRYVSMNGTSMATPHVAGAAALVKQRYPSWNATQIRNHLKNTATNLGNSSQFGSGLVNAEAATR

SEQ ID NO: 66257 - protein, 268 aa, Unidentified
QTVPWGITRVQAPAVHNRGITGSGVRVAILDSGISAHEDLNIRGGASFVPGEPTTADLNGHGTHVAGTVAALNNSIGVIGVAPNAELYAVKVLGANGSGSVSGIAQGLEWAATNNMHIANMSLGSDFPSSTLERAVNYATSRDVLVIAATGNNGSGSVGYPARYANAMAVGATDQNNRRANFSQYGTGIDIVAPGVNVQSTYPGNRYVSMNGTSMATPHVAGAAALVKQRYPSWNATQIRNHLKNTATNLGNSSQFGSGLVNANAATR

SEQ ID NO: 66258 - protein, 268 aa, Unidentified
QTVPWGITRVQAPAVWNRGITGSGVRVAILDSGISAHEDLNIRGGASFVPGEPTTADLNGHGTHVAGTVAALNNSIGVIGVAPNAELYAVKVLGANGSGSVSGIAQGLEWAATNNMHIANMSLGSDFPSSTLERAVNYATSRDVLVIAATGNNGSGSVGYPARYANAMAVGATDQNNRRANFSQYGTGIDIVAPGVNVQSTYPGNRYVSMNGTSMATPHVAGAAALVKQRYPSWNATQIRNHLKNTATNLGNSSQFGSGLVNAEAATR

SEQ ID NO: 66259 - protein, 268 aa, Unidentified
QTVPWGITRVQAPAVHNRGITGSGVRVAILDSGISAHSDLNIRGGASFVPGEPTTADLNGHGTHVAGTVAALNNSIGVIGVAPNAELYAVKVLGANGSGSVSGIAQGLEWAATNNMHIANMSLGSDFPNSTLERAVNYATSRDVLVIAATGNNGSGSVGYPARYANAMAVGATDQNNRRANFSQYGTGIDIVAPGVNVQSTYPGNRYVSMNGTSMATPHVAGAAALVKQRYPSWNATQIRNHLKNTATNLGNSSQFGSGLVNAEAATR

SEQ ID NO: 66260 - protein, 268 aa, Unidentified
QTVPWGITRVQAPAVHNRGITGSGVRVAILDSGISAHSDLNIRGGASFVPGEPTTADLNGHGTHVAGTVAALNNSIGVIGVAPNAELYAVKVLGANGSGAVSGIAQGLEWAATNNMHIANMSLGSDFPSSTLERAVNYATSRDVLVIAATGNNGSGSVGYPARYANAMAVGATDQNNRRANFSQYGTGIDIVAPGVNVQSTYPGNRYVSMNGTSMATPHVAGAAALVKQRYPSWNATQIRNHLKNTATNLGNSSQFGSGLVNAEAATR

SEQ ID NO: 66261 - protein, 268 aa, Unidentified
QTVPWGITRVQAPAVHNRGITGSGVRVAILDSGISAHEDLNIRGGASFVPGEPTTADLNGHGTHVAGTVAALNNSIGVIGVAPNAELYAVKVLGANGSGSVSGIAQGLEWAATNNMHIANMSLGSDFPSSTLERALNYATSRDVLVIAATGNNGSGSVGYPARYANAMAVGATDQNNRRANFSQYGTGIDIVAPGVNVQSTYPGNRYVSMNGTSMATPHVAGAAALVKQRYPSWNATQIRNHLKNTATNLGNSSQFGSGLVNAEAATR

SEQ ID NO: 66262 - protein, 268 aa, Unidentified
QTVPWGITRVQAPAVHNRGITGSGVRVAILDSGISAHEDLNIRGGASFVPGEPTTADLNGHGTHVAGTVAALNNSIGVIGVAPNAELYAVKVLGANGSGSVSGIAQGLEWAATNNMHIANMSLGSDFPSSTLERAVNYATSRDVLVIAATGNNGSGSVGYPARYANAMAVGATDQNNRRANFSQYGTGIDIVAPGVNVQSTYPGNRYVSMNGTSMATPHVAGAAALVKQRYPSWNATMIRNHLKNTATNLGNSSQFGSGLVNAEAATR

SEQ ID NO: 66263 - protein, 268 aa, Unidentified
QTVPWGITRVQAPAVHNRGITGSGVRVAILDSGISAHEDLNIRGGASFVPGEPTTADLNGHGTHVAGTVAALNNSIGVIGVAPNAELYAVKVLGANGSGSVSGIAQGLEWAATNNMHIANMSLGSDFPSSTLERAVNYATSRDVLVIAATGNNGSGSVGYPARYANAMAVGATDQNNRRANFSQYGTGIDIVAPGVNVQSTYPGNRYVSMNGTSMATPHVAGAAALVKQRYPSWNATEIRNHLKNTATNLGNSSQFGSGLVNAEAATR

SEQ ID NO: 66264 - protein, 268 aa, Unidentified
QTVPWGITRVQAPAVHNRGITGSGVRVAILDSGISAHSDLNIRGGASFVPGEPTTADLNGHGTHVAGTVAALNNSIGVIGVAPNATLYAVKVLGANGSGSVSGIAQGLEWAATNNMHIANMSLGSDFPSSTLERAVNYATSRDVLVIAATGNNGSGSVGYPARYANAMAVGATDQNNRRANFSQYGTGIDIVAPGVNVQSTYPGNRYVSMNGTSMATPHVAGAAALVKQRYPSWNATQIRNHLKNTATNLGNSSQFGSGLVNAEAATR

SEQ ID NO: 66265 - protein, 268 aa, Unidentified
QTVPWGITRVQAPAVHNRNITGSGVRVAILDSGISAHEDLNIRGGASFVPGEPTTADLNGHGTHVAGTVAALNNSIGVIGVAPNAELYAVKVLGANGSGSVSGIAQGLEWAATNNMHIANMSLGSDFPSSTLERAVNYATSRDVLVIAATGNNGSGSVGYPARYANAMAVGATDQNNRRANFSQYGTGIDIVAPGVNVQSTYPGNRYVSMNGTSMATPHVAGAAALVKQRYPSWNATQIRNHLKNTATNLGNSSQFGSGLVNAEAATR

SEQ ID NO: 66266 - protein, 268 aa, Unidentified
QTVPWGITRVQAPAVHNRGITGSGVRVAILDSGISAHEDLNIRGGASFVPGEPTTADLNGHGTHVAGTVAALNNSIGVIGVAPNAELYAVKVLGANGSGSVSGIAQGLEWAATNNMHIANMSLGSDFPSSTLERAVNYATSRDVLVIAATGNNGSGSVGYPARYANAMAVGATDQNNRRANFSQYGTGIDIVAPGVNVQSTYPGNRYVSMNGTSMATPHVAGAAAMVKQRYPSWNATQIRNHLKNTATNLGNSSQFGSGLVNAEAATR

SEQ ID NO: 66267 - protein, 268 aa, Unidentified
QTVPWGITRVQAPAVHNRGITGSGVRVAILDSGISAHEDLNIRGGASFVPGEPTTADLNGHGTHVAGTVAALNNSIGVIGVAPNAELYAVKVLGANGSGSVSGIAQGLEWAATNNMHIANMSLGSDFPSSTLERAVNYATSRDVLVIAATGNNGSGSVGYPARYANAMAVGATDQNNRRANFSQYGTGIDIVAPGVNVQSTYPGNRYVSMNGTSMATPHVAGAAALVKQRYPSWNATQIRNHLKATATNLGNSSQFGSGLVNAEAATR

SEQ ID NO: 66268 - protein, 268 aa, Unidentified
QTVPWGITRVQAPAVHNRGITGSGVRVAILDSGISAHSDLNIRGGASFVPGEPTTADLNGHGTHVAGTVAALNNSIGVIGVAPNAALYAVKVLGANGSGSVSGIAQGLEWAATNNMHIANMSLGSDFPSSTLERAVNYATSRDVLVIAATGNNGSGSVGYPARYANAMAVGATDQNNRRANFSQYGTGIDIVAPGVNVQSTYPGNRYVSMNGTSMATPHVAGAAALVKQRYPSWNATQIRNHLKNTATNLGNSSQFGSGLVNAEAATR

SEQ ID NO: 66269 - protein, 268 aa, Unidentified
QTVPWGITRVQAPAVHNRGITGSGVRVAILDSGISAHSDLNIRGGASFVPGEPTTADLNGHGTHVAGTVAALDNSIGVIGVAPNAELYAVKVLGANGSGSVSGIAQGLEWAATNNMHIANMSLGSDFPSSTLERAVNYATSRDVLVIAATGNNGSGSVGYPARYANAMAVGATDQNNRRANFSQYGTGIDIVAPGVNVQSTYPGNRYVSMNGTSMATPHVAGAAALVKQRYPSWNATQIRNHLKNTATNLGNSSQFGSGLVNAEAATR

SEQ ID NO: 66270 - protein, 268 aa, Unidentified
QTVPWGITRVQAPAVHNRGITGSGVRVAILDSGISAHEDLNIRGGASFVPGEPTTADLNGHGTHVAGTVAALNNSIGVIGVAPNAELYAVKVLGANGSGSVSGIAQGLEWAATNNMHIANMSLGSDFPSSTLERAVNYATSRDVLVIAATGNNGSGSVGYPARYANAMAVGATDQNNRRANFSQYGTGIDIVAPGVNVQSTYPGNRYVSMNGTSMATPHVAGAAALVKQRYPAWNATQIRNHLKNTATNLGNSSQFGSGLVNAEAATR

SEQ ID NO: 66271 - protein, 268 aa, Unidentified
QTVPWGITRVQAPAVHNRGITGSGVRVAILDSGISAHEDLNIRGGASFVPGEPTTADLNGHGTHVAGTVAALNNSIGVIGVAPNAELYAVKVLGANGSGSVSGIAQGLLWAATNNMHIANMSLGSDFPSSTLERAVNYATSRDVLVIAATGNNGSGSVGYPARYANAMAVGATDQNNRRANFSQYGTGIDIVAPGVNVQSTYPGNRYVSMNGTSMATPHVAGAAALVKQRYPSWNATQIRNHLKNTATNLGNSSQFGSGLVNAEAATR

SEQ ID NO: 66272 - protein, 268 aa, Unidentified
QTVPWGITRVQAPAVHNRGITGSGVRVAILDSGISAHEDLNIRGGASFVPGEPTTADLNGHGTHVAGTVAALNNSIGVIGVAPNAELYAVKVLGANGSGSVSGIAQGLEWAATNNMHIANMSLGSDFNSSTLERAVNYATSRDVLVIAATGNNGSGSVGYPARYANAMAVGATDQNNRRANFSQYGTGIDIVAPGVNVQSTYPGNRYVSMNGTSMATPHVAGAAALVKQRYPSWNATQIRNHLKNTATNLGNSSQFGSGLVNAEAATR

SEQ ID NO: 66273 - protein, 268 aa, Unidentified
QTVPWGITRVQAPAVHNRGITGSGVRVAILDSGISAHEDLNIRGGASFVPGEPTTADLNGHGTHVAGTVAALNNSIGVIGVAPNAELYAVKVLGANGSGSVSGIAQGLEWAATNNMHIANMSLGSDFPSSTLERAVNYATSRDVLVIAATGNNGSGSVGYPARYANAMAVGATDQNNRRANFSQYGTGIDIVAPGVNVQSTYPGNRYVSMNGTSMATPHVAGAAALVKQRYPSWNATQIRNHLKNTATNLGNSSQFGNGLVNAEAATR

SEQ ID NO: 66274 - protein, 268 aa, Unidentified
QTVPWGITRVQAPAVHNRGITGSGVRVAILDSGISAHSCLNIRGGASFVPGEPTTADLNGHGTHVAGTVAALNNSIGVIGVAPNAELYAVKVLGANGSGSVSGIAQGLEWAATNNMHIANMSLGSDFPSSTLERAVNYATSRDVLVIAATGNNGSGSVGYPARYANAMAVGATDQNNRRANFSQYGTGIDIVAPGVNVQSTYPGNRYVSMNGTSMATPHVAGAAALVKQRYPSWNATQIRNHLKNTATNLGNSSQFGSGLVNAEAATR

SEQ ID NO: 66275 - protein, 268 aa, Unidentified
QTVPWGITRVQAPAVHNRGITGSGVRVAILDSGISAHEDLNIRGGASFVPGEPTTADLNGHGTHVAGTVAALNNSIGVIGVAPNAELYAVKVLGANGSGSVSGIAQGLEWAATNNMHIANMSLGSDFPSSTLERAVNYATSRDVLVIAATGNNGSGSVGYPARYANAMAVGATDQNNRRANFSQYGTGIDIVAPGVDVQSTYPGNRYVSMNGTSMATPHVAGAAALVKQRYPSWNATQIRNHLKNTATNLGNSSQFGSGLVNAEAATR

SEQ ID NO: 66276 - protein, 268 aa, Unidentified
QTVPWGITRVQAPAVHNRGITGSGVRVAILDSGISAHEDLNIRGGASFVPGEPTTADLNGHGTHVAGTVAALNNSIGVIGVAPNAELYAVKVLGANGSGSVSGIAQGLEWAATNNMHIANMSLGSDFPSSTLERAVNYATSRDVLVIAATGNNGSGSVGYPARYANAMAVGATDQSNRRANFSQYGTGIDIVAPGVNVQSTYPGNRYVSMNGTSMATPHVAGAAALVKQRYPSWNATQIRNHLKNTATNLGNSSQFGSGLVNAEAATR

SEQ ID NO: 66277 - protein, 268 aa, Unidentified
QTVPWGITRVQAPAVHNRGITGSGVRVAILDSGISAHEDLNIRGGASFVPGEPTTADLNGHGTHVAGTVAALNNSIGVIGVAPNAELYAVKVLGANGSGSVSGIAQGLEWAATNNMHIANMSLGSDFPSSTLERAVNYATSRDVLVIAATGNNGSGSVGYPAQYANAMAVGATDQNNRRANFSQYGTGIDIVAPGVNVQSTYPGNRYVSMNGTSMATPHVAGAAALVKQRYPSWNATQIRNHLKNTATNLGNSSQFGSGLVNAEAATR

SEQ ID NO: 66278 - protein, 268 aa, Unidentified
QTVPWGITRVQAPDVHNRGITGSGVRVAILDSGISAHEDLNIRGGASFVPGEPTTADLNGHGTHVAGTVAALNNSIGVIGVAPNAELYAVKVLGANGSGSVSGIAQGLEWAATNNMHIANMSLGSDFPSSTLERAVNYATSRDVLVIAATGNNGSGSVGYPARYANAMAVGATDQNNRRANFSQYGTGIDIVAPGVNVQSTYPGNRYVSMNGTSMATPHVAGAAALVKQRYPSWNATQIRNHLKNTATNLGNSSQFGSGLVNAEAATR

SEQ ID NO: 66279 - protein, 268 aa, Unidentified
QTVPWGITRVQAPAVHNRGITGQGVRVAILDSGISAHSDLNIRGGASFVPGEPTTADLNGHGTHVAGTVAALNNSIGVIGVAPNAELYAVKVLGANGSGSVSGIAQGLEWAATNNMHIANMSLGSDFPSSTLERAVNYATSRDVLVIAATGNNGSGSVGYPARYANAMAVGATDQNNRRANFSQYGTGIDIVAPGVNVQSTYPGNRYVSMNGTSMATPHVAGAAALVKQRYPSWNATQIRNHLKNTATNLGNSSQFGSGLVNAEAATR

SEQ ID NO: 66280 - protein, 268 aa, Unidentified
QTVPWGITRVQAPAVHNRGITGSGVRVAILDSGISAHSDLNIRGGASFVPGEPTTADLNGHGTHVAGTVAALNNSIGVIGVAPNAELYAVKVLGANGSGSVSGIAQGLEWAATNNMHIANMSLGSDQPSSTLERAVNYATSRDVLVIAATGNNGSGSVGYPARYANAMAVGATDQNNRRANFSQYGTGIDIVAPGVNVQSTYPGNRYVSMNGTSMASPHVAGAAALVKQRYPSWNATQIRNHLKNTATNLGNSSQFGSGLVNAEAATR

SEQ ID NO: 66281 - protein, 268 aa, Unidentified
QTVPWGITRVQAPAVHNRGITGSGVRVAILDSGISAHSDLNIRGGASFVPGEPTTADLNGHGTHVAGTVAALNNSIGVIGWAPNAELYAVKVLGANGSGSVSGIAQGLEWAATNNMHIANMSLGSDFPSSTLERAVNYATSRDVLVIAATGNNGSGSVGYPARYANAMAVGATDQNNRRANFSQYGTGIDIVAPGVNVQSTYPGNRYVSMNGTSMATPHVAGAAALVKQRYPSWNATQIRNHLKNTATNLGNSSQFGSGLVNAEAATR

SEQ ID NO: 66282 - protein, 268 aa, Unidentified
QTVPWGITRVQAPAVHNRGITGSGVRVAILDSGISAHEDLNIRGGASFVPGEPTTADLNGHGTHVAGTVAALNNSIGVIGVAPNAELYAVKVLGANGSGSVSGIAQGLEWAATNNMNIANMSLGSDFPSSTLERAVNYATSRDVLVIAATGNNGSGSVGYPARYANAMAVGATDQNNRRANFSQYGTGIDIVAPGVNVQSTYPGNRYVSMNGTSMATPHVAGAAALVKQRYPSWNATQIRNHLKNTATNLGNSSQFGSGLVNAEAATR

SEQ ID NO: 66283 - protein, 268 aa, Unidentified
QTVPWGITRVQAPAVHNRGITGSGVRVAILDSGISAHSDLNIRGGASFVPGEPTTADLNGHGTHVAGTVAALNNSIGVIGVAPNAELYAVKVLGANGSGSVSGIAQGLEWAATNNMHIANMSLGSDFTSSTLERAVNYATSRDVLVIAATGNNGSGSVGYPARYANAMAVGATDQNNRRANFSQYGTGIDIVAPGVNVQSTYPGNRYVSMNGTSMATPHVAGAAALVKQRYPSWNATQIRNHLKNTATNLGNSSQFGSGLVNAEAATR

SEQ ID NO: 66284 - protein, 268 aa, Unidentified
QTVPWGITRVQAPAVHNRGITGSGVRVAILDSGISAHEDLNIRGGASFVPGEPTTADLNGHGTHVAGTVAALNNSIGVIGVAPNAELYAVKVLGANGSGSVSGIAQGLEWAATNNMHIANMSLGSDFPSSTLERAVNYATSRDVLVIAATGNNGSGSVGYPAMYANAMAVGATDQNNRRANFSQYGTGIDIVAPGVNVQSTYPGNRYVSMNGTSMATPHVAGAAALVKQRYPSWNATQIRNHLKNTATNLGNSSQFGSGLVNAEAATR

SEQ ID NO: 66285 - protein, 268 aa, Unidentified
QTVPWGITRVQAPAVINRGITGSGVRVAILDSGISAHEDLNIRGGASFVPGEPTTADLNGHGTHVAGTVAALNNSIGVIGVAPNAELYAVKVLGANGSGSVSGIAQGLEWAATNNMHIANMSLGSDFPSSTLERAVNYATSRDVLVIAATGNNGSGSVGYPARYANAMAVGATDQNNRRANFSQYGTGIDIVAPGVNVQSTYPGNRYVSMNGTSMATPHVAGAAALVKQRYPSWNATQIRNHLKNTATNLGNSSQFGSGLVNAEAATR

SEQ ID NO: 66286 - protein, 268 aa, Unidentified
QTVPWGITRVQAPAVHNRGITGSGIRVAILDSGISAHEDLNIRGGASFVPGEPTTADLNGHGTHVAGTVAALNNSIGVIGVAPNAELYAVKVLGANGSGSVSGIAQGLEWAATNNMHIANMSLGSDFPSSTLERAVNYATSRDVLVIAATGNNGSGSVGYPARYANAMAVGATDQNNRRANFSQYGTGIDIVAPGVNVQSTYPGNRYVSMNGTSMATPHVAGAAALVKQRYPSWNATQIRNHLKNTATNLGNSSQFGSGLVNAEAATR

SEQ ID NO: 66287 - protein, 268 aa, Unidentified
QTVPWGITRVQAPAVHNRGITGSGVRVAILDSGISAHEDLNIRGGASFVPGEPTTADLNGHGTHVAGTVAALNNNIGVIGVAPNAELYAVKVLGANGSGSVSGIAQGLEWAATNNMHIANMSLGSDFPSSTLERAVNYATSRDVLVIAATGNNGSGSVGYPARYANAMAVGATDQNNRRANFSQYGTGIDIVAPGVNVQSTYPGNRYVSMNGTSMATPHVAGAAALVKQRYPSWNATQIRNHLKNTATNLGNSSQFGSGLVNAEAATR

SEQ ID NO: 66288 - protein, 268 aa, Unidentified
QTVPWGITRVQAPAVHNRGITGSGVRVAILDSGISAHSDLNIRGGASFVPGEPTTADLNGHGTHVAGTVAALNNSIGVIGVAPNAELYAVKVLGANGSGSVSGIAQGLEWAATNNMHIANMSLGSDFPASTLERAVNYATSRDVLVIAATGNNGSGSVGYPARYANAMAVGATDQNNRRANFSQYGTGIDIVAPGVNVQSTYPGNRYVSMNGTSMATPHVAGAAALVKQRYPSWNATQIRNHLKNTATNLGNSSQFGSGLVNAEAATR

SEQ ID NO: 66289 - protein, 268 aa, Unidentified
QTVPWGITRVQAPAVHNRGITGSGVRVAILDSGISAHEDLNIRGGASFVPGEPTTADLNGHGTHVAGTVAALNNSIGVIGVAPNAELYAVKVLGANGSGSVSGIAQGLEWAATNNMHIANMSLGSDFPSSTLERAVNYATSRDVLVIAATGNNGSGSVGYPARYANAMAVGATDQNNRRANFSQYGTGIDIVAPGVNVQSTYPGNRYVSMNGTSMATPHVAGAAALVKQRYPSWNATQIRNHLKNTAFNLGNSSQFGSGLVNAEAATR

SEQ ID NO: 66290 - protein, 268 aa, Unidentified
QTVPWGITRVAAPAVHNRGITGSGVRVAILDSGISAHEDLNIRGGASFVPGEPTTADLNGHGTHVAGTVAALNNSIGVIGVAPNAELYAVKVLGANGSGSVSGIAQGLEWAATNNMHIANMSLGSDFPSSTLERAVNYATSRDVLVIAATGNNGSGSVGYPARYANAMAVGATDQNNRRANFSQYGTGIDIVAPGVNVQSTYPGNRYVSMNGTSMATPHVAGAAALVKQRYPSWNATQIRNHLKNTATNLGNSSQFGSGLVNAEAATR

SEQ ID NO: 66291 - protein, 268 aa, Bacillus gibsonii
QTVPWGITRVQAPAVHNRGITGSGVRVAILDSGISAHSDLNIRGGASFVPGEPTTADLNGHGTHVAGTVAALNNSIGVIGVAPNAELYAVKVLGANGSGSVSGIAQGLEWAATNNMHIANMSLGLDFPSSTLERAVNYATSRDVLVIAATGNNGSGSVGYPARYANAMAVGATDQNNRRANFSQYGTGIDIVAPGVNVQSTYPGNRYVSMNGTSMATPHVAGAAALVKQRYPSWNATQIRNHLKNTATNLGNSSQFGSGLVNAEAATR

SEQ ID NO: 66292 - protein, 268 aa, Unidentified
QTVPWGITRVQAPAVHNRGITGSGVRVAILDSGISAHEDLNIRGGASFVPGEPTTADLNGHGTHVAGTVAALNNSIGVIGVAPNAELYAVKVLGANGSGSVSGIAQGLEWAATNNMHIANMSLGSDFPSSTLERAVNYATSRDVLVIAATGNNGSGSVGYPARYANAMAVGATDQNNRRANFSQYGTGIDIVAPGVNVQSTYPGNRYVSMNGTSMATPHVAGAAALVKQRYPSWNATQIRNHLKNTATNLGNSSQFGSGLLNAEAATR

SEQ ID NO: 66293 - protein, 268 aa, Unidentified
QTVPWGITRVQAPAVHNRGITGSGVRVAILDSGISAHEDLNIRGGASFVPGEPTTADLNGHGTHVAGTVAALNNSIGVIGVAPNAELYAVKVLGANGSGSVSGIAQGLEWAATNNMHIANMSLGSDFPSSTLERAVNYATSRDVLVIAATGNNGSGVVGYPARYANAMAVGATDQNNRRANFSQYGTGIDIVAPGVNVQSTYPGNRYVSMNGTSMATPHVAGAAALVKQRYPSWNATQIRNHLKNTATNLGNSSQFGSGLVNAEAATR

SEQ ID NO: 66294 - protein, 268 aa, Unidentified
QTVPWGITRVQADAVHNRGITGSGVRVAILDSGISAHEDLNIRGGASFVPGEPTTADLNGHGTHVAGTVAALNNSIGVIGVAPNAELYAVKVLGANGSGSVSGIAQGLEWAATNNMHIANMSLGSDFPSSTLERAVNYATSRDVLVIAATGNNGSGSVGYPARYANAMAVGATDQNNRRANFSQYGTGIDIVAPGVNVQSTYPGNRYVSMNGTSMATPHVAGAAALVKQRYPSWNATQIRNHLKNTATNLGNSSQFGSGLVNAEAATR

SEQ ID NO: 66295 - protein, 268 aa, Unidentified
QTVPWGITRVQAPAVHNRGITGSGVRVAILDSGISAHSELNIRGGASFVPGEPTTADLNGHGTHVAGTVAALNNSIGVIGVAPNAELYAVKVLGANGSGSVSGIAQGLEWAATNNMHIANMSLGSDFPSSTLERAVNYATSRDVLVIAATGNNGSGSVGYPARYANAMAVGATDQNNRRANFSQYGTGIDIVAPGVNVQSTYPGNRYVSMNGTSMATPHVAGAAALVKQRYPSWNATQIRNHLKNTATNLGNSSQFGSGLVNAEAATR

SEQ ID NO: 66296 - protein, 268 aa, Unidentified
QTVPWGITRVQAPAVHNRGITGSGVRVAILDSGISAHEDLNIRGGASFVPGEPTTADLNGHGTHVAGTVAALNNSIGVIGVAPNAELYAVKVLGANGRGSVSGIAQGLEWAATNNMHIANMSLGAEGPSSTLERAVNYATSRDVLVIAATGNNGSGSVGYPARYANAMAVGATDQNNQRANFSQYGTGIDIVAPGVNVQSTYPGNRYVSLNGTSMATPHVAGAAALVKQRYPSWNATQIRNHLKNTATNLGNSSQFGSGLVNAEAATR

SEQ ID NO: 66297 - protein, 268 aa, Unidentified
QTVPWGITRVQAPAVHNRGITGSGVRVAILDSGIVAHEDLNIRGGASFVPGEPTTADLNGHGTHVAGTVAALNNSIGVIGVAPNAELYAVKVLGANGSGSVSGIAQGLEWAATNNMHIANMSLGSDFPSSTLERAVNYATSRDVLVIAATGNNGSGSVGYPARYANAMAVGATDQNNRRANFSQYGTGIDIVAPGVNVQSTYPGNRYVSMNGTSMATPHVAGAAALVKQRYPSWNATQIRNHLKNTATNLGNSSQFGSGLVNAEAATR

SEQ ID NO: 66298 - protein, 268 aa, Unidentified
QTVPWGITRVQAPAVHNRGITGSGVRVAILDSGISAHEDLNIRGGASFVPGEPTTADLNGHGTHVAGTVAALNNSIGVIGVAPNAELYAVKVLGANGSGSVSGIAQGLEWAATNNMHIANMSLGSDFPSSTLERAVNYATSRDVLVIAATGNNGSGSVGYPARYANAMAVGATDQNNRRANFSQYGTGIDIVAPGVNVQSTYPGNRYVSMNGTSMATPHVAGAAALVKQRYPSWNATQIRNHLKNTAYNLGNSSQFGSGLVNAEAATR

SEQ ID NO: 66299 - protein, 268 aa, Unidentified
QTVPWGITRVQAPAVHNRGITGSGVRVAILDSGISAHEDLNIRGGASFVPGEPTTADLNGHGTHVAGTVAALNNHIGVIGVAPNAELYAVKVLGANGSGSVSGIAQGLEWAATNNMHIANMSLGSDFPSSTLERAVNYATSRDVLVIAATGNNGSGSVGYPARYANAMAVGATDQNNRRANFSQYGTGIDIVAPGVNVQSTYPGNRYVSMNGTSMATPHVAGAAALVKQRYPSWNATQIRNHLKNTATNLGNSSQFGSGLVNAEAATR

SEQ ID NO: 66300 - protein, 268 aa, Unidentified
QTVPWGITRVQAPAVHNRGITGSGVRVAILDSGISAHEDLNIRGGASFVPGEPTTADLNGHGTHVAGTVAALNNSIGVIGVAPNAELYAVKVLGQNGSGSVSGIAQGLEWAATNNMHIANMSLGSDFPSSTLERAVNYATSRDVLVIAATGNNGSGSVGYPARYANAMAVGATDQNNRRANFSQYGTGIDIVAPGVNVQSTYPGNRYVSMNGTSMATPHVAGAAALVKQRYPSWNATQIRNHLKNTATNLGNSSQFGSGLVNAEAATR

SEQ ID NO: 66301 - protein, 268 aa, Unidentified
QTVPWGITRVQAPAVHNRGITGSGVRVAILDSGISAHEDLNIIGGASFVPGEPTTADLNGHGTHVAGTVAALNNSIGVIGVAPNAELYAVKVLGANGSGSVSGIAQGLEWAATNNMHIANMSLGSDFPSSTLERAVNYATSRDVLVIAATGNNGSGSVGYPARYANAMAVGATDQNNRRANFSQYGTGIDIVAPGVNVQSTYPGNRYVSMNGTSMATPHVAGAAALVKQRYPSWNATQIRNHLKNTATNLGNSSQFGSGLVNAEAATR

SEQ ID NO: 66302 - protein, 268 aa, Unidentified
QTVPWGITRVTAPAVHNRGITGSGVRVAILDSGISAHEDLNIRGGASFVPGEPTTADLNGHGTHVAGTVAALNNSIGVIGVAPNAELYAVKVLGANGSGSVSGIAQGLEWAATNNMHIANMSLGSDFPSSTLERAVNYATSRDVLVIAATGNNGSGSVGYPARYANAMAVGATDQNNRRANFSQYGTGIDIVAPGVNVQSTYPGNRYVSMNGTSMATPHVAGAAALVKQRYPSWNATQIRNHLKNTATNLGNSSQFGSGLVNAEAATR

SEQ ID NO: 66303 - protein, 268 aa, Unidentified
QTVPWGITRVQAPAVHNRGITGSGVRVAILDSGISAHEDLNIRGGASFVPGEPTTADLNGHGTHVAGTVAALNNSIGVIGVAPNAELYAVKVLGANGSGSVSGIAQGLEWAATNNMHIANMSLGSDFPSSTLERAVNYATSRDVLVIAMTGNNGSGSVGYPARYANAMAVGATDQNNRRANFSQYGTGIDIVAPGVNVQSTYPGNRYVSMNGTSMATPHVAGAAALVKQRYPSWNATQIRNHLKNTATNLGNSSQFGSGLVNAEAATR

SEQ ID NO: 66304 - protein, 268 aa, Unidentified
QTVPWGITRVQAPYVHNRGITGSGVRVAILDSGISAHEDLNIRGGASFVPGEPTTADLNGHGTHVAGTVAALNNSIGVIGVAPNAELYAVKVLGANGSGSVSGIAQGLEWAATNNMHIANMSLGSDFPSSTLERAVNYATSRDVLVIAATGNNGSGSVGYPARYANAMAVGATDQNNRRANFSQYGTGIDIVAPGVNVQSTYPGNRYVSMNGTSMATPHVAGAAALVKQRYPSWNATQIRNHLKNTATNLGNSSQFGSGLVNAEAATR

SEQ ID NO: 66305 - protein, 268 aa, Unidentified
QTVPWGITRVQAPAVHNRGITGSGVRVAILDSGISAHEDLNIRGGASFVPGEPTTADLNGHGTHVAGTVAALNNSIGVIGVAPNAELYAVKVLGANGSGSVSGIAQGLEWAATNNMHIANMSLGSDFPSSTLERAVNYATSRDVLVIAATGNNGSGSVGYPARYANAMAVGATDQNNRRANFSQYGTGIDIVAPGVNVQSTYPGNRYVSMNGTSMATPHVAGAAALVKQRYPSWNATNIRNHLKNTATNLGNSSQFGSGLVNAEAATR

SEQ ID NO: 66306 - protein, 268 aa, Unidentified
QTVPWGITRVQAPAVHNRGITGSGVRVAILDSGISAHEDLNIRGGASFVPGEPTTADLNGHGTHVAGTVAALNNSIGVIGVAPNAELYAVKVLGANGSGSVSGIAQGLEWAATNNMHIANMSLGSDFPSSTLERAVNYATSRDVLVIAATGNNGSGSVGYPARYANAMAVGATDQNNRRANFSQYGTGIDIVAPGVNVQSTYPGNRYVSMNGTSMATPHVAGAAALVKQRYPSWNATQIRNHLKNTATNLGNSSQFGSGLVNTEAATR

SEQ ID NO: 66307 - protein, 268 aa, Unidentified
QTVPWGITRVQAPHVHNRGITGSGVRVAILDSGISAHEDLNIRGGASFVPGEPTTADLNGHGTHVAGTVAALNNSIGVIGVAPNAELYAVKVLGANGSGSVSGIAQGLEWAATNNMHIANMSLGSDFPSSTLERAVNYATSRDVLVIAATGNNGSGSVGYPARYANAMAVGATDQNNRRANFSQYGTGIDIVAPGVNVQSTYPGNRYVSMNGTSMATPHVAGAAALVKQRYPSWNATQIRNHLKNTATNLGNSSQFGSGLVNAEAATR

SEQ ID NO: 66308 - protein, 268 aa, Unidentified
QTVPWGITRVQAPAVHNRGITGSGVRVAILDSGISAHEDLNIRGGASFVPGEPTTADLNGHGTHVAGTVAALNNSIGVIGVAPNAELYAVKVLGANGEGSVSGIAQGLEWAATNNMHIANMSLGSDFPSSTLERAVNYATSRDVLVIAATGNNGSGSVGYPARYANAMAVGATDQNNRRANFSQYGTGIDIVAPGVNVQSTYPGNRYVSMNGTSMATPHVAGAAALVKQRYPSWNATQIRNHLKNTATNLGNSSQFGSGLVNAEAATR

SEQ ID NO: 66309 - protein, 268 aa, Unidentified
QTVPWGITRIQAPAVHNRGITGSGVRVAILDSGISAHEDLNIRGGASFVPGEPTTADLNGHGTHVAGTVAALNNSIGVIGVAPNAELYAVKVLGANGSGSVSGIAQGLEWAATNNMHIANMSLGSDFPSSTLERAVNYATSRDVLVIAATGNNGSGSVGYPARYANAMAVGATDQNNRRANFSQYGTGIDIVAPGVNVQSTYPGNRYVSMNGTSMATPHVAGAAALVKQRYPSWNATQIRNHLKNTATNLGNSSQFGSGLVNAEAATR

SEQ ID NO: 66310 - protein, 268 aa, Unidentified
QTVPWGITRVQAPAVHNRGITGSGVRVAILDSGISAHSDLNIRGGASFVPGEPTTADLNGHGTHVAGTVAALNNSIGVIGVAPNADLYAVKVLGANGSGSVSGIAQGLEWAATNNMHIANMSLGSDFPSSTLERAVNYATSRDVLVIAATGNNGSGSVGYPARYANAMAVGATDQNNRRANFSQYGTGIDIVAPGVNVQSTYPGNRYVSMNGTSMATPHVAGAAALVKQRYPSWNATQIRNHLKNTATNLGNSSQFGSGLVNAEAATR

SEQ ID NO: 66311 - protein, 268 aa, Unidentified
QTVPWGITRVQAPAVHNRGITGSGVRVAILDSGISAHSDLNIRGGASFVPGEPTTADLNGHGTHVAGTVAALNNSIGVIGVAPNAELYAVKVLGANGSGGVSGIAQGLEWAATNNMHIANMSLGSDFPSSTLERAVNYATSRDVLVIAATGNNGSGSVGYPARYANAMAVGATDQNNRRANFSQYGTGIDIVAPGVNVQSTYPGNRYVSMNGTSMATPHVAGAAALVKQRYPSWNATQIRNHLKNTATNLGNSSQFGSGLVNAEAATR

SEQ ID NO: 66312 - protein, 268 aa, Unidentified
QTVPWGITRVQAPAVHNRGITGSGVRVAILDSGISAHSDLNIRGGASFVPGEPTTARLNGHGTHVAGTVAALNNSIGVIGVAPNAELYAVKVLGANGSGSVSGIAQGLEWAATNNMHIANMSLGSDFPSSTLERAVNYATSRDVLVIAATGNNGSGSVGYPARYANAMAVGATDQNNRRANFSQYGTGIDIVAPGVNVQSTYPGNRYVSMNGTSMATPHVAGAAALVKQRYPSWNATQIRNHLKNTATNLGNSSQFGSGLVNAEAATR

SEQ ID NO: 66313 - protein, 268 aa, Unidentified
QTVPWGITRVQAPAVHNRGITGSGVRVAILDSGISAHEDLNIRGGASFVPGEPTTADLNGHGTHVAGTVAALNNSIGVIGVAPNAELYAVKVLGANGSGSVSGIAQGLEWAATNNMHIANMSLGSDFPSSTLERAVNYATQRDVLVIAATGNNGSGSVGYPARYANAMAVGATDQNNRRANFSQYGTGIDIVAPGVNVQSTYPGNRYVSMNGTSMATPHVAGAAALVKQRYPSWNATQIRNHLKNTATNLGNSSQFGSGLVNAEAATR

SEQ ID NO: 66314 - protein, 268 aa, Unidentified
QTVPWGITRVQAPAVHNRGITGSGVRVAILDSGISAHEDLNIRGGASFVPGEPTTADLNGHGTHVAGTVAALNNSIGVIGVAPNAELYAVKVLGANGSGSVSGIAQGLEWAATNNMHIANMSLGSDFPSSTLERAVNYATSRDVLVIAATGNNGSGSVGYPARYANAMAVGATDQNDRRANFSQYGTGIDIVAPGVNVQSTYPGNRYVSMNGTSMATPHVAGAAALVKQRYPSWNATQIRNHLKNTATNLGNSSQFGSGLVNAEAATR

SEQ ID NO: 66315 - protein, 268 aa, Unidentified
QTVPWGITRVQAPAVHNRGITGSGVRVAILDSGISAHEDLNIRGGASFVPGEPTTADLNGHGTHVAGTVAALNNSIGVIGVAPNAELYAVKVLGANGSGSVSGIAQGLEWAATNNMHIANMSLGSDFPSSTLERAVNYATSRDVLVIAATGNNGSGSVGYPARYANAMAVGATDMNNRRANFSQYGTGIDIVAPGVNVQSTYPGNRYVSMNGTSMATPHVAGAAALVKQRYPSWNATQIRNHLKNTATNLGNSSQFGSGLVNAEAATR

SEQ ID NO: 66316 - protein, 268 aa, Unidentified
QTVPWGITRVQAPAVHNRGITGSGVRVAILDSGISAHEDLNIRGGASFVPGEPTTADLNGHGTHVAGTVAALNNSIGVIGVAPNAELYAVKVLGANGSGSVSGIAQGLEWAATNNMHIANMSLGSDFPSSTLERAVNYATSRDVLVIAATGNNGSGSVGYPARYQNAMAVGATDQNNRRANFSQYGTGIDIVAPGVNVQSTYPGNRYVSMNGTSMATPHVAGAAALVKQRYPSWNATQIRNHLKNTATNLGNSSQFGSGLVNAEAATR

SEQ ID NO: 66317 - protein, 268 aa, Unidentified
QTVPWGITRVQAPAVHNRGITGSGVRVAILDSGISAHEDLNIRGGASFVPGEPTTADLNGHGTHVAGTVAALNNSIGVIGVAPNAHLYAVKVLGANGSGSVSGIAQGLEWAATNNMHIANMSLGSDFPSSTLERAVNYATSRDVLVIAATGNNGSGSVGYPARYANAMAVGATDQNNRRANFSQYGTGIDIVAPGVNVQSTYPGNRYVSMNGTSMATPHVAGAAALVKQRYPSWNATQIRNHLKNTATNLGNSSQFGSGLVNAEAATR

SEQ ID NO: 66318 - protein, 268 aa, Unidentified
QTVPWGITRVQAPAVHNRGITGSGVRVAILDSGISAHEDLNIRGGASFVPGEPTTADLNGHGTHVAGTVAALNNSIGVIGVAPNAELYAVKVLGANGSGSVSGIAQGLEWAATNNMHIANMSLGSDFPSSTLERAVNYATSRDVLVIAATGNNGSGSVGYPARYANAMAVGATDQNNRRANFSQYGTGIDIVAPGVNVQSTYPGNRYVSMNGTSMATPHVAGAAALVKQRYPSWNATQIRNHLKNTATNLGNSSQFGSGLVNAEAAAR

SEQ ID NO: 66319 - protein, 268 aa, Unidentified
QTVPWGITRVQAPAVHNRGITGSGVRVAILDSGISAHEDLNIRGGASFVPGEPTTADLNGHGTHVAGTVAALNNSIGVIGVAPNAELYAVKVLGANGSGSVSGIAQGLEWAATNNMHIANMSLGSDFPSSTLERAVNYATSRDVLVIAATGNNGSGSVGYPARYANAMAVGATDQNNRRANFSQYGTGIDIVAPGVNVQSTYPGNRYVSMNGTSMATPHVAGAAALVKQRYPSWNATQIRNHLKNTATNLGNSSQFGDGLVNAEAATR

SEQ ID NO: 66320 - protein, 268 aa, Unidentified
QTVPWGITRVQAPAVHNRGITGSGVRVAILDSGISAHEDLNIRGGVSFVPGEPTTADLNGHGTHVAGTVAALNNSIGVIGVAPNAELYAVKVLGANGSGSVSGIAQGLEWAATNNMHIANMSLGSDFPSSTLERAVNYATSRDVLVIAATGNNGSGSVGYPARYANAMAVGATDQNNRRANFSQYGTGIDIVAPGVNVQSTYPGNRYVSMNGTSMATPHVAGAAALVKQRYPSWNATQIRNHLKNTATNLGNSSQFGSGLVNAEAATR

SEQ ID NO: 66321 - protein, 268 aa, Unidentified
QTVPWGITRVQAPAVHNRGITGSGVRVAILDSGISAHEDLNIRGGASFVPGEPTTADLNGHGTHVAGTVAALNNSIGVIGVAPNAELYAVKVLGANGSGSVSGIAQGLEWAATNNMEIANMSLGSDFPSSTLERAVNYATSRDVLVIAATGNNGSGSVGYPARYANAMAVGATDQNNRRANFSQYGTGIDIVAPGVNVQSTYPGNRYVSMNGTSMATPHVAGAAALVKQRYPSWNATQIRNHLKNTATNLGNSSQFGSGLVNAEAATR

SEQ ID NO: 66322 - protein, 268 aa, Unidentified
QTVPWGITRVQAPAVHNRGITGSGVRVAILDSGISAHSMLNIRGGASFVPGEPTTADLNGHGTHVAGTVAALNNSIGVIGVAPNAELYAVKVLGANGSGSVSGIAQGLEWAATNNMHIANMSLGSDFPSSTLERAVNYATSRDVLVIAATGNNGSGSVGYPARYANAMAVGATDQNNRRANFSQYGTGIDIVAPGVNVQSTYPGNRYVSMNGTSMATPHVAGAAALVKQRYPSWNATQIRNHLKNTATNLGNSSQFGSGLVNAEAATR

SEQ ID NO: 66323 - protein, 268 aa, Unidentified
QTVPWGITRVQAPAVHNRGITGSGVRVAILDSGISAHEDLNIRGGASFVPGEPTTADLNGHGTHVAGTVAALNNSIGVIGVAPNAELYAVKVLGANGSGSVSGIAQGLEWAATNNMHIANMSLGSDFPSSTLERAVNYAHSRDVLVIAATGNNGSGSVGYPARYANAMAVGATDQNNRRANFSQYGTGIDIVAPGVNVQSTYPGNRYVSMNGTSMATPHVAGAAALVKQRYPSWNATQIRNHLKNTATNLGNSSQFGSGLVNAEAATR

SEQ ID NO: 66324 - protein, 268 aa, Unidentified
QTVPWGITRVQAPAVHNRGITGSGVRVAILDSGISAHSDLNIRGGASFVPGEPTTADLNGHGTHVAGTVAALNNSIGVIGVAPNAELYAVKVLGANGSGSVSGIAQGLEWAATNNMHIANMSLGSDFPSSTLERAVNYATSRDVLVIAATGNNGSGSVGYPARYANAMAVGATDQNNRRANFSQYGTGIDIVAPGVNVQSTYPGNRYVSMNGTSMATPHVAGAAALVKQRYPSWNATQIRNHLKNTTTNLGNSSQFGSGLVNAEAATR

SEQ ID NO: 66325 - protein, 268 aa, Unidentified
QTVPWGITRVQAPAVHNRGITGSGVRVAILDSGISAHEDLNIRGGASFVPGEPTTADLNGHGTHVAGTVAALNNSIGVIGVAPNAELYAVKVLGANGSGSVSGIAQGLEWAATNNMHIANMSLGSDFPSSTLERAVNYATSRDVLVIAATGNNGSGSVGYPARYANAMAVGATDQNNRRANFSQYGTGIDIVAPGVNVQSTYPGNRYVSMNGTSMATPHVAGAAALVKQRYPSWNATQIRNHLKNTATNLGNSSQFGSGLVNAENATR

SEQ ID NO: 66326 - protein, 268 aa, Unidentified
QTVPWGITRVQAPAVHNRGITGSGVRVAILDSGISAHEDLNIRGGASFVPGEPTTADLNGHGTHVAGTVAALNNSIGVIGVAPNAELYAVKVLGMNGSGSVSGIAQGLEWAATNNMHIANMSLGSDFPSSTLERAVNYATSRDVLVIAATGNNGSGSVGYPARYANAMAVGATDQNNRRANFSQYGTGIDIVAPGVNVQSTYPGNRYVSMNGTSMATPHVAGAAALVKQRYPSWNATQIRNHLKNTATNLGNSSQFGSGLVNAEAATR

SEQ ID NO: 66327 - protein, 268 aa, Unidentified
QTVPWGITRVQAPAVHNRGITGSCVRVAILDSGISAHEDLNIRGGASFVPGEPTTADLNGHGTHVAGTVAALNNSIGVIGVAPNAELYAVKVLGANGSGSVSGIAQGLEWAATNNMHIANMSLGSDFPSSTLERAVNYATSRDVLVIAATGNNGSGSVGYPARYANAMAVGATDQNNRRANFSQYGTGIDIVAPGVNVQSTYPGNRYVSMNGTSMATPHVAGAAALVKQRYPSWNATQIRNHLKNTATNLGNSSQFGSGLVNAEAATR

SEQ ID NO: 66328 - protein, 268 aa, Unidentified
QTVPWGITRVQAPAVHNRGITGSGVRVAILDSGISAHEDLNIRGGASFVPGEPTTADLNGHGTHVAGTVAALNNSIGVIGVAPNAELYAVKVLGANGSGSVSGIAQGLEWAATNNMHIANMSLGSDFPSSTLERAVNYATSRDVLVIAATGNNGSGWVGYPARYANAMAVGATDQNNRRANFSQYGTGIDIVAPGVNVQSTYPGNRYVSMNGTSMATPHVAGAAALVKQRYPSWNATQIRNHLKNTATNLGNSSQFGSGLVNAEAATR

SEQ ID NO: 66329 - protein, 268 aa, Unidentified
QTVPWGITQVQAPAVHNRGITGSGVRVAILDSGISAHEDLNIRGGASFVPGEPTTADLNGHGTHVAGTVAALNNSIGVIGVAPNAELYAVKVLGANGSGSVSGIAQGLEWAATNNMHIANMSLGSDFPSSTLERAVNYATSRDVLVIAATGNNGSGSVGYPARYANAMAVGATDQNNRRANFSQYGTGIDIVAPGVNVQSTYPGNRYVSMNGTSMATPHVAGAAALVKQRYPSWNATQIRNHLKNTATNLGNSSQFGSGLVNAEAATR

SEQ ID NO: 66330 - protein, 268 aa, Unidentified
QTVPWGITRVQAPAVHNRGITGSGVRVAILDSGISAHSDLNIRGGASFVPGEPTTADLNGHGTHVAGTVAALNNSIGVIGVAPNAELYAVKVLGANGSGSVSGIAQGLEWAATNNMHIANMSLGSDFCSSTLERAVNYATSRDVLVIAATGNNGSGSVGYPARYANAMAVGATDQNNRRANFSQYGTGIDIVAPGVNVQSTYPGNRYVSMNGTSMATPHVAGAAALVKQRYPSWNATQIRNHLKNTATNLGNSSQFGSGLVNAEAATR

SEQ ID NO: 66331 - protein, 268 aa, Unidentified
QTVPWGITRVQAPAVHNRGITGSGVRVAILDSGISAHSDLNIRGGASFVPGEPTTADLNGHGTHVAGTVAALNNSIGVIGVAPNAELYAVKVLGANGSGSVSGIAQGLEWAATNNMHIANMSLGSDQPSSTLERAVNYATSRDVLVIAATGNNGSGSVGYPARYANAMAVGATDQNNRRANFSQYGTGIDIVAPGVNVQSTYPGNRYVSMNGTSMATPHVAGAAALVKQRYPSWNATQIRNHLKNTATNLGNSSQFGPGLVNAEAATR

SEQ ID NO: 66332 - protein, 268 aa, Unidentified
QTVPWGITRVQAPAVHNRGITGSGVRVAILDSGISAHEDLNIRGGASFVPGEPTPADLNGHGTHVAGTVAALNNSIGVIGVAPNAELYAVKVLGANGSGSVSGIAQGLEWAATNNMHIANMSLGSDFPSSTLERAVNYATSRDVLVIAATGNNGSGSVGYPARYANAMAVGATDQNNRRANFSQYGTGIDIVAPGVNVQSTYPGNRYVSMNGTSMATPHVAGAAALVKQRYPSWNATQIRNHLKNTATNLGNSSQFGSGLVNAEAATR

SEQ ID NO: 66333 - protein, 268 aa, Unidentified
QTVPWGITRVQAPAVHNDGITGSGVRVAILDSGISAHEDLNIRGGASFVPGEPTTADLNGHGTHVAGTVAALNNSIGVIGVAPNAELYAVKVLGANGSGSVSGIAQGLEWAATNNMHIANMSLGSDFPSSTLERAVNYATSRDVLVIAATGNNGSGSVGYPARYANAMAVGATDQNNRRANFSQYGTGIDIVAPGVNVQSTYPGNRYVSMNGTSMATPHVAGAAALVKQRYPSWNATQIRNHLKNTATNLGNSSQFGSGLVNAEAATR

SEQ ID NO: 66334 - protein, 268 aa, Unidentified
QTVPWGITRVQAPAVHNRGITGSGVRVAILDSGISAHSDLNIRGGASFVPGEPTTADLNGHGTHVAGTVAALNNSIGVIGVAPNAELYAVKVLGANGSGSVSGIAQGLEWAATNNMHIANMSLGSDFPSSTLERAVNYATSRDVLVIAATGNNGSGSVGYPARYANAMAVGATDQNNRRANFSQYGTGIDIVAPGVNVQSTYPGNRYVSMNGTSMATPHVAGAAALVKQRYPSWNATRIRNHLKNTATNLGNSSQFGSGLVNAEAATR

SEQ ID NO: 66335 - protein, 268 aa, Unidentified
QTVPWGITRVQAPAVHNRGITGSGVRVAILDSGISAHEDLNINGGASFVPGEPTTADLNGHGTHVAGTVAALNNSIGVIGVAPNAELYAVKVLGANGSGSVSGIAQGLEWAATNNMHIANMSLGSDFPSSTLERAVNYATSRDVLVIAATGNNGSGSVGYPARYANAMAVGATDQNNRRANFSQYGTGIDIVAPGVNVQSTYPGNRYVSMNGTSMATPHVAGAAALVKQRYPSWNATQIRNHLKNTATNLGNSSQFGSGLVNAEAATR

SEQ ID NO: 66336 - protein, 268 aa, Unidentified
QTVPWGITRVQAPAVHNRGITGSGVRVAILDSGISAHEDLNIRGGASFVPGEPTTADLNGHGTHVAGTVAALNNSIGVIGVAPNAELYAVKVLGANGSGSVSGIAQGLEWAATNNMHIANMSLGIDFPSSTLERAVNYATSRDVLVIAATGNNGSGSVGYPARYANAMAVGATDQNNRRANFSQYGTGIDIVAPGVNVQSTYPGNRYVSMNGTSMATPHVAGAAALVKQRYPSWNATQIRNHLKNTATNLGNSSQFGSGLVNAEAATR

SEQ ID NO: 66337 - protein, 268 aa, Unidentified
QTVPWGITRVQAPEVHNRGITGSGVRVAILDSGISAHEDLNIRGGASFVPGEPTTADLNGHGTHVAGTVAALNNSIGVIGVAPNAELYAVKVLGANGSGSVSGIAQGLEWAATNNMHIANMSLGSDFPSSTLERAVNYATSRDVLVIAATGNNGSGSVGYPARYANAMAVGATDQNNRRANFSQYGTGIDIVAPGVNVQSTYPGNRYVSMNGTSMATPHVAGAAALVKQRYPSWNATQIRNHLKNTATNLGNSSQFGSGLVNAEAATR

SEQ ID NO: 66338 - protein, 268 aa, Unidentified
QTVPWGITRVQAPAVHNRGITGSGVRVAILDSGISAHSDLNIRGGASFVPGEPTTADLNGHGTHVAGTVAALNNHIGVIGVAPNAELYAVKVLGANGSGSVSGIAQGLEWAATNNMHIANMSLGSDFPSSTLERAVNYATSRDVLVIAATGNNGSGSVGYPARYANAMAVGATDQNNRRANFSQYGTGIDIVAPGVNVQSTYPGNRYVSMNGTSMATPHVAGAAALVKQRYPSWNATQIRNHLKNTATNLGNSSQFGSGLVNAEAATR

SEQ ID NO: 66339 - protein, 268 aa, Unidentified
QTVPWGITRVQAPAVHNRGITGSGVRVAILDSGISAHEDLNIRGGASFVPGEPTTADLNGHGTHVAGTVAALNNSIGVIGVAPNAELYAVKVLGANGSGSVSGIAQGLEWAATNNMHIANMSLGSDFPSSTLERAVNYATSRDVLVIAATGNNGSGSVGYPARYANAMAVGATDQKNRRANFSQYGTGIDIVAPGVNVQSTYPGNRYVSMNGTSMATPHVAGAAALVKQRYPSWNATQIRNHLKNTATNLGNSSQFGSGLVNAEAATR

SEQ ID NO: 66340 - protein, 268 aa, Unidentified
QTVPWGITRVQAPAVHNRGITGSGVRVAILDSGISAHEDLNIRGGASFVPGEPTTADLNGHGTHVAGTVAALNNSIGVIGVAPNAELYAVKVLGANGSGSVSGIAQGLEWAATNNMHIANMSLGSDFPSSTLERAVNYATSRDVLVIAATGNNGSGSVGYPARYANAMAVGATDQNNRRANFSQYGTGIDIVAPGVNVQSTYPGNRYVPMNGTSMATPHVAGAAALVKQRYPSWNATQIRNHLKNTATNLGNSSQFGSGLVNAEAATR

SEQ ID NO: 66341 - protein, 268 aa, Unidentified
QTVPWGITRVQAPAVHNRGITGSGVRVAILDSGISAHSDLNIRGGASFVPGEPTTADLNGHGTHVAGTVAALNNSIGVIGMAPNAELYAVKVLGANGSGSVSGIAQGLEWAATNNMHIANMSLGSDFPSSTLERAVNYATSRDVLVIAATGNNGSGSVGYPARYANAMAVGATDQNNRRANFSQYGTGIDIVAPGVNVQSTYPGNRYVSMNGTSMATPHVAGAAALVKQRYPSWNATQIRNHLKNTATNLGNSSQFGSGLVNAEAATR

SEQ ID NO: 66342 - protein, 268 aa, Unidentified
QTVPWGITRVQAPAVHNRGITGSGVRVAILDSGISTHEDLNVRGGVSFVPGEPTTADLNGHGTHVAGTVAALDNSIGVVGVAPSADLYAVKVLGANGRGSVSGIAQGLEWAAANNMHIANMSLGTDAPSSTLERAVNYATSRDVLVIAATGNNGSGSVGYPARYANAMAVGATDQNNRRANFSQYGAGLDIVAPGVNVQSTYPGNRYVSMNGTSMATPHVAGAAALVKQRYPSWNATQIRNHLKNTATNLGNSSQYGSGLVNAEAATR

SEQ ID NO: 66343 - protein, 268 aa, Unidentified
QTVPWGITRVQAPAVHNRGITGSGVRVAILDSGISAHEDLNIRGGASFVPGEPTTADLNGHGTHVAGTVAALNNSIGVIGVAPNAELYAVKVLGANGSGSVSGIAQGLEWAATNNMHIANMSLGSDFPSSTLERAVNYATSRDVLVIAATGNNGSGSVGYPARYANAMAVGATDQNNRRANFSQYGTGIDIVAPGVNVQSTYPGNRYVSMNGTSMATPHVAGAAALVKQRYPSWNATQIRDHLKNTATNLGNSSQFGSGLVNAEAATR

SEQ ID NO: 66344 - protein, 268 aa, Unidentified
QTVPWGITRVQAPAVHNRGITGSGVRVAILDSGISTHEDLNIRGGVSFVPGEPTTADLNGHGTHVAGTVAALNNSIGVVGVAPSAELYAVKVLGANGRGSVSGIAQGLEWAATNNMHIANMSLGSDFPSSTLERAVNYATSRDVLVIAATGNNGSGSVGYPARYANAMAVGATDQNNRRANFSQYGTGIDIVAPGVNVQSTYPGNRYVSMNGTSMATPHVAGAAALVKQRYPSWNATQIRDHLKNTATNLGNSSQFGSGLVNAEAATR

SEQ ID NO: 66345 - protein, 268 aa, Unidentified
QTVPWGITRVQAPAVHNRGITGSGVRVAILDSGISAHEDLNIRGGASFVPGEPTTADLNGHGTHVAGTVAALNNSIGVIGVAPNAELYAVKVLGANGSGSVSGIAQGLEWAATNNMHIANMSLGSDFPSSTLERAVNYATSRDVLVIAATGNNGSGSVGYPARYANAMAVGATDQNNRRANFSQYGTGIDIVAPGVNVQSTYPGNRYVSMSGTSMATPHVAGAAALVKQRYPSWNATQIRNHLKNTATNLGNSSQFGSGLVNAEAATR

SEQ ID NO: 66346 - protein, 268 aa, Unidentified
QTVPWGITRTQAPAVHNRGITGSGVRVAILDSGISAHEDLNIRGGASFVPGEPTTADLNGHGTHVAGTVAALNNSIGVIGVAPNAELYAVKVLGANGSGSVSGIAQGLEWAATNNMHIANMSLGSDFPSSTLERAVNYATSRDVLVIAATGNNGSGSVGYPARYANAMAVGATDQNNRRANFSQYGTGIDIVAPGVNVQSTYPGNRYVSMNGTSMATPHVAGAAALVKQRYPSWNATQIRNHLKNTATNLGNSSQFGSGLVNAEAATR

SEQ ID NO: 66347 - protein, 268 aa, Unidentified
QTVPWGITRVQAPAVHNRGITGSGVRVAILDSGISAHSDLNIRGGASFVPGEPTTADLNGHGTHVAGTVAALNNSIGVIGVAPNAELYAVKVLGANGSGDVSGIAQGLEWAATNNMHIANMSLGSDFPSSTLERAVNYATSRDVLVIAATGNNGSGSVGYPARYANAMAVGATDQNNRRANFSQYGTGIDIVAPGVNVQSTYPGNRYVSMNGTSMATPHVAGAAALVKQRYPSWNATQIRNHLKNTATNLGNSSQFGSGLVNAEAATR

SEQ ID NO: 66348 - protein, 268 aa, Unidentified
QTVPWGITRVQAPAVHNRGITGAGVRVAILDSGISAHEDLNIRGGASFVPGEPTTADLNGHGTHVAGTVAALNNSIGVIGVAPNAELYAVKVLGANGSGSVSGIAQGLEWAATNNMHIANMSLGSDFPSSTLERAVNYATSRDVLVIAATGNNGSGSVGYPARYANAMAVGATDQNNRRANFSQYGTGIDIVAPGVNVQSTYPGNRYVSMNGTSMATPHVAGAAALVKQRYPSWNATQIRNHLKNTATNLGNSSQFGSGLVNAEAATR

SEQ ID NO: 66349 - protein, 268 aa, Unidentified
QTVPWGITRVQAPAVHNRGITGSGVRVAILDSGISAHEDLNIRGGASFVPGEPTTADLNGHGTHVAGTVAALNNSIGVIGVAPNAELYAVKVLGANGSGSVSGIAQGLEWAATNNMHIANMSLGSDFPSSTLERAVNYATSEDVLVIAATGNNGSGSVGYPARYANAMAVGATDQNNRRANFSQYGTGIDIVAPGVNVQSTYPGNRYVSMNGTSMATPHVAGAAALVKQRYPSWNATQIRNHLKNTATNLGNSSQFGSGLVNAEAATR

SEQ ID NO: 66350 - protein, 268 aa, Unidentified
QTVPWGITRVQAPAVHNRGITGSGVRVAILDSGISAHEDLNIRGGASFVPGEPTTADLNGHGTHVAGTVAALNNSIGVIGVAPNAELYAVKVLGANGSGSVSGIAQGLEWAATNNMHIANMSLGSDFPSSTLERAVNYATSRDVLVIAATGNNGSGSVGYPARYANAMAVGATDQNNRRANFSQYGTGIDIVAPGVNVQSTYPGNRYVSMNGTSMATPHVAGAAALVKQRYPSWNATQIRAHLKNTATNLGNSSQFGSGLVNAEAATR

SEQ ID NO: 66351 - protein, 268 aa, Unidentified
QTVPWGITRVQAPAVENRGITGSGVRVAILDSGISAHEDLNIRGGASFVPGEPTTADLNGHGTHVAGTVAALNNSIGVIGVAPNAELYAVKVLGANGSGSVSGIAQGLEWAATNNMHIANMSLGSDFPSSTLERAVNYATSRDVLVIAATGNNGSGSVGYPARYANAMAVGATDQNNRRANFSQYGTGIDIVAPGVNVQSTYPGNRYVSMNGTSMATPHVAGAAALVKQRYPSWNATQIRNHLKNTATNLGNSSQFGSGLVNAEAATR

SEQ ID NO: 66352 - protein, 268 aa, Unidentified
QTVPWGITRVQAPAVHNRGITGSGVRVAILDSGISAHSDLNIRGGASFVPGEPTTADLNGHGTHVAGTVAALNNSIGVIGVAPNAELCAVKVLGANGSGSVSGIAQGLEWAATNNMHIANMSLGSDFPSSTLERAVNYATSRDVLVIAATGNNGSGSVGYPARYANAMAVGATDQNNRRANFSQYGTGIDIVAPGVNVQSTYPGNRYVSMNGTSMATPHVAGAAALVKQRYPSWNATQIRNHLKNTATNLGNSSQFGSGLVNAEAATR

SEQ ID NO: 66353 - protein, 268 aa, Unidentified
QTVPWGITRVQAPAVHNRGITGSGVRVAILDSGISAHSDLNIRGGASFVPGEPTTAELNGHGTHVAGTVAALNNSIGVIGVAPNAELYAVKVLGANGSGSVSGIAQGLEWAATNNMHIANMSLGSDFPSSTLERAVNYATSRDVLVIAATGNNGSGSVGYPARYANAMAVGATDQNNRRANFSQYGTGIDIVAPGVNVQSTYPGNRYVSMNGTSMATPHVAGAAALVKQRYPSWNATQIRNHLKNTATNLGNSSQFGSGLVNAEAATR

SEQ ID NO: 66354 - protein, 268 aa, Unidentified
QTVPWGITRVQAPAVHNRGITGSGVRVAILDSGISAHEDLNIRGGASFVPGEPTTADLNGHGTHVAGTVAALNNSIGVIGVAPNAELYAVKVLGANGSGSVSGIAQGLEWAATNNMHIANMSLGSDFPSSTLERAVNYATSHDVLVIAATGNNGSGSVGYPARYANAMAVGATDQNNRRANFSQYGTGIDIVAPGVNVQSTYPGNRYVSMNGTSMATPHVAGAAALVKQRYPSWNATQIRNHLKNTATNLGNSSQFGSGLVNAEAATR

SEQ ID NO: 66355 - protein, 268 aa, Unidentified
QTVPWGITRVQAPAVHNRGITGSGVRVAILDSGISAHSDLNIRGGASFVPGEPTTADLNGHGTHVAGTVAALNNRIGVIGVAPNAELYAVKVLGANGSGSVSGIAQGLEWAATNNMHIANMSLGSDFPSSTLERAVNYATSRDVLVIAATGNNGSGSVGYPARYANAMAVGATDQNNRRANFSQYGTGIDIVAPGVNVQSTYPGNRYVSMNGTSMATPHVAGAAALVKQRYPSWNATQIRNHLKNTATNLGNSSQFGSGLVNAEAATR

SEQ ID NO: 66356 - protein, 268 aa, Unidentified
QTVPWGITRVRAPAVHNRGITGSGVRVAILDSGISAHEDLNIRGGASFVPGEPTTADLNGHGTHVAGTVAALNNSIGVIGVAPNAELYAVKVLGANGSGSVSGIAQGLEWAATNNMHIANMSLGSDFPSSTLERAVNYATSRDVLVIAATGNNGSGSVGYPARYANAMAVGATDQNNRRANFSQYGTGIDIVAPGVNVQSTYPGNRYVSMNGTSMATPHVAGAAALVKQRYPSWNATQIRNHLKNTATNLGNSSQFGSGLVNAEAATR

SEQ ID NO: 66357 - protein, 268 aa, Unidentified
QTVPWGITRVQAPAVHNCGITGSGVRVAILDSGISAHEDLNIRGGASFVPGEPTTADLNGHGTHVAGTVAALNNSIGVIGVAPNAELYAVKVLGANGSGSVSGIAQGLEWAATNNMHIANMSLGSDFPSSTLERAVNYATSRDVLVIAATGNNGSGSVGYPARYANAMAVGATDQNNRRANFSQYGTGIDIVAPGVNVQSTYPGNRYVSMNGTSMATPHVAGAAALVKQRYPSWNATQIRNHLKNTATNLGNSSQFGSGLVNAEAATR

SEQ ID NO: 66358 - protein, 268 aa, Unidentified
QTVPWGITRVQAPAVHNRGITGSGVRVAILDSGISAHEDLNIRGGASFVPGEPTTADLNGHGTHVAGTVAALNNSIGVIGVAPNAELYAVKVLGANGSGSVSGIAQGLEWAATNNMHIANMSLGSDFPSSTLERAVNYATSRDVLVIAATGNNGSGSVGYPARYDNAMAVGATDQNNRRANFSQYGTGIDIVAPGVNVQSTYPGNRYVSMNGTSMATPHVAGAAALVKQRYPSWNATQIRNHLKNTATNLGNSSQFGSGLVNAEAATR

SEQ ID NO: 66359 - protein, 268 aa, Unidentified
QTVPWGITRVQAPAVHNRGITGSGVRVAILDSGISAHEDLNIRGGASFVPGEPTTADLNGHGTHVAGTVAALNNSIGVIGVAPNAELYAVKVLGANGSGSVSGIAQGLEWAATENMHIANMSLGSDFPSSTLERAVNYATSRDVLVIAATGNNGSGSVGYPARYANAMAVGATDQNNRRANFSQYGTGIDIVAPGVNVQSTYPGNRYVSMNGTSMATPHVAGAAALVKQRYPSWNATQIRNHLKNTATNLGNSSQFGSGLVNAEAATR

SEQ ID NO: 66360 - protein, 268 aa, Unidentified
QTVPWGITRVQAPAVHNSGITGSGVRVAILDSGISAHEDLNIRGGASFVPGEPTTADLNGHGTHVAGTVAALNNSIGVIGVAPNAELYAVKVLGANGSGSVSGIAQGLEWAATNNMHIANMSLGSDFPSSTLERAVNYATSRDVLVIAATGNNGSGSVGYPARYANAMAVGATDQNNRRANFSQYGTGIDIVAPGVNVQSTYPGNRYVSMNGTSMATPHVAGAAALVKQRYPSWNATQIRNHLKNTATNLGNSSQFGSGLVNAEAATR

SEQ ID NO: 66361 - protein, 268 aa, Unidentified
QTVPWGITRVQAPAVHNRGITGSGVRVAILDSGISAHSDLNIRGGAVFVPGEPTTADLNGHGTHVAGTVAALNNSIGVIGVAPNAELYAVKVLGANGSGSVSGIAQGLEWAATNNMHIANMSLGSDFPSSTLERAVNYATSRDVLVIAATGNNGSGSVGYPARYANAMAVGATDQNNRRANFSQYGTGIDIVAPGVNVQSTYPGNRYVSMNGTSMATPHVAGAAALVKQRYPSWNATQIRNHLKNTATNLGNSSQFGSGLVNAEAATR

SEQ ID NO: 66362 - protein, 268 aa, Unidentified
QTVPWGITRVMAPAVHNRGITGSGVRVAILDSGISAHEDLNIRGGASFVPGEPTTADLNGHGTHVAGTVAALNNSIGVIGVAPNAELYAVKVLGANGSGSVSGIAQGLEWAATNNMHIANMSLGSDFPSSTLERAVNYATSRDVLVIAATGNNGSGSVGYPARYANAMAVGATDQNNRRANFSQYGTGIDIVAPGVNVQSTYPGNRYVSMNGTSMATPHVAGAAALVKQRYPSWNATQIRNHLKNTATNLGNSSQFGSGLVNAEAATR

SEQ ID NO: 66363 - protein, 268 aa, Unidentified
QTVPWGITRVQAPAVHNRGITGSGVRVAILDSGISAHSDLNIRGGASFVPGEPTTADLNGHGTHVAGTVAALNNSIGVIGVAPNALLYAVKVLGANGSGSVSGIAQGLEWAATNNMHIANMSLGSDFPSSTLERAVNYATSRDVLVIAATGNNGSGSVGYPARYANAMAVGATDQNNRRANFSQYGTGIDIVAPGVNVQSTYPGNRYVSMNGTSMATPHVAGAAALVKQRYPSWNATQIRNHLKNTATNLGNSSQFGSGLVNAEAATR

SEQ ID NO: 66364 - protein, 268 aa, Unidentified
QTVPWGITRVQAPAVHNRGITGSGVRVAILDSGISAHEDLNIRGGASFVPGEPTTADLNGHGTHVAGTVAALNNSIGVIGVAFNAELYAVKVLGANGSGSVSGIAQGLEWAATNNMHIANMSLGSDFPSSTLERAVNYATSRDVLVIAATGNNGSGSVGYPARYANAMAVGATDQNNRRANFSQYGTGIDIVAPGVNVQSTYPGNRYVSMNGTSMATPHVAGAAALVKQRYPSWNATQIRNHLKNTATNLGNSSQFGSGLVNAEAATR

SEQ ID NO: 66365 - protein, 268 aa, Unidentified
QTVPWGITRVQAPAVHNRGITGSGVRVAILDSGISAHEDLNIRGGASFVPGEPTTADLNGHGTHVAGTVAALNNSIGVIGVAPNAELYAVKVLGANGSGSVSGIAQGLEWAATNNMHIANMSLGSDFPSSTLERAVNYATSRDVLVIAATGNNGSGSVGYPARYANAMAVGATDQNNRRANFSQYGTGIDIVAPGVNVISTYPGNRYVSMNGTSMATPHVAGAAALVKQRYPSWNATQIRNHLKNTATNLGNSSQFGSGLVNAEAATR

SEQ ID NO: 66366 - protein, 268 aa, Unidentified
QTVPWGITRVQAPAVHNRGITGSGVRVAILDSGISAHEDLNIRGGASFVPGEPTTADLNGHGTHVAGTVAALNNSIGVIGVAPNAELYAVKVLGANGSGSVSGIAQGLEWAATNNMHIANMSLGSDFPSSTLERAVNYATSRDVLVIAATGNNGSGSVGYPARYANAMAVGATDQNNRRANFSQYGTGIDMVAPGVNVQSTYPGNRYVSMNGTSMATPHVAGAAALVKQRYPSWNATQIRNHLKNTATNLGNSSQFGSGLVNAEAATR

SEQ ID NO: 66367 - protein, 268 aa, Unidentified
QTVPWGITRVQAPAVHNRGITGSGVRVAILDSGISAHEDLNIRGGASFVPGEPTTADLNGHGTHVAGTVAALNNSIGVIGVAPNAELYAVKVLGANGSGSVSGIAQGLEWAATNNMHIANMSLGSDFPSSTLERAVNYATHRDVLVIAATGNNGSGSVGYPARYANAMAVGATDQNNRRANFSQYGTGIDIVAPGVNVQSTYPGNRYVSMNGTSMATPHVAGAAALVKQRYPSWNATQIRNHLKNTATNLGNSSQFGSGLVNAEAATR

SEQ ID NO: 66368 - protein, 268 aa, Unidentified
QTVPWGITRVQAPAVHNIGITGSGVRVAILDSGISAHEDLNIRGGASFVPGEPTTADLNGHGTHVAGTVAALNNSIGVIGVAPNAELYAVKVLGANGSGSVSGIAQGLEWAATNNMHIANMSLGSDFPSSTLERAVNYATSRDVLVIAATGNNGSGSVGYPARYANAMAVGATDQNNRRANFSQYGTGIDIVAPGVNVQSTYPGNRYVSMNGTSMATPHVAGAAALVKQRYPSWNATQIRNHLKNTATNLGNSSQFGSGLVNAEAATR

SEQ ID NO: 66369 - protein, 268 aa, Unidentified
QTVPWGITRVQAPAVHNRGITGSGVRVAILDSGISAHSDLNIRGGASFVPGEPTTADLNGHGTHVAGTVAALNNSIGVIGVAPNAELSAVKVLGANGSGSVSGIAQGLEWAATNNMHIANMSLGSDFPSSTLERAVNYATSRDVLVIAATGNNGSGSVGYPARYANAMAVGATDQNNRRANFSQYGTGIDIVAPGVNVQSTYPGNRYVSMNGTSMATPHVAGAAALVKQRYPSWNATQIRNHLKNTATNLGNSSQFGSGLVNAEAATR

SEQ ID NO: 66370 - protein, 268 aa, Unidentified
QTVPWGITRVQAPAVHNRGITGSGVRVAILDSGISAHEDLNIRGGASFVPGEPTTADLNGHGTHVAGTVAALNNSIGVIGVAPNAELYAVKVLGANGSGSVSGIAQGLEWAATNNMHIANMSLGSDFPSSTLERAVNYATSRDVLVIAATGNNGSGSVGYPARYANAMAVGATDENNRRANFSQYGTGIDIVAPGVNVQSTYPGNRYVSMNGTSMATPHVAGAAALVKQRYPSWNATQIRNHLKNTATNLGNSSQFGSGLVNAEAATR

SEQ ID NO: 66371 - protein, 268 aa, Unidentified
QTVPWGITRVQAPAVHNNGITGSGVRVAILDSGISAHEDLNIRGGASFVPGEPTTADLNGHGTHVAGTVAALNNSIGVIGVAPNAELYAVKVLGANGSGSVSGIAQGLEWAATNNMHIANMSLGSDFPSSTLERAVNYATSRDVLVIAATGNNGSGSVGYPARYANAMAVGATDQNNRRANFSQYGTGIDIVAPGVNVQSTYPGNRYVSMNGTSMATPHVAGAAALVKQRYPSWNATQIRNHLKNTATNLGNSSQFGSGLVNAEAATR

SEQ ID NO: 66372 - protein, 268 aa, Unidentified
QTVPWGITRVQAPAVHNRGITGSGVRVAILDSGISAHEDLNIRGGASFVPGEPTTADLNGHGTHVAGTVAALNNSIGVIGVAPNAELYAVKVLGANGSGSVSGIAQGLEWAATNNMHIANMSLGSDFPSSTLERAVNYANSRDVLVIAATGNNGSGSVGYPARYANAMAVGATDQNNRRANFSQYGTGIDIVAPGVNVQSTYPGNRYVSMNGTSMATPHVAGAAALVKQRYPSWNATQIRNHLKNTATNLGNSSQFGSGLVNAEAATR

SEQ ID NO: 66373 - protein, 268 aa, Unidentified
QTVPWGITRVQAPAVHNRGITGSGVRVAILDSGISAHEDLNIRGGASFVPGEPTTADLNGHGTHVAGTVAALNNSIGVIGVAPNAELYAVKVLGANGSGSVSGIAQGLEWAATNNMHIANMSLGSDFPSSTLERAVNYATSRDVLVIAATGNNGSGSVGYPARYANAMAVGATDQNNRRANFSQYGTGIDIVAPGVNVQSTYPGNRYVSMNGTSMATPHVAGAAALVKQRYPSWNATQIRYHLKNTATNLGNSSQFGSGLVNAEAATR

SEQ ID NO: 66374 - protein, 268 aa, Unidentified
QTVPWGITRVQAPAVHNRGITGSGVRVAILDSGISAHEDLNIRGGASFVPGEPTTADLNGHGTHVAGTVAALNNSIGVIGVAPNAELYAVKVLGANGSGSVSGIAQGLEWAATNNMHIANMSLGSDFPSSTLERAVNYATSMDVLVIAATGNNGSGSVGYPARYANAMAVGATDQNNRRANFSQYGTGIDIVAPGVNVQSTYPGNRYVSMNGTSMATPHVAGAAALVKQRYPSWNATQIRNHLKNTATNLGNSSQFGSGLVNAEAATR

SEQ ID NO: 66375 - protein, 268 aa, Unidentified
QTVPWGITRVQAPAVHNRGITGSGVRVAILDSGISAHEDLNIRGGASFVPSEPTTADLNGHGTHVAGTVAALNNSIGVIGVAPNAELYAVKVLGANGSGSVSGIAQGLEWAATNNMHIANMSLGSDFPSSTLERAVNYATSRDVLVIAATGNNGSGSVGYPARYANAMAVGATDQNNRRANFSQYGTGIDIVAPGVNVQSTYPGNRYVSMNGTSMATPHVAGAAALVKQRYPSWNATQIRNHLKNTATNLGNSSQFGSGLVNAEAATR

SEQ ID NO: 66376 - protein, 268 aa, Unidentified
QTVPWGITRVQAPAVHGRGITGSGVRVAILDSGISAHEDLNIRGGASFVPGEPTTADLNGHGTHVAGTVAALNNSIGVIGVAPNAELYAVKVLGANGSGSVSGIAQGLEWAATNNMHIANMSLGSDFPSSTLERAVNYATSRDVLVIAATGNNGSGSVGYPARYANAMAVGATDQNNRRANFSQYGTGIDIVAPGVNVQSTYPGNRYVSMNGTSMATPHVAGAAALVKQRYPSWNATQIRNHLKNTATNLGNSSQFGSGLVNAEAATR

SEQ ID NO: 66377 - protein, 268 aa, Unidentified
QTVPWGITRVQAPAVHNRGITGSGVRVAILDSGISAHEDLNIRGGASFVPGEPTTADLNGHGTHVAGTVAALNNSIGVIGVAPNAELYAVKVLGANGSGSVSGIAQGLEWAATNNMHIANMSLGSDFPSSTLERAVNYATSRDVLVIAATGNNGSGSVGYPARYANAMAVGATDQNNRRANFSQYGTGIDIVAPGVNVHSTYPGNRYVSMNGTSMATPHVAGAAALVKQRYPSWNATQIRNHLKNTATNLGNSSQFGSGLVNAEAATR

SEQ ID NO: 66378 - protein, 268 aa, Unidentified
QTVPWGITRVQAPAVHNRGITGSGVRVAILDSGISAHSDLNIRGGAWFVPGEPTTADLNGHGTHVAGTVAALNNSIGVIGVAPNAELYAVKVLGANGSGSVSGIAQGLEWAATNNMHIANMSLGSDFPSSTLERAVNYATSRDVLVIAATGNNGSGSVGYPARYANAMAVGATDQNNRRANFSQYGTGIDIVAPGVNVQSTYPGNRYVSMNGTSMATPHVAGAAALVKQRYPSWNATQIRNHLKNTATNLGNSSQFGSGLVNAEAATR

SEQ ID NO: 66379 - protein, 268 aa, Unidentified
QTVPWGITRVQAPAVHNRGITGSGVRVAILDSGISAHEDLNIRGGASFVPGEPTTADLNGHGTHVAGTVAALNNSIGVIGVAPNAELYAVKVLGANGSGSVSGIAQGLEWAATNNMHIANMSLGSDFPSSTLERAVNYATSVDVLVIAATGNNGSGSVGYPARYANAMAVGATDQNNRRANFSQYGTGIDIVAPGVNVQSTYPGNRYVSMNGTSMATPHVAGAAALVKQRYPSWNATQIRNHLKNTATNLGNSSQFGSGLVNAEAATR

SEQ ID NO: 66380 - protein, 268 aa, Unidentified
QTVPWGITRVQAPAVHNTGITGSGVRVAILDSGISAHEDLNIRGGASFVPGEPTTADLNGHGTHVAGTVAALNNSIGVIGVAPNAELYAVKVLGANGSGSVSGIAQGLEWAATNNMHIANMSLGSDFPSSTLERAVNYATSRDVLVIAATGNNGSGSVGYPARYANAMAVGATDQNNRRANFSQYGTGIDIVAPGVNVQSTYPGNRYVSMNGTSMATPHVAGAAALVKQRYPSWNATQIRNHLKNTATNLGNSSQFGSGLVNAEAATR

SEQ ID NO: 66381 - protein, 268 aa, Unidentified
QTVPWGITRVQAPAVHNRGITGSGVRVAILDSGISAHEDLNIHGGASFVPGEPTTADLNGHGTHVAGTVAALNNSIGVIGVAPNAELYAVKVLGANGSGSVSGIAQGLEWAATNNMHIANMSLGSDFPSSTLERAVNYATSRDVLVIAATGNNGSGSVGYPARYANAMAVGATDQNNRRANFSQYGTGIDIVAPGVNVQSTYPGNRYVSMNGTSMATPHVAGAAALVKQRYPSWNATQIRNHLKNTATNLGNSSQFGSGLVNAEAATR

SEQ ID NO: 66382 - protein, 268 aa, Unidentified
QTVPWGITAVQAPAVHNRGITGSGVRVAILDSGISAHEDLNIRGGASFVPGEPTTADLNGHGTHVAGTVAALNNSIGVIGVAPNAELYAVKVLGANGSGSVSGIAQGLEWAATNNMHIANMSLGSDFPSSTLERAVNYATSRDVLVIAATGNNGSGSVGYPARYANAMAVGATDQNNRRANFSQYGTGIDIVAPGVNVQSTYPGNRYVSMNGTSMATPHVAGAAALVKQRYPSWNATQIRNHLKNTATNLGNSSQFGSGLVNAEAATR

SEQ ID NO: 66383 - protein, 268 aa, Unidentified
QTVPWGITRVQAPAVHNRGITGSGVRVAILDSGISAHEDLNIRGGASFVPGEPTTADLNGHGTHVAGTVAALNNSIGVIGVAPSAELYAVKVLGANGRGSVSGIAQGLEWAATNNMHIANMSLGAEGPSSTLERAVNYATSRDVLVIAATGNNGSGSVGYPARYANAMAVGATDQNNRRANFSQYGTGIDIVAPGVNVQSTYPGNRYVSMNGTSMATPHVAGAAALVKQRYPSWNATQIRNHLKNTATNLGNSSQFGSGLVNAEAATR

SEQ ID NO: 66384 - protein, 268 aa, Unidentified
QTVPWGITRVQAPAVHNRGITGSGVRVAILDSGISAHEDLNIRGGASFVPGEPTTADLNGHGTHVAGTVAALNNSIGVIGVAPNAELYAVKVLGANGSGSVSGIAQGLEWAATNNMHIANMSLGSDFPSSTLERAVNYATSRDVLVIAATGNNGSGSVGYPARYANAMAVGATDQNNRRANFSQYGTGIDIVAPGVNVQSTYPGNRYVSMNGTSMATPHVAGAAALVKQRYPEWNATQIRNHLKNTATNLGNSSQFGSGLVNAEAATR

SEQ ID NO: 66385 - protein, 268 aa, Unidentified
QTVPWGITRVQAPAVHNRGITGSGVRVAILDSGISAHEDLNIRGGASFIPGEPTTADLNGHGTHVAGTVAALNNSIGVIGVAPNAELYAVKVLGANGSGSVSGIAQGLEWAATNNMHIANMSLGSDFPSSTLERAVNYATSRDVLVIAATGNNGSGSVGYPARYANAMAVGATDQNNRRANFSQYGTGIDIVAPGVNVQSTYPGNRYVSMNGTSMATPHVAGAAALVKQRYPSWNATQIRNHLKNTATNLGNSSQFGSGLVNAEAATR

SEQ ID NO: 66386 - protein, 268 aa, Unidentified
QTVPWGITRVQAPAVHNRGITGSEVRVAILDSGISAHEDLNIRGGASFVPGEPTTADLNGHGTHVAGTVAALNNSIGVIGVAPNAELYAVKVLGANGSGSVSGIAQGLEWAATNNMHIANMSLGSDFPSSTLERAVNYATSRDVLVIAATGNNGSGSVGYPARYANAMAVGATDQNNRRANFSQYGTGIDIVAPGVNVQSTYPGNRYVSMNGTSMATPHVAGAAALVKQRYPSWNATQIRNHLKNTATNLGNSSQFGSGLVNAEAATR

SEQ ID NO: 66387 - protein, 268 aa, Unidentified
QTVPWGITRVQAPTVHNRGITGSGVKVAILDTGIAQHSDLTIRGGASFVPGESTTADLNGHGTHVAGTVAALNNSIGVIGVAPSADLYAVKVLGANGRGSVSGIAQGLEWAATNNMHIANLSLGSDAPSTTLERAVNYATSRGVLVIAATGNSGAGSIGYPARYANAMAVGATDQNNRRASFSQYGTGIDIVAPGVGIQSTYLNNSYASMPGTSMATPHVAGVAALVKQKNPSWNATQIRNHLKNTATNLGNSSQFGSGLVNADAATR

SEQ ID NO: 66388 - protein, 268 aa, Unidentified
QTVPWGITRVQAPAVHNRGITGSGVRVAILDSGISAHSDLNIRGGASFVPGEPTTADLNGHGTHVAGTVAALNNSIGVIGVAPNAELYAVKVLGANGSGSVSGIAQGLEWAATNNMHIANMSLGTDAPSSTLERAVNYATSRDVLVIAATGNNGSGSVGYPARYANAMAVGATDQNNRRANFSQYGTGIDIVAPGVNVQSTYPGNRYVSMNGTSMATPHVAGAAALVKQRYPSWNATQIRNHLKNTATNLGNSSQFGSGLVNAEAATR

SEQ ID NO: 66389 - protein, 268 aa, Unidentified
QTVPWGITRVQAPAVHNRGITGSGVRVAILDSGISAHEDLNIRGGASFVPGEPTTADLNGHGTHVAGTVAALNNSIGVIGVAPNAELYAVKVLGANGSGSVSGIAQGLEWAATNNMHIANMSLGSDFPSSTLERAVNYATMRDVLVIAATGNNGSGSVGYPARYANAMAVGATDQNNRRANFSQYGTGIDIVAPGVNVQSTYPGNRYVSMNGTSMATPHVAGAAALVKQRYPSWNATQIRNHLKNTATNLGNSSQFGSGLVNAEAATR

SEQ ID NO: 66390 - protein, 268 aa, Unidentified
QTVPWGITRVQAPAVHNRGITGSGVRVAILDSGISAHEDLNIRGGASFVPGEPTWADLNGHGTHVAGTVAALNNSIGVIGVAPNAELYAVKVLGANGSGSVSGIAQGLEWAATNNMHIANMSLGSDFPSSTLERAVNYATSRDVLVIAATGNNGSGSVGYPARYANAMAVGATDQNNRRANFSQYGTGIDIVAPGVNVQSTYPGNRYVSMNGTSMATPHVAGAAALVKQRYPSWNATQIRNHLKNTATNLGNSSQFGSGLVNAEAATR

SEQ ID NO: 66391 - protein, 268 aa, Unidentified
QTVPWGITRVQAPAVHNRGITGSGVRVAILDSGISAHSDLNIRGGASFVPGEPTTADLNGHGTHVAGTVAALNNWIGVIGVAPNAELYAVKVLGANGSGSVSGIAQGLEWAATNNMHIANMSLGSDFPSSTLERAVNYATSRDVLVIAATGNNGSGSVGYPARYANAMAVGATDQNNRRANFSQYGTGIDIVAPGVNVQSTYPGNRYVSMNGTSMATPHVAGAAALVKQRYPSWNATQIRNHLKNTATNLGNSSQFGSGLVNAEAATR

SEQ ID NO: 66392 - protein, 268 aa, Unidentified
QTVPWGITRVQAPAVHNRGITGSGVRVAILDSGISAHEDLNIRGGASFVPMEPTTADLNGHGTHVAGTVAALNNSIGVIGVAPNAELYAVKVLGANGSGSVSGIAQGLEWAATNNMHIANMSLGSDFPSSTLERAVNYATSRDVLVIAATGNNGSGSVGYPARYANAMAVGATDQNNRRANFSQYGTGIDIVAPGVNVQSTYPGNRYVSMNGTSMATPHVAGAAALVKQRYPSWNATQIRNHLKNTATNLGNSSQFGSGLVNAEAATR

SEQ ID NO: 66393 - protein, 268 aa, Unidentified
QTVPWGITRVQAPAVHNRGITGSGVRVAILDSGISAHSDLNIRGGASFVPGEPTTADLNGHGTHVAGTVAALNNSIGVIGVAPNAELYAVKVLGANGSGSVSGIAQGLEWAATNNMHIANMSLGSDFPSSTLERAVNYATSRDVLVIAATGNNGSGSVGYPARYANAMAVGATDQNNRRANFSQYGTGIDIVAPGVNVQSTYPGNRYVSMNGTSMATPHVAGAAALVKQRYPSWNATQIRNHLKNTRTNLGNSSQFGSGLVNAEAATR

SEQ ID NO: 66394 - protein, 268 aa, Unidentified
QTVPWGITRVQAPAVHNAGITGSGVRVAILDSGISAHEDLNIRGGASFVPGEPTTADLNGHGTHVAGTVAALNNSIGVIGVAPNAELYAVKVLGANGSGSVSGIAQGLEWAATNNMHIANMSLGSDFPSSTLERAVNYATSRDVLVIAATGNNGSGSVGYPARYANAMAVGATDQNNRRANFSQYGTGIDIVAPGVNVQSTYPGNRYVSMNGTSMATPHVAGAAALVKQRYPSWNATQIRNHLKNTATNLGNSSQFGSGLVNAEAATR

SEQ ID NO: 66395 - protein, 268 aa, Unidentified
QTVPWGITRVQAPAVHNRGITGSGVRVAILDSGISAHEDLNIRGGASFVPGEPTTADLNGHGTHVAGTVAALNNSIGVIGVAPNAQLYAVKVLGANGSGSVSGIAQGLEWAATNNMHIANMSLGSDFPSSTLERAVNYATSRDVLVIAATGNNGSGSVGYPARYANAMAVGATDQNNRRANFSQYGTGIDIVAPGVNVQSTYPGNRYVSMNGTSMATPHVAGAAALVKQRYPSWNATQIRNHLKNTATNLGNSSQFGSGLVNAEAATR

SEQ ID NO: 66396 - protein, 268 aa, Unidentified
QTVPWGITRVQAPAVHNRGITGSGVRVAILDSGISAHSDLNIRGGASFVPGEPTTAKLNGHGTHVAGTVAALNNSIGVIGVAPNAELYAVKVLGANGSGSVSGIAQGLEWAATNNMHIANMSLGSDFPSSTLERAVNYATSRDVLVIAATGNNGSGSVGYPARYANAMAVGATDQNNRRANFSQYGTGIDIVAPGVNVQSTYPGNRYVSMNGTSMATPHVAGAAALVKQRYPSWNATQIRNHLKNTATNLGNSSQFGSGLVNAEAATR

SEQ ID NO: 66397 - protein, 268 aa, Unidentified
QTVPWGITRSQAPAVHNRGITGSGVRVAILDSGISAHEDLNIRGGASFVPGEPTTADLNGHGTHVAGTVAALNNSIGVIGVAPNAELYAVKVLGANGSGSVSGIAQGLEWAATNNMHIANMSLGSDFPSSTLERAVNYATSRDVLVIAATGNNGSGSVGYPARYANAMAVGATDQNNRRANFSQYGTGIDIVAPGVNVQSTYPGNRYVSMNGTSMATPHVAGAAALVKQRYPSWNATQIRNHLKNTATNLGNSSQFGSGLVNAEAATR

SEQ ID NO: 66398 - protein, 268 aa, Unidentified
QTVPWGITRVQAPAVHNRGITGSGVRVAILDSGISAHEDLNIRGGASFVPGEPTTADLNGHGTHVAGTVAALNNSIGVIGVAPNAELYAVKVLGANGWGSVSGIAQGLEWAATNNMHIANMSLGSDFPSSTLERAVNYATSRDVLVIAATGNNGSGSVGYPARYANAMAVGATDQNNRRANFSQYGTGIDIVAPGVNVQSTYPGNRYVSMNGTSMATPHVAGAAALVKQRYPSWNATQIRNHLKNTATNLGNSSQFGSGLVNAEAATR

SEQ ID NO: 66399 - protein, 268 aa, Unidentified
QTVPWGITRVQAPAVVNRGITGSGVRVAILDSGISAHEDLNIRGGASFVPGEPTTADLNGHGTHVAGTVAALNNSIGVIGVAPNAELYAVKVLGANGSGSVSGIAQGLEWAATNNMHIANMSLGSDFPSSTLERAVNYATSRDVLVIAATGNNGSGSVGYPARYANAMAVGATDQNNRRANFSQYGTGIDIVAPGVNVQSTYPGNRYVSMNGTSMATPHVAGAAALVKQRYPSWNATQIRNHLKNTATNLGNSSQFGSGLVNAEAATR

SEQ ID NO: 66400 - protein, 268 aa, Unidentified
QTVPWGITRVQAPAVHNRGITGSGVRVAILDSGISAGSDLNIRGGASFVPGEPTTADLNGHGTHVAGTVAALNNSIGVIGVAPNAELYAVKVLGANGSGSVSGIAQGLEWAATNNMHIANMSLGSDFPSSTLERAVNYATSRDVLVIAATGNNGSGSVGYPARYANAMAVGATDQNNRRANFSQYGTGIDIVAPGVNVQSTYPGNRYVSMNGTSMATPHVAGAAALVKQRYPSWNATQIRNHLKNTATNLGNSSQFGSGLVNAEAATR

SEQ ID NO: 66401 - protein, 268 aa, Unidentified
QTVPWGITRVQAPAVHNRGITGSGVRVAILDSGISAHEDLNIRGGASFVPGEPTTADLNGHGTHVAGTVAALNNSIGVIGVAPNAELYAVKVLGANGSGSVSGIAQGLEWAATNNMHIANMSLGSDFPSSTLERAVNYATSRDVLVIAATGNNGSGSVGYPARYANAMAVGATDQNNRRANFSQYGTGIDIVAPGVNVQSTYPGNRYVSMNGTSMATPHVAGAAALVKQRYPSWNATQIRWHLKNTATNLGNSSQFGSGLVNAEAATR

SEQ ID NO: 66402 - protein, 268 aa, Unidentified
QTVPWGITRVQAPAVHNRGITGSGVRVAILDSGISAHEDLNIRGGASFVPGEPTTADLNGHGTHVAGTVAALNNSIGVIGVAPNAELYAVKVLGANGFGSVSGIAQGLEWAATNNMHIANMSLGSDFPSSTLERAVNYATSRDVLVIAATGNNGSGSVGYPARYANAMAVGATDQNNRRANFSQYGTGIDIVAPGVNVQSTYPGNRYVSMNGTSMATPHVAGAAALVKQRYPSWNATQIRNHLKNTATNLGNSSQFGSGLVNAEAATR

SEQ ID NO: 66403 - protein, 268 aa, Unidentified
QTVPWGITRVQAPAVHNRGITGSGVRVAILDSGISAYSDLNIRGGASFVPGEPTTADLNGHGTHVAGTVAALNNSIGVIGVAPNAELYAVKVLGANGSGSVSGIAQGLEWAATNNMHIANMSLGSDFPSSTLERAVNYATSRDVLVIAATGNNGSGSVGYPARYANAMAVGATDQNNRRANFSQYGTGIDIVAPGVNVQSTYPGNRYVSMNGTSMATPHVAGAAALVKQRYPSWNATQIRNHLKNTATNLGNSSQFGSGLVNAEAATR

SEQ ID NO: 66404 - protein, 268 aa, Unidentified
QTVPWGITRVQAPAVHNRGITGSGVRVAILDSGISAHSDLNIRGGASFVPGEPTTAWLNGHGTHVAGTVAALNNSIGVIGVAPNAELYAVKVLGANGSGSVSGIAQGLEWAATNNMHIANMSLGSDFPSSTLERAVNYATSRDVLVIAATGNNGSGSVGYPARYANAMAVGATDQNNRRANFSQYGTGIDIVAPGVNVQSTYPGNRYVSMNGTSMATPHVAGAAALVKQRYPSWNATQIRNHLKNTATNLGNSSQFGSGLVNAEAATR

SEQ ID NO: 66405 - protein, 268 aa, Unidentified
QTVPWGITRVQAPAVHNRGITGSGVRVAILDSGISAHSDLNIRGGASFVPGEPTTANLNGHGTHVAGTVAALNNSIGVIGVAPNAELYAVKVLGANGSGSVSGIAQGLEWAATNNMHIANMSLGSDFPSSTLERAVNYATSRDVLVIAATGNNGSGSVGYPARYANAMAVGATDQNNRRANFSQYGTGIDIVAPGVNVQSTYPGNRYVSMNGTSMATPHVAGAAALVKQRYPSWNATQIRNHLKNTATNLGNSSQFGSGLVNAEAATR

SEQ ID NO: 66406 - protein, 268 aa, Unidentified
QTVPWGITRVQAPAVHNRGITGSGVRVAILDSGISAHSDLNIRGGASFVPGEPTTADLNGHGTHVAGTVAALNNFIGVIGVAPNAELYAVKVLGANGSGSVSGIAQGLEWAATNNMHIANMSLGSDFPSSTLERAVNYATSRDVLVIAATGNNGSGSVGYPARYANAMAVGATDQNNRRANFSQYGTGIDIVAPGVNVQSTYPGNRYVSMNGTSMATPHVAGAAALVKQRYPSWNATQIRNHLKNTATNLGNSSQFGSGLVNAEAATR

SEQ ID NO: 66407 - protein, 268 aa, Unidentified
QTVPWGITRVQAPAVHNRGITGSGVRVAILDSGISAHSDLNIRGGASFVPGEPTTADLNGHGTHVAGTVAALNNSIGVIGVAPNAELYAVKVLGANGSGSVSGIAQGLEWAATNNMHIANMSLGSDFHSSTLERAVNYATSRDVLVIAATGNNGSGSVGYPARYANAMAVGATDQNNRRANFSQYGTGIDIVAPGVNVQSTYPGNRYVSMNGTSMATPHVAGAAALVKQRYPSWNATQIRNHLKNTATNLGNSSQFGSGLVNAEAATR

SEQ ID NO: 66408 - protein, 268 aa, Unidentified
QTVPWGITRVQAPAVHNRGITGSGVRVAILDSGISAHSDLNIRGGASFVPGEPTTADLNGHGTHVAGTVAALNNSIGVIGVAPNAELYAVKVLGANGSGSVSGIAQGLEWAATNNMHIANMSLGSDFVSSTLERAVNYATSRDVLVIAATGNNGSGSVGYPARYANAMAVGATDQNNRRANFSQYGTGIDIVAPGVNVQSTYPGNRYVSMNGTSMATPHVAGAAALVKQRYPSWNATQIRNHLKNTATNLGNSSQFGSGLVNAEAATR

SEQ ID NO: 66409 - protein, 268 aa, Unidentified
QTVPWGITRVQAPWVHNRGITGSGVRVAILDSGISAHEDLNIRGGASFVPGEPTTADLNGHGTHVAGTVAALNNSIGVIGVAPNAELYAVKVLGANGSGSVSGIAQGLEWAATNNMHIANMSLGSDFPSSTLERAVNYATSRDVLVIAATGNNGSGSVGYPARYANAMAVGATDQNNRRANFSQYGTGIDIVAPGVNVQSTYPGNRYVSMNGTSMATPHVAGAAALVKQRYPSWNATQIRNHLKNTATNLGNSSQFGSGLVNAEAATR

SEQ ID NO: 66410 - protein, 268 aa, Unidentified
QTVPWGITRVQAPAVHNRGITGSGVRVAILDSGISAHSDLNIRGGASFVPGEPTTADLNGHGTHVAGTVAALNNSIGVIGVAPNASLYAVKVLGANGSGSVSGIAQGLEWAATNNMHIANMSLGSDFPSSTLERAVNYATSRDVLVIAATGNNGSGSVGYPARYANAMAVGATDQNNRRANFSQYGTGIDIVAPGVNVQSTYPGNRYVSMNGTSMATPHVAGAAALVKQRYPSWNATQIRNHLKNTATNLGNSSQFGSGLVNAEAATR

SEQ ID NO: 66411 - protein, 268 aa, Unidentified
QTVPWGITRVQAPAVHNRGITGSGVRVAILDSGISAHSDLNIRGGASFVPGEPTTADLNGHGTHVAGTVAALNNSIGVIGVAPNAELYAVKVLGANGSGSVSGIAQGLEWAATNNMHIANMSLGSDFASSTLERAVNYATSRDVLVIAATGNNGSGSVGYPARYANAMAVGATDQNNRRANFSQYGTGIDIVAPGVNVQSTYPGNRYVSMNGTSMATPHVAGAAALVKQRYPSWNATQIRNHLKNTATNLGNSSQFGSGLVNAEAATR

SEQ ID NO: 66412 - protein, 268 aa, Unidentified
QTVPWGITRVQAPAVHNRGITGSGVRVAILDSGISAHEDLNIRGGASFVPGEPTTADLNGHGTHVAGTVAALNNSIGVIGVAPNAELYAVKVLGANGSGSVSGIAQGLEWAATNNMHIANMSLGSDFPSSTLERAVNYATSRDVLVIAATGNNGSGSVGYPARYANAMAVGATDQYNRRANFSQYGTGIDIVAPGVNVQSTYPGNRYVSMNGTSMATPHVAGAAALVKQRYPSWNATQIRNHLKNTATNLGNSSQFGSGLVNAEAATR

SEQ ID NO: 66413 - protein, 268 aa, Unidentified
QTVPWGITRVQAPAVHNRGITGSGVRVAILDSGISAHEDLNIRGGASFVPGEPTTADLNGHGTHVAGTVAALNNSIGVIGVAPNAELYAVKVLGANGSGSVSGIAQGLEWAATNNMHIANMSLGSDFPSSTLERAVNYATSRDVLVIAATGNNGSGSVGYPARYANALAVGATDQNNRRANFSQYGTGIDIVAPGVNVQSTYPGNRYVSMNGTSMATPHVAGAAALVKQRYPSWNATQIRNHLKNTATNLGNSSQFGSGLVNAEAATR

SEQ ID NO: 66414 - protein, 268 aa, Unidentified
QTVPWGITRVQAPAVHNRGITGSGVRVAILDSGISAHSDLNIRGGASFVPGEPTTADLNGHGTHVAGTVAALNNSIGVIGKAPNAELYAVKVLGANGSGSVSGIAQGLEWAATNNMHIANMSLGSDFPSSTLERAVNYATSRDVLVIAATGNNGSGSVGYPARYANAMAVGATDQNNRRANFSQYGTGIDIVAPGVNVQSTYPGNRYVSMNGTSMATPHVAGAAALVKQRYPSWNATQIRNHLKNTATNLGNSSQFGSGLVNAEAATR

SEQ ID NO: 66415 - protein, 268 aa, Unidentified
QTVPWGITRVQAPAVHNRGITGSGVRVAILDSGISAHSDLNIRGGASFVPGEPTTADLNGHGTHVAGTVAALNNLIGVIGVAPNAELYAVKVLGANGSGSVSGIAQGLEWAATNNMHIANMSLGSDFPSSTLERAVNYATSRDVLVIAATGNNGSGSVGYPARYANAMAVGATDQNNRRANFSQYGTGIDIVAPGVNVQSTYPGNRYVSMNGTSMATPHVAGAAALVKQRYPSWNATQIRNHLKNTATNLGNSSQFGSGLVNAEAATR

SEQ ID NO: 66416 - protein, 268 aa, Unidentified
QTVPWGITRVQAPAVHNRGITGSGVRVAILDSGISAHSDLNIRGGASFVPGEPTTADLNGHGTHVAGTVAALNNSIGVIGSAPNAELYAVKVLGANGSGSVSGIAQGLEWAATNNMHIANMSLGSDFPSSTLERAVNYATSRDVLVIAATGNNGSGSVGYPARYANAMAVGATDQNNRRANFSQYGTGIDIVAPGVNVQSTYPGNRYVSMNGTSMATPHVAGAAALVKQRYPSWNATQIRNHLKNTATNLGNSSQFGSGLVNAEAATR

SEQ ID NO: 66417 - protein, 268 aa, Unidentified
QTVPWGITRVQAPAVHNRGITGSGVRVAILDSGISAHSDLNIRGGASFVPGEPTTADLNGHGTHVAGTVAALNNSIGVIGVAPNAPLYAVKVLGANGSGSVSGIAQGLEWAATNNMHIANMSLGSDFPSSTLERAVNYATSRDVLVIAATGNNGSGSVGYPARYANAMAVGATDQNNRRANFSQYGTGIDIVAPGVNVQSTYPGNRYVSMNGTSMATPHVAGAAALVKQRYPSWNATQIRNHLKNTATNLGNSSQFGSGLVNAEAATR

SEQ ID NO: 66418 - protein, 268 aa, Unidentified
QTVPWGITRVQAPAVHNRGITGSGVRVAILDSGISAHSDLNIRGGASFVPGEPTTADLNGHGTHVAGTVAALNNSIGVIGVAPNAELYAVKVLGANGSGSVSGIAQGLEWAATNNMHIANMSLGSDFPSSTLERAVNYATSRDVLVIAATGNNGSGSVGYPARYANAMAVGATDQNNRRANFSQYGTGIDIVAPGVNVQSTYPGNRYVSMNGTSMATPHVAGAAALVKQRYPSWNATQIRNHLKNTKTNLGNSSQFGSGLVNAEAATR

SEQ ID NO: 66419 - protein, 268 aa, Unidentified
QTVPWGITRVQAPAVHNRGITGSGVRVAILDSGISAHSDLNIRGGASFVPGEPTTADLNGHGTHVAGTVAALNNSIGVIGVAPNAELYAVKVLGANGSGQVSGIAQGLEWAATNNMHIANMSLGSDFPSSTLERAVNYATSRDVLVIAATGNNGSGSVGYPARYANAMAVGATDQNNRRANFSQYGTGIDIVAPGVNVQSTYPGNRYVSMNGTSMATPHVAGAAALVKQRYPSWNATQIRNHLKNTATNLGNSSQFGSGLVNAEAATR

SEQ ID NO: 66420 - protein, 268 aa, Unidentified
QTVPWGITRVQAPAVHNRGITGSGVRVAILDSGISAHSDLNIRGGASFVPGEPTYADLNGHGTHVAGTVAALNNSIGVIGVAPNAELYAVKVLGANGSGSVSGIAQGLEWAAQNNMHIANMSLGSDFPSSTLERAVNYATSRDVLVIAATGNNGSGSVGYPARYANAMAVGATDQNNRRANFSQYGTGIDIVAPGVNVQSTYPGNRYVSMNGTSMATPHVAGAAALVKQRYPSWNATQIRNHLKNTATNLGNSSQFGSGLVNAEAATR

SEQ ID NO: 66421 - protein, 268 aa, Unidentified
QTVPWGITRVQAPAVHNRGITGSGVRVAILDSGISAHSDLNIRGGASFVPGEPTTADLNGHGTHVAGTVAALNNSIGVIGVAPNAELYAVKVLGANGSGSVSGIAQGLEWAATNNMHIANMSLGSDFPSSTLERAVNYATSRDVLVIAATGNNGSGSVGYPARYANAMAVGATDQNNRRANFSQYGTGIDIVAPGVNVQSTYPGNRYVSMDGTSMATPHVAGAAALVKQRYPSWNATQIRNHLKNTATNLGNSSQFGSGLVNAEAATR

SEQ ID NO: 66422 - protein, 268 aa, Unidentified
QTVPWGITRVQAPAVHNRGITGSGVRVAILDSGISAHEDLNIRGGASFVPGEPTTADLNGHGTHVAGTVAALNNSIGVIGVAPNAELYAVKVLGANGSGSVSGIAQGLEWAATNNMHIANMSLGSDFPSSTLERAVNYATSRDVLVIAATGNNGSGSVGYPARYANAMAVGATDANNRRANFSQYGTGIDIVAPGVNVQSTYPGNRYVSMNGTSMATPHVAGAAALVKQRYPSWNATQIRNHLKNTATNLGNSSQFGSGLVNAEAATR

SEQ ID NO: 66423 - protein, 268 aa, Unidentified
QTVPWGITRVQAPAVHNRGITGSGVRVAILDSGISAHEDLNIRGGASFVPGEPTTADLNGHGTHVAGTVAALNNAIGVIGVAPNAELYAVKVLGANGSGSVSGIAQGLEWAATNNMHIANMSLGSDFPSSTLERAVNYATSRDVLVIAATGNNGSGSVGYPARYANAMAVGATDQNNRRANFSQYGTGIDIVAPGVNVQSTYPGNRYVSMNGTSMATPHVAGAAALVKQRYPSWNATQIRNHLKNTATNLGNSSQFGSGLVNAEAATR

SEQ ID NO: 66424 - protein, 268 aa, Unidentified
QTVPWGITRVQAPAVHNRGITGSGVRVAILDSGILAHEDLNIRGGASFVPGEPTTADLNGHGTHVAGTVAALNNSIGVIGVAPNAELYAVKVLGANGSGSVSGIAQGLEWAATNNMHIANMSLGSDFPSSTLERAVNYATSRDVLVIAATGNNGSGSVGYPARYANAMAVGATDQNNRRANFSQYGTGIDIVAPGVNVQSTYPGNRYVSMNGTSMATPHVAGAAALVKQRYPSWNATQIRNHLKNTATNLGNSSQFGSGLVNAEAATR

SEQ ID NO: 66425 - protein, 268 aa, Unidentified
QTVPWGITRVQAPAVHNRGITGSGVRVAILDSGISAHEDLNIRGGASFVPGEPTTADLNGHGTHVAGTVAALNNYIGVIGVAPNAELYAVKVLGANGSGSVSGIAQGLEWAATNNMHIANMSLGSDFPSSTLERAVNYATSRDVLVIAATGNNGSGSVGYPARYANAMAVGATDQNNRRANFSQYGTGIDIVAPGVNVQSTYPGNRYVSMNGTSMATPHVAGAAALVKQRYPSWNATQIRNHLKNTATNLGNSSQFGSGLVNAEAATR

SEQ ID NO: 66426 - protein, 268 aa, Unidentified
QTVPWGITRVQAPAVHNRGITGSGVRVAILDSGISAHSDLNIRGGASFVPGEPTTADLNGHGTHVAGTVAALNNSIGVIGVAPNAELYAVKVLGANGSGSVSGIAQGLEWAATNNMHIANMSLGSDFPSSTLERAVNYATSRDVLVIAATGNNGSGSVGAPARYANAMAVGATDQNNRRANFSQYGTGIDIVAPGVNVQSTYPGNRYVSMNGTSMATPHVAGAAALVKQRYPSWNATQIRNHLKNTATNLGNSSQFGSGLVNAEAATR

SEQ ID NO: 66427 - protein, 268 aa, Unidentified
QTVPWGITRVQAPAVHNRGITGSGVRVAILDSGISAHSNLNIRGGASFVPGEPTTADLNGHGTHVAGTVAALNNSIGVIGVAPNAELYAVKVLGANGSGSVSGIAQGLEWAATNNMHIANMSLGSDFPSSTLERAVNYATSRDVLVIAATGNNGSGSVGYPARYANAMAVGATDQNNRRANFSQYGTGIDIVAPGVNVQSTYPGNRYVSMNGTSMATPHVAGAAALVKQRYPSWNATQIRNHLKNTATNLGNSSQFGSGLVNAEAATR

SEQ ID NO: 66428 - protein, 268 aa, Unidentified
QTVPWGITRVQAPAVHNRGITGSGVRVAILDSGISAHSDLNIRGGASFVPGEPTTADLNGHGTHVAGTVAALNNSIGVIGVAPNAGLYAVKVLGANGSGSVSGIAQGLEWAATNNMHIANMSLGSDFPSSTLERAVNYATSRDVLVIAATGNNGSGSVGYPARYANAMAVGATDQNNRRANFSQYGTGIDIVAPGVNVQSTYPGNRYVSMNGTSMATPHVAGAAALVKQRYPSWNATQIRNHLKNTATNLGNSSQFGSGLVNAEAATR

SEQ ID NO: 66429 - protein, 268 aa, Unidentified
QTVPWGITRVQAPAVHNRGITGSGVRVAILDSGISAHSDLNIRGGASFVPGEPTTADLNGHGTHVAGTVAALNNSIGVIGVAPNAILYAVKVLGANGSGSVSGIAQGLEWAATNNMHIANMSLGSDFPSSTLERAVNYATSRDVLVIAATGNNGSGSVGYPARYANAMAVGATDQNNRRANFSQYGTGIDIVAPGVNVQSTYPGNRYVSMNGTSMATPHVAGAAALVKQRYPSWNATQIRNHLKNTATNLGNSSQFGSGLVNAEAATR

SEQ ID NO: 66430 - protein, 268 aa, Unidentified
QTVPWGITRVQAPAVHNRGITGSGVRVAILDSGISAHSDLNIRGGASFVPGEPTTADLNGHGTHVAGTVAALNNSIGVIGVAPNAELYAVKVLGANGSGSVSGIAQGLEWAATNNMHIANMSLGSDFPSSTLERAVNYATSRDVLVIAATGNNGSGSVGYPARYANAMAVGATDQNNRRANFSQYGTGIDIVAPGVNVISTYPGNRYVSMNGTSMATPHVAGAAALVKQRYPSWNATQIRNHLKNTATNLGNSSQFGSGLVNAEAATR

SEQ ID NO: 66431 - protein, 268 aa, Unidentified
QTVPWGITRVQAPAVHNRGITGSGVRVAILDSGISAHSDLNIRGGASFVPGEPTTADLNGHGTHVAGTVAALNNSIGVIGVAPNANLYAVKVLGANGSGSVSGIAQGLEWAATNNMHIANMSLGSDFPSSTLERAVNYATSRDVLVIAATGNNGSGSVGYPARYANAMAVGATDQNNRRANFSQYGTGIDIVAPGVNVQSTYPGNRYVSMNGTSMATPHVAGAAALVKQRYPSWNATQIRNHLKNTATNLGNSSQFGSGLVNAEAATR

SEQ ID NO: 66432 - protein, 268 aa, Unidentified
QTVPWGITRVQAPAVHNRGITGSGVRVAILDSGISAHSDLNIRGGASFVPGEPTTADLNGHGTHVAGTVAALNNSIGVIGVAPNAELVAVKVLGANGSGSVSGIAQGLEWAATNNMHIANMSLGSDFPSSTLERAVNYATSRDVLVIAATGNNGSGSVGYPARYANAMAVGATDQNNRRANFSQYGTGIDIVAPGVNVQSTYPGNRYVSMNGTSMATPHVAGAAALVKQRYPSWNATQIRNHLKNTATNLGNSSQFGSGLVNAEAATR

SEQ ID NO: 66433 - protein, 268 aa, Unidentified
QTVPWGITRVQAPAVHNRGITGSGVRVAILDSGISAHEDLNIRGGASFVPGEPTTADLNGHGTHVAGTVAALNNSIGVIGVAPNAELYAVKVLGANGSGSVSGIAQGLEWAATNNMHIANMSLGSDFPSSTLERAVNYATSRDVLVIAATGNNGSGSVGYPARYANAMAVGATDQNNRRANFSQYGTGIDIVAPGVNVQSTYPGNRYVSMNGTSMATPHVAGAAALVKQRYPSWNATQIRLHLKNTATNLGNSSQFGSGLVNAEAATR

SEQ ID NO: 66434 - protein, 268 aa, Unidentified
QTVPWGITRVQAPAVHNRGITGSGVRVAILDSGISAHEDLNIRGGASFVPGEPTTADLNGHGTHVAGTVAALNNSIGVIGVAPNAELYAVKVLGANGRGSVSGIAQGLEWAATNNMHIANMSLGSDAPSSTLERAVNYATSRDVLVIAATGNNGSGSVGYPARYANAMAVGATDQNNRRANFSQYGTGIDIVAPGVNVQSTYPGNRYVSMNGTSMATPHVAGAAALVKQRYPSWNATQIRNHLKNTATNLGNSSQFGSGLVNAEAATR

SEQ ID NO: 66435 - protein, 268 aa, Unidentified
QTVPWGITRVQAPAVHNRGITGSGVRVAILDSGISAHSDLNIRGGASFVPGEPTTADLNGHGTHVAGTVAALNNSIGVIGVAPNAHLYAVKVLGANGSGSVSGIAQGLEWAATNNMHIANMSLGSDFPSSTLERAVNYATSRDVLVIAATGNNGSGSVGYPARYANAMAVGATDQNNRRANFSQYGTGIDIVAPGVNVQSTYPGNRYVSMNGTSMATPHVAGAAALVKQRYPSWNATQIRNHLKNTATNLGNSSQFGSGLVNAEAATR

SEQ ID NO: 66436 - protein, 268 aa, Unidentified
QTVPWGITRVQAPAVHNRGITGSGVRVAILDSGISAHEDLNIRGGASFVPGEPTTADLNGHGTHVAGTVAALNNSIGVIGVAPNAELYAVKVLGANGSGSVSGIAQGLEWAATNNMHIANMSLGEDFPSSTLERAVNYATSRDVLVIAATGNNGSGSVGYPARYANAMAVGATDQNNRRANFSQYGTGIDIVAPGVNVQSTYPGNRYVSMNGTSMATPHVAGAAALVKQRYPSWNATQIRNHLKNTATNLGNSSQFGSGLVNAEAATR

SEQ ID NO: 66437 - protein, 268 aa, Unidentified
QTVPWGITRVQAPAVHNRGITGSGVRVAILDSGISTHEDLNIRGGASFVPGEPTTADLNGHGTHVAGTVAALNNSIGVIGVAPNAELYAVKVLGANGRGSVSGIAQGLEWAATNNMHIANMSLGAEGPSSTLERAVNYATSRDVLVIAATGNNGSGSVGYPARYANAMAVGATDQNNRRANFSQYGTGIDIVAPGVNVQSTYPGNRYVSMNGTSMATPHVAGAAALVKQRYPSWNATQIRNHLKNTATNLGNSSQFGSGLVNAEAATR

SEQ ID NO: 66438 - protein, 268 aa, Unidentified
QTVPWGITRVQAPAVHNRGITGSGVRVAILDSGISAHEDLNIRGGASFVPGEPTTADLNGHGTHVAGTVAALNNSIGVIGVAPNAELYAVKVLGANGSGSVSGIAQGLEWAATNNMHIANMSLGSDFPSSTLERAVNYATERDVLVIAATGNNGSGSVGYPARYANAMAVGATDQNNRRANFSQYGTGIDIVAPGVNVQSTYPGNRYVSMNGTSMATPHVAGAAALVKQRYPSWNATQIRNHLKNTATNLGNSSQFGSGLVNAEAATR

SEQ ID NO: 66439 - protein, 268 aa, Unidentified
QTVPWGITRVQAPAVHNRGITGSGVRVAILDSGISAHSDLNIRGGASFVPGEPTTADLNGHGTHVAGTVAALNNSIGVIGVAPNAELYAVKVLGANGSGSVSGIAQGLEWAATNNMHIANMSLGSDFPSSTLERAVNYATSRDVLVIAATGNNGSGSVGYPARYANAMAVGATDQNNRRANFSQYGTGIDIVAPGVNVQSTYPGNRYVSMNGTSMATPHVAGAAALVKQRYPSWNATQIRNHLKNTQTNLGNSSQFGSGLVNAEAATR

SEQ ID NO: 66440 - protein, 268 aa, Unidentified
QTVPWGITRVQAPAVHNRGITGSGVRVAILDSGISAHEDLNIRGGASFVPHEPTTADLNGHGTHVAGTVAALNNSIGVIGVAPNAELYAVKVLGANGSGSVSGIAQGLEWAATNNMHIANMSLGSDFPSSTLERAVNYATSRDVLVIAATGNNGSGSVGYPARYANAMAVGATDQNNRRANFSQYGTGIDIVAPGVNVQSTYPGNRYVSMNGTSMATPHVAGAAALVKQRYPSWNATQIRNHLKNTATNLGNSSQFGSGLVNAEAATR

SEQ ID NO: 66441 - protein, 268 aa, Unidentified
QTVPWGITRVQAPAVHNRGITGSGVRVAILDSGISADSDLNIRGGASFVPGEPTTADLNGHGTHVAGTVAALNNSIGVIGVAPNAELYAVKVLGANGSGSVSGIAQGLEWAATNNMHIANMSLGSDFPSSTLERAVNYATSRDVLVIAATGNNGSGSVGYPARYANAMAVGATDQNNRRANFSQYGTGIDIVAPGVNVQSTYPGNRYVSMNGTSMATPHVAGAAALVKQRYPSWNATQIRNHLKNTATNLGNSSQFGSGLVNAEAATR

SEQ ID NO: 66442 - protein, 268 aa, Unidentified
QTVPWGITRVQAPAVHNRGITGSGVRVAILDSGISAHEDLNIRGGASFVPGEPTTADLNGHGTHVAGTVAALNNSIGVIGVAPNAELYAVKVLGANGSGSVSGIAQGLEWAATNNMHIANMSLGSDFPSSTLERAVNYATSRDVLVIAATGNNGSGSVGYPARYANAMGVGATDQNNRRANFSQYGTGIDIVAPGVNVQSTYPGNRYVSMNGTSMATPHVAGAAALVKQRYPSWNATQIRNHLKNTATNLGNSSQFGSGLVNAEAATR

SEQ ID NO: 66443 - protein, 268 aa, Unidentified
QTVPWGITRVQAPAVHNRGITGSGVRVAILDSGISAHEDLNIRGGASFVPGEPTTADLNGHGTHVAGTVAALNNSIGVIGVAPNAELYAVKVLGANGSGSVSGIAQGLEWAATNNMHIANMSLGSDFPSSTLERAVNYATSRDVLVIAATGNNGSGSVGYPARYANAMAVGATDQNNRRANFSQYGTGIDIVAPGVNVQSTYPGNRYVSMNGTSMACPHVAGAAALVKQRYPSWNATQIRNHLKNTATNLGNSSQFGSGLVNAEAATR

SEQ ID NO: 66444 - protein, 268 aa, Unidentified
QTVPWGITRVQAPAVHNRGITGSGVRVAILDSGISAHSHLNIRGGASFVPGEPTTADLNGHGTHVAGTVAALNNSIGVIGVAPNAELYAVKVLGANGSGSVSGIAQGLEWAATNNMHIANMSLGSDFPSSTLERAVNYATSRDVLVIAATGNNGSGSVGYPARYANAMAVGATDQNNRRANFSQYGTGIDIVAPGVNVQSTYPGNRYVSMNGTSMATPHVAGAAALVKQRYPSWNATQIRNHLKNTATNLGNSSQFGSGLVNAEAATR

SEQ ID NO: 66445 - protein, 268 aa, Unidentified
QTVPWGITRVQAPAVHNRGITGSGVRVAILDSGISAHSDLNIRGGASFVPGEPTTADLNGHGTHVAGTVAALNNSIGVIGVAPNAELYAVKVLGANGSGSVSGIAQGLEWAATNNMHIANMSLGTDFPSSTLERAVNYATSRDVLVIAATGNNGSGSVGYPARYANAMAVGATDQNNRRANFSQYGTGIDIVAPGVNVQSTYPGNRYVSMNGTSMATPHVAGAAALVKQRYPSWNATQIRNHLKNTATNLGNSSQFGSGLVNAEAATR

SEQ ID NO: 66446 - protein, 268 aa, Unidentified
QTVPWGITRVQAPAVHNRGITGSGVRVAILDSGISAFSDLNIRGGASFVPGEPTTADLNGHGTHVAGTVAALNNSIGVIGVAPNAELYAVKVLGANGSGSVSGIAQGLEWAATNNMHIANMSLGSDFPSSTLERAVNYATSRDVLVIAATGNNGSGSVGYPARYANAMAVGATDQNNRRANFSQYGTGIDIVAPGVNVQSTYPGNRYVSMNGTSMATPHVAGAAALVKQRYPSWNATQIRNHLKNTATNLGNSSQFGSGLVNAEAATR

SEQ ID NO: 66447 - protein, 268 aa, Unidentified
QTVPWGITRVQAPAVHNRGITGSGVRVAILDSGISAHEDLNILGGASFVPGEPTTADLNGHGTHVAGTVAALNNSIGVIGVAPNAELYAVKVLGANGSGSVSGIAQGLEWAATNNMHIANMSLGSDFPSSTLERAVNYATSRDVLVIAATGNNGSGSVGYPARYANAMAVGATDQNNRRANFSQYGTGIDIVAPGVNVQSTYPGNRYVSMNGTSMATPHVAGAAALVKQRYPSWNATQIRNHLKNTATNLGNSSQFGSGLVNAEAATR

SEQ ID NO: 66448 - protein, 268 aa, Unidentified
QTVPWGITRVQAPAVLNRGITGSGVRVAILDSGISAHEDLNIRGGASFVPGEPTTADLNGHGTHVAGTVAALNNSIGVIGVAPNAELYAVKVLGANGSGSVSGIAQGLEWAATNNMHIANMSLGSDFPSSTLERAVNYATSRDVLVIAATGNNGSGSVGYPARYANAMAVGATDQNNRRANFSQYGTGIDIVAPGVNVQSTYPGNRYVSMNGTSMATPHVAGAAALVKQRYPSWNATQIRNHLKNTATNLGNSSQFGSGLVNAEAATR

SEQ ID NO: 66449 - protein, 268 aa, Unidentified
QTVPWGITRVQAPAVHNRGITGSGVRVAILDSGISAHEDLNIRGGASFVPGEPTTADLNGHGTHVAGTVAALNNSIGVIGVAPNAELYAVKVLGANGSGSVSGIAQGLEWAATNNMHIANMSLGSDFPSSTLERAVNYATSRDVLVIAATGNNGSGSVGYPARYANAMAVGATDQNNRRANFSQYGTGIDIVAPGVNVQSTYPGNRYVSMNGTSMATPHVAGAAALVKQRYPSWNATQIRNHLKNTATNLGNSSQFGSGLVNAELATR

SEQ ID NO: 66450 - protein, 268 aa, Unidentified
QTVPWGITRVQAPAVHNRGITGSGVRVAILDSGISAHEDLNIKGGASFVPGEPTTADLNGHGTHVAGTVAALNNSIGVIGVAPNAELYAVKVLGANGSGSVSGIAQGLEWAATNNMHIANMSLGSDFPSSTLERAVNYATSRDVLVIAATGNNGSGSVGYPARYANAMAVGATDQNNRRANFSQYGTGIDIVAPGVNVQSTYPGNRYVSMNGTSMATPHVAGAAALVKQRYPSWNATQIRNHLKNTATNLGNSSQFGSGLVNAEAATR

SEQ ID NO: 66451 - protein, 268 aa, Unidentified
QTVPWGITRVQAPAVHNRGITGSGVRVAILDSGISAHSDLNIRGGASFVPGEPTTADLNGHGTHVAGTVAALNNSIGVIGVAPNAELYAVKVLGANGSGYVSGIAQGLEWAATNNMHIANMSLGSDFPSSTLERAVNYATSRDVLVIAATGNNGSGSVGYPARYANAMAVGATDQNNRRANFSQYGTGIDIVAPGVNVQSTYPGNRYVSMNGTSMATPHVAGAAALVKQRYPSWNATQIRNHLKNTATNLGNSSQFGSGLVNAEAATR

SEQ ID NO: 66452 - protein, 268 aa, Unidentified
QTVPWGITRVQAPAVHNRGITGSGVRVAILDSGISAHSDLNIRGGASFVPGEPTTADLNGHGTHVAGTVAALNNSIGVIGVAPNAELYAVKVLGANGSGSVSGIAQGLEWAATNNMHIANMSLGSDFPFSTLERAVNYATSRDVLVIAATGNNGSGSVGYPARYANAMAVGATDQNNRRANFSQYGTGIDIVAPGVNVQSTYPGNRYVSMNGTSMATPHVAGAAALVKQRYPSWNATQIRNHLKNTATNLGNSSQFGSGLVNAEAATR

SEQ ID NO: 66453 - protein, 268 aa, Unidentified
QTVPWGITRVQAPAVHNRGITGSGVRVAILDSGISAHSDLNIRGGASFVPGEPTTADLNGHGTHVAGTVAALNNSIGVIGVAPNAELYAVKVLGANGSGSVSGIAQGLEWAATNNMHIANMSLGSDFPMSTLERAVNYATSRDVLVIAATGNNGSGSVGYPARYANAMAVGATDQNNRRANFSQYGTGIDIVAPGVNVQSTYPGNRYVSMNGTSMATPHVAGAAALVKQRYPSWNATQIRNHLKNTATNLGNSSQFGSGLVNAEAATR

SEQ ID NO: 66454 - protein, 268 aa, Unidentified
QTVPWGITRVQAPAVHNRGITGSGVRVAILDSGISAASDLNIRGGASFVPGEPTTADLNGHGTHVAGTVAALNNSIGVIGVAPNAELYAVKVLGANGSGSVSGIAQGLEWAATNNMHIANMSLGSDFPSSTLERAVNYATSRDVLVIAATGNNGSGSVGYPARYANAMAVGATDQNNRRANFSQYGTGIDIVAPGVNVQSTYPGNRYVSMNGTSMATPHVAGAAALVKQRYPSWNATQIRNHLKNTATNLGNSSQFGSGLVNAEAATR

SEQ ID NO: 66455 - protein, 268 aa, Unidentified
QTVPWGITRVQAPAVHNRGITGSGVRVAILDSGISAESDLNIRGGASFVPGEPTTADLNGHGTHVAGTVAALNNSIGVIGVAPNAELYAVKVLGANGSGSVSGIAQGLEWAATNNMHIANMSLGSDFPSSTLERAVNYATSRDVLVIAATGNNGSGSVGYPARYANAMAVGATDQNNRRANFSQYGTGIDIVAPGVNVQSTYPGNRYVSMNGTSMATPHVAGAAALVKQRYPSWNATQIRNHLKNTATNLGNSSQFGSGLVNAEAATR

SEQ ID NO: 66456 - protein, 268 aa, Unidentified
QTVPWGITRVQAPAVHNRGITGSGVRVAILDSGISAHSDLNIRGGASFVPGEPTTADLNGHGTHVAGTVAALNNSIGVIGDAPNAELYAVKVLGANGSGSVSGIAQGLEWAATNNMHIANMSLGSDFPSSTLERAVNYATSRDVLVIAATGNNGSGSVGYPARYANAMAVGATDQNNRRANFSQYGTGIDIVAPGVNVQSTYPGNRYVSMNGTSMATPHVAGAAALVKQRYPSWNATQIRNHLKNTATNLGNSSQFGSGLVNAEAATR

SEQ ID NO: 66457 - protein, 268 aa, Unidentified
QTVPWGITRVQAPAVHNRGITGSGVRVAILDSGISAHSDLNIRGGASFVPGEPTTADLNGHGTHVAGTVAALNNSIGVIGVAPNAELYAVKVLGANGSGSVSGIAQGLEWAATNNMHIANMSLGSDFPQSTLERAVNYATSRDVLVIAATGNNGSGSVGYPARYANAMAVGATDQNNRRANFSQYGTGIDIVAPGVNVQSTYPGNRYVSMNGTSMATPHVAGAAALVKQRYPSWNATQIRNHLKNTATNLGNSSQFGSGLVNAEAATR

SEQ ID NO: 66458 - protein, 268 aa, Unidentified
QTVPWGITRVQAPAVHNRGITGSGVRVAILDSGISAHSDLNIRGGASFVPGEPTTADLNGHGTHVAGTVAALNNSIGVIGHAPNAELYAVKVLGANGSGSVSGIAQGLEWAATNNMHIANMSLGSDFPSSTLERAVNYATSRDVLVIAATGNNGSGSVGYPARYANAMAVGATDQNNRRANFSQYGTGIDIVAPGVNVQSTYPGNRYVSMNGTSMATPHVAGAAALVKQRYPSWNATQIRNHLKNTATNLGNSSQFGSGLVNAEAATR

SEQ ID NO: 66459 - protein, 268 aa, Unidentified
QTVPWGITRVQAPAVHNRGITGSGVRVAILDSGISAHEDLNIRGGASFVPGEPTTADLNGHGTHVAGTVAALNNSIGVIGVAPNASLYAVKVLGANGSGSVSGIAQGLEWAATNNMHIANMSLGSDFPSSTLERAVNYATSRDVLVIAATGNNGSGSVGYPARYANAMAVGATDQNNRRANFSQYGTGIDIVAPGVNVQSTYPGNRYVSMNGTSMATPHVAGAAALVKQRYPSWNATQIRNHLKNTATNLGNSSQFGSGLVNAEAATR

SEQ ID NO: 66460 - protein, 268 aa, Unidentified
QTVPWGITRVQAPAVHMRGITGSGVRVAILDSGISAHEDLNIRGGASFVPGEPTTADLNGHGTHVAGTVAALNNSIGVIGVAPNAELYAVKVLGANGSGSVSGIAQGLEWAATNNMHIANMSLGSDFPSSTLERAVNYATSRDVLVIAATGNNGSGSVGYPARYANAMAVGATDQNNRRANFSQYGTGIDIVAPGVNVQSTYPGNRYVSMNGTSMATPHVAGAAALVKQRYPSWNATQIRNHLKNTATNLGNSSQFGSGLVNAEAATR

SEQ ID NO: 66461 - protein, 268 aa, Unidentified
QTVPWGITRVQAPAVHNRGITGSGVRVAILDSGISAHEDLNIRGGASFVPGEPTTADLNGHGTHVAGTVAALNNSIGVIGVAPNAELYAVKVLGANGSGSVSGIAQGLEWAATNNMHIANMSLGSDFPSSTLERAVNYATSRDVLVIAATGNNGSGSVGYPARYANAMAVGATDQNNRRANFSQYGTGIDIVAPGVNVQSTYPGNRYVSMNGTSMATPHVAGAAALVKQRYPSWNATQIRIHLKNTATNLGNSSQFGSGLVNAEAATR

SEQ ID NO: 66462 - protein, 268 aa, Unidentified
QTVPWGITRVQAPAVHNRGITGSGVRVAILDSGISAHEDLNIRGGASFVPGEPTTADLNGHGTHVAGTVAALNNSIGVIGVAPNAELYAVKVLGANGSGSVSGIAQGLEWAATNNMHIANMSLGSDFPSSTLERAVNYATSRDVLVIAATGNNGSGSVGYPARYANAMAVGATDQNNRRANFSQYGTGIDIVAPGVNVNSTYPGNRYVSMNGTSMATPHVAGAAALVKQRYPSWNATQIRNHLKNTATNLGNSSQFGSGLVNAEAATR

SEQ ID NO: 66463 - protein, 268 aa, Unidentified
QTVPWGITRVQAPAVHNRGITGSGVRVAILDSGISAHEDLNIRGGASFVPGEPTCADLNGHGTHVAGTVAALNNSIGVIGVAPNAELYAVKVLGANGSGSVSGIAQGLEWAATNNMHIANMSLGSDFPSSTLERAVNYATSRDVLVIAATGNNGSGSVGYPARYANAMAVGATDQNNRRANFSQYGTGIDIVAPGVNVQSTYPGNRYVSMNGTSMATPHVAGAAALVKQRYPSWNATQIRNHLKNTATNLGNSSQFGSGLVNAEAATR

SEQ ID NO: 66464 - protein, 268 aa, Unidentified
QTVPWGITRVQAPAVHNRGITGSGVRVAILDSGISAHEDLNIRGGASFVPGEPTTADLNGHGTHVAGTVAALNNSIGVIGVAPNAELYAVKVLGANGSGSVSGIAQGLEWAATNNMHIANMSLGSDFPSSTLERAVNYATSRDVLVIAATGNNGSGSVGYPARYANAMAVGATDQNNRRANFSQYGTGIDIVAPGVNVQSTYPGNRYVSMNGTSMATPHVAGAAALVKQRYPSWNATQIRKHLKNTATNLGNSSQFGSGLVNAEAATR

SEQ ID NO: 66465 - protein, 268 aa, Unidentified
QTVPWGITRVNAPAVHNRGITGSGVRVAILDSGISAHEDLNIRGGASFVPGEPTTADLNGHGTHVAGTVAALNNSIGVIGVAPNAELYAVKVLGANGSGSVSGIAQGLEWAATNNMHIANMSLGSDFPSSTLERAVNYATSRDVLVIAATGNNGSGSVGYPARYANAMAVGATDQNNRRANFSQYGTGIDIVAPGVNVQSTYPGNRYVSMNGTSMATPHVAGAAALVKQRYPSWNATQIRNHLKNTATNLGNSSQFGSGLVNAEAATR

SEQ ID NO: 66466 - protein, 268 aa, Unidentified
QTVPWGITRVQAPFVHNRGITGSGVRVAILDSGISAHEDLNIRGGASFVPGEPTTADLNGHGTHVAGTVAALNNSIGVIGVAPNAELYAVKVLGANGSGSVSGIAQGLEWAATNNMHIANMSLGSDFPSSTLERAVNYATSRDVLVIAATGNNGSGSVGYPARYANAMAVGATDQNNRRANFSQYGTGIDIVAPGVNVQSTYPGNRYVSMNGTSMATPHVAGAAALVKQRYPSWNATQIRNHLKNTATNLGNSSQFGSGLVNAEAATR

SEQ ID NO: 66467 - protein, 268 aa, Unidentified
QTVPWGITRVQAPAVHNRGITGSGVRVAILDSGISAHEDLNIRGGASFVPGEPTTADLNGHGTHVAGTVAALNNSIGVIGVAPNAELYAVKVLGANGSGSVSGIAQGLEWAATNNMHIANMSLGSDFPSSTLERMVNYATSRDVLVIAATGNNGSGSVGYPARYANAMAVGATDQNNRRANFSQYGTGIDIVAPGVNVQSTYPGNRYVSMNGTSMATPHVAGAAALVKQRYPSWNATQIRNHLKNTATNLGNSSQFGSGLVNAEAATR

SEQ ID NO: 66468 - protein, 268 aa, Unidentified
QTVPWGITRVQAPAVHNRGITGSGVRVAILDSGISAHSDLNIRGGASFVPGEPTTADLNGHGTHVAGTVAALNNAIGVIGVAPNAELYAVKVLGANGSGSVSGIAQGLEWAATNNMHIANMSLGSDFPSSTLERAVNYATSRDVLVIAATGNNGSGSVGYPARYANAMAVGATDQNNRRANFSQYGTGIDIVAPGVNVQSTYPGNRYVSMNGTSMATPHVAGAAALVKQRYPSWNATQIRNHLKNTATNLGNSSQFGSGLVNAEAATR

SEQ ID NO: 66469 - protein, 268 aa, Unidentified
QTVPWGITRVQAPAVHNRGITGSGVRVAILDSGISAHEDLNIRGGASFVPGEPTTADLNGHGTHVAGTVAALNNSIGVIGVAPNAELYAVKVLGANGSGSVSGIAQGLEWAATNNMHIANMSLGSDFPSSTLERAVNYATSRDVLVIAATGNNGSGSVGYPARYANAMAVGATDQNNRRANFSQYGTEIDIVAPGVNVQSTYPGNRYVSMNGTSMATPHVAGAAALVKQRYPSWNATQIRNHLKNTATNLGNSSQFGSGLVNAEAATR

SEQ ID NO: 66470 - protein, 268 aa, Unidentified
QTVPWGITRVQAPAVHNRGITGSGVRVAILDSGISAHEDLNIRGGASFVPGEPTTADLNGHGTHVAGTVAALNNSIGVIGVAPNAELYAVKVLGANGSGSVSGIAQGLEWAATNNMHIANMSLGSDFPSSTLERAVNYATSRDVLVIAATGNNGSGSVGYPARYANAMAVGATDQGNRRANFSQYGTGIDIVAPGVNVQSTYPGNRYVSMNGTSMATPHVAGAAALVKQRYPSWNATQIRNHLKNTATNLGNSSQFGSGLVNAEAATR

SEQ ID NO: 66471 - protein, 268 aa, Unidentified
QTVPWGITRVQAPAVHNRGITGSGVRVAILDSGISAHEDLNIRGGYSFVPGEPTTADLNGHGTHVAGTVAALNNSIGVIGVAPNAELYAVKVLGANGSGSVSGIAQGLEWAATNNMHIANMSLGSDFPSSTLERAVNYATSRDVLVIAATGNNGSGSVGYPARYANAMAVGATDQNNRRANFSQYGTGIDIVAPGVNVQSTYPGNRYVSMNGTSMATPHVAGAAALVKQRYPSWNATQIRNHLKNTATNLGNSSQFGSGLVNAEAATR

SEQ ID NO: 66472 - protein, 268 aa, Unidentified
QTVPWGITRVQAPAVHNRGITGSGVRVAILDSGISAHSDLNIRGGASFVPGEPTTADLNGHGTHVAGTVAALNNVIGVIGVAPNAELYAVKVLGANGSGSVSGIAQGLEWAATNNMHIANMSLGSDFPSSTLERAVNYATSRDVLVIAATGNNGSGSVGYPARYANAMAVGATDQNNRRANFSQYGTGIDIVAPGVNVQSTYPGNRYVSMNGTSMATPHVAGAAALVKQRYPSWNATQIRNHLKNTATNLGNSSQFGSGLVNAEAATR

SEQ ID NO: 66473 - protein, 268 aa, Unidentified
QTVPWGITRVQAPAVHNRGITGSGVRVAILDSGISAHSDLNIRGGASFVPGEPTTADLNGHGTHVAGTVAALNNSIGVIGIAPNAELYAVKVLGANGSGSVSGIAQGLEWAATNNMHIANMSLGSDFPSSTLERAVNYATSRDVLVIAATGNNGSGSVGYPARYANAMAVGATDQNNRRANFSQYGTGIDIVAPGVNVQSTYPGNRYVSMNGTSMATPHVAGAAALVKQRYPSWNATQIRNHLKNTATNLGNSSQFGSGLVNAEAATR

SEQ ID NO: 66474 - protein, 268 aa, Bacillus gibsonii
QTVPWGITRVQAPAVHNRGITGSGVRVAILDSGISAHSDLNIRGGASFVPGEPTTADLNGHGTHVAGTVAALNNSIGVIGVAPNAELYAVKVLGANGSGSVSGIAQGLEWAATNNMHIANMSLGSDFPSSTLERAVNYATSRDVLVIAATGNNGSGSVGYPARYANAMAVGATDQNNRRANFSQYGTGIDIVAPGVNIQSTYPGNRYVSMNGTSMATPHVAGAAALVKQRYPSWNATQIRNHLKNTATNLGNSSQFGSGLVNAEAATR

SEQ ID NO: 66475 - protein, 268 aa, Unidentified
QTVPWGITRVQAPAVHNRGITGSGVRVAILDSGISAHEDLNIRGGASFVPGEPTTADLNGHGTHVAGTVAALNNSIGVIGVAPNAELYAVKVLGANGSGAVSGIAQGLEWAATNNMHIANMSLGSDFPSSTLERAVNYATSRDVLVIAATGNNGSGSVGYPARYANAMAVGATDQNNRRANFSQYGTGIDIVAPGVNVQSTYPGNRYVSMNGTSMATPHVAGAAALVKQRYPSWNATQIRNHLKNTATNLGNSSQFGSGLVNAEAATR

SEQ ID NO: 66476 - protein, 268 aa, Unidentified
QTVPWGITRVQAPAVHNRGITGSGVRVAILDSGISAHSDLNIRGGASFVPGEPTTADLNGHGTHVAGTVAALNNSIGVIGVAPNAELYAVKVLGANGSGCVSGIAQGLEWAATNNMHIANMSLGSDFPSSTLERAVNYATSRDVLVIAATGNNGSGSVGYPARYANAMAVGATDQNNRRANFSQYGTGIDIVAPGVNVQSTYPGNRYVSMNGTSMATPHVAGAAALVKQRYPSWNATQIRNHLKNTATNLGNSSQFGSGLVNAEAATR

SEQ ID NO: 66477 - protein, 268 aa, Unidentified
QTVPWGITRVQAPAVHNRGITGSGVRVAILDSGISAHEDLNIRGGASFVPGEPTTADLNGHGTHVAGTVAALNNSIGVIGVAPNAELYAVKVLGANGSGSVSGIAQGLEWAATNNMHIANMSLGSDFPSSTLERAVNYATSRDCLVIAATGNNGSGSVGYPARYANAMAVGATDQNNRRANFSQYGTGIDIVAPGVNVQSTYPGNRYVSMNGTSMATPHVAGAAALVKQRYPSWNATQIRNHLKNTATNLGNSSQFGSGLVNAEAATR

SEQ ID NO: 66478 - protein, 268 aa, Unidentified
QTVPWGITRVQAPAVHNRGITGSGVRVAILDSGISAPSDLNIRGGASFVPGEPTTADLNGHGTHVAGTVAALNNSIGVIGVAPNAELYAVKVLGANGSGSVSGIAQGLEWAATNNMHIANMSLGSDFPSSTLERAVNYATSRDVLVIAATGNNGSGSVGYPARYANAMAVGATDQNNRRANFSQYGTGIDIVAPGVNVQSTYPGNRYVSMNGTSMATPHVAGAAALVKQRYPSWNATQIRNHLKNTATNLGNSSQFGSGLVNAEAATR

SEQ ID NO: 66479 - protein, 268 aa, Unidentified
QTVPWGITRVQAPAVHNRGITGSGVRVAILDSGISAHSDLNIRGGASFVPGEPTTADLNGHGTHVAGTVAALNNPIGVIGVAPNAELYAVKVLGANGSGSVSGIAQGLEWAATNNMHIANMSLGSDFPSSTLERAVNYATSRDVLVIAATGNNGSGSVGYPARYANAMAVGATDQNNRRANFSQYGTGIDIVAPGVNVQSTYPGNRYVSMNGTSMATPHVAGAAALVKQRYPSWNATQIRNHLKNTATNLGNSSQFGSGLVNAEAATR

SEQ ID NO: 66480 - protein, 268 aa, Unidentified
QTVPWGITRVQAPAVHNRGITGSGVRVAILDSGISAHSDLNIRGGASFVPGEPTTAVLNGHGTHVAGTVAALNNSIGVIGVAPNAELYAVKVLGANGSGSVSGIAQGLEWAATNNMHIANMSLGSDFPSSTLERAVNYATSRDVLVIAATGNNGSGSVGYPARYANAMAVGATDQNNRRANFSQYGTGIDIVAPGVNVQSTYPGNRYVSMNGTSMATPHVAGAAALVKQRYPSWNATQIRNHLKNTATNLGNSSQFGSGLVNAEAATR

SEQ ID NO: 66481 - protein, 268 aa, Unidentified
QTVPWGITRVQAPAVHNRGITGSGVRVAILDSGISASSDLNIRGGASFVPGEPTTADLNGHGTHVAGTVAALNNSIGVIGVAPNAELYAVKVLGANGSGSVSGIAQGLEWAATNNMHIANMSLGSDFPSSTLERAVNYATSRDVLVIAATGNNGSGSVGYPARYANAMAVGATDQNNRRANFSQYGTGIDIVAPGVNVQSTYPGNRYVSMNGTSMATPHVAGAAALVKQRYPSWNATQIRNHLKNTATNLGNSSQFGSGLVNAEAATR

SEQ ID NO: 66482 - protein, 268 aa, Unidentified
QTVPWGITRVQAPAVHNRGITGSGVRVAILDSGISAHSDLNIRGGASFVPGEPTTADLNGHGTHVAGTVAALNNSIGVIGVAPNAELYAVKVLGANGRGSVSGIAQGLEWAATNNMHIANMSLGSDAPSSTLERAVNYATSRDVLVIAATGNNGSGSVGYPARYANAMAVGATDQNNRRANFSQYGTGIDIVAPGVNVQSTYPGNRYVSMNGTSMATPHVAGAAALVKQRYPSWNATQIRNHLKNTATNLGNSSQFGSGLVNAEAATR

SEQ ID NO: 66483 - protein, 268 aa, Unidentified
QTVPWGITRVQAPAVHNRGITGSGVRVAILDSGISAHEDLNIRGGDSFVPGEPTTADLNGHGTHVAGTVAALNNSIGVIGVAPNAELYAVKVLGANGSGSVSGIAQGLEWAATNNMHIANMSLGSDFPSSTLERAVNYATSRDVLVIAATGNNGSGSVGYPARYANAMAVGATDQNNRRANFSQYGTGIDIVAPGVNVQSTYPGNRYVSMNGTSMATPHVAGAAALVKQRYPSWNATQIRNHLKNTATNLGNSSQFGSGLVNAEAATR

SEQ ID NO: 66484 - protein, 268 aa, Unidentified
QTVPWGITRVQAPAVHNRGITGSGVRVAILDSGISAHEDLNIRGGASFVPGEPTTADLNGHGTHVAGTVAALNNSIGVIGVAPNAELYAVKVLGANGIGSVSGIAQGLEWAATNNMHIANMSLGSDFPSSTLERAVNYATSRDVLVIAATGNNGSGSVGYPARYANAMAVGATDQNNRRANFSQYGTGIDIVAPGVNVQSTYPGNRYVSMNGTSMATPHVAGAAALVKQRYPSWNATQIRNHLKNTATNLGNSSQFGSGLVNAEAATR

SEQ ID NO: 66485 - protein, 268 aa, Unidentified
QTVPWGITRVQAPAVHNRGITGSGVRVAILDSGISAHSDLNIRGGASFVPGEPTTADLNGHGTHVAGTVAALNNSIGVIGVAPNAELHAVKVLGANGSGSVSGIAQGLEWAATNNMHIANMSLGSDFPSSTLERAVNYATSRDVLVIAATGNNGSGSVGYPARYANAMAVGATDQNNRRANFSQYGTGIDIVAPGVNVQSTYPGNRYVSMNGTSMATPHVAGAAALVKQRYPSWNATQIRNHLKNTATNLGNSSQFGSGLVNAEAATR

SEQ ID NO: 66486 - protein, 268 aa, Unidentified
QTVPWGITRVQAPAVHNRGITGSGVRVAILDSGISAHEDLNIRGGASFVPGEPTTADLNGHGTHVAGTVAALNNSIGVIGVAPNAELYAVKVLGANGSGSVSGIAQGLEWAATNNMHIANMSLGSDFPSSTLERAVNYATSRDVLVIAATGNNGSGSVGYPARYANAMAVGATDQNNRRANFSQYGTGIDIVAPGVNVQSTYPGNRYVSMNGTSMATPHVAGAAALVKQRYPSWNATQIRRHLKNTATNLGNSSQFGSGLVNAEAATR

SEQ ID NO: 66487 - protein, 268 aa, Unidentified
QTVPWGITRVQAPAVHNRGITGSGVRVAILDSGISAHEDLNIRGGASFVPGEPTTADLNGHGTHVAGSVAALNNSIGVIGVAPNAELYAVKVLGANGSGSVSGIAQGLEWAATNNMHIANMSLGSDFPSSTLERAVNYATSRDVLVIAATGNNGSGSVGYPARYANAMAVGATDQNNRRANFSQYGTGIDIVAPGVNVQSTYPGNRYVSMNGTSMATPHVAGAAALVKQRYPSWNATQIRNHLKNTATNLGNSSQFGSGLVNAEAATR

SEQ ID NO: 66488 - protein, 268 aa, Unidentified
QTVPWGITRVQAPAVHNRGITGSDVRVAILDSGISAHEDLNIRGGASFVPGEPTTADLNGHGTHVAGTVAALNNSIGVIGVAPNAELYAVKVLGANGSGSVSGIAQGLEWAATNNMHIANMSLGSDFPSSTLERAVNYATSRDVLVIAATGNNGSGSVGYPARYANAMAVGATDQNNRRANFSQYGTGIDIVAPGVNVQSTYPGNRYVSMNGTSMATPHVAGAAALVKQRYPSWNATQIRNHLKNTATNLGNSSQFGSGLVNAEAATR

SEQ ID NO: 66489 - protein, 268 aa, Unidentified
QTVPWGITRVQAPAVHNRGITGSGVRVAILDSGISAHEDLNICGGASFVPGEPTTADLNGHGTHVAGTVAALNNSIGVIGVAPNAELYAVKVLGANGSGSVSGIAQGLEWAATNNMHIANMSLGSDFPSSTLERAVNYATSRDVLVIAATGNNGSGSVGYPARYANAMAVGATDQNNRRANFSQYGTGIDIVAPGVNVQSTYPGNRYVSMNGTSMATPHVAGAAALVKQRYPSWNATQIRNHLKNTATNLGNSSQFGSGLVNAEAATR

SEQ ID NO: 66490 - protein, 268 aa, Unidentified
QTVPWGITRVQAPAVHNRGITGSGVRVAILDSGISAHSDLNIRGGALFVPGEPTTADLNGHGTHVAGTVAALNNSIGVIGVAPNAELYAVKVLGANGSGSVSGIAQGLEWAATNNMHIANMSLGSDFPSSTLERAVNYATSRDVLVIAATGNNGSGSVGYPARYANAMAVGATDQNNRRANFSQYGTGIDIVAPGVNVQSTYPGNRYVSMNGTSMATPHVAGAAALVKQRYPSWNATQIRNHLKNTATNLGNSSQFGSGLVNAEAATR

SEQ ID NO: 66491 - protein, 268 aa, Unidentified
QTVPWGITRVQAPAVHNRGITGSGVRVAILDSGISAHSDLNIRGGASFVPGEPTTAALNGHGTHVAGTVAALNNSIGVIGVAPNAELYAVKVLGANGSGSVSGIAQGLEWAATNNMHIANMSLGSDFPSSTLERAVNYATSRDVLVIAATGNNGSGSVGYPARYANAMAVGATDQNNRRANFSQYGTGIDIVAPGVNVQSTYPGNRYVSMNGTSMATPHVAGAAALVKQRYPSWNATQIRNHLKNTATNLGNSSQFGSGLVNAEAATR

SEQ ID NO: 66492 - protein, 268 aa, Bacillus gibsonii
QTVPWGITRVQAPAVHNRGITGSGVRVAILDSGISAHSDLNIRGGASFVPGEPTTADLNGHGTHVAGTVAALNNSIGVIGVAPNAELYAVKVLGANGXGSVSGIAQGLEWAATNNMHIANMSLGSDFPSSTLERAVNYATSRDVLVIAATGNNGSGSVGYPARYANAMAVGATDQNNRRANFSQYGTGIDIVAPGVNVQSTYPGNRYVSMNGTSMATPHVAGAAALVKQRYPSWNATQIRNHLKNTATNLGNSSQFGSGLVNAEAATR

SEQ ID NO: 66493 - protein, 268 aa, Unidentified
QTVPWGITRVQAPAVHNRGITGSGVRVAILDSGISAHSPLNIRGGASFVPGEPTTADLNGHGTHVAGTVAALNNSIGVIGVAPNAELYAVKVLGANGSGSVSGIAQGLEWAATNNMHIANMSLGSDFPSSTLERAVNYATSRDVLVIAATGNNGSGSVGYPARYANAMAVGATDQNNRRANFSQYGTGIDIVAPGVNVQSTYPGNRYVSMNGTSMATPHVAGAAALVKQRYPSWNATQIRNHLKNTATNLGNSSQFGSGLVNAEAATR

SEQ ID NO: 66494 - protein, 268 aa, Unidentified
QTVPWGITRVQAPAVHNRGITGSGVRVAILDSGISAHSDLNIRGGASFVPGEPTTAGLNGHGTHVAGTVAALNNSIGVIGVAPNAELYAVKVLGANGSGSVSGIAQGLEWAATNNMHIANMSLGSDFPSSTLERAVNYATSRDVLVIAATGNNGSGSVGYPARYANAMAVGATDQNNRRANFSQYGTGIDIVAPGVNVQSTYPGNRYVSMNGTSMATPHVAGAAALVKQRYPSWNATQIRNHLKNTATNLGNSSQFGSGLVNAEAATR

SEQ ID NO: 66495 - protein, 268 aa, Unidentified
QTVPWGITRVQAPAVHNRGITGSGVRVAILDSGISAHEDLNIRGGISFVPGEPTTADLNGHGTHVAGTVAALNNSIGVIGVAPNAELYAVKVLGANGSGSVSGIAQGLEWAATNNMHIANMSLGSDFPSSTLERAVNYATSRDVLVIAATGNNGSGSVGYPARYANAMAVGATDQNNRRANFSQYGTGIDIVAPGVNVQSTYPGNRYVSMNGTSMATPHVAGAAALVKQRYPSWNATQIRNHLKNTATNLGNSSQFGSGLVNAEAATR

SEQ ID NO: 66496 - protein, 268 aa, Unidentified
QTVPWGITRVQAPAVHNKGITGSGVRVAILDSGISAHEDLNIRGGASFVPGEPTTADLNGHGTHVAGTVAALNNSIGVIGVAPNAELYAVKVLGANGSGSVSGIAQGLEWAATNNMHIANMSLGSDFPSSTLERAVNYATSRDVLVIAATGNNGSGSVGYPARYANAMAVGATDQNNRRANFSQYGTGIDIVAPGVNVQSTYPGNRYVSMNGTSMATPHVAGAAALVKQRYPSWNATQIRNHLKNTATNLGNSSQFGSGLVNAEAATR

SEQ ID NO: 66497 - protein, 268 aa, Unidentified
QTVPWGITRVQAPAVHNRGITGSGVRVAILDSGISAHEDLNIRGGQSFVPGEPTTADLNGHGTHVAGTVAALNNSIGVIGVAPNAELYAVKVLGANGSGSVSGIAQGLEWAATNNMHIANMSLGSDFPSSTLERAVNYATSRDVLVIAATGNNGSGSVGYPARYANAMAVGATDQNNRRANFSQYGTGIDIVAPGVNVQSTYPGNRYVSMNGTSMATPHVAGAAALVKQRYPSWNATQIRNHLKNTATNLGNSSQFGSGLVNAEAATR

SEQ ID NO: 66498 - protein, 268 aa, Unidentified
QTVPWGITRVQAPAVHNRGITGSGVRVAILDSGISAHSDLNIRGGASFVPGEPTTADLNGHGTHVAGTVAALNNSIGVIGVAPNAELYAVKVLGANGSGSVSGIAQGLEWAATNNMHIANMSLGSDFYSSTLERAVNYATSRDVLVIAATGNNGSGSVGYPARYANAMAVGATDQNNRRANFSQYGTGIDIVAPGVNVQSTYPGNRYVSMNGTSMATPHVAGAAALVKQRYPSWNATQIRNHLKNTATNLGNSSQFGSGLVNAEAATR

SEQ ID NO: 66499 - protein, 268 aa, Unidentified
QTVPWGITRVQAPAVHNRGITGSGVRVAILDSGISAWSDLNIRGGASFVPGEPTTADLNGHGTHVAGTVAALNNSIGVIGVAPNAELYAVKVLGANGSGSVSGIAQGLEWAATNNMHIANMSLGSDFPSSTLERAVNYATSRDVLVIAATGNNGSGSVGYPARYANAMAVGATDQNNRRANFSQYGTGIDIVAPGVNVQSTYPGNRYVSMNGTSMATPHVAGAAALVKQRYPSWNATQIRNHLKNTATNLGNSSQFGSGLVNAEAATR

SEQ ID NO: 66500 - protein, 268 aa, Unidentified
QTVPWGITRVQAPAVHNRGITGSGVRVAILDSGISAHEDLNIRGGASFVPGEPTTADLNGHGTHVAGTVAALNNEIGVIGVAPNAELYAVKVLGANGSGSVSGIAQGLEWAATNNMHIANMSLGSDFPSSTLERAVNYATSRDVLVIAATGNNGSGSVGYPARYANAMAVGATDQNNRRANFSQYGTGIDIVAPGVNVQSTYPGNRYVSMNGTSMATPHVAGAAALVKQRYPSWNATQIRNHLKNTATNLGNSSQFGSGLVNAEAATR

SEQ ID NO: 66501 - protein, 268 aa, Unidentified
QTVPWGITRVQAPAVHNRGITGSGVRVAILDSGISAHEDLNIRGGASFVPGEPTTADLNGHGTHVAGTVAALNNSIGVIGVAPNAELYAVKVLGANGRGSVSGIAQGLEWAATNNMHIANMSLGAEGPSSTLERAVNYATSRDVLVIAATGNNGSGSVGYPARYANAMAVGATDQNNQRANFSQYGTGIDIVAPGVNVQSTYPGNRYVSLNGTSMATPHVAGAAALVKQRYPSWNATQIRNHLKNTATNLGPSSQFGSGLVNAEAATR

SEQ ID NO: 66502 - protein, 268 aa, Unidentified
QTVPWGITRVQAPAVHNRGITGSGVRVAILDSGISAHSDLNIRGGASFVPGEPTTADLNGHGTHVAGTVAALNNSIGVIGVAPNAELYAVKVLGANGSGLVSGIAQGLEWAATNNMHIANMSLGSDFPSSTLERAVNYATSRDVLVIAATGNNGSGSVGYPARYANAMAVGATDQNNRRANFSQYGTGIDIVAPGVNVQSTYPGNRYVSMNGTSMATPHVAGAAALVKQRYPSWNATQIRNHLKNTATNLGNSSQFGSGLVNAEAATR

SEQ ID NO: 66503 - protein, 268 aa, Unidentified
QTVPWGITMVQAPAVHNRGITGSGVRVAILDSGISAHEDLNIRGGASFVPGEPTTADLNGHGTHVAGTVAALNNSIGVIGVAPNAELYAVKVLGANGSGSVSGIAQGLEWAATNNMHIANMSLGSDFPSSTLERAVNYATSRDVLVIAATGNNGSGSVGYPARYANAMAVGATDQNNRRANFSQYGTGIDIVAPGVNVQSTYPGNRYVSMNGTSMATPHVAGAAALVKQRYPSWNATQIRNHLKNTATNLGNSSQFGSGLVNAEAATR

SEQ ID NO: 66504 - protein, 268 aa, Unidentified
QTVPWGITRVQAPAVHNRGITGSGVRVAILDSGISAHEDLNIRGGASFVPGEPTTADLNGHGTHVAGTVAALNNSIGVIGVAPNAELYAVKVLGANGSGSVSGIAQGLEWAATNNMHIANMSLGSDFPSSTLERAVNYATSRDVLVIAATGNNGSGSVGYPARYANAMAVGATDQNNRRANFSQYGTGIDIVAPGVNVQSTYPGNRYVSMNGTSMATPHVAGAAALVKQRYPSWNATQIRHHLKNTATNLGNSSQFGSGLVNAEAATR

SEQ ID NO: 66505 - protein, 268 aa, Unidentified
QTVPWGITRVQAPAVHNRGITGSGVRVAILDSGISAHSDLNIRGGASFVPGEPTTADLNGHGTHVAGTVAALNNDIGVIGVAPNAELYAVKVLGANGSGSVSGIAQGLEWAATNNMHIANMSLGSDSPSSTLERAVNYATSRDVLVIAATGNNGSGSVGYPARYANAMAVGATDQNNRRANFSQYGTGIDIVAPGVNVQSTYPGNRYVSMNGTSMASPHVAGAAALVKQRYPSWNATQIRNHLKNTATNLGNSSQFGSGLVNAEAATR

SEQ ID NO: 66506 - protein, 268 aa, Unidentified
QTVPWGITRVQAPAVHNRGITGSGVRVAILDSGISAHSDLNIRGGASFVPGEPTTADLNGHGTHVAGTVAALNNSIGVIGVAPNAELYAVKVLGANGSGSVSGIAQGLEWAATNNMHIANMSLGSDFRSSTLERAVNYATSRDVLVIAATGNNGSGSVGYPARYANAMAVGATDQNNRRANFSQYGTGIDIVAPGVNVQSTYPGNRYVSMNGTSMATPHVAGAAALVKQRYPSWNATQIRNHLKNTATNLGNSSQFGSGLVNAEAATR

SEQ ID NO: 66507 - protein, 268 aa, Unidentified
QTVPWGITRVQAPAVHNRGITGSGVRVAILDSGISAHEDLNIRGGASFVPGEPTTADLNGHGTHVAGTVAALNNSIGVIGVAPNAELYAVKVLGANGSGSVSGIAQGLEWAATNNMHIANMSLGSDFPSSTLERAVNYATSRDVLVIAATGNNGSGSVGYPARYANAMAVGATDNNNRRANFSQYGTGIDIVAPGVNVQSTYPGNRYVSMNGTSMATPHVAGAAALVKQRYPSWNATQIRNHLKNTATNLGNSSQFGSGLVNAEAATR

SEQ ID NO: 66508 - protein, 268 aa, Unidentified
QTVPWGITRVQAPAVHNRGITGSGVRVAILDSGISAHSDLNIRGGASFVPGEPTTADLNGHGTHVAGTVAALNNSIGVIGVAPNAELYAVKVLGANGSGSVSGIAQGLEWAATNNMHIANMSLGSDFPSSTLERAVNYATSRDVLVIAATGNNGSGSVGYPARYANAMAVGATDQNNRRANFSQYGTGIDIVAPGVNVQSTYPGNRYVSMNGTSMATPHVAGAAALVKQRYPSWNATQIRNHLKNTCTNLGNSSQFGSGLVNAEAATR

SEQ ID NO: 66509 - protein, 268 aa, Unidentified
QTVPWGITRVQAPAVHNRGITGSGVRVAILDSGISAHEDLNIRGGASFVPGEPTTADLNGHGTHVAGTVAALNNKIGVIGVAPNAELYAVKVLGANGSGSVSGIAQGLEWAATNNMHIANMSLGSDFPSSTLERAVNYATSRDVLVIAATGNNGSGSVGYPARYANAMAVGATDQNNRRANFSQYGTGIDIVAPGVNVQSTYPGNRYVSMNGTSMATPHVAGAAALVKQRYPSWNATQIRNHLKNTATNLGNSSQFGSGLVNAEAATR

SEQ ID NO: 66510 - protein, 268 aa, Unidentified
QTVPWGITRVQAPAVHNRGITGSGVRVAILDSGISAHEDLNIRGGASFVPGEPTIADLNGHGTHVAGTVAALNNSIGVIGVAPNAELYAVKVLGANGSGSVSGIAQGLEWAATNNMHIANMSLGSDFPSSTLERAVNYATSRDVLVIAATGNNGSGSVGYPARYANAMAVGATDQNNRRANFSQYGTGIDIVAPGVNVQSTYPGNRYVSMNGTSMATPHVAGAAALVKQRYPSWNATQIRNHLKNTATNLGNSSQFGSGLVNAEAATR

SEQ ID NO: 66511 - protein, 268 aa, Unidentified
QTVPWGITRVQAPAVHNRGITGSGVRVAILDSGISAHSVLNIRGGASFVPGEPTTADLNGHGTHVAGTVAALNNSIGVIGVAPNAELYAVKVLGANGSGSVSGIAQGLEWAATNNMHIANMSLGSDFPSSTLERAVNYATSRDVLVIAATGNNGSGSVGYPARYANAMAVGATDQNNRRANFSQYGTGIDIVAPGVNVQSTYPGNRYVSMNGTSMATPHVAGAAALVKQRYPSWNATQIRNHLKNTATNLGNSSQFGSGLVNAEAATR

SEQ ID NO: 66512 - protein, 268 aa, Unidentified
QTVPWGITRVQAPAVHNRGITGSGVRVAILDSGISAHSDLNIRGGASFVPGEPTTADLNGHGTHVAGTVAALNNSIGVIGVAPNAELDAVKVLGANGSGSVSGIAQGLEWAATNNMHIANMSLGSDFPSSTLERAVNYATSRDVLVIAATGNNGSGSVGYPARYANAMAVGATDQNNRRANFSQYGTGIDIVAPGVNVQSTYPGNRYVSMNGTSMATPHVAGAAALVKQRYPSWNATQIRNHLKNTATNLGNSSQFGSGLVNAEAATR

SEQ ID NO: 66513 - protein, 268 aa, Unidentified
QTVPWGITRVQAPAVHNRGITGSGVRVAILDSGISAHEDLNIRGGASFVPGEPTTADLNGHGTHVAGTVAALNNSIGVIGVAPNAELYAVKVLGANGSGSVSGIAQGLEWAATNNMHIANMSLGSDFPSSTLERAVNYATSRDVLVIAATGNNGSGSVGYPARYANAMAVGATDQNNRRANFSQYGTGIDIVAPGVNVQSTYPGNRYVSMQGTSMATPHVAGAAALVKQRYPSWNATQIRNHLKNTATNLGNSSQFGSGLVNAEAATR

SEQ ID NO: 66514 - protein, 268 aa, Unidentified
QTVPWGITRVQAPAVHNRGITGSGVRVAILDSGISAHEDLNIRGGASFVPGEPTTADLNGHGTHVAGTVAALNNSIGVIGVAPNAELYAVKVLGANGRGSVSGIAQGLEWAATNNMHIANMSLGSDFPSSTLERAVNYATSRDVLVIAATGNNGSGSVGYPARYANAMAVGATDQNNRRANFSQYGTGIDIVAPGVNVQSTYPGNRYVSMNGTSMATPHVAGAAALVKQRYPSWNATQIRNHLKNTATNLGPSSQFGSGLVNAEAATR

SEQ ID NO: 66515 - protein, 268 aa, Unidentified
QTVPWGITRVQAPAVHNRGITGSGVRVAILDSGISAHEDLNIRGGASFVPGEPTTADLNGHGTHVAGTVAALNNSIGVIGVAPNAELYAVKVLGANGSGSVSGIAQGLEWAATNNMHIANMSLGSDFPSSTLERAVNYATSRDVLVIAATGNNGSGSVGYPARYANAMAVGATDQNNRRANFSQYGTGIDIVAPGVNVQSTYPGNRYVSMNGTSMATPHVAGAAALVKQRYPSWNATQIRCHLKNTATNLGNSSQFGSGLVNAEAATR

SEQ ID NO: 66516 - protein, 268 aa, Unidentified
QTVPWGITRVQAPAVHNRGITGSGVRVAILDSGISAHSDLNIRGGASFVPGEPTTADLNGHGTHVAGTVAALNNSIGVIGEAPNAELYAVKVLGANGSGSVSGIAQGLEWAATNNMHIANMSLGSDFPSSTLERAVNYATSRDVLVIAATGNNGSGSVGYPARYANAMAVGATDQNNRRANFSQYGTGIDIVAPGVNVQSTYPGNRYVSMNGTSMATPHVAGAAALVKQRYPSWNATQIRNHLKNTATNLGNSSQFGSGLVNAEAATR

SEQ ID NO: 66517 - protein, 268 aa, Unidentified
QTVPWGITRVQAPAVHNRGITGSGVRVAILDSGISAHEDLNIVGGASFVPGEPTTADLNGHGTHVAGTVAALNNSIGVIGVAPNAELYAVKVLGANGSGSVSGIAQGLEWAATNNMHIANMSLGSDFPSSTLERAVNYATSRDVLVIAATGNNGSGSVGYPARYANAMAVGATDQNNRRANFSQYGTGIDIVAPGVNVQSTYPGNRYVSMNGTSMATPHVAGAAALVKQRYPSWNATQIRNHLKNTATNLGNSSQFGSGLVNAEAATR

SEQ ID NO: 66518 - protein, 268 aa, Unidentified
QTVPWGITRVQAPAVHNRGITGSGVRVAILDSGISAHEDLNIRGGASFVPGEPTTADLNGHGTHVAGTVAALNNSIGVIGVAPNAELYAVKVLGANGSGSVSGIAQGLEWAATNNMHIANMSLGSDFPSSTLERAVNYATSRDVLVIAATGNNGSGSVGYPARYANAMAVGATDQCNRRANFSQYGTGIDIVAPGVNVQSTYPGNRYVSMNGTSMATPHVAGAAALVKQRYPSWNATQIRNHLKNTATNLGNSSQFGSGLVNAEAATR

SEQ ID NO: 66519 - protein, 268 aa, Unidentified
QTVPWGITRVQAPAVHNRGITGSGVRVAILDSGISTHEDLNIRGGASFVPGEPTTADLNGHGTHVAGTVAALNNSIGVIGVAPNADLYAVKVLGANGRGSVSGIAQGLEWAAANNMHIANMSLGSDAPSSTLERAVNYATSRDVLVIAATGNNGSGSVGYPARYANAMAVGATDQNNRRANFSQYGTGIDIVAPGVNVQSTYPGNRYVSMNGTSMATPHVAGAAALVKQRYPSWNATQIRNHLKNTATNLGNSSQFGSGLVNAEAATR

SEQ ID NO: 66520 - protein, 268 aa, Unidentified
QTVPWGITRVQAPAVHNRGITGSGVRVAILDSGISAHEDLNIRGGASFVPGEPTTADLNGHGTHVAGTVAALNNSIGVIGVAPNAELYAVKVLGANGSGSVSGIAQGLEWAATNNMHIANMSLGSDFPSSTLERAVNYATSRDVLVIAATGNNGSGSVGYPARYANAMAVGATDQNNRRANFSQYGTGIDIVAPGVNVQSTYPGNRYVSMNGTSMATPHVAGAAALVKERYPSWNATQIRNHLKNTATNLGNSSQFGSGLVNAEAATR

SEQ ID NO: 66521 - protein, 268 aa, Unidentified
QTVPWGITRVQAPAVHNRGITGSGVRVAILDSGISAHEDLNIRGGASFVPGEPTTADLNGHGTHVAGTVAALNNSIGVIGVAPNAELYAVKVLGANGKGSVSGIAQGLEWAATNNMHIANMSLGSDFPSSTLERAVNYATSRDVLVIAATGNNGSGSVGYPARYANAMAVGATDQNNRRANFSQYGTGIDIVAPGVNVQSTYPGNRYVSMNGTSMATPHVAGAAALVKQRYPSWNATQIRNHLKNTATNLGNSSQFGSGLVNAEAATR

SEQ ID NO: 66522 - protein, 268 aa, Unidentified
QTVPWGITRVQAPAVHNRGITGSGVRVAILDSGISAHSDLNIRGGASFVPGEPTTADLNGHGTHVAGTVAALNNSIGVIGVAPNAELYAVKVLGASGSGSISGIAQGLQWAATNNMHIANMSLGSDAPSTTLERAVNYATSRDVLVIAATGNNGSGSVGYPARYANAMAVGATDQNNRRANFSQYGTGIDIVAPGVNVQSTYPGNRYVSMNGTSMATPHVAGAAALVKQRYPSWNATQIRNHLKNTATNLGNSSQFGSGLVNAEAATR

SEQ ID NO: 66523 - protein, 268 aa, Unidentified
QTVPWGITRVQAPAVHNRGITGSGVRVAILDSGISAHSDLNIRGGASFVPGEPTTADLNGHGTHVAGTVAALNNSIGVIGVAPNAELMAVKVLGANGSGSVSGIAQGLEWAATNNMHIANMSLGSDFPSSTLERAVNYATSRDVLVIAATGNNGSGSVGYPARYANAMAVGATDQNNRRANFSQYGTGIDIVAPGVNVQSTYPGNRYVSMNGTSMATPHVAGAAALVKQRYPSWNATQIRNHLKNTATNLGNSSQFGSGLVNAEAATR

SEQ ID NO: 66524 - protein, 268 aa, Unidentified
QTVPWGITRVQAPAVHNRGITGSGVRVAILDSGISAHSDLNIRGGASFVPGEPTTADLNGHGTHVAGTVAALNNSIGVIGVAPNAELYAVKVLGANGSGSVSGIAQGLEWAATNNMHIANMSLGSDFPSSTLERAVNYATSRDVLVIAATGNNGSGSVGYPARYANAMAVGATDQNNRRANFSQYGTGIDIVAPGVNVQSTYPGNRYVSMNGTSMATPHVAGAAALVKQRYPSWNATQIRNHLKNTPTNLGNSSQFGSGLVNAEAATR

SEQ ID NO: 66525 - protein, 268 aa, Unidentified
QTVPWGITRVQAPAVHNRGITGSGVRVAILDSGISAHSDLNIRGGASFVPGEPTTADLNGHGTHVAGTVAALNNSIGVIGVAPNAELYAVKVLGANGSGMVSGIAQGLEWAATNNMHIANMSLGSDFPSSTLERAVNYATSRDVLVIAATGNNGSGSVGYPARYANAMAVGATDQNNRRANFSQYGTGIDIVAPGVNVQSTYPGNRYVSMNGTSMATPHVAGAAALVKQRYPSWNATQIRNHLKNTATNLGNSSQFGSGLVNAEAATR

SEQ ID NO: 66526 - protein, 268 aa, Unidentified
QTVPWGITRVQAPAVHNRGITGSGVRVAILDSGISAHEDLNIRGGASFVPGEPTTADLNGHGTHVAGTVAALNNSIGVIGVAPNAELYAVKVLGANGSGSVSGIAQGLEWAATNNMHIANMSLGSDFPSSTLERAVNYATSNDVLVIAATGNNGSGSVGYPARYANAMAVGATDQNNRRANFSQYGTGIDIVAPGVNVQSTYPGNRYVSMNGTSMATPHVAGAAALVKQRYPSWNATQIRNHLKNTATNLGNSSQFGSGLVNAEAATR

SEQ ID NO: 66527 - protein, 268 aa, Unidentified
QTVPWGITRVDAPAVHNRGITGSGVRVAILDSGISAHEDLNIRGGASFVPGEPTTADLNGHGTHVAGTVAALNNSIGVIGVAPNAELYAVKVLGANGSGSVSGIAQGLEWAATNNMHIANMSLGSDFPSSTLERAVNYATSRDVLVIAATGNNGSGSVGYPARYANAMAVGATDQNNRRANFSQYGTGIDIVAPGVNVQSTYPGNRYVSMNGTSMATPHVAGAAALVKQRYPSWNATQIRNHLKNTATNLGNSSQFGSGLVNAEAATR

SEQ ID NO: 66528 - protein, 268 aa, Unidentified
QTVPWGITRVQAPAVHFRGITGSGVRVAILDSGISAHEDLNIRGGASFVPGEPTTADLNGHGTHVAGTVAALNNSIGVIGVAPNAELYAVKVLGANGSGSVSGIAQGLEWAATNNMHIANMSLGSDFPSSTLERAVNYATSRDVLVIAATGNNGSGSVGYPARYANAMAVGATDQNNRRANFSQYGTGIDIVAPGVNVQSTYPGNRYVSMNGTSMATPHVAGAAALVKQRYPSWNATQIRNHLKNTATNLGNSSQFGSGLVNAEAATR

SEQ ID NO: 66529 - protein, 268 aa, Unidentified
QTVPWGITRVQAPAVHNRGITGSGVRVAILDSGISAHSDLNIRGGASFVPGEPTTADLNGHGTHVAGTVAALNNSIGVIGVAPNAELYAVKVLGANGSGSVSGIAQGLEWAATNNMHIANMSLGSDFPSSTLERAVNYATSRDVLVIAATGNNGSGSVGYPARYANAMAVGATDQNNRRANFSQYGTGIDIVAPGVNVQSTYIGNRYVSMNGTSMATPHVAGAAALVKQRYPSWNATQIRNHLKNTATNLGNSSQFGSGLVNAEAATR

SEQ ID NO: 66530 - protein, 268 aa, Unidentified
QTVPWGITRVQAPAVHCRGITGSGVRVAILDSGISAHEDLNIRGGASFVPGEPTTADLNGHGTHVAGTVAALNNSIGVIGVAPNAELYAVKVLGANGSGSVSGIAQGLEWAATNNMHIANMSLGSDFPSSTLERAVNYATSRDVLVIAATGNNGSGSVGYPARYANAMAVGATDQNNRRANFSQYGTGIDIVAPGVNVQSTYPGNRYVSMNGTSMATPHVAGAAALVKQRYPSWNATQIRNHLKNTATNLGNSSQFGSGLVNAEAATR

SEQ ID NO: 66531 - protein, 268 aa, Unidentified
QTVPWGITRVQAPAVHNRGITGSGVRVAILDSGISAHEDLNIRGGASFVPGEPTTADLNGHGTHVAGTVAALNNSIGVIGVAPNAELYAVKVLGANGSGSVSGIAQGLEWAATNNMHIANMSLGSDFPSSTLERAVNYATSRDVLVIAATGNNGSGSVGYPARYANAMAVGATDQNNRRANFSQYGTGIDIVAPGVNVQSTYPGNRYVSMNGTSMATPHVAGAAALVKQRYPSWNATQIRNHLKNTACNLGNSSQFGSGLVNAEAATR

SEQ ID NO: 66532 - protein, 268 aa, Unidentified
QTVPWGITRVQAPAVHNRGITGSGVRVAILDSGISAHEDLNIRGGASFVPGEPTTADLNGHGTHVAGTVAALNNSIGVIGVAPNAELYAVKVLGANGSGSVSGIAQGLEWAATNNMHIANMSLGSDFPSSTLERAVNYATSRDVLVIAATGNNGSGSVGYPARYANAMAVGATDQNNRRANFSQYGTGIDIAAPGVNVQSTYPGNRYVSMNGTSMATPHVAGAAALVKQRYPSWNATQIRNHLKNTATNLGNSSQFGSGLVNAEAATR

SEQ ID NO: 66533 - protein, 268 aa, Unidentified
QTVPWGIERVQAPAVHNRGITGSGVRVAILDSGISAHSDLNIRGGASFVPGEPTTADLNGHGTHVAGTVAALNNSIGVIGVAPNAELYAVKVLGANGSGSVSGIAQGLEWAATNNMHIANMSLGSDFPSSTLERAVNYATSRDVLVIAATGNNGSGSVGYPARYANAMAVGATDQNNRRAEFSQYGTGIDIVAPGVNVQSTYPGNRYVSMNGTSMATPHVAGAAALVKQRYPSWNATQIRNHLKNTATNLGNSSQFGPGLVNAEAATR

SEQ ID NO: 66534 - protein, 268 aa, Unidentified
QTVPWGITRVQAPAVHNRGITGSGVRVAILDSGISAHSDLNIRGGASFVPGEPTTADLNGHGTHVAGTVAALNNSIGVIGVAPNAELYAVKVLGANGSGSVSGIAQGLEWAATNNMHIANMSLGSDFPPSTLERAVNYATSRDVLVIAATGNNGSGSVGYPARYANAMAVGATDQNNRRANFSQYGTGIDIVAPGVNVQSTYPGNRYVSMNGTSMATPHVAGAAALVKQRYPSWNATQIRNHLKNTATNLGNSSQFGSGLVNAEAATR

SEQ ID NO: 66535 - protein, 268 aa, Unidentified
QTVPWGITRVQAPAVHNRGITGSGVRVAILDSGISAHSDLNIRGGASFVPGEPTTADLNGHGTHVAGTVAALNNSIGVIGVAPNAVLYAVKVLGANGSGSVSGIAQGLEWAATNNMHIANMSLGSDFPSSTLERAVNYATSRDVLVIAATGNNGSGSVGYPARYANAMAVGATDQNNRRANFSQYGTGIDIVAPGVNVQSTYPGNRYVSMNGTSMATPHVAGAAALVKQRYPSWNATQIRNHLKNTATNLGNSSQFGSGLVNAEAATR

SEQ ID NO: 66536 - protein, 268 aa, Unidentified
QTVPWGITRVQAPAVHNRGITGSGVRVAILDSGISAHSDLNIRGGASFVPGEPTTADLNGHGTHVAGTVAALNNSIGVIGVAPNAMLYAVKVLGANGSGSVSGIAQGLEWAATNNMHIANMSLGSDFPSSTLERAVNYATSRDVLVIAATGNNGSGSVGYPARYANAMAVGATDQNNRRANFSQYGTGIDIVAPGVNVQSTYPGNRYVSMNGTSMATPHVAGAAALVKQRYPSWNATQIRNHLKNTATNLGNSSQFGSGLVNAEAATR

SEQ ID NO: 66537 - protein, 268 aa, Unidentified
QTVPWGITRVQAPAVHNRGITGSGVRVAILDSGISAHEDLNIRGGASFVPGEPTTADLNGHGTHVAGTVAALNNSIGVIGVAPNAELYAVKVLGANGSGSVSGIAQGLEWAATNNMHIANMSLGSDFPSSTLERAVNYATSRDVLVIAATGNNGSGSVGYPARYANAMAVGATDQNNRRANFSQYGTGIDIVAPGVNVQSTYPGNRYVSMNGTSMASPHVAGAAALVKQRYPSWNATQIRNHLKNTATNLGNSSQFGSGLVNAEAATR

SEQ ID NO: 66538 - protein, 268 aa, Unidentified
QTVPWGITRVQAPAVHNRGITGSGVRVAILDSGISAHEDLNIRGGASFVPGEPTMADLNGHGTHVAGTVAALNNSIGVIGVAPNAELYAVKVLGANGSGSVSGIAQGLEWAATNNMHIANMSLGSDFPSSTLERAVNYATSRDVLVIAATGNNGSGSVGYPARYANAMAVGATDQNNRRANFSQYGTGIDIVAPGVNVQSTYPGNRYVSMNGTSMATPHVAGAAALVKQRYPSWNATQIRNHLKNTATNLGNSSQFGSGLVNAEAATR

SEQ ID NO: 66539 - protein, 268 aa, Unidentified
QTVPWGITRVQAPAVHNRGITGSGVRVAILDSGISAHEDLNIRGGASFVPGEPTTADLNGHGTHVAGTVAALNNSIGVIGVAPNANLYAVKVLGANGSGSVSGIAQGLEWAATNNMHIANMSLGSDFPSSTLERAVNYATSRDVLVIAATGNNGSGSVGYPARYANAMAVGATDQNNRRANFSQYGTGIDIVAPGVNVQSTYPGNRYVSMNGTSMATPHVAGAAALVKQRYPSWNATQIRNHLKNTATNLGNSSQFGSGLVNAEAATR

SEQ ID NO: 66540 - protein, 268 aa, Unidentified
QTVPWGITRVQAPAVHNRGITGSGVRVAILDSGISAHSDLNIRGGAMFVPGEPTTADLNGHGTHVAGTVAALNNSIGVIGVAPNAELYAVKVLGANGSGSVSGIAQGLEWAATNNMHIANMSLGSDFPSSTLERAVNYATSRDVLVIAATGNNGSGSVGYPARYANAMAVGATDQNNRRANFSQYGTGIDIVAPGVNVQSTYPGNRYVSMNGTSMATPHVAGAAALVKQRYPSWNATQIRNHLKNTATNLGNSSQFGSGLVNAEAATR

SEQ ID NO: 66541 - protein, 268 aa, Unidentified
QTVPWGITRVQAPAVHNRGITGSGVRVAILDSGISAHEDLNIRGGASFVPGEPTTADLNGHGTHVAGTVAALNNSIGVIGVAPNAELYAVKVLGANGSGSVSGIAQGLEWAATNNMHIANMSLGLDFPSSTLERAVNYATSRDVLVIAATGNNGSGSVGYPARYANAMAVGATDQNNRRANFSQYGTGIDIVAPGVNVQSTYPGNRYVSMNGTSMATPHVAGAAALVKQRYPSWNATQIRNHLKNTATNLGNSSQFGSGLVNAEAATR

SEQ ID NO: 66542 - protein, 268 aa, Unidentified
QTVPWGITRVQAPAVHNRGITGSGVRVAILDSGISAHEDLMIRGGASFVPGEPTTADLNGHGTHVAGTVAALNNSIGVIGVAPNAELYAVKVLGANGSGSVSGIAQGLEWAATNNMHIANMSLGSDFPSSTLERAVNYATSRDVLVIAATGNNGSGSVGYPARYANAMAVGATDQNNRRANFSQYGTGIDIVAPGVNVQSTYPGNRYVSMNGTSMATPHVAGAAALVKQRYPSWNATQIRNHLKNTATNLGNSSQFGSGLVNAEAATR

SEQ ID NO: 66543 - protein, 268 aa, Unidentified
QTVPWGITRVQAPAVHNRGITGSGVRVAILDSGISAHSDLNIRGGASFVPGEPTTADLNGHGTHVAGTVAALNNIIGVIGVAPNAELYAVKVLGANGSGSVSGIAQGLEWAATNNMHIANMSLGSDFPSSTLERAVNYATSRDVLVIAATGNNGSGSVGYPARYANAMAVGATDQNNRRANFSQYGTGIDIVAPGVNVQSTYPGNRYVSMNGTSMATPHVAGAAALVKQRYPSWNATQIRNHLKNTATNLGNSSQFGSGLVNAEAATR

SEQ ID NO: 66544 - protein, 268 aa, Unidentified
QTVPWGITRVQAPAVHNRGITGSGVRVAILDSGISAHSDLNIRGGAYFVPGEPTTADLNGHGTHVAGTVAALNNSIGVIGVAPNAELYAVKVLGANGSGSVSGIAQGLEWAATNNMHIANMSLGSDFPSSTLERAVNYATSRDVLVIAATGNNGSGSVGYPARYANAMAVGATDQNNRRANFSQYGTGIDIVAPGVNVQSTYPGNRYVSMNGTSMATPHVAGAAALVKQRYPSWNATQIRNHLKNTATNLGNSSQFGSGLVNAEAATR

SEQ ID NO: 66545 - protein, 268 aa, Unidentified
QTVPWGITRVQAPAVHNRGITGSGVRVAILDSGISAHEDLNIRGGASFVPGEPTTADLNGHGTHVAGTVAALNNSIGVIGVAPNAELYAVKVLGANGSGSVSGIAQGLEWAATNNMHIANMSLGSDFPSSTLERAVNYATSRDVLVIAATGNNGSDSVGYPARYANAMAVGATDQNNRRANFSQYGTGIDIVAPGVNVQSTYPGNRYVSMNGTSMATPHVAGAAALVKQRYPSWNATQIRNHLKNTATNLGNSSQFGSGLVNAEAATR

SEQ ID NO: 66546 - protein, 268 aa, Unidentified
QTVPWGITWVQAPAVHNRGITGSGVRVAILDSGISAHEDLNIRGGASFVPGEPTTADLNGHGTHVAGTVAALNNSIGVIGVAPNAELYAVKVLGANGSGSVSGIAQGLEWAATNNMHIANMSLGSDFPSSTLERAVNYATSRDVLVIAATGNNGSGSVGYPARYANAMAVGATDQNNRRANFSQYGTGIDIVAPGVNVQSTYPGNRYVSMNGTSMATPHVAGAAALVKQRYPSWNATQIRNHLKNTATNLGNSSQFGSGLVNAEAATR

SEQ ID NO: 66547 - protein, 268 aa, Unidentified
QTVPWGITRVQAPAVHNRGITGSGVRVAILDSGISAHSDLNIRGGASFVPGEPTTADLNGHGTHVAGTVAALNNQIGVIGVAPNAELYAVKVLGANGSGSVSGIAQGLEWAATNNMHIANMSLGSDFPSSTLERAVNYATSRDVLVIAATGNNGSGSVGYPARYANAMAVGATDQNNRRANFSQYGTGIDIVAPGVNVQSTYPGNRYVSMNGTSMATPHVAGAAALVKQRYPSWNATQIRNHLKNTATNLGNSSQFGSGLVNAEAATR

SEQ ID NO: 66548 - protein, 268 aa, Unidentified
QTVPWGITRVQAPAVHNRDITGSGVRVAILDSGISAHEDLNIRGGASFVPGEPTTADLNGHGTHVAGTVAALNNSIGVIGVAPNAELYAVKVLGANGSGSVSGIAQGLEWAATNNMHIANMSLGSDFPSSTLERAVNYATSRDVLVIAATGNNGSGSVGYPARYANAMAVGATDQNNRRANFSQYGTGIDIVAPGVNVQSTYPGNRYVSMNGTSMATPHVAGAAALVKQRYPSWNATQIRNHLKNTATNLGNSSQFGSGLVNAEAATR

SEQ ID NO: 66549 - protein, 268 aa, Unidentified
QTVPWGITRVQAPAVHNRGITGSGVRVAILDSGISAHSDLNIRGGASFVPGEPTTADLNGHGTHVAGTVAALNNSIGVIGVAPNAELQAVKVLGANGSGSVSGIAQGLEWAATNNMHIANMSLGSDFPSSTLERAVNYATSRDVLVIAATGNNGSGSVGYPARYANAMAVGATDQNNRRANFSQYGTGIDIVAPGVNVQSTYPGNRYVSMNGTSMATPHVAGAAALVKQRYPSWNATQIRNHLKNTATNLGNSSQFGSGLVNAEAATR

SEQ ID NO: 66550 - protein, 268 aa, Unidentified
QTVPWGIERVQAPAVHNRGITGSGVRVAILDSGISAHSDLNIRGGASFVPGEPTTADLNGHGTHVAGTVAALNNDIGVIGVAPNAELYAVKVLGANGSGSVSGIAQGLEWAATNNMHIANMSLGSDRPSSTLERAVNYATSRDVLVIAATGNNGSGSVGYPARYANAMAVGATDQNNRRANFSQYGTGIDIVAPGVNVQSTYPGNRYVSMNGTSMATPHVAGAAALVKQRYPSWNATQIRNHLKNTATNLGNSSQFGSGLVNAEAATR

SEQ ID NO: 66551 - protein, 268 aa, Unidentified
QTVPWGITRVQAPAVHNRGITGSGVRVAILDSGISAHEDLNIRGGASFVPCEPTTADLNGHGTHVAGTVAALNNSIGVIGVAPNAELYAVKVLGANGSGSVSGIAQGLEWAATNNMHIANMSLGSDFPSSTLERAVNYATSRDVLVIAATGNNGSGSVGYPARYANAMAVGATDQNNRRANFSQYGTGIDIVAPGVNVQSTYPGNRYVSMNGTSMATPHVAGAAALVKQRYPSWNATQIRNHLKNTATNLGNSSQFGSGLVNAEAATR

SEQ ID NO: 66552 - protein, 268 aa, Unidentified
QTVPWGITRVQAPAVHNRGITGSGVRVAILDSGISAHEDLNIRGGASFVPGEPTTADLNGHGTHVAGTVAALNNSIGVIGVAPNAELYAVKVLGANGSGSVSGIAQGLEWAATNNMHIANMSLGSDFPSSTLERAVNYATSRDVLVIAATGNNGSGSVGYPARYANAMAVGATDQNNRRANFSQYGTGIDIVAPGVNVQSTYPGNRYVSMNGTSMATPHVAGAAALVKQRYPSWNATQIRGHLKNTATNLGNSSQFGSGLVNAEAATR

SEQ ID NO: 66553 - protein, 268 aa, Unidentified
QTVPWGITRVQAPAVHNRGITGSGVRVAILDSGISAHSDLNIRGGASFVPGEPTTADLNGHGTHVSGTVAALNNSIGVIGVAPNAELYAVKVLGANGSGSVSGIAQGLEWAATNNMHIANMSLGSDFPSSTLERAVNYATSRDVLVIAATGNNGSGSVGYPARYANAMAVGATDQNNRRANFSQYGTGIDIVAPGVNVQSTYPGNRYVSMNGTSMATPHVAGAAALVKQRYPSWNATQIRNHLKNTATNLGNSSQFGSGLVNAEAATR

SEQ ID NO: 66554 - protein, 268 aa, Unidentified
QTVPWGITRVQAPAVHNRGITGSGVRVAILDSGISAHEDLNIRGGASFVPGEPTTADLNGHGTHVAGTVAALNNSIGVIGVAPNAELYAVKVLGANGSGSVSGIAQGLEWAATNNMHIVNMSLGSDFPSSTLERAVNYATSRDVLVIAATGNNGSGSVGYPARYANAMAVGATDQNNRRANFSQYGTGIDIVAPGVNVQSTYPGNRYVSMNGTSMATPHVAGAAALVKQRYPSWNATQIRNHLKNTATNLGNSSQFGSGLVNAEAATR

SEQ ID NO: 66555 - protein, 268 aa, Unidentified
QTVPWGITRVQAPAVHNRGITGSGVRVAILDSGISAHEDLNIRGGASFVPGEPTTADLNGHGTHVAGTVAALNNSIGVIGVAPNAELYAVKVLGANGSGSVSGIAQGLEWAATNNMHIANMSLGSDFPSSTLERAVNYATSRDVLVIAATGNNGSGSVGYPARYANAMAVGATDQNNRRANFSQYGTGIDIVAPGVNVQSTYPGNRYVSMNGTSMATPHVAGAAALVKQRYPSWNATQIRNHLKNTATNLGNSSQFGSGLVNAEQATR

SEQ ID NO: 66556 - protein, 268 aa, Unidentified
QTTPWGITRVQAPAVHNRGITGSGVRVAILDSGISAHEDLNIRGGASFVPGEPTTADLNGHGTHVAGTVAALNNSIGVIGVAPNAELYAVKVLGANGSGSVSGIAQGLEWAATNNMHIANMSLGSDFPSSTLERAVNYATSRDVLVIAATGNNGSGSVGYPARYANAMAVGATDQNNRRANFSQYGTGIDIVAPGVNVQSTYPGNRYVSMNGTSMATPHVAGAAALVKQRYPSWNATQIRNHLKNTATNLGNSSQFGSGLVNAEAATR

SEQ ID NO: 66557 - protein, 268 aa, Unidentified
QTVPWGITRVQAPAVHNRGITGSGVRVAILDSGISAHEDLNIRGGASFVPGELTTADLNGHGTHVAGTVAALNNSIGVIGVAPNAELYAVKVLGANGSGSVSGIAQGLEWAATNNMHIANMSLGSDFPSSTLERAVNYATSRDVLVIAATGNNGSGSVGYPARYANAMAVGATDQNNRRANFSQYGTGIDIVAPGVNVQSTYPGNRYVSMNGTSMATPHVAGAAALVKQRYPSWNATQIRNHLKNTATNLGNSSQFGSGLVNAEAATR

SEQ ID NO: 66558 - protein, 268 aa, Unidentified
QTVPWGITRVQAPAVHNRGITGSGVRVAILDSGISAHSDLNIRGGASFVPGEPTTADLNGHGTHVAGTVAALNNSIGVIGVAPNAELPAVKVLGANGSGSVSGIAQGLEWAATNNMHIANMSLGSDFPSSTLERAVNYATSRDVLVIAATGNNGSGSVGYPARYANAMAVGATDQNNRRANFSQYGTGIDIVAPGVNVQSTYPGNRYVSMNGTSMATPHVAGAAALVKQRYPSWNATQIRNHLKNTATNLGNSSQFGSGLVNAEAATR

SEQ ID NO: 66559 - protein, 268 aa, Unidentified
QTVPWGITRVQAPAVHNRGITGSGVRVAILDSGISAHSDLNIRGGASFVPGEPTTAQLNGHGTHVAGTVAALNNSIGVIGVAPNAELYAVKVLGANGSGSVSGIAQGLEWAATNNMHIANMSLGSDFPSSTLERAVNYATSRDVLVIAATGNNGSGSVGYPARYANAMAVGATDQNNRRANFSQYGTGIDIVAPGVNVQSTYPGNRYVSMNGTSMATPHVAGAAALVKQRYPSWNATQIRNHLKNTATNLGNSSQFGSGLVNAEAATR

SEQ ID NO: 66560 - protein, 268 aa, Unidentified
QTVPWGITRVQAPAVHNRGITGSGVRVAILDSGISAHSDLNIRGGASFVPGEPTTADLNGHGTHVAGTVAALNNSIGVIGVAPNAELYAVKVLGANGSGSVSGIAQGLEWAATNNMHIANMSLGSDFPLSTLERAVNYATSRDVLVIAATGNNGSGSVGYPARYANAMAVGATDQNNRRANFSQYGTGIDIVAPGVNVQSTYPGNRYVSMNGTSMATPHVAGAAALVKQRYPSWNATQIRNHLKNTATNLGNSSQFGSGLVNAEAATR

SEQ ID NO: 66561 - protein, 268 aa, Unidentified
QTVPWGITRVQAPAVHNRGITGSGVRVAILDSGISAHSDLNIRGGASFVPGEPTTADLNGHGTHVAGTVAALNNSIGVIGCAPNAELYAVKVLGANGSGSVSGIAQGLEWAATNNMHIANMSLGSDFPSSTLERAVNYATSRDVLVIAATGNNGSGSVGYPARYANAMAVGATDQNNRRANFSQYGTGIDIVAPGVNVQSTYPGNRYVSMNGTSMATPHVAGAAALVKQRYPSWNATQIRNHLKNTATNLGNSSQFGSGLVNAEAATR

SEQ ID NO: 66562 - protein, 268 aa, Unidentified
QQVPWGIERVQAPAVHNRGITGSGVRVAILDSGISAHSDLNIRGGASFVPGEPTTADLNGHGTHVAGTVAALNNSIGVIGVAPNAELYAVKVLGANGSGSVSGIAQGLEWAATNNMHIANMSLGSDFPSSTLERAVNYATSRDVLVIAATGNNGSGSVGYPARYANAMAVGATDQNNRRANFSQYGTGIDIVAPGVNVQSTYPGNRYVSMNGTSMATPHVAGAAALVKQRYPSWNATQIRNHLKNTDTNLGNSSQFGSGLVNAEAATR

SEQ ID NO: 66563 - protein, 268 aa, Unidentified
QTVPWGITRVQAPAVHNRGITGSGVRVAILDSGISAHEDLNIRGGASFVPGEPTTADLNGHGTHVAGTVAALNNSIGVIGVAPNAELYAVKVLGANGSGSVSGIAQGLEWAATNNMHIANMSLGSDFPSSTLERAVNYATSRDVLVIAATGNNGSGSVGYPARYANAMAVGATDQNNRRANFSQYGTGIDIVAPGVNVQSTYPGNRYVSMNGTSMATPHVAGAAALVKQRYPSWNATDIRNHLKNTATNLGNSSQFGSGLVNAEAATR

SEQ ID NO: 66564 - protein, 268 aa, Unidentified
QTVPWGITRVQAPAVHNRGITGSGVRVAILDSGISAHEDLNIRGGASFVPGEPTTADLNGHGTHVAGTVAALNNSIGVIGVAPNAELYAVKVLGANGSGSVSGIAQGLEWAATNNMHIANMSLGSDFPSSTLERAVNYATSRDVLVIAATGNNGSGSVGYPARYANAMAVGATDDNNRRANFSQYGTGIDIVAPGVNVQSTYPGNRYVSMNGTSMATPHVAGAAALVKQRYPSWNATQIRNHLKNTATNLGNSSQFGSGLVNAEAATR

SEQ ID NO: 66565 - protein, 268 aa, Unidentified
QTVPWGITRVQAPAVHNRGITGSGVRVAILDSGISAHEDLDIRGGASFVPGEPTTADLNGHGTHVAGTVAALNNSIGVIGVAPNAELYAVKVLGANGSGSVSGIAQGLEWAATNNMHIANMSLGSDFPSSTLERAVNYATSRDVLVIAATGNNGSGSVGYPARYANAMAVGATDQNNRRANFSQYGTGIDIVAPGVNVQSTYPGNRYVSMNGTSMATPHVAGAAALVKQRYPSWNATQIRNHLKNTATNLGNSSQFGSGLVNAEAATR

SEQ ID NO: 66566 - protein, 268 aa, Unidentified
QTVPWGITRVQAPAVHNRGITGSGVRVAILDSGISAHSDLNIRGGASFVPGEPTTADLNGHGTHVAGTVAALNNYIGVIGVAPNAELYAVKVLGANGSGSVSGIAQGLEWAATNNMHIANMSLGSDFPSSTLERAVNYATSRDVLVIAATGNNGSGSVGYPARYANAMAVGATDQNNRRANFSQYGTGIDIVAPGVNVQSTYPGNRYVSMNGTSMATPHVAGAAALVKQRYPSWNATQIRNHLKNTATNLGNSSQFGSGLVNAEAATR

SEQ ID NO: 66567 - protein, 268 aa, Unidentified
QTVPWGITRVQAPAVHNRGITGSGVRVAILDSGISAHSDLNIRGGAQFVPGEPTTADLNGHGTHVAGTVAALNNSIGVIGVAPNAELYAVKVLGANGSGSVSGIAQGLEWAATNNMHIANMSLGSDFPSSTLERAVNYATSRDVLVIAATGNNGSGSVGYPARYANAMAVGATDQNNRRANFSQYGTGIDIVAPGVNVQSTYPGNRYVSMNGTSMATPHVAGAAALVKQRYPSWNATQIRNHLKNTATNLGNSSQFGSGLVNAEAATR

SEQ ID NO: 66568 - protein, 268 aa, Unidentified
QTVPWGITRVQAPAVHNRGITGSGVRVAILDSGISAHSDLNIRGGVSFVPGEPTTADLNGHGTHVAGTVAALNNSIGVIGVAPNAELYAVKVLGANGSGSVSGIAQGLEWAATNNMHIANMSLGSDFPSSTLERAVNYATSRDVLVIAATGNNGSGSVGYPARYANAMAVGATDQNNRRANFSQYGTGIDIVAPGVNVQSTYPGNRYVSMNGTSMATPHVAGAAALVKQRYPSWNATQIRNHLKNTATNLGNSSQFGSGLVNAEAATR

SEQ ID NO: 66569 - protein, 268 aa, Unidentified
QTVPWGITRVQAPAVHNRGITGSGVKVAILDSGISTHEDLNVRGGVSFVPGEPTYADLNGHGTHVAGTVAALNNSIGVVGVAPSADLYAVKVLGANGRGSISGIAQGLEWAAQNNMHIANMSLGTDAPSSTLERAVNYATSRDVLVIAATGNNGSGSVGYPARYANAMAVGATDQNNRRANFSQYGAGLDIVAPGVNVQSTYPGNRYVSMNGTSMATPHVAGAAALVKQRYPSWNATQIRNHLKNTATNLGNSSQYGSGLVNAEAATR

SEQ ID NO: 66570 - protein, 268 aa, Unidentified
QTVPWGITRVQAPAVHNRGITGSGVRVAILDSGISAHEDLNIRGGASFVPGEPTEADLNGHGTHVAGTVAALNNSIGVIGVAPNAELYAVKVLGANGSGSVSGIAQGLEWAATNNMHIANMSLGSDFPSSTLERAVNYATSRDVLVIAATGNNGSGSVGYPARYANAMAVGATDQNNRRANFSQYGTGIDIVAPGVNVQSTYPGNRYVSMNGTSMATPHVAGAAALVKQRYPSWNATQIRNHLKNTATNLGNSSQFGSGLVNAEAATR

SEQ ID NO: 66571 - protein, 268 aa, Unidentified
QTVPWGITRVQAPAVHNRGITGSGVRVAILDSGISAHEDLNIRGGASFVPGEPTTADLNGHGTHVAGTVAALNNSIGVIGVAPNAELYAVKVLGANGSGSVSGIAQGLEWAATNNMHIANMSLGSDFPSSTLERAVNYATSRDVLVIAATGNNGSGSVGYPARYANAMAVGATDQNNRRANFSQYGTGIDIVAPGVNVQSTYPGNRYVSMNGTSMATPHVAGAAALVKQRYPYWNATQIRNHLKNTATNLGNSSQFGSGLVNAEAATR

SEQ ID NO: 66572 - protein, 268 aa, Unidentified
QTVPWGITRVQAPAVHNRGITGSGVRVAILDSGISAHSDLNIRGGASFVPGEPTTADLNGHGTHVAGTVAALNNSIGVIGVAPNAELYAVKVLGANGSGPVSGIAQGLEWAATNNMHIANMSLGSDFPSSTLERAVNYATSRDVLVIAATGNNGSGSVGYPARYANAMAVGATDQNNRRANFSQYGTGIDIVAPGVNVQSTYPGNRYVSMNGTSMATPHVAGAAALVKQRYPSWNATQIRNHLKNTATNLGNSSQFGSGLVNAEAATR

SEQ ID NO: 66573 - protein, 268 aa, Unidentified
QTVPWGITRVQAPAVHNRGITGSGVRVAILDSGISAHSELNIRGGASFVPGEPTTADLNGHGTHVAGTVAALNNSIGVIGVAPNAELYAVKVLGANGSGSVSGIAQGLEWAATNNMHIANMSLGSDSPSSTLERAVNYATSRDVLVIAATGNNGSGSVGYPARYANAMAVGATDQNNRRANFSQYGTGIDIVAPGVNVQSTYPGNRYVSMNGTSMASPHVAGAAALVKQRYPSWNATQIRNHLKNTATNLGNSSQFGSGLVNAEAATR

SEQ ID NO: 66574 - protein, 268 aa, Unidentified
QTVPWGITRVQAPMVHNRGITGSGVRVAILDSGISAHEDLNIRGGASFVPGEPTTADLNGHGTHVAGTVAALNNSIGVIGVAPNAELYAVKVLGANGSGSVSGIAQGLEWAATNNMHIANMSLGSDFPSSTLERAVNYATSRDVLVIAATGNNGSGSVGYPARYANAMAVGATDQNNRRANFSQYGTGIDIVAPGVNVQSTYPGNRYVSMNGTSMATPHVAGAAALVKQRYPSWNATQIRNHLKNTATNLGNSSQFGSGLVNAEAATR

SEQ ID NO: 66575 - protein, 268 aa, Unidentified
QTVPWGITRVQAPAVHNRGITGSGVRVAILDSGISAHSDLNIRGGASFVPGEPTTAYLNGHGTHVAGTVAALNNSIGVIGVAPNAELYAVKVLGANGSGSVSGIAQGLEWAATNNMHIANMSLGSDFPSSTLERAVNYATSRDVLVIAATGNNGSGSVGYPARYANAMAVGATDQNNRRANFSQYGTGIDIVAPGVNVQSTYPGNRYVSMNGTSMATPHVAGAAALVKQRYPSWNATQIRNHLKNTATNLGNSSQFGSGLVNAEAATR

SEQ ID NO: 66576 - protein, 268 aa, Unidentified
QTVPWGITRVQAPAVHNRGITGSGVRVAILDSGISAHEDLNIRGGASFVPGEPTTADLNGHGTHVAGTVAALNNMIGVIGVAPNAELYAVKVLGANGSGSVSGIAQGLEWAATNNMHIANMSLGSDFPSSTLERAVNYATSRDVLVIAATGNNGSGSVGYPARYANAMAVGATDQNNRRANFSQYGTGIDIVAPGVNVQSTYPGNRYVSMNGTSMATPHVAGAAALVKQRYPSWNATQIRNHLKNTATNLGNSSQFGSGLVNAEAATR

SEQ ID NO: 66577 - protein, 268 aa, Unidentified
QTVPWGITRVQAPAVHNRGITGSGVRVAILDSGISAHEDLNIRGGASFVPGEPTTADLNGHGTHVAGTVAALNNSIGVIGVAPNAELYAVKVLNANGSGSVSGIAQGLEWAATNNMHIANMSLGSDFPSSTLERAVNYATSRDVLVIAATGNNGSGSVGYPARYANAMAVGATDQNNRRANFSQYGTGIDIVAPGVNVQSTYPGNRYVSMNGTSMATPHVAGAAALVKQRYPSWNATQIRNHLKNTATNLGNSSQFGSGLVNAEAATR

SEQ ID NO: 66578 - protein, 268 aa, Unidentified
QTVPWGITRVQAPAVHNRGITGSGVRVAILDSGISAHEDLNIRGGASFVPGEPTTADLNGHGTHVAGTVAALNNSIGVIGVAPNAELYAVKVLGANGSGSVSGIAQGLEWAATNNMHIANMSLGSDFPSSTLERAVNYATSRDVLVIAATGNNGSGQVGYPARYANAMAVGATDQNNRRANFSQYGTGIDIVAPGVNVQSTYPGNRYVSMNGTSMATPHVAGAAALVKQRYPSWNATQIRNHLKNTATNLGNSSQFGSGLVNAEAATR

SEQ ID NO: 66579 - protein, 268 aa, Unidentified
QTVPWGITRVQAPAVHNRGITGSGVRVAILDSGISAHEDLNIRGGESFVPGEPTTADLNGHGTHVAGTVAALNNSIGVIGVAPNAELYAVKVLGANGSGSVSGIAQGLEWAATNNMHIANMSLGSDFPSSTLERAVNYATSRDVLVIAATGNNGSGSVGYPARYANAMAVGATDQNNRRANFSQYGTGIDIVAPGVNVQSTYPGNRYVSMNGTSMATPHVAGAAALVKQRYPSWNATQIRNHLKNTATNLGNSSQFGSGLVNAEAATR

SEQ ID NO: 66580 - protein, 268 aa, Unidentified
QTVPWGITRVQAPAVHNRGITGSGVRVAILDSGISAHEDLNIRGGASFVPGEPTTADLNGHGTHVAGTVAALNNSIGVIGVAPNAELYAVKVLGANGSGSVSGIAQGLEWAATNNMHIANMSLGSDFPSSTLERAVNYATSRDVLVIAATGNNGSGSVGYPARYAEAMAVGATDQNNRRANFSQYGTGIDIVAPGVNVQSTYPGNRYVSMNGTSMATPHVAGAAALVKQRYPSWNATQIRNHLKNTATNLGNSSQFGSGLVNAEAATR

SEQ ID NO: 66581 - protein, 268 aa, Unidentified
QTVPWGITRVQAPAVHNRGITGSGVRVAILDSGISAHEDLNIRGGASFVPGEPTTADLNGHGTHVAGTVAALNNSIGVIGVAPNAELYAVKVLGANGQGSVSGIAQGLEWAATNNMHIANMSLGSDFPSSTLERAVNYATSRDVLVIAATGNNGSGSVGYPARYANAMAVGATDQNNRRANFSQYGTGIDIVAPGVNVQSTYPGNRYVSMNGTSMATPHVAGAAALVKQRYPSWNATQIRNHLKNTATNLGNSSQFGSGLVNAEAATR

SEQ ID NO: 66582 - protein, 268 aa, Unidentified
QTVPWGITRVQAPAVHNRGITGSGVRVAILDSGISAHSDLNIRGGASFVPGEPTTADLNGHGTHVAGTVAALNNSIGVIGVAPNAELYAVKVLGANGSGSVSGIAQGLEWAATNNMHIANMSLGSDFPHSTLERAVNYATSRDVLVIAATGNNGSGSVGYPARYANAMAVGATDQNNRRANFSQYGTGIDIVAPGVNVQSTYPGNRYVSMNGTSMATPHVAGAAALVKQRYPSWNATQIRNHLKNTATNLGNSSQFGSGLVNAEAATR

SEQ ID NO: 66583 - protein, 268 aa, Unidentified
QTVPWGITRVQAPAVHQRGITGSGVRVAILDSGISAHEDLNIRGGASFVPGEPTTADLNGHGTHVAGTVAALNNSIGVIGVAPNAELYAVKVLGANGSGSVSGIAQGLEWAATNNMHIANMSLGSDFPSSTLERAVNYATSRDVLVIAATGNNGSGSVGYPARYANAMAVGATDQNNRRANFSQYGTGIDIVAPGVNVQSTYPGNRYVSMNGTSMATPHVAGAAALVKQRYPSWNATQIRNHLKNTATNLGNSSQFGSGLVNAEAATR

SEQ ID NO: 66584 - protein, 268 aa, Unidentified
QTVPWGITRVQAPAVHNRGITGSGVRVAILDSGISAQSDLNIRGGASFVPGEPTTADLNGHGTHVAGTVAALNNSIGVIGVAPNAELYAVKVLGANGSGSVSGIAQGLEWAATNNMHIANMSLGSDFPSSTLERAVNYATSRDVLVIAATGNNGSGSVGYPARYANAMAVGATDQNNRRANFSQYGTGIDIVAPGVNVQSTYPGNRYVSMNGTSMATPHVAGAAALVKQRYPSWNATQIRNHLKNTATNLGNSSQFGSGLVNAEAATR

SEQ ID NO: 66585 - protein, 268 aa, Unidentified
QTVPWGITRVQAPAVHNRGITGSGVRVAILDSGISAHEDLNIRGGASFVPGEPTTADLNGHGTHVAGTVAALNNSIGVIGVAPNAELYAVKVLGANGSGSVSGIAQGLEWAATNNMHIANMSLGSDFPSSTLERAVNYATSRDVLVIAATGNNGSGSVGYPARYANAMAVGATDQNNRRANFSQYGTGIDIVAPGVNVQSTYPGNRYVSMNGTSMATPHVAGAAALVKQRYPSWNATQIRNHLKNTADNLGNSSQFGSGLVNAEAATR

SEQ ID NO: 66586 - protein, 268 aa, Unidentified
QTVPWGITRVQAPAVHNRGITGSGVRVAILDSGISAHEDLNIRGGASFVPGEPTTADLNGHGTHVAGTVAALNNSIGVIGVAPNAELYAVKVLGANGSGSVSGIAQGLEWAATNNMHIANMSLGSDFPSSTLERAVNYATSRDVLVIAATGNNGSGSVGYPARYANAMAVGATDQNNRRANFSQYGTGIDIVAPGVNVQSTYPGNRYVSMNGTSMATPHVAGAAALVKQRYPSWNATQIRNHLKNTATNLGNSSQFGSGLVNAERATR

SEQ ID NO: 66587 - protein, 268 aa, Unidentified
QTVPWGIERVQAPAVHNRGITGSGVRVAILDSGISAHSDLNIRGGASFVPGEPTTADLNGHGTHVAGTVAALNNSIGVIGVAPNAELYAVKVLGANGSGSVSGIAQGLEWAATNNMHIANMSLGSDFPSSTLERAVNYATSRDVLVIAATGNNGSGSVGYPARYQNAMAVGATDQNNRRAEFSQYGTGIDIVAPGVNVQSTYPGNRYVSMNGTSMATPHVAGAAALVKQRYPSWNATQIRNHLKNTATNLGNSSQFGSGLVNAEAATR

SEQ ID NO: 66588 - protein, 268 aa, Unidentified
QTVPWGITRVQAPAVHNRGITGSGVRVAILDSGISAHSDLNIRGGASFVPGEPTTADLNGHGTHVAGTVAALNNSIGVIGVAPNAELYAVKVLGANGSGSVSGIAQGLEWAATNNMHIANMSLGSDFESSTLERAVNYATSRDVLVIAATGNNGSGSVGYPARYANAMAVGATDQNNRRANFSQYGTGIDIVAPGVNVQSTYPGNRYVSMNGTSMATPHVAGAAALVKQRYPSWNATQIRNHLKNTATNLGNSSQFGSGLVNAEAATR

SEQ ID NO: 66589 - protein, 268 aa, Unidentified
QTVPWGITRVQAPAVHNRGITGSGVRVAILDSGISAISDLNIRGGASFVPGEPTTADLNGHGTHVAGTVAALNNSIGVIGVAPNAELYAVKVLGANGSGSVSGIAQGLEWAATNNMHIANMSLGSDFPSSTLERAVNYATSRDVLVIAATGNNGSGSVGYPARYANAMAVGATDQNNRRANFSQYGTGIDIVAPGVNVQSTYPGNRYVSMNGTSMATPHVAGAAALVKQRYPSWNATQIRNHLKNTATNLGNSSQFGSGLVNAEAATR

SEQ ID NO: 66590 - protein, 268 aa, Unidentified
QTVPWGITRVQAPAVHNRGITGSGVRVAILDSGISAHEDLNIRGGASFVPGEPTTADLNGHGTHVAGTVAALNNSIGVVGVAPNAELYAVKVLGANGRGSVSGIAQGLEWAATNNMHIANMSLGAEGPSSTLERAVNYATSRDVLVIAATGNNGSGSVGYPARYANAMAVGATDQNNRRANFSQYGTGIDIVAPGVNVQSTYPGNRYVSLNGTSMATPHVAGAAALVKQRYPSWNATQIRNHLKNTATNLGNSSQFGSGLVNAEAATR

SEQ ID NO: 66591 - protein, 268 aa, Unidentified
QTVPWGITRVQAPAVHNRGITGSAVRVAILDSGISAHEDLNIRGGASFVPGEPTTADLNGHGTHVAGTVAALNNSIGVIGVAPNAELYAVKVLGANGSGSVSGIAQGLEWAATNNMHIANMSLGSDFPSSTLERAVNYATSRDVLVIAATGNNGSGSVGYPARYANAMAVGATDQNNRRANFSQYGTGIDIVAPGVNVQSTYPGNRYVSMNGTSMATPHVAGAAALVKQRYPSWNATQIRNHLKNTATNLGNSSQFGSGLVNAEAATR

SEQ ID NO: 66592 - protein, 268 aa, Unidentified
QTVPWGITRVQAPAVHNRGITGSGVRVAILDSGISAHSALNIRGGASFVPGEPTTADLNGHGTHVAGTVAALNNSIGVIGVAPNAELYAVKVLGANGSGSVSGIAQGLEWAATNNMHIANMSLGSDFPSSTLERAVNYATSRDVLVIAATGNNGSGSVGYPARYANAMAVGATDQNNRRANFSQYGTGIDIVAPGVNVQSTYPGNRYVSMNGTSMATPHVAGAAALVKQRYPSWNATQIRNHLKNTATNLGNSSQFGSGLVNAEAATR

SEQ ID NO: 66593 - protein, 268 aa, Unidentified
QTVPWGITRVQAPAVHNRGITGSGVRVAILDSGISAHSDLNIRGGASFVPGEPTTADLNGHGTHVAGTVAALNNSIGVIGVAPNAELYAVKVLGANGSGSVSGIAQGLEWAATNNMHIANMSLGSDFISSTLERAVNYATSRDVLVIAATGNNGSGSVGYPARYANAMAVGATDQNNRRANFSQYGTGIDIVAPGVNVQSTYPGNRYVSMNGTSMATPHVAGAAALVKQRYPSWNATQIRNHLKNTATNLGNSSQFGSGLVNAEAATR

SEQ ID NO: 66594 - protein, 268 aa, Unidentified
QTVPWGITRVQAPAVHNRGITGSGVRVAILDSGISAHEDLNIRGGASFVPGEPTTADLNGHGTHVAGTVAALDNSIGVIGVAPNAELYAVKVLGANGSGSVSGIAQGLEWAATNNMHIANMSLGSDFPSSTLERAVNYATSRDVLVIAATGNNGSGSVGYPARYANAMAVGATDQNNRRANFSQYGTGIDIVAPGVNVQSTYPGNRYVSMNGTSMATPHVAGAAALVKQRYPSWNATQIRNHLKNTATNLGNSSQFGSGLVNAEAATR

SEQ ID NO: 66595 - protein, 268 aa, Unidentified
QTVPWGITRVQAPAVHNRGITGSGVRVAILDSGISAHSDLNIRGGASFVPGEPTTADLNGHGTHVAGTVAALNNKIGVIGVAPNAELYAVKVLGANGSGSVSGIAQGLEWAATNNMHIANMSLGSDFPSSTLERAVNYATSRDVLVIAATGNNGSGSVGYPARYANAMAVGATDQNNRRANFSQYGTGIDIVAPGVNVQSTYPGNRYVSMNGTSMATPHVAGAAALVKQRYPSWNATQIRNHLKNTATNLGNSSQFGSGLVNAEAATR

SEQ ID NO: 66596 - protein, 268 aa, Unidentified
QTVPWGITRVQAPAVHNRGITGSGVRVAILDSGIIAHEDLNIRGGASFVPGEPTTADLNGHGTHVAGTVAALNNSIGVIGVAPNAELYAVKVLGANGSGSVSGIAQGLEWAATNNMHIANMSLGSDFPSSTLERAVNYATSRDVLVIAATGNNGSGSVGYPARYANAMAVGATDQNNRRANFSQYGTGIDIVAPGVNVQSTYPGNRYVSMNGTSMATPHVAGAAALVKQRYPSWNATQIRNHLKNTATNLGNSSQFGSGLVNAEAATR

SEQ ID NO: 66597 - protein, 268 aa, Unidentified
QTVPWGITRVQAPAVHNRGITGSGVRVAILDSGISAHSDLNIRGGASFVPGEPTTADLNGHGTHVAGTVAALNNSIGVIGVAPNAELYAVKVLGANGSGKVSGIAQGLEWAATNNMHIANMSLGSDFPSSTLERAVNYATSRDVLVIAATGNNGSGSVGYPARYANAMAVGATDQNNRRANFSQYGTGIDIVAPGVNVQSTYPGNRYVSMNGTSMATPHVAGAAALVKQRYPSWNATQIRNHLKNTATNLGNSSQFGSGLVNAEAATR

SEQ ID NO: 66598 - protein, 268 aa, Unidentified
QTVPWGITRVQAPAVHNRGITGSGVRVAILDSGISAHEDLNIRGGASFVPGEPTTADLNGHGTHVAGTVAALNNSIGVIGVAPNAELYAVKVLGANGSGSVSGIAQGLEWAATNNMHIANMSLGSDFPSSTLERAVNYATSRDVLVIAATGNNGSGSVGYPAAYANAMAVGATDQNNRRANFSQYGTGIDIVAPGVNVQSTYPGNRYVSMNGTSMATPHVAGAAALVKQRYPSWNATQIRNHLKNTATNLGNSSQFGSGLVNAEAATR

SEQ ID NO: 66599 - protein, 268 aa, Unidentified
QTVPWGITRVQAPAVHERGITGSGVRVAILDSGISAHEDLNIRGGASFVPGEPTTADLNGHGTHVAGTVAALNNSIGVIGVAPNAELYAVKVLGANGSGSVSGIAQGLEWAATNNMHIANMSLGSDFPSSTLERAVNYATSRDVLVIAATGNNGSGSVGYPARYANAMAVGATDQNNRRANFSQYGTGIDIVAPGVNVQSTYPGNRYVSMNGTSMATPHVAGAAALVKQRYPSWNATQIRNHLKNTATNLGNSSQFGSGLVNAEAATR

SEQ ID NO: 66600 - protein, 268 aa, Unidentified
QTVPWGITRVQAPAVHNRGITGSGVRVAILDSGISAHEDLNIRGGASFVPTEPTTADLNGHGTHVAGTVAALNNSIGVIGVAPNAELYAVKVLGANGSGSVSGIAQGLEWAATNNMHIANMSLGSDFPSSTLERAVNYATSRDVLVIAATGNNGSGSVGYPARYANAMAVGATDQNNRRANFSQYGTGIDIVAPGVNVQSTYPGNRYVSMNGTSMATPHVAGAAALVKQRYPSWNATQIRNHLKNTATNLGNSSQFGSGLVNAEAATR

SEQ ID NO: 66601 - protein, 268 aa, Unidentified
QTVPWGITRVQAPAVHNRGITGSGVRVAILDSGISAHSDLNIRGGASFVPGEPTTADLNGHGTHVAGTVAALNNSIGVIGVAPNAELNAVKVLGANGSGSVSGIAQGLEWAATNNMHIANMSLGSDFPSSTLERAVNYATSRDVLVIAATGNNGSGSVGYPARYANAMAVGATDQNNRRANFSQYGTGIDIVAPGVNVQSTYPGNRYVSMNGTSMATPHVAGAAALVKQRYPSWNATQIRNHLKNTATNLGNSSQFGSGLVNAEAATR

SEQ ID NO: 66602 - protein, 268 aa, Unidentified
QTVPWGITRVQAPAVHNRGITGSGVRVAILDSGISAHSDLNIRGGANFVPGEPTTADLNGHGTHVAGTVAALNNSIGVIGVAPNAELYAVKVLGANGSGSVSGIAQGLEWAATNNMHIANMSLGSDFPSSTLERAVNYATSRDVLVIAATGNNGSGSVGYPARYANAMAVGATDQNNRRANFSQYGTGIDIVAPGVNVQSTYPGNRYVSMNGTSMATPHVAGAAALVKQRYPSWNATQIRNHLKNTATNLGNSSQFGSGLVNAEAATR

SEQ ID NO: 66603 - protein, 268 aa, Unidentified
QTVPWGITRVQAPAVHNRGITGSGVRVAILDSGISAHEDLNIRGGASFVPGEPTTADLNGHGTHVAGTVAALNNSIGVIGVAPNAELYAVKVLGANGSGSVSGIAQGLEWAATNNMHIANMSLGSDFPSSTLERAVNYATSRDVLVIAATGNNGSGSVGYPARYANAMAVGATDSNNRRANFSQYGTGIDIVAPGVNVQSTYPGNRYVSMNGTSMATPHVAGAAALVKQRYPSWNATQIRNHLKNTATNLGNSSQFGSGLVNAEAATR

SEQ ID NO: 66604 - protein, 268 aa, Unidentified
QTVPWGITRVQAPAVHNRGITGSGVRVAILDSGISAHEDLNIRGGASFVPGEPTTADLNGHGTHVAGTVAALNNSIGVIGVAPNAELYAVKVLGANGSGSVSGIAQGLEWAATNNMHIANMSLGSDFPSSTLERAVNYATSRDVLVIAATGNNGSGSVGYPARYANAMAVGAVDQNNRRANFSQYGTGIDIVAPGVNVQSTYPGNRYVSMNGTSMATPHVAGAAALVKQRYPSWNATQIRNHLKNTATNLGNSSQFGSGLVNAEAATR

SEQ ID NO: 66605 - protein, 268 aa, Unidentified
QTVPWGITRVQAPAVHNRGITGSGVRVAILDSGISAHSDLNIRGGASFVPGEPTTATLNGHGTHVAGTVAALNNSIGVIGVAPNAELYAVKVLGANGSGSVSGIAQGLEWAATNNMHIANMSLGSDFPSSTLERAVNYATSRDVLVIAATGNNGSGSVGYPARYANAMAVGATDQNNRRANFSQYGTGIDIVAPGVNVQSTYPGNRYVSMNGTSMATPHVAGAAALVKQRYPSWNATQIRNHLKNTATNLGNSSQFGSGLVNAEAATR

SEQ ID NO: 66606 - protein, 268 aa, Unidentified
QTVPWGITRVQAPAVHNRGITGSGVRVAILDSGISAHEDLNIRGGASFVPGEPTTADLNGHGTHVAGTVAALNNSIGVIGVAPNAELYAVKVLGANGSGSVSGIAQGLEWAATNNMHIANMSLGSDFPSSTLERAVNYATSRDVLVIAATGNNGSGSVGYPARYANAMAVGATDQANRRANFSQYGTGIDIVAPGVNVQSTYPGNRYVSMNGTSMATPHVAGAAALVKQRYPSWNATQIRNHLKNTATNLGNSSQFGSGLVNAEAATR

SEQ ID NO: 66607 - protein, 268 aa, Unidentified
QTVPWGITRVQAPAVHNRGITGSGVRVAILDSGISAHEDLNIRGGASFVPGEPTTADLNGHGTHVAGTVAALNNSIGVIGVAPNAELYAVKVLGANGSGSVSGIAQGLEWAATNNMHIANMSLGSDFPSSTLERAVNYATSRDVLVIAATGNNGSGSVGYPARYANAMAVGATDQNNRRANFSQYGTGIDIVAPGVNVQSTYPGNRYVSMNGTSMATPHVAGAAALVKQRYPWWNATQIRNHLKNTATNLGNSSQFGSGLVNAEAATR

SEQ ID NO: 66608 - protein, 268 aa, Unidentified
QTVPWGITRVQAPAVHNRGITGSGVRVAILDSGISAHEDLNIRGGASFVPGEPTTADLNGHGTHVAGTVAALNNSIGVIGVAPNAELYAVKVLGANGSGSVSGIAQGLEWAATNNMHIANMSLGSDFPSSTLERAVNYATSRDVLVIAATGNNGSGSVGYPARYINAMAVGATDQNNRRANFSQYGTGIDIVAPGVNVQSTYPGNRYVSMNGTSMATPHVAGAAALVKQRYPSWNATQIRNHLKNTATNLGNSSQFGSGLVNAEAATR

SEQ ID NO: 66609 - protein, 268 aa, Unidentified
QTVPWGITRVQAPAVHNRGITGSGVRVAILDSGISAHEDLNIRGGASFVPYEPTTADLNGHGTHVAGTVAALNNSIGVIGVAPNAELYAVKVLGANGSGSVSGIAQGLEWAATNNMHIANMSLGSDFPSSTLERAVNYATSRDVLVIAATGNNGSGSVGYPARYANAMAVGATDQNNRRANFSQYGTGIDIVAPGVNVQSTYPGNRYVSMNGTSMATPHVAGAAALVKQRYPSWNATQIRNHLKNTATNLGNSSQFGSGLVNAEAATR

SEQ ID NO: 66610 - protein, 268 aa, Unidentified
QTVPWGITRVQAPAVHNRGITGSGVRVAILDSGISAHSDLNIRGGASFVPGEPTTAMLNGHGTHVAGTVAALNNSIGVIGVAPNAELYAVKVLGANGSGSVSGIAQGLEWAATNNMHIANMSLGSDFPSSTLERAVNYATSRDVLVIAATGNNGSGSVGYPARYANAMAVGATDQNNRRANFSQYGTGIDIVAPGVNVQSTYPGNRYVSMNGTSMATPHVAGAAALVKQRYPSWNATQIRNHLKNTATNLGNSSQFGSGLVNAEAATR

SEQ ID NO: 66611 - protein, 268 aa, Unidentified
QTVPWGITRVQAPAVHNRGITGSGVRVAILDSGISAHEDLNIRGGASFVPGEPTTADLNGHGTHVAGTVAALNNSIGVIGVAPNAELYAVKVLGANGSGSVSGIAQGLEWAATNNMHIANMSLGSDFPSSTLERAVNYATARDVLVIAATGNNGSGSVGYPARYANAMAVGATDQNNRRANFSQYGTGIDIVAPGVNVQSTYPGNRYVSMNGTSMATPHVAGAAALVKQRYPSWNATQIRNHLKNTATNLGNSSQFGSGLVNAEAATR

SEQ ID NO: 66612 - protein, 268 aa, Unidentified
QTVPWGITRVQAPAVHNRGITGSGVRVAILDSGISAHEDLNIRGGASFVPGEPTTADLNGHGTHVAGTVAALNNSIGVIGVAPNAELYAVKVLGANGSGSVSGIAQGLEWAATNNMHIANMSLGSDFPSSTLERAVNYATSRDVLVIAATGNNGSGSVGYPARYANAMAVGATDQNNRRANFSQYGTGIDIVAPGVNVQSTYPGNRYVSMNGTSMATPHVAGAAALVKQRYPSWNATQIRNHLKNTATNLGNSSQFGSGLVDAEAATR

SEQ ID NO: 66613 - protein, 268 aa, Unidentified
QTVPWGITRVQAPAVHNRGITGSGVRVAILDSGISAVSDLNIRGGASFVPGEPTTADLNGHGTHVAGTVAALNNSIGVIGVAPNAELYAVKVLGANGSGSVSGIAQGLEWAATNNMHIANMSLGSDFPSSTLERAVNYATSRDVLVIAATGNNGSGSVGYPARYANAMAVGATDQNNRRANFSQYGTGIDIVAPGVNVQSTYPGNRYVSMNGTSMATPHVAGAAALVKQRYPSWNATQIRNHLKNTATNLGNSSQFGSGLVNAEAATR

SEQ ID NO: 66614 - protein, 268 aa, Unidentified
QTVPWGITRVQAPAVHNRGITGSGVRVAILDSGISAHEDLNIRGGASFVPGEPTTADLNGHGTHVAGTVAALNNSIGVIGVAPNAELYAVKVLGANGSGSVSGIAQGLEWAATNNMHIANMSLGSDFPSSTLERAVNYATSRDVLVIAATGNNGSGSVGYPARYPNAMAVGATDQNNRRANFSQYGTGIDIVAPGVNVQSTYPGNRYVSMNGTSMATPHVAGAAALVKQRYPSWNATQIRNHLKNTATNLGNSSQFGSGLVNAEAATR

SEQ ID NO: 66615 - protein, 268 aa, Unidentified
QTVPWGITRVQAPAVHNRGITGSGVRVAILDSGISAHSDLTIRGGASFVPGEPTTADLNGHGTHVAGTVAALNNSIGVVGVAPSADLYAVKVLGANGSGSVSGIAQGLEWAAANNMHIANMSLGSDAPSSTLERAVNYATSQGVLVIAATGNNGSGTISYPARYANAMAVGATDQNNRRANFSQYGTGIDIVAPGVGVQSTYPGNRYVSMNGTSMATPHVAGAAALVKQRYPSWNATQIRNHLKNTATNLGNSSQFGSGLVNAEAATR

SEQ ID NO: 66616 - protein, 268 aa, Unidentified
QTVPWGITRVQAPAVHNRGITGSGVRVAILDSGISAHSDLNIRGGASFVPGEPTTADLNGHGTHVAGTVAALNNSIGVIGVAPNAELYAVKVLGANGSGSVSGIAQGLEWAATNNMHIANMSLGSDFPSSTLERAVNYATSRDVLVIAATGNNGSGSVGYPARYANAMAVGATDQNNRRANFSQYGTGIDIVAPGVNVQSTYPGNRYVSMNGTSMATPHVAGAAALVKQRYPSWNATQIRNHLKNTLTNLGNSSQFGSGLVNAEAATR

SEQ ID NO: 66617 - protein, 268 aa, Unidentified
QTVPWGVTRVQAPAVHNRGITGSGVRVAILDSGISAHEDLNIRGGASFVPGEPTTADLNGHGTHVAGTVAALNNSIGVIGVAPNAELYAVKVLGANGSGSVSGIAQGLEWAATNNMHIANMSLGSDFPSSTLERAVNYATSRDVLVIAATGNNGSGSVGYPARYANAMAVGATDQNNRRANFSQYGTGIDIVAPGVNVQSTYPGNRYVSMNGTSMATPHVAGAAALVKQRYPSWNATQIRNHLKNTATNLGNSSQFGSGLVNAEAATR

SEQ ID NO: 66618 - protein, 268 aa, Unidentified
QTVPWGISRVQAPAVHNRGITGSGVRVAILDSGIAAHEDLNVRGGVSFVPGEPTTADLNGHGTHVAGTVAALNNSIGVVGVAPSADLYAVKVLGANGRGSVSGIAQGLEWAAANNMHIANMSLGSDAPSSTLERAVNYATSQDVLVIAATGNNGSGSVGYPARYANAMAVGATDQNNRRASFSQYGAGLDIVAPGVNVQSTYPGNRYVSMNGTSMATPHVAGAAALVKQRYPSWNATQIRNHLKNTATNLGNSSQFGSGLVNAEAATR

SEQ ID NO: 66619 - protein, 268 aa, Unidentified
QTVPWGIERVQAPAVHNRGITGSGVRVAILDSGISAHSDLNIRGGASFVPGEPTTADLNGHGTHVAGTVAALNNSIGVIGVAPNAELYAVKVLGANGSGSVSGIAQGLEWAATNNMHIANMSLGSDRPSSTLERAVNYATSRDVLVIAATGNNGSGSVGYPARYANAMAVGATDQNNRRANFSQYGTGIDIVAPGVNVQSTYPGNRYVSMNGTSMATPHVAGAAALVKQRYPSWNATQIRNHLKNTDTNLGNSSQFGSGLVNAEAATR

SEQ ID NO: 66620 - protein, 268 aa, Unidentified
QTVPWGITRVQAPAVHNRGITGSGVRVAILDSGISAHSDLNIRGGASFVPGEPTTADLNGHGTHVAGTVAALNNSIGVIGGAPNAELYAVKVLGANGSGSVSGIAQGLEWAATNNMHIANMSLGSDFPSSTLERAVNYATSRDVLVIAATGNNGSGSVGYPARYANAMAVGATDQNNRRANFSQYGTGIDIVAPGVNVQSTYPGNRYVSMNGTSMATPHVAGAAALVKQRYPSWNATQIRNHLKNTATNLGNSSQFGSGLVNAEAATR

SEQ ID NO: 66621 - protein, 268 aa, Unidentified
QTVPWGITRVQAPAVHNRGITGSGVRVAILDSGISAHSDLNIRGGASFVPGEPTTADLNGHGTHVAGTVAALNNSIGVIGNAPNAELYAVKVLGANGSGSVSGIAQGLEWAATNNMHIANMSLGSDFPSSTLERAVNYATSRDVLVIAATGNNGSGSVGYPARYANAMAVGATDQNNRRANFSQYGTGIDIVAPGVNVQSTYPGNRYVSMNGTSMATPHVAGAAALVKQRYPSWNATQIRNHLKNTATNLGNSSQFGSGLVNAEAATR

SEQ ID NO: 66622 - protein, 268 aa, Unidentified
QTVPWGITRVQAPAVHNRGITGSGVRVAILDSGISAHSDLNIRGGASFVPGEPTTADLNGHGTHVAGTVAALNNSIGVIGVAPNAELYAVKVLGANGSGSVSGIAQGLEWAATNNMHIANMSLGSDFFSSTLERAVNYATSRDVLVIAATGNNGSGSVGYPARYANAMAVGATDQNNRRANFSQYGTGIDIVAPGVNVQSTYPGNRYVSMNGTSMATPHVAGAAALVKQRYPSWNATQIRNHLKNTATNLGNSSQFGSGLVNAEAATR

SEQ ID NO: 66623 - protein, 268 aa, Unidentified
QTVPWGITRVQAPAVHNRGITGSGVRVAILDSGISAHEDLNLRGGASFVPGEPTTADLNGHGTHVAGTVAALNNSIGVIGVAPNAELYAVKVLGANGSGSVSGIAQGLEWAATNNMHIANMSLGSDFPSSTLERAVNYATSRDVLVIAATGNNGSGSVGYPARYANAMAVGATDQNNRRANFSQYGTGIDIVAPGVNVQSTYPGNRYVSMNGTSMATPHVAGAAALVKQRYPSWNATQIRNHLKNTATNLGNSSQFGSGLVNAEAATR

SEQ ID NO: 66624 - protein, 268 aa, Unidentified
QTVPWGITRVQAPAVHNRGITGSGVRVAILDSGISAHEDLNIYGGASFVPGEPTTADLNGHGTHVAGTVAALNNSIGVIGVAPNAELYAVKVLGANGSGSVSGIAQGLEWAATNNMHIANMSLGSDFPSSTLERAVNYATSRDVLVIAATGNNGSGSVGYPARYANAMAVGATDQNNRRANFSQYGTGIDIVAPGVNVQSTYPGNRYVSMNGTSMATPHVAGAAALVKQRYPSWNATQIRNHLKNTATNLGNSSQFGSGLVNAEAATR

SEQ ID NO: 66625 - protein, 268 aa, Unidentified
QTVPWGITRVQAPAVHNRGITGSGVRVAILDSGISAHEDLNIRGGASFVPGEPTTADLNGHGTHVAGTVAALNNSIGVIGVAPNAELYAVKVLGANGSGSVSGIAQGLEWAATNNMHIANMSLGSDFPSSTLERAVNYATSRDVLVIAATGNNGSGSVGYPARYANAMAVGATDQNNRRANFSQYGTGIDIVAPGVNVQSTYPGNRYVSMNGTSMATPHVAGAAALLKQRYPSWNATQIRNHLKNTATNLGNSSQFGSGLVNAEAATR

SEQ ID NO: 66626 - protein, 268 aa, Unidentified
QTVPWGITRVQAPAVHNRGITGSGVRVAILDSGISAHSDLNIRGGASFVPGEPTTADLNGHGTHVAGTVAALNNSIGVIGVAPNAELYAVKVLGANGSGSVSGIAQGLEWAATNNMHIANMSLGSDFPSSTLERAVNYATSRDVLVIAATGNNGSGSVGYPARYANAMAVGATDQNNRRANFSQYGTGIDIVAPGVNVQSTYPGNRYVSMNGTSMATPHVAGAAALVKQRYPSWNATQIRNHLKNTFTNLGNSSQFGSGLVNAEAATR

SEQ ID NO: 66627 - protein, 268 aa, Unidentified
QTVPWGITRVQAPAVHNRGITGSGVRVAILDSGISAHEDLNIRGGASFVPGEPTTADLNGHGTHVAGTVAALNNSIGVIGVAPNAELYAVKVLGANGSGTVSGIAQGLEWAATNNMHIANMSLGSDFPSSTLERAVNYATSRDVLVIAATGNNGSGSVGYPARYANAMAVGATDQNNRRANFSQYGTGIDIVAPGVNVQSTYPGNRYVSMNGTSMATPHVAGAAALVKQRYPSWNATQIRNHLKNTATNLGNSSQFGSGLVNAEAATR

SEQ ID NO: 66628 - protein, 268 aa, Unidentified
QTVPWGITRVQAPAVHNRGITGSGVRVAILDSGISAHSDLNIRGGASFVPGEPTTADLNGHGTHVAGTVAALNNSIGVIGVAPNAELYAVKVLGANGSGSVSGIAQGLEWAATNNMHIANMSLGSDFPSSTLERAVNYATSRDVLVIAATGNNGSGSVGYPARYANAMAVGATDQNNRRANFSQYGTGIDIVAPGVNVKSTYPGNRYVSMNGTSMATPHVAGAAALVKQRYPSWNATQIRNHLKNTATNLGNSSQFGSGLVNAEAATR

SEQ ID NO: 66629 - protein, 268 aa, Unidentified
QTVPWGITRAQAPAVHNRGITGSGVRVAILDSGISAHEDLNIRGGASFVPGEPTTADLNGHGTHVAGTVAALNNSIGVIGVAPNAELYAVKVLGANGSGSVSGIAQGLEWAATNNMHIANMSLGSDFPSSTLERAVNYATSRDVLVIAATGNNGSGSVGYPARYANAMAVGATDQNNRRANFSQYGTGIDIVAPGVNVQSTYPGNRYVSMNGTSMATPHVAGAAALVKQRYPSWNATQIRNHLKNTATNLGNSSQFGSGLVNAEAATR

SEQ ID NO: 66630 - protein, 268 aa, Unidentified
QTVPWGITRVQAPAVHNRGITGSGVRVAILDSGISAHEDLNIRGGASFVPGEPTTADLNGHGTHVAGTVAALNNSIGVIGVAPNAELYAVKVLGANGSGSMSGIAQGLEWAATNNMHIANMSLGSDFPSSTLERAVNYATSRDVLVIAATGNNGSGSVGYPARYANAMAVGATDQNNRRANFSQYGTGIDIVAPGVNVQSTYPGNRYVSMNGTSMATPHVAGAAALVKQRYPSWNATQIRNHLKNTATNLGNSSQFGSGLVNAEAATR

SEQ ID NO: 66631 - protein, 268 aa, Unidentified
QTVPWGITRVQAPAVHNRGITGSGVRVAILDSGISATSDLNIRGGASFVPGEPTTADLNGHGTHVAGTVAALNNSIGVIGVAPNAELYAVKVLGANGSGSVSGIAQGLEWAATNNMHIANMSLGSDFPSSTLERAVNYATSRDVLVIAATGNNGSGSVGYPARYANAMAVGATDQNNRRANFSQYGTGIDIVAPGVNVQSTYPGNRYVSMNGTSMATPHVAGAAALVKQRYPSWNATQIRNHLKNTATNLGNSSQFGSGLVNAEAATR

SEQ ID NO: 66632 - protein, 268 aa, Unidentified
QTVPWGITRVQAPAVHNRGITGSGVRVAILDSGISAHSDLNIRGGASFVPGEPTTADLNGHGTHVAGTVAALNNSIGVIGVAPNAELYAVKVLGANGSGSVSGIAQGLEWAATNNMHIANMSLGSDFPSSTLERAVNYATSRDVLVIAATGNNGSGSVGYPARYANAMAVGATDQNNRRANFSQYGTGIDIVAPGVNVCSTYPGNRYVSMNGTSMATPHVAGAAALVKQRYPSWNATQIRNHLKNTATNLGNSSQFGSGLVNAEAATR

SEQ ID NO: 66633 - protein, 268 aa, Unidentified
QTVPWGITRVQAPAVHNRGITGSGVRVAILDSGISAHSDLNIRGGASFVPGEPTTADLNGHGTHVAGTVAALNNSIGVIGVAPNAELYAVKVLGANGSGSVSGIAQGLEWAATNNMHIANMSLGSDFLSSTLERAVNYATSRDVLVIAATGNNGSGSVGYPARYANAMAVGATDQNNRRANFSQYGTGIDIVAPGVNVQSTYPGNRYVSMNGTSMATPHVAGAAALVKQRYPSWNATQIRNHLKNTATNLGNSSQFGSGLVNAEAATR

SEQ ID NO: 66634 - protein, 268 aa, Unidentified
QTVPWGITRVQAPAVHNRGITGSGVRVAILDSGISAHEDLNIRGGASFVPGEPTTADLNGHGTHVAGTVAALNNSIGVIGVAPNAELYAVKVLGANGSGSVSGIAQGLEWAATNNMHIANMSLGSDFPSSTLERAVNYATSRDVLVIAATGNNGSGSVGYPARYANAMAVGATDQNNRRANFSQYGTGIDIVAPGVNVQSTYPGNRYVFMNGTSMATPHVAGAAALVKQRYPSWNATQIRNHLKNTATNLGNSSQFGSGLVNAEAATR

SEQ ID NO: 66635 - protein, 268 aa, Unidentified
QTVPWGITRVQAPAVHNRGITGSGVRVAILDSGISAHEDLNIRGGASFVPGEPTTADLNGHGTHVAGTVAALNNSIGVIGVAPNAELYAVKVLGANGRGSVSGIAQGLEWAATNNMHIANMSLGAEGPSSTLERAVNYATSRDVLVIAATGNNGSGSVGYPARYANAMAVGATDQNNRRANFSQYGTGIDIVAPGVNVQSTYPGNRYVSLNGTSMATPHVAGAAALVKQRYPSWNATQIRNHLKNTATNLGNSSQFGSGLVNAEAATR

SEQ ID NO: 66636 - protein, 268 aa, Unidentified
QTVPWGITRVQAPAVHNRGITGSGVRVAILDSGISAHEDLNIRGGASFVPGEPTTADLNGHGTHVAGTVAALNNSIGVIGVAPNAELYAVKVLGANGSGSVSGIAQGLEWAATNNMHIANMSLGSDFPSSTLERAVNYATSRDVLVIAATGNNGSGSVGYPARYANAMAVGATDQNNRRANFSQYGTGIDIVAPGVNVDSTYPGNRYVSMNGTSMATPHVAGAAALVKQRYPSWNATQIRNHLKNTATNLGNSSQFGSGLVNAEAATR

SEQ ID NO: 66637 - protein, 268 aa, Unidentified
QTVPWGITRVQAPAVHNRGITGSGVRVAILDSGISAHSDLNIRGGASFVPGEPTTADLNGHGTHVAGTVAALNNSIGVIGVAPNAKLYAVKVLGANGSGSVSGIAQGLEWAATNNMHIANMSLGSDFPSSTLERAVNYATSRDVLVIAATGNNGSGSVGYPARYANAMAVGATDQNNRRANFSQYGTGIDIVAPGVNVQSTYPGNRYVSMNGTSMATPHVAGAAALVKQRYPSWNATQIRNHLKNTATNLGNSSQFGSGLVNAEAATR

SEQ ID NO: 66638 - protein, 268 aa, Unidentified
QTVPWGITRVQAPAVHNRGITGSGVRVAILDSGISAHEDLNIRGGASFVPGEPTTADLNGHGTHVAGTVAALNNSIGVIGVAPNAELYAVKVLGANGSGSVSGIAQGLEWAATNNMHIANMSLGSDFPSSTLERAVNYATSRDVLVIAATGNNGSGSVGYPARYANAMAVGATDQNNRRANFSQYGTGIDIVAPGVNVQSTYPGNRYVSMAGTSMATPHVAGAAALVKQRYPSWNATQIRNHLKNTATNLGNSSQFGSGLVNAEAATR

SEQ ID NO: 66639 - protein, 268 aa, Unidentified
QTVPWGITRVQAPAVHNRGITGSGVRVAILDSGISAHEDLNIRGGASFVPGEPTTADLNGHGTHVAGTVAALNNSIGVIGVAPNAELYAVKVLGANGSGSVSGIAQGLEWAATNNMHIANMSLGSDFPSSTLERAVNYATSRDVLVIAATGNNGSGSVGYPARYANAMAVGATDQNNRRANFSQYGTGIDIVAPGVNVQSTYPGNRYVSMNGTSMATPHVAGAAALVKQRYPSWNATQIRSHLKNTATNLGNSSQFGSGLVNAEAATR

SEQ ID NO: 66640 - protein, 268 aa, Unidentified
QTVPWGITRVQAPAVHNRGITGSGVRVAILDSGISAHSFLNIRGGASFVPGEPTTADLNGHGTHVAGTVAALNNSIGVIGVAPNAELYAVKVLGANGSGSVSGIAQGLEWAATNNMHIANMSLGSDFPSSTLERAVNYATSRDVLVIAATGNNGSGSVGYPARYANAMAVGATDQNNRRANFSQYGTGIDIVAPGVNVQSTYPGNRYVSMNGTSMATPHVAGAAALVKQRYPSWNATQIRNHLKNTATNLGNSSQFGSGLVNAEAATR

SEQ ID NO: 66641 - protein, 268 aa, Unidentified
QTVPWGITRVQAPAVHNRGITGSGVRVAILDSGISAHSDLNIRGGASFVPGEPTTADLNGHGTHVAGTVAALNNSIGVIGVAPNAELYAVKVLGANGSGSVSGIAQGLEWAATNNMHIANMSLGSDFMSSTLERAVNYATSRDVLVIAATGNNGSGSVGYPARYANAMAVGATDQNNRRANFSQYGTGIDIVAPGVNVQSTYPGNRYVSMNGTSMATPHVAGAAALVKQRYPSWNATQIRNHLKNTATNLGNSSQFGSGLVNAEAATR

SEQ ID NO: 66642 - protein, 268 aa, Unidentified
QTVPWGITRVQAPAVHNRGITGSGVRVAILDSGISAHSKLNIRGGASFVPGEPTTADLNGHGTHVAGTVAALNNSIGVIGVAPNAELYAVKVLGANGSGSVSGIAQGLEWAATNNMHIANMSLGSDFPSSTLERAVNYATSRDVLVIAATGNNGSGSVGYPARYANAMAVGATDQNNRRANFSQYGTGIDIVAPGVNVQSTYPGNRYVSMNGTSMATPHVAGAAALVKQRYPSWNATQIRNHLKNTATNLGNSSQFGSGLVNAEAATR

SEQ ID NO: 66643 - protein, 268 aa, Unidentified
QQVPWGITRVQAPAVHNRGITGSGVRVAILDSGISAHEDLNIRGGASFVPGEPTTADLNGHGTHVAGTVAALNNSIGVIGVAPNAELYAVKVLGANGRGSVSGIAQGLEWAATNNMHIANMSLGSDFPSSTLERAVNYATSRDVLVIAATGNNGSGSVGYPARYANAMAVGATDQNNRRANFSQYGTGIDIVAPGVNVQSTYPGNRYVSMNGTSMATPHVAGAAALVKQRYPSWNATQIRNHLKNTATNLGNSSQFGSGLVNAEAATR

SEQ ID NO: 66644 - protein, 268 aa, Unidentified
QTVPWGITRVQAPAVHNRGITGSGVRVAILDSGISAHSDLNIRGGASFVPGEPTTADLNGHGTHVAGTVAALNNSIGVIGVAPNAELKAVKVLGANGSGSVSGIAQGLEWAATNNMHIANMSLGSDFPSSTLERAVNYATSRDVLVIAATGNNGSGSVGYPARYANAMAVGATDQNNRRANFSQYGTGIDIVAPGVNVQSTYPGNRYVSMNGTSMATPHVAGAAALVKQRYPSWNATQIRNHLKNTATNLGNSSQFGSGLVNAEAATR

SEQ ID NO: 66645 - protein, 268 aa, Unidentified
QTVPWGITRVQAPAVHNRGITGSGVRVAILDSGISAHSDLNIRGGASFVPGEPTTADLNGHGTHVAGTVAALNNSIGVIGVAPNAELYAVKVLGANGSGFVSGIAQGLEWAATNNMHIANMSLGSDFPSSTLERAVNYATSRDVLVIAATGNNGSGSVGYPARYANAMAVGATDQNNRRANFSQYGTGIDIVAPGVNVQSTYPGNRYVSMNGTSMATPHVAGAAALVKQRYPSWNATQIRNHLKNTATNLGNSSQFGSGLVNAEAATR

SEQ ID NO: 66646 - protein, 268 aa, Unidentified
QTVPWGITRVQAPAVHNRGITGSGARVAILDSGISAHEDLNIRGGASFVPGEPTTADLNGHGTHVAGTVAALNNSIGVIGVAPNAELYAVKVLGANGSGSVSGIAQGLEWAATNNMHIANMSLGSDFPSSTLERAVNYATSRDVLVIAATGNNGSGSVGYPARYANAMAVGATDQNNRRANFSQYGTGIDIVAPGVNVQSTYPGNRYVSMNGTSMATPHVAGAAALVKQRYPSWNATQIRNHLKNTATNLGNSSQFGSGLVNAEAATR

SEQ ID NO: 66647 - protein, 268 aa, Unidentified
QTVPWGITRVQAPAVHNRGITGSGVRVAILDSGISAHSDLNIRGGASFVPGEPTTADLNGHGTHVAGTVAALNNSIGVIGVAPNAELYAVKVLGANGSGSVSGIAQGLEWAATNNMHIANMSLGSDFPSSTLERAVNYATSRDVLVIAATGNNGSGSVGYPARYANAMAVGATDQNNRRANFSQYGTGIDIVAPGVNVESTYPGNRYVSMNGTSMATPHVAGAAALVKQRYPSWNATQIRNHLKNTATNLGNSSQFGSGLVNAEAATR

SEQ ID NO: 66648 - protein, 268 aa, Unidentified
QTVPWGITRVQAPAVHNRGITGSGVRVAILDSGISAHEDLNIRGGASFVPGEPTTADLNGHGTHVAGTVAALNNSIGVIGVAPNADLYAVKVLGANGSGSVSGIAQGLEWAATNNMHIANMSLGSDFPSSTLERAVNYATSRDVLVIAATGNNGSGSVGYPARYANAMAVGATDQNNRRANFSQYGTGIDIVAPGVNVQSTYPGNRYVSMNGTSMATPHVAGAAALVKQRYPSWNATQIRNHLKNTATNLGNSSQFGSGLVNAEAATR

SEQ ID NO: 66649 - protein, 268 aa, Unidentified
QTVPWGITRVQAPAVHNRGITGSGVRVAILDSGISAHSDLNIRGGASFVPGEPTTADLNGHGTHVAGTVAALNNSIGVIGVAPNAELYAVKVLGANGSGIVSGIAQGLEWAATNNMHIANMSLGSDFPSSTLERAVNYATSRDVLVIAATGNNGSGSVGYPARYANAMAVGATDQNNRRANFSQYGTGIDIVAPGVNVQSTYPGNRYVSMNGTSMATPHVAGAAALVKQRYPSWNATQIRNHLKNTATNLGNSSQFGSGLVNAEAATR

SEQ ID NO: 66650 - protein, 268 aa, Unidentified
QTVPWGITRVQAPAVHNRGITGSGVRVAILDSGISAHSDLNIRGGASFVPGEPTTADLNGHGTHVAGTVAALNNSIGVIGVAPNAELYAVKVLGANGSGVVSGIAQGLEWAATNNMHIANMSLGSDFPSSTLERAVNYATSRDVLVIAATGNNGSGSVGYPARYANAMAVGATDQNNRRANFSQYGTGIDIVAPGVNVQSTYPGNRYVSMNGTSMATPHVAGAAALVKQRYPSWNATQIRNHLKNTATNLGNSSQFGSGLVNAEAATR

SEQ ID NO: 66651 - protein, 268 aa, Unidentified
QTVPWGITRVQAPAVHNRGITGSGVRVAILDSGISAHEDLNIRGGASFVPGEPTTADLNGHGTHVAGTVAALNNSIGVIGVAPNAELYAVKVLGANGSGSVSGIAQGLEWAATNNMHIANMSLGSDFPSSTLERAVNYATSRDVLVIAATGNNGSGSVGYPARYANAMAVGATDQNNRRANFSQYGTGIDIVAPGVNVQSTYPGNRYVSMNGTSMATPHVAGAAALVKQRYPSWNATQIRNHLKSTATNLGNSSQFGSGLVNAEAATR

SEQ ID NO: 66652 - protein, 268 aa, Unidentified
QTVPWGITRVQAPAVHNRGITGSGVRVAILDSGISAHSDLNIRGGASFVPGEPTTADLNGHGTHVAGTVAALNNSIGVIGVAPNAELYAVKVLGANGSGSVSGIAQGLEWAATNNMHIANMSLGSDFPSSTLERAVNYATSRDVLVIAATGNNGSGSVGYPARYANAMAVGATDQNNRRANFSQYGTGIDIVAPGVNVQSTYPGNRYVSMNGTSMATPHVAGAAALVKQRYPSWNATQIRNHLKNTMTNLGNSSQFGSGLVNAEAATR

SEQ ID NO: 66653 - protein, 268 aa, Unidentified
QTVPWGITRVQAPAVHNRGITGSGVRVAILDSGISAHEDLNIRGGASFVPGEPTTADLNGHGTHVAGTVAALNNSIGVIGVAPNAELYAVKVLGANGSGSVSGIAQGLEWAATNNMHIANMSLGSDFPSSTLERAVNYATSRDVLVIAATGNNGSGSVGYPARYANAMAVGATDQNNRRANFSQYGTGIDIVAPGVNVQSTYPGNRYVNMNGTSMATPHVAGAAALVKQRYPSWNATQIRNHLKNTATNLGNSSQFGSGLVNAEAATR

SEQ ID NO: 66654 - protein, 268 aa, Unidentified
QTVPWGITRVQAPAVHNRGITGSGVRVAILDSGISAHEDLNIRGGASFVPGEPTTADLNGHGTHVAGTVAALNNSIGVIGVAPNAELYAVKVLGANGSGSVSGIAQGLEWAATNNMHIANMSLGSDFPSSTLERAVNYATSRDVLVIAATGNNGSGSVGYPARYANAMAVGATDQNNRRANFSQYGTGIDIVAPGVNVQSTYPGNRYVSMNGTSMATPHVAGAAALVKQRYPSWNATQIRNHLKNEATNLGNSSQFGSGLVNAEAATR

SEQ ID NO: 66655 - protein, 268 aa, Unidentified
QTVPWGITRVQAPAVHNRGITGSGVRVAILDSGISAHEDLNIRGGASFVPGEPTTADLNGHGTHVAGTVAALNNSIGVIGVAPNAELYAVKVLGANGSGSVSGIAQGLEWAATNNMHIANMSLGSDFPSSTLERAVNYATSRDVLVIAATGNNGSGSVGYPARYANAMAVGATDQNNRRANFSQYGTGIDIVAPGVNVQSTYPGNRYVSMNGTSMATPHVAGAAALVKQRYPSWNATQIRMHLKNTATNLGNSSQFGSGLVNAEAATR

SEQ ID NO: 66656 - protein, 268 aa, Unidentified
QTVPWGITRVQAPAVHNRGITGSGVRVAILDSGISAHSDLNIRGGASFVPGEPTTADLNGHGTHVAGTVAALNNSIGVIGVAPNAELWAVKVLGANGSGSVSGIAQGLEWAATNNMHIANMSLGSDFPSSTLERAVNYATSRDVLVIAATGNNGSGSVGYPARYANAMAVGATDQNNRRANFSQYGTGIDIVAPGVNVQSTYPGNRYVSMNGTSMATPHVAGAAALVKQRYPSWNATQIRNHLKNTATNLGNSSQFGSGLVNAEAATR

SEQ ID NO: 66657 - protein, 268 aa, Unidentified
QTVPWGITRVEAPAVHNRGITGSGVRVAILDSGISAHEDLNIRGGASFVPGEPTTADLNGHGTHVAGTVAALNNSIGVIGVAPNAELYAVKVLGANGSGSVSGIAQGLEWAATNNMHIANMSLGSDFPSSTLERAVNYATSRDVLVIAATGNNGSGSVGYPARYANAMAVGATDQNNRRANFSQYGTGIDIVAPGVNVQSTYPGNRYVSMNGTSMATPHVAGAAALVKQRYPSWNATQIRNHLKNTATNLGNSSQFGSGLVNAEAATR

SEQ ID NO: 66658 - protein, 268 aa, Unidentified
QTVPWGITRVQAPAVHNRGITGSGVRVAILDSGISAHEDLNIRGGASFVPGEPTTADLNGHGTHVAGTVAALNNSIGVIGVAPNAELYAVKVLGANGSGSVSGIAQGLEWAATNNMHIANMSLGSDFPSSTLERAVNYATSRDVLVIAATGNNGSGSVGYPARYANAMAVGATDQNNRRANFSQYGTGIDIVAPGVNVQSTYPGNRYVGMNGTSMATPHVAGAAALVKQRYPSWNATQIRNHLKNTATNLGNSSQFGSGLVNAEAATR

SEQ ID NO: 66659 - protein, 268 aa, Unidentified
QTVPWGITRVQAPAVHNRGITGSGVRVAILDSGISAHEDLNIRGGASFVPGEPTTADLNGHGTHVAGTVAALNNFIGVIGVAPNAELYAVKVLGANGSGSVSGIAQGLEWAATNNMHIANMSLGSDFPSSTLERAVNYATSRDVLVIAATGNNGSGSVGYPARYANAMAVGATDQNNRRANFSQYGTGIDIVAPGVNVQSTYPGNRYVSMNGTSMATPHVAGAAALVKQRYPSWNATQIRNHLKNTATNLGNSSQFGSGLVNAEAATR

SEQ ID NO: 66660 - protein, 268 aa, Unidentified
QTVPWGITRVQAPAVHNRGITGSGVRVAILDSGISAHEDLNIRGGASFVPGEPTTADLNGHGTHVAGTVAALNNSIGVIGVAPNAELYAVKVLGANGYGSVSGIAQGLEWAATNNMHIANMSLGSDFPSSTLERAVNYATSRDVLVIAATGNNGSGSVGYPARYANAMAVGATDQNNRRANFSQYGTGIDIVAPGVNVQSTYPGNRYVSMNGTSMATPHVAGAAALVKQRYPSWNATQIRNHLKNTATNLGNSSQFGSGLVNAEAATR

SEQ ID NO: 66661 - protein, 268 aa, Unidentified
QTVPWGITRVQAPAVHNRGITGSGVRVAILDSGISAHSDLNIRGGASFVPGEPTTADLNGHGTHVAGTVAALNNSIGVIGVAPNAELYAVKVLGANGSGSVSGIAQGLEWAATNNMHIANMSLGSDFPSSTLERAVNYATSRDVLVIAATGNNGSGSVGYPARYANAMAVGATDQNNRRANFSQYGTGIDIVAPGVNVQSTYPGNRYVSMNGTSMATPHVAGAAALVKQRYPSWNATQIRDHLKNTATNLGNSSQFGSGLVNAEAATR

SEQ ID NO: 66662 - protein, 268 aa, Unidentified
QTVPWGITRVQAPAVHNRGITGSGVRVAILDSGISAHEDLNIRGGASFVPGEATTADLNGHGTHVAGTVAALNNSIGVIGVAPNAELYAVKVLGANGSGSVSGIAQGLEWAATNNMHIANMSLGSDFPSSTLERAVNYATSRDVLVIAATGNNGSGSVGYPARYANAMAVGATDQNNRRANFSQYGTGIDIVAPGVNVQSTYPGNRYVSMNGTSMATPHVAGAAALVKQRYPSWNATQIRNHLKNTATNLGNSSQFGSGLVNAEAATR

SEQ ID NO: 66663 - protein, 268 aa, Unidentified
QTVPWGITRVQAPAVHNRGITGSGVRVAILDSGISAHSDLNIRGGASFVPGEPTTADLNGHGTHVAGTVAALNNSIGVIGVAPNAELYAVKVLGANGSGSVSGIAQGLEWAATNNMHIANMSLGSDFPSSTLERAVNYATSRDVLVIAATGNNGSGSVGYPARYANAMAVGATDQNNRRANFSQYGTGIDIVAPGVNVQSTYPGNRYVSMNGTSMATPHVAGAAALVKQRYPSWNATQIRNHLKNTWTNLGNSSQFGSGLVNAEAATR

SEQ ID NO: 66664 - protein, 268 aa, Unidentified
QTVPWGITRVQAPAVHNRGITGSGVRVAILDSGISAHEDLNIRGGASFVPGEPTTADLNGHGTHVAGTVAALNNSIGVIGVAPNAELYAVKVLGANGSGSVSGIAQGLEWAATNNMHIANMSLGSDFPSSTLERAVNYATSRDVLVIAATGNNGSGSVGYPARYANAMAVGATDQNNRRANFSQYGTGIDIVAPGVNVQSTYPGNRYVSMNGTSMATPHVAGAAALVKQRYPSWNATQIRNHLKLTATNLGNSSQFGSGLVNAEAATR

SEQ ID NO: 66665 - protein, 268 aa, Unidentified
QTVPWGITRVQAPAVHNRGITGSGVRVAILDSGISAHEDLNIRGGASFVPGEPTKADLNGHGTHVAGTVAALNNSIGVIGVAPNAELYAVKVLGANGSGSVSGIAQGLEWAATNNMHIANMSLGSDFPSSTLERAVNYATSRDVLVIAATGNNGSGSVGYPARYANAMAVGATDQNNRRANFSQYGTGIDIVAPGVNVQSTYPGNRYVSMNGTSMATPHVAGAAALVKQRYPSWNATQIRNHLKNTATNLGNSSQFGSGLVNAEAATR

SEQ ID NO: 66666 - protein, 268 aa, Unidentified
QTVPWGITRVQAPAVHNRGITGSGVRVAILDSGISAHEDLNIRGGASFVPGEPTTADLNGHGTHVAGTVAALNNSIGVIGVAPNAELYAVKVLGANGSGSVSGIAQGLEWAATNNMHIANMSLGSDFPSSTLERAVNYATSRDVLVIAATGNNGSGSVGYPARYANAMAVGATDQNNRRANFSQYGTGIDIVAPGVNVQSTYPGNRYVSMNGTSMATPHVAGAAALVKQRYPTWNATQIRNHLKNTATNLGNSSQFGSGLVNAEAATR

SEQ ID NO: 66667 - protein, 268 aa, Unidentified
QTVPWGITRVQAPAVHNRGITGSGVRVAILDSGISAHEDLNIRGGASFVPAEPTTADLNGHGTHVAGTVAALNNSIGVIGVAPNAELYAVKVLGANGSGSVSGIAQGLEWAATNNMHIANMSLGSDFPSSTLERAVNYATSRDVLVIAATGNNGSGSVGYPARYANAMAVGATDQNNRRANFSQYGTGIDIVAPGVNVQSTYPGNRYVSMNGTSMATPHVAGAAALVKQRYPSWNATQIRNHLKNTATNLGNSSQFGSGLVNAEAATR

SEQ ID NO: 66668 - protein, 268 aa, Unidentified
QTVPWGITRVSAPAVHNRGITGSGVRVAILDSGISAHEDLNIRGGASFVPGEPTTADLNGHGTHVAGTVAALNNSIGVIGVAPNAELYAVKVLGANGSGSVSGIAQGLEWAATNNMHIANMSLGSDFPSSTLERAVNYATSRDVLVIAATGNNGSGSVGYPARYANAMAVGATDQNNRRANFSQYGTGIDIVAPGVNVQSTYPGNRYVSMNGTSMATPHVAGAAALVKQRYPSWNATQIRNHLKNTATNLGNSSQFGSGLVNAEAATR

SEQ ID NO: 66669 - protein, 268 aa, Unidentified
QQVPWGIERVQAPAVHNRGITGSGVRVAILDSGISAHSDLNIRGGASFVPGEPTTADLNGHGTHVAGTVAALNNDIGVIGVAPNAELYAVKVLGANGSGSVSGIAQGLEWAATNNMHIANMSLGSDFPSSTLERAVNYATSRDVLVIAATGNNGSGSVGYPARYANAMAVGATDQNNRRANFSQYGTGIDIVAPGVNVQSTYPGNRYVSMNGTSMATPHVAGAAALVKQRYPSWNATQIRNHLKNTATNLGNSSQFGSGLVNAEAATR

SEQ ID NO: 66670 - protein, 268 aa, Unidentified
QTVPWGITRVQAPAVHNRGITGSGVRVAILDSGISAHSDLNIRGGASFVPGEPTTADLNGHGTHVAGTVAALNNSIGVIGVAPNAELYAVKVLGANGSGSVSGIAQGLEWAATNNMHIANMSLGSDFPSSTLERAVNYATSRDVLVIAATGNNGSGSVGYPARYANAMAVGATDQNNRRANFSQYGTGIDIVAPGVNVLSTYPGNRYVSMNGTSMATPHVAGAAALVKQRYPSWNATQIRNHLKNTATNLGNSSQFGSGLVNAEAATR

SEQ ID NO: 66671 - protein, 268 aa, Unidentified
QTVPWGITRVQAPAVHNRGITGQGVRVAILDSGISAHSDLNIRGGASFVPGEPTTADLNGHGTHVAGTVAALNNSIGVIGVAPNAELYAVKVLGANGSGSVSGIAQGLEWAATNNMHIANMSLGSDQPSSTLERAVNYATSRDVLVIAATGNNGSGSVGYPARYANAMAVGATDQNNRRANFSQYGTGIDIVAPGVNVQSTYPGNRYVSMNGTSMATPHVAGAAALVKQRYPSWNATQIRNHLKNTATNLGNSSQFGSGLVNAEAATR

SEQ ID NO: 66672 - protein, 268 aa, Unidentified
QTVPWGITRVQAPAVHNRGITGSGVRVAILDSGISAHSDLNIRGGASFVPGEPTTADLNGHGTHVAGTVAALNNSIGVIGAAPNAELYAVKVLGANGSGSVSGIAQGLEWAATNNMHIANMSLGSDFPSSTLERAVNYATSRDVLVIAATGNNGSGSVGYPARYANAMAVGATDQNNRRANFSQYGTGIDIVAPGVNVQSTYPGNRYVSMNGTSMATPHVAGAAALVKQRYPSWNATQIRNHLKNTATNLGNSSQFGSGLVNAEAATR

SEQ ID NO: 66673 - protein, 268 aa, Unidentified
QTVPWGITRVQAPAVHNRGITGSGVRVAILDSGISAHSDLNIRGGASFVPGEPTTAILNGHGTHVAGTVAALNNSIGVIGVAPNAELYAVKVLGANGSGSVSGIAQGLEWAATNNMHIANMSLGSDFPSSTLERAVNYATSRDVLVIAATGNNGSGSVGYPARYANAMAVGATDQNNRRANFSQYGTGIDIVAPGVNVQSTYPGNRYVSMNGTSMATPHVAGAAALVKQRYPSWNATQIRNHLKNTATNLGNSSQFGSGLVNAEAATR

SEQ ID NO: 66674 - protein, 268 aa, Unidentified
QTVPWGITRVQAPAVHNRGITGSGVRVAILDSGISAHSDLNIRGGASFVPGEPTTADLNGHGTHVAGTVAALNNSIGVIGVAPNAELYAVKVLGANGSGSVSGIAQGLEWAATNNMHIANMSLGSDFPSSTLERAVNYATSRDVLVIAATGNNGSGSVGYPARYANAMAVGATDENNRRANFSQYGTGIDIVAPGVNVQSTYPGNRYVSMNGTSMATPHVAGAAALVKQRYPSWNATQIRNHLKNTATNLGNSSQFGSGLVNAEAATR

SEQ ID NO: 66675 - protein, 268 aa, Unidentified
QTVPWGITRVQAPAVHNRGITGSGVRVAILDSGISAHEDLNIRGGASFVPGEPTTADLNGHGTHVAGTVAALNNSIGVIGVAPNAELYAVKVLGANGSGSVSGIAQGLEWAATNNMHIANMSLGSDFPSSTLERAVNYATSRDVLVIAATGNNGSNSVGYPARYANAMAVGATDQNNRRANFSQYGTGIDIVAPGVNVQSTYPGNRYVSMNGTSMATPHVAGAAALVKQRYPSWNATQIRNHLKNTATNLGNSSQFGSGLVNAEAATR

SEQ ID NO: 66676 - protein, 268 aa, Unidentified
QTVPWGITRVQAPQVHNRGITGSGVRVAILDSGISAHEDLNIRGGASFVPGEPTTADLNGHGTHVAGTVAALNNSIGVIGVAPNAELYAVKVLGANGSGSVSGIAQGLEWAATNNMHIANMSLGSDFPSSTLERAVNYATSRDVLVIAATGNNGSGSVGYPARYANAMAVGATDQNNRRANFSQYGTGIDIVAPGVNVQSTYPGNRYVSMNGTSMATPHVAGAAALVKQRYPSWNATQIRNHLKNTATNLGNSSQFGSGLVNAEAATR

SEQ ID NO: 66677 - protein, 268 aa, Unidentified
QTVPWGITRVQAPAVHNRGITGSGVRVAILDSGISAHEDLCIRGGASFVPGEPTTADLNGHGTHVAGTVAALNNSIGVIGVAPNAELYAVKVLGANGSGSVSGIAQGLEWAATNNMHIANMSLGSDFPSSTLERAVNYATSRDVLVIAATGNNGSGSVGYPARYANAMAVGATDQNNRRANFSQYGTGIDIVAPGVNVQSTYPGNRYVSMNGTSMATPHVAGAAALVKQRYPSWNATQIRNHLKNTATNLGNSSQFGSGLVNAEAATR

SEQ ID NO: 66678 - protein, 268 aa, Unidentified
QTVPWGITRVQAPAVHNRGITGSGVRVAILDSGISAHEDLNIRGGASFVPGEPTTADLNGHGTHVAGTVAALNNSIGVIGVAPNAELYAVKVLGANGSGSVSGIAQGLEWAATNNMHIANMSLGSDFPSSTLERAVNYATSRDVLVIAATGNNGSGSVGYPARYANAMAVGATDQNNRRANFSQYGTGIDIVAPGVNVQSTYPGNRYVSMNGTSMATPHVAGAAALVKQRYPSWNATQIRNHLKNTATNLGNSSQFGSGLVNAQAATR

SEQ ID NO: 66679 - protein, 268 aa, Unidentified
QTVPWGITRVQAPAVHNRGITGSGVRVAILDSGISAHEDLNIRGGASFVPGEPTTADLNGHGTHVAGTVAALNNSIGVIGVAPNAELYAVKVLGANGSGSVSGIAQGLEWAATNNMHIANMSLGSDFPSSTLERAVNYATSRDVLVIAATGNNGSGNVGYPARYANAMAVGATDQNNRRANFSQYGTGIDIVAPGVNVQSTYPGNRYVSMNGTSMATPHVAGAAALVKQRYPSWNATQIRNHLKNTATNLGNSSQFGSGLVNAEAATR

SEQ ID NO: 66680 - protein, 268 aa, Unidentified
QTVPWGITRVQAPAVHNRGITGSGVKVAILDSGISTHEDLNIRGGVSFVPGEPTYADLNGHGTHVAGTVAALDNSIGVVGVAPSADLYAVKVLGANGRGSVSGIAQGLEWAAQNNMHVANMSLGSDAPSSTLERAVNYATSRDVLVIAATGNNGSGSVGYPARYANAMAVGATDQNNRRANFSQYGTGIDIVAPGVNVQSTYPGNRYVSMNGTSMATPHVAGAAALVKQRYPSWNATQIRNHLKNTATNLGNSSQFGSGLVNAEAATR

SEQ ID NO: 66681 - protein, 268 aa, Unidentified
QTVPWGITRVQAPAVHNRGITGSGVRVAILDSGISAHSDLNIRGGASFVPGEPTTADLNGHGTHVAGTVAALNNDIGVIGVAPNAELYAVKVLGANGSGSVSGIAQGLEWAATNNMHIANMSLGSDRPSSTLERAVNYATSRDVLVIAATGNNGSGSVGYPARYANAMAVGATDQNNRRANFSQYGTGIDIVAPGVNVQSTYPGNRYVSMNGTSMATPHVAGAAALVKQRYPSWNATQIRNHLKNTATNLGNSSQFGSGLVNAEAATR

SEQ ID NO: 66682 - protein, 268 aa, Unidentified
QVVPWGITRVQAPAVHNRGITGSGVRVAILDSGISAHEDLNIRGGASFVPGEPTTADLNGHGTHVAGTVAALNNSIGVIGVAPNAELYAVKVLGANGRGSVSGIAQGLEWAATNNMHIANMSLGSDFPSSTLERAVNYATSRDVLVIAATGNNGSGSVGYPARYANAMAVGATDQNNRRANFSQYGTGIDIVAPGVNVQSTYPGNRYVSMNGTSMATPHVAGAAALVKQRYPSWNATQIRNHLKNTATNLGNSSQFGSGLVNAEAATR

SEQ ID NO: 66683 - protein, 268 aa, Unidentified
QTVPWGITRVQAPAVHNRGITGSGVRVAILDSGISAHSDLNIRGGASFVPGEPTTADLNGHGTHVAGTVAALNNSIGVIGVAPNAELYAVKVLGANGSGSVSGIAQGLEWAATNNMHIANMSLGSDFPSSTLERAVNYATSRDVLVIAATGNNGSGSVGYPARYANAMAVGATDQNNRRANFSQYGTGIDIVAPGVNVQSTYPGNRYVSMNGTSMATPHVAGAAALVKQRYPSWNATQIRNHLKNTSTNLGNSSQFGSGLVNAEAATR

SEQ ID NO: 66684 - protein, 268 aa, Unidentified
QTVPWGITRVQAPAVHNRGITGSGVRVAILDSGISAHSDLNIRGGADFVPGEPTTADLNGHGTHVAGTVAALNNSIGVIGVAPNAELYAVKVLGANGSGSVSGIAQGLEWAATNNMHIANMSLGSDFPSSTLERAVNYATSRDVLVIAATGNNGSGSVGYPARYANAMAVGATDQNNRRANFSQYGTGIDIVAPGVNVQSTYPGNRYVSMNGTSMATPHVAGAAALVKQRYPSWNATQIRNHLKNTATNLGNSSQFGSGLVNAEAATR

SEQ ID NO: 66685 - protein, 268 aa, Unidentified
QTVPWGITRVQAPAVHNRGITGSGVRVAILDSGIMAHEDLNIRGGASFVPGEPTTADLNGHGTHVAGTVAALNNSIGVIGVAPNAELYAVKVLGANGSGSVSGIAQGLEWAATNNMHIANMSLGSDFPSSTLERAVNYATSRDVLVIAATGNNGSGSVGYPARYANAMAVGATDQNNRRANFSQYGTGIDIVAPGVNVQSTYPGNRYVSMNGTSMATPHVAGAAALVKQRYPSWNATQIRNHLKNTATNLGNSSQFGSGLVNAEAATR

SEQ ID NO: 66686 - protein, 268 aa, Unidentified
QTVPWGITRVQAPAVHNRGITGSGVRVAILDSGISAHSDLNIRGGASFVPGEPTTADLNGHGTHVAGTVAALNNSIGVIGVAPNAELYAVKVLGANGSGSVSGIAQGLEWAATNNMHIANMSLGQDFPSSTLERAVNYATSRDVLVIAATGNNGSGSVGYPARYANAMAVGATDQNNRRANFSQYGTGIDIVAPGVNVQSTYPGNRYVSMNGTSMATPHVAGAAALVKQRYPSWNATQIRNHLKNTATNLGNSSQFGSGLVNAEAATR

SEQ ID NO: 66687 - protein, 268 aa, Unidentified
QTVPWGITRVQAPAVHNRGITGSGVRVAILDSGISAHSDLNIRGGASFVPGEPTTADLNGHGTHVAGTVAALNNDIGVIGVAPNAELYAVKVLGANGSGSVSGIAQGLEWAATNNMHIANMSLGSDFPSSTLERAVNYATSRDVLVIAATGNNGSGSVGYPARYANAMAVGATDQNNRRANFSQYGTGIDIVAPGVNVQSTYPGNRYVSMNGTSMATPHVAGAAALVKQRYPSWNATQIRNHLKNTATNLGNSSQFGSGLVNAEAATR

SEQ ID NO: 66688 - protein, 268 aa, Unidentified
QTVPWGITRVQAPAVHNRGITGSGVRVAILDSGISAHSDLNIRGGASFVPGEPTTAPLNGHGTHVAGTVAALNNSIGVIGVAPNAELYAVKVLGANGSGSVSGIAQGLEWAATNNMHIANMSLGSDFPSSTLERAVNYATSRDVLVIAATGNNGSGSVGYPARYANAMAVGATDQNNRRANFSQYGTGIDIVAPGVNVQSTYPGNRYVSMNGTSMATPHVAGAAALVKQRYPSWNATQIRNHLKNTATNLGNSSQFGSGLVNAEAATR

SEQ ID NO: 66689 - protein, 268 aa, Unidentified
QTVPWGITRVQAPAVHNRGITGSGVRVAILDSGISAHEDLNIRGGASFVPGEPTTADLNGHGTHVAGTVAALNNSIGVIGVAPNAWLYAVKVLGANGSGSVSGIAQGLEWAATNNMHIANMSLGSDFPSSTLERAVNYATSRDVLVIAATGNNGSGSVGYPARYANAMAVGATDQNNRRANFSQYGTGIDIVAPGVNVQSTYPGNRYVSMNGTSMATPHVAGAAALVKQRYPSWNATQIRNHLKNTATNLGNSSQFGSGLVNAEAATR

SEQ ID NO: 66690 - protein, 268 aa, Unidentified
QTVPWGITRVQAPAVHNRGITGSGVRVAILDSGISAHEDLNIRGGASFVPGEPTTADLNGHGTHVAGTVAALNNSIGVIGVAPNAELYAVKVLGANGSGSVSGIAQGLEWAATNNMHIANMSLGSDFPSSTLERAVNYATSRDVLVIAATGNNGSGSVGYPARYANAMAVGATDQNNRRANFSQYGTGIDIVAPGVNVQSTYPGNRYVSMNGTSMATPHVAGAAALVKQRYPSWNATQIRNHLKNTATNLGNSSQFGSGLVNAEAACR

SEQ ID NO: 66691 - protein, 268 aa, Unidentified
QTVPWGITRVQAPAVHNRGITGSGVRVAILDSGISAHEDLNIRGGASFVPGEPTTADLNGHGTHVAGTVAALNNSIGVIGVAPNAELYAVKVLGANGSGSVSGIAQGLEWAATNNMHIANMSLGSDFPSSTLERAVNYATSRDVLVIAATGNNGSGSVGWPARYANAMAVGATDQNNRRANFSQYGTGIDIVAPGVNVQSTYPGNRYVSMNGTSMATPHVAGAAALVKQRYPSWNATQIRNHLKNTATNLGNSSQFGSGLVNAEAATR

SEQ ID NO: 66692 - protein, 268 aa, Unidentified
QTVPWGITRVQAPAVHNRGITGSGVRVAILDSGISAHEDLNIRGGASFVPGEPTTADLNGHGTHVAGTVAALNNSIGVIGVAPNAELYAVKVLGANGGGSVSGIAQGLEWAATNNMHIANMSLGSDFPSSTLERAVNYATSRDVLVIAATGNNGSGSVGYPARYANAMAVGATDQNNRRANFSQYGTGIDIVAPGVNVQSTYPGNRYVSMNGTSMATPHVAGAAALVKQRYPSWNATQIRNHLKNTATNLGNSSQFGSGLVNAEAATR

SEQ ID NO: 66693 - protein, 268 aa, Unidentified
QTVPWGITRVQAPAVHNRGITGSGVRVAILDSGISAHSDLNIRGGASFVPGEPTTADLNGHGTHVAGTVAALNNMIGVIGVAPNAELYAVKVLGANGSGSVSGIAQGLEWAATNNMHIANMSLGSDFPSSTLERAVNYATSRDVLVIAATGNNGSGSVGYPARYANAMAVGATDQNNRRANFSQYGTGIDIVAPGVNVQSTYPGNRYVSMNGTSMATPHVAGAAALVKQRYPSWNATQIRNHLKNTATNLGNSSQFGSGLVNAEAATR

SEQ ID NO: 66694 - protein, 268 aa, Unidentified
QTVPWGITRVQAPAVHNRGITGSGVRVAILDSGISAHSDLNIRGGASFVPGEPTTADLNGHGTHVAGTVAALNNSIGVIGVAPNAELYAVKVLGANGSGSVSGIAQGLEWAATNNMHIANMSLGSDFPSSTLERAVNYATSRDVLVIAATGNNGSGSVGYPARYANAMAVGATDQNNRRANFSQYGTGIDIVAPGVNVQSTYPGNRYVSMNGTSMATPHVAGAAALVKQRYPSWNATQIRNHLKNTETNLGNSSQFGSGLVNAEAATR

SEQ ID NO: 66695 - protein, 268 aa, Unidentified
QTVPWGITRVQAPAVHNRGITGSGVRVAILDSGISAHEDLNIRGGASFVPGEPTTADLNGHGTHVAGTVAALNNSIGVIGVAPNAELYAVKVLGANGSGSVSGIAQGLEWAATNNMHIANMSLGSDFPSSTLERAVNYATSRDVLVIAATGNNGSGSVGYPARYANAMAVGATDQMNRRANFSQYGTGIDIVAPGVNVQSTYPGNRYVSMNGTSMATPHVAGAAALVKQRYPSWNATQIRNHLKNTATNLGNSSQFGSGLVNAEAATR

SEQ ID NO: 66696 - protein, 268 aa, Bacillus gibsonii
QTVPWGITRVQAPAVHNRGITGSGVRVAILDSGISAHSDLNIRGGASFVPGEPTTADLNGHGTHAAGTVAALNNSIGVIGVAPNAELYAVKVLGANGSGSVSGIAQGLEWAATNNMHIANMSLGSDFPSSTLERAVNYATSRDVLVIAATGNNGSGSVGYPARYANAMAVGATDQNNRRANFSQYGTGIDIVAPGVNVQSTYPGNRYVSMNGTSMATPHVAGAAALVKQRYPSWNATQIRNHLKNTATNLGNSSQFGSGLVNAEAATR

SEQ ID NO: 66697 - protein, 268 aa, Unidentified
QQVPWGITRVQAPAVHNRGITGSGVRVAILDSGISAHSDLNIRGGASFVPGEPTTADLNGHGTHVAGTVAALNNSIGVIGVAPNAELYAVKVLGANGSGSVSGIAQGLEWAATNNMHIANMSLGSDFPSSTLERAVNYATSRDVLVIAATGNNGSGSVGYPARYANAMAVGATDQNNRRANFSQYGTGIDIVAPGVNVQSTYPGNRYVSMNGTSMATPHVAGAAALVKQRYPSWNATQIRNHLKNTDTNLGNSSQFGSGLVNAEAATR

SEQ ID NO: 66698 - protein, 268 aa, Unidentified
QTVPWGITRVQAPAVHNRGITGSGVRVAILDSGISAHSDLNIRGGASFVPGEPTTADLNGHGTHVAGTVAALNNSIGVIGQAPNAELYAVKVLGANGSGSVSGIAQGLEWAATNNMHIANMSLGSDFPSSTLERAVNYATSRDVLVIAATGNNGSGSVGYPARYANAMAVGATDQNNRRANFSQYGTGIDIVAPGVNVQSTYPGNRYVSMNGTSMATPHVAGAAALVKQRYPSWNATQIRNHLKNTATNLGNSSQFGSGLVNAEAATR

SEQ ID NO: 66699 - protein, 268 aa, Unidentified
QTVPWGITRVQAPAVHNRGITGSGVRVAILDSGISAHSDLNIRGGASFVPGEPTTADLNGHGTHVAGTVAALNNSIGVIGVAPNAELYAVKVLGANGSGHVSGIAQGLEWAATNNMHIANMSLGSDFPSSTLERAVNYATSRDVLVIAATGNNGSGSVGYPARYANAMAVGATDQNNRRANFSQYGTGIDIVAPGVNVQSTYPGNRYVSMNGTSMATPHVAGAAALVKQRYPSWNATQIRNHLKNTATNLGNSSQFGSGLVNAEAATR

SEQ ID NO: 66700 - protein, 268 aa, Unidentified
QTVPWGITRVQAPAVHNRGITGSGVRVAILDSGISAHEDLNIRGGASFVPGEPTTADLNGHGTHVAGTVAALNNSIGVIGVAPNAELYAVKVLGANGRGSVSGIAQGLEWAATNNMHIANMSLGSDFPSSTLERAVNYATSRDVLVIAATGNNGSGSVGYPARYANAMAVGATDQNNQRANFSQYGTGIDIVAPGVNVQSTYPGNRYVSMNGTSMATPHVAGAAALVKQRYPSWNATQIRNHLKNTATNLGNSSQFGSGLVNAEAATR

SEQ ID NO: 66701 - protein, 268 aa, Unidentified
QTVPWGITRVQAPAVHNRGITGSGVRVAILDSGISAHSDLNIRGGASFVPGEPTTAFLNGHGTHVAGTVAALNNSIGVIGVAPNAELYAVKVLGANGSGSVSGIAQGLEWAATNNMHIANMSLGSDFPSSTLERAVNYATSRDVLVIAATGNNGSGSVGYPARYANAMAVGATDQNNRRANFSQYGTGIDIVAPGVNVQSTYPGNRYVSMNGTSMATPHVAGAAALVKQRYPSWNATQIRNHLKNTATNLGNSSQFGSGLVNAEAATR

SEQ ID NO: 66702 - protein, 268 aa, Unidentified
QTVPWGITRVQAPAVHNRGITGSGVRVAILDSGISAHEDLNIRGGASFVPGEPTTADLNGHGTHVAGTVAALNNSIGVIGVAPNAELYAVKVLGANGSGSVSGIAQGLEWAATNNMHIANMSLGSDFPSSTLERAVNYATSRDVLVIAATGNNGSGSVGYPARYANAMAVGATDQNNRKANFSQYGTGIDIVAPGVNVQSTYPGNRYVSMNGTSMATPHVAGAAALVKQRYPSWNATQIRNHLKNTATNLGNSSQFGSGLVNAEAATR

SEQ ID NO: 66703 - protein, 268 aa, Unidentified
QTVPWGITRVQAPAVHNRGITGSGVRVAILDSGISAHEDLNIRGGASFVPGEPTTADLNGHGTHVAGTVAALNNSIGVIGVAPNAELYAVKVLGANGSGSVSGIAQGLEWAATNNMHIANMSLGSDFPSSTLERAVNYATSRDVLVIAATGNNGSSSVGYPARYANAMAVGATDQNNRRANFSQYGTGIDIVAPGVNVQSTYPGNRYVSMNGTSMATPHVAGAAALVKQRYPSWNATQIRNHLKNTATNLGNSSQFGSGLVNAEAATR

SEQ ID NO: 66704 - protein, 268 aa, Unidentified
QTVPWGITRVQAPAVHNRGITGSGVRVAILDSGISAHEDLNIRGGASFVPGEPTTADLNGHGTHVAGTVAALNNSIGVIGVAPNAELYAVKVLGANGSGSVSGIAQGLEWAATNNMHIANMSLGSDFPSSTLERAVNYATNRDVLVIAATGNNGSGSVGYPARYANAMAVGATDQNNRRANFSQYGTGIDIVAPGVNVQSTYPGNRYVSMNGTSMATPHVAGAAALVKQRYPSWNATQIRNHLKNTATNLGNSSQFGSGLVNAEAATR

SEQ ID NO: 66705 - protein, 268 aa, Unidentified
QTVPWGITRVQAPAVHNRGITGSGVRVAILDSGISAHEDLNIRGGASFVPGEPTTADLNGHGTHVAGTVAALNNSIGVIGVADNAELYAVKVLGANGSGSVSGIAQGLEWAATNNMHIANMSLGSDFPSSTLERAVNYATSRDVLVIAATGNNGSGSVGYPARYANAMAVGATDQNNRRANFSQYGTGIDIVAPGVNVQSTYPGNRYVSMNGTSMATPHVAGAAALVKQRYPSWNATQIRNHLKNTATNLGNSSQFGSGLVNAEAATR

SEQ ID NO: 66706 - protein, 268 aa, Unidentified
QTVPWGITRVQAPAVHNRGITGSGVRVAILDSGISAHEDLNIRGGASFVPGEPTTADLNGHGTHVAGTVAALNNSIGVIGVAPNAELYAVKVLGANGSGSVSGIAQGLEWAATNNMHIANMSLGSDFPSSTLERAVNYATSRDVLVIAATGNNGSGSVGYPARYENAMAVGATDQNNRRANFSQYGTGIDIVAPGVNVQSTYPGNRYVSMNGTSMATPHVAGAAALVKQRYPSWNATQIRNHLKNTATNLGNSSQFGSGLVNAEAATR

SEQ ID NO: 66707 - protein, 268 aa, Unidentified
QTVPWGITRVQAPAVHNRGITGSGVRVAILDSGISAHSDLNIRGGASFVPGEPTTADLNGHGTHVAGTVAALNNSIGVIGVAPNAELYAVKVLGANGSGSVSGIAQGLEWAATNNMHIANMSLGSDFWSSTLERAVNYATSRDVLVIAATGNNGSGSVGYPARYANAMAVGATDQNNRRANFSQYGTGIDIVAPGVNVQSTYPGNRYVSMNGTSMATPHVAGAAALVKQRYPSWNATQIRNHLKNTATNLGNSSQFGSGLVNAEAATR

SEQ ID NO: 66708 - protein, 268 aa, Unidentified
QTVPWGITRVQAPAVHNRGITGSGVRVAILDSGISAHEDLNIRGGASFVPGEPTTADLNGHGTHVAGTVAALNNSIGVIGVAPNAELYAVKVLGANGSGSVSGIAQGLEWAATNNMHIANMSLGSDFPSSTLERAVNYATSRDVLVIAATGNNGSGSVGYPARYANAMAVGATDQNNRRANFSQYGTGIEIVAPGVNVQSTYPGNRYVSMNGTSMATPHVAGAAALVKQRYPSWNATQIRNHLKNTATNLGNSSQFGSGLVNAEAATR

SEQ ID NO: 66709 - protein, 268 aa, Unidentified
QTVPWGITRVQAPAVHNRGITGSGVRVAILDSGISAHSDLNIRGGASFVPGEPTTADLNGHGTHVAGTVAALNNSIGVIGVAPNAELYAVKVLGANGSGEVSGIAQGLEWAATNNMHIANMSLGSDFPSSTLERAVNYATSRDVLVIAATGNNGSGSVGYPARYANAMAVGATDQNNRRANFSQYGTGIDIVAPGVNVQSTYPGNRYVSMNGTSMATPHVAGAAALVKQRYPSWNATQIRNHLKNTATNLGNSSQFGSGLVNAEAATR

SEQ ID NO: 66710 - protein, 268 aa, Unidentified
QTVPWGITRVQAPAVHNRGITGSGVRVAILDSGISAHSSLNIRGGASFVPGEPTTADLNGHGTHVAGTVAALNNSIGVIGVAPNAELYAVKVLGANGSGSVSGIAQGLEWAATNNMHIANMSLGSDFPSSTLERAVNYATSRDVLVIAATGNNGSGSVGYPARYANAMAVGATDQNNRRANFSQYGTGIDIVAPGVNVQSTYPGNRYVSMNGTSMATPHVAGAAALVKQRYPSWNATQIRNHLKNTATNLGNSSQFGSGLVNAEAATR

SEQ ID NO: 66711 - protein, 268 aa, Unidentified
QTVPWGITRVQAPAVHNRGITGSGVRVAILDSGISAHSDLNIRGGASFVPGEPTTADLNGHGTHVAGTVAALNNSIGVIGVAPNAELYAVKVLGANGSGSVSGIAQGLEWAATNNMHIANMSLGFDFPSSTLERAVNYATSRDVLVIAATGNNGSGSVGYPARYANAMAVGATDQNNRRANFSQYGTGIDIVAPGVNVQSTYPGNRYVSMNGTSMATPHVAGAAALVKQRYPSWNATQIRNHLKNTATNLGNSSQFGSGLVNAEAATR

SEQ ID NO: 66712 - protein, 268 aa, Unidentified
QTVPWGITRVQAPAVHNRGITGSGVRVAILDSGISAHEDLNIRGGASFVPGEPTTADLNGHGTHVAGTVAALNNSIGVIGVAPNAELYAVKVLGANGVGSVSGIAQGLEWAATNNMHIANMSLGSDFPSSTLERAVNYATSRDVLVIAATGNNGSGSVGYPARYANAMAVGATDQNNRRANFSQYGTGIDIVAPGVNVQSTYPGNRYVSMNGTSMATPHVAGAAALVKQRYPSWNATQIRNHLKNTATNLGNSSQFGSGLVNAEAATR

SEQ ID NO: 66713 - protein, 268 aa, Unidentified
QTVPWGITRVQAPAVHNEGITGSGVRVAILDSGISAHEDLNIRGGASFVPGEPTTADLNGHGTHVAGTVAALNNSIGVIGVAPNAELYAVKVLGANGSGSVSGIAQGLEWAATNNMHIANMSLGSDFPSSTLERAVNYATSRDVLVIAATGNNGSGSVGYPARYANAMAVGATDQNNRRANFSQYGTGIDIVAPGVNVQSTYPGNRYVSMNGTSMATPHVAGAAALVKQRYPSWNATQIRNHLKNTATNLGNSSQFGSGLVNAEAATR

SEQ ID NO: 66714 - protein, 268 aa, Unidentified
QTVPWGITRVQAPAVHNRGITGSGVRVAILDSGISAHSDLNIRGGASFVPGEPTTADLNGHGTHVAGTVAALNNSIGVIGVAPNAELYAVKVLGANGSGSVSGIAQGLEWAATNNMHIANMSLGSDFNSSTLERAVNYATSRDVLVIAATGNNGSGSVGYPARYANAMAVGATDQNNRRANFSQYGTGIDIVAPGVNVQSTYPGNRYVSMNGTSMATPHVAGAAALVKQRYPSWNATQIRNHLKNTATNLGNSSQFGSGLVNAEAATR

SEQ ID NO: 66715 - protein, 268 aa, Unidentified
QTVPWGITRVQAPAVHNRGITGSGVRVAILDSGISAHSDLNIRGGASFVPGEPTTADLNGHGTHVAGTVAALNNSIGVIGVAPNAELYAVKVLGANGSGSVSGIAQGLEWAATNNMHIANMSLGSDRPSSTLERAVNYATSRDVLVIAATGNNGSGSVGYPARYANAMAVGATDQNNRRANFSQYGTGIDIVAPGVNVQSTYPGNRYVSMNGTSMATPHVAGAAALVKQRYPSWNATQIRNHLKNTDTNLGNSSQFGSGLVNAEAATR

SEQ ID NO: 66716 - protein, 268 aa, Unidentified
QTVPWGITRVQAPAVHNRGITGSGVRVAILDSGISAHSDLNIRGGASFVPGEPTTADLNGHGTHVAGTVAALNNEIGVIGVAPNAELYAVKVLGANGSGSVSGIAQGLEWAATNNMHIANMSLGSDFPSSTLERAVNYATSRDVLVIAATGNNGSGSVGYPARYANAMAVGATDQNNRRANFSQYGTGIDIVAPGVNVQSTYPGNRYVSMNGTSMATPHVAGAAALVKQRYPSWNATQIRNHLKNTATNLGNSSQFGSGLVNAEAATR

SEQ ID NO: 66717 - protein, 268 aa, Unidentified
QTVPWGITRVQAPAVHNRGITGSGVRVAILDSGISAHSDLNIRGGASFVPGEPTTADLNGHGTHVAGTVAALNNSINVIGVAPNAELYAVKVLGANGSGSVSGIAQGLEWAATNNMHIANMSLGSDSPSSTLERAVNYATSRDVLVIAATGNNGSGSVGYPARYQNAMAVGATDQNNRRANFSQYGTGIDIVAPGVNVQSTYPGNRYVSMNGTSMATPHVAGAAALVKQRYPSWNATQIRNHLKNTATNLGNSSQFGSGLVNAEAATR

SEQ ID NO: 66718 - protein, 268 aa, Unidentified
QTVPWGITRVQAPAVHNRGITGSGVRVAILDSGISANSDLNIRGGASFVPGEPTTADLNGHGTHVAGTVAALNNSIGVIGVAPNAELYAVKVLGANGSGSVSGIAQGLEWAATNNMHIANMSLGSDFPSSTLERAVNYATSRDVLVIAATGNNGSGSVGYPARYANAMAVGATDQNNRRANFSQYGTGIDIVAPGVNVQSTYPGNRYVSMNGTSMATPHVAGAAALVKQRYPSWNATQIRNHLKNTATNLGNSSQFGSGLVNAEAATR

SEQ ID NO: 66719 - protein, 268 aa, Unidentified
QTVPWGITRVQAPAVHNRGITGSGVRVAILDSGISAHSDLNIRGGASFVPGEPTTADLNGHGTHVAGTVAALNNSIGVIGVAPNACLYAVKVLGANGSGSVSGIAQGLEWAATNNMHIANMSLGSDFPSSTLERAVNYATSRDVLVIAATGNNGSGSVGYPARYANAMAVGATDQNNRRANFSQYGTGIDIVAPGVNVQSTYPGNRYVSMNGTSMATPHVAGAAALVKQRYPSWNATQIRNHLKNTATNLGNSSQFGSGLVNAEAATR

SEQ ID NO: 66720 - protein, 268 aa, Unidentified
QTVPWGITRVQAPAVHNRGITGSGVRVAILDSGISAHSDLNIRGGASFVPGEPTTADLNGHGTHVAGTVAALNNSIGVIGVAPNAELYAVKVLGANGRGSVSGIAQGLEWAATNNMHIANMSLGSDAPSTTLERAVNYATSRDVLVIAATGNNGSGSVGYPARYANAMAVGATDQNNRRANFSQYGTGIDIVAPGVNVQSTYPGNRYVSMNGTSMATPHVAGAAALVKQRYPSWNATQIRNHLKNTATNLGNSSQFGSGLVNAEAATR

SEQ ID NO: 66721 - protein, 268 aa, Unidentified
QTVPWGITRVQAPAVHNRGITGSGVRVAILDSGISAHEDLNIRGGASFVPGEPTTADLNGHGTHVAGTVAALNNSIGVIGVAPNAELYAVKVLGANGSGSVSGIAQGLEWAATNNMHIANMSLGSDFPSSTLERAVNYATSRDVLVIAATGNNGSGSVGYPASYANAMAVGATDQNNRRANFSQYGTGIDIVAPGVNVQSTYPGNRYVSMNGTSMATPHVAGAAALVKQRYPSWNATQIRNHLKNTATNLGNSSQFGSGLVNAEAATR

SEQ ID NO: 66722 - protein, 268 aa, Unidentified
QTVPWGITRVQAPAVHNRGITGSGVRVAILDSGISAHSDLNIRGGASFVPGEPTTADLNGHGTHVAGTVAALNNSIGVIGVAPNAELYAVKVLGANGGGSVSGIAQGLEWAATNNMHIANMSLGSDFPSSTLERAVNYATSRDVLVIAATGNNGSGSVGYPARYANAMAVGATDQNNRRANFSQYGTGIDIVAPGVNVQSTYPGNRYVSMNGTSMATPHVAGAAALVKQRYPSWNATQIRNHLKNTATNLGNSSQFGSGLVNAEAATR

SEQ ID NO: 66723 - protein, 268 aa, Unidentified
QTVPWGITRVQAPAVHNRGITGSGVRVAILDSGISAHSGLNIRGGASFVPGEPTTADLNGHGTHVAGTVAALNNSIGVIGVAPNAELYAVKVLGANGSGSVSGIAQGLEWAATNNMHIANMSLGSDFPSSTLERAVNYATSRDVLVIAATGNNGSGSVGYPARYANAMAVGATDQNNRRANFSQYGTGIDIVAPGVNVQSTYPGNRYVSMNGTSMATPHVAGAAALVKQRYPSWNATQIRNHLKNTATNLGNSSQFGSGLVNAEAATR

SEQ ID NO: 66724 - protein, 268 aa, Unidentified
QTVPWGITRVQAPAVHNRGITGSGVRVAILDSGISAHEDLNIRGGASFVPGEPTTADLNGHGTHVAGTVAALNNSIGVIGVAPNAELYAVKVLGANGNGSVSGIAQGLEWAATNNMHIANMSLGSDFPSSTLERAVNYATSRDVLVIAATGNNGSGSVGYPARYANAMAVGATDQNNRRANFSQYGTGIDIVAPGVNVQSTYPGNRYVSMNGTSMATPHVAGAAALVKQRYPSWNATQIRNHLKNTATNLGNSSQFGSGLVNAEAATR

SEQ ID NO: 66725 - protein, 268 aa, Unidentified
QTVPWGITRVQAPAVHNRGITGSGVRVAILDSGISAHSDLNIRGGASFVPGEPTTADLNGHGTHVAGTVAALNNSIGVIGVAPNAELYAVKVLGANGSGSVSGIAQGLEWAATNNMHIANMSLGSDFPESTLERAVNYATSRDVLVIAATGNNGSGSVGYPARYANAMAVGATDQNNRRANFSQYGTGIDIVAPGVNVQSTYPGNRYVSMNGTSMATPHVAGAAALVKQRYPSWNATQIRNHLKNTATNLGNSSQFGSGLVNAEAATR

SEQ ID NO: 66726 - protein, 268 aa, Unidentified
QTVPWGITRVQAPAVHNRGITGSGVRVAILDSGISAHSDLNIRGGASFVPGEPTTADLNGHGTHVAGTVAALNNSIGVIGVAPNAELYAVKVLGANGSGSVSGIAQGLEWAATNNMHIANMSLGSDFPTSTLERAVNYATSRDVLVIAATGNNGSGSVGYPARYANAMAVGATDQNNRRANFSQYGTGIDIVAPGVNVQSTYPGNRYVSMNGTSMATPHVAGAAALVKQRYPSWNATQIRNHLKNTATNLGNSSQFGSGLVNAEAATR

SEQ ID NO: 66727 - protein, 268 aa, Unidentified
QTVPWGITRVQAPAVHNRGITGSGVRVAILDSGISAHEDLNIRGGASFVPGEPTTADLNGHGTHVAGTVAALNNSIGVIGVAPNAELYAVKVLGANGSGSVSGIAQGLEWAATNNMHIANMSLGTDFPSSTLERAVNYATSRDVLVIAATGNNGSGSVGYPARYANAMAVGATDQNNRRANFSQYGTGIDIVAPGVNVQSTYPGNRYVSMNGTSMATPHVAGAAALVKQRYPSWNATQIRNHLKNTATNLGNSSQFGSGLVNAEAATR

SEQ ID NO: 66728 - protein, 268 aa, Unidentified
QTVPWGITRVQAPAVHNRGITGSGVRVAILDSGISAHEDLNIRGGASFVPGEPTTADLNGHGTHVAGTVAALNNSIGVIGVAPNAELYAVKVLGANGSGSVSGIAQGLEWAATNNMHIANMSLGSDFPSSTLERAVNYATSRDVLVIAATGNNGSGSVGYPARYANAMAVGATDQDNRRANFSQYGTGIDIVAPGVNVQSTYPGNRYVSMNGTSMATPHVAGAAALVKQRYPSWNATQIRNHLKNTATNLGNSSQFGSGLVNAEAATR

SEQ ID NO: 66729 - protein, 268 aa, Unidentified
QTVPWGITRVQAPAVHNRGITGSGVRVAILDSGISAHSDLNIRGGASFVPGEPTTADLNGHGTHVAGTVAALNNSIGVIGVAPNAELYAVKVLGANGSGSVSGIAQGLEWAATNNMHIANMSLGSDFPSSTLERAVNYATSRDVLVIAATGNNGSGSVGYPARYANAMAVGATDQNNRRANFSQYGTGIDIVAPGVNVQSTYPGNRYVSMSGTSMATPHVAGAAALVKQRYPSWNATQIRNHLKNTATNLGNSSQFGSGLVNAEAATR

SEQ ID NO: 66730 - protein, 268 aa, Unidentified
QTVPWGITRVQAPAVHNRGITGSGVRVAILDSGISAHSDLNIRGGASFVPGEPTTADLNGHGTHVAGTVAALNNSIGVIGVAPNAELYAVKVLGANGSGSVSGIAQGLEWAATNNMHIANMSLGSDFDSSTLERAVNYATSRDVLVIAATGNNGSGSVGYPARYANAMAVGATDQNNRRANFSQYGTGIDIVAPGVNVQSTYPGNRYVSMNGTSMATPHVAGAAALVKQRYPSWNATQIRNHLKNTATNLGNSSQFGSGLVNAEAATR

SEQ ID NO: 66731 - protein, 268 aa, Unidentified
QTVPWGITRVQAPAVHNRGITGSGVRVAILDSGISAHSILNIRGGASFVPGEPTTADLNGHGTHVAGTVAALNNSIGVIGVAPNAELYAVKVLGANGSGSVSGIAQGLEWAATNNMHIANMSLGSDFPSSTLERAVNYATSRDVLVIAATGNNGSGSVGYPARYANAMAVGATDQNNRRANFSQYGTGIDIVAPGVNVQSTYPGNRYVSMNGTSMATPHVAGAAALVKQRYPSWNATQIRNHLKNTATNLGNSSQFGSGLVNAEAATR

SEQ ID NO: 66732 - protein, 268 aa, Unidentified
QTVPWGITRVQAPAVHNRGITGSGVRVAILDSGISAHEDLNIRGGASFVPGEPTHADLNGHGTHVAGTVAALNNSIGVIGVAPNAELYAVKVLGANGSGSVSGIAQGLEWAATNNMHIANMSLGSDFPSSTLERAVNYATSRDVLVIAATGNNGSGSVGYPARYANAMAVGATDQNNRRANFSQYGTGIDIVAPGVNVQSTYPGNRYVSMNGTSMATPHVAGAAALVKQRYPSWNATQIRNHLKNTATNLGNSSQFGSGLVNAEAATR

SEQ ID NO: 66733 - protein, 268 aa, Unidentified
QTVPWGITRVQAPAVHNRGITGSGVRVAILDSGISAHEDLNIRGGASFVPGEPTTADLNGHGTHVAGTVAALNNSIGVIGVAPNAELYAVKVLGANGSGSVSGIAQGLEWAATNNMHIANMSLGSDFPSSTLERAVNYATSRDVLVIAATGNNGSGSVGYPARYANAMAVGATDQNNRRANFSQYGTGIDIVAPGVNVQSTYPGNRYVSMNGTSMATPHVAGAAALVKQRYPSWNATQIRNHLKNTARNLGNSSQFGSGLVNAEAATR

SEQ ID NO: 66734 - protein, 268 aa, Unidentified
QTVPWGITRVQAPAVHNRGITGSGVRVAILDSGISAHSDLNIRGGASFVPGEPTTADLNGHGTHVAGTVAALNNSIGVIGVAPNAELYAVKVLGANGSGSVSGIAQGLEWAATNNMHIANMSLGSDFPSSTLERAVNYATSRDVLVIAATGNNGSGSVGYPARYANAMAVGATDQNNRRANFSQYGTGIDIVAPGVNVQSTYPGNRYVSMNGTSMATPHVAGAAALVKQRYPSWNATQIRNHLKNTGTNLGNSSQFGSGLVNAEAATR

SEQ ID NO: 66735 - protein, 268 aa, Unidentified
QTVPWGITRVQAPAVHNRGITGSGVRVAILDSGISAHEDLNIRGGASFVPGEPTTADLNGHGTHVAGTVAALNNSIGVIGVAPNAELYAVKVLGANGSGSVSGIAQGLEWAATNNMHIANMSLGSDFPSSTLERAVNYATSRDVLVIAATGNNGSGMVGYPARYANAMAVGATDQNNRRANFSQYGTGIDIVAPGVNVQSTYPGNRYVSMNGTSMATPHVAGAAALVKQRYPSWNATQIRNHLKNTATNLGNSSQFGSGLVNAEAATR

SEQ ID NO: 66736 - protein, 268 aa, Unidentified
QTVPWGITRVQAPAVHNRGITGSGVRVAILDSGISAHSDLNIRGGASFVPGEPTTADLNGHGTHVAGTVAALNNSIGVIGVAPNAELYAVKVLGANGSGNVSGIAQGLEWAATNNMHIANMSLGSDFPSSTLERAVNYATSRDVLVIAATGNNGSGSVGYPARYANAMAVGATDQNNRRANFSQYGTGIDIVAPGVNVQSTYPGNRYVSMNGTSMATPHVAGAAALVKQRYPSWNATQIRNHLKNTATNLGNSSQFGSGLVNAEAATR

SEQ ID NO: 66737 - protein, 268 aa, Unidentified
QTVPWGITRVQAPAVHNRGITGSGVRVAILDSGISAKSDLNIRGGASFVPGEPTTADLNGHGTHVAGTVAALNNSIGVIGVAPNAELYAVKVLGANGSGSVSGIAQGLEWAATNNMHIANMSLGSDFPSSTLERAVNYATSRDVLVIAATGNNGSGSVGYPARYANAMAVGATDQNNRRANFSQYGTGIDIVAPGVNVQSTYPGNRYVSMNGTSMATPHVAGAAALVKQRYPSWNATQIRNHLKNTATNLGNSSQFGSGLVNAEAATR

SEQ ID NO: 66738 - protein, 268 aa, Unidentified
QTVPWGITRVQAPAVHNRGITGSGVRVAILDSGISAHEDLNIRGGASFVPGEPTTADLNGHGTHVAGTVAALNNSIGVIGVAPNAALYAVKVLGANGSGSVSGIAQGLEWAATNNMHIANMSLGSDFPSSTLERAVNYATSRDVLVIAATGNNGSGSVGYPARYANAMAVGATDQNNRRANFSQYGTGIDIVAPGVNVQSTYPGNRYVSMNGTSMATPHVAGAAALVKQRYPSWNATQIRNHLKNTATNLGNSSQFGSGLVNAEAATR

SEQ ID NO: 66739 - protein, 268 aa, Unidentified
QTVPWGITRVQAPAVHNRGITGSGVRVAILDSGISAHSDLNIRGGASFVPGEPTTADLNGHGTHVAGTVAALNNSIGVIGVAPNAELYAVKVLGANGSGSVSGIAQGLEWAATNNMHIANMSLGSDFPGSTLERAVNYATSRDVLVIAATGNNGSGSVGYPARYANAMAVGATDQNNRRANFSQYGTGIDIVAPGVNVQSTYPGNRYVSMNGTSMATPHVAGAAALVKQRYPSWNATQIRNHLKNTATNLGNSSQFGSGLVNAEAATR

SEQ ID NO: 66740 - protein, 268 aa, Unidentified
QTVPWGITRVQAPAVHNRGITGSGVRVAILDSGISAHEDLNIRGGASFVPGEPTTADLNGHGTHVAGTVAALNNSIGVIGVAPNAELYAVKVLGANGSGSVSGIAQGLEWAATNNMHIANMSLGSDFPSSTLERAVNYATSRDVLVIAATGNNGSGSVGYPARYANAMAVGATDQNNRRANFSQYGTGIDIVAPGVNVQSTYPGNRYVSMNGTSMATPHVAGAAALVKQRYPSWNATQIRVHLKNTATNLGNSSQFGSGLVNAEAATR

SEQ ID NO: 66741 - protein, 268 aa, Unidentified
QTVPWGITRVQAPAVHNRGITGSGVRVAILDSGISAHSDLNIRGGAKFVPGEPTTADLNGHGTHVAGTVAALNNSIGVIGVAPNAELYAVKVLGANGSGSVSGIAQGLEWAATNNMHIANMSLGSDFPSSTLERAVNYATSRDVLVIAATGNNGSGSVGYPARYANAMAVGATDQNNRRANFSQYGTGIDIVAPGVNVQSTYPGNRYVSMNGTSMATPHVAGAAALVKQRYPSWNATQIRNHLKNTATNLGNSSQFGSGLVNAEAATR

SEQ ID NO: 66742 - protein, 268 aa, Unidentified
QTVPWGITRVQAPAVHNRGITGSGVRVAILDSGISAHSDLNIRGGASFVPGEPTTADLNGHGTHVAGTVAALNNSIGVIGVAPNAELIAVKVLGANGSGSVSGIAQGLEWAATNNMHIANMSLGSDFPSSTLERAVNYATSRDVLVIAATGNNGSGSVGYPARYANAMAVGATDQNNRRANFSQYGTGIDIVAPGVNVQSTYPGNRYVSMNGTSMATPHVAGAAALVKQRYPSWNATQIRNHLKNTATNLGNSSQFGSGLVNAEAATR

SEQ ID NO: 66743 - protein, 268 aa, Unidentified
QTVPWGITRVQAPAVHNRGITGSGVRVAILDSGISAHSDLNIRGGASFVPGEPTTADLNGHGTHVAGTVAALNNGIGVIGVAPNAELYAVKVLGANGSGSVSGIAQGLEWAATNNMHIANMSLGSDFPSSTLERAVNYATSRDVLVIAATGNNGSGSVGYPARYANAMAVGATDQNNRRANFSQYGTGIDIVAPGVNVQSTYPGNRYVSMNGTSMATPHVAGAAALVKQRYPSWNATQIRNHLKNTATNLGNSSQFGSGLVNAEAATR

SEQ ID NO: 66744 - protein, 268 aa, Unidentified
QTVPWGITRVQAPAVHNRGITGSGVRVAILDSGISAHEDLNIRGGASFVPGEPTDADLNGHGTHVAGTVAALNNSIGVIGVAPNAELYAVKVLGANGSGSVSGIAQGLEWAATNNMHIANMSLGSDFPSSTLERAVNYATSRDVLVIAATGNNGSGSVGYPARYANAMAVGATDQNNRRANFSQYGTGIDIVAPGVNVQSTYPGNRYVSMNGTSMATPHVAGAAALVKQRYPSWNATQIRNHLKNTATNLGNSSQFGSGLVNAEAATR

SEQ ID NO: 66745 - protein, 268 aa, Unidentified
QTVPWGITRVQAPAVHNRGITGSGVRVAILDSGISAHSDLNIRGGASFVPGEPTTADLNGHGTHVAGTVAALNNSIGVIGVAPNAELYAVKVLGANGSGSESGIAQGLEWAATNNMHIANMSLGSDFPSSTLERAVNYATSRDVLVIAATGNNGSGSVGYPARYANAMAVGATDQNNRRANFSQYGTGIDIVAPGVNVQSTYPGNRYVSMNGTSMATPHVAGAAALVKQRYPSWNATQIRNHLKNTATNLGNSSQFGSGLVNAEAATR

SEQ ID NO: 66746 - protein, 268 aa, Unidentified
QTVPWGITRVQAPAVHNRGITGSGVRVAILDSGISAHSDLNIRGGASFVPGEPTTADLNGHGTHVAGTVAALNNSIGVIGVAPNAELYAVKVLGANGSGSVSGIAQGLEWAATNNMHIANMSLGSDFQSSTLERAVNYATSRDVLVIAATGNNGSGSVGYPARYANAMAVGATDQNNRRANFSQYGTGIDIVAPGVNVQSTYPGNRYVSMNGTSMATPHVAGAAALVKQRYPSWNATQIRNHLKNTATNLGNSSQFGSGLVNAEAATR

SEQ ID NO: 66747 - protein, 268 aa, Unidentified
QTVPWGITRVQAPAVHNRCITGSGVRVAILDSGISAHEDLNIRGGASFVPGEPTTADLNGHGTHVAGTVAALNNSIGVIGVAPNAELYAVKVLGANGSGSVSGIAQGLEWAATNNMHIANMSLGSDFPSSTLERAVNYATSRDVLVIAATGNNGSGSVGYPARYANAMAVGATDQNNRRANFSQYGTGIDIVAPGVNVQSTYPGNRYVSMNGTSMATPHVAGAAALVKQRYPSWNATQIRNHLKNTATNLGNSSQFGSGLVNAEAATR

SEQ ID NO: 66748 - protein, 268 aa, Unidentified
QTVPWGITRVQAPAVHNRGITGSGVRVAILDSGISAHSDLNIRGGASFVPGEPTTADLNGHGTHVAGTVAALNNSIGVIGTAPNAELYAVKVLGANGSGSVSGIAQGLEWAATNNMHIANMSLGSDFPSSTLERAVNYATSRDVLVIAATGNNGSGSVGYPARYANAMAVGATDQNNRRANFSQYGTGIDIVAPGVNVQSTYPGNRYVSMNGTSMATPHVAGAAALVKQRYPSWNATQIRNHLKNTATNLGNSSQFGSGLVNAEAATR

SEQ ID NO: 66749 - protein, 268 aa, Unidentified
QTVPWGITRVQAPAVHNYGITGSGVRVAILDSGISAHEDLNIRGGASFVPGEPTTADLNGHGTHVAGTVAALNNSIGVIGVAPNAELYAVKVLGANGSGSVSGIAQGLEWAATNNMHIANMSLGSDFPSSTLERAVNYATSRDVLVIAATGNNGSGSVGYPARYANAMAVGATDQNNRRANFSQYGTGIDIVAPGVNVQSTYPGNRYVSMNGTSMATPHVAGAAALVKQRYPSWNATQIRNHLKNTATNLGNSSQFGSGLVNAEAATR

SEQ ID NO: 66750 - protein, 268 aa, Unidentified
QTVPWGITRVQAPAVHNRGITGSGVRVAILDSGISAHSDLNIRGGASFVPGEPTTADLNGHGTHVAGTVAALNNSIGVIGVAPNAELYAVKVLGANGSGSVSGIAQGLEWAATNNMHIANMSLGSDFPYSTLERAVNYATSRDVLVIAATGNNGSGSVGYPARYANAMAVGATDQNNRRANFSQYGTGIDIVAPGVNVQSTYPGNRYVSMNGTSMATPHVAGAAALVKQRYPSWNATQIRNHLKNTATNLGNSSQFGSGLVNAEAATR

SEQ ID NO: 66751 - protein, 268 aa, Unidentified
QTVPWGITRVQAPAVHNRGITGSGVRVAILDSGISAHSDLNIRGGASFVPGEPTTADLNGHGTHVAGTVAALNNSIGVIGVAPNAQLYAVKVLGANGSGSVSGIAQGLEWAATNNMHIANMSLGSDFPSSTLERAVNYATSRDVLVIAATGNNGSGSVGYPARYANAMAVGATDQNNRRANFSQYGTGIDIVAPGVNVQSTYPGNRYVSMNGTSMATPHVAGAAALVKQRYPSWNATQIRNHLKNTATNLGNSSQFGSGLVNAEAATR

SEQ ID NO: 66752 - protein, 268 aa, Unidentified
QTVPWGITRVQAPAVHNRGITGSGVRVAILDSGISAHEDLNIRGGASFVPGEPTTADLNGHGTHVAGTVAALNNSIGVIGVAPNAGLYAVKVLGANGSGSVSGIAQGLEWAATNNMHIANMSLGSDFPSSTLERAVNYATSRDVLVIAATGNNGSGSVGYPARYANAMAVGATDQNNRRANFSQYGTGIDIVAPGVNVQSTYPGNRYVSMNGTSMATPHVAGAAALVKQRYPSWNATQIRNHLKNTATNLGNSSQFGSGLVNAEAATR

SEQ ID NO: 66753 - protein, 268 aa, Unidentified
QTVPWGITRVQAPAVHNRGITGSGVRVAILDSGISAHEDLNIRGGASFVPGEPTTADLNGHGTHVAGTVAALNNDIGVIGVAPNAELYAVKVLGANGSGSVSGIAQGLEWAATNNMHIANMSLGSDFPSSTLERAVNYATSRDVLVIAATGNNGSGSVGYPARYANAMAVGATDQNNRRANFSQYGTGIDIVAPGVNVQSTYPGNRYVSMNGTSMATPHVAGAAALVKQRYPSWNATQIRNHLKNTATNLGNSSQFGSGLVNAEAATR

SEQ ID NO: 66754 - protein, 268 aa, Unidentified
QTVPWGITRVQAPAVHNRGITGSGVRVAILDSGISAHEDLNIRGGASFVPGEPTTADLNGHGTHVAGTVAALNNSIGVIGVAPNAELYAVKVLGANGSGSVSGIAQGLEWAATNNMHIANMSLGSDFPSSTLERAVNYATSRDVLVIAATGNNGSGSVGYPARYANAMAVGATDQNNRRANFSQYGTGIDIVAPGVNVQSTYPGNRYVSMNGTSMATPHVAGAAALVKQRYPSWNATQIRNHLKNTALNLGNSSQFGSGLVNAEAATR

SEQ ID NO: 66755 - protein, 268 aa, Unidentified
QTVPWGITRVQAPAVCNRGITGSGVRVAILDSGISAHEDLNIRGGASFVPGEPTTADLNGHGTHVAGTVAALNNSIGVIGVAPNAELYAVKVLGANGSGSVSGIAQGLEWAATNNMHIANMSLGSDFPSSTLERAVNYATSRDVLVIAATGNNGSGSVGYPARYANAMAVGATDQNNRRANFSQYGTGIDIVAPGVNVQSTYPGNRYVSMNGTSMATPHVAGAAALVKQRYPSWNATQIRNHLKNTATNLGNSSQFGSGLVNAEAATR

SEQ ID NO: 66756 - protein, 268 aa, Unidentified
QTVPWGITRVQAPAVHNRGITGSGVRVAILDSGISAHSDLNIRGGAIFVPGEPTTADLNGHGTHVAGTVAALNNSIGVIGVAPNAELYAVKVLGANGSGSVSGIAQGLEWAATNNMHIANMSLGSDFPSSTLERAVNYATSRDVLVIAATGNNGSGSVGYPARYANAMAVGATDQNNRRANFSQYGTGIDIVAPGVNVQSTYPGNRYVSMNGTSMATPHVAGAAALVKQRYPSWNATQIRNHLKNTATNLGNSSQFGSGLVNAEAATR

SEQ ID NO: 66757 - protein, 268 aa, Unidentified
QTVPWGITRVQAPAVHTRGITGSGVRVAILDSGISAHEDLNIRGGASFVPGEPTTADLNGHGTHVAGTVAALNNSIGVIGVAPNAELYAVKVLGANGSGSVSGIAQGLEWAATNNMHIANMSLGSDFPSSTLERAVNYATSRDVLVIAATGNNGSGSVGYPARYANAMAVGATDQNNRRANFSQYGTGIDIVAPGVNVQSTYPGNRYVSMNGTSMATPHVAGAAALVKQRYPSWNATQIRNHLKNTATNLGNSSQFGSGLVNAEAATR

SEQ ID NO: 66758 - protein, 268 aa, Unidentified
QTVPWGITRVQAPAVHNRGITGSGVRVAILDSGISAHSDLNIRGGAGFVPGEPTTADLNGHGTHVAGTVAALNNSIGVIGVAPNAELYAVKVLGANGSGSVSGIAQGLEWAATNNMHIANMSLGSDFPSSTLERAVNYATSRDVLVIAATGNNGSGSVGYPARYANAMAVGATDQNNRRANFSQYGTGIDIVAPGVNVQSTYPGNRYVSMNGTSMATPHVAGAAALVKQRYPSWNATQIRNHLKNTATNLGNSSQFGSGLVNAEAATR

SEQ ID NO: 66759 - protein, 268 aa, Unidentified
QTVPWGITRVQAPAVHNRGITGSMVRVAILDSGISAHEDLNIRGGASFVPGEPTTADLNGHGTHVAGTVAALNNSIGVIGVAPNAELYAVKVLGANGSGSVSGIAQGLEWAATNNMHIANMSLGSDFPSSTLERAVNYATSRDVLVIAATGNNGSGSVGYPARYANAMAVGATDQNNRRANFSQYGTGIDIVAPGVNVQSTYPGNRYVSMNGTSMATPHVAGAAALVKQRYPSWNATQIRNHLKNTATNLGNSSQFGSGLVNAEAATR

SEQ ID NO: 66760 - protein, 268 aa, Unidentified
QTVPWGITRVQAPAVHNRGITGSGVRVAILDSGISAHEDLNIRGGASFVPGECTTADLNGHGTHVAGTVAALNNSIGVIGVAPNAELYAVKVLGANGSGSVSGIAQGLEWAATNNMHIANMSLGSDFPSSTLERAVNYATSRDVLVIAATGNNGSGSVGYPARYANAMAVGATDQNNRRANFSQYGTGIDIVAPGVNVQSTYPGNRYVSMNGTSMATPHVAGAAALVKQRYPSWNATQIRNHLKNTATNLGNSSQFGSGLVNAEAATR

SEQ ID NO: 66761 - protein, 268 aa, Unidentified
QTVPWGITRVQAPAVHNRGITGSGVRVAILDSGISAHSDLNIRGGASFVPGEPTTADLNGHGTHVAGTVAALNNSIGVIGVAPNAELYAVKVLGANGSGSVSGIAQGLEWAATNNMHIANMSLGSDFPRSTLERAVNYATSRDVLVIAATGNNGSGSVGYPARYANAMAVGATDQNNRRANFSQYGTGIDIVAPGVNVQSTYPGNRYVSMNGTSMATPHVAGAAALVKQRYPSWNATQIRNHLKNTATNLGNSSQFGSGLVNAEAATR

SEQ ID NO: 66762 - protein, 268 aa, Unidentified
QTVPWGITRVQAPAVHNRGITGSGVRVAILDSGISAHSDLNIRGGASFVPGEPTTADLNGHGTHVAGTVAALNNSIGVIGVAPNAELYAVKVLGANGSGSVSGIAQGLEWAATNNMHIANMSLGRDFPSSTLERAVNYATSRDVLVIAATGNNGSGSVGYPARYANAMAVGATDQNNRRANFSQYGTGIDIVAPGVNVQSTYPGNRYVSMNGTSMATPHVAGAAALVKQRYPSWNATQIRNHLKNTATNLGNSSQFGSGLVNAEAATR

SEQ ID NO: 66763 - protein, 268 aa, Unidentified
QTVPWGITRVQAPKVHNRGITGSGVRVAILDSGISAHEDLNIRGGASFVPGEPTTADLNGHGTHVAGTVAALNNSIGVIGVAPNAELYAVKVLGANGSGSVSGIAQGLEWAATNNMHIANMSLGSDFPSSTLERAVNYATSRDVLVIAATGNNGSGSVGYPARYANAMAVGATDQNNRRANFSQYGTGIDIVAPGVNVQSTYPGNRYVSMNGTSMATPHVAGAAALVKQRYPSWNATQIRNHLKNTATNLGNSSQFGSGLVNAEAATR

SEQ ID NO: 66764 - protein, 268 aa, Unidentified
QTVPWGITRVQAPAVHNRGITGSGVRVAILDSGISAHEDLNIRGGASFVPGEPTTADLNGHGTHVAGTVAALNNSIGVIGVAPNAELYAVKVLGANGSGSVSGIAQGLEWAATNNMHIANMSLGSDFPSSTLERAVNYATSRDVLVIAATGNNGSGSVGYPARYANAMAVGATDQNNRRANFSQYGTGIDIVAPGVNVQSTYPGNRYVCMNGTSMATPHVAGAAALVKQRYPSWNATQIRNHLKNTATNLGNSSQFGSGLVNAEAATR

SEQ ID NO: 66765 - protein, 268 aa, Unidentified
QTVPWGITRVQAPAVHNRGITGSGVRVAILDSGISAHEDLNIRGGASFVPGEPTTADLNGHGTHVAGTVAALNNSIGVIGVAPNAELYAVKVLGANGSGSVSGIAQGLEWAATNNMHIANMSLGSDFPSSTLERAVNYATSRDVLVIAATGNNGSESVGYPARYANAMAVGATDQNNRRANFSQYGTGIDIVAPGVNVQSTYPGNRYVSMNGTSMATPHVAGAAALVKQRYPSWNATQIRNHLKNTATNLGNSSQFGSGLVNAEAATR

SEQ ID NO: 66766 - protein, 268 aa, Unidentified
QTVPWGITRVQAPAVHNRGITGSGVRVAILDSGISAHEDLEIRGGASFVPGEPTTADLNGHGTHVAGTVAALNNSIGVIGVAPNAELYAVKVLGANGSGSVSGIAQGLEWAATNNMHIANMSLGSDFPSSTLERAVNYATSRDVLVIAATGNNGSGSVGYPARYANAMAVGATDQNNRRANFSQYGTGIDIVAPGVNVQSTYPGNRYVSMNGTSMATPHVAGAAALVKQRYPSWNATQIRNHLKNTATNLGNSSQFGSGLVNAEAATR

SEQ ID NO: 66767 - protein, 268 aa, Unidentified
QTVPWGITRVQAPAVHNRGITGSGVRVAILDSGISAHEDLNIRGGASFVPGEPTTADLNGHGTHVAGTVAALNNSIGVIGVAYNAELYAVKVLGANGSGSVSGIAQGLEWAATNNMHIANMSLGSDFPSSTLERAVNYATSRDVLVIAATGNNGSGSVGYPARYANAMAVGATDQNNRRANFSQYGTGIDIVAPGVNVQSTYPGNRYVSMNGTSMATPHVAGAAALVKQRYPSWNATQIRNHLKNTATNLGNSSQFGSGLVNAEAATR

SEQ ID NO: 66768 - protein, 268 aa, Unidentified
QTVPWGITRVQAPAVHNRGITGSGVRVAILDSGISAHEDLNIRGGASFVPGEPTTADLNGHGTHVAGTVAALNNSIGVIGVAPNAELYAVKVLGANGLGSVSGIAQGLEWAATNNMHIANMSLGSDFPSSTLERAVNYATSRDVLVIAATGNNGSGSVGYPARYANAMAVGATDQNNRRANFSQYGTGIDIVAPGVNVQSTYPGNRYVSMNGTSMATPHVAGAAALVKQRYPSWNATQIRNHLKNTATNLGNSSQFGSGLVNAEAATR

SEQ ID NO: 66769 - protein, 268 aa, Unidentified
QTVPWGITRVQAPAVHNRGITGSGVRVAILDSGISAHEDLNIRGGASFVPGEPTTADLNGHGTHVAGTVAALNNSIGVIGVAPNAELYAVKVLGANGSGSVSGIAQGLEWAATNNMHIANMSLGSDFPSSTLERAVNYATSRDVLVIAATGNNGSGSVGYPARYVNAMAVGATDQNNRRANFSQYGTGIDIVAPGVNVQSTYPGNRYVSMNGTSMATPHVAGAAALVKQRYPSWNATQIRNHLKNTATNLGNSSQFGSGLVNAEAATR

SEQ ID NO: 66770 - protein, 268 aa, Unidentified
QTVPWGITRVQAPAVHNRGVTGSGVRVAILDSGISQHSDLTIRGGASFIPGEPTTADLNGHGTHVAGTVAALNNSIGVIGVAPSADLYAVKVLGANGRGSVSGIAQGLEWAAANNMHIANMSLGADAPSSTLERAVNYATSQGVLVIAATGNNGSGSVGYPARYANAMAVGATDQNNRRANFSQYGTGIDIVAPGVNVQSTYPGNRYASLNGTSMATPHVAGAAALVKQRNPSWNATQIRNHLKNTATNLGNSSQFGSGLVNAEAATR

SEQ ID NO: 66771 - protein, 268 aa, Unidentified
QTVPWGITRVQAPAVHNRGITGSGVRVAILDSGISAHEDLNIRGGASFVPGEMTTADLNGHGTHVAGTVAALNNSIGVIGVAPNAELYAVKVLGANGSGSVSGIAQGLEWAATNNMHIANMSLGSDFPSSTLERAVNYATSRDVLVIAATGNNGSGSVGYPARYANAMAVGATDQNNRRANFSQYGTGIDIVAPGVNVQSTYPGNRYVSMNGTSMATPHVAGAAALVKQRYPSWNATQIRNHLKNTATNLGNSSQFGSGLVNAEAATR

SEQ ID NO: 66772 - protein, 268 aa, Unidentified
QTVPWGITRVCAPAVHNRGITGSGVRVAILDSGISAHEDLNIRGGASFVPGEPTTADLNGHGTHVAGTVAALNNSIGVIGVAPNAELYAVKVLGANGSGSVSGIAQGLEWAATNNMHIANMSLGSDFPSSTLERAVNYATSRDVLVIAATGNNGSGSVGYPARYANAMAVGATDQNNRRANFSQYGTGIDIVAPGVNVQSTYPGNRYVSMNGTSMATPHVAGAAALVKQRYPSWNATQIRNHLKNTATNLGNSSQFGSGLVNAEAATR

SEQ ID NO: 66773 - protein, 268 aa, Unidentified
QTVPWGITRVQAPAVHNRGITGSGVRVAILDSGISAHSDLNIRGGASFVPGEPTTADLNGHGTHVAGTVAALNNSIGVIGVAPNAELYAVKVLGANGSGSVSGIAQGLEWAATNNMHIANMSLGSDFGSSTLERAVNYATSRDVLVIAATGNNGSGSVGYPARYANAMAVGATDQNNRRANFSQYGTGIDIVAPGVNVQSTYPGNRYVSMNGTSMATPHVAGAAALVKQRYPSWNATQIRNHLKNTATNLGNSSQFGSGLVNAEAATR

SEQ ID NO: 66774 - protein, 268 aa, Unidentified
QTVPWGITRVQAPAVHNRGITGSGVRVAILDSGISAHEDLNIRGGASFVPGEVTTADLNGHGTHVAGTVAALNNSIGVIGVAPNAELYAVKVLGANGSGSVSGIAQGLEWAATNNMHIANMSLGSDFPSSTLERAVNYATSRDVLVIAATGNNGSGSVGYPARYANAMAVGATDQNNRRANFSQYGTGIDIVAPGVNVQSTYPGNRYVSMNGTSMATPHVAGAAALVKQRYPSWNATQIRNHLKNTATNLGNSSQFGSGLVNAEAATR

SEQ ID NO: 66775 - protein, 268 aa, Unidentified
QTVPWGITRVQAPAVHNRGITGSGVRVAILDSGISAHSDLNIRGGASFVPGEPTTADLNGHGTHVAGTVAALNNSIGVIGVAPNAELRAVKVLGANGSGSVSGIAQGLEWAATNNMHIANMSLGSDFPSSTLERAVNYATSRDVLVIAATGNNGSGSVGYPARYANAMAVGATDQNNRRANFSQYGTGIDIVAPGVNVQSTYPGNRYVSMNGTSMATPHVAGAAALVKQRYPSWNATQIRNHLKNTATNLGNSSQFGSGLVNAEAATR

SEQ ID NO: 66776 - protein, 268 aa, Unidentified
QTVPWGITRVQAPAVHNRGITGSGVRVAILDSGISAHSDLNIRGGASFVPGEPTTADLNGHGTHVAGTVAALNNSIGVIGVAPNAWLYAVKVLGANGSGSVSGIAQGLEWAATNNMHIANMSLGSDFPSSTLERAVNYATSRDVLVIAATGNNGSGSVGYPARYANAMAVGATDQNNRRANFSQYGTGIDIVAPGVNVQSTYPGNRYVSMNGTSMATPHVAGAAALVKQRYPSWNATQIRNHLKNTATNLGNSSQFGSGLVNAEAATR

SEQ ID NO: 66777 - protein, 268 aa, Unidentified
QTVPWGITRVQAPAVHNRGITGSGVRVAILDSGISAHEDLNIRGGASFVPGEPTTADLNGHGTHVAGTVAALNNSIGVIGVAPNAELYAVKVLGANGSGSVSGIAQGLEWAATNNMHIANMSLGSDFPSSTLERAVNYATSRDVLVIAATGNNGSASVGYPARYANAMAVGATDQNNRRANFSQYGTGIDIVAPGVNVQSTYPGNRYVSMNGTSMATPHVAGAAALVKQRYPSWNATQIRNHLKNTATNLGNSSQFGSGLVNAEAATR

SEQ ID NO: 66778 - protein, 268 aa, Unidentified
QTVPWGITRVQAPAVHNRGITGSGVRVAILDSGISAHEDLNIRGGASFVPGEPTTADLNGHGTHVAGTVAALNNSIGVIGVAPNAELYAVKVLGANGSGSLSGIAQGLEWAATNNMHIANMSLGSDFPSSTLERAVNYATSRDVLVIAATGNNGSGSVGYPARYANAMAVGATDQNNRRANFSQYGTGIDIVAPGVNVQSTYPGNRYVSMNGTSMATPHVAGAAALVKQRYPSWNATQIRNHLKNTATNLGNSSQFGSGLVNAEAATR

SEQ ID NO: 66779 - protein, 268 aa, Unidentified
QTVPWGITRVQAPAVHNRGITGSGVRVAILDSGISAHEDLNIRGGASFVPGEPTTADLNGHGTHVAGTVAALNNSIGVIGVAPNAELYAVKVLGANGSGSVSGIAQGLEWAATNNMHIANMSLGSDFPSSTLERAVNYATSRDVLVIAATGNNGSGSVGYPARYANAMAVGATDQNNRRANFSQYGTGIDIVAPGVNVQSTYPGNRYVQMNGTSMATPHVAGAAALVKQRYPSWNATQIRNHLKNTATNLGNSSQFGSGLVNAEAATR

SEQ ID NO: 66780 - protein, 268 aa, Unidentified
QTVPWGITRVQAPAVHNRGITGSGVRVAILDSGISAHEDLNIRGGASFVPGEPTTADLNGHGTHVAGTVAALNNSIGVIGVAPNAELYAVKVLGANGSGSVSGIAQGLEWAATNNMHIANMSLGSDFPSSTLERAVNYATSRDVLVIAATGNNGSGSVGYPARYANAMAVGATDQNNRRANFSQYGTGIDIVAPGVNVQSTYPGNRYVSMNGTSMATPHVAGAAALVKQRYPMWNATQIRNHLKNTATNLGNSSQFGSGLVNAEAATR

SEQ ID NO: 66781 - protein, 268 aa, Unidentified
QTVPWGITRVQAPAVHNRGITGSGVRVAILDSGISAHEDLNIRGGASFVPGEPTTADLNGHGTHVAGTVAALNNSIGVIGVAPNAELYAVKVLGANGMGSVSGIAQGLEWAATNNMHIANMSLGSDFPSSTLERAVNYATSRDVLVIAATGNNGSGSVGYPARYANAMAVGATDQNNRRANFSQYGTGIDIVAPGVNVQSTYPGNRYVSMNGTSMATPHVAGAAALVKQRYPSWNATQIRNHLKNTATNLGNSSQFGSGLVNAEAATR

SEQ ID NO: 66782 - protein, 268 aa, Unidentified
QTVPWGITRVQAPAVHNRGITGSGVRVAILDSGISAHEDLNIRGGASFVPGEPTTADLNGHGTHVAGTVAALNNSIGVIGVAPNAELYAVKVLGANGSGSVSGIAQGLEWAATNNMHIANMSLGSDFPSSTLERAVNYATSRDVLVIAATGNNGSGSVGYPARYANAMAVGATDQNNRRANFSQYGTCIDIVAPGVNVQSTYPGNRYVSMNGTSMATPHVAGAAALVKQRYPSWNATQIRNHLKNTATNLGNSSQFGSGLVNAEAATR

SEQ ID NO: 66783 - protein, 268 aa, Unidentified
QTVPWGITRVQAPAVHNRGITGSGVRVAILDSGISAHSDLNIRGGAFFVPGEPTTADLNGHGTHVAGTVAALNNSIGVIGVAPNAELYAVKVLGANGSGSVSGIAQGLEWAATNNMHIANMSLGSDFPSSTLERAVNYATSRDVLVIAATGNNGSGSVGYPARYANAMAVGATDQNNRRANFSQYGTGIDIVAPGVNVQSTYPGNRYVSMNGTSMATPHVAGAAALVKQRYPSWNATQIRNHLKNTATNLGNSSQFGSGLVNAEAATR

SEQ ID NO: 66784 - protein, 268 aa, Unidentified
QTVPWGITRVQAPAVHNRGITGSGVRVAILDSGISAHEDLNIRGGASFVPGEPTTADLNGHGTHVAGTVAALNNSIGVIGVAPNAELYAVKVLGANGSGSVSGIAQGLEWAATNNMHIANMSLGSDFPSSTLERAVNYATSRDVLVIAATGNNGSGSVGYPARYANAMAVGATDQNNRRANFSQYGTGIDIVAPGVNVQSTYPGNRYVSMNGTSMATPHVAGAAALVKQRYPSWNATQIRNHLENTATNLGNSSQFGSGLVNAEAATR

SEQ ID NO: 66785 - protein, 268 aa, Unidentified
QTVPWGITRVQAPAVHNRGITGSGVRVAILDSGISAHEDLNIRGGASFVPGEPTTADLNGHGTHVAGTVAALNNSIGVIGVAPNAELYAVKVLGANGSGSVSGIAQGLEWAATNNMHIANMSLGSDFPSSTLERAVNYATSRDVLVIAATGNNGSGTVGYPARYANAMAVGATDQNNRRANFSQYGTGIDIVAPGVNVQSTYPGNRYVSMNGTSMATPHVAGAAALVKQRYPSWNATQIRNHLKNTATNLGNSSQFGSGLVNAEAATR

SEQ ID NO: 66786 - protein, 268 aa, Unidentified
QTVPWGITRVQAPAVHNRGITGSGVRVAILDSGISAHEDLNIRGGASFVPGEPTTADLNGHGTHVAGTVAALNNSIGVIGVAPNAELYAVKVLGANGRGSVSGIAQGLEWAATNNMHIANMSLGAEGPSSTLERAVNYATSRDVLVIAATGNNGSGSVQYPARYANAMAVGATDQNNQRANFSQYGTGIDIVAPGVNVQSTYPGNRYVSLNGTSMATPHVAGAAALVKQRYPSWNATQIRNHLKNTATNLGPSSQFGSGLVNAEAATR

SEQ ID NO: 66787 - protein, 268 aa, Unidentified
QTVPWGITRVQAPAVHNRGITGSGVRVAILDSGISAHEDLQIRGGASFVPGEPTTADLNGHGTHVAGTVAALNNSIGVIGVAPNAELYAVKVLGANGSGSVSGIAQGLEWAATNNMHIANMSLGSDFPSSTLERAVNYATSRDVLVIAATGNNGSGSVGYPARYANAMAVGATDQNNRRANFSQYGTGIDIVAPGVNVQSTYPGNRYVSMNGTSMATPHVAGAAALVKQRYPSWNATQIRNHLKNTATNLGNSSQFGSGLVNAEAATR

SEQ ID NO: 66788 - protein, 268 aa, Unidentified
QTVPWGITRVQAPAVHNRGITGSGVRVAILDSGISAHSDLNIRGGASFVPGEPTTADLNGHGTHVAGTVAALNNSIGVIGVAPNAELYAVKVLGANGSGSVSGIAQGLEWAATNNMHIANMSLGSDFSSSTLERAVNYATSRDVLVIAATGNNGSGSVGYPARYANAMAVGATDQNNRRANFSQYGTGIDIVAPGVNVQSTYPGNRYVSMNGTSMATPHVAGAAALVKQRYPSWNATQIRNHLKNTATNLGNSSQFGSGLVNAEAATR

SEQ ID NO: 66789 - protein, 268 aa, Unidentified
QTVPWGITRVVAPAVHNRGITGSGVRVAILDSGISAHEDLNIRGGASFVPGEPTTADLNGHGTHVAGTVAALNNSIGVIGVAPNAELYAVKVLGANGSGSVSGIAQGLEWAATNNMHIANMSLGSDFPSSTLERAVNYATSRDVLVIAATGNNGSGSVGYPARYANAMAVGATDQNNRRANFSQYGTGIDIVAPGVNVQSTYPGNRYVSMNGTSMATPHVAGAAALVKQRYPSWNATQIRNHLKNTATNLGNSSQFGSGLVNAEAATR

SEQ ID NO: 66790 - protein, 268 aa, Unidentified
QTVPWGITRVQAPAVHNRGITGSGVRVAILDSGISAHSDLNIRGGACFVPGEPTTADLNGHGTHVAGTVAALNNSIGVIGVAPNAELYAVKVLGANGSGSVSGIAQGLEWAATNNMHIANMSLGSDFPSSTLERAVNYATSRDVLVIAATGNNGSGSVGYPARYANAMAVGATDQNNRRANFSQYGTGIDIVAPGVNVQSTYPGNRYVSMNGTSMATPHVAGAAALVKQRYPSWNATQIRNHLKNTATNLGNSSQFGSGLVNAEAATR

SEQ ID NO: 66791 - protein, 268 aa, Unidentified
QTVPWGITRVQAPAVHNRGITGSGVRVAILDSGISAHSDLNIRGGASFVPGEPTTALLNGHGTHVAGTVAALNNSIGVIGVAPNAELYAVKVLGANGSGSVSGIAQGLEWAATNNMHIANMSLGSDFPSSTLERAVNYATSRDVLVIAATGNNGSGSVGYPARYANAMAVGATDQNNRRANFSQYGTGIDIVAPGVNVQSTYPGNRYVSMNGTSMATPHVAGAAALVKQRYPSWNATQIRNHLKNTATNLGNSSQFGSGLVNAEAATR

SEQ ID NO: 66792 - protein, 268 aa, Unidentified
QTVPWGITRVQAPAVHNRGITGSGVRVAILDSGISAHSDLNIRGGASFVPGEPTTADLNGHGTHVAGTVAALNNSIGVIGVAPNAELYAVKVLGANGSGSVSGIAQGLEWAATNNMHIANMSLGSDFPSSTLERAVNYATSRDVLVIAATGNNGSGSVGYPARYANAMAVGATDQNNRRANFSQYGTGIDIVAPGVNVQSTYPGNRYVSMNGTSMATPHVAGAAALVKQRYPSWNATQIRNHLKNTHTNLGNSSQFGSGLVNAEAATR

SEQ ID NO: 66793 - protein, 268 aa, Unidentified
QTVPWGITRVQAPAVHNRGITGSGVRVAILDSGISAHEDLNIRGGASFVPGEPTTADLNGHGTHVAGTVAALNNSIGVIGVAPNAELYAVKVLGANGSGSVSGIAQGLEWAATNNMHIANMSLGSDFPSSTLERAVNYATSQDVLVIAATGNNGSGSVGYPARYANAMAVGATDQNNRRANFSQYGTGIDIVAPGVNVQSTYPGNRYVSMNGTSMATPHVAGAAALVKQRYPSWNATQIRNHLKNTATNLGNSSQFGSGLVNAEAATR

SEQ ID NO: 66794 - protein, 268 aa, Unidentified
QTVPWGITRVQAPAVHNRGITGSGVRVAILDSGISAHEDLNIRGGASFVPGEPTTADLNGHGTHVAGTVAALNNSIGVIGVAPNAELYAVKVLGANGSGSVSGIAQGLEWAATNNMHIANMSLGSDFPSSTLERAVNYATSRDVLVIAATGNNGSGSVGYPARYANAMAVGATDQNNRRANFSQYGTGIDIVAPGVNVQSTYPGNRYVSMNGTSMATPHVAGAAALVKQRYPSWNATQIRNHLKNTAENLGNSSQFGSGLVNAEAATR

SEQ ID NO: 66795 - protein, 268 aa, Unidentified
QTVPWGITRVQAPAVHNRGITGSGVRVAILDSGISAHEDLNIRGGASFVPGEPTNADLNGHGTHVAGTVAALNNSIGVIGVAPNAELYAVKVLGANGSGSVSGIAQGLEWAATNNMHIANMSLGSDFPSSTLERAVNYATSRDVLVIAATGNNGSGSVGYPARYANAMAVGATDQNNRRANFSQYGTGIDIVAPGVNVQSTYPGNRYVSMNGTSMATPHVAGAAALVKQRYPSWNATQIRNHLKNTATNLGNSSQFGSGLVNAEAATR

SEQ ID NO: 66796 - protein, 268 aa, Unidentified
QTVPWGITRVQAPAVHNRMITGSGVRVAILDSGISAHEDLNIRGGASFVPGEPTTADLNGHGTHVAGTVAALNNSIGVIGVAPNAELYAVKVLGANGSGSVSGIAQGLEWAATNNMHIANMSLGSDFPSSTLERAVNYATSRDVLVIAATGNNGSGSVGYPARYANAMAVGATDQNNRRANFSQYGTGIDIVAPGVNVQSTYPGNRYVSMNGTSMATPHVAGAAALVKQRYPSWNATQIRNHLKNTATNLGNSSQFGSGLVNAEAATR

SEQ ID NO: 66797 - protein, 268 aa, Unidentified
QTVPWGITRVQAPPVHNRGITGSGVRVAILDSGISAHEDLNIRGGASFVPGEPTTADLNGHGTHVAGTVAALNNSIGVIGVAPNAELYAVKVLGANGSGSVSGIAQGLEWAATNNMHIANMSLGSDFPSSTLERAVNYATSRDVLVIAATGNNGSGSVGYPARYANAMAVGATDQNNRRANFSQYGTGIDIVAPGVNVQSTYPGNRYVSMNGTSMATPHVAGAAALVKQRYPSWNATQIRNHLKNTATNLGNSSQFGSGLVNAEAATR

SEQ ID NO: 66798 - protein, 268 aa, Unidentified
QTVPWGITRVQAPAVHNRGITGSGVRVAILDSGISAHEDLNIRGGASFVPGENTTADLNGHGTHVAGTVAALNNSIGVIGVAPNAELYAVKVLGANGSGSVSGIAQGLEWAATNNMHIANMSLGSDFPSSTLERAVNYATSRDVLVIAATGNNGSGSVGYPARYANAMAVGATDQNNRRANFSQYGTGIDIVAPGVNVQSTYPGNRYVSMNGTSMATPHVAGAAALVKQRYPSWNATQIRNHLKNTATNLGNSSQFGSGLVNAEAATR

SEQ ID NO: 66799 - protein, 268 aa, Unidentified
QTVPWGITRVQAPAVHNRGITGSGVRVAILDSGISAHEDLNIRGGASFVPGEPTTADLNGHGTHVAGTVAALNNSIGVIGVAPNAELYAVKVLGANGSGSVSGIAQGLEWAATNNMHIANMSLGSDFPSSTLERAVNYATSRDVLVIAATGNNGSGSVGYPARYANAMAVGATDQENRRANFSQYGTGIDIVAPGVNVQSTYPGNRYVSMNGTSMATPHVAGAAALVKQRYPSWNATQIRNHLKNTATNLGNSSQFGSGLVNAEAATR

SEQ ID NO: 66800 - protein, 268 aa, Unidentified
QTVPWGITRVQAPAVHNRGITGSGVRVAILDSGISAHSLLNIRGGASFVPGEPTTADLNGHGTHVAGTVAALNNSIGVIGVAPNAELYAVKVLGANGSGSVSGIAQGLEWAATNNMHIANMSLGSDFPSSTLERAVNYATSRDVLVIAATGNNGSGSVGYPARYANAMAVGATDQNNRRANFSQYGTGIDIVAPGVNVQSTYPGNRYVSMNGTSMATPHVAGAAALVKQRYPSWNATQIRNHLKNTATNLGNSSQFGSGLVNAEAATR

SEQ ID NO: 66801 - protein, 268 aa, Unidentified
QTVPWGITRVQAPAVHNRGITGSGVRVAILDSGISAHEDLNIRGGASFVPGEPTTADLNGHGTHVAGTVAALNNSIGVIGVAPNAMLYAVKVLGANGSGSVSGIAQGLEWAATNNMHIANMSLGSDFPSSTLERAVNYATSRDVLVIAATGNNGSGSVGYPARYANAMAVGATDQNNRRANFSQYGTGIDIVAPGVNVQSTYPGNRYVSMNGTSMATPHVAGAAALVKQRYPSWNATQIRNHLKNTATNLGNSSQFGSGLVNAEAATR

SEQ ID NO: 66802 - protein, 268 aa, Unidentified
QTVPWGITRVQAPAVHNRGITGSGVRVAILDSGISAHEDLNIRGGMSFVPGEPTTADLNGHGTHVAGTVAALNNSIGVIGVAPNAELYAVKVLGANGSGSVSGIAQGLEWAATNNMHIANMSLGSDFPSSTLERAVNYATSRDVLVIAATGNNGSGSVGYPARYANAMAVGATDQNNRRANFSQYGTGIDIVAPGVNVQSTYPGNRYVSMNGTSMATPHVAGAAALVKQRYPSWNATQIRNHLKNTATNLGNSSQFGSGLVNAEAATR

SEQ ID NO: 66803 - protein, 268 aa, Unidentified
QTVPWGITRVQAPAVHNRGITGSGVRVAILDSGISAHSDLNIRGGASFVPGEPTTADLNGHGTHVAGTVAALNNSIGVIGVAPNAELGAVKVLGANGSGSVSGIAQGLEWAATNNMHIANMSLGSDFPSSTLERAVNYATSRDVLVIAATGNNGSGSVGYPARYANAMAVGATDQNNRRANFSQYGTGIDIVAPGVNVQSTYPGNRYVSMNGTSMATPHVAGAAALVKQRYPSWNATQIRNHLKNTATNLGNSSQFGSGLVNAEAATR

SEQ ID NO: 66804 - protein, 268 aa, Unidentified
QTVPWGITRVQAPAVHNRGITGSGVRVAILDSGISAHSDLNIRGGAHFVPGEPTTADLNGHGTHVAGTVAALNNSIGVIGVAPNAELYAVKVLGANGSGSVSGIAQGLEWAATNNMHIANMSLGSDFPSSTLERAVNYATSRDVLVIAATGNNGSGSVGYPARYANAMAVGATDQNNRRANFSQYGTGIDIVAPGVNVQSTYPGNRYVSMNGTSMATPHVAGAAALVKQRYPSWNATQIRNHLKNTATNLGNSSQFGSGLVNAEAATR

SEQ ID NO: 66805 - protein, 268 aa, Unidentified
QTVPWGITRVQAPAVHNRGITGSGVRVAILDSGISAHSDLNIRGGASFVPGEPTTADLNGHGTHVAGTVAALNNSIGVIGFAPNAELYAVKVLGANGSGSVSGIAQGLEWAATNNMHIANMSLGSDFPSSTLERAVNYATSRDVLVIAATGNNGSGSVGYPARYANAMAVGATDQNNRRANFSQYGTGIDIVAPGVNVQSTYPGNRYVSMNGTSMATPHVAGAAALVKQRYPSWNATQIRNHLKNTATNLGNSSQFGSGLVNAEAATR

SEQ ID NO: 66806 - protein, 268 aa, Unidentified
QTVPWGITRVQAPAVHNRGITGSGVRVAILDSGISAHEDLNIRGGASFVPGEPTTADLNGHGTHVAGTVAALNNSIGVIGVAPNAELYAVKVLGANGSGSVSGIAQGLEWAATNNMHIANMSLGSDFPSSTLERAVNYATSRDVLCIAATGNNGSGSVGYPARYANAMAVGATDQNNRRANFSQYGTGIDIVAPGVNVQSTYPGNRYVSMNGTSMATPHVAGAAALVKQRYPSWNATQIRNHLKNTATNLGNSSQFGSGLVNAEAATR

SEQ ID NO: 66807 - protein, 268 aa, Unidentified
QTVPWGITRVQAPAVHNRGITGSGVRVAILDSGISAHSDLNIRGGASFVPGEPTTAHLNGHGTHVAGTVAALNNSIGVIGVAPNAELYAVKVLGANGSGSVSGIAQGLEWAATNNMHIANMSLGSDFPSSTLERAVNYATSRDVLVIAATGNNGSGSVGYPARYANAMAVGATDQNNRRANFSQYGTGIDIVAPGVNVQSTYPGNRYVSMNGTSMATPHVAGAAALVKQRYPSWNATQIRNHLKNTATNLGNSSQFGSGLVNAEAATR

SEQ ID NO: 66808 - protein, 268 aa, Unidentified
QTVPWGITRVQAPAVHNRGITGSGVRVAILDSGISAHEDLNIRGGASFVPGEPTTADLNGHGTHVAGTVAALNNSIGVIGVAPNAELYAVKVLGANGSGSVSGIAQGLEWAATNNMHIANMSLGSDFPSSTLERAVNYATSRDVLVIAATGNNGSGSVGYPARYANAMAVGATDQNNRRANFSQYGTGIDIVAPGVNVQSTYPGNRYVSMNGTSMATPHVAGAAALVKQRYPSWNATQIRNHLKNTATNLGNSSQFGSGLVNAMAATR

SEQ ID NO: 66809 - protein, 268 aa, Unidentified
QTVPWGITRVQAPAVHNRTITGSGVRVAILDSGISAHEDLNIRGGASFVPGEPTTADLNGHGTHVAGTVAALNNSIGVIGVAPNAELYAVKVLGANGSGSVSGIAQGLEWAATNNMHIANMSLGSDFPSSTLERAVNYATSRDVLVIAATGNNGSGSVGYPARYANAMAVGATDQNNRRANFSQYGTGIDIVAPGVNVQSTYPGNRYVSMNGTSMATPHVAGAAALVKQRYPSWNATQIRNHLKNTATNLGNSSQFGSGLVNAEAATR

SEQ ID NO: 66810 - protein, 268 aa, Unidentified
QTVPWGITRVQAPAVHNRGITGSGVRVAILDSGISAHSDLNIRGGASFVPGEPTTADLNGHGTHVAGTVAALNNCIGVIGVAPNAELYAVKVLGANGSGSVSGIAQGLEWAATNNMHIANMSLGSDFPSSTLERAVNYATSRDVLVIAATGNNGSGSVGYPARYANAMAVGATDQNNRRANFSQYGTGIDIVAPGVNVQSTYPGNRYVSMNGTSMATPHVAGAAALVKQRYPSWNATQIRNHLKNTATNLGNSSQFGSGLVNAEAATR

SEQ ID NO: 66811 - protein, 268 aa, Unidentified
QTVPWGITRVQAPAVHNRGITGSGVRVAILDSGISAHSTLNIRGGASFVPGEPTTADLNGHGTHVAGTVAALNNSIGVIGVAPNAELYAVKVLGANGSGSVSGIAQGLEWAATNNMHIANMSLGSDFPSSTLERAVNYATSRDVLVIAATGNNGSGSVGYPARYANAMAVGATDQNNRRANFSQYGTGIDIVAPGVNVQSTYPGNRYVSMNGTSMATPHVAGAAALVKQRYPSWNATQIRNHLKNTATNLGNSSQFGSGLVNAEAATR

SEQ ID NO: 66812 - protein, 268 aa, Unidentified
QTVPWGITRVQAPAVHNRGITGSGVRVAILDSGISAHEDLNIRGGASFVPGEGTTADLNGHGTHVAGTVAALNNSIGVIGVAPNAELYAVKVLGANGSGSVSGIAQGLEWAATNNMHIANMSLGSDFPSSTLERAVNYATSRDVLVIAATGNNGSGSVGYPARYANAMAVGATDQNNRRANFSQYGTGIDIVAPGVNVQSTYPGNRYVSMNGTSMATPHVAGAAALVKQRYPSWNATQIRNHLKNTATNLGNSSQFGSGLVNAEAATR

SEQ ID NO: 66813 - protein, 268 aa, Unidentified
QTVPWGITRVQAPAVHNRGITGSGVRVAILDSGISTHEDLNVRGGASFVPGEPTTADLNGHGTHVAGTVAALNNSIGVVGVAPSADLYAVKVLGANGRGSVSGIAQGLEWAAQNNMHIANMSLGSDFPSSTLERAVNYATSRDVLVIAATGNNGSGSVGYPARYANAMAVGATDQNNRRANFSQYGTGIDIVAPGVNVQSTYPGNRYVSMNGTSMATPHVAGAAALVKQRYPSWNATQIRNHLKNTATNLGNSSQFGSGLVNAEAATR

SEQ ID NO: 66814 - protein, 268 aa, Unidentified
QTVPWGITRVQAPTVHNRGITGSGVRVAILDSGISAHEDLNIRGGASFVPGEPTTADLNGHGTHVAGTVAALNNSIGVIGVAPNAELYAVKVLGANGSGSVSGIAQGLEWAATNNMHIANMSLGSDFPSSTLERAVNYATSRDVLVIAATGNNGSGSVGYPARYANAMAVGATDQNNRRANFSQYGTGIDIVAPGVNVQSTYPGNRYVSMNGTSMATPHVAGAAALVKQRYPSWNATQIRNHLKNTATNLGNSSQFGSGLVNAEAATR

SEQ ID NO: 66815 - protein, 268 aa, Unidentified
QTVPWGITRVQAPAVHNRGITGSGVRVAILDSGISACSDLNIRGGASFVPGEPTTADLNGHGTHVAGTVAALNNSIGVIGVAPNAELYAVKVLGANGSGSVSGIAQGLEWAATNNMHIANMSLGSDFPSSTLERAVNYATSRDVLVIAATGNNGSGSVGYPARYANAMAVGATDQNNRRANFSQYGTGIDIVAPGVNVQSTYPGNRYVSMNGTSMATPHVAGAAALVKQRYPSWNATQIRNHLKNTATNLGNSSQFGSGLVNAEAATR

SEQ ID NO: 66816 - protein, 268 aa, Unidentified
QTVPWGITRVQAPAVHNRGITGSGVRVAILDSGISAHEDLNIRGGASFVPGEPTQADLNGHGTHVAGTVAALNNSIGVIGVAPNAELYAVKVLGANGSGSVSGIAQGLEWAATNNMHIANMSLGSDFPSSTLERAVNYATSRDVLVIAATGNNGSGSVGYPARYANAMAVGATDQNNRRANFSQYGTGIDIVAPGVNVQSTYPGNRYVSMNGTSMATPHVAGAAALVKQRYPSWNATQIRNHLKNTATNLGNSSQFGSGLVNAEAATR

SEQ ID NO: 66817 - protein, 268 aa, Unidentified
QTVPWGITRVQAPAVHNRGITGSGVRVAILDSGISAHEDLNIRGGASFVPGEPTTADLNGHGTHVAGTVAALNNSIGVIGVAPNAELYAVKVLGANGSGSVSGIAKGLEWAATNNMHIANMSLGSDFPSSTLERAVNYATSRDVLVIAATGNNGSGSVGYPARYANAMAVGATDQNNRRANFSQYGTGIDIVAPGVNVQSTYPGNRYVSMNGTSMATPHVAGAAALVKQRYPSWNATQIRNHLKNTATNLGNSSQFGSGLVNAEAATR

SEQ ID NO: 66818 - protein, 268 aa, Unidentified
QTVPWGITRVQAPAVHNRGITGSGVRVAILDSGISAHSDLNIRGGASFVPGEPTTADLNGHGTHVAGTVAALNNNIGVIGVAPNAELYAVKVLGANGSGSVSGIAQGLEWAATNNMHIANMSLGSDFPSSTLERAVNYATSRDVLVIAATGNNGSGSVGYPARYANAMAVGATDQNNRRANFSQYGTGIDIVAPGVNVQSTYPGNRYVSMNGTSMATPHVAGAAALVKQRYPSWNATQIRNHLKNTATNLGNSSQFGSGLVNAEAATR

SEQ ID NO: 66819 - protein, 268 aa, Unidentified
QTVPWGITRVQAPAVHNRGITGSGVRVAILDSGISAHEDLNIRGGASFVPGEPTTADLNGHGTHVAGTVAALNNLIGVIGVAPNAELYAVKVLGANGSGSVSGIAQGLEWAATNNMHIANMSLGSDFPSSTLERAVNYATSRDVLVIAATGNNGSGSVGYPARYANAMAVGATDQNNRRANFSQYGTGIDIVAPGVNVQSTYPGNRYVSMNGTSMATPHVAGAAALVKQRYPSWNATQIRNHLKNTATNLGNSSQFGSGLVNAEAATR

SEQ ID NO: 66820 - protein, 268 aa, Unidentified
QTVPWGITRVQAPAVHNRGITGSGVRVAILDSGISAHEDLNIRGGASFVPGEPTTADLNGHGTHVAGTVAALNNSIGVIGVAPNAELYAVKVLGANGSGSVSGIAQGLEWAATNNMHIANMSLGSDFPSSTLERAVNYATSRDVLVIAATGNNGSCSVGYPARYANAMAVGATDQNNRRANFSQYGTGIDIVAPGVNVQSTYPGNRYVSMNGTSMATPHVAGAAALVKQRYPSWNATQIRNHLKNTATNLGNSSQFGSGLVNAEAATR

SEQ ID NO: 66821 - protein, 268 aa, Unidentified
QTVPWGITRVQAPAVHNRGITGSGVRVAILDSGISAHEDLNIRGGASFVPGEPTTADLNGHGTHVAGTVAALNNSIGVIGVAPNAELYAVKVLGANGSGSVSGIAQGLEWAATNNMHIANMSLGSDFPSSTLERAVNYATSRDVLVIAATGNNGSGSVGYPARYANAMAVGATDQNNRRANFSQYGTGIDIVAPGVNVMSTYPGNRYVSMNGTSMATPHVAGAAALVKQRYPSWNATQIRNHLKNTATNLGNSSQFGSGLVNAEAATR

SEQ ID NO: 66822 - protein, 268 aa, Unidentified
QTVPWGITRVQAPAVHNRAITGSGVRVAILDSGISAHEDLNIRGGASFVPGEPTTADLNGHGTHVAGTVAALNNSIGVIGVAPNAELYAVKVLGANGSGSVSGIAQGLEWAATNNMHIANMSLGSDFPSSTLERAVNYATSRDVLVIAATGNNGSGSVGYPARYANAMAVGATDQNNRRANFSQYGTGIDIVAPGVNVQSTYPGNRYVSMNGTSMATPHVAGAAALVKQRYPSWNATQIRNHLKNTATNLGNSSQFGSGLVNAEAATR

SEQ ID NO: 66823 - protein, 268 aa, Unidentified
QTVPWGITRVQAPAVHNRGITGSGVRVAILDSGISAHEDLNIRGGASFVPGEPTTADLNGHGTHVAGTVAALNNSIGVIGVAPNAELYAVKVLGANGSGSVSGIAQGLEWAATNNMHIANMSLGSDFPSSTLERAVNYATSRDVLVIAATGNNGSGSVGYPARYANAMAVGATDQNNRRANFSQYGTGIDIVAPGVNIQSTYPGNRYVSMNGTSMATPHVAGAAALVKQRYPSWNATQIRNHLKNTATNLGNSSQFGSGLVNAEAATR

SEQ ID NO: 66824 - protein, 268 aa, Unidentified
QTVPWGITRVQAPAVHLRGITGSGVRVAILDSGISAHEDLNIRGGASFVPGEPTTADLNGHGTHVAGTVAALNNSIGVIGVAPNAELYAVKVLGANGSGSVSGIAQGLEWAATNNMHIANMSLGSDFPSSTLERAVNYATSRDVLVIAATGNNGSGSVGYPARYANAMAVGATDQNNRRANFSQYGTGIDIVAPGVNVQSTYPGNRYVSMNGTSMATPHVAGAAALVKQRYPSWNATQIRNHLKNTATNLGNSSQFGSGLVNAEAATR

SEQ ID NO: 66825 - protein, 268 aa, Unidentified
QTVPWGITRVQAPAVHNRGITGSGVRVAILDSGISAHEDLNIRGGASFVPGEPTTADLNGHGTHVAGTVAALNNSIGVIGVAPNAELYAVKVLGANGSGSVSGIAQGLEWAATNNMHIANMSLGSDFPSSTLERAVNYATSRDVLVIAATGNNGSGSVGYPARYANAMAVGATDQNNRRANFSQYGTGIDIVAPGVNVQSTYPGNRYVLMNGTSMATPHVAGAAALVKQRYPSWNATQIRNHLKNTATNLGNSSQFGSGLVNAEAATR

SEQ ID NO: 66826 - protein, 268 aa, Unidentified
QTVPWGITRVQAPAVHNRGITGSGVRVAILDSGISAHEDLNIRGGASFVPGEPTTADLNGHGTHVAGTVAALNNSIGVIGAAPNAELYAVKVLGANGSGSVSGIAQGLEWAATNNMHIANMSLGSDFPSSTLERAVNYATSRDVLVIAATGNNGSGSVGYPARYANAMAVGATDQNNRRANFSQYGTGIDIVAPGVNVQSTYPGNRYVSMNGTSMATPHVAGAAALVKQRYPSWNATQIRNHLKNTATNLGNSSQFGSGLVNAEAATR

SEQ ID NO: 66827 - protein, 268 aa, Unidentified
QTVPWGITRVQAPAVHNRGITGSGVRVAILDSGISAHSDLNIRGGATFVPGEPTTADLNGHGTHVAGTVAALNNSIGVIGVAPNAELYAVKVLGANGSGSVSGIAQGLEWAATNNMHIANMSLGSDFPSSTLERAVNYATSRDVLVIAATGNNGSGSVGYPARYANAMAVGATDQNNRRANFSQYGTGIDIVAPGVNVQSTYPGNRYVSMNGTSMATPHVAGAAALVKQRYPSWNATQIRNHLKNTATNLGNSSQFGSGLVNAEAATR

SEQ ID NO: 66828 - protein, 268 aa, Unidentified
QTVPWGITRVQAPAVHNRGITGSGVRVAILDSGISAHSDLNIRGGASFVPGEPTTADLNGHGTHVAGTVAALNNSIGVIGRAPNAELYAVKVLGANGSGSVSGIAQGLEWAATNNMHIANMSLGSDFPSSTLERAVNYATSRDVLVIAATGNNGSGSVGYPARYANAMAVGATDQNNRRANFSQYGTGIDIVAPGVNVQSTYPGNRYVSMNGTSMATPHVAGAAALVKQRYPSWNATQIRNHLKNTATNLGNSSQFGSGLVNAEAATR

SEQ ID NO: 66829 - protein, 268 aa, Unidentified
QTVPWGITRVQAPAVHNRGITGSGVRVAILDSGISAHEDLNIRGGASFVPGEPTTADLNGHGTHVAGTVAALNNSIGVIGVAPNAELYAVKVLGANGSGSVSGIAQGLEWAATNNMHIANMSLGSDFPSSTLERAVNYATSRDVLVIAATGNNGSGAVGYPARYANAMAVGATDQNNRRANFSQYGTGIDIVAPGVNVQSTYPGNRYVSMNGTSMATPHVAGAAALVKQRYPSWNATQIRNHLKNTATNLGNSSQFGSGLVNAEAATR

SEQ ID NO: 66830 - protein, 268 aa, Unidentified
QTVPWGITRVQAPAVHNRGITGSGVRVAILDSGISALSDLNIRGGASFVPGEPTTADLNGHGTHVAGTVAALNNSIGVIGVAPNAELYAVKVLGANGSGSVSGIAQGLEWAATNNMHIANMSLGSDFPSSTLERAVNYATSRDVLVIAATGNNGSGSVGYPARYANAMAVGATDQNNRRANFSQYGTGIDIVAPGVNVQSTYPGNRYVSMNGTSMATPHVAGAAALVKQRYPSWNATQIRNHLKNTATNLGNSSQFGSGLVNAEAATR

SEQ ID NO: 66831 - protein, 267 aa, Unidentified
QTVPWGITRVQAPAVHNRGITGSGVRVAILDSGISTHEDLNVRGGVSFVPGEPTTADLNGHGTHVAGTVAALNNSIGVVGVAPSADLYAVKVLGANGRGSVSGIAQGLEWAAANNMHIASMSLGSDAPSSTLERAVNYATSRDVLVIAATGNNGSGSVGYPARYANAMAVGATDQNNRRASFSQYGTGLDIVAPGVNVQSTYPGNRYVSMNGTSMATPHVAGAAALVKQRYPSWNATQIRNHLLTATNLGNSNQFGSGLVNAEAATR

SEQ ID NO: 66832 - protein, 344 aa, Unidentified
EKLRRFIKCDRVRYVDLVEMLSSMEGELKEEVMLLLSDVGDIHEVIQERLKEIGKILESDASWERIAEVEEVVRDGHVYDLTVEGSHSFIANGFVVHNSGVKVAVLDTGISTHPDLNIRGGASFVPGEPSTQDGNGHGTHVAGTIAALNNSIGVLGVAPSAELYAVKVLGASGSGSVSSIAQGLEWAGNNGMHVANLSLGSPSPSATLEQAVNSATSRGVLVVAASGNSGAGSISYPARYANAMAVGATDQNNNRASFSQYGAGLDIVAPGVNVQSTYPGSTYASLNGTSMATPHVAGAAALVKQKNPSWSNVQIRNHLKNTATSLGSTNLYGSGLVNAEAATR

SEQ ID NO: 66833 - protein, 268 aa, Unidentified
QTVPWGITRVQAPAVHNRGITGSGVRVAILDSGISTHEDLNVRGGVSFVPGEPTTADLNGHGTHVAGTVAALNNSIGVVGVAPSADLYAVKVLGANGRGSVSGIAQGLEWAAANNMHIANMSLGSDAPSSTLERAVNYATSRDVLVIAATGNNGSGSVGYPARYANAMAVGATDQNNRRANFSQYGTGLDIVAPGVNVQSTYPGNRYVSMNGTSMATPHVAGVAALVKQRYPSWNATQIRNHLKNTATNLGNSSQFGSGLVNAEAATR

SEQ ID NO: 66834 - protein, 268 aa, Unidentified
QTVPWGITRVQAPAVHNRGITGSGVRVAILDSGISAHEDLNIRGGASFVPGEPTTADLNGHGTHVAGTVAALNNSIGVIGVAPNAELYAVKVLGANGRGSVSGIAQGLEWAATNNMHIANMSLGAEGPSSTLERAVNYATSRDVLVIAATGNNGSGSVGYPARYANAMAVGATDQNNRRANFSQYGTGIDIVAPGVNVQSTYPGNRYVSMNGTSMATPHVAGAAALVKQRYPSWNATQIRNHLKNTATNLGNSSEFGSGLVNAEAATR

SEQ ID NO: 66835 - protein, 268 aa, Unidentified
QTVPWGITRVQAPAVHNRGITGSGVRVAILDSGISAHSELNIRGGASFVPGEPTTADLNGHGTHVAGTVAALNNDIGVIGVAPNAELYAVKVLGANGSGSVSGIAQGLEWAATNNMHIANMSLGSDFPSSTLERAVNYATSRDVLVIAATGNNGSGSVGYPARYANAMAVGATDQNNRRANFSQYGTGIDIVAPGVNVQSTYPGNRYVSMNGTSMATPHVAGAAALVKQRYPSWNATQIRNHLKNTATNLGNSSQFGSGLVNAEAATR

SEQ ID NO: 66836 - protein, 268 aa, Unidentified
QTVPWGITRVQAPAVHNRGITGSGVRVAILDSGISAHSDLNIRGGASFVPGEPTTADLNGHGTHVAGTVAALNNSIGVIGVAPNAELYAVKVLGANGSGSVSGIAQGLEWAATNNMHIANMSLGSDQPSSTLERAVNYATSRDVLVIAATGNNGSGSVGYPARYANAMAVGATDQNNRRANFSQYGTGIDIVAPGVNVQSTYPGNRYVSMNGTSMQTPHVAGAAALVKQRYPSWNATQIRNHLKNTDTNLGNSSQFGSGLVNAEAATR

SEQ ID NO: 66837 - protein, 268 aa, Unidentified
QTVPWGITRVQAPAVHNRGITGSGVRVAILDSGISTHEDLNIRGGASFVPGEPTTADLNGHGTHVAGTVAALNNSIGVVGVAPSADLYAVKVLGANGRGSVSGIAQGLEWAAQNNMHIANMSLGTDAPSSTLERAVNYATSRDVLVIAATGNNGSGSVGYPARYANAMAVGATDQNNRRANFSQYGTGIDIVAPGVNVQSTYPGNRYVSMNGTSMATPHVAGAAALVKQRYPSWNATQIRDHLKNTATNLGNSSQFGSGLVNAEAATR

SEQ ID NO: 66838 - protein, 268 aa, Unidentified
QTVPWGITRVQAPAVHNRGITGSGVRVAILDSGISAHEDLNIRGGASFVPGEPTTADLNGHGTHVAGTVAALNNSIGVIGVAPNAELYAVKVLGANGRGSVSGIAQGLEWAAQNNMHIANMSLGAEGPSSTLERAVNYATSRDVLVIAATGNNGSGSVGYPARYANAMAVGATDQNNRRANFSQYGTGIDIVAPGVNVQSTYPGNRYVSMNGTSMATPHVAGAAALVKQRYPSWNATQIRNHLKNTATNLGNSSQFGSGLVNAEAATR

SEQ ID NO: 66839 - protein, 268 aa, Unidentified
QTVPWGITRVQAPAVHNRGITGSGVRVAILDSGISTHEDLNIRGGASFVPGEPTTADLNGHGTHVAGTVAALNNSIGVIGVAPNAELYAVKVLGANGRGSVSGIAQGLEWAAQNNMHIANMSLGTDAPSSTLERAVNYATSRDVLVIAATGNNGSGSVGYPARYANAMAVGATDQNNRRANFSQYGTGIDIVAPGVNVQSTYPGNRYVSMNGTSMATPHVAGAAALVKQRYPSWNATQIRDHLKNTATNLGNSSQFGSGLVNAEAATR

SEQ ID NO: 66840 - protein, 268 aa, Unidentified
QTVPWGITRVQAPAVHNRGITGSGVRVAILDSGISTHEDLNVRGGVSFVPGEPTYADLNGHGTHVAGTVAALNNSIGVVGVAPSADLYAVKVLGANGSGSVSGIAQGLEWAAQNNMHIANMSLGSPEPSSTLERAVNYATSRDVLVIAATGNNGSGSVGYPARYANAMAVGATDQNNRRANFSQYGTGIDIVAPGVNVQSTYPGNRYVSMNGTSMATPHVAGAAALVKQRYPSWNATQIRDHLKNTATNLGNSSQFGSGLVNAEAATR

SEQ ID NO: 66841 - protein, 268 aa, Unidentified
QTVPWGITRVQAPAVHNRGITGSGVKVAILDSGISAHSDLNIRGGASFVPGEPTTADLNGHGTHVAGTVAALNNSIGVIGVAPNAELYAVKVLGANGRGSISGIAQGLEWAATNNMHIANMSLGTDAPSSTLERAVNYATSADVLVIAATGNNGSGTISYPARYANAMAVGATDQNNRRANFSQYGTGIDIVAPGVNVQSTYPGNRYVSMNGTSMATPHVAGAAALVKQRYPSWNATQIRNHLKNTATNLGNSSQFGSGLVNAEAATR

SEQ ID NO: 66842 - protein, 268 aa, Unidentified
QTVPWGITRVQAPAVHNRGITGSGVRVAILDSGISAHSDLNIRGGASFVPGEPTTADLNGHGTHVAGTVAALNNSIGVIGVAPNAELYAVKVLGANGRGSVSGIAQGLEWAATNNMHIANMSLGTDAPSSTLERAVNYATSRDVLVIAATGNNGSGSVGYPARYANAMAVGATDQNNRRANFSQYGTGIDIVAPGVNVQSTYPGNRYVSMNGTSMATPHVAGAAALVKQRYPSWNATQIRNHLKNTATNLGNSSQFGSGLVNAEAATR

SEQ ID NO: 66843 - protein, 268 aa, Unidentified
QTVPWGITRVQAPAVHNRGITGSGVRVAILDSGISTHEDLNVRGGVSFVPGEPTYADLNGHGTHVAGTVAALNNSIGVVGVAPSADLYAVKVLGANGRGSVSGIAQGLEWAAQNNMHVANMSLGTDAPSSTLERAVNYATSRDVLVIAATGNNGSGSVGYPARYANAMAVGATDQNNRRANFSQYGTGIDIVAPGVNVQSTYPGNRYVSMNGTSMATPHVAGAAALVKQRYPSWNATQIRNHLKNTATNLGNSSQYGSGLVNAEAATR

SEQ ID NO: 66844 - protein, 268 aa, Unidentified
QTVPWGITRVQAPAVHNRGITGSGVRVAILDSGISAHEDLNIRGGVSFVPGEPTTADLNGHGTHVAGTVAALNNSIGVIGVAPNAELYAVKVLGANGRGSVSGIAQGLEWAATNNMHIANMSLGAEGPSSTLERAVNYATSRDVLVIAATGNNGSGSVGYPARYANAMAVGATDQNNRRANFSQYGTGIDIVAPGVNVQSTYPGNRYVSLNGTSMATPHVAGAAALVKQRYPSWNATQIRNHLKNTATNLGNSSQFGSGLVNAEAATR

SEQ ID NO: 66845 - protein, 268 aa, Unidentified
QTVPWGIERVQAPAVHNRGITGSGVRVAILDSGISAHEDLNIRGGASFVPGEPTTADLNGHGTHVAGTVAALNNSIGVIGVAPNAELYAVKVLGANGRGSVSGIAQGLEWAATNNMHIANMSLGAEGPSSTLERAVNYATSRDVLVIAATGNNGSGSVGYPARYANAMAVGATDQNNRRANFSQYGTGIDIVAPGVNVQSTYPGNRYVSMNGTSMATPHVAGAAALVKQRYPSWNATQIRNHLKNTATNLGNSSQFGSGLVNAEAATR

SEQ ID NO: 66846 - protein, 268 aa, Unidentified
QTVPWGITRVQAPAVHNRGITGSGVRVAILDSGISAHSDLNIRGGASFVPGEPTTADLNGHGTHVAGTVAALNNDIGVIGVAPNAELYAVKVLGANGSGSVSGIAQGLEWAATNNMHIANMSLGSDSPSSTLERAVNYATSRDVLVIAATGNNGSGSVGYPARYQNAMAVGATDQNNRRANFSQYGTGIDIVAPGVNVQSTYPGNRYVSMNGTSMASPHVAGAAALVKQRYPSWNATQIRNHLKNTATNLGNSSQFGSGLVNAEAATR

SEQ ID NO: 66847 - protein, 268 aa, Unidentified
QTVPWGITRVQAPAVHNRGITGSGVRVAILDSGISAHEDLNIRGGASFVPGEPTTADLNGHGTHVAGTVAALNNSIGVIGVAPNAELYAVKVLGANGRGSVSGIAQGLEWAATNNMHIANMSLGAEGPSSTLERAVNYATSRDVLVIAATGNNGSGSVGYPARYANAMAVGATDQNNQRANFSQYGTGIDIVAPGVNVQSTYPGNRYVSMNGTSMATPHVAGAAALVKQRYPSWNATQIRNHLKNTATNLGPSSQFGSGLVNAEAATR

SEQ ID NO: 66848 - protein, 268 aa, Unidentified
QTVPWGITRVQAPAVHNRGITGSGVKVAILDSGISTHEDLNIRGGVSFVPGEPTYADLNGHGTHVAGTVAALDNSIGVVGVAPSADLYAVKVLGANGRGSVSGIAQGLEWAAQNNMHVANMSLGTDAPSSTLERAVNYATSRDVLVIAATGNNGSGSVGYPARYANAMAVGATDQNNRRANFSQYGTGIDIVAPGVNVQSTYPGNRYVSMNGTSMATPHVAGAAALVKQRYPSWNATQIRDHLKNTATNLGNSSQYGSGLVNAEAATR

SEQ ID NO: 66849 - protein, 268 aa, Unidentified
QTVPWGITRVQAPAVHNRGITGSGVRVAILDSGISAHEDLNIRGGVSFVPGEPTTADLNGHGTHVAGTVAALNNSIGVIGVAPSAELYAVKVLGANGRGSVSGIAQGLEWAAQNNMHIANMSLGSDFPSSTLERAVNYATSRDVLVIAATGNNGSGSVGYPARYANAMAVGATDQNNRRANFSQYGTGIDIVAPGVNVQSTYPGNRYVSMNGTSMATPHVAGAAALVKQRYPSWNATQIRDHLKNTATNLGNSSQFGSGLVNAEAATR

SEQ ID NO: 66850 - protein, 268 aa, Unidentified
QTVPWGITRVQAPAVHNRGITGSGVRVAILDSGISAHEDLNIRGGASFVPGEPTTADLNGHGTHVAGTVAALNNSIGVIGVAPNAELYAVKVLGANGRGSVSGIAQGLEWAATNNMHIANMSLGTDAPSSTLERAVNYATSRDVLVIAATGNNGSGSVGYPARYANAMAVGATDQNNRRANFSQYGTGIDIVAPGVNVQSTYPGNRYVSMNGTSMATPHVAGAAALVKQRYPSWNATQIRNHLKNTATNLGNSSQFGSGLVNAEAATR

SEQ ID NO: 66851 - protein, 268 aa, Unidentified
QTVPWGITRVQAPAVHNRGITGSGVRVAILDSGISAHSDLNIRGGASFVPGEPTTADLNGHGTHVAGTVAALNNSIGVIGVAPNAELYAVKVLGANGRGSVSGIAQGLEWAATNNMHIANMSLGTDFPSSTLERAVNYATSRDVLVIAATGNNGSGSVGYPARYANAMAVGATDQNNRRANFSQYGTGIDIVAPGVNVQSTYPGNRYVSMNGTSMATPHVAGAAALVKQRYPSWNATQIRNHLKNTATNLGNSSQFGSGLVNAEAATR

SEQ ID NO: 66852 - protein, 268 aa, Unidentified
QTVPWGITRVQAPAVHNRGITGSGVRVAILDSGISAHEDLNIRGGASFVPGEPTTADLNGHGTHVSGTVAALNNSIGVIGVAPNAELYAVKVLGANGRGSVSGIAQGLEWAATNNMHIANMSLGSDFPSSTLERAVNYATSRDVLVIAATGNNGSGSVGYPARYANAMAVGATDQNNRRANFSQYGTGIDIVAPGVNVQSTYPGNRYVSMNGTSMATPHVAGAAALVKQRYPSWNATQIRNHLKNTATNLGNSSQFGSGLVNAEAATR

SEQ ID NO: 66853 - protein, 268 aa, Unidentified
QTVPWGITRVQAPAVHNRGITGSGVRVAILDSGISAHSDLNIRGGASFVPGEPTTADLNGHGTHVAGTVAALNNSIGVIGVAPNADLYAVKVLGANGSGSVSGIAQGLEWAATNNMHIANMSLGSDFPSSTLERAVNYATSRDVLVIAATGNNGSGSVGYPARYANAMAVGATDQNNRRANFSQYGTGIDIVAPGVNVQSTYPGNRYVSMNGTSMATPHVAGAAALVKQRYPSWNATQIRNHLKNTDTNLGNSSQFGSGLVNAEAATR

SEQ ID NO: 66854 - protein, 268 aa, Unidentified
QTVPWGITRVQAPAVHNRGITGSGVRVAILDSGISTHEDLNVRGGVSFVPGEPTYADLNGHGTHVAGTVAALNNSIGVVGVAPSADLYAVKVLGANGSGSVSGIAQGLEWAAQNNMHIANMSLGSVSPSSTLERAVNYATSRDVLVIAATGNNGSGSVGYPARYANAMAVGATDQNNRRANFSQYGTGIDIVAPGVNVQSTYPGNRYVSMNGTSMATPHVAGAAALVKQRYPSWNATQIRDHLKNTATNLGNSSQFGSGLVNAEAATR

SEQ ID NO: 66855 - protein, 268 aa, Unidentified
QTVPWGIERVQAPAVHNRGITGSGVRVAILDSGISAHSDLNIRGGASFVPGEPTTADLNGHGTHVAGTVAALNNDIGVIGVAPNAELYAVKVLGANGSGSVSGIAQGLEWAATNNMHIANMSLGSDFPSSTLERAVNYATSRDVLVIAATGNNGSGSVGYPARYANAMAVGATDQNNRRANFSQYGTGIDIVAPGVNVQSTYPGNRYVSMNGTSMASPHVAGAAALVKQRYPSWNATQIRNHLKNTATNLGNSSQFGSGLVNAEAATR

SEQ ID NO: 66856 - protein, 268 aa, Unidentified
QTVPWGITRVQAPAVHNRGITGSGVRVAILDSGISTHEDLNVRGGASFVPGEPTTADLNGHGTHVAGTVAALNNSIGVVGVAPSADLYAVKVLGANGRGSVSGIAQGLEWAAQNNMHIANMSLGSDFPSSTLERAVNYATSRDVLVIAATGNNGSGSVGYPARYANAMAVGATDQNNRRANFSQYGTGIDIVAPGVNVQSTYPGNRYVSMNGTSMATPHVAGAAALVKQRYPSWNATQIRDHLKNTATNLGNSSQFGSGLVNAEAATR

SEQ ID NO: 66857 - protein, 268 aa, Unidentified
QTVPWGITRVQAPAVHNRGITGSGVRVAILDSGISAHEDLNIRGGASFVPGEPTYADLNGHGTHVAGTVAALNNSIGVIGVAPNAELYAVKVLGANGRGSVSGIAQGLEWAATNNMHIANMSLGAEGPSSTLERAVNYATSRDVLVIAATGNNGSGSVGYPARYANAMAVGATDQNNRRANFSQYGTGIDIVAPGVNVQSTYPGNRYVSLNGTSMATPHVAGAAALVKQRYPSWNATQIRNHLKNTATNLGNSSQFGSGLVNAEAATR

SEQ ID NO: 66858 - protein, 268 aa, Unidentified
QTVPWGITRVQAPAVHNRGITGSGVRVAILDSGISAHEDLNIRGGASFVPGETTTADLNGHGTHVAGTVAALNNSIGVIGVAPNAELYAVKVLGANGRGSVSGIAQGLEWAATNNMHIANMSLGAEGPSSTLERAVNYATSRDVLVIAATGNNGSGSVGYPARYANAMAVGATDQNNRRANFSQYGTGIDIVAPGVNVQSTYPGNRYVSLNGTSMATPHVAGAAALVKQRYPSWNATQIRNHLKNTATNLGNSSQFGSGLVNAEAATR

SEQ ID NO: 66859 - protein, 268 aa, Unidentified
QTVPWGITRVQAPAVHNRGITGSGVRVAILDSGISAHSDLNIRGGASFVPGEPTTADLNGHGTHVAGTVAALNNDIGVIGVAPNAELYAVKVLGANGSGSVSGIAQGLEWAATNNMHIANMSLGSDFPSSTLERAVNYATSRDVLVIAATGNNGSGSVGYPARYANAMAVGATDQNNRRANFSQYGTGIDIVAPGVNVQSTYPGNRYVIMNGTSMATPHVAGAAALVKQRYPSWNATQIRNHLKNTATNLGNSSQFGSGLVNAEAATR

SEQ ID NO: 66860 - protein, 268 aa, Unidentified
QTVPWGITRVQAPAVHNRGITGSGVRVAILDSGISAHEDLNIRGGASFVPGEPTTADLNGHGTHVAGTVAALNNSIGVIGVAPNAELYAVKVLGANGRGSVSGIAQGLEWAATNNMHIANMSLGAEGPSSTLERAVNYATSRDVLVIAATGNNGSGSVGYPARYANAMAVGATDQNNRRANFSQYGTGIDIVAPGVNVQSTYPGNRYVSMNGTSMATPHVAGAAALVKQRYPSWNATQIRNHLKNTATNLGNSWQFGSGLVNAEAATR

SEQ ID NO: 66861 - protein, 268 aa, Unidentified
QTVPWGITRVQAPTVHNRGITGSGVKVAILDTGIAQHSDLTIRGGASFVPGESTTADLNGHGTHVAGTVAALNNSIGVIGVAPSADLYAVKVLGANGRGSVSGIAQGLEWAATNNMHIANMSLGSPAPSTTLERAVNYATSRGVLVIAATGNNGTGSIGYPARYANAMAVGATDQNNRRASFSQYGTGIDIVAPGVGIQSTYLNNSYASLDGTSMATPHVAGVAALVKQKNPSWNATQIRNHLKNTATNLGNSSQFGSGLVNADAATR

SEQ ID NO: 66862 - protein, 268 aa, Unidentified
QTVPWGITRVQAPAVHNRGITGSGVRVAILDSGISTHEDLNVRGGVSFVPGEPTTADLNGHGTHVAGTVAALNNSIGVVGVAPSADLYAVKVLGANGRGSVSGIAQGLEWAAANNMHIASMSLGSDAPSSTLERAVNYATSRDVLVIAATGNNGSGSVGYPARYANAMAVGATDQNNRRASFSQYGTGLDIVAPGVNVQSTYPGNRYVSMNGTSMATPHVAGAAALVKQRYPSWNATQIRNHLLSTATNLGNSNQFGSGLVNAEAATR

SEQ ID NO: 66863 - protein, 268 aa, Unidentified
QTVPWGITRVQAPAVHNRGITGSGVRVAILDSGISAHEDLNIRGGASFVPGEPTYADLNGHGTHVAGTVAALNNSIGVIGVAPNAELYAVKVLGANGRGSVSGIAQGLEWAATNNMHIANMSLGSDAPSSTLERAVNYATSRDVLVIAATGNNGSGSVGYPARYANAMAVGATDQNNRRANFSQYGTGIDIVAPGVNVQSTYPGNRYVSMNGTSMATPHVAGAAALVKQRYPSWNATQIRNHLKNTATNLGNSSQFGSGLVNAEAATR

SEQ ID NO: 66864 - protein, 268 aa, Bacillus sp.
QTVPWGITRVQAPAVHNRGITGSGVRVAILDSGISAHEDLNIRGGASFVPGEPTTADLNGHGTHVAGTVAALNNSIGVIGVAPNAELYAVKVLGANGRGSVSGIAQGLEWAATNNMHIANMSLGAEGPSSTLERAVNYATSRDVLVIAATGNNGSGSVGYPARYANAMAVGATDQNNRRANFSQYGTGIDIVAPGVNVQSTYPGNRYVSMNGTSMATPHVAGAAALVKQRYPSWNATQIRNHLKNTATNLGNSSQFGSGLVNAEAATR

SEQ ID NO: 66865 - protein, 268 aa, Unidentified
QTVPWGITRVQAPAVHNRGITGSGVRVAILDSGISAHEDLNIRGGASFVPGEPTTADLNGHGTHVAGTVAALNNSIGVIGVAPNAELYAVKVLGANGRGSVSGIAQGLEWAATNNMHIANMSLGAEGPSSTLERAVNYATSRDVLVIAATGNNGSGSVGYPARYANAMAVGATDQNNRRANFSQYGTGIDIVAPGVNVQSTYPGNRYVSLNGTSMATPHVAGAAALVKQRYPSWNATQIRDHLKNTATNLGNSSQFGSGLVNAEAATR

SEQ ID NO: 66866 - protein, 268 aa, Unidentified
QTVPWGITRVQAPAVHNRGITGSGVRVAILDSGISAHEDLNIRGGASFVPGEPTTADLNGHGTHVAGTVAALNNSIGVIGVAPNAELYAVKVLGANGRGSVSGIAQGLEWAATNNMHIANMSLGTDFPSSTLERAVNYATSRDVLVIAATGNNGSGSVGYPARYANAMAVGATDQNNRRANFSQYGTGIDIVAPGVNVQSTYPGNRYVSMNGTSMATPHVAGAAALVKQRYPSWNATQIRNHLKNTATNLGNSSQFGSGLVNAEAATR

SEQ ID NO: 66867 - protein, 268 aa, Unidentified
QTVPWGITRVQAPAVHNRGITGSGVRVAILDSGISAHEDLNIRGGASFVPGEPTTADLNGHGTHVAGTVAALDNSIGVIGVAPNAELYAVKVLGANGRGSVSGIAQGLEWAATNNMHIANMSLGAEGPSSTLERAVNYATSRDVLVIAATGNNGSGSVGYPARYANAMAVGATDQNNRRANFSQYGTGIDIVAPGVNVQSTYPGNRYVSLNGTSMATPHVAGAAALVKQRYPSWNATQIRNHLKNTATNLGNSSQFGSGLVNAEAATR

SEQ ID NO: 66868 - protein, 268 aa, Unidentified
QTVPWGITRVQAPAVHNRGITGSGVRVAILDSGISAHEDLNIRGGASFVPGEPTTADLNGHGTHVAGTVAALNNSIGVIGVAPNAELYAVKVLGANGRGSVSGIAQGLEWAATNNMHIANMSLGAEGPSSTLERAVNYATSRDVLVIAATGNNGSGSVGYPARYANAMAVGATDQNNRRANFSQYGTGIDIVAPGVNVQSTYPGNRYVSMNGTSMATPHVAGAAALVKQRYPSWNATQIRNHLKNTATNLGDSSQFGSGLVNAEAATR

SEQ ID NO: 66869 - protein, 268 aa, Unidentified
QTVPWGIERVQAPAVHNRGITGSGVRVAILDSGISAHSDLNIRGGASFVPGEPTTADLNGHGTHVAGTVAALNNSIGVIGVAPNAELYAVKVLGANGSGSVSGIAQGLEWAATNNMHIANMSLGSDFPSSTLERAVNYATSRDVLVIAATGNNGSGSVGYPARYQNAMAVGATDQNNRRANFSQYGTGIDIVAPGVNVQSTYPGNRYVSMNGTSMASPHVAGAAALVKQRYPSWNATQIRNHLKNTATNLGNSSQFGSGLVNAEAATR

SEQ ID NO: 66870 - protein, 268 aa, Unidentified
QTIPWGITRVQAPAVHNRGITGSGVRVAILDSGISTHEDLNVRGGVSFVPGEPTTADLNGHGTHVAGTVAALNNSIGVVGVAPSADLYAVKVLGANGRGSVSGIAQGLEWAAANNMHIANMSLGSDAPSSTLERAVNYATSRDVLVIAATGNNGSGSVGYPARYANAMAVGATDQNNRRASFSQYGTGIDIVAPGVNVQSTYPGNRYVSMNGTSMATPHVAGAAALVKQRYPSWNATQIRNHLKNTATNLGNSSQFGSGLVNAEAATR

SEQ ID NO: 66871 - protein, 268 aa, Unidentified
QTVPWGIERVQAPAVHNRGITGSGVRVAILDSGISAHSELNIRGGASFVPGEPTTADLNGHGTHVAGTVAALNNSIGVIGVAPNAELYAVKVLGANGSGSVSGIAQGLEWAATNNMHIANMSLGSDFPSSTLERAVNYATSRDVLVIAATGNNGSGSVGYPARYANAMAVGATDQNNRRANFSQYGTGIDIVAPGVNVQSTYPGNRYVSMNGTSMQTPHVAGAAALVKQRYPSWNATQIRNHLKNTATNLGNSSQFGSGLVNAEAATR

SEQ ID NO: 66872 - protein, 268 aa, Unidentified
QTVPWGITRVQAPAVHNRGITGSGVRVAILDSGISTHEDLNVRGGVSFVPGEPTTADLNGHGTHVAGTVAALNNSIGVVGVAPSADLYAVKVLGANGRGSVSGIAQGLEWAAANNMHVANMSLGTDAPSSTLERAVNYATSRDVLVIAATGNNGSGTVSYPARYANAMAVGATDQNNRRANFSQYGTGIDIVAPGVNVQSTYPGNRYVSMNGTSMATPHVAGAAALVKQRYPSWNATQIRDHLKNTATNLGNSSQYGSGLVNAEAATR

SEQ ID NO: 66873 - protein, 268 aa, Unidentified
QTVPWGITRVQAPAVHNRGITGSGVRVAILDSGISAHSDLNIRGGASFVPGEPTYADLNGHGTHVAGTVAALNNSIGVIGVAPNAELYAVKVLGANGSGSVSGIAQGLEWAAQNNMHIANMSLGSDFPSSTLERAVNYATSRDVLVIAATGNNGSGSVGYPARYANAMAVGATDQNNRRANFSQYGTGIDIVAPGVNVQSTYPGNRYVSMNGTSMATPHVAGAAALVKQRYPSWNATQIRDHLKNTATNLGNSSQFGSGLVNAEAATR

SEQ ID NO: 66874 - protein, 268 aa, Unidentified
QTVPWGITRVQAPAVHNRGITGSGVRVAILDSGISAHSDLNIRGGASFVPGEPTYADLNGHGTHVAGTVAALNNSIGVIGVAPNAELYAVKVLGANGRGSVSGIAQGLEWAAQNNMHIANMSLGSDAPSSTLERAVNYATSRDVLVIAATGNNGSGSVGYPARYANAMAVGATDQNNRRANFSQYGTGIDIVAPGVNVQSTYPGNRYVSMNGTSMATPHVAGAAALVKQRYPSWNATQIRNHLKNTATNLGNSSQFGSGLVNAEAATR

SEQ ID NO: 66875 - protein, 268 aa, Unidentified
QTVPWGITRVQAPAVHNRGITGSGVRVAILDSGISAHSDLNIRGGASFVPGEPTTADLNGHGTHVAGTVAALNNDIGVIGVAPNAELYAVKVLGANGSGSVSGIAQGLEWAATNNMHIANMSLGSDFPSSTLERAVNYATSRDVLVIAATGNNGSGSVGYPARYANAMAVGATDQNNRRANFSQYGTGIDIVAPGVNVQSTYPGNRYVSMNGTSMATPHVAGAAALVKQRYPSWNATQIRNHLKNTDTNLGNSSQFGSGLVNAEAATR

SEQ ID NO: 66876 - protein, 268 aa, Unidentified
QTVPWGITRVQAPAVHNRGITGSGVRVAILDSGISAHEDLNIRGGASFVPGEPTTADLNGHGTHVAGTVAALNNSIGVIGVAPNAELYAVKVLGANGRGSVSGIAQGLEWAATNNMHIANMSLGAEGPSSTLERAVNYATSRDVLVIAATGNNGSGSVQYPARYANAMAVGATDQNNQRANFSQYGTGIDIVAPGVNVQSTYPGNRYVSLSGTSMATPHVAGAAALVKQRYPSWNATQIRNHLKNTATNLGPSSQFGSGLVNAEAATR

SEQ ID NO: 66877 - protein, 268 aa, Unidentified
QTVPWGITRVQAPAVHNRGITGSGVRVAILDSGISAHSDLNIRGGASFVPGEPTTADLNGHGTHVAGTVAALDNSIGVVGVAPSADLYAVKVLGANGRGSISGIAQGLEWAATNNMHIANMSLGSDFPSSTLERAVNYATSRDVLVIAATGNNGSGSVGYPARYANAMAVGATDQNNRRANFSQYGTGLDIVAPGVNVQSTYPGNRYVSMNGTSMATPHVAGAAALVKQRYPSWNATQIRDHLKNTATNLGNSSQYGSGLVNAEAATR

SEQ ID NO: 66878 - protein, 268 aa, Unidentified
QTVPWGITRVQAPAVHNRGITGSGVRVAILDSGISAHSDLNIRGGASFVPGEPTTADLNGHGTHVAGTVAALNNDIGVIGVAPNAELYAVKVLGANGSGSVSGIAQGLEWAATNNMHIANMSLGSDQPSSTLERAVNYATSRDVLVIAATGNNGSGSVGYPARYQNAMAVGATDQNNRRANFSQYGTGIDIVAPGVNVQSTYPGNRYVSMNGTSMATPHVAGAAALVKQRYPSWNATQIRNHLKNTATNLGNSSQFGSGLVNAEAATR

SEQ ID NO: 66879 - protein, 268 aa, Unidentified
QTVPWGITRVQAPAVHNRGITGSGVRVAILDSGISAHSDLNIRGGASFVPGEPTTADLNGHGTHVAGTVAALNNDIGVIGVAPNAELYAVKVLGANGSGSVSGIAQGLEWAATNNMHIANMSLGSDFPSSTLERAVNYATSRDVLVIAATGNNGSGSVGYPARYANAMAVGATDQNNRRANFSQYGTGIDIVAPGVNVQSTYPGNRYVSMNGTSMASPHVAGAAALVKQRYPSWNATQIRNHLKNTATNLGNSSQFGSGLVNAEAATR

SEQ ID NO: 66880 - protein, 268 aa, Unidentified
QTVPWGITRVQAPAVHNRGITGSGVRVAILDSGISAHSDLNIRGGASFVPGEPTTADLNGHGTHVAGTVAALNNSIGVIGVAPNADLYAVKVLGANGSGSVSGIAQGLEWAATNNMHIANMSLGSDQPSSTLERAVNYATSRDVLVIAATGNNGSGSVGYPARYANAMAVGATDQNNRRANFSQYGTGIDIVAPGVNVQSTYPGNRYVSMNGTSMATPHVAGAAALVKQRYPSWNATQIRNHLKNTDTNLGNSSQFGSGLVNAEAATR

SEQ ID NO: 66881 - protein, 268 aa, Unidentified
QTVPWGITRVQAPAVHNRGITGSGVRVAILDSGISAHEDLNIRGGASFVPGEPTTADLNGHGTHVAGTVAALNNSIGVIGVAPRAELYAVKVLGANGRGSVSGIAQGLEWAATNNMHIANMSLGAEGPSSTLERAVNYATSRDVLVIAATGNNGSGSVQYPARYANAMAVGATDQNNQRANFSQYGTGIDIVAPGVNVQSTYPGNRYVSLSGTSMATPHVAGAAALVKQRYPSWNATQIRNHLKNTATNLGPSSQFGSGLVNAEAATR

SEQ ID NO: 66882 - protein, 268 aa, Unidentified
QTVPWGIERVQAPAVHNRGITGQGVRVAILDSGISAHSDLNIRGGASFVPGEPTTADLNGHGTHVAGTVAALNNDIGVIGVAPNAELYAVKVLGANGSGSVSGIAQGLEWAATNNMHIANMSLGSDFPSSTLERAVNYATSRDVLVIAATGNNGSGSVGYPARYANAMAVGATDQNNRRANFSQYGTGIDIVAPGVNVQSTYPGNRYVSMNGTSMATPHVAGAAALVKQRYPSWNATQIRNHLKNTATNLGNSSQFGSGLVNAEAATR

SEQ ID NO: 66883 - protein, 268 aa, Unidentified
QTVPWGITRVQAPAVHNRGITGSGVRVAILDSGISAHEDLNIRGGASFVPGEPTTADLNGHGTHVAGTVAALDNSIGVIGVAPNAELYAVKVLGANGRGSVSGIAQGLEWAATNNMHIANMSLGAEGPSSTLERAVNYATSRDVLVIAATGNNGSGSVGYPARYANAMAVGATDQNNRRANFSQYGTGIDIVAPGVNVQSTYPGNRYVSLNGTSMATPHVAGAAALVKQRYPSWNATQIRNHLKNTATNLGPSSQFGSGLVNAEAATR

SEQ ID NO: 66884 - protein, 268 aa, Unidentified
QTVPWGIERVQAPAVHNRGITGSGVRVAILDSGISAHSDLNIRGGASFVPGEPTTADLNGHGTHVAGTVAALNNSIGVIGVAPNAELYAVKVLGANGSGSVSGIAQGLEWAATNNMHIANMSLGSDFPSSTLERAVNYATSRDVLVIAATGNNGSGSVGYPARYANAMAVGATDQNNRRANFSQYGTGIDIVAPGVNVQSTYPGNRYVSMNGTSMQTPHVAGAAALVKQRYPSWNATQIRNHLKNTDTNLGNSSQFGSGLVNAEAATR

SEQ ID NO: 66885 - protein, 268 aa, Unidentified
QTVPWGITRVQAPAVHNRGITGSGVRVAILDSGISTHEDLNVRGGASFVPGEPTTADLNGHGTHVAGTVAALNNSIGVIGVAPSADLYAVKVLGANGRGSVSGIAQGLEWAAQNNMHIANMSLGSDFPSSTLERAVNYATSRDVLVIAATGNNGSGSVGYPARYANAMAVGATDQNNRRANFSQYGTGIDIVAPGVNVQSTYPGNRYVSMNGTSMATPHVAGAAALVKQRYPSWNATQIRDHLKNTATNLGNSSQFGSGLVNAEAATR

SEQ ID NO: 66886 - protein, 268 aa, Unidentified
QTVPWGITRVQAPAVHNRGITGSGVRVAILDSGISTHEDLNVRGGVSFVPGEPTTADLNGHGTHVAGTVAALNNSIGVVGVAPSADLYAVKVLGANGRGSVSGIAQGLEWAAANNMHIANMSLGSDAPSSTLERAVNYATSRDVLVIAATGNNGSGSVGYPARYANAMAVGATDQNNRRANFSQYGTGIDIVAPGVNVQSTYPGNRYVSMNGTSMATPHVAGAAALVKQRYPSWNATQIRNHLKNTATNLGNSSQFGSGLVNAEAATR

SEQ ID NO: 66887 - protein, 268 aa, Unidentified
QTVPWGITRVQAPAVHNRGITGSGVRVAILDSGISAHEDLNIRGGASFVPGEPTTADLNGHGTHVAGTVAALDNSIGVIGVAPNAELYAVKVLGANGRGSVSGIAQGLEWAATNNMHIANMSLGAEGPSSTLERAVNYATSRDVLVIAATGNNGSGSVGYPARYANAMAVGATDQNNQRANFSQYGTGIDIVAPGVNVQSTYPGNRYVSLNGTSMATPHVAGAAALVKQRYPSWNATQIRNHLKNTATNLGPSSQFGSGLVNAEAATR

SEQ ID NO: 66888 - protein, 268 aa, Unidentified
QTVPWGITRVQAPAVHNRGITGQGVRVAILDSGISAHSDLNIRGGASFVPGEPTTADLNGHGTHVAGTVAALNNSIGVIGVAPNAELYAVKVLGANGSGSVSGIAQGLEWAATNNMHIANMSLGSDFPSSTLERAVNYATSRDVLVIAATGNNGSGSVGYPARYANAMAVGATDQNNRRANFSQYGTGIDIVAPGVNVQSTYPGNRYVSMNGTSMATPHVAGAAALVKQRYPSWNATQIRNHLKNTATNLGNSSQFGPGLVNAEAATR

SEQ ID NO: 66889 - protein, 268 aa, Unidentified
QTVPWGITRVQAPAVHNRGITGSGVRVAILDSGISAHEDLNIRGGASFVPGEPTTADLNGHGTHVAGTVAALNNSIGVIGVAPNADLYAVKVLGANGSGSVSGIAQGLEWAATNNMHIANMSLGSDFPSSTLERAVNYATSRDVLVIAATGNNGSGSVGYPARYANAMAVGATDQNNRRANFSQYGTGIDIVAPGVNVQSTYPGNRYVSMNGTSMATPHVAGAAALVKQRYPSWNATQIRDHLKNTATNLGNSSQFGSGLVNAEAATR

SEQ ID NO: 66890 - protein, 268 aa, Unidentified
QTVPWGITRVQAPAVHNRGITGSGVRVAILDSGISTHEDLNIRGGASFVPGEPTYADLNGHGTHVAGTVAALNNSIGVIGVAPSAELYAVKVLGANGRGSVSGIAQGLEWAAQNNMHIANMSLGTDAPSSTLERAVNYATSRDVLVIAATGNNGSGSVGYPARYANAMAVGATDQNNRRANFSQYGTGIDIVAPGVNVQSTYPGNRYVSMNGTSMATPHVAGAAALVKQRYPSWNATQIRDHLKNTATNLGNSSQFGSGLVNAEAATR

SEQ ID NO: 66891 - protein, 268 aa, Unidentified
QTVPWGITRVQAPAVHNRGITGSGVRVAILDSGISAHEDLNIRGGASFVPGEPTTADLNGHGTHVAGTVAALNNSIGVIGVAPNAELYAVKVLGANGRGSVSGIAQGLEWAATNNMHIANMSLGAEGPSSTLERAVNYATSRDVLVIAATGNNGSGSVGYPARYANAMAVGATDQNNQRANFSQYGTGIDIVAPGVNVQSTYPGNRYVSLSGTSMATPHVAGAAALVKQRYPSWNATQIRNHLKNTATNLGNSSQFGSGLVNAEAATR

SEQ ID NO: 66892 - protein, 268 aa, Unidentified
QTVPWGITRVQAPAVHNRGITGSGVKVAILDSGISTHEDLNIRGGVSFVPGEPTTADLNGHGTHVAGTVAALNNSIGVVGVAPSADLYAVKVLGANGRGSVSGIAQGLEWAAQNNMHIANMSLGSDAPSSTLERAVNYATSRDVLVIAATGNNGSGSVGYPARYANAMAVGATDQNNRRANFSQYGTGIDIVAPGVNVQSTYPGNRYVSMSGTSMATPHVAGAAALVKQRYPSWNATQIRDHLKNTATNLGNSSQFGSGLVNAEAATR

SEQ ID NO: 66893 - protein, 268 aa, Unidentified
QTVPWGITRVQAPAVHNRGITGSGVRVAILDSGISAHSDLNIRGGASFVPGEPTTADLNGHGTHVAGTVAALNNSIGVIGVAPNAELYAVKVLGANGSGSVSGIAQGLEWAATNNMHIANMSLGSDFPSSTLERAVNYATSRDVLVIAATGNNGSGSVGYPARYANAMAVGATDQNNRRANFSQYGTGIDIVAPGVNVQSTYPGNRYVSMNGTSMQSPHVAGAAALVKQRYPSWNATQIRNHLKNTATNLGNSSQFGSGLVNAEAATR

SEQ ID NO: 66894 - protein, 268 aa, Unidentified
QTVPWGITRVQAPAVHNRGITGSGVRVAILDSGISAHEDLNIRGGASFVPGEPTTADLNGHGTHVAGTVAALDNSIGVIGVAPNAELYAVKVLGANGRGSVSGIAQGLEWAATNNMHIANMSLGAEGPSSTLERAVNYATSRDVLVIAATGNNGSGSVQYPARYANAMAVGATDQNNQRANFSQYGTGIDIVAPGVNVQSTYPGNRYVSLNGTSMATPHVAGAAALVKQRYPSWNATQIRNHLKNTATNLGPSSQFGSGLVNAEAATR

SEQ ID NO: 66895 - protein, 268 aa, Unidentified
QTVPWGITRVQAPAVHNRGITGSGVRVAILDSGISAHSDLNIRGGASFVPGEPTTADLNGHGTHVAGTVAALNNSIGVIGVAPSADLYAVKVLGANGRGSISGIAQGLEWAAQNNMHIANMSLGSDFPSSTLERAVNYATSRDVLVIAATGNNGSGTISYPARYANAMAVGATDQNNRRANFSQYGTGIDIVAPGVNVQSTYPGNRYVSMSGTSMATPHVAGAAALVKQRYPSWNATQIRDHLKNTATNLGNSSQYGSGLVNAEAATR

SEQ ID NO: 66896 - protein, 268 aa, Unidentified
QTVPWGIERVQAPAVHNRGITGSGVRVAILDSGISAHSDLNIRGGASFVPGEPTTADLNGHGTHVAGTVAALNNSIGVIGVAPNAELYAVKVLGANGSGSVSGIAQGLEWAATNNMHIANMSLGSDFPSSTLERAVNYATSRDVLVIAATGNNGSGSVGYPARYANAMAVGATDQNNRRANFSQYGTGIDIVAPGVNVQSTYPGNRYVSMNGTSMQTPHVAGAAALVKQRYPSWNATQIRNHLKNTATNLGNSSQFGPGLVNAEAATR

SEQ ID NO: 66897 - protein, 268 aa, Unidentified
QTVPWGITRVQAPAVHNRGITGSGVRVAILDSGISAHSDLNIRGGASFVPGEPTTADLNGHGTHVAGTVAALNNDIGVIGVAPNAELYAVKVLGANGSGSVSGIAQGLEWAATNNMHIANMSLGSDQPSSTLERAVNYATSRDVLVIAATGNNGSGSVGYPARYANAMAVGATDQNNRRANFSQYGTGIDIVAPGVNVQSTYPGNRYVSMNGTSMATPHVAGAAALVKQRYPSWNATQIRNHLKNTATNLGNSSQFGPGLVNAEAATR

SEQ ID NO: 66898 - protein, 268 aa, Unidentified
QTVPWGITRVQAPAVHNRGITGSGVRVAILDSGISTHEDLNVRGGASFVPGEPTTADLNGHGTHVAGTVAALNNSIGVIGVAPNAELYAVKVLGANGRGSVSGIAQGLEWAAQNNMHIANMSLGSDFPSSTLERAVNYATSRDVLVIAATGNNGSGSVGYPARYANAMAVGATDQNNRRANFSQYGTGIDIVAPGVNVQSTYPGNRYVSMNGTSMATPHVAGAAALVKQRYPSWNATQIRDHLKNTATNLGNSSQFGSGLVNAEAATR

SEQ ID NO: 66899 - protein, 268 aa, Unidentified
QTVPWGITRVQAPAVHNRGITGSGVRVAILDSGISAHSDLNIRGGASFVPGEPTTADLNGHGTHVAGTVAALNNSIGVIGVAPNAELYAVKVLGANGSGSVSGIAQGLEWAATNNMHIANMSLGSDQPSSTLERAVNYATSRDVLVIAATGNNGSGSVGYPARYANAMAVGATDQNNRRANFSQYGTGIDIVAPGVNVQSTYPGNRYVSMNGTSMLSPHVAGAAALVKQRYPSWNATQIRNHLKNTATNLGNSSQFGSGLVNAEAATR

SEQ ID NO: 66900 - protein, 268 aa, Unidentified
QTVPWGISRVQAPAVHNRGITGSGVRVAILDSGISTHEDLNVRGGVSFVPGEPTTADLNGHGTHVAGTVAALNNSIGVVGVAPSADLYAVKVLGANGRGSVSGIAQGLEWAAANNMHIANMSLGSDAPSSTLERAVNYATSRDVLVIAATGNNGSGSVGYPARYANAMAVGATDQNNRRANFSQYGTGIDIVAPGINVQSTYPGNRYVSMNGTSMATPHVAGAAALVKQRYPSWNATQIRNHLKNTATNLGNSSQFGSGLVNAEAATR

SEQ ID NO: 66901 - protein, 268 aa, Unidentified
QTVPWGITRVQAPAVHNRGITGSGVRVAILDSGISAHEDLNIRGGASFVPGEPTTADLNGHGTHVAGTVAALNNSIGVIGVAPNAELYAVKVLGANGRGSVSGIAQGLEWAAANNMHIANMSLGTDFPSSTLERAVNYATSRDVLVIAATGNNGSGSVGYPARYANAMAVGATDQNNRRANFSQYGTGIDIVAPGVNVQSTYPGNRYVSMNGTSMATPHVAGAAALVKQRYPSWNATQIRNHLKNTATNLGNSSQFGSGLVNAEAATR

SEQ ID NO: 66902 - protein, 268 aa, Unidentified
QTVPWGITRVQAPAVHNRGITGSGVRVAILDSGISAHSDLNIRGGASFVPGEPTTADLNGHGTHVAGTVAALNNSIGVIGVAPNAELYAVKVLGANGSGSVSGIAQGLEWAATNNMHIANMSLGSDFPSSTLERAVNYATSRDVLVIAATGNNGSGSVGYPARYQNAMAVGATDQNNRRANFSQYGTGIDIVAPGVNVQSTYPGNRYVIMNGTSMATPHVAGAAALVKQRYPSWNATQIRNHLKNTATNLGNSSQFGSGLVNAEAATR

SEQ ID NO: 66903 - protein, 268 aa, Unidentified
QTVPWGITRVQAPAVHNRGITGSGVRVAILDSGISAHEDLNIRGGASFVPGEPTTADLNGHGTHVAGTVAALNNSIGVIGVAPNAELYAVKVLGANGRGSVSGIAQGLEWAATNNMHIANMSLGAEGPSSTLERAVNYATSRDVLVIAATGNNGSGSVQYPARYANAMAVGATDQNNQRANFSQYGTGIDIVAPGVNVQSTYPGNRYVSMNGTSMATPHVAGAAALVKQRYPSWNATQIRNHLKNTATNLGPSSQFGSGLVNAEAATR

SEQ ID NO: 66904 - protein, 268 aa, Unidentified
QTVPWGITRVQAPAVHNRGITGSGVRVAILDSGISAHEDLNIRGGASFVPGEPTTADLNGHGTHVAGTVAALNNSIGVIGVAPNAELYAVKVLGANGRGSVSGIAQGLEWAATNNMHIANMSLGAEGPSSTLERAVNYATSRDVLVIAATGNNGSGSVQYPARYANAMAVGATDQNNQRANFSQYGTGIDIVAPGVNVQSTYPGNRYVSMNGTSMATPHVAGAAALVKQRYPSWNATQIRNHLKNTATNLGNSSQFGSGLVNAEAATR

SEQ ID NO: 66905 - protein, 268 aa, Unidentified
QTVPWGITRVQAPAVHNRGITGSGVRVAILDSGISAHEDLNIRGGVSFVPGEPTYADLNGHGTHVAGTVAALNNSIGVVGVAPSAELYAVKVLGANGRGSVSGIAQGLEWAAQNNMHIANMSLGSDFPSSTLERAVNYATSRDVLVIAATGNNGSGSVGYPARYANAMAVGATDQNNRRANFSQYGTGIDIVAPGVNVQSTYPGNRYVSMNGTSMATPHVAGAAALVKQRYPSWNATQIRNHLKNTATNLGNSSQFGSGLVNAEAATR

SEQ ID NO: 66906 - protein, 268 aa, Unidentified
QTVPWGITRVQAPAVHNRGITGSGVRVAILDSGISTHEDLNVRGGVSFVPGEPTYADLNGHGTHVAGTVAALNNSIGVVGVAPSADLYAVKVLGANGSGSVSGIAQGLEWAAQNNMHIANMSLGSQSPSSTLERAVNYATSRDVLVIAATGNNGSGSVGYPARYANAMAVGATDQNNRRANFSQYGTGIDIVAPGVNVQSTYPGNRYVSMNGTSMATPHVAGAAALVKQRYPSWNATQIRDHLKNTATNLGNSSQFGSGLVNAEAATR

SEQ ID NO: 66907 - protein, 268 aa, Unidentified
QTVPWGITRVQAPAVHNRGITGSGVRVAILDSGISTHEDLNVRGGVSFVPGEPTTADLNGHGTHVAGTVAALNNSIGVVGVAPSADLYAVKVLGANGRGSISGIAQGLEWAAANNMHVANMSLGTDAPSSTLERAVNYATSRDVLVIAATGNNGSGSVGYPARYANAMAVGATDQNNRRANFSQYGTGIDIVAPGVNVQSTYPGNRYVSMNGTSMATPHVAGAAALVKQRYPSWNATQIRNHLKNTATNLGNSSQYGSGLVNAEAATR

SEQ ID NO: 66908 - protein, 268 aa, Unidentified
QTVPWGITRVQAPAVHNRGITGSGVRVAILDSGISAHEDLNIRGGASFVPGEPTTADLNGHGTHVAGTVAALDNSIGVIGVAPNAELYAVKVLGANGRGSVSGIAQGLEWAATNNMHIANMSLGAEGPSSTLERAVNYATSRDVLVIAATGNNGSGSVGYPARYANAMAVGATDQNNRRANFSQYGTGIDIVAPGVNVQSTYPGNRYVSLNGTSMATPHVAGAAALVKQRYPSWNATQIRNHLKNTATNLGNSSEFGSGLVNAEAATR

SEQ ID NO: 66909 - protein, 268 aa, Unidentified
QTVPWGITRVQAPAVHNRGITGSGVRVAILDSGISAHEDLNIRGGASFVPGEPTTADLNGHGTHVAGTVAALNNSIGVIGVAPNADLYAVKVLGANGRGSVSGIAQGLEWAATNNMHIANMSLGSDAPSSTLERAVNYATSRDVLVIAATGNNGSGSVGYPARYANAMAVGATDQNNRRANFSQYGTGIDIVAPGVNVQSTYPGNRYVSMNGTSMATPHVAGAAALVKQRYPSWNATQIRNHLKNTATNLGNSSQFGSGLVNAEAATR

SEQ ID NO: 66910 - protein, 268 aa, Unidentified
QTVPWGITRVQAPAVHNRGITGSGVRVAILDSGISAHEDLNVRGGASFVPGEPTTADLNGHGTHVAGTVAALNNSIGVIGVAPNAELYAVKVLGANGRGSVSGIAQGLEWAATNNMHIANMSLGAEGPSSTLERAVNYATSRDVLVIAATGNNGSGSVGYPARYANAMAVGATDQNNRRANFSQYGTGIDIVAPGVNVQSTYPGNRYVSLNGTSMATPHVAGAAALVKQRYPSWNATQIRNHLKNTATNLGNSSQFGSGLVNAEAATR

SEQ ID NO: 66911 - protein, 268 aa, Unidentified
QTVPWGITRVQAPAVHNRGITGSGVRVAILDSGISAHSDLNIRGGASFVPGEPTTADLNGHGTHVAGTVAALNNDIGVIGVAPNAELYAVKVLGANGSGSVSGIAQGLEWAATNNMHIANMSLGSDQPSSTLERAVNYATSRDVLVIAATGNNGSGSVGYPARYANAMAVGATDQNNRRANFSQYGTGIDIVAPGVNVQSTYPGNRYVSMNGTSMASPHVAGAAALVKQRYPSWNATQIRNHLKNTATNLGNSSQFGSGLVNAEAATR

SEQ ID NO: 66912 - protein, 268 aa, Unidentified
QTVPWGITRVQAPAVHNRGITGSGVRVAILDSGISAHEDLNIRGGASFVPGEPTTADLNGHGTHVAGTVAALNNSIGVIGVAPSAELYAVKVLGANGRGSVSGIAQGLEWAATNNMHIANMSLGAEGPSSTLERAVNYATSRDVLVIAATGNNGSGSVGYPARYANAMAVGATDQNNRRANFSQYGTGIDIVAPGVNVQSTYPGNRYVSMNGTSMATPHVAGAAALVKQRYPSWNATQIRDHLKNTATNLGNSSQFGSGLVNAEAATR

SEQ ID NO: 66913 - protein, 268 aa, Unidentified
QTVPWGITRVQAPAVHNRGITGSGVRVAILDSGISAHEDLNIRGGASFVPGEPTTADLNGHGTHVAGTVAALDNSIGVIGVAPNAELYAVKVLGANGRGSVSGIAQGLEWAATNNMHIANMSLGAEGPSSTLERAVNYATSRDVLVIAATGNNGSGSVQYPARYANAMAVGATDQNNRRANFSQYGTGIDIVAPGVNVQSTYPGNRYVSLNGTSMATPHVAGAAALVKQRYPSWNATQIRNHLKNTATNLGPSSQFGSGLVNAEAATR

SEQ ID NO: 66914 - protein, 268 aa, Unidentified
QTVPWGITRVQAPAVHNRGITGSGVRVAILDSGISAHEDLNIRGGASFVPGEPTTADLNGHGTHVAGTVAALNNNIGVIGVAPNAELYAVKVLGANGRGSVSGIAQGLEWAATNNMHIANMSLGSDFPSSTLERAVNYATSRDVLVIAATGNNGSGSVGYPARYANAMAVGATDQNNRRANFSQYGTGIDIVAPGVNVQSTYPGNRYVSMNGTSMATPHVAGAAALVKQRYPSWNATQIRNHLKNTATNLGNSSQFGSGLVNAEAATR

SEQ ID NO: 66915 - protein, 268 aa, Unidentified
QTVPWGITRVQAPAVHNRGITGSGVRVAILDSGISAHEDLNIRGGASFVPGEPTTADLNGHGTHVAGTVAALDNSIGVIGVAPNAELYAVKVLGANGRGSVSGIAQGLEWAATNNMHIANMSLGAEGPSSTLERAVNYATSRDVLVIAATGNNGSGSVQYPARYANAMAVGATDQNNQRANFSQYGTGIDIVAPGVNVQSTYPGNRYVSLNGTSMATPHVAGAAALVKQRYPSWNATQIRNHLKNTATNLGNSSQFGSGLVNAEAATR

SEQ ID NO: 66916 - protein, 268 aa, Unidentified
QTVPWGITRVQAPAVHNRGITGSGVRVAILDSGISAHEDLNIRGGASFVPGEPTTADLNGHGTHVAGTVAALDNSIGVIGVAPNAELYAVKVLGANGRGSVSGIAQGLEWAATNNMHIANMSLGAEGPSSTLERAVNYATSRDVLVIAATGNNGSGSVGYPARYANAMAVGATDQNNQRANFSQYGTGIDIVAPGVNVQSTYPGNRYVSLNGTSMATPHVAGAAALVKQRYPSWNATQIRNHLKNTATNLGNSSQFGSGLVNAEAATR

SEQ ID NO: 66917 - protein, 268 aa, Unidentified
QTVPWGITRVQAPAVHNRGITGSGVRVAILDSGISAHSDLNIRGGASFVPGEPTTADLNGHGTHVAGTVAALNNSIGVIGVAPNAELYAVKVLGANGSGSVSGIAQGLEWAATNNMHIANMSLGSDFPSSTLERAVNYATSRDVLVIAATGNNGSGSVGYPARYQNAMAVGATDQNNRRANFSQYGTGIDIVAPGVNVQSTYPGNRYVSMNGTSMATPHVAGAAALVKQRYPSWNATQIRNHLKNTDTNLGNSSQFGSGLVNAEAATR

SEQ ID NO: 66918 - protein, 268 aa, Unidentified
QTVPWGITRVQAPAVHNRGITGSGVRVAILDSGISAHEDLNIRGGASFVPGEPTTADLNGHGTHVAGTVAALDNSIGVIGVAPNAELYAVKVLGANGRGSVSGIAQGLEWAATNNMHIANMSLGAEGPSSTLERAVNYATSRDVLVIAATGNNGSGSVQYPARYANAMAVGATDQNNRRANFSQYGTGIDIVAPGVNVQSTYPGNRYVSLNGTSMATPHVAGAAALVKQRYPSWNATQIRNHLKNTATNLGNSSQFGSGLVNAEAATR

SEQ ID NO: 66919 - protein, 268 aa, Unidentified
QTVPWGITRVQAPAVHNRGITGSGVRVAILDSGISAHEDLNIRGGASFVPGEPTTADLNGHGTHVAGTVAALNNSIGVIGVAPNAELYAVKVLGANGRGSVSGIAQGLEWAAXNNMHIANMSLGTDAPSSTLERAVNYATSRDVLVIAATGNNGSGSVGYPARYANAMAVGATDQNNRRANFSQYGTGIDIVAPGVNVQSTYPGNRYVSMNGTSMATPHVAGAAALVKQRYPSWNATQIRNHLKNTATNLGNSSQFGSGLVNAEAATR

SEQ ID NO: 66920 - protein, 274 aa, Unidentified
QTVPWGITRVQAPAVHNRGITGSGVRVAILDSGISTXHEDLNVRGGVSFVPGEPTXTADLNGHGTHVAGTVAALNNSIGVVGVAPSADLYAVKVLGANGRGSVSGIAQGLEWAAXNNMHIANMSLGSDAPSSTLERAVNYATSRDVLVIAATGNNGSXXXXGSVGYPARYANAMAVGATDQNNRRANFSQYGTGIDIVAPGVNVQSTYPGNRYVSMNGTSMATPHVAGAAALVKQRYPSWNATQIRNHLKNTATNLGNSSQFGSGLVNAEAATR

SEQ ID NO: 66921 - protein, 268 aa, Unidentified
QTVPWGITRVQAPAVHNRGITGSGVRVAILDSGISAHEDLNIRGGASFVPGEPTTADLNGHGTHVAGTVAALNNSIGVIGVAPNAELYAVKVLGANGRGSVSGIAQGLEWAATNNMHIANMSLGAEGPSSTLERAVNYATSRDVLVIAATGNNGSGSVGYPARYANAMAVGATDQNNQRANFSQYGTGIDIVAPGVNVQSTYPGNRYVSLSGTSMATPHVAGAAALVKQRYPSWNATQIRNHLKNTATNLGPSSQFGSGLVNAEAATR

SEQ ID NO: 66922 - protein, 268 aa, Unidentified
QTVPWGITRVQAPAVHNRGITGSGVRVAILDSGISTHEDLNVRGGVSFVPGEPTTADLNGHGTHVAGTVAALNNSIGVIGVAPNAELYAVKVLGANGSGSVSGIAQGLEWAATNNMHIANMSLGSDFPSSTLERAVNYATSRDVLVIAATGNNGSGSVGYPARYANAMAVGATDQNNRRANFSQYGTGIDIVAPGVNVQSTYPGNRYVSMNGTSMATPHVAGAAALVKQRYPSWNATQIRDHLKNTATNLGNSSQFGSGLVNAEAATR

SEQ ID NO: 66923 - protein, 268 aa, Unidentified
QTVPWGIERVQAPAVHNRGITGQGVRVAILDSGISAHSDLNIRGGASFVPGEPTTADLNGHGTHVAGTVAALNNSIGVIGVAPNAELYAVKVLGANGSGSVSGIAQGLEWAATNNMHIANMSLGSDFPSSTLERAVNYATSRDVLVIAATGNNGSGSVGYPARYQNAMAVGATDQNNRRANFSQYGTGIDIVAPGVNVQSTYPGNRYVSMNGTSMATPHVAGAAALVKQRYPSWNATQIRNHLKNTATNLGNSSQFGSGLVNAEAATR

SEQ ID NO: 66924 - protein, 268 aa, Unidentified
QTVPWGITRVQAPAVHNRGITGSGVRVAILDSGISAHSDLNIRGGASFVPGEPTTADLNGHGTHVAGTVAALNNSIGVIGVAPNAELYAVKVLGANGSGSVSGIAQGLEWAATNNMHIANMSLGSDFPSSTLERAVNYATSRDVLVIAATGNNGSGSVGYPARYANAMAVGATDQNNRRANFSQYGTGIDIVAPGVNVQSTYPGNRYVIMNGTSMATPHVAGAAALVKQRYPSWNATQIRNHLKNTATNLGNSSQFGPGLVNAEAATR

SEQ ID NO: 66925 - protein, 268 aa, Unidentified
QTVPWGITRVQAPAVHNRGVTGSGVRVAILDSGISQHSDLTIRGGASFVPGEPTTEDLNGHGTHVAGTVAALNNSFGVIGVAPSADLYAVKVLGAGGRGSVSGIAQGLEWAAANNMHIANMSLGADAPSSTLERAVNYATSRGVLVIAATGNNGSGSVGYPARYANAMAVGATDQNNRRANFSQYGTGIDIVAPGVNVQSTYPGNRYASLNGTSMATPHVAGVAALVKQRNPSWNATQIRNHLKNTATNLGNSSQFGSGLVNAEAAIR

SEQ ID NO: 66926 - protein, 268 aa, Unidentified
QTVPWGITRVQAPAVHNRGITGSGVRVAILDSGISAHEDLNIRGGASFVPGEPTYADLNGHGTHVAGTVAALNNSIGVIGVAPNADLYAVKVLGANGSGSVSGIAQGLEWAAQNNMHIANMSLGSDFPSSTLERAVNYATSRDVLVIAATGNNGSGSVGYPARYANAMAVGATDQNNRRANFSQYGTGIDIVAPGVNVQSTYPGNRYVSMNGTSMATPHVAGAAALVKQRYPSWNATQIRNHLKNTATNLGNSSQFGSGLVNAEAATR

SEQ ID NO: 66927 - protein, 268 aa, Unidentified
QTVPWGITRVQAPAVHNRGITGSGVRVAILDSGISAHSDLNIRGGASFVPGEPTTADLNGHGTHVAGTVAALNNSIGVIGVAPNAELYAVKVLGANGSGIISGIAQGLEWAATNNMHIANMSLGSDFPSSTLERAVNYATSRDVLVIAATGNNGSGSVGYPARYANAMAVGATDQNNRRANFSQYGTGIDIVAPGVNVQSTYPGNRYVSMNGTSMATPHVAGAAALVKQRYPSWNATQIRNHLKNTATNLGNSSQFGSGLVNAEAATR

SEQ ID NO: 66928 - protein, 268 aa, Unidentified
QTVPWGITRVQAPAVHNRGITGSGVRVAILDSGISAHSDLNIRGGASFVPGEPTTADLNGHGTHVAGTVAALNNSIGVIGVAPNAELYAVKVLGANGSGSVSGIAQGLEWAATNNMHIANMSLGSDQPSSTLERAVNYATSRDVLVIAATGNNGSGSVGYPARYANAMAVGATDQNNRRANFSQYGTGIDIVAPGVNVQSTYPGNRYVSMNGTSMATPHVAGAAALVKQRYPSWNATQIRNHLKNTDTNLGNSSQFGPGLVNAEAATR

SEQ ID NO: 66929 - protein, 268 aa, Unidentified
QTVPWGITRVQAPAVHNRGVTGSGVRVAILDSGISAHSDLNIRGGASFVPGEPTTADLNGHGTHVAGTVAALNNSIGVVGVAPSADLYAVKVLGANGSGSVSGIAQGLEWAATNNIHIANMSLGSDAPSTTLERAVNYATSQGVLVIAATGNNGSGSVGYPARYANAMAVGATDQNNRRANFSQYGTGIDIVAPGVNVQSTYPGNRYVSMNGTSMATPHVAGVAALVKQRYPSWNATQIRNHLKNTATNLGNSSQFGSGLVNAEAATR

SEQ ID NO: 66930 - protein, 268 aa, Unidentified
QTVPWGIERVQAPAVHNRGITGSGVRVAILDSGISAHSDLNIRGGASFVPGEPTTADLNGHGTHVAGTVAALNNSIGVIGVAPNAELYAVKVLGANGSGSVSGIAQGLEWAATNNMHIANMSLGSDFPSSTLERAVNYATSRDVLVIAATGNNGSGSVGYPARYANAMAVGATDQNNRRANFSQYGTGIDIVAPGVNVQSTYPGNRYVSMNGTSMASPHVAGAAALVKQRYPSWNATQIRNHLKNTATNLGNSSQFGPGLVNAEAATR

SEQ ID NO: 66931 - protein, 268 aa, Unidentified
QTVPWGITRVQAPAVHNRGITGSGVRVAILDSGISAHEDLNIRGGASFVPGEPTTADLNGHGTHVAGTVAALDNSIGVIGVAPSAELYAVKVLGANGRGSVSGIAQGLEWAATNNMHIANMSLGAEGPSSTLERAVNYATSRDVLVIAATGNNGSGSVGYPARYANAMAVGATDQNNRRANFSQYGTGIDIVAPGVNVQSTYPGNRYVSMNGTSMATPHVAGAAALVKQRYPSWNATQIRNHLKNTATNLGNSSQFGSGLVNAEAATR

SEQ ID NO: 66932 - protein, 268 aa, Unidentified
QTVPWGITRVQAPAVHNRGITGSGVRVAILDSGISAHEDLNIRGGASFVPGEPTTADLNGHGTHVAGTVAALNNSIGVIGVAPNAELYAVKVLGANGRGSVSGIAQGLEWAATNNMHIANMSLGSDFPSSTLERAVNYATSRDVLVIAATGNNGSGSVGYPARYANAMAVGATDQNNRRANFSQYGTGIDIVAPGVNVQSTYPGNRYVSMSGTSMATPHVAGAAALVKQRYPSWNATQIRNHLKNTATNLGNSSQFGSGLVNAEAATR

SEQ ID NO: 66933 - protein, 268 aa, Unidentified
QTVPWGITRVQAPAVHNRGITGSGVRVAILDSGISAHEDLNIRGGASFVPGEPTTADLNGHGTHVAGTVAALNNSIGVVGVAPNAELYAVKVLGANGRGSVSGIAQGLEWAAQNNMHIANMSLGSDFPSSTLERAVNYATSRDVLVIAATGNNGSGSVGYPARYANAMAVGATDQNNRRANFSQYGTGIDIVAPGVNVQSTYPGNRYVSMNGTSMATPHVAGAAALVKQRYPSWNATQIRDHLKNTATNLGNSSQFGSGLVNAEAATR

SEQ ID NO: 66934 - protein, 268 aa, Unidentified
QTVPWGITRVQAPAVHNRGITGSGVRVAILDSGISTHEDLNIRGGVSFVPGEPTTADLNGHGTHVAGTVAALNNSIGVVGVAPSADLYAVKVLGANGRGSVSGIAQGLEWAAANNMHIANMSLGTDAPSSTLERAVNYATSRDVLVIAATGNNGSGSVGYPARYANAMAVGATDQNNRRANFSQYGTGIDIVAPGVNVQSTYPGNRYVSMNGTSMATPHVAGAAALVKQRYPSWNATQIRNHLKNTATNLGNSSQFGSGLVNAEAATR

SEQ ID NO: 66935 - protein, 268 aa, Unidentified
QTVPWGITRVQAPAVHNRGITGSGVRVAILDSGISAHEDLNIRGGASFVPGEPTTADLNGHGTHVAGTVAALDNSIGVIGVAPRAELYAVKVLGANGRGSVSGIAQGLEWAATNNMHIANMSLGAEGPSSTLERAVNYATSRDVLVIAATGNNGSGSVQYPARYANAMAVGATDQNNQRANFSQYGTGIDIVAPGVNVQSTYPGNRYVSLNGTSMATPHVAGAAALVKQRYPSWNATQIRNHLKNTATNLGNSSQFGSGLVNAEAATR

SEQ ID NO: 66936 - protein, 268 aa, Unidentified
QTVPWGITRVQAPAVHNRGITGSGVRVAILDSGISAHSDLNIRGGASFVPGEPTTADLNGHGTHVAGTVAALNNSIGVIGVAPNAELYAVKVLGANGRGSVSGIAQGLEWAATNNMHIANMSLGSDAPSSTLERAVNYATSRDVLVIAATGNNGSGSVGYPARYANAMAVGATDQNNRRANFSQYGTGIDIVAPGVNVQSTYPGNRYVSMNGTSMATPHVAGAAALVKQRYPSWNATQIRDHLKNTATNLGNSSQFGSGLVNAEAATR

SEQ ID NO: 66937 - protein, 268 aa, Unidentified
QTVPWGITRVQAPAVHNRGITGSGVRVAILDSGISAHEDLNIRGGASFVPGEPTTADLNGHGTHVAGTVAALNNSIGVVGVAPNAELYAVKVLGANGRGSVSGIAQGLEWAATNNMHIANMSLGAEGPSSTLERAVNYATSRDVLVIAATGNNGSGSVGYPARYANAMAVGATDQNNRRANFSQYGTGIDIVAPGVNVQSTYPGNRYVSMNGTSMATPHVAGAAALVKQRYPSWNATQIRNHLKNTATNLGNSSQFGSGLVNAEAATR

SEQ ID NO: 66938 - protein, 268 aa, Unidentified
QTVPWGITRVQAPAVHNRGITGSGVRVAILDSGISAHEDLNIRGGASFVPGEPTTADLNGHGTHVAGTVAALNNSIGVIGVAPNAELYAVKVLGANGRGSVSGIAQGLEWAATNNMHIANMSLGAEGPSSTLERAVNYATSRDVLVIAATGNNGSGSVQYPARYANAMAVGATDQNNQRANFSQYGTGIDIVAPGVNVQSTYPGNRYVSLSGTSMATPHVAGAAALVKQRYPSWNATQIRNHLKNTATNLGNSSQFGSGLVNAEAATR

SEQ ID NO: 66939 - protein, 374 aa, Bacillus sp.
MGKIVAGTALIISVAFSSSIAQAAEEAKEKYLIGFKEQEVMSQFVDQIDGDEYSISSQAEDVEIDLLHEFDFIPVLSVELDPEDVDALELDPAIAYIEEDAEVTTMQTVPWGINRVQAPIAQSRGFTGTGVRVAVLDTGISNHADLRIRGGASFVPGEPNISDGNGHGTHVAGTIAALNNSIGVLGVAPNVDLYGVKVLGASGSGSISGIAQGLQWAANNGMHIANMSLGSSAGSATMEQAVNQATASGVLVVAASGNSGAGNVGFPARYANAMAVGATDQNNNRASFSQYGAGLDIVAPGVGVQSTVPGNGYASFNGTSMATPHVAGVAALVKQKNPSWSNVQIRNHLKNTATNLGNTTQFGSGLVNAEAATR

SEQ ID NO: 66940 - protein, 267 aa, Unidentified
QTVPWGITRVQAPAVHNRGITGSGVKVAILDSGISAHSDLNIRGGASFVPGEPTTADLNGHGTHVAGTVAALDNSIGVIGVAPNAELYAVKVLGANGRGSISGIAQGLEWAAQNNMHIANMSLGTDAPSSTLERAVNYATSRDVLVIAATGNNGSGSVGYPARYANAMAVGATDQNNRRANFSQYGAGLDIVAPGVNVQSTYPGNRYVSMGTSMATPHVAGAAALVKQRYPSWNATQIRDHLKNTATNLGNSSQFGSGLVNAEAATR

SEQ ID NO: 66941 - protein, 335 aa, Unidentified
EKGIEEVMASNLKVGDMIAAVAESESEARDCGMSEECVMEAEVYTSLEATFDRVKSIAYEKGDFDVYDLSVPEYGRNFIGGEGLLVLHNSGVKVAVLDTGISTHPDLNIRGGASFVPGEPSTQDGNGHGTHVAGTIAALNNSIGVLGVAPSAELYAVKVLGASGSGSVSSIAQGLEWAGNNGMHVANLSLGSPSPSATLEQAVNSATSRGVLVVAASGNSGAGSISYPARYANAMAVGATDQNNNRASFSQYGAGLDIVAPGVNVQSTYPGSTYASLNGTSMATPHVAGAAALVKQKNPSWSNVQIRNHLKNTATSLGSTNLYGSGLVNAEAATR

SEQ ID NO: 66942 - protein, 184 aa, Unidentified
ASFGNGHGTHVAGTIAALNNSIGVLGVAPSAELYAVKVLGASGSGSVSSIAQGVANLSLGSPSPSATLEQAVNSATSRGVLVVAASGNSGAGSISYPARDQNNNRASFSQYGAGLDIVAPGVNVQSTYPGSTYASLNGTSMATPHVAGAWSNVQIRNHLKNTATSLGSTNLYGSGLVNAEAATR

SEQ ID NO: 66943 - protein, 374 aa, Bacillus sp.
MGKIVAGTALIISVAFSSSIAQAAEEAKEKYLIGFKEQEVMSQFVDQIDGDEYSISSQAEDVEIDLLHEFDFIPVLSVELDPEDVDALELDPAIAYIEEDAEVTTMQTVPWGINRVQAPIAQSRGFTGTGVRVAVLDTGISNHADLRIRGGASFVPGEPNISDGNGHGTHVAGTIAALNNSIGVLGVAPNVDLYGVKVLGADGSGSISGIAQGLQWAANNGMHIANMSLGSSAGSATMEQAVNQATASGVLVVAASGNSGAGNVGFPARYANAMAVGATDQNNNRASFSQYGAGLDIVAPGVGVQSTVPGNGYASFNGTSMATPHVAGVAALVKQKNPSWSNVQIRNHLKNTATNLGNTTQFGSGLVNAEAATR

SEQ ID NO: 66944 - protein, 374 aa, Bacillus sp.
MGKIVAGTALIISVAFSSSIAQAAEEAKEKYLIGFKEQEVMSQFVDQIDGDEYSISSQAEDVEIDLLHEFDFIPVLSVELDPEDVDALELDPAIAYIEEDAEVTTMQTVPWGINRVQAPIAQSRGFTGTGVRVAVLDTGISNHADLRIRGGASFVPGEPNISDGNGHGTHVAGTIAALNNSIGVLGVAPNVDLYGVKVLGASGEGSISGIAQGLQWAANNGMHIANMSLGSSAGSATMEQAVNQATASGVLVVAASGNSGAGNVGFPARYANAMAVGATDQNNNRASFSQYGAGLDIVAPGVGVQSTVPGNGYASFNGTSMATPHVAGVAALVKQKNPSWSNVQIRNHLKNTATNLGNTTQFGSGLVNAEAATR

SEQ ID NO: 66945 - protein, 268 aa, Unidentified
QTVPWGITRVQAPAVHNRGITGSGVRVAILDSGISAHEDLNIRGGASFVPGEPTTADLNGHGTHVAGTVAALNNSIGVIGVAPNADLYAVKVLGANGRGSVSGIAQGLEWAATNNMHIANMSLGTDFPSSTLERAVNYATSRDVLVIAATGNNGSGSVGYPARYANAMAVGATDQNNRRANFSQYGTGIDIVAPGVNVQSTYPGNRYVSMNGTSMATPHVAGAAALVKQRYPSWNATQIRNHLKNTATNLGNSSQFGSGLVNAEAATR

SEQ ID NO: 66946 - protein, 268 aa, Unidentified
QTVPWGITRVQAPAVHNRGITGSGVRVAILDSGISTHEDLNVRGGVSFVPGEPTYADLNGHGTHVAGTVAALNNSIGVVGVAPSADLYAVKVLGANGSGSVSGIAQGLEWAAQNNMHIANMSLGSLNPSSTLERAVNYATSRDVLVIAATGNNGSGSVGYPARYANAMAVGATDQNNRRANFSQYGTGIDIVAPGVNVQSTYPGNRYVSMNGTSMATPHVAGAAALVKQRYPSWNATQIRDHLKNTATNLGNSSQFGSGLVNAEAATR

SEQ ID NO: 66947 - protein, 268 aa, Unidentified
QTVPWGITRVQAPAVHNRGITGSGVRVAILDSGISAHSDLNIRGGASFVPGEPTTADLNGHGTHVAGTVAALNNSIGVIGVAPNAELYAVKVLGANGRGSVSGIAQGLEWAATNNMHIANMSLGTDFPSSTLERAVNYATSRDVLVIAATGNNGSGSVGYPARYANAMAVGATDQNNRRANFSQYGTGIDIVAPGVNVQSTYPGNRYVSMNGTSMATPHVAGAAALVKQRYPSWNATQIRDHLKNTATNLGNSSQFGSGLVNAEAATR

SEQ ID NO: 66948 - protein, 268 aa, Unidentified
QTVPWGITRVQAPAVHNRGITGSGVRVAILDSGISAHEDLNIRGGASFVPGEPTTADLNGHGTHVAGTVAALDNSIGVIGVAPRAELYAVKVLGANGRGSVSGIAQGLEWAATNNMHIANMSLGAEGPSSTLERAVNYATSRDVLVIAATGNNGSGSVGYPARYANAMAVGATDQNNRRANFSQYGTGIDIVAPGVNVQSTYPGNRYVSLSGTSMATPHVAGAAALVKQRYPSWNATQIRNHLKNTATNLGNSSQFGSGLVNAEAATR

SEQ ID NO: 66949 - protein, 268 aa, Unidentified
QTVPWGITRVQAPAVHNRGITGSGVRVAILDSGISAHSDLNIRGGASFVPGEPTTADLNGHGTHVAGTVAALDNSIGVIGVAPSADLYAVKVLGANGRGSISGIAQGLEWAATNNMHIANMSLGTDAPSSTLERAVNYATSRDVLVIAATGNNGSGSVGYPARYANAMAVGATDQNNRRANFSQYGTGLDIVAPGVNVQSTYPGNRYVSMNGTSMATPHVAGAAALVKQRYPSWNATQIRDHLKNTATNLGNSSQYGSGLVNAEAATR

SEQ ID NO: 66950 - protein, 268 aa, Unidentified
QTVPWGITRVQAPAVHNRGITGSGVRVAILDSGISAHEDLNIRGGASFVPGEPTTADLNGHGTHVAGTVAALDNSIGVIGVAPNAELYAVKVLGANGRGSVSGIAQGLEWAATNNMHIANMSLGAEGPSSTLERAVNYATSRDVLVIAATGNNGSGSVGYPARYANAMAVGATDQNNRRANFSQYGTGIDIVAPGVNVQSTYPGNRYVSLNGTSMATPHVAGAAALVKQRYPSWNATQIRDHLKNTATNLGNSSQFGSGLVNAEAATR

SEQ ID NO: 66951 - protein, 268 aa, Unidentified
QTVPWGITRVQAPAVHNRGITGSGVRVAILDSGISAHEDLNIRGGASFVPGEPTTADLNGHGTHVAGTVAALNNSIGVIGVAPNADLYAVKVLGANGRGSVSGIAQGLEWAATNNMHIANMSLGAEGPSSTLERAVNYATSRDVLVIAATGNNGSGSVGYPARYANAMAVGATDQNNRRANFSQYGTGIDIVAPGVNVQSTYPGNRYVSMNGTSMATPHVAGAAALVKQRYPSWNATQIRNHLKNTATNLGNSSQFGSGLVNAEAATR

SEQ ID NO: 66952 - protein, 268 aa, Unidentified
QTVPWGITRVQAPAVHNRGITGSGVRVAILDSGISTHEDLNVRGGVSFVPGEPTYADLNGHGTHVAGTVAALNNSIGVVGVAPSAELYAVKVLGANGRGSVSGIAQGLEWAAQNNMHIANMSLGSEGPSSTLERAVNYATSRDVLVIAATGNNGSGSVGYPARYANAMAVGATDQNNRRANFSQYGTGIDIVAPGVNVQSTYPGNRYVSMNGTSMATPHVAGAAALVKQRYPSWNATQIRDHLKNTATNLGNSSQFGSGLVNAEAATR

SEQ ID NO: 66953 - protein, 268 aa, Unidentified
QTVPWGITRVQAPAVHNRGITGSGVRVAILDSGISAHEDLNVRGGASFVPGEPTTADLNGHGTHVAGTVAALNNSIGVIGVAPNADLYAVKVLGANGRGSVSGIAQGLEWAAQNNMHIANMSLGSDFPSSTLERAVNYATSRDVLVIAATGNNGSGSVGYPARYANAMAVGATDQNNRRANFSQYGTGIDIVAPGVNVQSTYPGNRYVSMNGTSMATPHVAGAAALVKQRYPSWNATQIRNHLKNTATNLGNSSQFGSGLVNAEAATR

SEQ ID NO: 66954 - protein, 268 aa, Unidentified
QTVPWGITRVQAPAVHNRGITGSGVRVAILDSGISTHEDLNVRGGVSFVPGEPTYADLNGHGTHVAGTVAALNNSIGVVGVAPSADLYAVKVLGANGSGSVSGIAQGLEWAAQNNMHIANMSLGSGQPSSTLERAVNYATSRDVLVIAATGNNGSGSVGYPARYANAMAVGATDQNNRRANFSQYGTGIDIVAPGVNVQSTYPGNRYVSMNGTSMATPHVAGAAALVKQRYPSWNATQIRDHLKNTATNLGNSSQFGSGLVNAEAATR

SEQ ID NO: 66955 - protein, 268 aa, Unidentified
QTVPWGITRVQAPTVHNRGITGSGVKVAILDTGIAQHSDLTIRGGASFVPGESTTADLNGHGTHVAGTVAALNNSIGVIGVAPSADLYAVKVLGANGRGSVSGIAQGLEWAATNNMHIANMSLGSPAPSTTLERAVNYATSRGVLVIAATGNNGTGSIGYPARYANAMAVGATDQNNRRASFSQYGTGIDIVAPGVGIQSTYLNNSYASMPGTSMATPHVAGVAALVKQKNPSWNATQIRNHLKNTATNLGNSSQFGSGLVNADAATR

SEQ ID NO: 66956 - protein, 268 aa, Unidentified
QTVPWGITRVQAPAVHNRGITGSGVRVAILDSGISTHEDLNVRGGVSFVPGEPTYADLNGHGTHVAGTVAALNNSIGVVGVAPSADLYAVKVLGANGSGSVSGIAQGLEWAAQNNMHIANMSLGASSPSSTLERAVNYATSRDVLVIAATGNNGSGSVGYPARYANAMAVGATDQNNRRANFSQYGTGIDIVAPGVNVQSTYPGNRYVSMNGTSMATPHVAGAAALVKQRYPSWNATQIRDHLKNTATNLGNSSQFGSGLVNAEAATR

SEQ ID NO: 66957 - protein, 268 aa, Unidentified
QTVPWGITRVQAPAVHNRGITGSGVRVAILDSGISAHEDLNIRGGASFVPGEPTTADLNGHGTHVAGTVAALNNSIGVIGVAPNAELYAVKVLGANGRGSVSGIAQGLEWAAQNNMHIANMSLGTDAPSSTLERAVNYATSRDVLVIAATGNNGSGSVGYPARYANAMAVGATDQNNRRANFSQYGTGIDIVAPGVNVQSTYPGNRYVSMNGTSMATPHVAGAAALVKQRYPSWNATQIRDHLKNTATNLGNSSQFGSGLVNAEAATR

SEQ ID NO: 66958 - protein, 268 aa, Unidentified
QTVPWGITRVQAPAVHNRGITGSGVRVAILDSGISTHEDLNVRGGVSFVPGEPTTADLNGHGTHVAGTVAALNNSIGVVGVAPSADLYAVKVLGANGRGSVSGIAQGLEWAAANNMHIANMSLGSDAPSSTLERAVNYATSRDVLVIAATGNNGSGSVGYPARYANAMAVGATDQNNRRANFSQYGTGIDIVAPGVNVQSTYPGNRYVSMNGTSMATPHVAGAAALVKQRYPSWNATQIRDHLKNTATNLGNSSQFGSGLVNAEAATR

SEQ ID NO: 66959 - protein, 268 aa, Unidentified
QTVPWGITRVQAPAVHNRGITGSGVRVAILDSGISTHEDLNVRGGVSFVPGEPGTADLNGHGTHVAGTVAALNNSIGVVGVAPSADLYAVKVLGANGRGSVSGIAQGLEWAAQNNMHIANMSLGTDAPSSTLERAVNYATSRDVLVIAATGNNGSGSVGYPARYANAMAVGATDQNNRRANFSQYGTGIDIVAPGVNVQSTYPGNRYVSMNGTSMATPHVAGAAALVKQRYPSWNATQIRNHLKNTATNLGNSSQFGSGLVNAEAATR

SEQ ID NO: 66960 - protein, 268 aa, Unidentified
QTVPWGITRVQAPAVHNRGITGSGVRVAILDSGISTHEDLNVRGGVSFVPGEPTYADLNGHGTHVAGTVAALNNSIGVVGVAPSADLYAVKVLGANGSGSVSGIAQGLEWAAQNNMHIANMSLGTLSPSSTLERAVNYATSRDVLVIAATGNNGSGSVGYPARYANAMAVGATDQNNRRANFSQYGTGIDIVAPGVNVQSTYPGNRYVSMNGTSMATPHVAGAAALVKQRYPSWNATQIRDHLKNTATNLGNSSQFGSGLVNAEAATR

SEQ ID NO: 66961 - protein, 268 aa, Unidentified
QTVPWGITRVQAPAVHNRGITGSGVRVAILDSGISAHEDLNIRGGASFVPGEPTTADLNGHGTHVAGTVAALDNSIGVIGVAPNAELYAVKVLGANGRGSVSGIAQGLEWAATNNMHIANMSLGAEGPSSTLERAVNYATSRDVLVIAATGNNGSGSVGYPARYANAMAVGATDQNNRRANFSQYGTGIDIVAPGVNVQSTYPGNRYVSLSGTSMATPHVAGAAALVKQRYPSWNATQIRNHLKNTATNLGNSSQFGSGLVNAEAATR

SEQ ID NO: 66962 - protein, 268 aa, Unidentified
QTVPWGITRVQAPAVHNRGITGSGVRVAILDSGISAHSDLNIRGGASFVPGEPTTADLNGHGTHVAGTVAALNNDIGVIGVAPNAELYAVKVLGANGSGSVSGIAQGLEWAATNNMHIANMSLGSDFPSSTLERAVNYATSRDVLVIAATGNNGSGSVGYPARYQNAMAVGATDQNNRRANFSQYGTGIDIVAPGVNVQSTYPGNRYVSMNGTSMASPHVAGAAALVKQRYPSWNATQIRNHLKNTATNLGNSSQFGSGLVNAEAATR

SEQ ID NO: 66963 - protein, 268 aa, Unidentified
QTVPWGITRVQAPAVHNRGITGSGVRVAILDSGISAHEDLNIRGGASFVPGEPTTADLNGHGTHVAGTVAALNNSIGVIGVAPNADLYAVKVLGANGRGSVSGIAQGLEWAATNNMHIANMSLGTDAPSSTLERAVNYATSRDVLVIAATGNNGSGSVGYPARYANAMAVGATDQNNRRANFSQYGTGIDIVAPGVNVQSTYPGNRYVSMNGTSMATPHVAGAAALVKQRYPSWNATQIRNHLKNTATNLGNSSQFGSGLVNAEAATR

SEQ ID NO: 66964 - protein, 268 aa, Unidentified
QTVPWGITRVQAPAVHNRGITGSGVRVAILDSGISTHEDLNIRGGASFVPGEPTYADLNGHGTHVAGTVAALNNSIGVIGVAPNAELYAVKVLGANGRGSVSGIAQGLEWAATNNMHIANMSLGTDAPSSTLERAVNYATSRDVLVIAATGNNGSGSVGYPARYANAMAVGATDQNNRRANFSQYGTGIDIVAPGVNVQSTYPGNRYVSMNGTSMATPHVAGAAALVKQRYPSWNATQIRDHLKNTATNLGNSSQFGSGLVNAEAATR

SEQ ID NO: 66965 - protein, 268 aa, Unidentified
QTVPWGITRVQAPAVHNRGITGSGVRVAILDSGISTHEDLNVRGGVSFVPGEPTYADLNGHGTHVAGTVAALNNSIGVVGVAPSADLYAVKVLGANGSGSVSGIAQGLEWAAQNNMHIANMSLGSLVPSSTLERAVNYATSRDVLVIAATGNNGSGSVGYPARYANAMAVGATDQNNRRANFSQYGTGIDIVAPGVNVQSTYPGNRYVSMNGTSMATPHVAGAAALVKQRYPSWNATQIRDHLKNTATNLGNSSQFGSGLVNAEAATR

SEQ ID NO: 66966 - protein, 268 aa, Unidentified
QTVPWGITRVQAPAVHNRGITGSGVRVAILDSGISAHEDLNIRGGASFVPGEPTTADLNGHGTHVAGTVAALDNSIGVIGVAPNAELYAVKVLGANGRGSVSGIAQGLEWAATNNMHIANMSLGAEGPSSTLERAVNYATSRDVLVIAATGNNGSGSVGYPARYANAMAVGATDQNNRRANFSQYGTGIDIVAPGVNVLSTYPGNRYVSLNGTSMATPHVAGAAALVKQRYPSWNATQIRNHLKNTATNLGNSSEFGSGLVNAEAATR

SEQ ID NO: 66967 - protein, 268 aa, Unidentified
QTVPWGITRVQAPAVHNRGITGSGVRVAILDSGISAHEDLNIRGGASFVPGEPTTADLNGHGTHVAGTVAALDNSIGVIGVAPNAELYAVKVLGANGRGSVSGIAQGLEWAAQNNMHIANMSLGAEGPSSTLERAVNYATSRDVLVIAATGNNGSGSVGYPARYANAMAVGATDQNNRRANFSQYGTGIDIVAPGVNVQSTYPGNRYVSMNGTSMATPHVAGAAALVKQRYPSWNATQIRNHLKNTATNLGNSSQFGSGLVNAEAATR

SEQ ID NO: 66968 - protein, 268 aa, Unidentified
QTVPWGITRVQAPTVHNRGLTGSGVKVAILDTGIAQHSDLTIRGGASFVPGESTTADLNGHGTHVAGTVAALNNSIGVIGVAPSADLYAVKVLGANGRGSVSGIAQGLEWAATNNMHIANMSLGSDAPSTTLERAVNYATSRGVLVIAATGNNGTGSIGYPARYANAMAVGATDQNNRRASFSQYGTGIDIVAPGVGIQSTYLNNSYASMPGTSMATPHVAGVAALVKQKNPSWNATQIRNHLKNTATNLGNSSQFGSGLVNADAATR

SEQ ID NO: 66969 - protein, 268 aa, Unidentified
QTVPWGITRVQAPAVHNRGITGSGVRVAILDSGISAHEDLNIRGGASFVPGETTTADLNGHGTHVAGTVAALNNSIGVIGVAPNAELYAVKVLGANGRGSVSGIAQGLEWAATNNMHIANMSLGAEGPSSTLERAVNYATSRDVLVIAATGNNGSGSVGYPARYANAMAVGATDQNNRRANFSQYGTGIDIVAPGVNVQSTYPGNRYVSMNGTSMATPHVAGAAALVKQRYPSWNATQIRNHLKNTATNLGNSSQFGSGLVNAEAATR

SEQ ID NO: 66970 - protein, 268 aa, Unidentified
QTVPWGITRVQAPAVHNRGITGSGVRVAILDSGISAHEDLNIRGGASFVPGEPTTADLNGHGTHVAGTVAALNNSIGVIGVAPNADLYAVKVLGANGRGSVSGIAQGLEWAATNNMHIANMSLGSDAPSSTLERAVNYATSRDVLVIAATGNNGSGSVGYPARYANAMAVGATDQNNRRANFSQYGTGIDIVAPGVNVQSTYPGNRYVSMNGTSMATPHVAGAAALVKQRYPSWNATQIRDHLKNTATNLGNSSQFGSGLVNAEAATR

SEQ ID NO: 66971 - protein, 268 aa, Unidentified
QTVPWGITRVQAPAVHNRGITGSGVRVAILDSGISAHSDLNIRGGASFVPGEPTTADLNGHGTHVAGTVAALDNSIGVVGVAPSADLYAVKVLGANGSGSVSGIAQGLEWAATNNMHIANMSLGSDFPSSTLERAVNYATSRDVLVIAATGNNGSGTVGYPARYANAMAVGATDQNNRRANFSQYGTGIDIVAPGVNVQSTYPGNRYVSMNGTSMATPHVAGAAALVKQRYPSWNATQIRDHLKNTATNLGNSSQFGSGLVNAEAATR

SEQ ID NO: 66972 - protein, 268 aa, Unidentified
QTVPWGITRVQAPTVHNRGITGSGVKVAILDTGIAQHSDLTIRGGASFVPGESTTADLNGHGTHVAGTVAALNNSIGVIGVAPSADLYAVKVLGANGRGSVSGIAQGLEWAATNNMHIANMSLGSPAPSTTLERAVNYATSRGVLVIAATGNNGTGSIGYPARYANAMAVGATDQNNQRASFSQYGTGIDIVAPGVGIQSTYLNNSYASMSGTSMATPHVAGVAALVKQKNPSWNATQIRNHLKNTATNLGPSSQFGSGLVNADAATR

SEQ ID NO: 66973 - protein, 268 aa, Unidentified
QTVPWGITRVQAPAVHNRGITGSGVRVAILDSGISAHSDLNIRGGASFVPGEPTYADLNGHGTHVAGTVAALNNSIGVIGVAPNAELYAVKVLGANGRGSVSGIAQGLEWAAQNNMHIANMSLGSDAPSSTLERAVNYATSRDVLVIAATGNNGSGSVGYPARYANAMAVGATDQNNRRANFSQYGTGIDIVAPGVNVQSTYPGNRYVSMNGTSMATPHVAGAAALVKQRYPSWNATQIRDHLKNTATNLGNSSQFGSGLVNAEAATR

SEQ ID NO: 66974 - protein, 268 aa, Unidentified
QTVPWGITRVQAPAVHNRGITGSGVRVAILDSGISAHEDLNIRGGASFVPGEPTTADLNGHGTHVAGTVAALNNSIGVIGVAPNAELYAVKVLGANGRGSVSGIAQGLEWAATNNMHIANMSLGAEGPSSTLERAVNYATSRDVLVIAATGNNGSGSVQYPARYANAMAVGATDQNNQRANFSQYGTGIDIVAPGVNVQSTYPGNRYVSMSGTSMATPHVAGAAALVKQRYPSWNATQIRNHLKNTATNLGNSSQFGSGLVNAEAATR

SEQ ID NO: 66975 - protein, 268 aa, Unidentified
QTVPWGITRVQAPAVHNRGITGSGVRVAILDSGISAHEDLNIRGGASFVPGEPTTADLNGHGTHVAGTVAALNNSIGVIGVAPNAELYAVKVLGANGRGSVSGIAQGLEWAATNNMHIANMSLGAEGPSSTLERAVNYATSRDVLVIAATGNNGSGSVGYPARYANAMAVGATDQNNRRANFSQYGTGIDIVAPGVNVQSTWPGNRYVSMNGTSMATPHVAGAAALVKQRYPSWNATQIRNHLKNTATNLGNSSQFGSGLVNAEAATR

SEQ ID NO: 66976 - protein, 268 aa, Unidentified
QTVPWGITRVQAPTVHNRGITGSGVKVAILDTGIAQHSDLTIRGGASFVPGESTTADLNGHGTHVAGTVAALNNSIGVIGVAPSADLYAVKVLGANGRGSVSGIAQGLEWAATNNMHIANMSLGSDAPSTTLERAVNYATSRGVLVIAATGNNGTGSISYPARYANAMAVGATDQNNRRASFSQYGTGIDIVAPGVGIQSTYLNNSYASMPGTSMATPHVAGVAALVKQKNPSWNATQIRNHLKNTATNLGNSSQFGSGLVNADAATR

SEQ ID NO: 66977 - protein, 268 aa, Unidentified
QTVPWGITRVQAPAVHNRGITGSGVRVAILDSGISTHEDLNVRGGVSFVPGEPTTADLNGHGTHVAGTVAALNNSIGVVGVAPSADLYAVKVLGANGRGSVSGIAQGLEWAAQNNMHIANMSLGSDAPSSTLERAVNYATSRDVLVIAATGNNGSGSVGYPARYANAMAVGATDQNNRRANFSQYGTGIDIVAPGVNVQSTYPGNRYVSMNGTSMATPHVAGAAALVKQRYPSWNATQIRDHLKNTATNLGNSSQFGSGLVNAEAATR

SEQ ID NO: 66978 - protein, 268 aa, Unidentified
QTVPWGITRVQAPAVHNRGITGSGVRVAILDSGISAHEDLNIRGGASFVPGEPTYADLNGHGTHVAGTVAALNNSIGVIGVAPNADLYAVKVLGANGSGSVSGIAQGLEWAAQNNMHIANMSLGSDFPSSTLERAVNYATSRDVLVIAATGNNGSGSVGYPARYANAMAVGATDQNNRRANFSQYGTGIDIVAPGVNVQSTYPGNRYVSMNGTSMATPHVAGAAALVKQRYPSWNATQIRDHLKNTATNLGNSSQFGSGLVNAEAATR

SEQ ID NO: 66979 - protein, 268 aa, Unidentified
QTVPWGITRVQAPAVHNRGITGSGVRVAILDSGISAHEDLNIRGGVSFVPGEPTYADLNGHGTHVAGTVAALNNSIGVIGVAPSAELYAVKVLGANGRGSVSGIAQGLEWAAQNNMHIANMSLGSDAPSSTLERAVNYATSRDVLVIAATGNNGSGSVGYPARYANAMAVGATDQNNRRANFSQYGTGIDIVAPGVNVQSTYPGNRYVSMNGTSMATPHVAGAAALVKQRYPSWNATQIRDHLKNTATNLGNSSQFGSGLVNAEAATR

SEQ ID NO: 66980 - protein, 268 aa, Unidentified
QTVPWGITRVQAPAVHNRGITGSGVRVAILDSGISTHEDLNVRGGVSFVPGEPTTADLNGHGTHVAGTVAALNNSIGVVGVAPSADLYAVKVLGANGRGSISGIAQGLEWAAQNNMHIANMSLGSDAPSSTLERAVNYATSRDVLVIAATGNNGSGSVGYPARYANAMAVGATDQNNRRANFSQYGTGIDIVAPGVNVQSTYPGNRYVSMNGTSMATPHVAGAAALVKQRYPSWNATQIRNHLKNTATNLGNSSQFGSGLVNAEAATR

SEQ ID NO: 66981 - protein, 268 aa, Unidentified
QTVPWGITRVQAPTVHNRGITGSGVKVAILDTGIAQHSDLTIRGGASFVPGESTTADLNGHGTHVAGTVAALNNSIGVIGVAPSADLYAVKVLGANGRGSVSGIAQGLEWAATNNMHIANMSLGSPAPSTTLERAVNYATSRGVLVIAATGNNGTGSIQYPARYANAMAVGATDQNNRRASFSQYGTGIDIVAPGVGIQSTYLNNSYASMPGTSMATPHVAGVAALVKQKNPSWNATQIRNHLKNTATNLGNSSQFGSGLVNADAATR

SEQ ID NO: 66982 - protein, 268 aa, Unidentified
QTVPWGITRVQAPAVHNRGITGSGVRVAILDSGISTHEDLNVRGGVSFVPGEPTYADLNGHGTHVAGTVAALNNSIGVVGVAPSADLYAVKVLGANGSGSVSGIAQGLEWAAQNNMHIANMSLGSDEPSSTLERAVNYATSRDVLVIAATGNNGSGSVGYPARYANAMAVGATDQNNRRANFSQYGTGIDIVAPGVNVQSTYPGNRYVSMNGTSMATPHVAGAAALVKQRYPSWNATQIRDHLKNTATNLGNSSQFGSGLVNAEAATR

SEQ ID NO: 66983 - protein, 268 aa, Unidentified
QTIPWGISRVQAPAVHNRGITGSGVRVAILDSGISTHEDLNVRGGVSFVPGEPTTADLNGHGTHVAGTVAALNNSIGVVGVAPSADLYAVKVLGANGRGSVSGIAQGLEWAAANNMHIANMSLGSDAPSSTLERAVNYATSRDVLVIAATGNNGSGSVGYPARYANAMAVGATDQNNRRANFSQYGTGIDIVAPGVNVQSTYPGNRYVSMNGTSMATPHVAGVAALVKQRYPSWNATQIRNHLLNTATNLGNSNQFGSGLVNAEAATR

SEQ ID NO: 66984 - protein, 268 aa, Unidentified
QTVPWGITRVQAPAVHNRGITGSGVRVAILDSGISTHEDLNIRGGVSFVPGEPTYADLNGHGTHVAGTVAALNNSIGVIGVAPNAELYAVKVLGANGRGSVSGIAQGLEWAAQNNMHIANMSLGTDAPSSTLERAVNYATSRDVLVIAATGNNGSGSVGYPARYANAMAVGATDQNNRRANFSQYGTGIDIVAPGVNVQSTYPGNRYVSMNGTSMATPHVAGAAALVKQRYPSWNATQIRNHLKNTATNLGNSSQFGSGLVNAEAATR

SEQ ID NO: 66985 - protein, 268 aa, Unidentified
QTVPWGITRVQAPAVHNRGITGSGVRVAILDSGISAHEDLNIRGGVSFVPGEPTTADLNGHGTHVAGTVAALNNSIGVIGVAPNAELYAVKVLGANGRGSVSGIAQGLEWAATNNMHIANMSLGAEGPSSTLERAVNYATSRDVLVIAATGNNGSGSVGYPARYANAMAVGATDQNNRRANFSQYGTGIDIVAPGVNVQSTYPGNRYVSMNGTSMATPHVAGAAALVKQRYPSWNATQIRNHLKNTATNLGNSSQFGSGLVNAEAATR

SEQ ID NO: 66986 - protein, 268 aa, Shouchella gibsonii
QTVPWGITRVQAPTVHNRGITGSGVKVAILDTGIAQHSDLTIRGGASFVPGESTTADLNGHGTHVAGTVAALNNSIGVIGVAPSADLYAVKVLGANGRGSVSGIAQGLEWAATNNMHIANMSLGSDAPSTTLERAVNYATSRGVLVIAATGNNGTGSIGYPARYANAMAVGATDQNNRRASFSQYGTGIDIVAPGVGIQSTYLNNSYASLDGTSMATPHVAGVAALVKQKNPSWNATQIRNHLKNTATNLGNSSQFGSGLVNADAATR

SEQ ID NO: 66987 - protein, 268 aa, Unidentified
QTVPWGITRVQAPAVHNRGITGSGVRVAILDSGISAHEDLNIRGGASFVPGEPTYADLNGHGTHVAGTVAALNNSIGVIGVAPNAELYAVKVLGANGRGSVSGIAQGLEWAATNNMHIANMSLGTDAPSSTLERAVNYATSRDVLVIAATGNNGSGSVGYPARYANAMAVGATDQNNRRANFSQYGTGIDIVAPGVNVQSTYPGNRYVSMNGTSMATPHVAGAAALVKQRYPSWNATQIRNHLKNTATNLGNSSQFGSGLVNAEAATR

SEQ ID NO: 66988 - protein, 268 aa, Unidentified
QTVPWGITRVQAPAVHNRGITGSGVRVAILDSGISAHSDLNIRGGASFVPGEPTTADLNGHGTHVAGTVAALNNSIGVIGVAPNAELYAVKVLGANGSGSVSGIAQGLEWAATNNMRIANMSLGSDFPSSTLERAVNYATSRDRLVIAATGNNGSGSVGYPARYANAMAVGATDQNNRRANFSQYGTGIDIVAPGVNVQSTYPGNRYVSMNGTSMASPHVAGAAALVKQRYPSWNATQIRNHLKNTATNLGNSSQFGSGLVNAEAATR

SEQ ID NO: 66989 - protein, 268 aa, Unidentified
QTVPWGITRVQAPAVHNRGITGSGVRVAILDSGISAHEDLRIRGGASFVPGEPTTADLNGHGTHVAGTVAALNNSIGVIGVAPNAELYAVKVLGANGRGSVSGIAQGLEWAATNNMHIANMSLGAEGPSSTLERAVNYATSRDVLVIAATGNNGSGSVGYPARYANAMAVGATDQNNRRANFSQYGTGIDIVAPGVNVQSTYPGNRYVSMNGTSMATPHVAGAAALVKQRYPSWNATQIRNHLKNTATNLGNSSQFGSGLVNAEAATR

SEQ ID NO: 66990 - protein, 268 aa, Unidentified
QTVPWGITRVQAPAVHNRGITGSGVRVAILDSGISAHEDLNIRGGASFVPGEPTTADLNGHGTHVAGTVAALDNSIGVIGVAPNAELYAVKVLGANGRGSVSGIAQGLEWAATNNMHIANMSLGAEGPSSTLERAVNYATSRDVLVIAATGNNGSGSVGYPARYANAMAVGATDQNNRRANFSQYGTGIDIVAPGVNVLSTYPGNRYVSLNGTSMATPHVAGAAALVKQRYPSWNATQIRNHLKNTATNLGNSSQFGSGLVNAEAATR

SEQ ID NO: 66991 - protein, 268 aa, Unidentified
QTVPWGITRVQAPAVHNRGITGSGVRVAILDSGISAHEDLNIRGGASFVPGEPTTADLNGHGTHVAGTVAALDNSIGVIGVAPNAELYAVKVLGANGRGSVSGIAQGLEWAATNNMHIANMSLGAEGPSSTLERAVNYATSRDVLVIAATGNNGSGSVGYPARYANAMAVGATDQNNQRANFSQYGTGIDIVAPGVNVQSTYPGNRYVSLSGTSMATPHVAGAAALVKQRYPSWNATQIRNHLKNTATNLGNSSQFGSGLVNAEAATR

SEQ ID NO: 66992 - protein, 268 aa, Unidentified
QTVPWGITRVQAPAVHNRGITGSGVRVAILDSGISAHSDLNIRGGASFVPGEPTTADLNGHGTHVAGTVAALNNSIGVIGVAPNAELYAVKVLGANGSGSVSGIAQGLEWAATNNMRIANMSMGSDFPSSTLERAVNYATSRDVLVIAATGNNGSGSVGYPARYANAMAVGATDQNNRRANFSQYGTGIDIVAPGVNVQSTYPGNRYVSMNGTSMATPHVAGAAALVKQRYPSWNATQIRNHLKNTDTNLGNSSQFGSGLVNAEAATR

SEQ ID NO: 66993 - protein, 268 aa, Unidentified
QTVPWGITRVQAPTVHNRGITGSGVKVAILDTGIAQHSDLTIRGGASFVPGESTTADLNGHGTHVAGTVAALNNSIGVIGVAPSADLYAVKVLGANGRGSVSGIAQGLEWAATNNMHIANMSLGSDAPSTTLERAVNYATSRGVLVIAATGNSGTGSIGYPARYANAMAVGATDQNNRRASFSQYGTGIDIVAPGVGIQSTYLNNSYASMPGTSMATPHVAGVAALVKQKNPSWNATQIRNHLKNTATNLGNSSQFGSGLVNADAATR

SEQ ID NO: 66994 - protein, 268 aa, Unidentified
QTVPWGITRVQAPAVHNRGITGSGVRVAILDSGISAHEDLNIRGGASFVPGEPTTADLNGHGTHVAGTVAALDNSIGVIGVAPNAELYAVKVLGANGRGSVSGIAQGLEWAATNNMHIANMSLGAEGPSSTLERAVNYATSRDVLVIAATGNNGSGSVQYPARYANAMAVGATDQNNQRANFSQYGTGIDIVAPGVNVQSTYPGNRYVSLSGTSMATPHVAGAAALVKQRYPSWNATQIRNHLKNTATNLGPSSQFGSGLVNAEAATR

SEQ ID NO: 66995 - protein, 268 aa, Unidentified
QTVPWGITRVQAPAVHNRGITGSGVRVAILDSGISAHEDLNIRGGASFVPGEPTTADLNGHGTHVAGTVAALNNSIGVIGVAPNAELYAVKVLGANGRGSVSGIAQGLEWAATNNMHIANMSLGAEGPSSTLERAVNYATSRDVLVIAATGNNGSGSVQYPARYANAMAVGATDQNNQRANFSQYGTGIDIVAPGVNVQSTYPGNRYVSMSGTSMATPHVAGAAALVKQRYPSWNATQIRNHLKNTATNLGPSSQFGSGLVNAEAATR

SEQ ID NO: 66996 - protein, 268 aa, Unidentified
QTVPWGITRVQAPAVHNRGITGSGVRVAILDSGISAHEDLNIRGGASFVPGEPTTADLNGHGTHVAGTVAALDNSIGVIGVAPNAELYAVKVLGANGRGSVSGIAQGLEWAATNNMHIANMSLGAEGPSSTLERAVNYATSRDVLVIAATGNNGSGSVGYPARYANAMAVGATDQNNRRANFSQYGTGIDIVAPGVNVQSTYPGNRYVSMNGTSMATPHVAGAAALVKQRYPSWNATQIRNHLKNTATNLGPSSQFGSGLVNAEAATR

SEQ ID NO: 66997 - protein, 268 aa, Unidentified
QTVPWGITRVQAPAVHNRGITGSGVRVAILDSGISAHSDLNIRGGASFVPGEPTTADLNGHGTHVAGTVAALNNSINVIGVAPNAELYAVKVLGANGSGSVSGIAQGLEWAATNNMHIANMSLGSDFPSSTLERAVNYATSRDRLVIAATGNNGSGSVGYPARYQNAMAVGATDQNNRRANFSQYGTGIDIVAPGVNVQSTYPGNRYVSMNGTSMATPHVAGAAALVKQRYPSWNATQIRNHLKNTATNLGNSSQFGSGLVNAEAATR

SEQ ID NO: 66998 - protein, 268 aa, Unidentified
QTVPWGITRVQAPAVHNRGITGSGVRVAILDSGISAHSDLNIRGGASFVPGEPTTADLNGHGTHVAGTVAALNNDIGVIGVAPNAELYAVKVLGANGSGSVSGIAQGLEWAATNNMHIANMSMGSDQPSSTLERAVNYATSRDVLVIAATGNNGSGSVGYPARYANAMAVGATDQNNRRANFSQYGTGIDIVAPGVNVQSTYPGNRYVSMNGTSMLTPHVAGAAALVKQRYPSWNATQIRNHLKNTATNLGNSSQFGSGLVNAEAATR

SEQ ID NO: 66999 - protein, 268 aa, Unidentified
QTVPWGITRVQAPAVHNRGITGSGVRVAILDSGISAHEDLNIRGGASFVPGEPTTADLNGHGTHVAGTVAALDNSIGVIGVAPNAELYAVKVLGANGRGSVSGIAQGLEWAATNNMHIANMSLGAEGPSSTLERAVNYATSRDVLVIAATGNNGSGSVQYPARYANAMAVGATDQNNRRANFSQYGTGIDIVAPGVNVQSTYPGNRYVSMNGTSMATPHVAGAAALVKQRYPSWNATQIRNHLKNTATNLGPSSQFGSGLVNAEAATR

SEQ ID NO: 67000 - protein, 268 aa, Unidentified
QTVPWGITRVQAPAVHNRGITGSGVRVAILDSGISAHEDLNIRGGASFVPGEPTTADLNGHGTHVAGTVAALDNSIGVIGVAPNAELYAVKVLGANGRGSVSGIAQGLEWAATNNMHIANMSLGAEGPSSTLERAVNYATSRDVLVIAATGNNGSGSVQYPARYANAMAVGATDQNNQRANFSQYGTGIDIVAPGVNVQSTYPGNRYVSMNGTSMATPHVAGAAALVKQRYPSWNATQIRNHLKNTATNLGPSSQFGSGLVNAEAATR

SEQ ID NO: 67001 - protein, 268 aa, Unidentified
QTVPWGITRVQAPAVHNRGITGSGVRVAILDSGISAHEDLNIRGGASFVPGEPTTADLNGHGTHVAGTVAALDNSIGVIGVAPNAELYAVKVLGANGRGSVSGIAQGLEWAATNNMHIANMSLGAEGPSSTLERAVNYATSRDVLVIAATGNNGSGSVQYPARYANAMAVGATDQNNRRANFSQYGTGIDIVAPGVNVQSTYPGNRYVSMNGTSMATPHVAGAAALVKQRYPSWNATQIRNHLKNTATNLGNSSQFGSGLVNAEAATR

SEQ ID NO: 67002 - protein, 268 aa, Unidentified
QTVPWGITRVQAPAVHNRGITGSGVRVAILDSGISAHSDLNIRGGASFVPGEPTTADLNGHGTHVAGTVAALNNDIGVIGVAPNAELYAVKVLGANGSGSVSGIAQGLEWAATNNMHIANMSLGSDFPSSTLERAVNYATSRDVLVIAATGNNGSGSVGYPARYQNAMAVGATDQNNRRANFSQYGTGIDIVAPGVNVQSTYPGNRYVSMNGTSMATPHVAGAAALVKQRYPSWNATQIRNHLKNTATNLGNSSQFGPGLVNAEAATR

SEQ ID NO: 67003 - protein, 268 aa, Unidentified
QTVPWGITRVQAPAVHNRGITGSGVRVAILDSGISTHEDLNVRGGVSFVPGEPTYADLNGHGTHVAGTVAALNNSIGVVGVAPSADLYAVKVLGANGSGSVSGIAQGLEWAAQNNMHIANMSLGSTTPSSTLERAVNYATSRDVLVIAATGNNGSGSVGYPARYANAMAVGATDQNNRRANFSQYGTGIDIVAPGVNVQSTYPGNRYVSMNGTSMATPHVAGAAALVKQRYPSWNATQIRDHLKNTATNLGNSSQFGSGLVNAEAATR

SEQ ID NO: 67004 - protein, 268 aa, Unidentified
QTVPWGITRVQAPTVHNRGITGSGVKVAILDTGIAQHSDLTIRGGASFVPGESTTADLNGHGTHVAGTVAALNNSIGVIGVAPSADLYAVKVLGANGRGSVSGIAQGLEWAATNNMHIANLSLGSDAPSTTLERAVNYATSRGVLVIAATGNNGTGSIGYPARYANAMAVGATDQNNRRASFSQYGTGIDIVAPGVGIQSTYLNNSYASMPGTSMATPHVAGVAALVKQKNPSWNATQIRNHLKNTATNLGNSSQFGSGLVNADAATR

SEQ ID NO: 67005 - protein, 268 aa, Unidentified
QTVPWGITRVQAPAVHNRGITGSGVRVAILDSGISTHEDLNVRGGVSFVPGEPTYADLNGHGTHVAGTVAALNNSIGVVGVAPSADLYAVKVLGANGRGSVSGIAQGLEWAAQNNMHIANLSLGAEGPSSTLERAVNYATSRDVLVIAATGNNGSGSVGYPARYANAMAVGATDQNNRRANFSQYGTGIDIVAPGVNVQSTYPGNRYVSLNGTSMATPHVAGAAALVKQRYPSWNATQIRDHLKNTATNLGNSSQFGSGLVNAEAATR

SEQ ID NO: 67006 - protein, 268 aa, Unidentified
QTVPWGITRVQAPAVHNRGITGSGVKVAILDSGISTHEDLNVRGGVSFVPGEPTNADLNGHGTHVAGTVAALNNSIGVVGVAPSADLYAVKVLGANGRGSVSGIAQGLEWAAPNNMHIANMSLGTDAPSSTLERAVNYATSTDVLVIAATGNNGSGSIGYPARYANAMAVGATDQNNRRANFSQYGTGIDIVAPGVNVQSTYPGNRYVSMTGTSMATPHVAGAAALVKQRYPSWNATQIRNHLKNTATNLGNSSQYGSGLVNAEAATR

SEQ ID NO: 67007 - protein, 268 aa, Unidentified
QTVPWGITRVQAPAVHNRGITGSGVRVAILDSGISTHEDLNVRGGVSFVPGEPTYADLNGHGTHVAGTVAALNNSIGVVGVAPSADLYAVKVLGANGMGSVSGIAQGLEWAAQNNMHIANMSLGSGSPSSTLERAVNYATSRDVLVIAATGNNGSGSVGYPARYANAMAVGATDQNNRRANFSQYGTGIDIVAPGVNVQSTYPGNRYVSMNGTSMATPHVAGAAALVKQRYPSWNATQIRDHLKNTATNLGNSSQFGSGLVNAEAATR

SEQ ID NO: 67008 - protein, 268 aa, Unidentified
QTVPWGITRVQAPAVHNRGITGSGVRVAILDSGISTHEDLNIRGGVSFVPGEPTYADLNGHGTHVAGTVAALNNSIGVIGVAPNAELYAVKVLGANGRGSVSGIAQGLEWAAANNMHIANMSLGTDAPSSTLERAVNYATSRDVLVIAATGNNGSGSVGYPARYANAMAVGATDQNNRRANFSQYGTGIDIVAPGVNVQSTYPGNRYVSMNGTSMATPHVAGAAALVKQRYPSWNATQIRNHLKNTATNLGNSSQFGSGLVNAEAATR

SEQ ID NO: 67009 - protein, 268 aa, Unidentified
QTVPWGITRVQAPAVHNRGITGSGVRVAILDSGISAHEDLNIRGGVSFVPGEPTYADLNGHGTHVAGTVAALNNSIGVIGVAPSADLYAVKVLGANGRGSVSGIAQGLEWAAQNNMHIANMSLGSDFPSSTLERAVNYATSRDVLVIAATGNNGSGSVGYPARYANAMAVGATDQNNRRANFSQYGTGIDIVAPGVNVQSTYPGNRYVSMNGTSMATPHVAGAAALVKQRYPSWNATQIRNHLKNTATNLGNSSQFGSGLVNAEAATR

SEQ ID NO: 67010 - protein, 268 aa, Unidentified
QTVPWGITRVQAPTVHNRGITGSGVKVAILDTGIAQHSDLTIRGGASFVPGESTTADLNGHGTHVAGTVAALNNSIGVIGVAPSADLYAVKVLGANGRGSVSGIAQGLEWAATNNMHIANMSLGSDAPSTTLERAVNYATSRGVLVIAATGNNGTGSIGYPARYANAMAVGATDQNNRRASFSQYGTGIDIVAPGVGIQSTYLNNSYASLPGTSMATPHVAGVAALVKQKNPSWNATQIRNHLKNTATNLGNSSQFGSGLVNADAATR

SEQ ID NO: 67011 - protein, 268 aa, Unidentified
QTVPWGITRVQAPAVHNRGITGSGVRVAILDSGISAHSELNIRGGASFVPGEPTTADLNGHGTHVAGTVAALNNDIGVIGVAPNAELYAVKVLGANGSGSVSGIAQGLEWAATNNMHIANMSLGSDFPSSTLERAVNYATSRDVLVIAATGNNGSGSVGYPARYQNAMAVGATDQNNRRANFSQYGTGIDIVAPGVNVQSTYPGNRYVSMNGTSMATPHVAGAAALVKQRYPSWNATQIRNHLKNTATNLGNSSQFGSGLVNAEAATR

SEQ ID NO: 67012 - protein, 268 aa, Unidentified
QTVPWGITRVQAPTVHNRGITGSGVKVAILDTGIAQHSDLTIRGGASFVPGESTTADLNGHGTHVAGTVAALNNSIGVIGVAPSADLYAVKVLGANGRGSVSGIAQGLEWAATNNMHIANMSLGSPAPSTTLERAVNYATSRGVLVIAATGNNGTGSIGYPARYANAMAVGATDQNNQRASFSQYGTGIDIVAPGVGIQSTYLNNSYASMPGTSMATPHVAGVAALVKQKNPSWNATQIRNHLKNTATNLGNSSQFGSGLVNADAATR

SEQ ID NO: 67013 - protein, 268 aa, Unidentified
QTVPWGITRVQAPAVHNRGITGQGVRVAILDSGISAHSDLNIRGGASFVPGEPTTADLNGHGTHVAGTVAALNNDIGVIGVAPNAELYAVKVLGANGSGSVSGIAQGLEWAATNNMHIANMSLGSDFPSSTLERAVNYATSRDVLVIAATGNNGSGSVGYPARYQNAMAVGATDQNNRRANFSQYGTGIDIVAPGVNVQSTYPGNRYVSMNGTSMATPHVAGAAALVKQRYPSWNATQIRNHLKNTATNLGNSSQFGSGLVNAEAATR

SEQ ID NO: 67014 - protein, 268 aa, Unidentified
QTVPWGITRVQAPAVHNRGITGSGVRVAILDSGISTHEDLTIRGGASFVPGEPTTADLNGHGTHVAGTVAALNNSIGVIGVAPNAELYAVKVLGANGRGSISGIAQGLEWAAQNNMHIANMSLGTDFPSSTLERAVNYATSRDVLVIAATGNNGSGSVGYPARYANAMAVGATDQNNRRANFSQYGTGIDIVAPGVNVQSTYPGNRYVSMNGTSMATPHVAGAAALVKQRYPSWNATQIRNHLKNTATNLGNSSQFGSGLVNAEAATR

SEQ ID NO: 67015 - protein, 268 aa, Unidentified
QTVPWGITRVQAPTVHNRGITGSGVKVAILDTGIAQHSDLTIRGGASFVPGESTTADLNGHGTHVAGTVAALNNSIGVIGVAPSAELYAVKVLGANGRGSVSGIAQGLEWAATNNMHIANMSLGSDAPSTTLERAVNYATSRGVLVIAATGNNGTGSIGYPARYANAMAVGATDQNNRRASFSQYGTGIDIVAPGVGIQSTYLNNSYASMPGTSMATPHVAGVAALVKQKNPSWNATQIRNHLKNTATNLGNSSQFGSGLVNADAATR

SEQ ID NO: 67016 - protein, 268 aa, Unidentified
QTVPWGITRVQAPAVHNRGITGSGVRVAILDSGISTHEDLNVRGGVSFVPGEPTYADLNGHGTHVAGTVAALNNSIGVVGVAPSADLYAVKVLGANGSGSVSGIAQGLEWAAQNNMHIANMSLGSQMPSSTLERAVNYATSRDVLVIAATGNNGSGSVGYPARYANAMAVGATDQNNRRANFSQYGTGIDIVAPGVNVQSTYPGNRYVSMNGTSMATPHVAGAAALVKQRYPSWNATQIRDHLKNTATNLGNSSQFGSGLVNAEAATR

SEQ ID NO: 67017 - protein, 268 aa, Unidentified
QTVPWGITRVQAPAVHNRGITGSGVRVAILDSGISAHEDLNIRGGASFVPGEPTYADLNGHGTHVAGTVAALNNSIGVIGVAPNAELYAVKVLGANGRGSVSGIAQGLEWAATNNMHIANMSLGAEGPSSTLERAVNYATSRDVLVIAATGNNGSGSVGYPARYANAMAVGATDQNNRRANFSQYGTGIDIVAPGVNVQSTYPGNRYVSMNGTSMATPHVAGAAALVKQRYPSWNATQIRNHLKNTATNLGNSSQFGSGLVNAEAATR

SEQ ID NO: 67018 - protein, 268 aa, Unidentified
QTVPWGITRVQAPTVHNRGITGSGVKVAILDTGIAQHSDLTIRGGASFVPGESTTADLNGHGTHVAGTVAALNNSIGVIGVAPSADLYAVKVLGANGRGSVSGIAQGLEWAATNNMHIANMSLGSPAPSTTLERAVNYATSRGVLVIAATGNNGTGSIGYPARYANAMAVGATDQNNRRASFSQYGTGIDIVAPGVGIQSTYLNNSYASMPGTSMATPHVAGVAALVKQKNPSWNATQIRNHLKNTATNLGPSSQFGSGLVNADAATR

SEQ ID NO: 67019 - protein, 268 aa, Unidentified
QTVPWGITRVQAPAVHNRGITGSGVRVAILDSGISAHSELNIRGGASFVPGEPTTADLNGHGTHVAGTVAALNNSIGVIGVAPNAELYAVKVLGANGSGSVSGIAQGLEWAATNNMHIANMSLGSDFPSSTLERAVNYATSRDRLVIAATGNNGSGSVGYPARYANAMAVGATDQNNRRANFSQYGTGIDIVAPGVNVQSTYPGNRYVSMNGTSMASPHVAGAAALVKQRYPSWNATQIRNHLKNTATNLGNSSQFGSGLVNAEAATR

SEQ ID NO: 67020 - protein, 268 aa, Unidentified
QTVPWGITRVQAPAVHNRGITGSGVKVAILDSGISTHEDLNVRGGVSFVPGEPTTADLNGHGTHVAGTVAALNNSIGVVGVAPSADLYAVKVLGANGRGSVSGIAQGLEWAAANNMHIANMSLGTDAPSSTLERAVNYATSRDVLVIAATGNNGSGSVGYPARYANAMAVGATDQNNRRANFSQYGTGIDIVAPGVNVQSTYPGNRYVSMNGTSMATPHVAGAAALVKQRYPSWNATQIRDHLKNTATNLGNSSQFGSGLVNAEAATR

SEQ ID NO: 67021 - protein, 268 aa, Unidentified
QTVPWGITRVQAPAVHNRGITGSGVRVAILDSGISAHEDLNIRGGASFVPGEPTTADLNGHGTHVAGTVAALNNSIGVIGVAPNAELYAVKVLGANGRGSVSGIAQGLEWAATNNMHIANMSLGAEGPSSTLERAVNYATSRDVLVIAATGNNGSGSVGYPARYANAMAVGATDQNNRRANFSQYGTGIDIVAPGVNVLSTYPGNRYVSMNGTSMATPHVAGAAALVKQRYPSWNATQIRNHLKNTATNLGNSSQFGSGLVNAEAATR

SEQ ID NO: 67022 - protein, 268 aa, Unidentified
QTVPWGIERVQAPAVHNRGITGSGVRVAILDSGISAHSDLNIRGGASFVPGEPTTADLNGHGTHVAGTVAALNNDIGVIGVAPNAELYAVKVLGANGSGSVSGIAQGLEWAATNNMHIANMSLGSDFPSSTLERAVNYATSRDVLVIAATGNNGSGSVGYPARYQNAMAVGATDQNNRRANFSQYGTGIDIVAPGVNVQSTYPGNRYVSMNGTSMATPHVAGAAALVKQRYPSWNATQIRNHLKNTATNLGNSSQFGPGLVNAEAATR

SEQ ID NO: 67023 - protein, 268 aa, Unidentified
QTVPWGITRVQAPAVHNRGITGSGVRVAILDSGISTHEDLNVRGGVSFVPGEPTTADLNGHGTHVAGTVAALDNSIGVVGVAPSADLYAVKVLGANGRGSVSGIAQGLEWAAQNNMHVANMSLGTDAPSSTLERAVNYATSRDVLVIAATGNNGSGSVGYPARYANAMAVGATDQNNRRANFSQYGTGIDIVAPGVNVQSTYPGNRYVSMNGTSMATPHVAGAAALVKQRYPSWNATQIRNHLKNTATNLGNSSQFGSGLVNAEAATR

SEQ ID NO: 67024 - protein, 268 aa, Unidentified
QTVPWGITRVQAPAVHNRGITGSGVRVAILDSGISAHEDLNIRGGASFVPGEPTTADLNGHGTHVAGTVAALDNSIGVIGVAPNAELYAVKVLGANGRGSVSGIAQGLEWAATNNMHIANMSLGAEGPSSTLERAVNYATSRDVLVIAATGNNGSGSVQYPARYANAMAVGATDQNNRRANFSQYGTGIDIVAPGVNVQSTYPGNRYVSLSGTSMATPHVAGAAALVKQRYPSWNATQIRNHLKNTATNLGPSSQFGSGLVNAEAATR

SEQ ID NO: 67025 - protein, 268 aa, Unidentified
QTVPWGITRVQAPAVHNRGITGSGVRVAILDSGISAHSDLNIRGGASFVPGEPTTADLNGHGTHVAGTVAALNNSIGVIGVAPNAELYAVKVLGANGSGSVSGIAQGLEWAATNNMHIANMSLGSDFPSSTLERAVNYATSRDRLVIAATGNNGSGSVGYPARYQNAMAVGATDQNNRRANFSQYGTGIDIVAPGVNVQSTYPGNRYVSMNGTSMASPHVAGAAALVKQRYPSWNATQIRNHLKNTATNLGNSSQFGSGLVNAEAATR

SEQ ID NO: 67026 - protein, 268 aa, Unidentified
QTVPWGITRVQAPAVHNRGITGSGVRVAILDSGISAHSDLNIRGGASFVPGEPTTADLNGHGTHVAGTVAALNNSIGVIGVAPNAELYAVKVLGANGSGSVSGIAQGLEWAATNNMHIANMSLGSDFPSSTLERAVNYATSRDVLVIAATGNNGSGSVGYPARYQNAMAVGATDQNNRRANFSQYGTGIDIVAPGVNVQSTYPGNRYVIMNGTSMATPHVAGAAALVKQRYPSWNATQIRNHLKNTDTNLGNSSQFGSGLVNAEAATR

SEQ ID NO: 67027 - protein, 268 aa, Unidentified
QTVPWGITRVQAPTVHNRGITGSGVKVAILDTGIAQHSDLTIRGGASFVPGESTTADLNGHGTHVAGTVAALNNSIGVIGVAPSADLYAVKVLGANGRGSVSGIAQGLEWAATNNMHIANMSLGSDAPSTTLERAVNYATSRGVLVIAATGNNGAGSIGYPARYANAMAVGATDQNNRRASFSQYGTGIDIVAPGVGIQSTYLNNSYASMPGTSMATPHVAGVAALVKQKNPSWNATQIRNHLKNTATNLGNSSQFGSGLVNADAATR

SEQ ID NO: 67028 - protein, 268 aa, Unidentified
QTVPWGITRVQAPAVHNRGITGSGVRVAILDSGISAHEDLNIRGGASFVPGEPTTADLNGHGTHVAGTVAALNNNIGVIGVAPNAELYAVKVLGANGRGSVSGIAQGLEWAATNNMHIANMSLGSDFPSSTLERAVNYATSRDVLVIAATGNNGSGSVQYPARYANAMAVGATDQNNQRANFSQYGTGIDIVAPGVNVQSTYPGNRYVSMSGTSMATPHVAGAAALVKQRYPSWNATQIRNHLKNTATNLGPSSQFGSGLVNAEAATR

SEQ ID NO: 67029 - protein, 268 aa, Unidentified
QTVPWGITRVQAPAVHNRGITGSGVRVAILDSGISTHEDLNVRGGVSFVPGEPTTADLNGHGTHVAGTVAALNNSIGVIGVAPSADLYAVKVLGANGRGSVSGIAQGLEWAAQNNMHIANMSLGSDFPSSTLERAVNYATSRDVLVIAATGNNGSGSVGYPARYANAMAVGATDQNNRRANFSQYGTGIDIVAPGVNVQSTYPGNRYVSMNGTSMATPHVAGAAALVKQRYPSWNATQIRDHLKNTATNLGNSSQFGSGLVNAEAATR
